United States Patent Application Publication US 2021/0180091 A1 - sequence listing, part 10

SEQ ID NO: 202834 - DNA, 22 bp, Artificial Sequence
  Synthetic oligonucleotide; CTG chr2 60511050 60511071 60511067 60511072 +
tgcagccaactgcgtttccagg

SEQ ID NO: 202835 - DNA, 22 bp, Artificial Sequence
  Synthetic oligonucleotide; CTG chr2 60511062 60511083 60511079 60511084 +
cgtttccaggcacactgagatg

SEQ ID NO: 202836 - DNA, 22 bp, Artificial Sequence
  Synthetic oligonucleotide; TTT chr2 60511067 60511088 60511084 60511089 +
ccaggcacactgagatgcccat

SEQ ID NO: 202837 - DNA, 22 bp, Artificial Sequence
  Synthetic oligonucleotide; TTC chr2 60511068 60511089 60511085 60511090 +
caggcacactgagatgcccata

SEQ ID NO: 202838 - DNA, 22 bp, Artificial Sequence
  Synthetic oligonucleotide; CTG chr2 60511079 60511100 60511096 60511101 +
agatgcccatactcatatccaa

SEQ ID NO: 202839 - DNA, 22 bp, Artificial Sequence
  Synthetic oligonucleotide; CTC chr2 60511093 60511114 60511110 60511115 +
atatccaatactgtgcaggggc

SEQ ID NO: 202840 - DNA, 22 bp, Artificial Sequence
  Synthetic oligonucleotide; CTG chr2 60511106 60511127 60511123 60511128 +
tgcaggggcactggccaggcac

SEQ ID NO: 202841 - DNA, 22 bp, Artificial Sequence
  Synthetic oligonucleotide; CTG chr2 60511119 60511140 60511136 60511141 +
gccaggcacaaatcccagctgc

SEQ ID NO: 202842 - DNA, 22 bp, Artificial Sequence
  Synthetic oligonucleotide; CTG chr2 60511140 60511161 60511157 60511162 +
cctccacggcattactctccct

SEQ ID NO: 202843 - DNA, 22 bp, Artificial Sequence
  Synthetic oligonucleotide; CTC chr2 60511144 60511165 60511161 60511166 +
cacggcattactctccctccat

SEQ ID NO: 202844 - DNA, 22 bp, Artificial Sequence
  Synthetic oligonucleotide; TTA chr2 60511154 60511175 60511171 60511176 +
ctctccctccattcttgctttc

SEQ ID NO: 202845 - DNA, 22 bp, Artificial Sequence
  Synthetic oligonucleotide; CTC chr2 60511157 60511178 60511174 60511179 +
tccctccattcttgctttcaga

SEQ ID NO: 202846 - DNA, 22 bp, Artificial Sequence
  Synthetic oligonucleotide; CTC chr2 60511159 60511180 60511176 60511181 +
cctccattcttgctttcagatt

SEQ ID NO: 202847 - DNA, 22 bp, Artificial Sequence
  Synthetic oligonucleotide; CTC chr2 60511163 60511184 60511180 60511185 +
cattcttgctttcagattctcc

SEQ ID NO: 202848 - DNA, 22 bp, Artificial Sequence
  Synthetic oligonucleotide; TTC chr2 60511168 60511189 60511185 60511190 +
ttgctttcagattctccctcct

SEQ ID NO: 202849 - DNA, 22 bp, Artificial Sequence
  Synthetic oligonucleotide; CTT chr2 60511170 60511191 60511187 60511192 +
gctttcagattctccctcctcc

SEQ ID NO: 202850 - DNA, 22 bp, Artificial Sequence
  Synthetic oligonucleotide; TTG chr2 60511171 60511192 60511188 60511193 +
ctttcagattctccctcctcct

SEQ ID NO: 202851 - DNA, 22 bp, Artificial Sequence
  Synthetic oligonucleotide; CTT chr2 60511174 60511195 60511191 60511196 +
tcagattctccctcctcctggc

SEQ ID NO: 202852 - DNA, 22 bp, Artificial Sequence
  Synthetic oligonucleotide; TTT chr2 60511175 60511196 60511192 60511197 +
cagattctccctcctcctggca

SEQ ID NO: 202853 - DNA, 22 bp, Artificial Sequence
  Synthetic oligonucleotide; TTC chr2 60511176 60511197 60511193 60511198 +
agattctccctcctcctggcag

SEQ ID NO: 202854 - DNA, 22 bp, Artificial Sequence
  Synthetic oligonucleotide; TTC chr2 60511182 60511203 60511199 60511204 +
tccctcctcctggcaggggcac

SEQ ID NO: 202855 - DNA, 22 bp, Artificial Sequence
  Synthetic oligonucleotide; CTC chr2 60511184 60511205 60511201 60511206 +
cctcctcctggcaggggcactg

SEQ ID NO: 202856 - DNA, 22 bp, Artificial Sequence
  Synthetic oligonucleotide; CTC chr2 60511188 60511209 60511205 60511210 +
ctcctggcaggggcactgggga

SEQ ID NO: 202857 - DNA, 22 bp, Artificial Sequence
  Synthetic oligonucleotide; CTC chr2 60511191 60511212 60511208 60511213 +
ctggcaggggcactggggaggg

SEQ ID NO: 202858 - DNA, 22 bp, Artificial Sequence
  Synthetic oligonucleotide; CTG chr2 60511194 60511215 60511211 60511216 +
gcaggggcactggggagggcag

SEQ ID NO: 202859 - DNA, 22 bp, Artificial Sequence
  Synthetic oligonucleotide; CTG chr2 60511206 60511227 60511223 60511228 +
gggagggcaggagagaaggagg

SEQ ID NO: 202860 - DNA, 22 bp, Artificial Sequence
  Synthetic oligonucleotide; CTT chr2 60511252 60511273 60511269 60511274 +
ctacctgagagcccgggatgca

SEQ ID NO: 202861 - DNA, 22 bp, Artificial Sequence
  Synthetic oligonucleotide; TTC chr2 60511253 60511274 60511270 60511275 +
tacctgagagcccgggatgcag

SEQ ID NO: 202862 - DNA, 22 bp, Artificial Sequence
  Synthetic oligonucleotide; CTA chr2 60511255 60511276 60511272 60511277 +
cctgagagcccgggatgcagcc

SEQ ID NO: 202863 - DNA, 22 bp, Artificial Sequence
  Synthetic oligonucleotide; CTG chr2 60511259 60511280 60511276 60511281 +
agagcccgggatgcagccagaa

SEQ ID NO: 202864 - DNA, 22 bp, Artificial Sequence
  Synthetic oligonucleotide; CTA chr2 60511287 60511308 60511304 60511309 +
aaataccctttcccaccctagc

SEQ ID NO: 202865 - DNA, 22 bp, Artificial Sequence
  Synthetic oligonucleotide; CTT chr2 60511297 60511318 60511314 60511319 +
tcccaccctagcatacaatttg

SEQ ID NO: 202866 - DNA, 22 bp, Artificial Sequence
  Synthetic oligonucleotide; TTT chr2 60511298 60511319 60511315 60511320 +
cccaccctagcatacaatttga

SEQ ID NO: 202867 - DNA, 22 bp, Artificial Sequence
  Synthetic oligonucleotide; TTC chr2 60511299 60511320 60511316 60511321 +
ccaccctagcatacaatttgac

SEQ ID NO: 202868 - DNA, 22 bp, Artificial Sequence
  Synthetic oligonucleotide; CTA chr2 60511307 60511328 60511324 60511329 +
gcatacaatttgacaggtgaat

SEQ ID NO: 202869 - DNA, 22 bp, Artificial Sequence
  Synthetic oligonucleotide; TTT chr2 60511318 60511339 60511335 60511340 +
gacaggtgaataagtgctcccc

SEQ ID NO: 202870 - DNA, 22 bp, Artificial Sequence
  Synthetic oligonucleotide; TTG chr2 60511319 60511340 60511336 60511341 +
acaggtgaataagtgctcccca

SEQ ID NO: 202871 - DNA, 22 bp, Artificial Sequence
  Synthetic oligonucleotide; CTC chr2 60511337 60511358 60511354 60511359 +
cccagtaggcaataacaaggag

SEQ ID NO: 202872 - DNA, 22 bp, Artificial Sequence
  Synthetic oligonucleotide; CTG chr2 60511366 60511387 60511383 60511388 +
aattaaaagaactcgccaattt

SEQ ID NO: 202873 - DNA, 22 bp, Artificial Sequence
  Synthetic oligonucleotide; TTA chr2 60511371 60511392 60511388 60511393 +
aaagaactcgccaatttgggaa

SEQ ID NO: 202874 - DNA, 22 bp, Artificial Sequence
  Synthetic oligonucleotide; CTC chr2 60511380 60511401 60511397 60511402 +
gccaatttgggaagtaatgtca

SEQ ID NO: 202875 - DNA, 22 bp, Artificial Sequence
  Synthetic oligonucleotide; TTT chr2 60511388 60511409 60511405 60511410 +
gggaagtaatgtcattctatgt

SEQ ID NO: 202876 - DNA, 22 bp, Artificial Sequence
  Synthetic oligonucleotide; TTG chr2 60511389 60511410 60511406 60511411 +
ggaagtaatgtcattctatgtg

SEQ ID NO: 202877 - DNA, 22 bp, Artificial Sequence
  Synthetic oligonucleotide; TTC chr2 60511405 60511426 60511422 60511427 +
tatgtgactccactcttttccg

SEQ ID NO: 202878 - DNA, 22 bp, Artificial Sequence
  Synthetic oligonucleotide; CTA chr2 60511407 60511428 60511424 60511429 +
tgtgactccactcttttccgtt

SEQ ID NO: 202879 - DNA, 22 bp, Artificial Sequence
  Synthetic oligonucleotide; CTC chr2 60511415 60511436 60511432 60511437 +
cactcttttccgttaccaataa

SEQ ID NO: 202880 - DNA, 22 bp, Artificial Sequence
  Synthetic oligonucleotide; CTC chr2 60511420 60511441 60511437 60511442 +
ttttccgttaccaataaaacac

SEQ ID NO: 202881 - DNA, 22 bp, Artificial Sequence
  Synthetic oligonucleotide; CTT chr2 60511422 60511443 60511439 60511444 +
ttccgttaccaataaaacactt

SEQ ID NO: 202882 - DNA, 22 bp, Artificial Sequence
  Synthetic oligonucleotide; TTT chr2 60511423 60511444 60511440 60511445 +
tccgttaccaataaaacactta

SEQ ID NO: 202883 - DNA, 22 bp, Artificial Sequence
  Synthetic oligonucleotide; TTT chr2 60511424 60511445 60511441 60511446 +
ccgttaccaataaaacacttaa

SEQ ID NO: 202884 - DNA, 22 bp, Artificial Sequence
  Synthetic oligonucleotide; TTC chr2 60511425 60511446 60511442 60511447 +
cgttaccaataaaacacttaaa

SEQ ID NO: 202885 - DNA, 22 bp, Artificial Sequence
  Synthetic oligonucleotide; TTA chr2 60511430 60511451 60511447 60511452 +
ccaataaaacacttaaagatgc

SEQ ID NO: 202886 - DNA, 22 bp, Artificial Sequence
  Synthetic oligonucleotide; CTT chr2 60511444 60511465 60511461 60511466 +
aaagatgctattcatgcagaca

SEQ ID NO: 202887 - DNA, 22 bp, Artificial Sequence
  Synthetic oligonucleotide; TTA chr2 60511445 60511466 60511462 60511467 +
aagatgctattcatgcagacat

SEQ ID NO: 202888 - DNA, 22 bp, Artificial Sequence
  Synthetic oligonucleotide; CTA chr2 60511454 60511475 60511471 60511476 +
ttcatgcagacataaagtgcta

SEQ ID NO: 202889 - DNA, 22 bp, Artificial Sequence
  Synthetic oligonucleotide; TTC chr2 60511457 60511478 60511474 60511479 +
atgcagacataaagtgctaatg

SEQ ID NO: 202890 - DNA, 22 bp, Artificial Sequence
  Synthetic oligonucleotide; CTA chr2 60511476 60511497 60511493 60511498 +
atggccacttgttaccatgttt

SEQ ID NO: 202891 - DNA, 22 bp, Artificial Sequence
  Synthetic oligonucleotide; CTT chr2 60511486 60511507 60511503 60511508 +
gttaccatgtttcataatgcta

SEQ ID NO: 202892 - DNA, 22 bp, Artificial Sequence
  Synthetic oligonucleotide; TTG chr2 60511487 60511508 60511504 60511509 +
ttaccatgtttcataatgctaa

SEQ ID NO: 202893 - DNA, 22 bp, Artificial Sequence
  Synthetic oligonucleotide; TTA chr2 60511490 60511511 60511507 60511512 +
ccatgtttcataatgctaatat

SEQ ID NO: 202894 - DNA, 22 bp, Artificial Sequence
  Synthetic oligonucleotide; TTT chr2 60511498 60511519 60511515 60511520 +
cataatgctaatatttccctct

SEQ ID NO: 202895 - DNA, 22 bp, Artificial Sequence
  Synthetic oligonucleotide; TTC chr2 60511499 60511520 60511516 60511521 +
ataatgctaatatttccctctg

SEQ ID NO: 202896 - DNA, 22 bp, Artificial Sequence
  Synthetic oligonucleotide; CTA chr2 60511508 60511529 60511525 60511530 +
atatttccctctgatttctgac

SEQ ID NO: 202897 - DNA, 22 bp, Artificial Sequence
  Synthetic oligonucleotide; TTT chr2 60511514 60511535 60511531 60511536 +
ccctctgatttctgacagttct

SEQ ID NO: 202898 - DNA, 22 bp, Artificial Sequence
  Synthetic oligonucleotide; TTC chr2 60511515 60511536 60511532 60511537 +
cctctgatttctgacagttctt

SEQ ID NO: 202899 - DNA, 22 bp, Artificial Sequence
  Synthetic oligonucleotide; CTC chr2 60511519 60511540 60511536 60511541 +
tgatttctgacagttctttttt

SEQ ID NO: 202900 - DNA, 22 bp, Artificial Sequence
  Synthetic oligonucleotide; CTG chr2 60511521 60511542 60511538 60511543 +
atttctgacagttctttttttt

SEQ ID NO: 202901 - DNA, 22 bp, Artificial Sequence
  Synthetic oligonucleotide; TTT chr2 60511525 60511546 60511542 60511547 +
ctgacagttctttttttttcct

SEQ ID NO: 202902 - DNA, 22 bp, Artificial Sequence
  Synthetic oligonucleotide; TTC chr2 60511526 60511547 60511543 60511548 +
tgacagttctttttttttcctt

SEQ ID NO: 202903 - DNA, 22 bp, Artificial Sequence
  Synthetic oligonucleotide; CTG chr2 60511528 60511549 60511545 60511550 +
acagttctttttttttccttct

SEQ ID NO: 202904 - DNA, 22 bp, Artificial Sequence
  Synthetic oligonucleotide; TTC chr2 60511535 60511556 60511552 60511557 +
tttttttttccttcttcttttt

SEQ ID NO: 202905 - DNA, 22 bp, Artificial Sequence
  Synthetic oligonucleotide; CTT chr2 60511537 60511558 60511554 60511559 +
tttttttccttcttcttttttg

SEQ ID NO: 202906 - DNA, 22 bp, Artificial Sequence
  Synthetic oligonucleotide; TTT chr2 60511538 60511559 60511555 60511560 +
ttttttccttcttcttttttgg

SEQ ID NO: 202907 - DNA, 22 bp, Artificial Sequence
  Synthetic oligonucleotide; TTT chr2 60511539 60511560 60511556 60511561 +
tttttccttcttcttttttggg

SEQ ID NO: 202908 - DNA, 22 bp, Artificial Sequence
  Synthetic oligonucleotide; TTT chr2 60511540 60511561 60511557 60511562 +
ttttccttcttcttttttgggg

SEQ ID NO: 202909 - DNA, 22 bp, Artificial Sequence
  Synthetic oligonucleotide; TTT chr2 60511541 60511562 60511558 60511563 +
tttccttcttcttttttggggc

SEQ ID NO: 202910 - DNA, 22 bp, Artificial Sequence
  Synthetic oligonucleotide; TTT chr2 60511542 60511563 60511559 60511564 +
ttccttcttcttttttggggct

SEQ ID NO: 202911 - DNA, 22 bp, Artificial Sequence
  Synthetic oligonucleotide; TTT chr2 60511543 60511564 60511560 60511565 +
tccttcttcttttttggggcta

SEQ ID NO: 202912 - DNA, 22 bp, Artificial Sequence
  Synthetic oligonucleotide; TTT chr2 60511544 60511565 60511561 60511566 +
ccttcttcttttttggggctat

SEQ ID NO: 202913 - DNA, 22 bp, Artificial Sequence
  Synthetic oligonucleotide; TTC chr2 60511545 60511566 60511562 60511567 +
cttcttcttttttggggctatt

SEQ ID NO: 202914 - DNA, 22 bp, Artificial Sequence
  Synthetic oligonucleotide; CTT chr2 60511548 60511569 60511565 60511570 +
cttcttttttggggctatttta

SEQ ID NO: 202915 - DNA, 22 bp, Artificial Sequence
  Synthetic oligonucleotide; TTC chr2 60511549 60511570 60511566 60511571 +
ttcttttttggggctattttaa

SEQ ID NO: 202916 - DNA, 22 bp, Artificial Sequence
  Synthetic oligonucleotide; CTT chr2 60511551 60511572 60511568 60511573 +
cttttttggggctattttaagt

SEQ ID NO: 202917 - DNA, 22 bp, Artificial Sequence
  Synthetic oligonucleotide; TTC chr2 60511552 60511573 60511569 60511574 +
ttttttggggctattttaagtt

SEQ ID NO: 202918 - DNA, 22 bp, Artificial Sequence
  Synthetic oligonucleotide; CTT chr2 60511554 60511575 60511571 60511576 +
ttttggggctattttaagttaa

SEQ ID NO: 202919 - DNA, 22 bp, Artificial Sequence
  Synthetic oligonucleotide; TTT chr2 60511555 60511576 60511572 60511577 +
tttggggctattttaagttaac

SEQ ID NO: 202920 - DNA, 22 bp, Artificial Sequence
  Synthetic oligonucleotide; TTT chr2 60511556 60511577 60511573 60511578 +
ttggggctattttaagttaaca

SEQ ID NO: 202921 - DNA, 22 bp, Artificial Sequence
  Synthetic oligonucleotide; TTT chr2 60511557 60511578 60511574 60511579 +
tggggctattttaagttaacag

SEQ ID NO: 202922 - DNA, 22 bp, Artificial Sequence
  Synthetic oligonucleotide; TTT chr2 60511558 60511579 60511575 60511580 +
ggggctattttaagttaacaga

SEQ ID NO: 202923 - DNA, 22 bp, Artificial Sequence
  Synthetic oligonucleotide; TTG chr2 60511559 60511580 60511576 60511581 +
gggctattttaagttaacagag

SEQ ID NO: 202924 - DNA, 22 bp, Artificial Sequence
  Synthetic oligonucleotide; CTA chr2 60511565 60511586 60511582 60511587 +
ttttaagttaacagagcgctaa

SEQ ID NO: 202925 - DNA, 22 bp, Artificial Sequence
  Synthetic oligonucleotide; TTT chr2 60511568 60511589 60511585 60511590 +
taagttaacagagcgctaatct

SEQ ID NO: 202926 - DNA, 22 bp, Artificial Sequence
  Synthetic oligonucleotide; TTT chr2 60511569 60511590 60511586 60511591 +
aagttaacagagcgctaatctg

SEQ ID NO: 202927 - DNA, 22 bp, Artificial Sequence
  Synthetic oligonucleotide; TTA chr2 60511570 60511591 60511587 60511592 +
agttaacagagcgctaatctga

SEQ ID NO: 202928 - DNA, 22 bp, Artificial Sequence
  Synthetic oligonucleotide; TTA chr2 60511575 60511596 60511592 60511597 +
acagagcgctaatctgattcaa

SEQ ID NO: 202929 - DNA, 22 bp, Artificial Sequence
  Synthetic oligonucleotide; CTA chr2 60511586 60511607 60511603 60511608 +
atctgattcaaaactgaagact

SEQ ID NO: 202930 - DNA, 22 bp, Artificial Sequence
  Synthetic oligonucleotide; CTG chr2 60511591 60511612 60511608 60511613 +
attcaaaactgaagactcaaag

SEQ ID NO: 202931 - DNA, 22 bp, Artificial Sequence
  Synthetic oligonucleotide; TTC chr2 60511595 60511616 60511612 60511617 +
aaaactgaagactcaaagagct

SEQ ID NO: 202932 - DNA, 22 bp, Artificial Sequence
  Synthetic oligonucleotide; CTG chr2 60511602 60511623 60511619 60511624 +
aagactcaaagagctacactct

SEQ ID NO: 202933 - DNA, 22 bp, Artificial Sequence
  Synthetic oligonucleotide; CTC chr2 60511609 60511630 60511626 60511631 +
aaagagctacactctacataac

SEQ ID NO: 202934 - DNA, 22 bp, Artificial Sequence
  Synthetic oligonucleotide; CTA chr2 60511618 60511639 60511635 60511640 +
cactctacataactgcactatt

SEQ ID NO: 202935 - DNA, 22 bp, Artificial Sequence
  Synthetic oligonucleotide; CTC chr2 60511623 60511644 60511640 60511645 +
tacataactgcactattaatga

SEQ ID NO: 202936 - DNA, 22 bp, Artificial Sequence
  Synthetic oligonucleotide; CTA chr2 60511625 60511646 60511642 60511647 +
cataactgcactattaatgaca

SEQ ID NO: 202937 - DNA, 22 bp, Artificial Sequence
  Synthetic oligonucleotide; CTG chr2 60511633 60511654 60511650 60511655 +
cactattaatgacaaccattgc

SEQ ID NO: 202938 - DNA, 22 bp, Artificial Sequence
  Synthetic oligonucleotide; CTA chr2 60511638 60511659 60511655 60511660 +
ttaatgacaaccattgctttac

SEQ ID NO: 202939 - DNA, 22 bp, Artificial Sequence
  Synthetic oligonucleotide; TTA chr2 60511641 60511662 60511658 60511663 +
atgacaaccattgctttacatg

SEQ ID NO: 202940 - DNA, 22 bp, Artificial Sequence
  Synthetic oligonucleotide; TTG chr2 60511654 60511675 60511671 60511676 +
ctttacatgttgcaccatttca

SEQ ID NO: 202941 - DNA, 22 bp, Artificial Sequence
  Synthetic oligonucleotide; CTT chr2 60511657 60511678 60511674 60511679 +
tacatgttgcaccatttcatga

SEQ ID NO: 202942 - DNA, 22 bp, Artificial Sequence
  Synthetic oligonucleotide; TTT chr2 60511658 60511679 60511675 60511680 +
acatgttgcaccatttcatgaa

SEQ ID NO: 202943 - DNA, 22 bp, Artificial Sequence
  Synthetic oligonucleotide; TTA chr2 60511659 60511680 60511676 60511681 +
catgttgcaccatttcatgaaa

SEQ ID NO: 202944 - DNA, 22 bp, Artificial Sequence
  Synthetic oligonucleotide; TTG chr2 60511666 60511687 60511683 60511688 +
caccatttcatgaaaacaatca

SEQ ID NO: 202945 - DNA, 22 bp, Artificial Sequence
  Synthetic oligonucleotide; TTT chr2 60511674 60511695 60511691 60511696 +
catgaaaacaatcatcactcag

SEQ ID NO: 202946 - DNA, 22 bp, Artificial Sequence
  Synthetic oligonucleotide; TTC chr2 60511675 60511696 60511692 60511697 +
atgaaaacaatcatcactcagt

SEQ ID NO: 202947 - DNA, 22 bp, Artificial Sequence
  Synthetic oligonucleotide; CTC chr2 60511694 60511715 60511711 60511716 +
agtcaacgtattttccaagcca

SEQ ID NO: 202948 - DNA, 22 bp, Artificial Sequence
  Synthetic oligonucleotide; TTT chr2 60511707 60511728 60511724 60511729 +
tccaagccacagaaaataagtt

SEQ ID NO: 202949 - DNA, 22 bp, Artificial Sequence
  Synthetic oligonucleotide; TTT chr2 60511708 60511729 60511725 60511730 +
ccaagccacagaaaataagttg

SEQ ID NO: 202950 - DNA, 22 bp, Artificial Sequence
  Synthetic oligonucleotide; TTC chr2 60511709 60511730 60511726 60511731 +
caagccacagaaaataagttga

SEQ ID NO: 202951 - DNA, 22 bp, Artificial Sequence
  Synthetic oligonucleotide; TTG chr2 60511730 60511751 60511747 60511752 +
aaataagttgaaaatgcagtag

SEQ ID NO: 202952 - DNA, 22 bp, Artificial Sequence
  Synthetic oligonucleotide; TTG chr2 60511740 60511761 60511757 60511762 +
aaaatgcagtaggcaaagaagc

SEQ ID NO: 202953 - DNA, 22 bp, Artificial Sequence
  Synthetic oligonucleotide; CTA chr2 60511767 60511788 60511784 60511789 +
gtcatgtaagacactaaggggc

SEQ ID NO: 202954 - DNA, 22 bp, Artificial Sequence
  Synthetic oligonucleotide; CTA chr2 60511783 60511804 60511800 60511805 +
aggggcaggggagtcattaatt

SEQ ID NO: 202955 - DNA, 22 bp, Artificial Sequence
  Synthetic oligonucleotide; TTA chr2 60511802 60511823 60511819 60511824 +
attcttctccaagctttcaaca

SEQ ID NO: 202956 - DNA, 22 bp, Artificial Sequence
  Synthetic oligonucleotide; TTC chr2 60511806 60511827 60511823 60511828 +
ttctccaagctttcaacactct

SEQ ID NO: 202957 - DNA, 22 bp, Artificial Sequence
  Synthetic oligonucleotide; CTT chr2 60511808 60511829 60511825 60511830 +
ctccaagctttcaacactctgt

SEQ ID NO: 202958 - DNA, 22 bp, Artificial Sequence
  Synthetic oligonucleotide; TTC chr2 60511809 60511830 60511826 60511831 +
tccaagctttcaacactctgtt

SEQ ID NO: 202959 - DNA, 22 bp, Artificial Sequence
  Synthetic oligonucleotide; CTC chr2 60511811 60511832 60511828 60511833 +
caagctttcaacactctgtttc

SEQ ID NO: 202960 - DNA, 22 bp, Artificial Sequence
  Synthetic oligonucleotide; CTT chr2 60511818 60511839 60511835 60511840 +
tcaacactctgtttctatgaag

SEQ ID NO: 202961 - DNA, 22 bp, Artificial Sequence
  Synthetic oligonucleotide; TTT chr2 60511819 60511840 60511836 60511841 +
caacactctgtttctatgaagg

SEQ ID NO: 202962 - DNA, 22 bp, Artificial Sequence
  Synthetic oligonucleotide; TTC chr2 60511820 60511841 60511837 60511842 +
aacactctgtttctatgaaggc

SEQ ID NO: 202963 - DNA, 22 bp, Artificial Sequence
  Synthetic oligonucleotide; CTC chr2 60511827 60511848 60511844 60511849 +
tgtttctatgaaggcaagggtt

SEQ ID NO: 202964 - DNA, 22 bp, Artificial Sequence
  Synthetic oligonucleotide; CTG chr2 60511829 60511850 60511846 60511851 +
tttctatgaaggcaagggttgg

SEQ ID NO: 202965 - DNA, 22 bp, Artificial Sequence
  Synthetic oligonucleotide; TTT chr2 60511832 60511853 60511849 60511854 +
ctatgaaggcaagggttggagg

SEQ ID NO: 202966 - DNA, 22 bp, Artificial Sequence
  Synthetic oligonucleotide; TTC chr2 60511833 60511854 60511850 60511855 +
tatgaaggcaagggttggaggg

SEQ ID NO: 202967 - DNA, 22 bp, Artificial Sequence
  Synthetic oligonucleotide; CTA chr2 60511835 60511856 60511852 60511857 +
tgaaggcaagggttggagggag

SEQ ID NO: 202968 - DNA, 22 bp, Artificial Sequence
  Synthetic oligonucleotide; TTG chr2 60511850 60511871 60511867 60511872 +
gagggagcttttttctttcaaa

SEQ ID NO: 202969 - DNA, 22 bp, Artificial Sequence
  Synthetic oligonucleotide; CTT chr2 60511860 60511881 60511877 60511882 +
ttttctttcaaataaatcagta

SEQ ID NO: 202970 - DNA, 22 bp, Artificial Sequence
  Synthetic oligonucleotide; TTT chr2 60511861 60511882 60511878 60511883 +
tttctttcaaataaatcagtaa

SEQ ID NO: 202971 - DNA, 22 bp, Artificial Sequence
  Synthetic oligonucleotide; TTT chr2 60511862 60511883 60511879 60511884 +
ttctttcaaataaatcagtaaa

SEQ ID NO: 202972 - DNA, 22 bp, Artificial Sequence
  Synthetic oligonucleotide; TTT chr2 60511863 60511884 60511880 60511885 +
tctttcaaataaatcagtaaaa

SEQ ID NO: 202973 - DNA, 22 bp, Artificial Sequence
  Synthetic oligonucleotide; TTT chr2 60511864 60511885 60511881 60511886 +
ctttcaaataaatcagtaaaat

SEQ ID NO: 202974 - DNA, 22 bp, Artificial Sequence
  Synthetic oligonucleotide; TTC chr2 60511865 60511886 60511882 60511887 +
tttcaaataaatcagtaaaatg

SEQ ID NO: 202975 - DNA, 22 bp, Artificial Sequence
  Synthetic oligonucleotide; CTT chr2 60511867 60511888 60511884 60511889 +
tcaaataaatcagtaaaatgat

SEQ ID NO: 202976 - DNA, 22 bp, Artificial Sequence
  Synthetic oligonucleotide; TTT chr2 60511868 60511889 60511885 60511890 +
caaataaatcagtaaaatgatg

SEQ ID NO: 202977 - DNA, 22 bp, Artificial Sequence
  Synthetic oligonucleotide; TTC chr2 60511869 60511890 60511886 60511891 +
aaataaatcagtaaaatgatga

SEQ ID NO: 202978 - DNA, 22 bp, Artificial Sequence
  Synthetic oligonucleotide; CTT chr2 60511898 60511919 60511915 60511920 +
cctctgctacgcccagtggccc

SEQ ID NO: 202979 - DNA, 22 bp, Artificial Sequence
  Synthetic oligonucleotide; TTC chr2 60511899 60511920 60511916 60511921 +
ctctgctacgcccagtggccca

SEQ ID NO: 202980 - DNA, 22 bp, Artificial Sequence
  Synthetic oligonucleotide; CTC chr2 60511902 60511923 60511919 60511924 +
tgctacgcccagtggcccaggc

SEQ ID NO: 202981 - DNA, 22 bp, Artificial Sequence
  Synthetic oligonucleotide; CTG chr2 60511904 60511925 60511921 60511926 +
ctacgcccagtggcccaggcac

SEQ ID NO: 202982 - DNA, 22 bp, Artificial Sequence
  Synthetic oligonucleotide; CTA chr2 60511907 60511928 60511924 60511929 +
cgcccagtggcccaggcactct

SEQ ID NO: 202983 - DNA, 22 bp, Artificial Sequence
  Synthetic oligonucleotide; CTC chr2 60511928 60511949 60511945 60511950 +
tcactaaggtatcctcccagca

SEQ ID NO: 202984 - DNA, 22 bp, Artificial Sequence
  Synthetic oligonucleotide; CTC chr2 60511930 60511951 60511947 60511952 +
actaaggtatcctcccagcaat

SEQ ID NO: 202985 - DNA, 22 bp, Artificial Sequence
  Synthetic oligonucleotide; CTA chr2 60511934 60511955 60511951 60511956 +
aggtatcctcccagcaatgtag

SEQ ID NO: 202986 - DNA, 22 bp, Artificial Sequence
  Synthetic oligonucleotide; CTC chr2 60511944 60511965 60511961 60511966 +
ccagcaatgtaggtgttcaaag

SEQ ID NO: 202987 - DNA, 22 bp, Artificial Sequence
  Synthetic oligonucleotide; TTC chr2 60511962 60511983 60511979 60511984 +
aaaggcaaaagaaagggaacca

SEQ ID NO: 202988 - DNA, 22 bp, Artificial Sequence
  Synthetic oligonucleotide; CTC chr2 60511988 60512009 60512005 60512010 +
atggcgtaatacttgctcggcc

SEQ ID NO: 202989 - DNA, 22 bp, Artificial Sequence
  Synthetic oligonucleotide; CTT chr2 60512002 60512023 60512019 60512024 +
gctcggccaaagacatagtaac

SEQ ID NO: 202990 - DNA, 22 bp, Artificial Sequence
  Synthetic oligonucleotide; TTG chr2 60512003 60512024 60512020 60512025 +
ctcggccaaagacatagtaacg

SEQ ID NO: 202991 - DNA, 22 bp, Artificial Sequence
  Synthetic oligonucleotide; CTC chr2 60512006 60512027 60512023 60512028 +
ggccaaagacatagtaacgctt

SEQ ID NO: 202992 - DNA, 22 bp, Artificial Sequence
  Synthetic oligonucleotide; CTT chr2 60512028 60512049 60512045 60512050 +
cccaggaaatacaagtgtcaca

SEQ ID NO: 202993 - DNA, 22 bp, Artificial Sequence
  Synthetic oligonucleotide; TTC chr2 60512029 60512050 60512046 60512051 +
ccaggaaatacaagtgtcacag

SEQ ID NO: 202994 - DNA, 22 bp, Artificial Sequence
  Synthetic oligonucleotide; CTC chr2 60512057 60512078 60512074 60512079 +
caaaatgaatatgtgtgcagcc

SEQ ID NO: 202995 - DNA, 22 bp, Artificial Sequence
  Synthetic oligonucleotide; CTG chr2 60512084 60512105 60512101 60512106 +
ggcttgcaacttaattcaaaca

SEQ ID NO: 202996 - DNA, 22 bp, Artificial Sequence
  Synthetic oligonucleotide; CTT chr2 60512089 60512110 60512106 60512111 +
gcaacttaattcaaacaacttg

SEQ ID NO: 202997 - DNA, 22 bp, Artificial Sequence
  Synthetic oligonucleotide; TTG chr2 60512090 60512111 60512107 60512112 +
caacttaattcaaacaacttgg

SEQ ID NO: 202998 - DNA, 22 bp, Artificial Sequence
  Synthetic oligonucleotide; CTT chr2 60512096 60512117 60512113 60512118 +
aattcaaacaacttggaaggct

SEQ ID NO: 202999 - DNA, 22 bp, Artificial Sequence
  Synthetic oligonucleotide; TTA chr2 60512097 60512118 60512114 60512119 +
attcaaacaacttggaaggcta

SEQ ID NO: 203000 - DNA, 22 bp, Artificial Sequence
  Synthetic oligonucleotide; TTC chr2 60512101 60512122 60512118 60512123 +
aaacaacttggaaggctaagga

SEQ ID NO: 203001 - DNA, 22 bp, Artificial Sequence
  Synthetic oligonucleotide; CTT chr2 60512110 60512131 60512127 60512132 +
ggaaggctaaggagcactggag

SEQ ID NO: 203002 - DNA, 22 bp, Artificial Sequence
  Synthetic oligonucleotide; TTG chr2 60512111 60512132 60512128 60512133 +
gaaggctaaggagcactggagc

SEQ ID NO: 203003 - DNA, 22 bp, Artificial Sequence
  Synthetic oligonucleotide; CTA chr2 60512119 60512140 60512136 60512141 +
aggagcactggagctggggagc

SEQ ID NO: 203004 - DNA, 22 bp, Artificial Sequence
  Synthetic oligonucleotide; CTG chr2 60512129 60512150 60512146 60512151 +
gagctggggagctgcagatgaa

SEQ ID NO: 203005 - DNA, 22 bp, Artificial Sequence
  Synthetic oligonucleotide; CTG chr2 60512135 60512156 60512152 60512157 +
gggagctgcagatgaacccctg

SEQ ID NO: 203006 - DNA, 22 bp, Artificial Sequence
  Synthetic oligonucleotide; CTG chr2 60512143 60512164 60512160 60512165 +
cagatgaacccctgtgctcacc

SEQ ID NO: 203007 - DNA, 22 bp, Artificial Sequence
  Synthetic oligonucleotide; CTG chr2 60512157 60512178 60512174 60512179 +
tgctcaccacccctggagagca

SEQ ID NO: 203008 - DNA, 22 bp, Artificial Sequence
  Synthetic oligonucleotide; CTC chr2 60512162 60512183 60512179 60512184 +
accacccctggagagcagtcag

SEQ ID NO: 203009 - DNA, 22 bp, Artificial Sequence
  Synthetic oligonucleotide; CTG chr2 60512172 60512193 60512189 60512194 +
gagagcagtcagagaggaagcc

SEQ ID NO: 203010 - DNA, 22 bp, Artificial Sequence
  Synthetic oligonucleotide; CTG chr2 60512196 60512217 60512213 60512218 +
ctttcctcagatgttttaaagg

SEQ ID NO: 203011 - DNA, 22 bp, Artificial Sequence
  Synthetic oligonucleotide; CTT chr2 60512199 60512220 60512216 60512221 +
tcctcagatgttttaaaggaag

SEQ ID NO: 203012 - DNA, 22 bp, Artificial Sequence
  Synthetic oligonucleotide; TTT chr2 60512200 60512221 60512217 60512222 +
cctcagatgttttaaaggaagc

SEQ ID NO: 203013 - DNA, 22 bp, Artificial Sequence
  Synthetic oligonucleotide; TTC chr2 60512201 60512222 60512218 60512223 +
ctcagatgttttaaaggaagcc

SEQ ID NO: 203014 - DNA, 22 bp, Artificial Sequence
  Synthetic oligonucleotide; CTC chr2 60512204 60512225 60512221 60512226 +
agatgttttaaaggaagccacc

SEQ ID NO: 203015 - DNA, 22 bp, Artificial Sequence
  Synthetic oligonucleotide; TTT chr2 60512212 60512233 60512229 60512234 +
taaaggaagccacctagagccc

SEQ ID NO: 203016 - DNA, 22 bp, Artificial Sequence
  Synthetic oligonucleotide; TTT chr2 60512213 60512234 60512230 60512235 +
aaaggaagccacctagagcccc

SEQ ID NO: 203017 - DNA, 22 bp, Artificial Sequence
  Synthetic oligonucleotide; TTA chr2 60512214 60512235 60512231 60512236 +
aaggaagccacctagagcccca

SEQ ID NO: 203018 - DNA, 22 bp, Artificial Sequence
  Synthetic oligonucleotide; CTA chr2 60512228 60512249 60512245 60512250 +
gagccccacctgtcactgtgga

SEQ ID NO: 203019 - DNA, 22 bp, Artificial Sequence
  Synthetic oligonucleotide; CTG chr2 60512240 60512261 60512257 60512262 +
tcactgtggaactgctcatggt

SEQ ID NO: 203020 - DNA, 22 bp, Artificial Sequence
  Synthetic oligonucleotide; CTG chr2 60512246 60512267 60512263 60512268 +
tggaactgctcatggtggctgc

SEQ ID NO: 203021 - DNA, 22 bp, Artificial Sequence
  Synthetic oligonucleotide; CTG chr2 60512254 60512275 60512271 60512276 +
ctcatggtggctgcccgatgcg

SEQ ID NO: 203022 - DNA, 22 bp, Artificial Sequence
  Synthetic oligonucleotide; CTC chr2 60512257 60512278 60512274 60512279 +
atggtggctgcccgatgcgctg

SEQ ID NO: 203023 - DNA, 22 bp, Artificial Sequence
  Synthetic oligonucleotide; CTG chr2 60512267 60512288 60512284 60512289 +
cccgatgcgctgatgtggaact

SEQ ID NO: 203024 - DNA, 22 bp, Artificial Sequence
  Synthetic oligonucleotide; CTG chr2 60512279 60512300 60512296 60512301 +
atgtggaactcagaatcattca

SEQ ID NO: 203025 - DNA, 22 bp, Artificial Sequence
  Synthetic oligonucleotide; CTC chr2 60512290 60512311 60512307 60512312 +
agaatcattcatttgggcttgt

SEQ ID NO: 203026 - DNA, 22 bp, Artificial Sequence
  Synthetic oligonucleotide; TTC chr2 60512300 60512321 60512317 60512322 +
atttgggcttgtggctgagctg

SEQ ID NO: 203027 - DNA, 22 bp, Artificial Sequence
  Synthetic oligonucleotide; TTT chr2 60512304 60512325 60512321 60512326 +
gggcttgtggctgagctgtgct

SEQ ID NO: 203028 - DNA, 22 bp, Artificial Sequence
  Synthetic oligonucleotide; TTG chr2 60512305 60512326 60512322 60512327 +
ggcttgtggctgagctgtgcta

SEQ ID NO: 203029 - DNA, 22 bp, Artificial Sequence
  Synthetic oligonucleotide; CTT chr2 60512310 60512331 60512327 60512332 +
gtggctgagctgtgctaggtaa

SEQ ID NO: 203030 - DNA, 22 bp, Artificial Sequence
  Synthetic oligonucleotide; TTG chr2 60512311 60512332 60512328 60512333 +
tggctgagctgtgctaggtaac

SEQ ID NO: 203031 - DNA, 22 bp, Artificial Sequence
  Synthetic oligonucleotide; CTG chr2 60512317 60512338 60512334 60512339 +
agctgtgctaggtaactgggtg

SEQ ID NO: 203032 - DNA, 22 bp, Artificial Sequence
  Synthetic oligonucleotide; CTG chr2 60512322 60512343 60512339 60512344 +
tgctaggtaactgggtggcctg

SEQ ID NO: 203033 - DNA, 22 bp, Artificial Sequence
  Synthetic oligonucleotide; CTA chr2 60512327 60512348 60512344 60512349 +
ggtaactgggtggcctgggcaa

SEQ ID NO: 203034 - DNA, 22 bp, Artificial Sequence
  Synthetic oligonucleotide; CTG chr2 60512335 60512356 60512352 60512357 +
ggtggcctgggcaagtcacttc

SEQ ID NO: 203035 - DNA, 22 bp, Artificial Sequence
  Synthetic oligonucleotide; CTG chr2 60512344 60512365 60512361 60512366 +
ggcaagtcacttcacctccctt

SEQ ID NO: 203036 - DNA, 22 bp, Artificial Sequence
  Synthetic oligonucleotide; CTT chr2 60512356 60512377 60512373 60512378 +
cacctcccttggcctgtgtcct

SEQ ID NO: 203037 - DNA, 22 bp, Artificial Sequence
  Synthetic oligonucleotide; TTC chr2 60512357 60512378 60512374 60512379 +
acctcccttggcctgtgtcctt

SEQ ID NO: 203038 - DNA, 22 bp, Artificial Sequence
  Synthetic oligonucleotide; CTC chr2 60512362 60512383 60512379 60512384 +
ccttggcctgtgtccttgagct

SEQ ID NO: 203039 - DNA, 22 bp, Artificial Sequence
  Synthetic oligonucleotide; CTT chr2 60512366 60512387 60512383 60512388 +
ggcctgtgtccttgagctttcc

SEQ ID NO: 203040 - DNA, 22 bp, Artificial Sequence
  Synthetic oligonucleotide; TTG chr2 60512367 60512388 60512384 60512389 +
gcctgtgtccttgagctttcct

SEQ ID NO: 203041 - DNA, 22 bp, Artificial Sequence
  Synthetic oligonucleotide; CTG chr2 60512372 60512393 60512389 60512394 +
tgtccttgagctttcctggctg

SEQ ID NO: 203042 - DNA, 22 bp, Artificial Sequence
  Synthetic oligonucleotide; CTT chr2 60512379 60512400 60512396 60512401 +
gagctttcctggctgcacatct

SEQ ID NO: 203043 - DNA, 22 bp, Artificial Sequence
  Synthetic oligonucleotide; TTG chr2 60512380 60512401 60512397 60512402 +
agctttcctggctgcacatctt

SEQ ID NO: 203044 - DNA, 22 bp, Artificial Sequence
  Synthetic oligonucleotide; CTT chr2 60512385 60512406 60512402 60512407 +
tcctggctgcacatcttgctct

SEQ ID NO: 203045 - DNA, 22 bp, Artificial Sequence
  Synthetic oligonucleotide; TTT chr2 60512386 60512407 60512403 60512408 +
cctggctgcacatcttgctctc

SEQ ID NO: 203046 - DNA, 22 bp, Artificial Sequence
  Synthetic oligonucleotide; TTC chr2 60512387 60512408 60512404 60512409 +
ctggctgcacatcttgctctca

SEQ ID NO: 203047 - DNA, 22 bp, Artificial Sequence
  Synthetic oligonucleotide; CTG chr2 60512390 60512411 60512407 60512412 +
gctgcacatcttgctctcaggt

SEQ ID NO: 203048 - DNA, 22 bp, Artificial Sequence
  Synthetic oligonucleotide; CTG chr2 60512394 60512415 60512411 60512416 +
cacatcttgctctcaggtataa

SEQ ID NO: 203049 - DNA, 22 bp, Artificial Sequence
  Synthetic oligonucleotide; CTT chr2 60512402 60512423 60512419 60512424 +
gctctcaggtataaaggatctg

SEQ ID NO: 203050 - DNA, 22 bp, Artificial Sequence
  Synthetic oligonucleotide; TTG chr2 60512403 60512424 60512420 60512425 +
ctctcaggtataaaggatctgt

SEQ ID NO: 203051 - DNA, 22 bp, Artificial Sequence
  Synthetic oligonucleotide; CTC chr2 60512406 60512427 60512423 60512428 +
tcaggtataaaggatctgtctc

SEQ ID NO: 203052 - DNA, 22 bp, Artificial Sequence
  Synthetic oligonucleotide; CTC chr2 60512408 60512429 60512425 60512430 +
aggtataaaggatctgtctcct

SEQ ID NO: 203053 - DNA, 22 bp, Artificial Sequence
  Synthetic oligonucleotide; CTG chr2 60512424 60512445 60512441 60512446 +
tctccttctacctgcccctgtg

SEQ ID NO: 203054 - DNA, 22 bp, Artificial Sequence
  Synthetic oligonucleotide; CTC chr2 60512428 60512449 60512445 60512450 +
cttctacctgcccctgtgccac

SEQ ID NO: 203055 - DNA, 22 bp, Artificial Sequence
  Synthetic oligonucleotide; CTT chr2 60512431 60512452 60512448 60512453 +
ctacctgcccctgtgccacaca

SEQ ID NO: 203056 - DNA, 22 bp, Artificial Sequence
  Synthetic oligonucleotide; TTC chr2 60512432 60512453 60512449 60512454 +
tacctgcccctgtgccacacac

SEQ ID NO: 203057 - DNA, 22 bp, Artificial Sequence
  Synthetic oligonucleotide; CTA chr2 60512434 60512455 60512451 60512456 +
cctgcccctgtgccacacacac

SEQ ID NO: 203058 - DNA, 22 bp, Artificial Sequence
  Synthetic oligonucleotide; CTG chr2 60512438 60512459 60512455 60512460 +
cccctgtgccacacacactcgc

SEQ ID NO: 203059 - DNA, 22 bp, Artificial Sequence
  Synthetic oligonucleotide; CTG chr2 60512444 60512465 60512461 60512466 +
tgccacacacactcgcctctca

SEQ ID NO: 203060 - DNA, 22 bp, Artificial Sequence
  Synthetic oligonucleotide; CTC chr2 60512458 60512479 60512475 60512480 +
gcctctcaaatgagaaaggcag

SEQ ID NO: 203061 - DNA, 22 bp, Artificial Sequence
  Synthetic oligonucleotide; CTC chr2 60512463 60512484 60512480 60512485 +
tcaaatgagaaaggcagctttg

SEQ ID NO: 203062 - DNA, 22 bp, Artificial Sequence
  Synthetic oligonucleotide; CTC chr2 60512465 60512486 60512482 60512487 +
aaatgagaaaggcagctttgag

SEQ ID NO: 203063 - DNA, 22 bp, Artificial Sequence
  Synthetic oligonucleotide; CTT chr2 60512483 60512504 60512500 60512505 +
tgagagaggatgcttgccttcc

SEQ ID NO: 203064 - DNA, 22 bp, Artificial Sequence
  Synthetic oligonucleotide; TTT chr2 60512484 60512505 60512501 60512506 +
gagagaggatgcttgccttccc

SEQ ID NO: 203065 - DNA, 22 bp, Artificial Sequence
  Synthetic oligonucleotide; TTG chr2 60512485 60512506 60512502 60512507 +
agagaggatgcttgccttcccg

SEQ ID NO: 203066 - DNA, 22 bp, Artificial Sequence
  Synthetic oligonucleotide; CTT chr2 60512498 60512519 60512515 60512520 +
gccttcccggctcccctcccaa

SEQ ID NO: 203067 - DNA, 22 bp, Artificial Sequence
  Synthetic oligonucleotide; TTG chr2 60512499 60512520 60512516 60512521 +
ccttcccggctcccctcccaac

SEQ ID NO: 203068 - DNA, 22 bp, Artificial Sequence
  Synthetic oligonucleotide; CTT chr2 60512503 60512524 60512520 60512525 +
cccggctcccctcccaacccag

SEQ ID NO: 203069 - DNA, 22 bp, Artificial Sequence
  Synthetic oligonucleotide; TTC chr2 60512504 60512525 60512521 60512526 +
ccggctcccctcccaacccaga

SEQ ID NO: 203070 - DNA, 22 bp, Artificial Sequence
  Synthetic oligonucleotide; CTC chr2 60512511 60512532 60512528 60512533 +
ccctcccaacccagaacctatc

SEQ ID NO: 203071 - DNA, 22 bp, Artificial Sequence
  Synthetic oligonucleotide; CTC chr2 60512516 60512537 60512533 60512538 +
ccaacccagaacctatcacaat

SEQ ID NO: 203072 - DNA, 22 bp, Artificial Sequence
  Synthetic oligonucleotide; CTA chr2 60512531 60512552 60512548 60512553 +
tcacaatgctctgcagagagta

SEQ ID NO: 203073 - DNA, 22 bp, Artificial Sequence
  Synthetic oligonucleotide; CTC chr2 60512542 60512563 60512559 60512564 +
tgcagagagtacatgctcaaca

SEQ ID NO: 203074 - DNA, 22 bp, Artificial Sequence
  Synthetic oligonucleotide; CTG chr2 60512544 60512565 60512561 60512566 +
cagagagtacatgctcaacaaa

SEQ ID NO: 203075 - DNA, 22 bp, Artificial Sequence
  Synthetic oligonucleotide; CTC chr2 60512560 60512581 60512577 60512582 +
aacaaatccaatgctaaattgt

SEQ ID NO: 203076 - DNA, 22 bp, Artificial Sequence
  Synthetic oligonucleotide; CTA chr2 60512576 60512597 60512593 60512598 +
aattgtaaaaagtgagactaga

SEQ ID NO: 203077 - DNA, 22 bp, Artificial Sequence
  Synthetic oligonucleotide; TTG chr2 60512581 60512602 60512598 60512603 +
taaaaagtgagactagatggta

SEQ ID NO: 203078 - DNA, 22 bp, Artificial Sequence
  Synthetic oligonucleotide; CTA chr2 60512596 60512617 60512613 60512618 +
gatggtatctgcctctcctctc

SEQ ID NO: 203079 - DNA, 22 bp, Artificial Sequence
  Synthetic oligonucleotide; CTG chr2 60512607 60512628 60512624 60512629 +
cctctcctctcagctctaaatt

SEQ ID NO: 203080 - DNA, 22 bp, Artificial Sequence
  Synthetic oligonucleotide; CTC chr2 60512611 60512632 60512628 60512633 +
tcctctcagctctaaattattt

SEQ ID NO: 203081 - DNA, 22 bp, Artificial Sequence
  Synthetic oligonucleotide; CTC chr2 60512613 60512634 60512630 60512635 +
ctctcagctctaaattatttgg

SEQ ID NO: 203082 - DNA, 22 bp, Artificial Sequence
  Synthetic oligonucleotide; CTC chr2 60512616 60512637 60512633 60512638 +
tcagctctaaattatttggtct

SEQ ID NO: 203083 - DNA, 22 bp, Artificial Sequence
  Synthetic oligonucleotide; CTC chr2 60512618 60512639 60512635 60512640 +
agctctaaattatttggtctaa

SEQ ID NO: 203084 - DNA, 22 bp, Artificial Sequence
  Synthetic oligonucleotide; CTC chr2 60512623 60512644 60512640 60512645 +
taaattatttggtctaaagaaa

SEQ ID NO: 203085 - DNA, 22 bp, Artificial Sequence
  Synthetic oligonucleotide; CTA chr2 60512625 60512646 60512642 60512647 +
aattatttggtctaaagaaaac

SEQ ID NO: 203086 - DNA, 22 bp, Artificial Sequence
  Synthetic oligonucleotide; TTA chr2 60512630 60512651 60512647 60512652 +
tttggtctaaagaaaactgaag

SEQ ID NO: 203087 - DNA, 22 bp, Artificial Sequence
  Synthetic oligonucleotide; TTT chr2 60512633 60512654 60512650 60512655 +
ggtctaaagaaaactgaagccc

SEQ ID NO: 203088 - DNA, 22 bp, Artificial Sequence
  Synthetic oligonucleotide; TTG chr2 60512634 60512655 60512651 60512656 +
gtctaaagaaaactgaagcccc

SEQ ID NO: 203089 - DNA, 22 bp, Artificial Sequence
  Synthetic oligonucleotide; CTA chr2 60512639 60512660 60512656 60512661 +
aagaaaactgaagcccccagca

SEQ ID NO: 203090 - DNA, 22 bp, Artificial Sequence
  Synthetic oligonucleotide; CTG chr2 60512649 60512670 60512666 60512671 +
aagcccccagcaactccatttt

SEQ ID NO: 203091 - DNA, 22 bp, Artificial Sequence
  Synthetic oligonucleotide; CTC chr2 60512665 60512686 60512682 60512687 +
cattttgcatatctaattggag

SEQ ID NO: 203092 - DNA, 22 bp, Artificial Sequence
  Synthetic oligonucleotide; TTT chr2 60512670 60512691 60512687 60512692 +
tgcatatctaattggagatggt

SEQ ID NO: 203093 - DNA, 22 bp, Artificial Sequence
  Synthetic oligonucleotide; TTT chr2 60512671 60512692 60512688 60512693 +
gcatatctaattggagatggtt

SEQ ID NO: 203094 - DNA, 22 bp, Artificial Sequence
  Synthetic oligonucleotide; TTG chr2 60512672 60512693 60512689 60512694 +
catatctaattggagatggttt

SEQ ID NO: 203095 - DNA, 22 bp, Artificial Sequence
  Synthetic oligonucleotide; CTA chr2 60512680 60512701 60512697 60512702 +
attggagatggtttcaataata

SEQ ID NO: 203096 - DNA, 22 bp, Artificial Sequence
  Synthetic oligonucleotide; TTG chr2 60512684 60512705 60512701 60512706 +
gagatggtttcaataatataat

SEQ ID NO: 203097 - DNA, 22 bp, Artificial Sequence
  Synthetic oligonucleotide; TTT chr2 60512694 60512715 60512711 60512716 +
caataatataattatcaaggca

SEQ ID NO: 203098 - DNA, 22 bp, Artificial Sequence
  Synthetic oligonucleotide; TTC chr2 60512695 60512716 60512712 60512717 +
aataatataattatcaaggcat

SEQ ID NO: 203099 - DNA, 22 bp, Artificial Sequence
  Synthetic oligonucleotide; TTA chr2 60512708 60512729 60512725 60512730 +
tcaaggcatccctacgttactt

SEQ ID NO: 203100 - DNA, 22 bp, Artificial Sequence
  Synthetic oligonucleotide; CTA chr2 60512722 60512743 60512739 60512744 +
cgttacttgaagttggttcata

SEQ ID NO: 203101 - DNA, 22 bp, Artificial Sequence
  Synthetic oligonucleotide; TTA chr2 60512727 60512748 60512744 60512749 +
cttgaagttggttcataatctg

SEQ ID NO: 203102 - DNA, 22 bp, Artificial Sequence
  Synthetic oligonucleotide; CTT chr2 60512730 60512751 60512747 60512752 +
gaagttggttcataatctggcg

SEQ ID NO: 203103 - DNA, 22 bp, Artificial Sequence
  Synthetic oligonucleotide; TTG chr2 60512731 60512752 60512748 60512753 +
aagttggttcataatctggcga

SEQ ID NO: 203104 - DNA, 22 bp, Artificial Sequence
  Synthetic oligonucleotide; TTG chr2 60512737 60512758 60512754 60512759 +
gttcataatctggcgacgttca

SEQ ID NO: 203105 - DNA, 22 bp, Artificial Sequence
  Synthetic oligonucleotide; TTC chr2 60512741 60512762 60512758 60512763 +
ataatctggcgacgttcacagc

SEQ ID NO: 203106 - DNA, 22 bp, Artificial Sequence
  Synthetic oligonucleotide; CTG chr2 60512749 60512770 60512766 60512771 +
gcgacgttcacagccttatgaa

SEQ ID NO: 203107 - DNA, 22 bp, Artificial Sequence
  Synthetic oligonucleotide; TTC chr2 60512758 60512779 60512775 60512780 +
acagccttatgaagacagttta

SEQ ID NO: 203108 - DNA, 22 bp, Artificial Sequence
  Synthetic oligonucleotide; CTT chr2 60512766 60512787 60512783 60512788 +
atgaagacagtttattctcttt

SEQ ID NO: 203109 - DNA, 22 bp, Artificial Sequence
  Synthetic oligonucleotide; TTA chr2 60512767 60512788 60512784 60512789 +
tgaagacagtttattctctttt

SEQ ID NO: 203110 - DNA, 22 bp, Artificial Sequence
  Synthetic oligonucleotide; TTT chr2 60512779 60512800 60512796 60512801 +
attctcttttagtgtctcaagt

SEQ ID NO: 203111 - DNA, 22 bp, Artificial Sequence
  Synthetic oligonucleotide; TTA chr2 60512780 60512801 60512797 60512802 +
ttctcttttagtgtctcaagta

SEQ ID NO: 203112 - DNA, 22 bp, Artificial Sequence
  Synthetic oligonucleotide; TTC chr2 60512783 60512804 60512800 60512805 +
tcttttagtgtctcaagtatga

SEQ ID NO: 203113 - DNA, 22 bp, Artificial Sequence
  Synthetic oligonucleotide; CTC chr2 60512785 60512806 60512802 60512807 +
ttttagtgtctcaagtatgagt

SEQ ID NO: 203114 - DNA, 22 bp, Artificial Sequence
  Synthetic oligonucleotide; CTT chr2 60512787 60512808 60512804 60512809 +
ttagtgtctcaagtatgagtca

SEQ ID NO: 203115 - DNA, 22 bp, Artificial Sequence
  Synthetic oligonucleotide; TTT chr2 60512788 60512809 60512805 60512810 +
tagtgtctcaagtatgagtcac

SEQ ID NO: 203116 - DNA, 22 bp, Artificial Sequence
  Synthetic oligonucleotide; TTT chr2 60512789 60512810 60512806 60512811 +
agtgtctcaagtatgagtcacc

SEQ ID NO: 203117 - DNA, 22 bp, Artificial Sequence
  Synthetic oligonucleotide; TTA chr2 60512790 60512811 60512807 60512812 +
gtgtctcaagtatgagtcacct

SEQ ID NO: 203118 - DNA, 22 bp, Artificial Sequence
  Synthetic oligonucleotide; CTC chr2 60512797 60512818 60512814 60512819 +
aagtatgagtcacctctgatga

SEQ ID NO: 203119 - DNA, 22 bp, Artificial Sequence
  Synthetic oligonucleotide; CTC chr2 60512813 60512834 60512830 60512835 +
tgatgacggataggagaacaag

SEQ ID NO: 203120 - DNA, 22 bp, Artificial Sequence
  Synthetic oligonucleotide; CTG chr2 60512815 60512836 60512832 60512837 +
atgacggataggagaacaagca

SEQ ID NO: 203121 - DNA, 22 bp, Artificial Sequence
  Synthetic oligonucleotide; TTT chr2 60512842 60512863 60512859 60512864 +
tactacaatacacacctaaagt

SEQ ID NO: 203122 - DNA, 22 bp, Artificial Sequence
  Synthetic oligonucleotide; TTT chr2 60512843 60512864 60512860 60512865 +
actacaatacacacctaaagta

SEQ ID NO: 203123 - DNA, 22 bp, Artificial Sequence
  Synthetic oligonucleotide; TTA chr2 60512844 60512865 60512861 60512866 +
ctacaatacacacctaaagtaa

SEQ ID NO: 203124 - DNA, 22 bp, Artificial Sequence
  Synthetic oligonucleotide; CTA chr2 60512847 60512868 60512864 60512869 +
caatacacacctaaagtaaatg

SEQ ID NO: 203125 - DNA, 22 bp, Artificial Sequence
  Synthetic oligonucleotide; CTA chr2 60512860 60512881 60512877 60512882 +
aagtaaatgaataaacccaacc

SEQ ID NO: 203126 - DNA, 22 bp, Artificial Sequence
  Synthetic oligonucleotide; CTT chr2 60512886 60512907 60512903 60512908 +
tgcccacccacatggcatccat

SEQ ID NO: 203127 - DNA, 22 bp, Artificial Sequence
  Synthetic oligonucleotide; TTT chr2 60512887 60512908 60512904 60512909 +
gcccacccacatggcatccatt

SEQ ID NO: 203128 - DNA, 22 bp, Artificial Sequence
  Synthetic oligonucleotide; TTG chr2 60512888 60512909 60512905 60512910 +
cccacccacatggcatccattt

SEQ ID NO: 203129 - DNA, 22 bp, Artificial Sequence
  Synthetic oligonucleotide; TTT chr2 60512910 60512931 60512927 60512932 +
ggaggagacacagagaaaggag

SEQ ID NO: 203130 - DNA, 22 bp, Artificial Sequence
  Synthetic oligonucleotide; TTG chr2 60512911 60512932 60512928 60512933 +
gaggagacacagagaaaggagt

SEQ ID NO: 203131 - DNA, 22 bp, Artificial Sequence
  Synthetic oligonucleotide; TTT chr2 60512935 60512956 60512952 60512957 +
cacctcttagacgtctcagaga

SEQ ID NO: 203132 - DNA, 22 bp, Artificial Sequence
  Synthetic oligonucleotide; TTC chr2 60512936 60512957 60512953 60512958 +
acctcttagacgtctcagagat

SEQ ID NO: 203133 - DNA, 22 bp, Artificial Sequence
  Synthetic oligonucleotide; CTC chr2 60512941 60512962 60512958 60512963 +
ttagacgtctcagagattaaca

SEQ ID NO: 203134 - DNA, 22 bp, Artificial Sequence
  Synthetic oligonucleotide; CTT chr2 60512943 60512964 60512960 60512965 +
agacgtctcagagattaacatt

SEQ ID NO: 203135 - DNA, 22 bp, Artificial Sequence
  Synthetic oligonucleotide; TTA chr2 60512944 60512965 60512961 60512966 +
gacgtctcagagattaacattt

SEQ ID NO: 203136 - DNA, 22 bp, Artificial Sequence
  Synthetic oligonucleotide; CTC chr2 60512952 60512973 60512969 60512974 +
agagattaacattttctcaaaa

SEQ ID NO: 203137 - DNA, 22 bp, Artificial Sequence
  Synthetic oligonucleotide; TTA chr2 60512960 60512981 60512977 60512982 +
acattttctcaaaaatgaacac

SEQ ID NO: 203138 - DNA, 22 bp, Artificial Sequence
  Synthetic oligonucleotide; TTT chr2 60512966 60512987 60512983 60512988 +
tctcaaaaatgaacacacagag

SEQ ID NO: 203139 - DNA, 22 bp, Artificial Sequence
  Synthetic oligonucleotide; TTT chr2 60512967 60512988 60512984 60512989 +
ctcaaaaatgaacacacagagc

SEQ ID NO: 203140 - DNA, 22 bp, Artificial Sequence
  Synthetic oligonucleotide; TTC chr2 60512968 60512989 60512985 60512990 +
tcaaaaatgaacacacagagca

SEQ ID NO: 203141 - DNA, 22 bp, Artificial Sequence
  Synthetic oligonucleotide; CTC chr2 60512970 60512991 60512987 60512992 +
aaaaatgaacacacagagcaac

SEQ ID NO: 203142 - DNA, 22 bp, Artificial Sequence
  Synthetic oligonucleotide; CTG chr2 60512997 60513018 60513014 60513019 +
acgagtcacagtggaccacacc

SEQ ID NO: 203143 - DNA, 22 bp, Artificial Sequence
  Synthetic oligonucleotide; CTC chr2 60513027 60513048 60513044 60513049 +
tggttaccccctgagaaaggca

SEQ ID NO: 203144 - DNA, 22 bp, Artificial Sequence
  Synthetic oligonucleotide; CTG chr2 60513029 60513050 60513046 60513051 +
gttaccccctgagaaaggcaga

SEQ ID NO: 203145 - DNA, 22 bp, Artificial Sequence
  Synthetic oligonucleotide; TTA chr2 60513033 60513054 60513050 60513055 +
ccccctgagaaaggcagagaaa

SEQ ID NO: 203146 - DNA, 22 bp, Artificial Sequence
  Synthetic oligonucleotide; CTG chr2 60513040 60513061 60513057 60513062 +
agaaaggcagagaaaggacccc

SEQ ID NO: 203147 - DNA, 22 bp, Artificial Sequence
  Synthetic oligonucleotide; TTT chr2 60513079 60513100 60513096 60513101 +
gaggagaggttcagggatcatg

SEQ ID NO: 203148 - DNA, 22 bp, Artificial Sequence
  Synthetic oligonucleotide; TTG chr2 60513080 60513101 60513097 60513102 +
aggagaggttcagggatcatga

SEQ ID NO: 203149 - DNA, 22 bp, Artificial Sequence
  Synthetic oligonucleotide; TTC chr2 60513091 60513112 60513108 60513113 +
agggatcatgaggactcaccac

SEQ ID NO: 203150 - DNA, 22 bp, Artificial Sequence
  Synthetic oligonucleotide; CTC chr2 60513108 60513129 60513125 60513130 +
accaccccactgaaatccatgg

SEQ ID NO: 203151 - DNA, 22 bp, Artificial Sequence
  Synthetic oligonucleotide; CTG chr2 60513120 60513141 60513137 60513142 +
aaatccatggatagtctagcct

SEQ ID NO: 203152 - DNA, 22 bp, Artificial Sequence
  Synthetic oligonucleotide; CTA chr2 60513138 60513159 60513155 60513160 +
gcctgtgaggggttgggggtgg

SEQ ID NO: 203153 - DNA, 22 bp, Artificial Sequence
  Synthetic oligonucleotide; CTG chr2 60513143 60513164 60513160 60513165 +
tgaggggttgggggtggcaaat

SEQ ID NO: 203154 - DNA, 22 bp, Artificial Sequence
  Synthetic oligonucleotide; TTG chr2 60513153 60513174 60513170 60513175 +
ggggtggcaaattactttatct

SEQ ID NO: 203155 - DNA, 22 bp, Artificial Sequence
  Synthetic oligonucleotide; TTA chr2 60513167 60513188 60513184 60513189 +
ctttatctttctcatctttgag

SEQ ID NO: 203156 - DNA, 22 bp, Artificial Sequence
  Synthetic oligonucleotide; CTT chr2 60513170 60513191 60513187 60513192 +
tatctttctcatctttgagcgg

SEQ ID NO: 203157 - DNA, 22 bp, Artificial Sequence
  Synthetic oligonucleotide; TTT chr2 60513171 60513192 60513188 60513193 +
atctttctcatctttgagcggc

SEQ ID NO: 203158 - DNA, 22 bp, Artificial Sequence
  Synthetic oligonucleotide; TTA chr2 60513172 60513193 60513189 60513194 +
tctttctcatctttgagcggct

SEQ ID NO: 203159 - DNA, 22 bp, Artificial Sequence
  Synthetic oligonucleotide; CTT chr2 60513176 60513197 60513193 60513198 +
tctcatctttgagcggctcttc

SEQ ID NO: 203160 - DNA, 22 bp, Artificial Sequence
  Synthetic oligonucleotide; TTT chr2 60513177 60513198 60513194 60513199 +
ctcatctttgagcggctcttcc

SEQ ID NO: 203161 - DNA, 22 bp, Artificial Sequence
  Synthetic oligonucleotide; TTC chr2 60513178 60513199 60513195 60513200 +
tcatctttgagcggctcttccc

SEQ ID NO: 203162 - DNA, 22 bp, Artificial Sequence
  Synthetic oligonucleotide; CTC chr2 60513180 60513201 60513197 60513202 +
atctttgagcggctcttcccca

SEQ ID NO: 203163 - DNA, 22 bp, Artificial Sequence
  Synthetic oligonucleotide; CTT chr2 60513185 60513206 60513202 60513207 +
tgagcggctcttccccagagtc

SEQ ID NO: 203164 - DNA, 22 bp, Artificial Sequence
  Synthetic oligonucleotide; TTT chr2 60513186 60513207 60513203 60513208 +
gagcggctcttccccagagtca

SEQ ID NO: 203165 - DNA, 22 bp, Artificial Sequence
  Synthetic oligonucleotide; TTG chr2 60513187 60513208 60513204 60513209 +
agcggctcttccccagagtcag

SEQ ID NO: 203166 - DNA, 22 bp, Artificial Sequence
  Synthetic oligonucleotide; CTC chr2 60513195 60513216 60513212 60513217 +
ttccccagagtcaggatgactc

SEQ ID NO: 203167 - DNA, 22 bp, Artificial Sequence
  Synthetic oligonucleotide; CTT chr2 60513197 60513218 60513214 60513219 +
ccccagagtcaggatgactctc

SEQ ID NO: 203168 - DNA, 22 bp, Artificial Sequence
  Synthetic oligonucleotide; TTC chr2 60513198 60513219 60513215 60513220 +
cccagagtcaggatgactctca

SEQ ID NO: 203169 - DNA, 22 bp, Artificial Sequence
  Synthetic oligonucleotide; CTC chr2 60513217 60513238 60513234 60513239 +
tcactaggtttcaggtacatcc

SEQ ID NO: 203170 - DNA, 22 bp, Artificial Sequence
  Synthetic oligonucleotide; CTC chr2 60513219 60513240 60513236 60513241 +
actaggtttcaggtacatcccc

SEQ ID NO: 203171 - DNA, 22 bp, Artificial Sequence
  Synthetic oligonucleotide; CTA chr2 60513223 60513244 60513240 60513245 +
ggtttcaggtacatccccatca

SEQ ID NO: 203172 - DNA, 22 bp, Artificial Sequence
  Synthetic oligonucleotide; TTT chr2 60513228 60513249 60513245 60513250 +
caggtacatccccatcatgccc

SEQ ID NO: 203173 - DNA, 22 bp, Artificial Sequence
  Synthetic oligonucleotide; TTC chr2 60513229 60513250 60513246 60513251 +
aggtacatccccatcatgcccc

SEQ ID NO: 203174 - DNA, 22 bp, Artificial Sequence
  Synthetic oligonucleotide; CTC chr2 60513257 60513278 60513274 60513279 +
cagtctctgcagctgacacggc

SEQ ID NO: 203175 - DNA, 22 bp, Artificial Sequence
  Synthetic oligonucleotide; CTC chr2 60513264 60513285 60513281 60513286 +
tgcagctgacacggctccaaga

SEQ ID NO: 203176 - DNA, 22 bp, Artificial Sequence
  Synthetic oligonucleotide; CTG chr2 60513266 60513287 60513283 60513288 +
cagctgacacggctccaagatg

SEQ ID NO: 203177 - DNA, 22 bp, Artificial Sequence
  Synthetic oligonucleotide; CTG chr2 60513272 60513293 60513289 60513294 +
acacggctccaagatgctaaat

SEQ ID NO: 203178 - DNA, 22 bp, Artificial Sequence
  Synthetic oligonucleotide; CTC chr2 60513281 60513302 60513298 60513303 +
caagatgctaaatatgagacaa

SEQ ID NO: 203179 - DNA, 22 bp, Artificial Sequence
  Synthetic oligonucleotide; CTA chr2 60513291 60513312 60513308 60513313 +
aatatgagacaaggaggggaca

SEQ ID NO: 203180 - DNA, 22 bp, Artificial Sequence
  Synthetic oligonucleotide; TTT chr2 60513321 60513342 60513338 60513343 +
agtcccaggagtggcactagaa

SEQ ID NO: 203181 - DNA, 22 bp, Artificial Sequence
  Synthetic oligonucleotide; TTA chr2 60513322 60513343 60513339 60513344 +
gtcccaggagtggcactagaag

SEQ ID NO: 203182 - DNA, 22 bp, Artificial Sequence
  Synthetic oligonucleotide; CTA chr2 60513340 60513361 60513357 60513362 +
gaaggagtccctgctccctcag

SEQ ID NO: 203183 - DNA, 22 bp, Artificial Sequence
  Synthetic oligonucleotide; CTG chr2 60513353 60513374 60513370 60513375 +
ctccctcaggagccatctgccg

SEQ ID NO: 203184 - DNA, 22 bp, Artificial Sequence
  Synthetic oligonucleotide; CTC chr2 60513356 60513377 60513373 60513378 +
cctcaggagccatctgccgggt

SEQ ID NO: 203185 - DNA, 22 bp, Artificial Sequence
  Synthetic oligonucleotide; CTC chr2 60513360 60513381 60513377 60513382 +
aggagccatctgccgggtgctt

SEQ ID NO: 203186 - DNA, 22 bp, Artificial Sequence
  Synthetic oligonucleotide; CTG chr2 60513372 60513393 60513389 60513394 +
ccgggtgcttctggagatgctg

SEQ ID NO: 203187 - DNA, 22 bp, Artificial Sequence
  Synthetic oligonucleotide; CTT chr2 60513382 60513403 60513399 60513404 +
ctggagatgctgcctccacgcc

SEQ ID NO: 203188 - DNA, 22 bp, Artificial Sequence
  Synthetic oligonucleotide; TTC chr2 60513383 60513404 60513400 60513405 +
tggagatgctgcctccacgccc

SEQ ID NO: 203189 - DNA, 22 bp, Artificial Sequence
  Synthetic oligonucleotide; CTG chr2 60513385 60513406 60513402 60513407 +
gagatgctgcctccacgcccca

SEQ ID NO: 203190 - DNA, 22 bp, Artificial Sequence
  Synthetic oligonucleotide; CTG chr2 60513394 60513415 60513411 60513416 +
cctccacgccccacttgaggct

SEQ ID NO: 203191 - DNA, 22 bp, Artificial Sequence
  Synthetic oligonucleotide; CTC chr2 60513398 60513419 60513415 60513420 +
cacgccccacttgaggctgtcc

SEQ ID NO: 203192 - DNA, 22 bp, Artificial Sequence
  Synthetic oligonucleotide; CTT chr2 60513410 60513431 60513427 60513432 +
gaggctgtccacagcagaaacc

SEQ ID NO: 203193 - DNA, 22 bp, Artificial Sequence
  Synthetic oligonucleotide; TTG chr2 60513411 60513432 60513428 60513433 +
aggctgtccacagcagaaacca

SEQ ID NO: 203194 - DNA, 22 bp, Artificial Sequence
  Synthetic oligonucleotide; CTG chr2 60513417 60513438 60513434 60513439 +
tccacagcagaaaccagcgccc

SEQ ID NO: 203195 - DNA, 22 bp, Artificial Sequence
  Synthetic oligonucleotide; CTC chr2 60513449 60513470 60513466 60513471 +
aagccagccaccccatgggaac

SEQ ID NO: 203196 - DNA, 22 bp, Artificial Sequence
  Synthetic oligonucleotide; CTT chr2 60513476 60513497 60513493 60513498 +
tggcaggtgtgggtgttgggtt

SEQ ID NO: 203197 - DNA, 22 bp, Artificial Sequence
  Synthetic oligonucleotide; TTT chr2 60513477 60513498 60513494 60513499 +
ggcaggtgtgggtgttgggtta

SEQ ID NO: 203198 - DNA, 22 bp, Artificial Sequence
  Synthetic oligonucleotide; TTG chr2 60513478 60513499 60513495 60513500 +
gcaggtgtgggtgttgggttag

SEQ ID NO: 203199 - DNA, 22 bp, Artificial Sequence
  Synthetic oligonucleotide; TTG chr2 60513494 60513515 60513511 60513516 +
ggttagcctctagccagaactc

SEQ ID NO: 203200 - DNA, 22 bp, Artificial Sequence
  Synthetic oligonucleotide; TTA chr2 60513499 60513520 60513516 60513521 +
gcctctagccagaactcctgct

SEQ ID NO: 203201 - DNA, 22 bp, Artificial Sequence
  Synthetic oligonucleotide; CTC chr2 60513504 60513525 60513521 60513526 +
tagccagaactcctgctgcttc

SEQ ID NO: 203202 - DNA, 22 bp, Artificial Sequence
  Synthetic oligonucleotide; CTA chr2 60513506 60513527 60513523 60513528 +
gccagaactcctgctgcttctc

SEQ ID NO: 203203 - DNA, 22 bp, Artificial Sequence
  Synthetic oligonucleotide; CTC chr2 60513516 60513537 60513533 60513538 +
ctgctgcttctctctttgtgga

SEQ ID NO: 203204 - DNA, 22 bp, Artificial Sequence
  Synthetic oligonucleotide; CTG chr2 60513519 60513540 60513536 60513541 +
ctgcttctctctttgtggagca

SEQ ID NO: 203205 - DNA, 22 bp, Artificial Sequence
  Synthetic oligonucleotide; CTG chr2 60513522 60513543 60513539 60513544 +
cttctctctttgtggagcaaat

SEQ ID NO: 203206 - DNA, 22 bp, Artificial Sequence
  Synthetic oligonucleotide; CTT chr2 60513525 60513546 60513542 60513547 +
ctctctttgtggagcaaatctt

SEQ ID NO: 203207 - DNA, 22 bp, Artificial Sequence
  Synthetic oligonucleotide; TTC chr2 60513526 60513547 60513543 60513548 +
tctctttgtggagcaaatcttc

SEQ ID NO: 203208 - DNA, 22 bp, Artificial Sequence
  Synthetic oligonucleotide; CTC chr2 60513528 60513549 60513545 60513550 +
tctttgtggagcaaatcttcat

SEQ ID NO: 203209 - DNA, 22 bp, Artificial Sequence
  Synthetic oligonucleotide; CTC chr2 60513530 60513551 60513547 60513552 +
tttgtggagcaaatcttcatgt

SEQ ID NO: 203210 - DNA, 22 bp, Artificial Sequence
  Synthetic oligonucleotide; CTT chr2 60513532 60513553 60513549 60513554 +
tgtggagcaaatcttcatgtcc

SEQ ID NO: 203211 - DNA, 22 bp, Artificial Sequence
  Synthetic oligonucleotide; TTT chr2 60513533 60513554 60513550 60513555 +
gtggagcaaatcttcatgtcct

SEQ ID NO: 203212 - DNA, 22 bp, Artificial Sequence
  Synthetic oligonucleotide; TTG chr2 60513534 60513555 60513551 60513556 +
tggagcaaatcttcatgtcctg

SEQ ID NO: 203213 - DNA, 22 bp, Artificial Sequence
  Synthetic oligonucleotide; CTT chr2 60513547 60513568 60513564 60513569 +
catgtcctgtctggatcttccc

SEQ ID NO: 203214 - DNA, 22 bp, Artificial Sequence
  Synthetic oligonucleotide; TTC chr2 60513548 60513569 60513565 60513570 +
atgtcctgtctggatcttccca

SEQ ID NO: 203215 - DNA, 22 bp, Artificial Sequence
  Synthetic oligonucleotide; CTG chr2 60513556 60513577 60513573 60513578 +
tctggatcttcccagtcctgcc

SEQ ID NO: 203216 - DNA, 22 bp, Artificial Sequence
  Synthetic oligonucleotide; CTG chr2 60513560 60513581 60513577 60513582 +
gatcttcccagtcctgccctct

SEQ ID NO: 203217 - DNA, 22 bp, Artificial Sequence
  Synthetic oligonucleotide; CTT chr2 60513566 60513587 60513583 60513588 +
cccagtcctgccctctctcttc

SEQ ID NO: 203218 - DNA, 22 bp, Artificial Sequence
  Synthetic oligonucleotide; TTC chr2 60513567 60513588 60513584 60513589 +
ccagtcctgccctctctcttct

SEQ ID NO: 203219 - DNA, 22 bp, Artificial Sequence
  Synthetic oligonucleotide; CTG chr2 60513576 60513597 60513593 60513598 +
ccctctctcttctgaatcttcc

SEQ ID NO: 203220 - DNA, 22 bp, Artificial Sequence
  Synthetic oligonucleotide; CTC chr2 60513581 60513602 60513598 60513603 +
tctcttctgaatcttcccaccc

SEQ ID NO: 203221 - DNA, 22 bp, Artificial Sequence
  Synthetic oligonucleotide; CTC chr2 60513583 60513604 60513600 60513605 +
tcttctgaatcttcccaccctt

SEQ ID NO: 203222 - DNA, 22 bp, Artificial Sequence
  Synthetic oligonucleotide; CTC chr2 60513585 60513606 60513602 60513607 +
ttctgaatcttcccacccttcc

SEQ ID NO: 203223 - DNA, 22 bp, Artificial Sequence
  Synthetic oligonucleotide; CTT chr2 60513587 60513608 60513604 60513609 +
ctgaatcttcccacccttccaa

SEQ ID NO: 203224 - DNA, 22 bp, Artificial Sequence
  Synthetic oligonucleotide; TTC chr2 60513588 60513609 60513605 60513610 +
tgaatcttcccacccttccaag

SEQ ID NO: 203225 - DNA, 22 bp, Artificial Sequence
  Synthetic oligonucleotide; CTG chr2 60513590 60513611 60513607 60513612 +
aatcttcccacccttccaaggg

SEQ ID NO: 203226 - DNA, 22 bp, Artificial Sequence
  Synthetic oligonucleotide; CTT chr2 60513596 60513617 60513613 60513618 +
cccacccttccaagggcctgct

SEQ ID NO: 203227 - DNA, 22 bp, Artificial Sequence
  Synthetic oligonucleotide; TTC chr2 60513597 60513618 60513614 60513619 +
ccacccttccaagggcctgctg

SEQ ID NO: 203228 - DNA, 22 bp, Artificial Sequence
  Synthetic oligonucleotide; CTT chr2 60513605 60513626 60513622 60513627 +
ccaagggcctgctgcctaatcc

SEQ ID NO: 203229 - DNA, 22 bp, Artificial Sequence
  Synthetic oligonucleotide; TTC chr2 60513606 60513627 60513623 60513628 +
caagggcctgctgcctaatcca

SEQ ID NO: 203230 - DNA, 22 bp, Artificial Sequence
  Synthetic oligonucleotide; CTG chr2 60513616 60513637 60513633 60513638 +
ctgcctaatccatctccccact

SEQ ID NO: 203231 - DNA, 22 bp, Artificial Sequence
  Synthetic oligonucleotide; CTG chr2 60513619 60513640 60513636 60513641 +
cctaatccatctccccactcac

SEQ ID NO: 203232 - DNA, 22 bp, Artificial Sequence
  Synthetic oligonucleotide; CTA chr2 60513623 60513644 60513640 60513645 +
atccatctccccactcacacgc

SEQ ID NO: 203233 - DNA, 22 bp, Artificial Sequence
  Synthetic oligonucleotide; CTC chr2 60513632 60513653 60513649 60513654 +
cccactcacacgctaaagtaaa

SEQ ID NO: 203234 - DNA, 22 bp, Artificial Sequence
  Synthetic oligonucleotide; CTC chr2 60513639 60513660 60513656 60513661 +
acacgctaaagtaaatgaataa

SEQ ID NO: 203235 - DNA, 22 bp, Artificial Sequence
  Synthetic oligonucleotide; CTA chr2 60513647 60513668 60513664 60513669 +
aagtaaatgaataaacccaaca

SEQ ID NO: 203236 - DNA, 22 bp, Artificial Sequence
  Synthetic oligonucleotide; CTC chr2 60513679 60513700 60513696 60513701 +
atccctgatcaggactgaaaaa

SEQ ID NO: 203237 - DNA, 22 bp, Artificial Sequence
  Synthetic oligonucleotide; CTG chr2 60513686 60513707 60513703 60513708 +
atcaggactgaaaaaagaaaaa

SEQ ID NO: 203238 - DNA, 22 bp, Artificial Sequence
  Synthetic oligonucleotide; CTG chr2 60513696 60513717 60513713 60513718 +
aaaaaagaaaaagaaatagcct

SEQ ID NO: 203239 - DNA, 22 bp, Artificial Sequence
  Synthetic oligonucleotide; CTC chr2 60513719 60513740 60513736 60513741 +
ccatcacaccactctctgggaa

SEQ ID NO: 203240 - DNA, 22 bp, Artificial Sequence
  Synthetic oligonucleotide; CTC chr2 60513733 60513754 60513750 60513755 +
tctgggaaaatagaactgagtc

SEQ ID NO: 203241 - DNA, 22 bp, Artificial Sequence
  Synthetic oligonucleotide; CTC chr2 60513735 60513756 60513752 60513757 +
tgggaaaatagaactgagtcct

SEQ ID NO: 203242 - DNA, 22 bp, Artificial Sequence
  Synthetic oligonucleotide; CTG chr2 60513737 60513758 60513754 60513759 +
ggaaaatagaactgagtcctag

SEQ ID NO: 203243 - DNA, 22 bp, Artificial Sequence
  Synthetic oligonucleotide; CTG chr2 60513751 60513772 60513768 60513773 +
agtcctagctctagcactgggc

SEQ ID NO: 203244 - DNA, 22 bp, Artificial Sequence
  Synthetic oligonucleotide; CTA chr2 60513758 60513779 60513775 60513780 +
gctctagcactgggcacagctg

SEQ ID NO: 203245 - DNA, 22 bp, Artificial Sequence
  Synthetic oligonucleotide; CTC chr2 60513762 60513783 60513779 60513784 +
tagcactgggcacagctgggtc

SEQ ID NO: 203246 - DNA, 22 bp, Artificial Sequence
  Synthetic oligonucleotide; CTA chr2 60513764 60513785 60513781 60513786 +
gcactgggcacagctgggtcag

SEQ ID NO: 203247 - DNA, 22 bp, Artificial Sequence
  Synthetic oligonucleotide; CTG chr2 60513770 60513791 60513787 60513792 +
ggcacagctgggtcagcaccta

SEQ ID NO: 203248 - DNA, 22 bp, Artificial Sequence
  Synthetic oligonucleotide; CTG chr2 60513780 60513801 60513797 60513802 +
ggtcagcacctacgaagggtcc

SEQ ID NO: 203249 - DNA, 22 bp, Artificial Sequence
  Synthetic oligonucleotide; CTA chr2 60513792 60513813 60513809 60513814 +
cgaagggtcctatgcagtgaac

SEQ ID NO: 203250 - DNA, 22 bp, Artificial Sequence
  Synthetic oligonucleotide; CTA chr2 60513804 60513825 60513821 60513826 +
tgcagtgaacaccttgcagtct

SEQ ID NO: 203251 - DNA, 22 bp, Artificial Sequence
  Synthetic oligonucleotide; CTT chr2 60513819 60513840 60513836 60513841 +
gcagtctgaagggcagactctc

SEQ ID NO: 203252 - DNA, 22 bp, Artificial Sequence
  Synthetic oligonucleotide; TTG chr2 60513820 60513841 60513837 60513842 +
cagtctgaagggcagactctct

SEQ ID NO: 203253 - DNA, 22 bp, Artificial Sequence
  Synthetic oligonucleotide; CTG chr2 60513827 60513848 60513844 60513849 +
aagggcagactctctcttctca

SEQ ID NO: 203254 - DNA, 22 bp, Artificial Sequence
  Synthetic oligonucleotide; CTC chr2 60513839 60513860 60513856 60513861 +
tctcttctcaacaagccagaga

SEQ ID NO: 203255 - DNA, 22 bp, Artificial Sequence
  Synthetic oligonucleotide; CTC chr2 60513841 60513862 60513858 60513863 +
tcttctcaacaagccagagatt

SEQ ID NO: 203256 - DNA, 22 bp, Artificial Sequence
  Synthetic oligonucleotide; CTC chr2 60513843 60513864 60513860 60513865 +
ttctcaacaagccagagattct

SEQ ID NO: 203257 - DNA, 22 bp, Artificial Sequence
  Synthetic oligonucleotide; CTT chr2 60513845 60513866 60513862 60513867 +
ctcaacaagccagagattctct

SEQ ID NO: 203258 - DNA, 22 bp, Artificial Sequence
  Synthetic oligonucleotide; TTC chr2 60513846 60513867 60513863 60513868 +
tcaacaagccagagattctctg

SEQ ID NO: 203259 - DNA, 22 bp, Artificial Sequence
  Synthetic oligonucleotide; CTC chr2 60513848 60513869 60513865 60513870 +
aacaagccagagattctctgcc

SEQ ID NO: 203260 - DNA, 22 bp, Artificial Sequence
  Synthetic oligonucleotide; TTC chr2 60513864 60513885 60513881 60513886 +
tctgccttccagacaggcacct

SEQ ID NO: 203261 - DNA, 22 bp, Artificial Sequence
  Synthetic oligonucleotide; CTC chr2 60513866 60513887 60513883 60513888 +
tgccttccagacaggcacctcc

SEQ ID NO: 203262 - DNA, 22 bp, Artificial Sequence
  Synthetic oligonucleotide; CTG chr2 60513868 60513889 60513885 60513890 +
ccttccagacaggcacctccat

SEQ ID NO: 203263 - DNA, 22 bp, Artificial Sequence
  Synthetic oligonucleotide; CTT chr2 60513872 60513893 60513889 60513894 +
ccagacaggcacctccatgaag

SEQ ID NO: 203264 - DNA, 22 bp, Artificial Sequence
  Synthetic oligonucleotide; TTC chr2 60513873 60513894 60513890 60513895 +
cagacaggcacctccatgaaga

SEQ ID NO: 203265 - DNA, 22 bp, Artificial Sequence
  Synthetic oligonucleotide; CTC chr2 60513887 60513908 60513904 60513909 +
catgaagagaagctgttcctgg

SEQ ID NO: 203266 - DNA, 22 bp, Artificial Sequence
  Synthetic oligonucleotide; CTG chr2 60513902 60513923 60513919 60513924 +
ttcctggcttgtggtgagcaaa

SEQ ID NO: 203267 - DNA, 22 bp, Artificial Sequence
  Synthetic oligonucleotide; TTC chr2 60513905 60513926 60513922 60513927 +
ctggcttgtggtgagcaaaact

SEQ ID NO: 203268 - DNA, 22 bp, Artificial Sequence
  Synthetic oligonucleotide; CTG chr2 60513908 60513929 60513925 60513930 +
gcttgtggtgagcaaaactccc

SEQ ID NO: 203269 - DNA, 22 bp, Artificial Sequence
  Synthetic oligonucleotide; CTT chr2 60513912 60513933 60513929 60513934 +
gtggtgagcaaaactccctgga

SEQ ID NO: 203270 - DNA, 22 bp, Artificial Sequence
  Synthetic oligonucleotide; TTG chr2 60513913 60513934 60513930 60513935 +
tggtgagcaaaactccctggat

SEQ ID NO: 203271 - DNA, 22 bp, Artificial Sequence
  Synthetic oligonucleotide; CTC chr2 60513928 60513949 60513945 60513950 +
cctggattgagtcgagacctgg

SEQ ID NO: 203272 - DNA, 22 bp, Artificial Sequence
  Synthetic oligonucleotide; CTG chr2 60513932 60513953 60513949 60513954 +
gattgagtcgagacctggattc

SEQ ID NO: 203273 - DNA, 22 bp, Artificial Sequence
  Synthetic oligonucleotide; TTG chr2 60513937 60513958 60513954 60513959 +
agtcgagacctggattctagtt

SEQ ID NO: 203274 - DNA, 22 bp, Artificial Sequence
  Synthetic oligonucleotide; CTG chr2 60513949 60513970 60513966 60513971 +
gattctagttccactactttga

SEQ ID NO: 203275 - DNA, 22 bp, Artificial Sequence
  Synthetic oligonucleotide; TTC chr2 60513954 60513975 60513971 60513976 +
tagttccactactttgaattct

SEQ ID NO: 203276 - DNA, 22 bp, Artificial Sequence
  Synthetic oligonucleotide; CTA chr2 60513956 60513977 60513973 60513978 +
gttccactactttgaattctct

SEQ ID NO: 203277 - DNA, 22 bp, Artificial Sequence
  Synthetic oligonucleotide; TTC chr2 60513960 60513981 60513977 60513982 +
cactactttgaattctctaggt

SEQ ID NO: 203278 - DNA, 22 bp, Artificial Sequence
  Synthetic oligonucleotide; CTA chr2 60513965 60513986 60513982 60513987 +
ctttgaattctctaggttcaca

SEQ ID NO: 203279 - DNA, 22 bp, Artificial Sequence
  Synthetic oligonucleotide; CTT chr2 60513968 60513989 60513985 60513990 +
tgaattctctaggttcacagtc

SEQ ID NO: 203280 - DNA, 22 bp, Artificial Sequence
  Synthetic oligonucleotide; TTT chr2 60513969 60513990 60513986 60513991 +
gaattctctaggttcacagtcc

SEQ ID NO: 203281 - DNA, 22 bp, Artificial Sequence
  Synthetic oligonucleotide; TTG chr2 60513970 60513991 60513987 60513992 +
aattctctaggttcacagtcct

SEQ ID NO: 203282 - DNA, 22 bp, Artificial Sequence
  Synthetic oligonucleotide; TTC chr2 60513975 60513996 60513992 60513997 +
tctaggttcacagtcctaaatc

SEQ ID NO: 203283 - DNA, 22 bp, Artificial Sequence
  Synthetic oligonucleotide; CTC chr2 60513977 60513998 60513994 60513999 +
taggttcacagtcctaaatcct

SEQ ID NO: 203284 - DNA, 22 bp, Artificial Sequence
  Synthetic oligonucleotide; CTA chr2 60513979 60514000 60513996 60514001 +
ggttcacagtcctaaatcctca

SEQ ID NO: 203285 - DNA, 22 bp, Artificial Sequence
  Synthetic oligonucleotide; TTC chr2 60513984 60514005 60514001 60514006 +
acagtcctaaatcctcagagaa

SEQ ID NO: 203286 - DNA, 22 bp, Artificial Sequence
  Synthetic oligonucleotide; CTA chr2 60513993 60514014 60514010 60514015 +
aatcctcagagaaggacagact

SEQ ID NO: 203287 - DNA, 22 bp, Artificial Sequence
  Synthetic oligonucleotide; CTC chr2 60514000 60514021 60514017 60514022 +
agagaaggacagacttgagggc

SEQ ID NO: 203288 - DNA, 22 bp, Artificial Sequence
  Synthetic oligonucleotide; CTT chr2 60514016 60514037 60514033 60514038 +
gagggcagacagccacaggtgg

SEQ ID NO: 203289 - DNA, 22 bp, Artificial Sequence
  Synthetic oligonucleotide; TTG chr2 60514017 60514038 60514034 60514039 +
agggcagacagccacaggtggc

SEQ ID NO: 203290 - DNA, 22 bp, Artificial Sequence
  Synthetic oligonucleotide; CTG chr2 60514042 60514063 60514059 60514064 +
gcatgggctgaggcagcacaca

SEQ ID NO: 203291 - DNA, 22 bp, Artificial Sequence
  Synthetic oligonucleotide; CTG chr2 60514052 60514073 60514069 60514074 +
aggcagcacacaaggactctga

SEQ ID NO: 203292 - DNA, 22 bp, Artificial Sequence
  Synthetic oligonucleotide; CTC chr2 60514071 60514092 60514088 60514093 +
tgagccacaccagccatctcct

SEQ ID NO: 203293 - DNA, 22 bp, Artificial Sequence
  Synthetic oligonucleotide; CTG chr2 60514073 60514094 60514090 60514095 +
agccacaccagccatctccttg

SEQ ID NO: 203294 - DNA, 22 bp, Artificial Sequence
  Synthetic oligonucleotide; CTC chr2 60514091 60514112 60514108 60514113 +
cttgtggactttcctgagagca

SEQ ID NO: 203295 - DNA, 22 bp, Artificial Sequence
  Synthetic oligonucleotide; CTT chr2 60514094 60514115 60514111 60514116 +
gtggactttcctgagagcacgt

SEQ ID NO: 203296 - DNA, 22 bp, Artificial Sequence
  Synthetic oligonucleotide; TTG chr2 60514095 60514116 60514112 60514117 +
tggactttcctgagagcacgtg

SEQ ID NO: 203297 - DNA, 22 bp, Artificial Sequence
  Synthetic oligonucleotide; CTT chr2 60514102 60514123 60514119 60514124 +
tcctgagagcacgtgcagctag

SEQ ID NO: 203298 - DNA, 22 bp, Artificial Sequence
  Synthetic oligonucleotide; TTT chr2 60514103 60514124 60514120 60514125 +
cctgagagcacgtgcagctagc

SEQ ID NO: 203299 - DNA, 22 bp, Artificial Sequence
  Synthetic oligonucleotide; TTC chr2 60514104 60514125 60514121 60514126 +
ctgagagcacgtgcagctagca

SEQ ID NO: 203300 - DNA, 22 bp, Artificial Sequence
  Synthetic oligonucleotide; CTG chr2 60514107 60514128 60514124 60514129 +
agagcacgtgcagctagcagtg

SEQ ID NO: 203301 - DNA, 22 bp, Artificial Sequence
  Synthetic oligonucleotide; CTA chr2 60514123 60514144 60514140 60514145 +
gcagtgctccaagcactctctg

SEQ ID NO: 203302 - DNA, 22 bp, Artificial Sequence
  Synthetic oligonucleotide; CTC chr2 60514132 60514153 60514149 60514154 +
caagcactctctgagaggcttc

SEQ ID NO: 203303 - DNA, 22 bp, Artificial Sequence
  Synthetic oligonucleotide; CTC chr2 60514141 60514162 60514158 60514163 +
tctgagaggcttccaggctgga

SEQ ID NO: 203304 - DNA, 22 bp, Artificial Sequence
  Synthetic oligonucleotide; CTC chr2 60514143 60514164 60514160 60514165 +
tgagaggcttccaggctggagc

SEQ ID NO: 203305 - DNA, 22 bp, Artificial Sequence
  Synthetic oligonucleotide; CTG chr2 60514145 60514166 60514162 60514167 +
agaggcttccaggctggagctc

SEQ ID NO: 203306 - DNA, 22 bp, Artificial Sequence
  Synthetic oligonucleotide; CTT chr2 60514153 60514174 60514170 60514175 +
ccaggctggagctctgagaggc

SEQ ID NO: 203307 - DNA, 22 bp, Artificial Sequence
  Synthetic oligonucleotide; TTC chr2 60514154 60514175 60514171 60514176 +
caggctggagctctgagaggct

SEQ ID NO: 203308 - DNA, 22 bp, Artificial Sequence
  Synthetic oligonucleotide; CTG chr2 60514161 60514182 60514178 60514183 +
gagctctgagaggcttccaggc

SEQ ID NO: 203309 - DNA, 22 bp, Artificial Sequence
  Synthetic oligonucleotide; CTC chr2 60514167 60514188 60514184 60514189 +
tgagaggcttccaggctgggct

SEQ ID NO: 203310 - DNA, 22 bp, Artificial Sequence
  Synthetic oligonucleotide; CTG chr2 60514169 60514190 60514186 60514191 +
agaggcttccaggctgggctac

SEQ ID NO: 203311 - DNA, 22 bp, Artificial Sequence
  Synthetic oligonucleotide; CTT chr2 60514177 60514198 60514194 60514199 +
ccaggctgggctacctccagcc

SEQ ID NO: 203312 - DNA, 22 bp, Artificial Sequence
  Synthetic oligonucleotide; TTC chr2 60514178 60514199 60514195 60514200 +
caggctgggctacctccagcca

SEQ ID NO: 203313 - DNA, 22 bp, Artificial Sequence
  Synthetic oligonucleotide; CTG chr2 60514185 60514206 60514202 60514207 +
ggctacctccagccatgtggtg

SEQ ID NO: 203314 - DNA, 22 bp, Artificial Sequence
  Synthetic oligonucleotide; CTA chr2 60514190 60514211 60514207 60514212 +
cctccagccatgtggtggaaac

SEQ ID NO: 203315 - DNA, 22 bp, Artificial Sequence
  Synthetic oligonucleotide; CTC chr2 60514194 60514215 60514211 60514216 +
cagccatgtggtggaaactggt

SEQ ID NO: 203316 - DNA, 22 bp, Artificial Sequence
  Synthetic oligonucleotide; CTG chr2 60514214 60514235 60514231 60514236 +
gtagcaaaggaagcccagaagg

SEQ ID NO: 203317 - DNA, 22 bp, Artificial Sequence
  Synthetic oligonucleotide; CTG chr2 60514246 60514267 60514263 60514268 +
aactagaaggctaaggaacacc

SEQ ID NO: 203318 - DNA, 22 bp, Artificial Sequence
  Synthetic oligonucleotide; CTA chr2 60514251 60514272 60514268 60514273 +
gaaggctaaggaacaccccggc

SEQ ID NO: 203319 - DNA, 22 bp, Artificial Sequence
  Synthetic oligonucleotide; CTA chr2 60514259 60514280 60514276 60514281 +
aggaacaccccggccactggtg

SEQ ID NO: 203320 - DNA, 22 bp, Artificial Sequence
  Synthetic oligonucleotide; CTG chr2 60514278 60514299 60514295 60514300 +
gtgggatcgcagtgctgagcca

SEQ ID NO: 203321 - DNA, 22 bp, Artificial Sequence
  Synthetic oligonucleotide; CTG chr2 60514295 60514316 60514312 60514317 +
agccatgagccctaccaggcaa

SEQ ID NO: 203322 - DNA, 22 bp, Artificial Sequence
  Synthetic oligonucleotide; CTA chr2 60514309 60514330 60514326 60514331 +
ccaggcaacccatttctgggca

SEQ ID NO: 203323 - DNA, 22 bp, Artificial Sequence
  Synthetic oligonucleotide; TTT chr2 60514324 60514345 60514341 60514346 +
ctgggcagtcccaagacttgga

SEQ ID NO: 203324 - DNA, 22 bp, Artificial Sequence
  Synthetic oligonucleotide; TTC chr2 60514325 60514346 60514342 60514347 +
tgggcagtcccaagacttggag

SEQ ID NO: 203325 - DNA, 22 bp, Artificial Sequence
  Synthetic oligonucleotide; CTG chr2 60514327 60514348 60514344 60514349 +
ggcagtcccaagacttggagaa

SEQ ID NO: 203326 - DNA, 22 bp, Artificial Sequence
  Synthetic oligonucleotide; CTT chr2 60514343 60514364 60514360 60514365 +
ggagaacaagccatctgaaaat

SEQ ID NO: 203327 - DNA, 22 bp, Artificial Sequence
  Synthetic oligonucleotide; TTG chr2 60514344 60514365 60514361 60514366 +
gagaacaagccatctgaaaata

SEQ ID NO: 203328 - DNA, 22 bp, Artificial Sequence
  Synthetic oligonucleotide; CTG chr2 60514360 60514381 60514377 60514382 +
aaaatagaattaaatagccagg

SEQ ID NO: 203329 - DNA, 22 bp, Artificial Sequence
  Synthetic oligonucleotide; TTA chr2 60514372 60514393 60514389 60514394 +
aatagccaggtgcggtggctca

SEQ ID NO: 203330 - DNA, 22 bp, Artificial Sequence
  Synthetic oligonucleotide; CTC chr2 60514393 60514414 60514410 60514415 +
acacctgtaatctcagcatttt

SEQ ID NO: 203331 - DNA, 22 bp, Artificial Sequence
  Synthetic oligonucleotide; CTG chr2 60514400 60514421 60514417 60514422 +
taatctcagcattttgggaggc

SEQ ID NO: 203332 - DNA, 22 bp, Artificial Sequence
  Synthetic oligonucleotide; CTC chr2 60514407 60514428 60514424 60514429 +
agcattttgggaggccgaggcg

SEQ ID NO: 203333 - DNA, 22 bp, Artificial Sequence
  Synthetic oligonucleotide; TTT chr2 60514414 60514435 60514431 60514436 +
tgggaggccgaggcgtgtgggt

SEQ ID NO: 203334 - DNA, 22 bp, Artificial Sequence
  Synthetic oligonucleotide; TTT chr2 60514415 60514436 60514432 60514437 +
gggaggccgaggcgtgtgggtc

SEQ ID NO: 203335 - DNA, 22 bp, Artificial Sequence
  Synthetic oligonucleotide; TTG chr2 60514416 60514437 60514433 60514438 +
ggaggccgaggcgtgtgggtca

SEQ ID NO: 203336 - DNA, 22 bp, Artificial Sequence
  Synthetic oligonucleotide; CTG chr2 60514442 60514463 60514459 60514464 +
aggtcaggagttcaagaccagc

SEQ ID NO: 203337 - DNA, 22 bp, Artificial Sequence
  Synthetic oligonucleotide; TTC chr2 60514455 60514476 60514472 60514477 +
aagaccagcctagccaacatgg

SEQ ID NO: 203338 - DNA, 22 bp, Artificial Sequence
  Synthetic oligonucleotide; CTA chr2 60514467 60514488 60514484 60514489 +
gccaacatggtgaaaccccatc

SEQ ID NO: 203339 - DNA, 22 bp, Artificial Sequence
  Synthetic oligonucleotide; CTC chr2 60514491 60514512 60514508 60514513 +
tacttaaaaaaaaaaaaaaaaa

SEQ ID NO: 203340 - DNA, 22 bp, Artificial Sequence
  Synthetic oligonucleotide; CTA chr2 60514493 60514514 60514510 60514515 +
cttaaaaaaaaaaaaaaaaaaa

SEQ ID NO: 203341 - DNA, 22 bp, Artificial Sequence
  Synthetic oligonucleotide; CTT chr2 60514496 60514517 60514513 60514518 +
aaaaaaaaaaaaaaaaaaaaaa

SEQ ID NO: 203342 - DNA, 22 bp, Artificial Sequence
  Synthetic oligonucleotide; TTA chr2 60514497 60514518 60514514 60514519 +
aaaaaaaaaaaaaaaaaaaaaa

SEQ ID NO: 203343 - DNA, 22 bp, Artificial Sequence
  Synthetic oligonucleotide; CTA chr2 60514546 60514567 60514563 60514568 +
taatcccagctacttgggaggc

SEQ ID NO: 203344 - DNA, 22 bp, Artificial Sequence
  Synthetic oligonucleotide; CTA chr2 60514558 60514579 60514575 60514580 +
cttgggaggctgaggcaggaga

SEQ ID NO: 203345 - DNA, 22 bp, Artificial Sequence
  Synthetic oligonucleotide; CTT chr2 60514561 60514582 60514578 60514583 +
gggaggctgaggcaggagaatc

SEQ ID NO: 203346 - DNA, 22 bp, Artificial Sequence
  Synthetic oligonucleotide; TTG chr2 60514562 60514583 60514579 60514584 +
ggaggctgaggcaggagaatca

SEQ ID NO: 203347 - DNA, 22 bp, Artificial Sequence
  Synthetic oligonucleotide; CTG chr2 60514570 60514591 60514587 60514592 +
aggcaggagaatcacttgaacc

SEQ ID NO: 203348 - DNA, 22 bp, Artificial Sequence
  Synthetic oligonucleotide; CTT chr2 60514587 60514608 60514604 60514609 +
gaacctgggaggcggaggctgc

SEQ ID NO: 203349 - DNA, 22 bp, Artificial Sequence
  Synthetic oligonucleotide; TTG chr2 60514588 60514609 60514605 60514610 +
aacctgggaggcggaggctgca

SEQ ID NO: 203350 - DNA, 22 bp, Artificial Sequence
  Synthetic oligonucleotide; CTG chr2 60514594 60514615 60514611 60514616 +
ggaggcggaggctgcaatgagc

SEQ ID NO: 203351 - DNA, 22 bp, Artificial Sequence
  Synthetic oligonucleotide; CTG chr2 60514608 60514629 60514625 60514630 +
caatgagccgagatcgtagcac

SEQ ID NO: 203352 - DNA, 22 bp, Artificial Sequence
  Synthetic oligonucleotide; CTG chr2 60514632 60514653 60514649 60514654 +
cactccagcctgggcgacagag

SEQ ID NO: 203353 - DNA, 22 bp, Artificial Sequence
  Synthetic oligonucleotide; CTC chr2 60514637 60514658 60514654 60514659 +
cagcctgggcgacagagcgaga

SEQ ID NO: 203354 - DNA, 22 bp, Artificial Sequence
  Synthetic oligonucleotide; CTG chr2 60514644 60514665 60514661 60514666 +
ggcgacagagcgagactccatc

SEQ ID NO: 203355 - DNA, 22 bp, Artificial Sequence
  Synthetic oligonucleotide; CTC chr2 60514662 60514683 60514679 60514684 +
catctcaaaaaaaaaaaaaaat

SEQ ID NO: 203356 - DNA, 22 bp, Artificial Sequence
  Synthetic oligonucleotide; CTC chr2 60514668 60514689 60514685 60514690 +
aaaaaaaaaaaaaaattaaatt

SEQ ID NO: 203357 - DNA, 22 bp, Artificial Sequence
  Synthetic oligonucleotide; TTA chr2 60514686 60514707 60514703 60514708 +
aattgggtgggggagtttctta

SEQ ID NO: 203358 - DNA, 22 bp, Artificial Sequence
  Synthetic oligonucleotide; TTG chr2 60514691 60514712 60514708 60514713 +
ggtgggggagtttcttaggaaa

SEQ ID NO: 203359 - DNA, 22 bp, Artificial Sequence
  Synthetic oligonucleotide; TTT chr2 60514704 60514725 60514721 60514726 +
cttaggaaaaaaatcagagttg

SEQ ID NO: 203360 - DNA, 22 bp, Artificial Sequence
  Synthetic oligonucleotide; TTC chr2 60514705 60514726 60514722 60514727 +
ttaggaaaaaaatcagagttgt

SEQ ID NO: 203361 - DNA, 22 bp, Artificial Sequence
  Synthetic oligonucleotide; CTT chr2 60514707 60514728 60514724 60514729 +
aggaaaaaaatcagagttgtgc

SEQ ID NO: 203362 - DNA, 22 bp, Artificial Sequence
  Synthetic oligonucleotide; TTA chr2 60514708 60514729 60514725 60514730 +
ggaaaaaaatcagagttgtgca

SEQ ID NO: 203363 - DNA, 22 bp, Artificial Sequence
  Synthetic oligonucleotide; TTG chr2 60514726 60514747 60514743 60514748 +
tgcaaataaatctagttggtct

SEQ ID NO: 203364 - DNA, 22 bp, Artificial Sequence
  Synthetic oligonucleotide; CTA chr2 60514740 60514761 60514757 60514762 +
gttggtctgactgtctttacaa

SEQ ID NO: 203365 - DNA, 22 bp, Artificial Sequence
  Synthetic oligonucleotide; TTG chr2 60514744 60514765 60514761 60514766 +
gtctgactgtctttacaacaca

SEQ ID NO: 203366 - DNA, 22 bp, Artificial Sequence
  Synthetic oligonucleotide; CTG chr2 60514749 60514770 60514766 60514771 +
actgtctttacaacacaatgaa

SEQ ID NO: 203367 - DNA, 22 bp, Artificial Sequence
  Synthetic oligonucleotide; CTG chr2 60514753 60514774 60514770 60514775 +
tctttacaacacaatgaaaggg

SEQ ID NO: 203368 - DNA, 22 bp, Artificial Sequence
  Synthetic oligonucleotide; CTT chr2 60514757 60514778 60514774 60514779 +
tacaacacaatgaaagggtaag

SEQ ID NO: 203369 - DNA, 22 bp, Artificial Sequence
  Synthetic oligonucleotide; TTT chr2 60514758 60514779 60514775 60514780 +
acaacacaatgaaagggtaagg

SEQ ID NO: 203370 - DNA, 22 bp, Artificial Sequence
  Synthetic oligonucleotide; TTA chr2 60514759 60514780 60514776 60514781 +
caacacaatgaaagggtaaggc

SEQ ID NO: 203371 - DNA, 22 bp, Artificial Sequence
  Synthetic oligonucleotide; CTG chr2 60514795 60514816 60514812 60514817 +
tgaattccattgataagagagg

SEQ ID NO: 203372 - DNA, 22 bp, Artificial Sequence
  Synthetic oligonucleotide; TTC chr2 60514802 60514823 60514819 60514824 +
cattgataagagaggatttccc

SEQ ID NO: 203373 - DNA, 22 bp, Artificial Sequence
  Synthetic oligonucleotide; TTG chr2 60514807 60514828 60514824 60514829 +
ataagagaggatttccctactc

SEQ ID NO: 203374 - DNA, 22 bp, Artificial Sequence
  Synthetic oligonucleotide; TTT chr2 60514821 60514842 60514838 60514843 +
ccctactcaaatatcaaaggtc

SEQ ID NO: 203375 - DNA, 22 bp, Artificial Sequence
  Synthetic oligonucleotide; TTC chr2 60514822 60514843 60514839 60514844 +
cctactcaaatatcaaaggtct

SEQ ID NO: 203376 - DNA, 22 bp, Artificial Sequence
  Synthetic oligonucleotide; CTA chr2 60514826 60514847 60514843 60514848 +
ctcaaatatcaaaggtcttgca

SEQ ID NO: 203377 - DNA, 22 bp, Artificial Sequence
  Synthetic oligonucleotide; CTC chr2 60514829 60514850 60514846 60514851 +
aaatatcaaaggtcttgcatac

SEQ ID NO: 203378 - DNA, 22 bp, Artificial Sequence
  Synthetic oligonucleotide; CTT chr2 60514845 60514866 60514862 60514867 +
gcatacacatacactaaaacag

SEQ ID NO: 203379 - DNA, 22 bp, Artificial Sequence
  Synthetic oligonucleotide; TTG chr2 60514846 60514867 60514863 60514868 +
catacacatacactaaaacaga

SEQ ID NO: 203380 - DNA, 22 bp, Artificial Sequence
  Synthetic oligonucleotide; CTA chr2 60514861 60514882 60514878 60514883 +
aaacagaaaaaagaaaaaaaaa

SEQ ID NO: 203381 - DNA, 22 bp, Artificial Sequence
  Synthetic oligonucleotide; CTT chr2 60514922 60514943 60514939 60514944 +
ttaaactcatccaagagccagt

SEQ ID NO: 203382 - DNA, 22 bp, Artificial Sequence
  Synthetic oligonucleotide; TTT chr2 60514923 60514944 60514940 60514945 +
taaactcatccaagagccagtc

SEQ ID NO: 203383 - DNA, 22 bp, Artificial Sequence
  Synthetic oligonucleotide; TTT chr2 60514924 60514945 60514941 60514946 +
aaactcatccaagagccagtca

SEQ ID NO: 203384 - DNA, 22 bp, Artificial Sequence
  Synthetic oligonucleotide; TTA chr2 60514925 60514946 60514942 60514947 +
aactcatccaagagccagtcaa

SEQ ID NO: 203385 - DNA, 22 bp, Artificial Sequence
  Synthetic oligonucleotide; CTC chr2 60514930 60514951 60514947 60514952 +
atccaagagccagtcaaagcca

SEQ ID NO: 203386 - DNA, 22 bp, Artificial Sequence
  Synthetic oligonucleotide; CTT chr2 60514980 60515001 60514997 60515002 +
ccgaactcagccgttctccctc

SEQ ID NO: 203387 - DNA, 22 bp, Artificial Sequence
  Synthetic oligonucleotide; TTC chr2 60514981 60515002 60514998 60515003 +
cgaactcagccgttctccctct

SEQ ID NO: 203388 - DNA, 22 bp, Artificial Sequence
  Synthetic oligonucleotide; CTC chr2 60514988 60515009 60515005 60515010 +
agccgttctccctctggtgaga

SEQ ID NO: 203389 - DNA, 22 bp, Artificial Sequence
  Synthetic oligonucleotide; TTC chr2 60514996 60515017 60515013 60515018 +
tccctctggtgagacaggctct

SEQ ID NO: 203390 - DNA, 22 bp, Artificial Sequence
  Synthetic oligonucleotide; CTC chr2 60514998 60515019 60515015 60515020 +
cctctggtgagacaggctctag

SEQ ID NO: 203391 - DNA, 22 bp, Artificial Sequence
  Synthetic oligonucleotide; CTC chr2 60515002 60515023 60515019 60515024 +
tggtgagacaggctctagcttg

SEQ ID NO: 203392 - DNA, 22 bp, Artificial Sequence
  Synthetic oligonucleotide; CTG chr2 60515004 60515025 60515021 60515026 +
gtgagacaggctctagcttgtt

SEQ ID NO: 203393 - DNA, 22 bp, Artificial Sequence
  Synthetic oligonucleotide; CTC chr2 60515017 60515038 60515034 60515039 +
tagcttgtttccagaatgccac

SEQ ID NO: 203394 - DNA, 22 bp, Artificial Sequence
  Synthetic oligonucleotide; CTA chr2 60515019 60515040 60515036 60515041 +
gcttgtttccagaatgccacta

SEQ ID NO: 203395 - DNA, 22 bp, Artificial Sequence
  Synthetic oligonucleotide; CTT chr2 60515023 60515044 60515040 60515045 +
gtttccagaatgccactaccag

SEQ ID NO: 203396 - DNA, 22 bp, Artificial Sequence
  Synthetic oligonucleotide; TTG chr2 60515024 60515045 60515041 60515046 +
tttccagaatgccactaccagc

SEQ ID NO: 203397 - DNA, 22 bp, Artificial Sequence
  Synthetic oligonucleotide; TTT chr2 60515027 60515048 60515044 60515049 +
ccagaatgccactaccagcttc

SEQ ID NO: 203398 - DNA, 22 bp, Artificial Sequence
  Synthetic oligonucleotide; TTC chr2 60515028 60515049 60515045 60515050 +
cagaatgccactaccagcttcc

SEQ ID NO: 203399 - DNA, 22 bp, Artificial Sequence
  Synthetic oligonucleotide; CTA chr2 60515041 60515062 60515058 60515063 +
ccagcttcccacacctccaggg

SEQ ID NO: 203400 - DNA, 22 bp, Artificial Sequence
  Synthetic oligonucleotide; CTT chr2 60515048 60515069 60515065 60515070 +
cccacacctccaggggaccccc

SEQ ID NO: 203401 - DNA, 22 bp, Artificial Sequence
  Synthetic oligonucleotide; TTC chr2 60515049 60515070 60515066 60515071 +
ccacacctccaggggaccccct

SEQ ID NO: 203402 - DNA, 22 bp, Artificial Sequence
  Synthetic oligonucleotide; CTC chr2 60515058 60515079 60515075 60515080 +
caggggaccccctaactccaaa

SEQ ID NO: 203403 - DNA, 22 bp, Artificial Sequence
  Synthetic oligonucleotide; CTA chr2 60515072 60515093 60515089 60515094 +
actccaaagtgttgcccagacc

SEQ ID NO: 203404 - DNA, 22 bp, Artificial Sequence
  Synthetic oligonucleotide; CTC chr2 60515076 60515097 60515093 60515098 +
caaagtgttgcccagacctaag

SEQ ID NO: 203405 - DNA, 22 bp, Artificial Sequence
  Synthetic oligonucleotide; TTG chr2 60515086 60515107 60515103 60515108 +
cccagacctaaggatcctcccc

SEQ ID NO: 203406 - DNA, 22 bp, Artificial Sequence
  Synthetic oligonucleotide; CTA chr2 60515096 60515117 60515113 60515118 +
aggatcctcccccacgtgctcc

SEQ ID NO: 203407 - DNA, 22 bp, Artificial Sequence
  Synthetic oligonucleotide; CTC chr2 60515105 60515126 60515122 60515127 +
ccccacgtgctccttccccaac

SEQ ID NO: 203408 - DNA, 22 bp, Artificial Sequence
  Synthetic oligonucleotide; CTC chr2 60515117 60515138 60515134 60515139 +
cttccccaacactggcttccag

SEQ ID NO: 203409 - DNA, 22 bp, Artificial Sequence
  Synthetic oligonucleotide; CTT chr2 60515120 60515141 60515137 60515142 +
ccccaacactggcttccaggtg

SEQ ID NO: 203410 - DNA, 22 bp, Artificial Sequence
  Synthetic oligonucleotide; TTC chr2 60515121 60515142 60515138 60515143 +
cccaacactggcttccaggtga

SEQ ID NO: 203411 - DNA, 22 bp, Artificial Sequence
  Synthetic oligonucleotide; CTG chr2 60515131 60515152 60515148 60515153 +
gcttccaggtgagcgagacaga

SEQ ID NO: 203412 - DNA, 22 bp, Artificial Sequence
  Synthetic oligonucleotide; CTT chr2 60515135 60515156 60515152 60515157 +
ccaggtgagcgagacagaatct

SEQ ID NO: 203413 - DNA, 22 bp, Artificial Sequence
  Synthetic oligonucleotide; TTC chr2 60515136 60515157 60515153 60515158 +
caggtgagcgagacagaatctg

SEQ ID NO: 203414 - DNA, 22 bp, Artificial Sequence
  Synthetic oligonucleotide; CTG chr2 60515158 60515179 60515175 60515180 +
caagcagagttcactgcttgac

SEQ ID NO: 203415 - DNA, 22 bp, Artificial Sequence
  Synthetic oligonucleotide; TTC chr2 60515170 60515191 60515187 60515192 +
actgcttgaccatggggtgaaa

SEQ ID NO: 203416 - DNA, 22 bp, Artificial Sequence
  Synthetic oligonucleotide; CTG chr2 60515174 60515195 60515191 60515196 +
cttgaccatggggtgaaagcca

SEQ ID NO: 203417 - DNA, 22 bp, Artificial Sequence
  Synthetic oligonucleotide; CTT chr2 60515177 60515198 60515194 60515199 +
gaccatggggtgaaagccacaa

SEQ ID NO: 203418 - DNA, 22 bp, Artificial Sequence
  Synthetic oligonucleotide; TTG chr2 60515178 60515199 60515195 60515200 +
accatggggtgaaagccacaaa

SEQ ID NO: 203419 - DNA, 22 bp, Artificial Sequence
  Synthetic oligonucleotide; CTA chr2 60515214 60515235 60515231 60515236 +
tcccaaccccagcactttcact

SEQ ID NO: 203420 - DNA, 22 bp, Artificial Sequence
  Synthetic oligonucleotide; CTT chr2 60515231 60515252 60515248 60515253 +
tcactttttcactttctcccca

SEQ ID NO: 203421 - DNA, 22 bp, Artificial Sequence
  Synthetic oligonucleotide; TTT chr2 60515232 60515253 60515249 60515254 +
cactttttcactttctccccag

SEQ ID NO: 203422 - DNA, 22 bp, Artificial Sequence
  Synthetic oligonucleotide; TTC chr2 60515233 60515254 60515250 60515255 +
actttttcactttctccccagg

SEQ ID NO: 203423 - DNA, 22 bp, Artificial Sequence
  Synthetic oligonucleotide; CTT chr2 60515237 60515258 60515254 60515259 +
tttcactttctccccagggagg

SEQ ID NO: 203424 - DNA, 22 bp, Artificial Sequence
  Synthetic oligonucleotide; TTT chr2 60515238 60515259 60515255 60515260 +
ttcactttctccccagggagga

SEQ ID NO: 203425 - DNA, 22 bp, Artificial Sequence
  Synthetic oligonucleotide; TTT chr2 60515239 60515260 60515256 60515261 +
tcactttctccccagggaggaa

SEQ ID NO: 203426 - DNA, 22 bp, Artificial Sequence
  Synthetic oligonucleotide; TTT chr2 60515240 60515261 60515257 60515262 +
cactttctccccagggaggaag

SEQ ID NO: 203427 - DNA, 22 bp, Artificial Sequence
  Synthetic oligonucleotide; TTC chr2 60515241 60515262 60515258 60515263 +
actttctccccagggaggaagg

SEQ ID NO: 203428 - DNA, 22 bp, Artificial Sequence
  Synthetic oligonucleotide; CTT chr2 60515245 60515266 60515262 60515267 +
tctccccagggaggaaggggga

SEQ ID NO: 203429 - DNA, 22 bp, Artificial Sequence
  Synthetic oligonucleotide; TTT chr2 60515246 60515267 60515263 60515268 +
ctccccagggaggaagggggaa

SEQ ID NO: 203430 - DNA, 22 bp, Artificial Sequence
  Synthetic oligonucleotide; TTC chr2 60515247 60515268 60515264 60515269 +
tccccagggaggaagggggaaa

SEQ ID NO: 203431 - DNA, 22 bp, Artificial Sequence
  Synthetic oligonucleotide; CTC chr2 60515249 60515270 60515266 60515271 +
cccagggaggaagggggaaata

SEQ ID NO: 203432 - DNA, 22 bp, Artificial Sequence
  Synthetic oligonucleotide; CTT chr2 60515276 60515297 60515293 60515298 +
gcccagcctcacaccttccctg

SEQ ID NO: 203433 - DNA, 22 bp, Artificial Sequence
  Synthetic oligonucleotide; TTG chr2 60515277 60515298 60515294 60515299 +
cccagcctcacaccttccctgg

SEQ ID NO: 203434 - DNA, 22 bp, Artificial Sequence
  Synthetic oligonucleotide; CTC chr2 60515286 60515307 60515303 60515308 +
acaccttccctggacagggagc

SEQ ID NO: 203435 - DNA, 22 bp, Artificial Sequence
  Synthetic oligonucleotide; CTT chr2 60515293 60515314 60515310 60515315 +
ccctggacagggagctggggat

SEQ ID NO: 203436 - DNA, 22 bp, Artificial Sequence
  Synthetic oligonucleotide; TTC chr2 60515294 60515315 60515311 60515316 +
cctggacagggagctggggatc

SEQ ID NO: 203437 - DNA, 22 bp, Artificial Sequence
  Synthetic oligonucleotide; CTG chr2 60515298 60515319 60515315 60515320 +
gacagggagctggggatccatt

SEQ ID NO: 203438 - DNA, 22 bp, Artificial Sequence
  Synthetic oligonucleotide; CTG chr2 60515310 60515331 60515327 60515332 +
gggatccattcaaagcccggtc

SEQ ID NO: 203439 - DNA, 22 bp, Artificial Sequence
  Synthetic oligonucleotide; TTC chr2 60515321 60515342 60515338 60515343 +
aaagcccggtctttctctgttc

SEQ ID NO: 203440 - DNA, 22 bp, Artificial Sequence
  Synthetic oligonucleotide; CTT chr2 60515334 60515355 60515351 60515356 +
tctctgttcaatcaagcagcgt

SEQ ID NO: 203441 - DNA, 22 bp, Artificial Sequence
  Synthetic oligonucleotide; TTT chr2 60515335 60515356 60515352 60515357 +
ctctgttcaatcaagcagcgtg

SEQ ID NO: 203442 - DNA, 22 bp, Artificial Sequence
  Synthetic oligonucleotide; TTC chr2 60515336 60515357 60515353 60515358 +
tctgttcaatcaagcagcgtga

SEQ ID NO: 203443 - DNA, 22 bp, Artificial Sequence
  Synthetic oligonucleotide; CTC chr2 60515338 60515359 60515355 60515360 +
tgttcaatcaagcagcgtgagc

SEQ ID NO: 203444 - DNA, 22 bp, Artificial Sequence
  Synthetic oligonucleotide; CTG chr2 60515340 60515361 60515357 60515362 +
ttcaatcaagcagcgtgagcaa

SEQ ID NO: 203445 - DNA, 22 bp, Artificial Sequence
  Synthetic oligonucleotide; TTC chr2 60515343 60515364 60515360 60515365 +
aatcaagcagcgtgagcaaagt

SEQ ID NO: 203446 - DNA, 22 bp, Artificial Sequence
  Synthetic oligonucleotide; TTA chr2 60515373 60515394 60515390 60515395 +
aatactacatatgaaccagcat

SEQ ID NO: 203447 - DNA, 22 bp, Artificial Sequence
  Synthetic oligonucleotide; CTA chr2 60515380 60515401 60515397 60515402 +
catatgaaccagcattatgtta

SEQ ID NO: 203448 - DNA, 22 bp, Artificial Sequence
  Synthetic oligonucleotide; TTA chr2 60515397 60515418 60515414 60515419 +
tgttaggcaccaagaaggcaca

SEQ ID NO: 203449 - DNA, 22 bp, Artificial Sequence
  Synthetic oligonucleotide; TTA chr2 60515402 60515423 60515419 60515424 +
ggcaccaagaaggcacaaaaaa

SEQ ID NO: 203450 - DNA, 22 bp, Artificial Sequence
  Synthetic oligonucleotide; CTC chr2 60515437 60515458 60515454 60515459 +
ctgccctccaaaaggttataat

SEQ ID NO: 203451 - DNA, 22 bp, Artificial Sequence
  Synthetic oligonucleotide; CTG chr2 60515440 60515461 60515457 60515462 +
ccctccaaaaggttataatttg

SEQ ID NO: 203452 - DNA, 22 bp, Artificial Sequence
  Synthetic oligonucleotide; CTC chr2 60515445 60515466 60515462 60515467 +
caaaaggttataatttgaggag

SEQ ID NO: 203453 - DNA, 22 bp, Artificial Sequence
  Synthetic oligonucleotide; TTA chr2 60515455 60515476 60515472 60515477 +
taatttgaggaggagaaaatac

SEQ ID NO: 203454 - DNA, 22 bp, Artificial Sequence
  Synthetic oligonucleotide; TTT chr2 60515461 60515482 60515478 60515483 +
gaggaggagaaaatacacccac

SEQ ID NO: 203455 - DNA, 22 bp, Artificial Sequence
  Synthetic oligonucleotide; TTG chr2 60515462 60515483 60515479 60515484 +
aggaggagaaaatacacccacg

SEQ ID NO: 203456 - DNA, 22 bp, Artificial Sequence
  Synthetic oligonucleotide; CTG chr2 60515504 60515525 60515521 60515526 +
atccccttttaactaatcccag

SEQ ID NO: 203457 - DNA, 22 bp, Artificial Sequence
  Synthetic oligonucleotide; CTT chr2 60515512 60515533 60515529 60515534 +
ttaactaatcccagagtgacac

SEQ ID NO: 203458 - DNA, 22 bp, Artificial Sequence
  Synthetic oligonucleotide; TTT chr2 60515513 60515534 60515530 60515535 +
taactaatcccagagtgacacc

SEQ ID NO: 203459 - DNA, 22 bp, Artificial Sequence
  Synthetic oligonucleotide; TTT chr2 60515514 60515535 60515531 60515536 +
aactaatcccagagtgacacct

SEQ ID NO: 203460 - DNA, 22 bp, Artificial Sequence
  Synthetic oligonucleotide; TTA chr2 60515515 60515536 60515532 60515537 +
actaatcccagagtgacacctc

SEQ ID NO: 203461 - DNA, 22 bp, Artificial Sequence
  Synthetic oligonucleotide; CTA chr2 60515519 60515540 60515536 60515541 +
atcccagagtgacacctcctcc

SEQ ID NO: 203462 - DNA, 22 bp, Artificial Sequence
  Synthetic oligonucleotide; CTC chr2 60515537 60515558 60515554 60515559 +
ctccaaagaaagccaagttgct

SEQ ID NO: 203463 - DNA, 22 bp, Artificial Sequence
  Synthetic oligonucleotide; CTC chr2 60515540 60515561 60515557 60515562 +
caaagaaagccaagttgctgac

SEQ ID NO: 203464 - DNA, 22 bp, Artificial Sequence
  Synthetic oligonucleotide; TTG chr2 60515557 60515578 60515574 60515579 +
ctgacagagtcaggccttccta

SEQ ID NO: 203465 - DNA, 22 bp, Artificial Sequence
  Synthetic oligonucleotide; CTG chr2 60515560 60515581 60515577 60515582 +
acagagtcaggccttcctagtt

SEQ ID NO: 203466 - DNA, 22 bp, Artificial Sequence
  Synthetic oligonucleotide; CTT chr2 60515575 60515596 60515592 60515597 +
cctagttacctagaaaaatggc

SEQ ID NO: 203467 - DNA, 22 bp, Artificial Sequence
  Synthetic oligonucleotide; TTC chr2 60515576 60515597 60515593 60515598 +
ctagttacctagaaaaatggcc

SEQ ID NO: 203468 - DNA, 22 bp, Artificial Sequence
  Synthetic oligonucleotide; CTA chr2 60515579 60515600 60515596 60515601 +
gttacctagaaaaatggcctgg

SEQ ID NO: 203469 - DNA, 22 bp, Artificial Sequence
  Synthetic oligonucleotide; TTA chr2 60515583 60515604 60515600 60515605 +
cctagaaaaatggcctggggag

SEQ ID NO: 203470 - DNA, 22 bp, Artificial Sequence
  Synthetic oligonucleotide; CTA chr2 60515587 60515608 60515604 60515609 +
gaaaaatggcctggggaggtcc

SEQ ID NO: 203471 - DNA, 22 bp, Artificial Sequence
  Synthetic oligonucleotide; CTG chr2 60515600 60515621 60515617 60515622 +
gggaggtccagcccactagaag

SEQ ID NO: 203472 - DNA, 22 bp, Artificial Sequence
  Synthetic oligonucleotide; CTA chr2 60515618 60515639 60515635 60515640 +
gaaggagatacagaaacaagcc

SEQ ID NO: 203473 - DNA, 22 bp, Artificial Sequence
  Synthetic oligonucleotide; CTC chr2 60515643 60515664 60515660 60515665 +
cataaatatctgtgggacccag

SEQ ID NO: 203474 - DNA, 22 bp, Artificial Sequence
  Synthetic oligonucleotide; CTG chr2 60515655 60515676 60515672 60515677 +
tgggacccagctacctctctga

SEQ ID NO: 203475 - DNA, 22 bp, Artificial Sequence
  Synthetic oligonucleotide; CTA chr2 60515668 60515689 60515685 60515690 +
cctctctgaaacacagcccagt

SEQ ID NO: 203476 - DNA, 22 bp, Artificial Sequence
  Synthetic oligonucleotide; CTC chr2 60515672 60515693 60515689 60515694 +
tctgaaacacagcccagtgctt

SEQ ID NO: 203477 - DNA, 22 bp, Artificial Sequence
  Synthetic oligonucleotide; CTC chr2 60515674 60515695 60515691 60515696 +
tgaaacacagcccagtgctttc

SEQ ID NO: 203478 - DNA, 22 bp, Artificial Sequence
  Synthetic oligonucleotide; CTG chr2 60515676 60515697 60515693 60515698 +
aaacacagcccagtgctttcag

SEQ ID NO: 203479 - DNA, 22 bp, Artificial Sequence
  Synthetic oligonucleotide; CTT chr2 60515694 60515715 60515711 60515716 +
tcaggcagggagaaagtggtgg

SEQ ID NO: 203480 - DNA, 22 bp, Artificial Sequence
  Synthetic oligonucleotide; TTT chr2 60515695 60515716 60515712 60515717 +
caggcagggagaaagtggtggt

SEQ ID NO: 203481 - DNA, 22 bp, Artificial Sequence
  Synthetic oligonucleotide; TTC chr2 60515696 60515717 60515713 60515718 +
aggcagggagaaagtggtggtg

SEQ ID NO: 203482 - DNA, 22 bp, Artificial Sequence
  Synthetic oligonucleotide; CTG chr2 60515746 60515767 60515763 60515768 +
acacagacatgggggcttccaa

SEQ ID NO: 203483 - DNA, 22 bp, Artificial Sequence
  Synthetic oligonucleotide; CTT chr2 60515764 60515785 60515781 60515786 +
ccaaatgactcttgatcaccca

SEQ ID NO: 203484 - DNA, 22 bp, Artificial Sequence
  Synthetic oligonucleotide; TTC chr2 60515765 60515786 60515782 60515787 +
caaatgactcttgatcacccaa

SEQ ID NO: 203485 - DNA, 22 bp, Artificial Sequence
  Synthetic oligonucleotide; CTC chr2 60515775 60515796 60515792 60515797 +
ttgatcacccaactttccagct

SEQ ID NO: 203486 - DNA, 22 bp, Artificial Sequence
  Synthetic oligonucleotide; CTT chr2 60515777 60515798 60515794 60515799 +
gatcacccaactttccagcttc

SEQ ID NO: 203487 - DNA, 22 bp, Artificial Sequence
  Synthetic oligonucleotide; TTG chr2 60515778 60515799 60515795 60515800 +
atcacccaactttccagcttcc

SEQ ID NO: 203488 - DNA, 22 bp, Artificial Sequence
  Synthetic oligonucleotide; CTT chr2 60515790 60515811 60515807 60515812 +
tccagcttccccatttctgccc

SEQ ID NO: 203489 - DNA, 22 bp, Artificial Sequence
  Synthetic oligonucleotide; TTT chr2 60515791 60515812 60515808 60515813 +
ccagcttccccatttctgcccc

SEQ ID NO: 203490 - DNA, 22 bp, Artificial Sequence
  Synthetic oligonucleotide; TTC chr2 60515792 60515813 60515809 60515814 +
cagcttccccatttctgcccct

SEQ ID NO: 203491 - DNA, 22 bp, Artificial Sequence
  Synthetic oligonucleotide; CTT chr2 60515798 60515819 60515815 60515820 +
ccccatttctgcccctgacttg

SEQ ID NO: 203492 - DNA, 22 bp, Artificial Sequence
  Synthetic oligonucleotide; TTC chr2 60515799 60515820 60515816 60515821 +
cccatttctgcccctgacttga

SEQ ID NO: 203493 - DNA, 22 bp, Artificial Sequence
  Synthetic oligonucleotide; TTT chr2 60515806 60515827 60515823 60515828 +
ctgcccctgacttgagctccca

SEQ ID NO: 203494 - DNA, 22 bp, Artificial Sequence
  Synthetic oligonucleotide; TTC chr2 60515807 60515828 60515824 60515829 +
tgcccctgacttgagctcccag

SEQ ID NO: 203495 - DNA, 22 bp, Artificial Sequence
  Synthetic oligonucleotide; CTG chr2 60515809 60515830 60515826 60515831 +
cccctgacttgagctcccaggc

SEQ ID NO: 203496 - DNA, 22 bp, Artificial Sequence
  Synthetic oligonucleotide; CTG chr2 60515815 60515836 60515832 60515837 +
acttgagctcccaggccactca

SEQ ID NO: 203497 - DNA, 22 bp, Artificial Sequence
  Synthetic oligonucleotide; CTT chr2 60515819 60515840 60515836 60515841 +
gagctcccaggccactcaaccc

SEQ ID NO: 203498 - DNA, 22 bp, Artificial Sequence
  Synthetic oligonucleotide; TTG chr2 60515820 60515841 60515837 60515842 +
agctcccaggccactcaaccca

SEQ ID NO: 203499 - DNA, 22 bp, Artificial Sequence
  Synthetic oligonucleotide; CTC chr2 60515825 60515846 60515842 60515847 +
ccaggccactcaacccactgtg

SEQ ID NO: 203500 - DNA, 22 bp, Artificial Sequence
  Synthetic oligonucleotide; CTC chr2 60515836 60515857 60515853 60515858 +
aacccactgtgaggtcttactg

SEQ ID NO: 203501 - DNA, 22 bp, Artificial Sequence
  Synthetic oligonucleotide; CTG chr2 60515845 60515866 60515862 60515867 +
tgaggtcttactgtggggatta

SEQ ID NO: 203502 - DNA, 22 bp, Artificial Sequence
  Synthetic oligonucleotide; CTT chr2 60515854 60515875 60515871 60515876 +
actgtggggattaccgagtcac

SEQ ID NO: 203503 - DNA, 22 bp, Artificial Sequence
  Synthetic oligonucleotide; TTA chr2 60515855 60515876 60515872 60515877 +
ctgtggggattaccgagtcacc

SEQ ID NO: 203504 - DNA, 22 bp, Artificial Sequence
  Synthetic oligonucleotide; CTG chr2 60515858 60515879 60515875 60515880 +
tggggattaccgagtcaccacc

SEQ ID NO: 203505 - DNA, 22 bp, Artificial Sequence
  Synthetic oligonucleotide; TTA chr2 60515867 60515888 60515884 60515889 +
ccgagtcaccaccaggctgcgc

SEQ ID NO: 203506 - DNA, 22 bp, Artificial Sequence
  Synthetic oligonucleotide; CTG chr2 60515886 60515907 60515903 60515908 +
cgctgaacaggaagtgaacaag

SEQ ID NO: 203507 - DNA, 22 bp, Artificial Sequence
  Synthetic oligonucleotide; CTG chr2 60515891 60515912 60515908 60515913 +
aacaggaagtgaacaagtcaat

SEQ ID NO: 203508 - DNA, 22 bp, Artificial Sequence
  Synthetic oligonucleotide; TTC chr2 60515915 60515936 60515932 60515937 +
gagaaagatccaataagggaat

SEQ ID NO: 203509 - DNA, 22 bp, Artificial Sequence
  Synthetic oligonucleotide; TTC chr2 60515941 60515962 60515958 60515963 +
tctgggcaccgctgggccaaca

SEQ ID NO: 203510 - DNA, 22 bp, Artificial Sequence
  Synthetic oligonucleotide; CTC chr2 60515943 60515964 60515960 60515965 +
tgggcaccgctgggccaacacc

SEQ ID NO: 203511 - DNA, 22 bp, Artificial Sequence
  Synthetic oligonucleotide; CTG chr2 60515945 60515966 60515962 60515967 +
ggcaccgctgggccaacaccca

SEQ ID NO: 203512 - DNA, 22 bp, Artificial Sequence
  Synthetic oligonucleotide; CTG chr2 60515955 60515976 60515972 60515977 +
ggccaacacccacggaggggtc

SEQ ID NO: 203513 - DNA, 22 bp, Artificial Sequence
  Synthetic oligonucleotide; CTG chr2 60515980 60516001 60515997 60516002 +
gaatacaaataccctggagtct

SEQ ID NO: 203514 - DNA, 22 bp, Artificial Sequence
  Synthetic oligonucleotide; CTG chr2 60515996 60516017 60516013 60516018 +
gagtctgaagggcggtggcccc

SEQ ID NO: 203515 - DNA, 22 bp, Artificial Sequence
  Synthetic oligonucleotide; CTG chr2 60516003 60516024 60516020 60516025 +
aagggcggtggcccctcttctc

SEQ ID NO: 203516 - DNA, 22 bp, Artificial Sequence
  Synthetic oligonucleotide; CTC chr2 60516020 60516041 60516037 60516042 +
ttctcaccacttcaattatgtc

SEQ ID NO: 203517 - DNA, 22 bp, Artificial Sequence
  Synthetic oligonucleotide; CTT chr2 60516022 60516043 60516039 60516044 +
ctcaccacttcaattatgtctt

SEQ ID NO: 203518 - DNA, 22 bp, Artificial Sequence
  Synthetic oligonucleotide; TTC chr2 60516023 60516044 60516040 60516045 +
tcaccacttcaattatgtcttc

SEQ ID NO: 203519 - DNA, 22 bp, Artificial Sequence
  Synthetic oligonucleotide; CTC chr2 60516025 60516046 60516042 60516047 +
accacttcaattatgtcttcat

SEQ ID NO: 203520 - DNA, 22 bp, Artificial Sequence
  Synthetic oligonucleotide; CTT chr2 60516032 60516053 60516049 60516054 +
caattatgtcttcattgaactg

SEQ ID NO: 203521 - DNA, 22 bp, Artificial Sequence
  Synthetic oligonucleotide; TTC chr2 60516033 60516054 60516050 60516055 +
aattatgtcttcattgaactgg

SEQ ID NO: 203522 - DNA, 22 bp, Artificial Sequence
  Synthetic oligonucleotide; TTA chr2 60516038 60516059 60516055 60516060 +
tgtcttcattgaactgggttat

SEQ ID NO: 203523 - DNA, 22 bp, Artificial Sequence
  Synthetic oligonucleotide; CTT chr2 60516044 60516065 60516061 60516066 +
cattgaactgggttatgaaaaa

SEQ ID NO: 203524 - DNA, 22 bp, Artificial Sequence
  Synthetic oligonucleotide; TTC chr2 60516045 60516066 60516062 60516067 +
attgaactgggttatgaaaaag

SEQ ID NO: 203525 - DNA, 22 bp, Artificial Sequence
  Synthetic oligonucleotide; TTG chr2 60516049 60516070 60516066 60516071 +
aactgggttatgaaaaagggaa

SEQ ID NO: 203526 - DNA, 22 bp, Artificial Sequence
  Synthetic oligonucleotide; CTG chr2 60516054 60516075 60516071 60516076 +
ggttatgaaaaagggaagcagg

SEQ ID NO: 203527 - DNA, 22 bp, Artificial Sequence
  Synthetic oligonucleotide; TTA chr2 60516059 60516080 60516076 60516081 +
tgaaaaagggaagcagggattg

SEQ ID NO: 203528 - DNA, 22 bp, Artificial Sequence
  Synthetic oligonucleotide; TTG chr2 60516081 60516102 60516098 60516103 +
aaaatctagccttgtggccata

SEQ ID NO: 203529 - DNA, 22 bp, Artificial Sequence
  Synthetic oligonucleotide; CTA chr2 60516089 60516110 60516106 60516111 +
gccttgtggccataagcctgtg

SEQ ID NO: 203530 - DNA, 22 bp, Artificial Sequence
  Synthetic oligonucleotide; CTT chr2 60516094 60516115 60516111 60516116 +
gtggccataagcctgtgatgac

SEQ ID NO: 203531 - DNA, 22 bp, Artificial Sequence
  Synthetic oligonucleotide; TTG chr2 60516095 60516116 60516112 60516117 +
tggccataagcctgtgatgact

SEQ ID NO: 203532 - DNA, 22 bp, Artificial Sequence
  Synthetic oligonucleotide; CTG chr2 60516109 60516130 60516126 60516131 +
tgatgactcatgccagctttgg

SEQ ID NO: 203533 - DNA, 22 bp, Artificial Sequence
  Synthetic oligonucleotide; CTC chr2 60516118 60516139 60516135 60516140 +
atgccagctttgggtgctctaa

SEQ ID NO: 203534 - DNA, 22 bp, Artificial Sequence
  Synthetic oligonucleotide; CTT chr2 60516128 60516149 60516145 60516150 +
tgggtgctctaagatgctttcc

SEQ ID NO: 203535 - DNA, 22 bp, Artificial Sequence
  Synthetic oligonucleotide; TTT chr2 60516129 60516150 60516146 60516151 +
gggtgctctaagatgctttccc

SEQ ID NO: 203536 - DNA, 22 bp, Artificial Sequence
  Synthetic oligonucleotide; TTG chr2 60516130 60516151 60516147 60516152 +
ggtgctctaagatgctttccca

SEQ ID NO: 203537 - DNA, 22 bp, Artificial Sequence
  Synthetic oligonucleotide; CTC chr2 60516137 60516158 60516154 60516159 +
taagatgctttcccatgtctgt

SEQ ID NO: 203538 - DNA, 22 bp, Artificial Sequence
  Synthetic oligonucleotide; CTA chr2 60516139 60516160 60516156 60516161 +
agatgctttcccatgtctgtaa

SEQ ID NO: 203539 - DNA, 22 bp, Artificial Sequence
  Synthetic oligonucleotide; CTT chr2 60516147 60516168 60516164 60516169 +
tcccatgtctgtaatgcttttc

SEQ ID NO: 203540 - DNA, 22 bp, Artificial Sequence
  Synthetic oligonucleotide; TTT chr2 60516148 60516169 60516165 60516170 +
cccatgtctgtaatgcttttca

SEQ ID NO: 203541 - DNA, 22 bp, Artificial Sequence
  Synthetic oligonucleotide; TTC chr2 60516149 60516170 60516166 60516171 +
ccatgtctgtaatgcttttcat

SEQ ID NO: 203542 - DNA, 22 bp, Artificial Sequence
  Synthetic oligonucleotide; CTG chr2 60516158 60516179 60516175 60516180 +
taatgcttttcatatcatccta

SEQ ID NO: 203543 - DNA, 22 bp, Artificial Sequence
  Synthetic oligonucleotide; CTT chr2 60516166 60516187 60516183 60516188 +
ttcatatcatcctacacactca

SEQ ID NO: 203544 - DNA, 22 bp, Artificial Sequence
  Synthetic oligonucleotide; TTT chr2 60516167 60516188 60516184 60516189 +
tcatatcatcctacacactcac

SEQ ID NO: 203545 - DNA, 22 bp, Artificial Sequence
  Synthetic oligonucleotide; TTT chr2 60516168 60516189 60516185 60516190 +
catatcatcctacacactcact

SEQ ID NO: 203546 - DNA, 22 bp, Artificial Sequence
  Synthetic oligonucleotide; TTC chr2 60516169 60516190 60516186 60516191 +
atatcatcctacacactcactg

SEQ ID NO: 203547 - DNA, 22 bp, Artificial Sequence
  Synthetic oligonucleotide; CTA chr2 60516180 60516201 60516197 60516202 +
cacactcactgtcacctctcct

SEQ ID NO: 203548 - DNA, 22 bp, Artificial Sequence
  Synthetic oligonucleotide; CTC chr2 60516187 60516208 60516204 60516209 +
actgtcacctctcctcacccca

SEQ ID NO: 203549 - DNA, 22 bp, Artificial Sequence
  Synthetic oligonucleotide; CTG chr2 60516191 60516212 60516208 60516213 +
tcacctctcctcaccccagcac

SEQ ID NO: 203550 - DNA, 22 bp, Artificial Sequence
  Synthetic oligonucleotide; CTC chr2 60516198 60516219 60516215 60516220 +
tcctcaccccagcacacagaaa

SEQ ID NO: 203551 - DNA, 22 bp, Artificial Sequence
  Synthetic oligonucleotide; CTC chr2 60516200 60516221 60516217 60516222 +
ctcaccccagcacacagaaaag

SEQ ID NO: 203552 - DNA, 22 bp, Artificial Sequence
  Synthetic oligonucleotide; CTC chr2 60516203 60516224 60516220 60516225 +
accccagcacacagaaaagatg

SEQ ID NO: 203553 - DNA, 22 bp, Artificial Sequence
  Synthetic oligonucleotide; CTT chr2 60516230 60516251 60516247 60516252 +
attatgtgcacttaggttttgt

SEQ ID NO: 203554 - DNA, 22 bp, Artificial Sequence
  Synthetic oligonucleotide; TTA chr2 60516231 60516252 60516248 60516253 +
ttatgtgcacttaggttttgtt

SEQ ID NO: 203555 - DNA, 22 bp, Artificial Sequence
  Synthetic oligonucleotide; TTA chr2 60516234 60516255 60516251 60516256 +
tgtgcacttaggttttgttgta

SEQ ID NO: 203556 - DNA, 22 bp, Artificial Sequence
  Synthetic oligonucleotide; CTT chr2 60516243 60516264 60516260 60516265 +
aggttttgttgtactattaaac

SEQ ID NO: 203557 - DNA, 22 bp, Artificial Sequence
  Synthetic oligonucleotide; TTA chr2 60516244 60516265 60516261 60516266 +
ggttttgttgtactattaaaca

SEQ ID NO: 203558 - DNA, 22 bp, Artificial Sequence
  Synthetic oligonucleotide; TTT chr2 60516249 60516270 60516266 60516271 +
tgttgtactattaaacacaatg

SEQ ID NO: 203559 - DNA, 22 bp, Artificial Sequence
  Synthetic oligonucleotide; TTT chr2 60516250 60516271 60516267 60516272 +
gttgtactattaaacacaatga

SEQ ID NO: 203560 - DNA, 22 bp, Artificial Sequence
  Synthetic oligonucleotide; TTG chr2 60516251 60516272 60516268 60516273 +
ttgtactattaaacacaatgac

SEQ ID NO: 203561 - DNA, 22 bp, Artificial Sequence
  Synthetic oligonucleotide; TTG chr2 60516254 60516275 60516271 60516276 +
tactattaaacacaatgaccca

SEQ ID NO: 203562 - DNA, 22 bp, Artificial Sequence
  Synthetic oligonucleotide; CTA chr2 60516259 60516280 60516276 60516281 +
ttaaacacaatgacccactcct

SEQ ID NO: 203563 - DNA, 22 bp, Artificial Sequence
  Synthetic oligonucleotide; TTA chr2 60516262 60516283 60516279 60516284 +
aacacaatgacccactcctatt

SEQ ID NO: 203564 - DNA, 22 bp, Artificial Sequence
  Synthetic oligonucleotide; CTC chr2 60516279 60516300 60516296 60516301 +
ctattattaaaacacaggtttt

SEQ ID NO: 203565 - DNA, 22 bp, Artificial Sequence
  Synthetic oligonucleotide; CTA chr2 60516282 60516303 60516299 60516304 +
ttattaaaacacaggttttgct

SEQ ID NO: 203566 - DNA, 22 bp, Artificial Sequence
  Synthetic oligonucleotide; TTA chr2 60516285 60516306 60516302 60516307 +
ttaaaacacaggttttgctgga

SEQ ID NO: 203567 - DNA, 22 bp, Artificial Sequence
  Synthetic oligonucleotide; TTA chr2 60516288 60516309 60516305 60516310 +
aaacacaggttttgctggaaac

SEQ ID NO: 203568 - DNA, 22 bp, Artificial Sequence
  Synthetic oligonucleotide; TTT chr2 60516300 60516321 60516317 60516322 +
tgctggaaactcaaaaaagact

SEQ ID NO: 203569 - DNA, 22 bp, Artificial Sequence
  Synthetic oligonucleotide; TTT chr2 60516301 60516322 60516318 60516323 +
gctggaaactcaaaaaagactt

SEQ ID NO: 203570 - DNA, 22 bp, Artificial Sequence
  Synthetic oligonucleotide; TTG chr2 60516302 60516323 60516319 60516324 +
ctggaaactcaaaaaagacttg

SEQ ID NO: 203571 - DNA, 22 bp, Artificial Sequence
  Synthetic oligonucleotide; CTG chr2 60516305 60516326 60516322 60516327 +
gaaactcaaaaaagacttggct

SEQ ID NO: 203572 - DNA, 22 bp, Artificial Sequence
  Synthetic oligonucleotide; CTC chr2 60516312 60516333 60516329 60516334 +
aaaaaagacttggctctgctgg

SEQ ID NO: 203573 - DNA, 22 bp, Artificial Sequence
  Synthetic oligonucleotide; CTT chr2 60516323 60516344 60516340 60516345 +
ggctctgctggctcacagggaa

SEQ ID NO: 203574 - DNA, 22 bp, Artificial Sequence
  Synthetic oligonucleotide; TTG chr2 60516324 60516345 60516341 60516346 +
gctctgctggctcacagggaat

SEQ ID NO: 203575 - DNA, 22 bp, Artificial Sequence
  Synthetic oligonucleotide; CTC chr2 60516328 60516349 60516345 60516350 +
tgctggctcacagggaatctgg

SEQ ID NO: 203576 - DNA, 22 bp, Artificial Sequence
  Synthetic oligonucleotide; CTG chr2 60516330 60516351 60516347 60516352 +
ctggctcacagggaatctgggc

SEQ ID NO: 203577 - DNA, 22 bp, Artificial Sequence
  Synthetic oligonucleotide; CTG chr2 60516333 60516354 60516350 60516355 +
gctcacagggaatctgggctcc

SEQ ID NO: 203578 - DNA, 22 bp, Artificial Sequence
  Synthetic oligonucleotide; CTC chr2 60516337 60516358 60516354 60516359 +
acagggaatctgggctccgctc

SEQ ID NO: 203579 - DNA, 22 bp, Artificial Sequence
  Synthetic oligonucleotide; CTG chr2 60516349 60516370 60516366 60516371 +
ggctccgctcttccaaaacctt

SEQ ID NO: 203580 - DNA, 22 bp, Artificial Sequence
  Synthetic oligonucleotide; CTC chr2 60516354 60516375 60516371 60516376 +
cgctcttccaaaacctttgttc

SEQ ID NO: 203581 - DNA, 22 bp, Artificial Sequence
  Synthetic oligonucleotide; CTC chr2 60516359 60516380 60516376 60516381 +
ttccaaaacctttgttctccag

SEQ ID NO: 203582 - DNA, 22 bp, Artificial Sequence
  Synthetic oligonucleotide; CTT chr2 60516361 60516382 60516378 60516383 +
ccaaaacctttgttctccagat

SEQ ID NO: 203583 - DNA, 22 bp, Artificial Sequence
  Synthetic oligonucleotide; TTC chr2 60516362 60516383 60516379 60516384 +
caaaacctttgttctccagatg

SEQ ID NO: 203584 - DNA, 22 bp, Artificial Sequence
  Synthetic oligonucleotide; CTT chr2 60516371 60516392 60516388 60516393 +
tgttctccagatgtcagtgcaa

SEQ ID NO: 203585 - DNA, 22 bp, Artificial Sequence
  Synthetic oligonucleotide; TTT chr2 60516372 60516393 60516389 60516394 +
gttctccagatgtcagtgcaaa

SEQ ID NO: 203586 - DNA, 22 bp, Artificial Sequence
  Synthetic oligonucleotide; TTG chr2 60516373 60516394 60516390 60516395 +
ttctccagatgtcagtgcaaag

SEQ ID NO: 203587 - DNA, 22 bp, Artificial Sequence
  Synthetic oligonucleotide; TTC chr2 60516376 60516397 60516393 60516398 +
tccagatgtcagtgcaaagtta

SEQ ID NO: 203588 - DNA, 22 bp, Artificial Sequence
  Synthetic oligonucleotide; CTC chr2 60516378 60516399 60516395 60516400 +
cagatgtcagtgcaaagttatg

SEQ ID NO: 203589 - DNA, 22 bp, Artificial Sequence
  Synthetic oligonucleotide; TTA chr2 60516398 60516419 60516415 60516420 +
tgaacagctctccccctgagct

SEQ ID NO: 203590 - DNA, 22 bp, Artificial Sequence
  Synthetic oligonucleotide; CTC chr2 60516408 60516429 60516425 60516430 +
tccccctgagctaacttaccga

SEQ ID NO: 203591 - DNA, 22 bp, Artificial Sequence
  Synthetic oligonucleotide; CTC chr2 60516410 60516431 60516427 60516432 +
cccctgagctaacttaccgagc

SEQ ID NO: 203592 - DNA, 22 bp, Artificial Sequence
  Synthetic oligonucleotide; CTG chr2 60516416 60516437 60516433 60516438 +
agctaacttaccgagcagtaag

SEQ ID NO: 203593 - DNA, 22 bp, Artificial Sequence
  Synthetic oligonucleotide; CTA chr2 60516421 60516442 60516438 60516443 +
acttaccgagcagtaagtgagg

SEQ ID NO: 203594 - DNA, 22 bp, Artificial Sequence
  Synthetic oligonucleotide; CTT chr2 60516425 60516446 60516442 60516447 +
accgagcagtaagtgaggcaag

SEQ ID NO: 203595 - DNA, 22 bp, Artificial Sequence
  Synthetic oligonucleotide; TTA chr2 60516426 60516447 60516443 60516448 +
ccgagcagtaagtgaggcaaga

SEQ ID NO: 203596 - DNA, 22 bp, Artificial Sequence
  Synthetic oligonucleotide; CTC chr2 60516458 60516479 60516475 60516480 +
actatatttctcagcctccatg

SEQ ID NO: 203597 - DNA, 22 bp, Artificial Sequence
  Synthetic oligonucleotide; CTA chr2 60516462 60516483 60516479 60516484 +
tatttctcagcctccatgaagt

SEQ ID NO: 203598 - DNA, 22 bp, Artificial Sequence
  Synthetic oligonucleotide; TTT chr2 60516467 60516488 60516484 60516489 +
ctcagcctccatgaagtcgtca

SEQ ID NO: 203599 - DNA, 22 bp, Artificial Sequence
  Synthetic oligonucleotide; TTC chr2 60516468 60516489 60516485 60516490 +
tcagcctccatgaagtcgtcac

SEQ ID NO: 203600 - DNA, 22 bp, Artificial Sequence
  Synthetic oligonucleotide; CTC chr2 60516470 60516491 60516487 60516492 +
agcctccatgaagtcgtcactg

SEQ ID NO: 203601 - DNA, 22 bp, Artificial Sequence
  Synthetic oligonucleotide; CTC chr2 60516476 60516497 60516493 60516498 +
catgaagtcgtcactgggagag

SEQ ID NO: 203602 - DNA, 22 bp, Artificial Sequence
  Synthetic oligonucleotide; CTG chr2 60516492 60516513 60516509 60516514 +
ggagaggagccaagagggaggg

SEQ ID NO: 203603 - DNA, 22 bp, Artificial Sequence
  Synthetic oligonucleotide; CTT chr2 60516522 60516543 60516539 60516544 +
aggagacaagatcgtaactcac

SEQ ID NO: 203604 - DNA, 22 bp, Artificial Sequence
  Synthetic oligonucleotide; TTA chr2 60516523 60516544 60516540 60516545 +
ggagacaagatcgtaactcacc

SEQ ID NO: 203605 - DNA, 22 bp, Artificial Sequence
  Synthetic oligonucleotide; CTC chr2 60516542 60516563 60516559 60516564 +
accgtcatccggggaagtggag

SEQ ID NO: 203606 - DNA, 22 bp, Artificial Sequence
  Synthetic oligonucleotide; CTC chr2 60516581 60516602 60516598 60516603 +
gtgtcaggagtggagagctaag

SEQ ID NO: 203607 - DNA, 22 bp, Artificial Sequence
  Synthetic oligonucleotide; CTA chr2 60516601 60516622 60516618 60516623 +
agctcaatatggacaaggacag

SEQ ID NO: 203608 - DNA, 22 bp, Artificial Sequence
  Synthetic oligonucleotide; CTC chr2 60516606 60516627 60516623 60516628 +
aatatggacaaggacagagagg

SEQ ID NO: 203609 - DNA, 22 bp, Artificial Sequence
  Synthetic oligonucleotide; CTG chr2 60516636 60516657 60516653 60516658 +
ggatgggagaaatgtggcatca

SEQ ID NO: 203610 - DNA, 22 bp, Artificial Sequence
  Synthetic oligonucleotide; CTG chr2 60516667 60516688 60516684 60516689 +
ggagtgaaagtttaactgccct

SEQ ID NO: 203611 - DNA, 22 bp, Artificial Sequence
  Synthetic oligonucleotide; TTT chr2 60516680 60516701 60516697 60516702 +
aactgccctcaaagatggctga

SEQ ID NO: 203612 - DNA, 22 bp, Artificial Sequence
  Synthetic oligonucleotide; TTA chr2 60516681 60516702 60516698 60516703 +
actgccctcaaagatggctgac

SEQ ID NO: 203613 - DNA, 22 bp, Artificial Sequence
  Synthetic oligonucleotide; CTG chr2 60516685 60516706 60516702 60516707 +
ccctcaaagatggctgacaaag

SEQ ID NO: 203614 - DNA, 22 bp, Artificial Sequence
  Synthetic oligonucleotide; CTC chr2 60516690 60516711 60516707 60516712 +
aaagatggctgacaaagatcta

SEQ ID NO: 203615 - DNA, 22 bp, Artificial Sequence
  Synthetic oligonucleotide; CTG chr2 60516701 60516722 60516718 60516723 +
acaaagatctagcattcctagt

SEQ ID NO: 203616 - DNA, 22 bp, Artificial Sequence
  Synthetic oligonucleotide; CTA chr2 60516712 60516733 60516729 60516734 +
gcattcctagtggacaccaagc

SEQ ID NO: 203617 - DNA, 22 bp, Artificial Sequence
  Synthetic oligonucleotide; TTC chr2 60516718 60516739 60516735 60516740 +
ctagtggacaccaagctgagca

SEQ ID NO: 203618 - DNA, 22 bp, Artificial Sequence
  Synthetic oligonucleotide; CTA chr2 60516721 60516742 60516738 60516743 +
gtggacaccaagctgagcatga

SEQ ID NO: 203619 - DNA, 22 bp, Artificial Sequence
  Synthetic oligonucleotide; CTG chr2 60516736 60516757 60516753 60516758 +
agcatgagtcatcaatgaagca

SEQ ID NO: 203620 - DNA, 22 bp, Artificial Sequence
  Synthetic oligonucleotide; CTG chr2 60516761 60516782 60516778 60516783 +
gtttttaaaaaagcaagcagga

SEQ ID NO: 203621 - DNA, 22 bp, Artificial Sequence
  Synthetic oligonucleotide; TTT chr2 60516765 60516786 60516782 60516787 +
ttaaaaaagcaagcaggacata

SEQ ID NO: 203622 - DNA, 22 bp, Artificial Sequence
  Synthetic oligonucleotide; TTT chr2 60516766 60516787 60516783 60516788 +
taaaaaagcaagcaggacataa

SEQ ID NO: 203623 - DNA, 22 bp, Artificial Sequence
  Synthetic oligonucleotide; TTT chr2 60516767 60516788 60516784 60516789 +
aaaaaagcaagcaggacataag

SEQ ID NO: 203624 - DNA, 22 bp, Artificial Sequence
  Synthetic oligonucleotide; TTA chr2 60516768 60516789 60516785 60516790 +
aaaaagcaagcaggacataaga

SEQ ID NO: 203625 - DNA, 22 bp, Artificial Sequence
  Synthetic oligonucleotide; CTA chr2 60516807 60516828 60516824 60516829 +
aagaatgtggaaaacactaaga

SEQ ID NO: 203626 - DNA, 22 bp, Artificial Sequence
  Synthetic oligonucleotide; CTA chr2 60516826 60516847 60516843 60516848 +
agatatcttgccattggactct

SEQ ID NO: 203627 - DNA, 22 bp, Artificial Sequence
  Synthetic oligonucleotide; CTT chr2 60516835 60516856 60516852 60516857 +
gccattggactctgtagttatc

SEQ ID NO: 203628 - DNA, 22 bp, Artificial Sequence
  Synthetic oligonucleotide; TTG chr2 60516836 60516857 60516853 60516858 +
ccattggactctgtagttatca

SEQ ID NO: 203629 - DNA, 22 bp, Artificial Sequence
  Synthetic oligonucleotide; TTG chr2 60516842 60516863 60516859 60516864 +
gactctgtagttatcagactaa

SEQ ID NO: 203630 - DNA, 22 bp, Artificial Sequence
  Synthetic oligonucleotide; CTC chr2 60516847 60516868 60516864 60516869 +
tgtagttatcagactaatgttt

SEQ ID NO: 203631 - DNA, 22 bp, Artificial Sequence
  Synthetic oligonucleotide; CTG chr2 60516849 60516870 60516866 60516871 +
tagttatcagactaatgtttga

SEQ ID NO: 203632 - DNA, 22 bp, Artificial Sequence
  Synthetic oligonucleotide; TTA chr2 60516855 60516876 60516872 60516877 +
tcagactaatgtttgagtaaaa

SEQ ID NO: 203633 - DNA, 22 bp, Artificial Sequence
  Synthetic oligonucleotide; CTA chr2 60516863 60516884 60516880 60516885 +
atgtttgagtaaaagagctgga

SEQ ID NO: 203634 - DNA, 22 bp, Artificial Sequence
  Synthetic oligonucleotide; TTT chr2 60516869 60516890 60516886 60516891 +
gagtaaaagagctggaaaacca

SEQ ID NO: 203635 - DNA, 22 bp, Artificial Sequence
  Synthetic oligonucleotide; TTG chr2 60516870 60516891 60516887 60516892 +
agtaaaagagctggaaaaccag

SEQ ID NO: 203636 - DNA, 22 bp, Artificial Sequence
  Synthetic oligonucleotide; CTG chr2 60516883 60516904 60516900 60516905 +
gaaaaccagcagattctaaaga

SEQ ID NO: 203637 - DNA, 22 bp, Artificial Sequence
  Synthetic oligonucleotide; TTC chr2 60516899 60516920 60516916 60516921 +
taaagagaggcatagaaacaat

SEQ ID NO: 203638 - DNA, 22 bp, Artificial Sequence
  Synthetic oligonucleotide; CTA chr2 60516901 60516922 60516918 60516923 +
aagagaggcatagaaacaataa

SEQ ID NO: 203639 - DNA, 22 bp, Artificial Sequence
  Synthetic oligonucleotide; TTA chr2 60516931 60516952 60516948 60516953 +
caagataatagatccatgagtt

SEQ ID NO: 203640 - DNA, 22 bp, Artificial Sequence
  Synthetic oligonucleotide; TTC chr2 60516954 60516975 60516971 60516976 +
aggttcaggaaagagattattt

SEQ ID NO: 203641 - DNA, 22 bp, Artificial Sequence
  Synthetic oligonucleotide; TTC chr2 60516960 60516981 60516977 60516982 +
aggaaagagattatttaggaag

SEQ ID NO: 203642 - DNA, 22 bp, Artificial Sequence
  Synthetic oligonucleotide; TTA chr2 60516973 60516994 60516990 60516995 +
tttaggaagaagaagtggcgga

SEQ ID NO: 203643 - DNA, 22 bp, Artificial Sequence
  Synthetic oligonucleotide; TTT chr2 60516976 60516997 60516993 60516998 +
aggaagaagaagtggcggagaa

SEQ ID NO: 203644 - DNA, 22 bp, Artificial Sequence
  Synthetic oligonucleotide; TTA chr2 60516977 60516998 60516994 60516999 +
ggaagaagaagtggcggagaat

SEQ ID NO: 203645 - DNA, 22 bp, Artificial Sequence
  Synthetic oligonucleotide; TTT chr2 60517029 60517050 60517046 60517051 +
cagcccaaagctggtgatgaga

SEQ ID NO: 203646 - DNA, 22 bp, Artificial Sequence
  Synthetic oligonucleotide; TTC chr2 60517030 60517051 60517047 60517052 +
agcccaaagctggtgatgagat

SEQ ID NO: 203647 - DNA, 22 bp, Artificial Sequence
  Synthetic oligonucleotide; CTG chr2 60517042 60517063 60517059 60517064 +
gtgatgagatactttgtcgtct

SEQ ID NO: 203648 - DNA, 22 bp, Artificial Sequence
  Synthetic oligonucleotide; CTT chr2 60517056 60517077 60517073 60517078 +
tgtcgtctctggaatgaagagg

SEQ ID NO: 203649 - DNA, 22 bp, Artificial Sequence
  Synthetic oligonucleotide; TTT chr2 60517057 60517078 60517074 60517079 +
gtcgtctctggaatgaagagga

SEQ ID NO: 203650 - DNA, 22 bp, Artificial Sequence
  Synthetic oligonucleotide; TTG chr2 60517058 60517079 60517075 60517080 +
tcgtctctggaatgaagaggaa

SEQ ID NO: 203651 - DNA, 22 bp, Artificial Sequence
  Synthetic oligonucleotide; CTC chr2 60517065 60517086 60517082 60517087 +
tggaatgaagaggaaatgggtt

SEQ ID NO: 203652 - DNA, 22 bp, Artificial Sequence
  Synthetic oligonucleotide; CTG chr2 60517067 60517088 60517084 60517089 +
gaatgaagaggaaatgggttta

SEQ ID NO: 203653 - DNA, 22 bp, Artificial Sequence
  Synthetic oligonucleotide; TTT chr2 60517088 60517109 60517105 60517110 +
aaaatgaagcataagggatcga

SEQ ID NO: 203654 - DNA, 22 bp, Artificial Sequence
  Synthetic oligonucleotide; TTA chr2 60517089 60517110 60517106 60517111 +
aaatgaagcataagggatcgaa

SEQ ID NO: 203655 - DNA, 22 bp, Artificial Sequence
  Synthetic oligonucleotide; TTT chr2 60517132 60517153 60517149 60517154 +
cctgcgattgagaggtgtcttt

SEQ ID NO: 203656 - DNA, 22 bp, Artificial Sequence
  Synthetic oligonucleotide; TTC chr2 60517133 60517154 60517150 60517155 +
ctgcgattgagaggtgtcttta

SEQ ID NO: 203657 - DNA, 22 bp, Artificial Sequence
  Synthetic oligonucleotide; CTG chr2 60517136 60517157 60517153 60517158 +
cgattgagaggtgtctttaaaa

SEQ ID NO: 203658 - DNA, 22 bp, Artificial Sequence
  Synthetic oligonucleotide; TTG chr2 60517142 60517163 60517159 60517164 +
agaggtgtctttaaaaatagaa

SEQ ID NO: 203659 - DNA, 22 bp, Artificial Sequence
  Synthetic oligonucleotide; CTT chr2 60517153 60517174 60517170 60517175 +
taaaaatagaactagggtggtg

SEQ ID NO: 203660 - DNA, 22 bp, Artificial Sequence
  Synthetic oligonucleotide; TTT chr2 60517154 60517175 60517171 60517176 +
aaaaatagaactagggtggtga

SEQ ID NO: 203661 - DNA, 22 bp, Artificial Sequence
  Synthetic oligonucleotide; TTA chr2 60517155 60517176 60517172 60517177 +
aaaatagaactagggtggtgag

SEQ ID NO: 203662 - DNA, 22 bp, Artificial Sequence
  Synthetic oligonucleotide; CTA chr2 60517167 60517188 60517184 60517189 +
gggtggtgaggaagaggttggg

SEQ ID NO: 203663 - DNA, 22 bp, Artificial Sequence
  Synthetic oligonucleotide; TTG chr2 60517187 60517208 60517204 60517209 +
ggctggccaattctggagggcc

SEQ ID NO: 203664 - DNA, 22 bp, Artificial Sequence
  Synthetic oligonucleotide; CTG chr2 60517192 60517213 60517209 60517214 +
gccaattctggagggccatctg

SEQ ID NO: 203665 - DNA, 22 bp, Artificial Sequence
  Synthetic oligonucleotide; TTC chr2 60517200 60517221 60517217 60517222 +
tggagggccatctgcccctgag

SEQ ID NO: 203666 - DNA, 22 bp, Artificial Sequence
  Synthetic oligonucleotide; CTG chr2 60517202 60517223 60517219 60517224 +
gagggccatctgcccctgagag

SEQ ID NO: 203667 - DNA, 22 bp, Artificial Sequence
  Synthetic oligonucleotide; CTG chr2 60517214 60517235 60517231 60517236 +
cccctgagagggtacacgttcc

SEQ ID NO: 203668 - DNA, 22 bp, Artificial Sequence
  Synthetic oligonucleotide; CTG chr2 60517220 60517241 60517237 60517242 +
agagggtacacgttccttcacc

SEQ ID NO: 203669 - DNA, 22 bp, Artificial Sequence
  Synthetic oligonucleotide; TTC chr2 60517235 60517256 60517252 60517257 +
cttcaccaccccaactccatct

SEQ ID NO: 203670 - DNA, 22 bp, Artificial Sequence
  Synthetic oligonucleotide; CTT chr2 60517238 60517259 60517255 60517260 +
caccaccccaactccatctact

SEQ ID NO: 203671 - DNA, 22 bp, Artificial Sequence
  Synthetic oligonucleotide; TTC chr2 60517239 60517260 60517256 60517261 +
accaccccaactccatctactc

SEQ ID NO: 203672 - DNA, 22 bp, Artificial Sequence
  Synthetic oligonucleotide; CTC chr2 60517252 60517273 60517269 60517274 +
catctactccattatctccagt

SEQ ID NO: 203673 - DNA, 22 bp, Artificial Sequence
  Synthetic oligonucleotide; CTA chr2 60517258 60517279 60517275 60517280 +
ctccattatctccagttatctg

SEQ ID NO: 203674 - DNA, 22 bp, Artificial Sequence
  Synthetic oligonucleotide; CTC chr2 60517261 60517282 60517278 60517283 +
cattatctccagttatctgaat

SEQ ID NO: 203675 - DNA, 22 bp, Artificial Sequence
  Synthetic oligonucleotide; TTA chr2 60517266 60517287 60517283 60517288 +
tctccagttatctgaataaaaa

SEQ ID NO: 203676 - DNA, 22 bp, Artificial Sequence
  Synthetic oligonucleotide; CTC chr2 60517270 60517291 60517287 60517292 +
cagttatctgaataaaaaagcc

SEQ ID NO: 203677 - DNA, 22 bp, Artificial Sequence
  Synthetic oligonucleotide; TTA chr2 60517276 60517297 60517293 60517298 +
tctgaataaaaaagccaagcta

SEQ ID NO: 203678 - DNA, 22 bp, Artificial Sequence
  Synthetic oligonucleotide; CTG chr2 60517280 60517301 60517297 60517302 +
aataaaaaagccaagctattcc

SEQ ID NO: 203679 - DNA, 22 bp, Artificial Sequence
  Synthetic oligonucleotide; CTA chr2 60517298 60517319 60517315 60517320 +
ttccctgggcacaccatgtaaa

SEQ ID NO: 203680 - DNA, 22 bp, Artificial Sequence
  Synthetic oligonucleotide; TTC chr2 60517301 60517322 60517318 60517323 +
cctgggcacaccatgtaaaccc

SEQ ID NO: 203681 - DNA, 22 bp, Artificial Sequence
  Synthetic oligonucleotide; CTG chr2 60517305 60517326 60517322 60517327 +
ggcacaccatgtaaaccccaga

SEQ ID NO: 203682 - DNA, 22 bp, Artificial Sequence
  Synthetic oligonucleotide; CTT chr2 60517339 60517360 60517356 60517361 +
tgggagccctagcaggaaaggt

SEQ ID NO: 203683 - DNA, 22 bp, Artificial Sequence
  Synthetic oligonucleotide; TTT chr2 60517340 60517361 60517357 60517362 +
gggagccctagcaggaaaggtg

SEQ ID NO: 203684 - DNA, 22 bp, Artificial Sequence
  Synthetic oligonucleotide; TTG chr2 60517341 60517362 60517358 60517363 +
ggagccctagcaggaaaggtgg

SEQ ID NO: 203685 - DNA, 22 bp, Artificial Sequence
  Synthetic oligonucleotide; CTA chr2 60517350 60517371 60517367 60517372 +
gcaggaaaggtggtaggaagac

SEQ ID NO: 203686 - DNA, 22 bp, Artificial Sequence
  Synthetic oligonucleotide; TTC chr2 60517440 60517461 60517457 60517462 +
tctgcaacagcacaggtgattg

SEQ ID NO: 203687 - DNA, 22 bp, Artificial Sequence
  Synthetic oligonucleotide; CTC chr2 60517442 60517463 60517459 60517464 +
tgcaacagcacaggtgattggg

SEQ ID NO: 203688 - DNA, 22 bp, Artificial Sequence
  Synthetic oligonucleotide; CTG chr2 60517444 60517465 60517461 60517466 +
caacagcacaggtgattgggtg

SEQ ID NO: 203689 - DNA, 22 bp, Artificial Sequence
  Synthetic oligonucleotide; TTG chr2 60517462 60517483 60517479 60517484 +
ggtggtggttttgttgcttggg

SEQ ID NO: 203690 - DNA, 22 bp, Artificial Sequence
  Synthetic oligonucleotide; TTT chr2 60517473 60517494 60517490 60517495 +
tgttgcttgggttttaccatgg

SEQ ID NO: 203691 - DNA, 22 bp, Artificial Sequence
  Synthetic oligonucleotide; TTT chr2 60517474 60517495 60517491 60517496 +
gttgcttgggttttaccatggg

SEQ ID NO: 203692 - DNA, 22 bp, Artificial Sequence
  Synthetic oligonucleotide; TTG chr2 60517475 60517496 60517492 60517497 +
ttgcttgggttttaccatgggc

SEQ ID NO: 203693 - DNA, 22 bp, Artificial Sequence
  Synthetic oligonucleotide; TTG chr2 60517478 60517499 60517495 60517500 +
cttgggttttaccatgggctcc

SEQ ID NO: 203694 - DNA, 22 bp, Artificial Sequence
  Synthetic oligonucleotide; CTT chr2 60517481 60517502 60517498 60517503 +
gggttttaccatgggctcccca

SEQ ID NO: 203695 - DNA, 22 bp, Artificial Sequence
  Synthetic oligonucleotide; TTG chr2 60517482 60517503 60517499 60517504 +
ggttttaccatgggctccccag

SEQ ID NO: 203696 - DNA, 22 bp, Artificial Sequence
  Synthetic oligonucleotide; TTT chr2 60517487 60517508 60517504 60517509 +
taccatgggctccccaggttag

SEQ ID NO: 203697 - DNA, 22 bp, Artificial Sequence
  Synthetic oligonucleotide; TTT chr2 60517488 60517509 60517505 60517510 +
accatgggctccccaggttagc

SEQ ID NO: 203698 - DNA, 22 bp, Artificial Sequence
  Synthetic oligonucleotide; TTA chr2 60517489 60517510 60517506 60517511 +
ccatgggctccccaggttagca

SEQ ID NO: 203699 - DNA, 22 bp, Artificial Sequence
  Synthetic oligonucleotide; CTC chr2 60517499 60517520 60517516 60517521 +
cccaggttagcactgccacaaa

SEQ ID NO: 203700 - DNA, 22 bp, Artificial Sequence
  Synthetic oligonucleotide; TTA chr2 60517508 60517529 60517525 60517530 +
gcactgccacaaaagcaccagg

SEQ ID NO: 203701 - DNA, 22 bp, Artificial Sequence
  Synthetic oligonucleotide; CTG chr2 60517514 60517535 60517531 60517536 +
ccacaaaagcaccaggctcttc

SEQ ID NO: 203702 - DNA, 22 bp, Artificial Sequence
  Synthetic oligonucleotide; CTC chr2 60517533 60517554 60517550 60517555 +
ttcaacaaagctccagttaaga

SEQ ID NO: 203703 - DNA, 22 bp, Artificial Sequence
  Synthetic oligonucleotide; CTT chr2 60517535 60517556 60517552 60517557 +
caacaaagctccagttaagaaa

SEQ ID NO: 203704 - DNA, 22 bp, Artificial Sequence
  Synthetic oligonucleotide; TTC chr2 60517536 60517557 60517553 60517558 +
aacaaagctccagttaagaaaa

SEQ ID NO: 203705 - DNA, 22 bp, Artificial Sequence
  Synthetic oligonucleotide; CTC chr2 60517546 60517567 60517563 60517568 +
cagttaagaaaagcattccagc

SEQ ID NO: 203706 - DNA, 22 bp, Artificial Sequence
  Synthetic oligonucleotide; TTA chr2 60517552 60517573 60517569 60517574 +
agaaaagcattccagccatcac

SEQ ID NO: 203707 - DNA, 22 bp, Artificial Sequence
  Synthetic oligonucleotide; TTC chr2 60517564 60517585 60517581 60517586 +
cagccatcaccgataaaagcgt

SEQ ID NO: 203708 - DNA, 22 bp, Artificial Sequence
  Synthetic oligonucleotide; TTC chr2 60517598 60517619 60517615 60517620 +
ctctgcaaagcacatgcgggcc

SEQ ID NO: 203709 - DNA, 22 bp, Artificial Sequence
  Synthetic oligonucleotide; CTC chr2 60517601 60517622 60517618 60517623 +
tgcaaagcacatgcgggccacc

SEQ ID NO: 203710 - DNA, 22 bp, Artificial Sequence
  Synthetic oligonucleotide; CTG chr2 60517603 60517624 60517620 60517625 +
caaagcacatgcgggccacctc

SEQ ID NO: 203711 - DNA, 22 bp, Artificial Sequence
  Synthetic oligonucleotide; CTC chr2 60517625 60517646 60517642 60517647 +
tggctcctgctggccatggaga

SEQ ID NO: 203712 - DNA, 22 bp, Artificial Sequence
  Synthetic oligonucleotide; CTG chr2 60517627 60517648 60517644 60517649 +
gctcctgctggccatggagagg

SEQ ID NO: 203713 - DNA, 22 bp, Artificial Sequence
  Synthetic oligonucleotide; CTC chr2 60517631 60517652 60517648 60517653 +
ctgctggccatggagaggccat

SEQ ID NO: 203714 - DNA, 22 bp, Artificial Sequence
  Synthetic oligonucleotide; CTG chr2 60517634 60517655 60517651 60517656 +
ctggccatggagaggccatgtg

SEQ ID NO: 203715 - DNA, 22 bp, Artificial Sequence
  Synthetic oligonucleotide; CTG chr2 60517637 60517658 60517654 60517659 +
gccatggagaggccatgtgcga

SEQ ID NO: 203716 - DNA, 22 bp, Artificial Sequence
  Synthetic oligonucleotide; TTG chr2 60517662 60517683 60517679 60517684 +
gtacagtcagccaggaatgaaa

SEQ ID NO: 203717 - DNA, 22 bp, Artificial Sequence
  Synthetic oligonucleotide; CTC chr2 60517702 60517723 60517719 60517724 +
tgggccaagtctaccactgcct

SEQ ID NO: 203718 - DNA, 22 bp, Artificial Sequence
  Synthetic oligonucleotide; CTG chr2 60517704 60517725 60517721 60517726 +
ggccaagtctaccactgcctag

SEQ ID NO: 203719 - DNA, 22 bp, Artificial Sequence
  Synthetic oligonucleotide; CTA chr2 60517715 60517736 60517732 60517737 +
ccactgcctagcaagtagactc

SEQ ID NO: 203720 - DNA, 22 bp, Artificial Sequence
  Synthetic oligonucleotide; CTG chr2 60517721 60517742 60517738 60517743 +
cctagcaagtagactctggcac

SEQ ID NO: 203721 - DNA, 22 bp, Artificial Sequence
  Synthetic oligonucleotide; CTA chr2 60517725 60517746 60517742 60517747 +
gcaagtagactctggcactcac

SEQ ID NO: 203722 - DNA, 22 bp, Artificial Sequence
  Synthetic oligonucleotide; CTC chr2 60517737 60517758 60517754 60517759 +
tggcactcactcccctcttagc

SEQ ID NO: 203723 - DNA, 22 bp, Artificial Sequence
  Synthetic oligonucleotide; CTG chr2 60517739 60517760 60517756 60517761 +
gcactcactcccctcttagcct

SEQ ID NO: 203724 - DNA, 22 bp, Artificial Sequence
  Synthetic oligonucleotide; CTC chr2 60517745 60517766 60517762 60517767 +
actcccctcttagcctcaacct

SEQ ID NO: 203725 - DNA, 22 bp, Artificial Sequence
  Synthetic oligonucleotide; CTC chr2 60517749 60517770 60517766 60517771 +
ccctcttagcctcaacctttct

SEQ ID NO: 203726 - DNA, 22 bp, Artificial Sequence
  Synthetic oligonucleotide; CTC chr2 60517754 60517775 60517771 60517776 +
ttagcctcaacctttctcatct

SEQ ID NO: 203727 - DNA, 22 bp, Artificial Sequence
  Synthetic oligonucleotide; CTT chr2 60517756 60517777 60517773 60517778 +
agcctcaacctttctcatctgt

SEQ ID NO: 203728 - DNA, 22 bp, Artificial Sequence
  Synthetic oligonucleotide; TTA chr2 60517757 60517778 60517774 60517779 +
gcctcaacctttctcatctgta

SEQ ID NO: 203729 - DNA, 22 bp, Artificial Sequence
  Synthetic oligonucleotide; CTC chr2 60517762 60517783 60517779 60517784 +
aacctttctcatctgtaaaatg

SEQ ID NO: 203730 - DNA, 22 bp, Artificial Sequence
  Synthetic oligonucleotide; CTT chr2 60517768 60517789 60517785 60517790 +
tctcatctgtaaaatgacaggg

SEQ ID NO: 203731 - DNA, 22 bp, Artificial Sequence
  Synthetic oligonucleotide; TTT chr2 60517769 60517790 60517786 60517791 +
ctcatctgtaaaatgacagggt

SEQ ID NO: 203732 - DNA, 22 bp, Artificial Sequence
  Synthetic oligonucleotide; TTC chr2 60517770 60517791 60517787 60517792 +
tcatctgtaaaatgacagggtt

SEQ ID NO: 203733 - DNA, 22 bp, Artificial Sequence
  Synthetic oligonucleotide; CTC chr2 60517772 60517793 60517789 60517794 +
atctgtaaaatgacagggttaa

SEQ ID NO: 203734 - DNA, 22 bp, Artificial Sequence
  Synthetic oligonucleotide; CTG chr2 60517777 60517798 60517794 60517799 +
taaaatgacagggttaatgata

SEQ ID NO: 203735 - DNA, 22 bp, Artificial Sequence
  Synthetic oligonucleotide; TTA chr2 60517793 60517814 60517810 60517815 +
atgatatgacttcacaagtcta

SEQ ID NO: 203736 - DNA, 22 bp, Artificial Sequence
  Synthetic oligonucleotide; CTT chr2 60517805 60517826 60517822 60517827 +
cacaagtctatgtctacataga

SEQ ID NO: 203737 - DNA, 22 bp, Artificial Sequence
  Synthetic oligonucleotide; TTC chr2 60517806 60517827 60517823 60517828 +
acaagtctatgtctacatagaa

SEQ ID NO: 203738 - DNA, 22 bp, Artificial Sequence
  Synthetic oligonucleotide; CTA chr2 60517815 60517836 60517832 60517837 +
tgtctacatagaagatgctcaa

SEQ ID NO: 203739 - DNA, 22 bp, Artificial Sequence
  Synthetic oligonucleotide; CTA chr2 60517821 60517842 60517838 60517843 +
catagaagatgctcaataagta

SEQ ID NO: 203740 - DNA, 22 bp, Artificial Sequence
  Synthetic oligonucleotide; CTC chr2 60517835 60517856 60517852 60517857 +
aataagtattcactttggcttt

SEQ ID NO: 203741 - DNA, 22 bp, Artificial Sequence
  Synthetic oligonucleotide; TTC chr2 60517846 60517867 60517863 60517868 +
actttggctttccacgaaggaa

SEQ ID NO: 203742 - DNA, 22 bp, Artificial Sequence
  Synthetic oligonucleotide; CTT chr2 60517850 60517871 60517867 60517872 +
tggctttccacgaaggaaacta

SEQ ID NO: 203743 - DNA, 22 bp, Artificial Sequence
  Synthetic oligonucleotide; TTT chr2 60517851 60517872 60517868 60517873 +
ggctttccacgaaggaaactat

SEQ ID NO: 203744 - DNA, 22 bp, Artificial Sequence
  Synthetic oligonucleotide; TTG chr2 60517852 60517873 60517869 60517874 +
gctttccacgaaggaaactatc

SEQ ID NO: 203745 - DNA, 22 bp, Artificial Sequence
  Synthetic oligonucleotide; CTT chr2 60517856 60517877 60517873 60517878 +
tccacgaaggaaactatctatg

SEQ ID NO: 203746 - DNA, 22 bp, Artificial Sequence
  Synthetic oligonucleotide; TTT chr2 60517857 60517878 60517874 60517879 +
ccacgaaggaaactatctatgc

SEQ ID NO: 203747 - DNA, 22 bp, Artificial Sequence
  Synthetic oligonucleotide; TTC chr2 60517858 60517879 60517875 60517880 +
cacgaaggaaactatctatgct

SEQ ID NO: 203748 - DNA, 22 bp, Artificial Sequence
  Synthetic oligonucleotide; CTA chr2 60517872 60517893 60517889 60517894 +
tctatgctcaaagagctgtgct

SEQ ID NO: 203749 - DNA, 22 bp, Artificial Sequence
  Synthetic oligonucleotide; CTA chr2 60517876 60517897 60517893 60517898 +
tgctcaaagagctgtgctttct

SEQ ID NO: 203750 - DNA, 22 bp, Artificial Sequence
  Synthetic oligonucleotide; CTC chr2 60517881 60517902 60517898 60517903 +
aaagagctgtgctttcttctat

SEQ ID NO: 203751 - DNA, 22 bp, Artificial Sequence
  Synthetic oligonucleotide; CTG chr2 60517890 60517911 60517907 60517912 +
tgctttcttctatgattcctca

SEQ ID NO: 203752 - DNA, 22 bp, Artificial Sequence
  Synthetic oligonucleotide; CTT chr2 60517895 60517916 60517912 60517917 +
tcttctatgattcctcagaaac

SEQ ID NO: 203753 - DNA, 22 bp, Artificial Sequence
  Synthetic oligonucleotide; TTT chr2 60517896 60517917 60517913 60517918 +
cttctatgattcctcagaaact

SEQ ID NO: 203754 - DNA, 22 bp, Artificial Sequence
  Synthetic oligonucleotide; TTC chr2 60517897 60517918 60517914 60517919 +
ttctatgattcctcagaaactc

SEQ ID NO: 203755 - DNA, 22 bp, Artificial Sequence
  Synthetic oligonucleotide; CTT chr2 60517899 60517920 60517916 60517921 +
ctatgattcctcagaaactctt

SEQ ID NO: 203756 - DNA, 22 bp, Artificial Sequence
  Synthetic oligonucleotide; TTC chr2 60517900 60517921 60517917 60517922 +
tatgattcctcagaaactcttg

SEQ ID NO: 203757 - DNA, 22 bp, Artificial Sequence
  Synthetic oligonucleotide; CTA chr2 60517902 60517923 60517919 60517924 +
tgattcctcagaaactcttgtc

SEQ ID NO: 203758 - DNA, 22 bp, Artificial Sequence
  Synthetic oligonucleotide; TTC chr2 60517908 60517929 60517925 60517930 +
ctcagaaactcttgtcgactag

SEQ ID NO: 203759 - DNA, 22 bp, Artificial Sequence
  Synthetic oligonucleotide; CTC chr2 60517911 60517932 60517928 60517933 +
agaaactcttgtcgactagagg

SEQ ID NO: 203760 - DNA, 22 bp, Artificial Sequence
  Synthetic oligonucleotide; CTC chr2 60517919 60517940 60517936 60517941 +
ttgtcgactagaggaacaagaa

SEQ ID NO: 203761 - DNA, 22 bp, Artificial Sequence
  Synthetic oligonucleotide; CTT chr2 60517921 60517942 60517938 60517943 +
gtcgactagaggaacaagaacc

SEQ ID NO: 203762 - DNA, 22 bp, Artificial Sequence
  Synthetic oligonucleotide; TTG chr2 60517922 60517943 60517939 60517944 +
tcgactagaggaacaagaacct

SEQ ID NO: 203763 - DNA, 22 bp, Artificial Sequence
  Synthetic oligonucleotide; CTA chr2 60517929 60517950 60517946 60517951 +
gaggaacaagaaccttactcta

SEQ ID NO: 203764 - DNA, 22 bp, Artificial Sequence
  Synthetic oligonucleotide; CTT chr2 60517945 60517966 60517962 60517967 +
actctaaaacccaattttaggg

SEQ ID NO: 203765 - DNA, 22 bp, Artificial Sequence
  Synthetic oligonucleotide; TTA chr2 60517946 60517967 60517963 60517968 +
ctctaaaacccaattttagggg

SEQ ID NO: 203766 - DNA, 22 bp, Artificial Sequence
  Synthetic oligonucleotide; CTC chr2 60517949 60517970 60517966 60517971 +
taaaacccaattttaggggagg

SEQ ID NO: 203767 - DNA, 22 bp, Artificial Sequence
  Synthetic oligonucleotide; CTA chr2 60517951 60517972 60517968 60517973 +
aaacccaattttaggggaggag

SEQ ID NO: 203768 - DNA, 22 bp, Artificial Sequence
  Synthetic oligonucleotide; TTT chr2 60517962 60517983 60517979 60517984 +
taggggaggagagaaaattttt

SEQ ID NO: 203769 - DNA, 22 bp, Artificial Sequence
  Synthetic oligonucleotide; TTT chr2 60517963 60517984 60517980 60517985 +
aggggaggagagaaaattttta

SEQ ID NO: 203770 - DNA, 22 bp, Artificial Sequence
  Synthetic oligonucleotide; TTA chr2 60517964 60517985 60517981 60517986 +
ggggaggagagaaaatttttaa

SEQ ID NO: 203771 - DNA, 22 bp, Artificial Sequence
  Synthetic oligonucleotide; TTT chr2 60517982 60518003 60517999 60518004 +
ttaaaagactttaaattaatta

SEQ ID NO: 203772 - DNA, 22 bp, Artificial Sequence
  Synthetic oligonucleotide; TTT chr2 60517983 60518004 60518000 60518005 +
taaaagactttaaattaattac

SEQ ID NO: 203773 - DNA, 22 bp, Artificial Sequence
  Synthetic oligonucleotide; TTT chr2 60517984 60518005 60518001 60518006 +
aaaagactttaaattaattact

SEQ ID NO: 203774 - DNA, 22 bp, Artificial Sequence
  Synthetic oligonucleotide; TTA chr2 60517985 60518006 60518002 60518007 +
aaagactttaaattaattactt

SEQ ID NO: 203775 - DNA, 22 bp, Artificial Sequence
  Synthetic oligonucleotide; CTT chr2 60517993 60518014 60518010 60518015 +
taaattaattacttgaaggcca

SEQ ID NO: 203776 - DNA, 22 bp, Artificial Sequence
  Synthetic oligonucleotide; TTT chr2 60517994 60518015 60518011 60518016 +
aaattaattacttgaaggccag

SEQ ID NO: 203777 - DNA, 22 bp, Artificial Sequence
  Synthetic oligonucleotide; TTA chr2 60517995 60518016 60518012 60518017 +
aattaattacttgaaggccaga

SEQ ID NO: 203778 - DNA, 22 bp, Artificial Sequence
  Synthetic oligonucleotide; TTA chr2 60518000 60518021 60518017 60518022 +
attacttgaaggccagaggcat

SEQ ID NO: 203779 - DNA, 22 bp, Artificial Sequence
  Synthetic oligonucleotide; TTA chr2 60518004 60518025 60518021 60518026 +
cttgaaggccagaggcatttgc

SEQ ID NO: 203780 - DNA, 22 bp, Artificial Sequence
  Synthetic oligonucleotide; CTT chr2 60518007 60518028 60518024 60518029 +
gaaggccagaggcatttgctta

SEQ ID NO: 203781 - DNA, 22 bp, Artificial Sequence
  Synthetic oligonucleotide; TTG chr2 60518008 60518029 60518025 60518030 +
aaggccagaggcatttgcttat

SEQ ID NO: 203782 - DNA, 22 bp, Artificial Sequence
  Synthetic oligonucleotide; TTT chr2 60518024 60518045 60518041 60518046 +
gcttatgcctataatctcagaa

SEQ ID NO: 203783 - DNA, 22 bp, Artificial Sequence
  Synthetic oligonucleotide; TTG chr2 60518025 60518046 60518042 60518047 +
cttatgcctataatctcagaaa

SEQ ID NO: 203784 - DNA, 22 bp, Artificial Sequence
  Synthetic oligonucleotide; CTT chr2 60518028 60518049 60518045 60518050 +
atgcctataatctcagaaattt

SEQ ID NO: 203785 - DNA, 22 bp, Artificial Sequence
  Synthetic oligonucleotide; TTA chr2 60518029 60518050 60518046 60518051 +
tgcctataatctcagaaatttg

SEQ ID NO: 203786 - DNA, 22 bp, Artificial Sequence
  Synthetic oligonucleotide; CTA chr2 60518035 60518056 60518052 60518057 +
taatctcagaaatttggaaggc

SEQ ID NO: 203787 - DNA, 22 bp, Artificial Sequence
  Synthetic oligonucleotide; CTC chr2 60518042 60518063 60518059 60518064 +
agaaatttggaaggccacagag

SEQ ID NO: 203788 - DNA, 22 bp, Artificial Sequence
  Synthetic oligonucleotide; TTT chr2 60518050 60518071 60518067 60518072 +
ggaaggccacagagggaagatt

SEQ ID NO: 203789 - DNA, 22 bp, Artificial Sequence
  Synthetic oligonucleotide; TTG chr2 60518051 60518072 60518068 60518073 +
gaaggccacagagggaagattg

SEQ ID NO: 203790 - DNA, 22 bp, Artificial Sequence
  Synthetic oligonucleotide; TTG chr2 60518073 60518094 60518090 60518095 +
cttgaagctaggagttcaagac

SEQ ID NO: 203791 - DNA, 22 bp, Artificial Sequence
  Synthetic oligonucleotide; CTT chr2 60518076 60518097 60518093 60518098 +
gaagctaggagttcaagaccag

SEQ ID NO: 203792 - DNA, 22 bp, Artificial Sequence
  Synthetic oligonucleotide; TTG chr2 60518077 60518098 60518094 60518099 +
aagctaggagttcaagaccagc

SEQ ID NO: 203793 - DNA, 22 bp, Artificial Sequence
  Synthetic oligonucleotide; CTA chr2 60518083 60518104 60518100 60518105 +
ggagttcaagaccagcctgggc

SEQ ID NO: 203794 - DNA, 22 bp, Artificial Sequence
  Synthetic oligonucleotide; TTC chr2 60518090 60518111 60518107 60518112 +
aagaccagcctgggcaacatag

SEQ ID NO: 203795 - DNA, 22 bp, Artificial Sequence
  Synthetic oligonucleotide; CTG chr2 60518102 60518123 60518119 60518124 +
ggcaacatagcaaaaccctgtc

SEQ ID NO: 203796 - DNA, 22 bp, Artificial Sequence
  Synthetic oligonucleotide; CTG chr2 60518122 60518143 60518139 60518144 +
tctctacaaaaagcttaataaa

SEQ ID NO: 203797 - DNA, 22 bp, Artificial Sequence
  Synthetic oligonucleotide; CTC chr2 60518126 60518147 60518143 60518148 +
tacaaaaagcttaataaataaa

SEQ ID NO: 203798 - DNA, 22 bp, Artificial Sequence
  Synthetic oligonucleotide; CTA chr2 60518128 60518149 60518145 60518150 +
caaaaagcttaataaataaaat

SEQ ID NO: 203799 - DNA, 22 bp, Artificial Sequence
  Synthetic oligonucleotide; CTT chr2 60518138 60518159 60518155 60518160 +
aataaataaaataaaataattg

SEQ ID NO: 203800 - DNA, 22 bp, Artificial Sequence
  Synthetic oligonucleotide; TTA chr2 60518139 60518160 60518156 60518161 +
ataaataaaataaaataattgc

SEQ ID NO: 203801 - DNA, 22 bp, Artificial Sequence
  Synthetic oligonucleotide; TTG chr2 60518160 60518181 60518177 60518182 +
ctgagatttagctatcttttca

SEQ ID NO: 203802 - DNA, 22 bp, Artificial Sequence
  Synthetic oligonucleotide; CTG chr2 60518163 60518184 60518180 60518185 +
agatttagctatcttttcaaag

SEQ ID NO: 203803 - DNA, 22 bp, Artificial Sequence
  Synthetic oligonucleotide; TTT chr2 60518169 60518190 60518186 60518191 +
agctatcttttcaaagaaaata

SEQ ID NO: 203804 - DNA, 22 bp, Artificial Sequence
  Synthetic oligonucleotide; TTA chr2 60518170 60518191 60518187 60518192 +
gctatcttttcaaagaaaatat

SEQ ID NO: 203805 - DNA, 22 bp, Artificial Sequence
  Synthetic oligonucleotide; CTA chr2 60518174 60518195 60518191 60518196 +
tcttttcaaagaaaatataaaa

SEQ ID NO: 203806 - DNA, 22 bp, Artificial Sequence
  Synthetic oligonucleotide; CTT chr2 60518178 60518199 60518195 60518200 +
ttcaaagaaaatataaaatttg

SEQ ID NO: 203807 - DNA, 22 bp, Artificial Sequence
  Synthetic oligonucleotide; TTT chr2 60518179 60518200 60518196 60518201 +
tcaaagaaaatataaaatttgg

SEQ ID NO: 203808 - DNA, 22 bp, Artificial Sequence
  Synthetic oligonucleotide; TTT chr2 60518180 60518201 60518197 60518202 +
caaagaaaatataaaatttggc

SEQ ID NO: 203809 - DNA, 22 bp, Artificial Sequence
  Synthetic oligonucleotide; TTC chr2 60518181 60518202 60518198 60518203 +
aaagaaaatataaaatttggcc

SEQ ID NO: 203810 - DNA, 22 bp, Artificial Sequence
  Synthetic oligonucleotide; TTT chr2 60518199 60518220 60518216 60518221 +
ggcccagttttttatctatcaa

SEQ ID NO: 203811 - DNA, 22 bp, Artificial Sequence
  Synthetic oligonucleotide; TTG chr2 60518200 60518221 60518217 60518222 +
gcccagttttttatctatcaaa

SEQ ID NO: 203812 - DNA, 22 bp, Artificial Sequence
  Synthetic oligonucleotide; TTT chr2 60518209 60518230 60518226 60518231 +
tttatctatcaaacctagacct

SEQ ID NO: 203813 - DNA, 22 bp, Artificial Sequence
  Synthetic oligonucleotide; TTT chr2 60518210 60518231 60518227 60518232 +
ttatctatcaaacctagaccta

SEQ ID NO: 203814 - DNA, 22 bp, Artificial Sequence
  Synthetic oligonucleotide; TTT chr2 60518211 60518232 60518228 60518233 +
tatctatcaaacctagacctaa

SEQ ID NO: 203815 - DNA, 22 bp, Artificial Sequence
  Synthetic oligonucleotide; TTT chr2 60518212 60518233 60518229 60518234 +
atctatcaaacctagacctaaa

SEQ ID NO: 203816 - DNA, 22 bp, Artificial Sequence
  Synthetic oligonucleotide; TTA chr2 60518213 60518234 60518230 60518235 +
tctatcaaacctagacctaaaa

SEQ ID NO: 203817 - DNA, 22 bp, Artificial Sequence
  Synthetic oligonucleotide; CTA chr2 60518217 60518238 60518234 60518239 +
tcaaacctagacctaaaatcat

SEQ ID NO: 203818 - DNA, 22 bp, Artificial Sequence
  Synthetic oligonucleotide; CTA chr2 60518226 60518247 60518243 60518248 +
gacctaaaatcatcttgtctca

SEQ ID NO: 203819 - DNA, 22 bp, Artificial Sequence
  Synthetic oligonucleotide; CTA chr2 60518232 60518253 60518249 60518254 +
aaatcatcttgtctcattccct

SEQ ID NO: 203820 - DNA, 22 bp, Artificial Sequence
  Synthetic oligonucleotide; CTT chr2 60518242 60518263 60518259 60518264 +
gtctcattccctctgtcaacat

SEQ ID NO: 203821 - DNA, 22 bp, Artificial Sequence
  Synthetic oligonucleotide; TTG chr2 60518243 60518264 60518260 60518265 +
tctcattccctctgtcaacatc

SEQ ID NO: 203822 - DNA, 22 bp, Artificial Sequence
  Synthetic oligonucleotide; CTC chr2 60518247 60518268 60518264 60518269 +
attccctctgtcaacatctgct

SEQ ID NO: 203823 - DNA, 22 bp, Artificial Sequence
  Synthetic oligonucleotide; TTC chr2 60518251 60518272 60518268 60518273 +
cctctgtcaacatctgctgagc

SEQ ID NO: 203824 - DNA, 22 bp, Artificial Sequence
  Synthetic oligonucleotide; CTC chr2 60518255 60518276 60518272 60518277 +
tgtcaacatctgctgagctctc

SEQ ID NO: 203825 - DNA, 22 bp, Artificial Sequence
  Synthetic oligonucleotide; CTG chr2 60518257 60518278 60518274 60518279 +
tcaacatctgctgagctctcat

SEQ ID NO: 203826 - DNA, 22 bp, Artificial Sequence
  Synthetic oligonucleotide; CTG chr2 60518267 60518288 60518284 60518289 +
ctgagctctcataatacataaa

SEQ ID NO: 203827 - DNA, 22 bp, Artificial Sequence
  Synthetic oligonucleotide; CTG chr2 60518270 60518291 60518287 60518292 +
agctctcataatacataaaaca

SEQ ID NO: 203828 - DNA, 22 bp, Artificial Sequence
  Synthetic oligonucleotide; CTC chr2 60518275 60518296 60518292 60518297 +
tcataatacataaaacatcata

SEQ ID NO: 203829 - DNA, 22 bp, Artificial Sequence
  Synthetic oligonucleotide; CTC chr2 60518277 60518298 60518294 60518299 +
ataatacataaaacatcataga

SEQ ID NO: 203830 - DNA, 22 bp, Artificial Sequence
  Synthetic oligonucleotide; TTA chr2 60518318 60518339 60518335 60518340 +
gacctaccgttccataccagtg

SEQ ID NO: 203831 - DNA, 22 bp, Artificial Sequence
  Synthetic oligonucleotide; CTA chr2 60518324 60518345 60518341 60518346 +
ccgttccataccagtgtgttac

SEQ ID NO: 203832 - DNA, 22 bp, Artificial Sequence
  Synthetic oligonucleotide; TTC chr2 60518330 60518351 60518347 60518352 +
cataccagtgtgttacagcctg

SEQ ID NO: 203833 - DNA, 22 bp, Artificial Sequence
  Synthetic oligonucleotide; TTA chr2 60518345 60518366 60518362 60518367 +
cagcctgtcatgaagcagactc

SEQ ID NO: 203834 - DNA, 22 bp, Artificial Sequence
  Synthetic oligonucleotide; CTG chr2 60518352 60518373 60518369 60518374 +
tcatgaagcagactcagagaat

SEQ ID NO: 203835 - DNA, 22 bp, Artificial Sequence
  Synthetic oligonucleotide; CTC chr2 60518367 60518388 60518384 60518389 +
agagaatttggctactacttag

SEQ ID NO: 203836 - DNA, 22 bp, Artificial Sequence
  Synthetic oligonucleotide; TTT chr2 60518376 60518397 60518393 60518398 +
ggctactacttagtactaacat

SEQ ID NO: 203837 - DNA, 22 bp, Artificial Sequence
  Synthetic oligonucleotide; TTG chr2 60518377 60518398 60518394 60518399 +
gctactacttagtactaacatt

SEQ ID NO: 203838 - DNA, 22 bp, Artificial Sequence
  Synthetic oligonucleotide; CTA chr2 60518381 60518402 60518398 60518403 +
ctacttagtactaacatttaat

SEQ ID NO: 203839 - DNA, 22 bp, Artificial Sequence
  Synthetic oligonucleotide; CTA chr2 60518384 60518405 60518401 60518406 +
cttagtactaacatttaattta

SEQ ID NO: 203840 - DNA, 22 bp, Artificial Sequence
  Synthetic oligonucleotide; CTT chr2 60518387 60518408 60518404 60518409 +
agtactaacatttaatttagtt

SEQ ID NO: 203841 - DNA, 22 bp, Artificial Sequence
  Synthetic oligonucleotide; TTA chr2 60518388 60518409 60518405 60518410 +
gtactaacatttaatttagttt

SEQ ID NO: 203842 - DNA, 22 bp, Artificial Sequence
  Synthetic oligonucleotide; CTA chr2 60518394 60518415 60518411 60518416 +
acatttaatttagttttaaaat

SEQ ID NO: 203843 - DNA, 22 bp, Artificial Sequence
  Synthetic oligonucleotide; TTT chr2 60518400 60518421 60518417 60518422 +
aatttagttttaaaatgtctgc

SEQ ID NO: 203844 - DNA, 22 bp, Artificial Sequence
  Synthetic oligonucleotide; TTA chr2 60518401 60518422 60518418 60518423 +
atttagttttaaaatgtctgcg

SEQ ID NO: 203845 - DNA, 22 bp, Artificial Sequence
  Synthetic oligonucleotide; TTT chr2 60518405 60518426 60518422 60518427 +
agttttaaaatgtctgcgatag

SEQ ID NO: 203846 - DNA, 22 bp, Artificial Sequence
  Synthetic oligonucleotide; TTA chr2 60518406 60518427 60518423 60518428 +
gttttaaaatgtctgcgataga

SEQ ID NO: 203847 - DNA, 22 bp, Artificial Sequence
  Synthetic oligonucleotide; TTT chr2 60518410 60518431 60518427 60518432 +
taaaatgtctgcgatagagcag

SEQ ID NO: 203848 - DNA, 22 bp, Artificial Sequence
  Synthetic oligonucleotide; TTT chr2 60518411 60518432 60518428 60518433 +
aaaatgtctgcgatagagcaga

SEQ ID NO: 203849 - DNA, 22 bp, Artificial Sequence
  Synthetic oligonucleotide; TTA chr2 60518412 60518433 60518429 60518434 +
aaatgtctgcgatagagcagat

SEQ ID NO: 203850 - DNA, 22 bp, Artificial Sequence
  Synthetic oligonucleotide; CTG chr2 60518421 60518442 60518438 60518443 +
cgatagagcagattcaggatta

SEQ ID NO: 203851 - DNA, 22 bp, Artificial Sequence
  Synthetic oligonucleotide; TTC chr2 60518436 60518457 60518453 60518458 +
aggattatgcctgtaagatgac

SEQ ID NO: 203852 - DNA, 22 bp, Artificial Sequence
  Synthetic oligonucleotide; TTA chr2 60518443 60518464 60518460 60518465 +
tgcctgtaagatgacattccaa

SEQ ID NO: 203853 - DNA, 22 bp, Artificial Sequence
  Synthetic oligonucleotide; CTG chr2 60518449 60518470 60518466 60518471 +
taagatgacattccaactcacc

SEQ ID NO: 203854 - DNA, 22 bp, Artificial Sequence
  Synthetic oligonucleotide; TTC chr2 60518462 60518483 60518479 60518484 +
caactcacctgcatttaaatat

SEQ ID NO: 203855 - DNA, 22 bp, Artificial Sequence
  Synthetic oligonucleotide; CTC chr2 60518468 60518489 60518485 60518490 +
acctgcatttaaatatgaataa

SEQ ID NO: 203856 - DNA, 22 bp, Artificial Sequence
  Synthetic oligonucleotide; CTG chr2 60518473 60518494 60518490 60518495 +
catttaaatatgaataaagagt

SEQ ID NO: 203857 - DNA, 22 bp, Artificial Sequence
  Synthetic oligonucleotide; TTT chr2 60518478 60518499 60518495 60518500 +
aaatatgaataaagagtgagca

SEQ ID NO: 203858 - DNA, 22 bp, Artificial Sequence
  Synthetic oligonucleotide; TTA chr2 60518479 60518500 60518496 60518501 +
aatatgaataaagagtgagcag

SEQ ID NO: 203859 - DNA, 22 bp, Artificial Sequence
  Synthetic oligonucleotide; TTT chr2 60518551 60518572 60518568 60518573 +
tagcttcccacacgcaaaggca

SEQ ID NO: 203860 - DNA, 22 bp, Artificial Sequence
  Synthetic oligonucleotide; TTT chr2 60518552 60518573 60518569 60518574 +
agcttcccacacgcaaaggcat

SEQ ID NO: 203861 - DNA, 22 bp, Artificial Sequence
  Synthetic oligonucleotide; TTA chr2 60518553 60518574 60518570 60518575 +
gcttcccacacgcaaaggcatg

SEQ ID NO: 203862 - DNA, 22 bp, Artificial Sequence
  Synthetic oligonucleotide; CTT chr2 60518557 60518578 60518574 60518579 +
cccacacgcaaaggcatggggg

SEQ ID NO: 203863 - DNA, 22 bp, Artificial Sequence
  Synthetic oligonucleotide; TTC chr2 60518558 60518579 60518575 60518580 +
ccacacgcaaaggcatgggggg

SEQ ID NO: 203864 - DNA, 22 bp, Artificial Sequence
  Synthetic oligonucleotide; TTG chr2 60518598 60518619 60518615 60518620 +
ctctagatctgagaatcaccac

SEQ ID NO: 203865 - DNA, 22 bp, Artificial Sequence
  Synthetic oligonucleotide; CTC chr2 60518601 60518622 60518618 60518623 +
tagatctgagaatcaccacaca

SEQ ID NO: 203866 - DNA, 22 bp, Artificial Sequence
  Synthetic oligonucleotide; CTA chr2 60518603 60518624 60518620 60518625 +
gatctgagaatcaccacacacc

SEQ ID NO: 203867 - DNA, 22 bp, Artificial Sequence
  Synthetic oligonucleotide; CTG chr2 60518609 60518630 60518626 60518631 +
agaatcaccacacaccagagag

SEQ ID NO: 203868 - DNA, 22 bp, Artificial Sequence
  Synthetic oligonucleotide; TTG chr2 60518670 60518691 60518687 60518692 +
agaaagagttttaagagcctac

SEQ ID NO: 203869 - DNA, 22 bp, Artificial Sequence
  Synthetic oligonucleotide; TTT chr2 60518681 60518702 60518698 60518703 +
taagagcctactcatcatcaga

SEQ ID NO: 203870 - DNA, 22 bp, Artificial Sequence
  Synthetic oligonucleotide; TTT chr2 60518682 60518703 60518699 60518704 +
aagagcctactcatcatcagag

SEQ ID NO: 203871 - DNA, 22 bp, Artificial Sequence
  Synthetic oligonucleotide; TTA chr2 60518683 60518704 60518700 60518705 +
agagcctactcatcatcagagt

SEQ ID NO: 203872 - DNA, 22 bp, Artificial Sequence
  Synthetic oligonucleotide; CTA chr2 60518691 60518712 60518708 60518713 +
ctcatcatcagagttcacttaa

SEQ ID NO: 203873 - DNA, 22 bp, Artificial Sequence
  Synthetic oligonucleotide; CTC chr2 60518694 60518715 60518711 60518716 +
atcatcagagttcacttaaaag

SEQ ID NO: 203874 - DNA, 22 bp, Artificial Sequence
  Synthetic oligonucleotide; TTC chr2 60518707 60518728 60518724 60518729 +
acttaaaagtccatccagaatc

SEQ ID NO: 203875 - DNA, 22 bp, Artificial Sequence
  Synthetic oligonucleotide; CTT chr2 60518711 60518732 60518728 60518733 +
aaaagtccatccagaatcagaa

SEQ ID NO: 203876 - DNA, 22 bp, Artificial Sequence
  Synthetic oligonucleotide; TTA chr2 60518712 60518733 60518729 60518734 +
aaagtccatccagaatcagaac

SEQ ID NO: 203877 - DNA, 22 bp, Artificial Sequence
  Synthetic oligonucleotide; TTC chr2 60518760 60518781 60518777 60518782 +
ctgggggccgggcgtggatttt

SEQ ID NO: 203878 - DNA, 22 bp, Artificial Sequence
  Synthetic oligonucleotide; CTG chr2 60518763 60518784 60518780 60518785 +
ggggccgggcgtggattttaag

SEQ ID NO: 203879 - DNA, 22 bp, Artificial Sequence
  Synthetic oligonucleotide; TTT chr2 60518781 60518802 60518798 60518803 +
taaggactcatcaattactgtt

SEQ ID NO: 203880 - DNA, 22 bp, Artificial Sequence
  Synthetic oligonucleotide; TTT chr2 60518782 60518803 60518799 60518804 +
aaggactcatcaattactgttc

SEQ ID NO: 203881 - DNA, 22 bp, Artificial Sequence
  Synthetic oligonucleotide; TTA chr2 60518783 60518804 60518800 60518805 +
aggactcatcaattactgttca

SEQ ID NO: 203882 - DNA, 22 bp, Artificial Sequence
  Synthetic oligonucleotide; CTC chr2 60518790 60518811 60518807 60518812 +
atcaattactgttcaagttcag

SEQ ID NO: 203883 - DNA, 22 bp, Artificial Sequence
  Synthetic oligonucleotide; TTA chr2 60518798 60518819 60518815 60518820 +
ctgttcaagttcaggtcaagct

SEQ ID NO: 203884 - DNA, 22 bp, Artificial Sequence
  Synthetic oligonucleotide; CTG chr2 60518801 60518822 60518818 60518823 +
ttcaagttcaggtcaagctgga

SEQ ID NO: 203885 - DNA, 22 bp, Artificial Sequence
  Synthetic oligonucleotide; TTC chr2 60518804 60518825 60518821 60518826 +
aagttcaggtcaagctggatgg

SEQ ID NO: 203886 - DNA, 22 bp, Artificial Sequence
  Synthetic oligonucleotide; TTC chr2 60518810 60518831 60518827 60518832 +
aggtcaagctggatggacacca

SEQ ID NO: 203887 - DNA, 22 bp, Artificial Sequence
  Synthetic oligonucleotide; CTG chr2 60518821 60518842 60518838 60518843 +
gatggacaccatccacatggtg

SEQ ID NO: 203888 - DNA, 22 bp, Artificial Sequence
  Synthetic oligonucleotide; TTG chr2 60518846 60518867 60518863 60518868 +
ctcgatgggcaaagatcaagag

SEQ ID NO: 203889 - DNA, 22 bp, Artificial Sequence
  Synthetic oligonucleotide; CTC chr2 60518849 60518870 60518866 60518871 +
gatgggcaaagatcaagaggca

SEQ ID NO: 203890 - DNA, 22 bp, Artificial Sequence
  Synthetic oligonucleotide; TTC chr2 60518878 60518899 60518895 60518900 +
accaccagccgtatttcctggg

SEQ ID NO: 203891 - DNA, 22 bp, Artificial Sequence
  Synthetic oligonucleotide; TTT chr2 60518894 60518915 60518911 60518916 +
cctggggctgcttgttactgac

SEQ ID NO: 203892 - DNA, 22 bp, Artificial Sequence
  Synthetic oligonucleotide; TTC chr2 60518895 60518916 60518912 60518917 +
ctggggctgcttgttactgaca

SEQ ID NO: 203893 - DNA, 22 bp, Artificial Sequence
  Synthetic oligonucleotide; CTG chr2 60518898 60518919 60518915 60518920 +
gggctgcttgttactgacattc

SEQ ID NO: 203894 - DNA, 22 bp, Artificial Sequence
  Synthetic oligonucleotide; CTG chr2 60518904 60518925 60518921 60518926 +
cttgttactgacattctgtcat

SEQ ID NO: 203895 - DNA, 22 bp, Artificial Sequence
  Synthetic oligonucleotide; CTT chr2 60518907 60518928 60518924 60518929 +
gttactgacattctgtcattca

SEQ ID NO: 203896 - DNA, 22 bp, Artificial Sequence
  Synthetic oligonucleotide; TTG chr2 60518908 60518929 60518925 60518930 +
ttactgacattctgtcattcaa

SEQ ID NO: 203897 - DNA, 22 bp, Artificial Sequence
  Synthetic oligonucleotide; TTA chr2 60518911 60518932 60518928 60518933 +
ctgacattctgtcattcaaggt

SEQ ID NO: 203898 - DNA, 22 bp, Artificial Sequence
  Synthetic oligonucleotide; CTG chr2 60518914 60518935 60518931 60518936 +
acattctgtcattcaaggtggg

SEQ ID NO: 203899 - DNA, 22 bp, Artificial Sequence
  Synthetic oligonucleotide; TTC chr2 60518920 60518941 60518937 60518942 +
tgtcattcaaggtgggtcctga

SEQ ID NO: 203900 - DNA, 22 bp, Artificial Sequence
  Synthetic oligonucleotide; CTG chr2 60518922 60518943 60518939 60518944 +
tcattcaaggtgggtcctgaag

SEQ ID NO: 203901 - DNA, 22 bp, Artificial Sequence
  Synthetic oligonucleotide; TTC chr2 60518928 60518949 60518945 60518950 +
aaggtgggtcctgaagccacag

SEQ ID NO: 203902 - DNA, 22 bp, Artificial Sequence
  Synthetic oligonucleotide; CTG chr2 60518941 60518962 60518958 60518963 +
aagccacagtaagcaccaaatc

SEQ ID NO: 203903 - DNA, 22 bp, Artificial Sequence
  Synthetic oligonucleotide; CTG chr2 60518965 60518986 60518982 60518987 +
ctccctacaatccacagcaaaa

SEQ ID NO: 203904 - DNA, 22 bp, Artificial Sequence
  Synthetic oligonucleotide; CTC chr2 60518968 60518989 60518985 60518990 +
cctacaatccacagcaaaagga

SEQ ID NO: 203905 - DNA, 22 bp, Artificial Sequence
  Synthetic oligonucleotide; CTA chr2 60518972 60518993 60518989 60518994 +
caatccacagcaaaaggagagt

SEQ ID NO: 203906 - DNA, 22 bp, Artificial Sequence
  Synthetic oligonucleotide; TTC chr2 60518996 60519017 60519013 60519018 +
cttcttttaaagagcgatggca

SEQ ID NO: 203907 - DNA, 22 bp, Artificial Sequence
  Synthetic oligonucleotide; CTT chr2 60518999 60519020 60519016 60519021 +
cttttaaagagcgatggcacac

SEQ ID NO: 203908 - DNA, 22 bp, Artificial Sequence
  Synthetic oligonucleotide; TTC chr2 60519000 60519021 60519017 60519022 +
ttttaaagagcgatggcacaca

SEQ ID NO: 203909 - DNA, 22 bp, Artificial Sequence
  Synthetic oligonucleotide; CTT chr2 60519002 60519023 60519019 60519024 +
ttaaagagcgatggcacacatc

SEQ ID NO: 203910 - DNA, 22 bp, Artificial Sequence
  Synthetic oligonucleotide; TTT chr2 60519003 60519024 60519020 60519025 +
taaagagcgatggcacacatct

SEQ ID NO: 203911 - DNA, 22 bp, Artificial Sequence
  Synthetic oligonucleotide; TTT chr2 60519004 60519025 60519021 60519026 +
aaagagcgatggcacacatctc

SEQ ID NO: 203912 - DNA, 22 bp, Artificial Sequence
  Synthetic oligonucleotide; TTA chr2 60519005 60519026 60519022 60519027 +
aagagcgatggcacacatctct

SEQ ID NO: 203913 - DNA, 22 bp, Artificial Sequence
  Synthetic oligonucleotide; CTC chr2 60519026 60519047 60519043 60519048 +
tcaactcttgagagaaaatgga

SEQ ID NO: 203914 - DNA, 22 bp, Artificial Sequence
  Synthetic oligonucleotide; CTC chr2 60519028 60519049 60519045 60519050 +
aactcttgagagaaaatggaca

SEQ ID NO: 203915 - DNA, 22 bp, Artificial Sequence
  Synthetic oligonucleotide; CTC chr2 60519033 60519054 60519050 60519055 +
ttgagagaaaatggacagaagt

SEQ ID NO: 203916 - DNA, 22 bp, Artificial Sequence
  Synthetic oligonucleotide; CTT chr2 60519035 60519056 60519052 60519057 +
gagagaaaatggacagaagtgg

SEQ ID NO: 203917 - DNA, 22 bp, Artificial Sequence
  Synthetic oligonucleotide; TTG chr2 60519036 60519057 60519053 60519058 +
agagaaaatggacagaagtggg

SEQ ID NO: 203918 - DNA, 22 bp, Artificial Sequence
  Synthetic oligonucleotide; TTT chr2 60519062 60519083 60519079 60519084 +
ttcaatcctgataccagcagga

SEQ ID NO: 203919 - DNA, 22 bp, Artificial Sequence
  Synthetic oligonucleotide; TTT chr2 60519063 60519084 60519080 60519085 +
tcaatcctgataccagcaggaa

SEQ ID NO: 203920 - DNA, 22 bp, Artificial Sequence
  Synthetic oligonucleotide; TTT chr2 60519064 60519085 60519081 60519086 +
caatcctgataccagcaggaaa

SEQ ID NO: 203921 - DNA, 22 bp, Artificial Sequence
  Synthetic oligonucleotide; TTC chr2 60519065 60519086 60519082 60519087 +
aatcctgataccagcaggaaac

SEQ ID NO: 203922 - DNA, 22 bp, Artificial Sequence
  Synthetic oligonucleotide; CTG chr2 60519072 60519093 60519089 60519094 +
ataccagcaggaaacagggagt

SEQ ID NO: 203923 - DNA, 22 bp, Artificial Sequence
  Synthetic oligonucleotide; CTC chr2 60519097 60519118 60519114 60519119 +
tggtaggtactaccaaaccaag

SEQ ID NO: 203924 - DNA, 22 bp, Artificial Sequence
  Synthetic oligonucleotide; CTG chr2 60519099 60519120 60519116 60519121 +
gtaggtactaccaaaccaagaa

SEQ ID NO: 203925 - DNA, 22 bp, Artificial Sequence
  Synthetic oligonucleotide; CTA chr2 60519109 60519130 60519126 60519131 +
ccaaaccaagaagcttcttttc

SEQ ID NO: 203926 - DNA, 22 bp, Artificial Sequence
  Synthetic oligonucleotide; CTT chr2 60519125 60519146 60519142 60519147 +
cttttctcccaagtacaccagg

SEQ ID NO: 203927 - DNA, 22 bp, Artificial Sequence
  Synthetic oligonucleotide; TTC chr2 60519126 60519147 60519143 60519148 +
ttttctcccaagtacaccagga

SEQ ID NO: 203928 - DNA, 22 bp, Artificial Sequence
  Synthetic oligonucleotide; CTT chr2 60519128 60519149 60519145 60519150 +
ttctcccaagtacaccaggaac

SEQ ID NO: 203929 - DNA, 22 bp, Artificial Sequence
  Synthetic oligonucleotide; TTT chr2 60519129 60519150 60519146 60519151 +
tctcccaagtacaccaggaacc

SEQ ID NO: 203930 - DNA, 22 bp, Artificial Sequence
  Synthetic oligonucleotide; TTT chr2 60519130 60519151 60519147 60519152 +
ctcccaagtacaccaggaaccc

SEQ ID NO: 203931 - DNA, 22 bp, Artificial Sequence
  Synthetic oligonucleotide; TTC chr2 60519131 60519152 60519148 60519153 +
tcccaagtacaccaggaacccc

SEQ ID NO: 203932 - DNA, 22 bp, Artificial Sequence
  Synthetic oligonucleotide; CTC chr2 60519133 60519154 60519150 60519155 +
ccaagtacaccaggaacccctt

SEQ ID NO: 203933 - DNA, 22 bp, Artificial Sequence
  Synthetic oligonucleotide; CTT chr2 60519155 60519176 60519172 60519177 +
tcaaatacaggcgctacaaaaa

SEQ ID NO: 203934 - DNA, 22 bp, Artificial Sequence
  Synthetic oligonucleotide; TTT chr2 60519156 60519177 60519173 60519178 +
caaatacaggcgctacaaaaaa

SEQ ID NO: 203935 - DNA, 22 bp, Artificial Sequence
  Synthetic oligonucleotide; TTC chr2 60519157 60519178 60519174 60519179 +
aaatacaggcgctacaaaaaaa

SEQ ID NO: 203936 - DNA, 22 bp, Artificial Sequence
  Synthetic oligonucleotide; CTA chr2 60519171 60519192 60519188 60519193 +
caaaaaaagaaataggtgtgaa

SEQ ID NO: 203937 - DNA, 22 bp, Artificial Sequence
  Synthetic oligonucleotide; CTG chr2 60519216 60519237 60519233 60519238 +
aggactatgcatgctctgtcta

SEQ ID NO: 203938 - DNA, 22 bp, Artificial Sequence
  Synthetic oligonucleotide; CTA chr2 60519223 60519244 60519240 60519245 +
tgcatgctctgtctatgggtat

SEQ ID NO: 203939 - DNA, 22 bp, Artificial Sequence
  Synthetic oligonucleotide; CTC chr2 60519232 60519253 60519249 60519254 +
tgtctatgggtatcaacacctt

SEQ ID NO: 203940 - DNA, 22 bp, Artificial Sequence
  Synthetic oligonucleotide; CTG chr2 60519234 60519255 60519251 60519256 +
tctatgggtatcaacaccttta

SEQ ID NO: 203941 - DNA, 22 bp, Artificial Sequence
  Synthetic oligonucleotide; CTA chr2 60519238 60519259 60519255 60519260 +
tgggtatcaacacctttaaggc

SEQ ID NO: 203942 - DNA, 22 bp, Artificial Sequence
  Synthetic oligonucleotide; CTT chr2 60519254 60519275 60519271 60519276 +
taaggcattttgcggtcttttt

SEQ ID NO: 203943 - DNA, 22 bp, Artificial Sequence
  Synthetic oligonucleotide; TTT chr2 60519255 60519276 60519272 60519277 +
aaggcattttgcggtctttttg

SEQ ID NO: 203944 - DNA, 22 bp, Artificial Sequence
  Synthetic oligonucleotide; TTA chr2 60519256 60519277 60519273 60519278 +
aggcattttgcggtctttttga

SEQ ID NO: 203945 - DNA, 22 bp, Artificial Sequence
  Synthetic oligonucleotide; TTT chr2 60519264 60519285 60519281 60519286 +
tgcggtctttttgattctataa

SEQ ID NO: 203946 - DNA, 22 bp, Artificial Sequence
  Synthetic oligonucleotide; TTT chr2 60519265 60519286 60519282 60519287 +
gcggtctttttgattctataac

SEQ ID NO: 203947 - DNA, 22 bp, Artificial Sequence
  Synthetic oligonucleotide; TTG chr2 60519266 60519287 60519283 60519288 +
cggtctttttgattctataacc

SEQ ID NO: 203948 - DNA, 22 bp, Artificial Sequence
  Synthetic oligonucleotide; CTT chr2 60519273 60519294 60519290 60519295 +
tttgattctataacctccatat

SEQ ID NO: 203949 - DNA, 22 bp, Artificial Sequence
  Synthetic oligonucleotide; TTT chr2 60519274 60519295 60519291 60519296 +
ttgattctataacctccatatt

SEQ ID NO: 203950 - DNA, 22 bp, Artificial Sequence
  Synthetic oligonucleotide; TTT chr2 60519275 60519296 60519292 60519297 +
tgattctataacctccatattg

SEQ ID NO: 203951 - DNA, 22 bp, Artificial Sequence
  Synthetic oligonucleotide; TTT chr2 60519276 60519297 60519293 60519298 +
gattctataacctccatattga

SEQ ID NO: 203952 - DNA, 22 bp, Artificial Sequence
  Synthetic oligonucleotide; TTG chr2 60519277 60519298 60519294 60519299 +
attctataacctccatattgag

SEQ ID NO: 203953 - DNA, 22 bp, Artificial Sequence
  Synthetic oligonucleotide; TTC chr2 60519281 60519302 60519298 60519303 +
tataacctccatattgagagac

SEQ ID NO: 203954 - DNA, 22 bp, Artificial Sequence
  Synthetic oligonucleotide; CTA chr2 60519283 60519304 60519300 60519305 +
taacctccatattgagagacat

SEQ ID NO: 203955 - DNA, 22 bp, Artificial Sequence
  Synthetic oligonucleotide; CTC chr2 60519290 60519311 60519307 60519312 +
catattgagagacataaaacac

SEQ ID NO: 203956 - DNA, 22 bp, Artificial Sequence
  Synthetic oligonucleotide; TTG chr2 60519297 60519318 60519314 60519319 +
agagacataaaacacagaacat

SEQ ID NO: 203957 - DNA, 22 bp, Artificial Sequence
  Synthetic oligonucleotide; TTA chr2 60519321 60519342 60519338 60519343 +
cacctgtcaggtgctgggccct

SEQ ID NO: 203958 - DNA, 22 bp, Artificial Sequence
  Synthetic oligonucleotide; CTG chr2 60519327 60519348 60519344 60519349 +
tcaggtgctgggccctgaacta

SEQ ID NO: 203959 - DNA, 22 bp, Artificial Sequence
  Synthetic oligonucleotide; CTG chr2 60519337 60519358 60519354 60519359 +
ggccctgaactatctccaggca

SEQ ID NO: 203960 - DNA, 22 bp, Artificial Sequence
  Synthetic oligonucleotide; CTG chr2 60519344 60519365 60519361 60519366 +
aactatctccaggcagctgaaa

SEQ ID NO: 203961 - DNA, 22 bp, Artificial Sequence
  Synthetic oligonucleotide; CTA chr2 60519349 60519370 60519366 60519371 +
tctccaggcagctgaaagtcag

SEQ ID NO: 203962 - DNA, 22 bp, Artificial Sequence
  Synthetic oligonucleotide; CTC chr2 60519353 60519374 60519370 60519375 +
caggcagctgaaagtcagtaca

SEQ ID NO: 203963 - DNA, 22 bp, Artificial Sequence
  Synthetic oligonucleotide; CTG chr2 60519363 60519384 60519380 60519385 +
aaagtcagtacatcagcttttt

SEQ ID NO: 203964 - DNA, 22 bp, Artificial Sequence
  Synthetic oligonucleotide; CTT chr2 60519382 60519403 60519399 60519404 +
tttaatgatgtgaaagttaaag

SEQ ID NO: 203965 - DNA, 22 bp, Artificial Sequence
  Synthetic oligonucleotide; TTT chr2 60519383 60519404 60519400 60519405 +
ttaatgatgtgaaagttaaaga

SEQ ID NO: 203966 - DNA, 22 bp, Artificial Sequence
  Synthetic oligonucleotide; TTT chr2 60519384 60519405 60519401 60519406 +
taatgatgtgaaagttaaagat

SEQ ID NO: 203967 - DNA, 22 bp, Artificial Sequence
  Synthetic oligonucleotide; TTT chr2 60519385 60519406 60519402 60519407 +
aatgatgtgaaagttaaagatt

SEQ ID NO: 203968 - DNA, 22 bp, Artificial Sequence
  Synthetic oligonucleotide; TTA chr2 60519386 60519407 60519403 60519408 +
atgatgtgaaagttaaagatta

SEQ ID NO: 203969 - DNA, 22 bp, Artificial Sequence
  Synthetic oligonucleotide; TTA chr2 60519401 60519422 60519418 60519423 +
aagattaaaaacatgttggaac

SEQ ID NO: 203970 - DNA, 22 bp, Artificial Sequence
  Synthetic oligonucleotide; TTA chr2 60519408 60519429 60519425 60519430 +
aaaacatgttggaacgcttact

SEQ ID NO: 203971 - DNA, 22 bp, Artificial Sequence
  Synthetic oligonucleotide; TTG chr2 60519419 60519440 60519436 60519441 +
gaacgcttactttatgcagtgc

SEQ ID NO: 203972 - DNA, 22 bp, Artificial Sequence
  Synthetic oligonucleotide; CTT chr2 60519427 60519448 60519444 60519449 +
actttatgcagtgccaaaaatg

SEQ ID NO: 203973 - DNA, 22 bp, Artificial Sequence
  Synthetic oligonucleotide; TTA chr2 60519428 60519449 60519445 60519450 +
ctttatgcagtgccaaaaatgt

SEQ ID NO: 203974 - DNA, 22 bp, Artificial Sequence
  Synthetic oligonucleotide; CTT chr2 60519431 60519452 60519448 60519453 +
tatgcagtgccaaaaatgtgtc

SEQ ID NO: 203975 - DNA, 22 bp, Artificial Sequence
  Synthetic oligonucleotide; TTT chr2 60519432 60519453 60519449 60519454 +
atgcagtgccaaaaatgtgtct

SEQ ID NO: 203976 - DNA, 22 bp, Artificial Sequence
  Synthetic oligonucleotide; TTA chr2 60519433 60519454 60519450 60519455 +
tgcagtgccaaaaatgtgtcta

SEQ ID NO: 203977 - DNA, 22 bp, Artificial Sequence
  Synthetic oligonucleotide; CTA chr2 60519455 60519476 60519472 60519477 +
taacctgtaaggagagatgggt

SEQ ID NO: 203978 - DNA, 22 bp, Artificial Sequence
  Synthetic oligonucleotide; CTG chr2 60519462 60519483 60519479 60519484 +
taaggagagatgggtgtggaac

SEQ ID NO: 203979 - DNA, 22 bp, Artificial Sequence
  Synthetic oligonucleotide; CTG chr2 60519505 60519526 60519522 60519527 +
cactcatgctgcagagaaaaaa

SEQ ID NO: 203980 - DNA, 22 bp, Artificial Sequence
  Synthetic oligonucleotide; CTC chr2 60519510 60519531 60519527 60519532 +
atgctgcagagaaaaaataagg

SEQ ID NO: 203981 - DNA, 22 bp, Artificial Sequence
  Synthetic oligonucleotide; CTG chr2 60519516 60519537 60519533 60519538 +
cagagaaaaaataaggtcctca

SEQ ID NO: 203982 - DNA, 22 bp, Artificial Sequence
  Synthetic oligonucleotide; CTC chr2 60519537 60519558 60519554 60519559 +
acttgcctgcctgcctgcctgc

SEQ ID NO: 203983 - DNA, 22 bp, Artificial Sequence
  Synthetic oligonucleotide; CTT chr2 60519541 60519562 60519558 60519563 +
gcctgcctgcctgcctgcctgc

SEQ ID NO: 203984 - DNA, 22 bp, Artificial Sequence
  Synthetic oligonucleotide; TTG chr2 60519542 60519563 60519559 60519564 +
cctgcctgcctgcctgcctgcc

SEQ ID NO: 203985 - DNA, 22 bp, Artificial Sequence
  Synthetic oligonucleotide; CTG chr2 60519546 60519567 60519563 60519568 +
cctgcctgcctgcctgcctgcc

SEQ ID NO: 203986 - DNA, 22 bp, Artificial Sequence
  Synthetic oligonucleotide; CTG chr2 60519550 60519571 60519567 60519572 +
cctgcctgcctgcctgcctgcc

SEQ ID NO: 203987 - DNA, 22 bp, Artificial Sequence
  Synthetic oligonucleotide; CTG chr2 60519554 60519575 60519571 60519576 +
cctgcctgcctgcctgcctgcc

SEQ ID NO: 203988 - DNA, 22 bp, Artificial Sequence
  Synthetic oligonucleotide; CTG chr2 60519558 60519579 60519575 60519580 +
cctgcctgcctgcctgcctgcc

SEQ ID NO: 203989 - DNA, 22 bp, Artificial Sequence
  Synthetic oligonucleotide; CTG chr2 60519562 60519583 60519579 60519584 +
cctgcctgcctgcctgcctgcc

SEQ ID NO: 203990 - DNA, 22 bp, Artificial Sequence
  Synthetic oligonucleotide; CTG chr2 60519566 60519587 60519583 60519588 +
cctgcctgcctgcctgccttct

SEQ ID NO: 203991 - DNA, 22 bp, Artificial Sequence
  Synthetic oligonucleotide; CTG chr2 60519570 60519591 60519587 60519592 +
cctgcctgcctgccttctttcc

SEQ ID NO: 203992 - DNA, 22 bp, Artificial Sequence
  Synthetic oligonucleotide; CTG chr2 60519574 60519595 60519591 60519596 +
cctgcctgccttctttccttac

SEQ ID NO: 203993 - DNA, 22 bp, Artificial Sequence
  Synthetic oligonucleotide; CTG chr2 60519578 60519599 60519595 60519600 +
cctgccttctttccttacaaga

SEQ ID NO: 203994 - DNA, 22 bp, Artificial Sequence
  Synthetic oligonucleotide; CTG chr2 60519582 60519603 60519599 60519604 +
ccttctttccttacaagagaaa

SEQ ID NO: 203995 - DNA, 22 bp, Artificial Sequence
  Synthetic oligonucleotide; CTT chr2 60519586 60519607 60519603 60519608 +
ctttccttacaagagaaatcgc

SEQ ID NO: 203996 - DNA, 22 bp, Artificial Sequence
  Synthetic oligonucleotide; TTC chr2 60519587 60519608 60519604 60519609 +
tttccttacaagagaaatcgct

SEQ ID NO: 203997 - DNA, 22 bp, Artificial Sequence
  Synthetic oligonucleotide; CTT chr2 60519589 60519610 60519606 60519611 +
tccttacaagagaaatcgctcc

SEQ ID NO: 203998 - DNA, 22 bp, Artificial Sequence
  Synthetic oligonucleotide; TTT chr2 60519590 60519611 60519607 60519612 +
ccttacaagagaaatcgctcct

SEQ ID NO: 203999 - DNA, 22 bp, Artificial Sequence
  Synthetic oligonucleotide; TTC chr2 60519591 60519612 60519608 60519613 +
cttacaagagaaatcgctcctg

SEQ ID NO: 204000 - DNA, 22 bp, Artificial Sequence
  Synthetic oligonucleotide; CTT chr2 60519594 60519615 60519611 60519616 +
acaagagaaatcgctcctgaaa

SEQ ID NO: 204001 - DNA, 22 bp, Artificial Sequence
  Synthetic oligonucleotide; TTA chr2 60519595 60519616 60519612 60519617 +
caagagaaatcgctcctgaaat

SEQ ID NO: 204002 - DNA, 22 bp, Artificial Sequence
  Synthetic oligonucleotide; CTC chr2 60519610 60519631 60519627 60519632 +
ctgaaatctgacgtgctttgca

SEQ ID NO: 204003 - DNA, 22 bp, Artificial Sequence
  Synthetic oligonucleotide; CTG chr2 60519613 60519634 60519630 60519635 +
aaatctgacgtgctttgcaaca

SEQ ID NO: 204004 - DNA, 22 bp, Artificial Sequence
  Synthetic oligonucleotide; CTG chr2 60519620 60519641 60519637 60519642 +
acgtgctttgcaacagcagtaa

SEQ ID NO: 204005 - DNA, 22 bp, Artificial Sequence
  Synthetic oligonucleotide; CTT chr2 60519628 60519649 60519645 60519650 +
tgcaacagcagtaagttgacca

SEQ ID NO: 204006 - DNA, 22 bp, Artificial Sequence
  Synthetic oligonucleotide; TTT chr2 60519629 60519650 60519646 60519651 +
gcaacagcagtaagttgaccac

SEQ ID NO: 204007 - DNA, 22 bp, Artificial Sequence
  Synthetic oligonucleotide; TTG chr2 60519630 60519651 60519647 60519652 +
caacagcagtaagttgaccact

SEQ ID NO: 204008 - DNA, 22 bp, Artificial Sequence
  Synthetic oligonucleotide; TTG chr2 60519646 60519667 60519663 60519668 +
accactggagaaagtgaggctg

SEQ ID NO: 204009 - DNA, 22 bp, Artificial Sequence
  Synthetic oligonucleotide; CTG chr2 60519653 60519674 60519670 60519675 +
gagaaagtgaggctggaaccac

SEQ ID NO: 204010 - DNA, 22 bp, Artificial Sequence
  Synthetic oligonucleotide; CTG chr2 60519668 60519689 60519685 60519690 +
gaaccactggaatcttgtagat

SEQ ID NO: 204011 - DNA, 22 bp, Artificial Sequence
  Synthetic oligonucleotide; CTG chr2 60519677 60519698 60519694 60519699 +
gaatcttgtagatttctgaggc

SEQ ID NO: 204012 - DNA, 22 bp, Artificial Sequence
  Synthetic oligonucleotide; CTT chr2 60519684 60519705 60519701 60519706 +
gtagatttctgaggccagttct

SEQ ID NO: 204013 - DNA, 22 bp, Artificial Sequence
  Synthetic oligonucleotide; TTG chr2 60519685 60519706 60519702 60519707 +
tagatttctgaggccagttctg

SEQ ID NO: 204014 - DNA, 22 bp, Artificial Sequence
  Synthetic oligonucleotide; TTT chr2 60519692 60519713 60519709 60519714 +
ctgaggccagttctgttctgac

SEQ ID NO: 204015 - DNA, 22 bp, Artificial Sequence
  Synthetic oligonucleotide; TTC chr2 60519693 60519714 60519710 60519715 +
tgaggccagttctgttctgaca

SEQ ID NO: 204016 - DNA, 22 bp, Artificial Sequence
  Synthetic oligonucleotide; CTG chr2 60519695 60519716 60519712 60519717 +
aggccagttctgttctgacaca

SEQ ID NO: 204017 - DNA, 22 bp, Artificial Sequence
  Synthetic oligonucleotide; TTC chr2 60519705 60519726 60519722 60519727 +
tgttctgacacatgcagctggg

SEQ ID NO: 204018 - DNA, 22 bp, Artificial Sequence
  Synthetic oligonucleotide; CTG chr2 60519707 60519728 60519724 60519729 +
ttctgacacatgcagctgggag

SEQ ID NO: 204019 - DNA, 22 bp, Artificial Sequence
  Synthetic oligonucleotide; TTC chr2 60519710 60519731 60519727 60519732 +
tgacacatgcagctgggagcca

SEQ ID NO: 204020 - DNA, 22 bp, Artificial Sequence
  Synthetic oligonucleotide; CTG chr2 60519712 60519733 60519729 60519734 +
acacatgcagctgggagccact

SEQ ID NO: 204021 - DNA, 22 bp, Artificial Sequence
  Synthetic oligonucleotide; CTG chr2 60519725 60519746 60519742 60519747 +
ggagccactggtttaggaattc

SEQ ID NO: 204022 - DNA, 22 bp, Artificial Sequence
  Synthetic oligonucleotide; CTG chr2 60519735 60519756 60519752 60519757 +
gtttaggaattcacgtgggcat

SEQ ID NO: 204023 - DNA, 22 bp, Artificial Sequence
  Synthetic oligonucleotide; TTT chr2 60519739 60519760 60519756 60519761 +
aggaattcacgtgggcatggga

SEQ ID NO: 204024 - DNA, 22 bp, Artificial Sequence
  Synthetic oligonucleotide; TTA chr2 60519740 60519761 60519757 60519762 +
ggaattcacgtgggcatgggac

SEQ ID NO: 204025 - DNA, 22 bp, Artificial Sequence
  Synthetic oligonucleotide; TTC chr2 60519747 60519768 60519764 60519769 +
acgtgggcatgggactgtgctt

SEQ ID NO: 204026 - DNA, 22 bp, Artificial Sequence
  Synthetic oligonucleotide; CTG chr2 60519764 60519785 60519781 60519786 +
tgcttattcagaaagggctccc

SEQ ID NO: 204027 - DNA, 22 bp, Artificial Sequence
  Synthetic oligonucleotide; CTT chr2 60519769 60519790 60519786 60519791 +
attcagaaagggctcccagtca

SEQ ID NO: 204028 - DNA, 22 bp, Artificial Sequence
  Synthetic oligonucleotide; TTA chr2 60519770 60519791 60519787 60519792 +
ttcagaaagggctcccagtcac

SEQ ID NO: 204029 - DNA, 22 bp, Artificial Sequence
  Synthetic oligonucleotide; TTC chr2 60519773 60519794 60519790 60519795 +
agaaagggctcccagtcacatc

SEQ ID NO: 204030 - DNA, 22 bp, Artificial Sequence
  Synthetic oligonucleotide; CTC chr2 60519784 60519805 60519801 60519806 +
ccagtcacatcctgtattctcc

SEQ ID NO: 204031 - DNA, 22 bp, Artificial Sequence
  Synthetic oligonucleotide; CTG chr2 60519798 60519819 60519815 60519820 +
tattctcctaaattactccaat

SEQ ID NO: 204032 - DNA, 22 bp, Artificial Sequence
  Synthetic oligonucleotide; TTC chr2 60519803 60519824 60519820 60519825 +
tcctaaattactccaatgacaa

SEQ ID NO: 204033 - DNA, 22 bp, Artificial Sequence
  Synthetic oligonucleotide; CTC chr2 60519805 60519826 60519822 60519827 +
ctaaattactccaatgacaaag

SEQ ID NO: 204034 - DNA, 22 bp, Artificial Sequence
  Synthetic oligonucleotide; CTA chr2 60519808 60519829 60519825 60519830 +
aattactccaatgacaaagaaa

SEQ ID NO: 204035 - DNA, 22 bp, Artificial Sequence
  Synthetic oligonucleotide; TTA chr2 60519813 60519834 60519830 60519835 +
ctccaatgacaaagaaaactca

SEQ ID NO: 204036 - DNA, 22 bp, Artificial Sequence
  Synthetic oligonucleotide; CTC chr2 60519816 60519837 60519833 60519838 +
caatgacaaagaaaactcagtg

SEQ ID NO: 204037 - DNA, 22 bp, Artificial Sequence
  Synthetic oligonucleotide; CTC chr2 60519834 60519855 60519851 60519856 +
agtgaagacaaagagatcgttt

SEQ ID NO: 204038 - DNA, 22 bp, Artificial Sequence
  Synthetic oligonucleotide; TTT chr2 60519856 60519877 60519873 60519878 +
tcataggcattgtcatttgcca

SEQ ID NO: 204039 - DNA, 22 bp, Artificial Sequence
  Synthetic oligonucleotide; TTT chr2 60519857 60519878 60519874 60519879 +
cataggcattgtcatttgccaa

SEQ ID NO: 204040 - DNA, 22 bp, Artificial Sequence
  Synthetic oligonucleotide; TTC chr2 60519858 60519879 60519875 60519880 +
ataggcattgtcatttgccaat

SEQ ID NO: 204041 - DNA, 22 bp, Artificial Sequence
  Synthetic oligonucleotide; TTG chr2 60519868 60519889 60519885 60519890 +
tcatttgccaatccataactca

SEQ ID NO: 204042 - DNA, 22 bp, Artificial Sequence
  Synthetic oligonucleotide; TTT chr2 60519874 60519895 60519891 60519896 +
gccaatccataactcaggaatt

SEQ ID NO: 204043 - DNA, 22 bp, Artificial Sequence
  Synthetic oligonucleotide; TTG chr2 60519875 60519896 60519892 60519897 +
ccaatccataactcaggaattc

SEQ ID NO: 204044 - DNA, 22 bp, Artificial Sequence
  Synthetic oligonucleotide; CTC chr2 60519889 60519910 60519906 60519911 +
aggaattcatggctatgcttgg

SEQ ID NO: 204045 - DNA, 22 bp, Artificial Sequence
  Synthetic oligonucleotide; TTC chr2 60519897 60519918 60519914 60519919 +
atggctatgcttggataattct

SEQ ID NO: 204046 - DNA, 22 bp, Artificial Sequence
  Synthetic oligonucleotide; CTA chr2 60519904 60519925 60519921 60519926 +
tgcttggataattctctctaga

SEQ ID NO: 204047 - DNA, 22 bp, Artificial Sequence
  Synthetic oligonucleotide; CTT chr2 60519909 60519930 60519926 60519931 +
ggataattctctctagacttgg

SEQ ID NO: 204048 - DNA, 22 bp, Artificial Sequence
  Synthetic oligonucleotide; TTG chr2 60519910 60519931 60519927 60519932 +
gataattctctctagacttgga

SEQ ID NO: 204049 - DNA, 22 bp, Artificial Sequence
  Synthetic oligonucleotide; TTC chr2 60519918 60519939 60519935 60519940 +
tctctagacttggagtgttaaa

SEQ ID NO: 204050 - DNA, 22 bp, Artificial Sequence
  Synthetic oligonucleotide; CTC chr2 60519920 60519941 60519937 60519942 +
tctagacttggagtgttaaaag

SEQ ID NO: 204051 - DNA, 22 bp, Artificial Sequence
  Synthetic oligonucleotide; CTC chr2 60519922 60519943 60519939 60519944 +
tagacttggagtgttaaaagtt

SEQ ID NO: 204052 - DNA, 22 bp, Artificial Sequence
  Synthetic oligonucleotide; CTA chr2 60519924 60519945 60519941 60519946 +
gacttggagtgttaaaagtttg

SEQ ID NO: 204053 - DNA, 22 bp, Artificial Sequence
  Synthetic oligonucleotide; CTT chr2 60519929 60519950 60519946 60519951 +
ggagtgttaaaagtttgcacct

SEQ ID NO: 204054 - DNA, 22 bp, Artificial Sequence
  Synthetic oligonucleotide; TTG chr2 60519930 60519951 60519947 60519952 +
gagtgttaaaagtttgcaccta

SEQ ID NO: 204055 - DNA, 22 bp, Artificial Sequence
  Synthetic oligonucleotide; TTA chr2 60519938 60519959 60519955 60519960 +
aaagtttgcacctagttattct

SEQ ID NO: 204056 - DNA, 22 bp, Artificial Sequence
  Synthetic oligonucleotide; TTT chr2 60519945 60519966 60519962 60519967 +
gcacctagttattctcccctct

SEQ ID NO: 204057 - DNA, 22 bp, Artificial Sequence
  Synthetic oligonucleotide; TTG chr2 60519946 60519967 60519963 60519968 +
cacctagttattctcccctctc

SEQ ID NO: 204058 - DNA, 22 bp, Artificial Sequence
  Synthetic oligonucleotide; CTA chr2 60519952 60519973 60519969 60519974 +
gttattctcccctctctctggc

SEQ ID NO: 204059 - DNA, 22 bp, Artificial Sequence
  Synthetic oligonucleotide; TTA chr2 60519956 60519977 60519973 60519978 +
ttctcccctctctctggcagga

SEQ ID NO: 204060 - DNA, 22 bp, Artificial Sequence
  Synthetic oligonucleotide; TTC chr2 60519959 60519980 60519976 60519981 +
tcccctctctctggcaggagaa

SEQ ID NO: 204061 - DNA, 22 bp, Artificial Sequence
  Synthetic oligonucleotide; CTC chr2 60519961 60519982 60519978 60519983 +
ccctctctctggcaggagaatc

SEQ ID NO: 204062 - DNA, 22 bp, Artificial Sequence
  Synthetic oligonucleotide; CTC chr2 60519966 60519987 60519983 60519988 +
tctctggcaggagaatcatgtc

SEQ ID NO: 204063 - DNA, 22 bp, Artificial Sequence
  Synthetic oligonucleotide; CTC chr2 60519968 60519989 60519985 60519990 +
tctggcaggagaatcatgtcac

SEQ ID NO: 204064 - DNA, 22 bp, Artificial Sequence
  Synthetic oligonucleotide; CTC chr2 60519970 60519991 60519987 60519992 +
tggcaggagaatcatgtcactg

SEQ ID NO: 204065 - DNA, 22 bp, Artificial Sequence
  Synthetic oligonucleotide; CTG chr2 60519972 60519993 60519989 60519994 +
gcaggagaatcatgtcactggc

SEQ ID NO: 204066 - DNA, 22 bp, Artificial Sequence
  Synthetic oligonucleotide; CTG chr2 60519992 60520013 60520009 60520014 +
gcaagcaattattgtatcctct

SEQ ID NO: 204067 - DNA, 22 bp, Artificial Sequence
  Synthetic oligonucleotide; TTA chr2 60520003 60520024 60520020 60520025 +
ttgtatcctcttcaaataattc

SEQ ID NO: 204068 - DNA, 22 bp, Artificial Sequence
  Synthetic oligonucleotide; TTG chr2 60520006 60520027 60520023 60520028 +
tatcctcttcaaataattcggc

SEQ ID NO: 204069 - DNA, 22 bp, Artificial Sequence
  Synthetic oligonucleotide; CTC chr2 60520013 60520034 60520030 60520035 +
ttcaaataattcggcctaaatt

SEQ ID NO: 204070 - DNA, 22 bp, Artificial Sequence
  Synthetic oligonucleotide; CTT chr2 60520015 60520036 60520032 60520037 +
caaataattcggcctaaatttt

SEQ ID NO: 204071 - DNA, 22 bp, Artificial Sequence
  Synthetic oligonucleotide; TTC chr2 60520016 60520037 60520033 60520038 +
aaataattcggcctaaattttc

SEQ ID NO: 204072 - DNA, 22 bp, Artificial Sequence
  Synthetic oligonucleotide; TTC chr2 60520025 60520046 60520042 60520047 +
ggcctaaattttcatttatgcc

SEQ ID NO: 204073 - DNA, 22 bp, Artificial Sequence
  Synthetic oligonucleotide; CTA chr2 60520031 60520052 60520048 60520053 +
aattttcatttatgcctgtgta

SEQ ID NO: 204074 - DNA, 22 bp, Artificial Sequence
  Synthetic oligonucleotide; TTT chr2 60520036 60520057 60520053 60520058 +
tcatttatgcctgtgtatttat

SEQ ID NO: 204075 - DNA, 22 bp, Artificial Sequence
  Synthetic oligonucleotide; TTT chr2 60520037 60520058 60520054 60520059 +
catttatgcctgtgtatttatg

SEQ ID NO: 204076 - DNA, 22 bp, Artificial Sequence
  Synthetic oligonucleotide; TTC chr2 60520038 60520059 60520055 60520060 +
atttatgcctgtgtatttatgc

SEQ ID NO: 204077 - DNA, 22 bp, Artificial Sequence
  Synthetic oligonucleotide; TTT chr2 60520042 60520063 60520059 60520064 +
atgcctgtgtatttatgcacaa

SEQ ID NO: 204078 - DNA, 22 bp, Artificial Sequence
  Synthetic oligonucleotide; TTA chr2 60520043 60520064 60520060 60520065 +
tgcctgtgtatttatgcacaaa

SEQ ID NO: 204079 - DNA, 22 bp, Artificial Sequence
  Synthetic oligonucleotide; CTG chr2 60520049 60520070 60520066 60520071 +
tgtatttatgcacaaatgtgtg

SEQ ID NO: 204080 - DNA, 22 bp, Artificial Sequence
  Synthetic oligonucleotide; TTT chr2 60520056 60520077 60520073 60520078 +
atgcacaaatgtgtgtatgata

SEQ ID NO: 204081 - DNA, 22 bp, Artificial Sequence
  Synthetic oligonucleotide; TTA chr2 60520057 60520078 60520074 60520079 +
tgcacaaatgtgtgtatgatat

SEQ ID NO: 204082 - DNA, 22 bp, Artificial Sequence
  Synthetic oligonucleotide; TTA chr2 60520086 60520107 60520103 60520108 +
tggcttctttttctgaaaattg

SEQ ID NO: 204083 - DNA, 22 bp, Artificial Sequence
  Synthetic oligonucleotide; CTT chr2 60520092 60520113 60520109 60520114 +
ctttttctgaaaattgaaaaat

SEQ ID NO: 204084 - DNA, 22 bp, Artificial Sequence
  Synthetic oligonucleotide; TTC chr2 60520093 60520114 60520110 60520115 +
tttttctgaaaattgaaaaatt

SEQ ID NO: 204085 - DNA, 22 bp, Artificial Sequence
  Synthetic oligonucleotide; CTT chr2 60520095 60520116 60520112 60520117 +
tttctgaaaattgaaaaattca

SEQ ID NO: 204086 - DNA, 22 bp, Artificial Sequence
  Synthetic oligonucleotide; TTT chr2 60520096 60520117 60520113 60520118 +
ttctgaaaattgaaaaattcag

SEQ ID NO: 204087 - DNA, 22 bp, Artificial Sequence
  Synthetic oligonucleotide; TTT chr2 60520097 60520118 60520114 60520119 +
tctgaaaattgaaaaattcaga

SEQ ID NO: 204088 - DNA, 22 bp, Artificial Sequence
  Synthetic oligonucleotide; TTT chr2 60520098 60520119 60520115 60520120 +
ctgaaaattgaaaaattcagaa

SEQ ID NO: 204089 - DNA, 22 bp, Artificial Sequence
  Synthetic oligonucleotide; TTC chr2 60520099 60520120 60520116 60520121 +
tgaaaattgaaaaattcagaaa

SEQ ID NO: 204090 - DNA, 22 bp, Artificial Sequence
  Synthetic oligonucleotide; CTG chr2 60520101 60520122 60520118 60520123 +
aaaattgaaaaattcagaaagc

SEQ ID NO: 204091 - DNA, 22 bp, Artificial Sequence
  Synthetic oligonucleotide; TTG chr2 60520108 60520129 60520125 60520130 +
aaaaattcagaaagccaaagat

SEQ ID NO: 204092 - DNA, 22 bp, Artificial Sequence
  Synthetic oligonucleotide; TTC chr2 60520116 60520137 60520133 60520138 +
agaaagccaaagataatagaat

SEQ ID NO: 204093 - DNA, 22 bp, Artificial Sequence
  Synthetic oligonucleotide; CTT chr2 60520145 60520166 60520162 60520167 +
gcgtggcaaggtatattgatta

SEQ ID NO: 204094 - DNA, 22 bp, Artificial Sequence
  Synthetic oligonucleotide; TTG chr2 60520146 60520167 60520163 60520168 +
cgtggcaaggtatattgattag

SEQ ID NO: 204095 - DNA, 22 bp, Artificial Sequence
  Synthetic oligonucleotide; TTG chr2 60520163 60520184 60520180 60520185 +
attaggtaggaatcaaaaataa

SEQ ID NO: 204096 - DNA, 22 bp, Artificial Sequence
  Synthetic oligonucleotide; TTA chr2 60520167 60520188 60520184 60520189 +
ggtaggaatcaaaaataattgc

SEQ ID NO: 204097 - DNA, 22 bp, Artificial Sequence
  Synthetic oligonucleotide; TTG chr2 60520188 60520209 60520205 60520210 +
caaaattatttatgcaggagta

SEQ ID NO: 204098 - DNA, 22 bp, Artificial Sequence
  Synthetic oligonucleotide; TTA chr2 60520196 60520217 60520213 60520218 +
tttatgcaggagtattaaaatt

SEQ ID NO: 204099 - DNA, 22 bp, Artificial Sequence
  Synthetic oligonucleotide; TTT chr2 60520199 60520220 60520216 60520221 +
atgcaggagtattaaaattttc

SEQ ID NO: 204100 - DNA, 22 bp, Artificial Sequence
  Synthetic oligonucleotide; TTA chr2 60520200 60520221 60520217 60520222 +
tgcaggagtattaaaattttcc

SEQ ID NO: 204101 - DNA, 22 bp, Artificial Sequence
  Synthetic oligonucleotide; TTA chr2 60520213 60520234 60520230 60520235 +
aaattttcctcaaaagttccca

SEQ ID NO: 204102 - DNA, 22 bp, Artificial Sequence
  Synthetic oligonucleotide; TTT chr2 60520219 60520240 60520236 60520241 +
tcctcaaaagttcccaggcaaa

SEQ ID NO: 204103 - DNA, 22 bp, Artificial Sequence
  Synthetic oligonucleotide; TTT chr2 60520220 60520241 60520237 60520242 +
cctcaaaagttcccaggcaaat

SEQ ID NO: 204104 - DNA, 22 bp, Artificial Sequence
  Synthetic oligonucleotide; TTC chr2 60520221 60520242 60520238 60520243 +
ctcaaaagttcccaggcaaatg

SEQ ID NO: 204105 - DNA, 22 bp, Artificial Sequence
  Synthetic oligonucleotide; CTC chr2 60520224 60520245 60520241 60520246 +
aaaagttcccaggcaaatgggt

SEQ ID NO: 204106 - DNA, 22 bp, Artificial Sequence
  Synthetic oligonucleotide; TTC chr2 60520232 60520253 60520249 60520254 +
ccaggcaaatgggttcctcttt

SEQ ID NO: 204107 - DNA, 22 bp, Artificial Sequence
  Synthetic oligonucleotide; TTC chr2 60520248 60520269 60520265 60520270 +
ctctttaattttcacccttaca

SEQ ID NO: 204108 - DNA, 22 bp, Artificial Sequence
  Synthetic oligonucleotide; CTC chr2 60520251 60520272 60520268 60520273 +
tttaattttcacccttacaata

SEQ ID NO: 204109 - DNA, 22 bp, Artificial Sequence
  Synthetic oligonucleotide; CTT chr2 60520253 60520274 60520270 60520275 +
taattttcacccttacaataaa

SEQ ID NO: 204110 - DNA, 22 bp, Artificial Sequence
  Synthetic oligonucleotide; TTT chr2 60520254 60520275 60520271 60520276 +
aattttcacccttacaataaac

SEQ ID NO: 204111 - DNA, 22 bp, Artificial Sequence
  Synthetic oligonucleotide; TTA chr2 60520255 60520276 60520272 60520277 +
attttcacccttacaataaact

SEQ ID NO: 204112 - DNA, 22 bp, Artificial Sequence
  Synthetic oligonucleotide; TTT chr2 60520259 60520280 60520276 60520281 +
tcacccttacaataaactcttc

SEQ ID NO: 204113 - DNA, 22 bp, Artificial Sequence
  Synthetic oligonucleotide; TTT chr2 60520260 60520281 60520277 60520282 +
cacccttacaataaactcttct

SEQ ID NO: 204114 - DNA, 22 bp, Artificial Sequence
  Synthetic oligonucleotide; TTC chr2 60520261 60520282 60520278 60520283 +
acccttacaataaactcttctg

SEQ ID NO: 204115 - DNA, 22 bp, Artificial Sequence
  Synthetic oligonucleotide; CTT chr2 60520267 60520288 60520284 60520289 +
acaataaactcttctgcaggtt

SEQ ID NO: 204116 - DNA, 22 bp, Artificial Sequence
  Synthetic oligonucleotide; TTA chr2 60520268 60520289 60520285 60520290 +
caataaactcttctgcaggttt

SEQ ID NO: 204117 - DNA, 22 bp, Artificial Sequence
  Synthetic oligonucleotide; CTC chr2 60520278 60520299 60520295 60520300 +
ttctgcaggttttgtttatttt

SEQ ID NO: 204118 - DNA, 22 bp, Artificial Sequence
  Synthetic oligonucleotide; CTT chr2 60520280 60520301 60520297 60520302 +
ctgcaggttttgtttattttga

SEQ ID NO: 204119 - DNA, 22 bp, Artificial Sequence
  Synthetic oligonucleotide; TTC chr2 60520281 60520302 60520298 60520303 +
tgcaggttttgtttattttgag

SEQ ID NO: 204120 - DNA, 22 bp, Artificial Sequence
  Synthetic oligonucleotide; CTG chr2 60520283 60520304 60520300 60520305 +
caggttttgtttattttgagga

SEQ ID NO: 204121 - DNA, 22 bp, Artificial Sequence
  Synthetic oligonucleotide; TTT chr2 60520290 60520311 60520307 60520312 +
tgtttattttgaggaaacattt

SEQ ID NO: 204122 - DNA, 22 bp, Artificial Sequence
  Synthetic oligonucleotide; TTT chr2 60520291 60520312 60520308 60520313 +
gtttattttgaggaaacatttc

SEQ ID NO: 204123 - DNA, 22 bp, Artificial Sequence
  Synthetic oligonucleotide; TTG chr2 60520292 60520313 60520309 60520314 +
tttattttgaggaaacatttca

SEQ ID NO: 204124 - DNA, 22 bp, Artificial Sequence
  Synthetic oligonucleotide; TTT chr2 60520295 60520316 60520312 60520317 +
attttgaggaaacatttcactt

SEQ ID NO: 204125 - DNA, 22 bp, Artificial Sequence
  Synthetic oligonucleotide; TTA chr2 60520296 60520317 60520313 60520318 +
ttttgaggaaacatttcacttt

SEQ ID NO: 204126 - DNA, 22 bp, Artificial Sequence
  Synthetic oligonucleotide; TTT chr2 60520299 60520320 60520316 60520321 +
tgaggaaacatttcactttttt

SEQ ID NO: 204127 - DNA, 22 bp, Artificial Sequence
  Synthetic oligonucleotide; TTT chr2 60520300 60520321 60520317 60520322 +
gaggaaacatttcacttttttt

SEQ ID NO: 204128 - DNA, 22 bp, Artificial Sequence
  Synthetic oligonucleotide; TTG chr2 60520301 60520322 60520318 60520323 +
aggaaacatttcactttttttt

SEQ ID NO: 204129 - DNA, 22 bp, Artificial Sequence
  Synthetic oligonucleotide; TTT chr2 60520312 60520333 60520329 60520334 +
cactttttttttcaagacatga

SEQ ID NO: 204130 - DNA, 22 bp, Artificial Sequence
  Synthetic oligonucleotide; TTC chr2 60520313 60520334 60520330 60520335 +
actttttttttcaagacatgag

SEQ ID NO: 204131 - DNA, 22 bp, Artificial Sequence
  Synthetic oligonucleotide; CTT chr2 60520317 60520338 60520334 60520339 +
tttttttcaagacatgaggtgt

SEQ ID NO: 204132 - DNA, 22 bp, Artificial Sequence
  Synthetic oligonucleotide; TTT chr2 60520318 60520339 60520335 60520340 +
ttttttcaagacatgaggtgtg

SEQ ID NO: 204133 - DNA, 22 bp, Artificial Sequence
  Synthetic oligonucleotide; TTT chr2 60520319 60520340 60520336 60520341 +
tttttcaagacatgaggtgtga

SEQ ID NO: 204134 - DNA, 22 bp, Artificial Sequence
  Synthetic oligonucleotide; TTT chr2 60520320 60520341 60520337 60520342 +
ttttcaagacatgaggtgtgaa

SEQ ID NO: 204135 - DNA, 22 bp, Artificial Sequence
  Synthetic oligonucleotide; TTT chr2 60520321 60520342 60520338 60520343 +
tttcaagacatgaggtgtgaat

SEQ ID NO: 204136 - DNA, 22 bp, Artificial Sequence
  Synthetic oligonucleotide; TTT chr2 60520322 60520343 60520339 60520344 +
ttcaagacatgaggtgtgaatg

SEQ ID NO: 204137 - DNA, 22 bp, Artificial Sequence
  Synthetic oligonucleotide; TTT chr2 60520323 60520344 60520340 60520345 +
tcaagacatgaggtgtgaatga

SEQ ID NO: 204138 - DNA, 22 bp, Artificial Sequence
  Synthetic oligonucleotide; TTT chr2 60520324 60520345 60520341 60520346 +
caagacatgaggtgtgaatgat

SEQ ID NO: 204139 - DNA, 22 bp, Artificial Sequence
  Synthetic oligonucleotide; TTC chr2 60520325 60520346 60520342 60520347 +
aagacatgaggtgtgaatgatg

SEQ ID NO: 204140 - DNA, 22 bp, Artificial Sequence
  Synthetic oligonucleotide; TTT chr2 60520360 60520381 60520377 60520382 +
ggatatgtaaactgaattattt

SEQ ID NO: 204141 - DNA, 22 bp, Artificial Sequence
  Synthetic oligonucleotide; TTG chr2 60520361 60520382 60520378 60520383 +
gatatgtaaactgaattatttg

SEQ ID NO: 204142 - DNA, 22 bp, Artificial Sequence
  Synthetic oligonucleotide; CTG chr2 60520374 60520395 60520391 60520396 +
aattatttgcataatgcattac

SEQ ID NO: 204143 - DNA, 22 bp, Artificial Sequence
  Synthetic oligonucleotide; TTA chr2 60520379 60520400 60520396 60520401 +
tttgcataatgcattactaatc

SEQ ID NO: 204144 - DNA, 22 bp, Artificial Sequence
  Synthetic oligonucleotide; TTT chr2 60520382 60520403 60520399 60520404 +
gcataatgcattactaatcagt

SEQ ID NO: 204145 - DNA, 22 bp, Artificial Sequence
  Synthetic oligonucleotide; TTG chr2 60520383 60520404 60520400 60520405 +
cataatgcattactaatcagtg

SEQ ID NO: 204146 - DNA, 22 bp, Artificial Sequence
  Synthetic oligonucleotide; TTA chr2 60520395 60520416 60520412 60520417 +
ctaatcagtgagtataaattct

SEQ ID NO: 204147 - DNA, 22 bp, Artificial Sequence
  Synthetic oligonucleotide; CTA chr2 60520398 60520419 60520415 60520420 +
atcagtgagtataaattctgga

SEQ ID NO: 204148 - DNA, 22 bp, Artificial Sequence
  Synthetic oligonucleotide; TTC chr2 60520416 60520437 60520433 60520438 +
tggagtctgaggacctgaaatc

SEQ ID NO: 204149 - DNA, 22 bp, Artificial Sequence
  Synthetic oligonucleotide; CTG chr2 60520418 60520439 60520435 60520440 +
gagtctgaggacctgaaatcaa

SEQ ID NO: 204150 - DNA, 22 bp, Artificial Sequence
  Synthetic oligonucleotide; CTG chr2 60520425 60520446 60520442 60520447 +
aggacctgaaatcaagtgccac

SEQ ID NO: 204151 - DNA, 22 bp, Artificial Sequence
  Synthetic oligonucleotide; CTG chr2 60520433 60520454 60520450 60520455 +
aaatcaagtgccaccaaatttt

SEQ ID NO: 204152 - DNA, 22 bp, Artificial Sequence
  Synthetic oligonucleotide; TTT chr2 60520454 60520475 60520471 60520476 +
tttaaaatctagattataaaag

SEQ ID NO: 204153 - DNA, 22 bp, Artificial Sequence
  Synthetic oligonucleotide; TTT chr2 60520455 60520476 60520472 60520477 +
ttaaaatctagattataaaagt

SEQ ID NO: 204154 - DNA, 22 bp, Artificial Sequence
  Synthetic oligonucleotide; TTT chr2 60520456 60520477 60520473 60520478 +
taaaatctagattataaaagta

SEQ ID NO: 204155 - DNA, 22 bp, Artificial Sequence
  Synthetic oligonucleotide; TTT chr2 60520457 60520478 60520474 60520479 +
aaaatctagattataaaagtaa

SEQ ID NO: 204156 - DNA, 22 bp, Artificial Sequence
  Synthetic oligonucleotide; TTA chr2 60520458 60520479 60520475 60520480 +
aaatctagattataaaagtaaa

SEQ ID NO: 204157 - DNA, 22 bp, Artificial Sequence
  Synthetic oligonucleotide; CTA chr2 60520465 60520486 60520482 60520487 +
gattataaaagtaaagagcatc

SEQ ID NO: 204158 - DNA, 22 bp, Artificial Sequence
  Synthetic oligonucleotide; TTA chr2 60520470 60520491 60520487 60520492 +
taaaagtaaagagcatcaccct

SEQ ID NO: 204159 - DNA, 22 bp, Artificial Sequence
  Synthetic oligonucleotide; CTT chr2 60520493 60520514 60520510 60520515 +
cggtgggataatgtacacattt

SEQ ID NO: 204160 - DNA, 22 bp, Artificial Sequence
  Synthetic oligonucleotide; TTC chr2 60520494 60520515 60520511 60520516 +
ggtgggataatgtacacatttg

SEQ ID NO: 204161 - DNA, 22 bp, Artificial Sequence
  Synthetic oligonucleotide; TTT chr2 60520515 60520536 60520532 60520537 +
gtgtacacattcgcattccgtt

SEQ ID NO: 204162 - DNA, 22 bp, Artificial Sequence
  Synthetic oligonucleotide; TTG chr2 60520516 60520537 60520533 60520538 +
tgtacacattcgcattccgttt

SEQ ID NO: 204163 - DNA, 22 bp, Artificial Sequence
  Synthetic oligonucleotide; TTC chr2 60520527 60520548 60520544 60520549 +
gcattccgtttataagaaggag

SEQ ID NO: 204164 - DNA, 22 bp, Artificial Sequence
  Synthetic oligonucleotide; TTC chr2 60520533 60520554 60520550 60520555 +
cgtttataagaaggagaaatta

SEQ ID NO: 204165 - DNA, 22 bp, Artificial Sequence
  Synthetic oligonucleotide; TTT chr2 60520538 60520559 60520555 60520560 +
ataagaaggagaaattatcctc

SEQ ID NO: 204166 - DNA, 22 bp, Artificial Sequence
  Synthetic oligonucleotide; TTA chr2 60520539 60520560 60520556 60520561 +
taagaaggagaaattatcctca

SEQ ID NO: 204167 - DNA, 22 bp, Artificial Sequence
  Synthetic oligonucleotide; TTA chr2 60520555 60520576 60520572 60520577 +
tcctcacagagttttctgagga

SEQ ID NO: 204168 - DNA, 22 bp, Artificial Sequence
  Synthetic oligonucleotide; CTC chr2 60520560 60520581 60520577 60520582 +
acagagttttctgaggaaaatt

SEQ ID NO: 204169 - DNA, 22 bp, Artificial Sequence
  Synthetic oligonucleotide; TTT chr2 60520569 60520590 60520586 60520591 +
tctgaggaaaattaaataagtg

SEQ ID NO: 204170 - DNA, 22 bp, Artificial Sequence
  Synthetic oligonucleotide; TTT chr2 60520570 60520591 60520587 60520592 +
ctgaggaaaattaaataagtgg

SEQ ID NO: 204171 - DNA, 22 bp, Artificial Sequence
  Synthetic oligonucleotide; TTC chr2 60520571 60520592 60520588 60520593 +
tgaggaaaattaaataagtggc

SEQ ID NO: 204172 - DNA, 22 bp, Artificial Sequence
  Synthetic oligonucleotide; CTG chr2 60520573 60520594 60520590 60520595 +
aggaaaattaaataagtggcct

SEQ ID NO: 204173 - DNA, 22 bp, Artificial Sequence
  Synthetic oligonucleotide; TTA chr2 60520583 60520604 60520600 60520605 +
aataagtggcctttgatgtaaa

SEQ ID NO: 204174 - DNA, 22 bp, Artificial Sequence
  Synthetic oligonucleotide; CTT chr2 60520596 60520617 60520613 60520618 +
tgatgtaaactgttttgctctg

SEQ ID NO: 204175 - DNA, 22 bp, Artificial Sequence
  Synthetic oligonucleotide; TTT chr2 60520597 60520618 60520614 60520619 +
gatgtaaactgttttgctctga

SEQ ID NO: 204176 - DNA, 22 bp, Artificial Sequence
  Synthetic oligonucleotide; TTG chr2 60520598 60520619 60520615 60520620 +
atgtaaactgttttgctctgac

SEQ ID NO: 204177 - DNA, 22 bp, Artificial Sequence
  Synthetic oligonucleotide; CTG chr2 60520608 60520629 60520625 60520630 +
ttttgctctgactcaacactat

SEQ ID NO: 204178 - DNA, 22 bp, Artificial Sequence
  Synthetic oligonucleotide; TTT chr2 60520611 60520632 60520628 60520633 +
tgctctgactcaacactatgag

SEQ ID NO: 204179 - DNA, 22 bp, Artificial Sequence
  Synthetic oligonucleotide; TTT chr2 60520612 60520633 60520629 60520634 +
gctctgactcaacactatgagg

SEQ ID NO: 204180 - DNA, 22 bp, Artificial Sequence
  Synthetic oligonucleotide; TTG chr2 60520613 60520634 60520630 60520635 +
ctctgactcaacactatgaggc

SEQ ID NO: 204181 - DNA, 22 bp, Artificial Sequence
  Synthetic oligonucleotide; CTC chr2 60520616 60520637 60520633 60520638 +
tgactcaacactatgaggcata

SEQ ID NO: 204182 - DNA, 22 bp, Artificial Sequence
  Synthetic oligonucleotide; CTG chr2 60520618 60520639 60520635 60520640 +
actcaacactatgaggcataag

SEQ ID NO: 204183 - DNA, 22 bp, Artificial Sequence
  Synthetic oligonucleotide; CTC chr2 60520622 60520643 60520639 60520644 +
aacactatgaggcataaggtcc

SEQ ID NO: 204184 - DNA, 22 bp, Artificial Sequence
  Synthetic oligonucleotide; CTA chr2 60520629 60520650 60520646 60520651 +
tgaggcataaggtcctaaattc

SEQ ID NO: 204185 - DNA, 22 bp, Artificial Sequence
  Synthetic oligonucleotide; CTA chr2 60520646 60520667 60520663 60520668 +
aattcataggcacaaccacaga

SEQ ID NO: 204186 - DNA, 22 bp, Artificial Sequence
  Synthetic oligonucleotide; TTC chr2 60520651 60520672 60520668 60520673 +
ataggcacaaccacagaagcac

SEQ ID NO: 204187 - DNA, 22 bp, Artificial Sequence
  Synthetic oligonucleotide; TTT chr2 60520693 60520714 60520710 60520715 +
gcatcaaaaagagcagacagtc

SEQ ID NO: 204188 - DNA, 22 bp, Artificial Sequence
  Synthetic oligonucleotide; TTG chr2 60520694 60520715 60520711 60520716 +
catcaaaaagagcagacagtcc

SEQ ID NO: 204189 - DNA, 22 bp, Artificial Sequence
  Synthetic oligonucleotide; TTG chr2 60520736 60520757 60520753 60520758 +
gtcgcctacggaatctacagga

SEQ ID NO: 204190 - DNA, 22 bp, Artificial Sequence
  Synthetic oligonucleotide; CTA chr2 60520744 60520765 60520761 60520766 +
cggaatctacaggaatctgaag

SEQ ID NO: 204191 - DNA, 22 bp, Artificial Sequence
  Synthetic oligonucleotide; CTA chr2 60520753 60520774 60520770 60520775 +
caggaatctgaaggggcagcca

SEQ ID NO: 204192 - DNA, 22 bp, Artificial Sequence
  Synthetic oligonucleotide; CTG chr2 60520763 60520784 60520780 60520785 +
aaggggcagccagacattctgc

SEQ ID NO: 204193 - DNA, 22 bp, Artificial Sequence
  Synthetic oligonucleotide; TTC chr2 60520782 60520803 60520799 60520804 +
tgcctataccacccatcagatc

SEQ ID NO: 204194 - DNA, 22 bp, Artificial Sequence
  Synthetic oligonucleotide; CTG chr2 60520784 60520805 60520801 60520806 +
cctataccacccatcagatcag

SEQ ID NO: 204195 - DNA, 22 bp, Artificial Sequence
  Synthetic oligonucleotide; CTA chr2 60520788 60520809 60520805 60520810 +
taccacccatcagatcagccac

SEQ ID NO: 204196 - DNA, 22 bp, Artificial Sequence
  Synthetic oligonucleotide; CTT chr2 60520839 60520860 60520856 60520861 +
ctccagtgggttcccaccggtg

SEQ ID NO: 204197 - DNA, 22 bp, Artificial Sequence
  Synthetic oligonucleotide; TTC chr2 60520840 60520861 60520857 60520862 +
tccagtgggttcccaccggtgt

SEQ ID NO: 204198 - DNA, 22 bp, Artificial Sequence
  Synthetic oligonucleotide; CTC chr2 60520842 60520863 60520859 60520864 +
cagtgggttcccaccggtgttt

SEQ ID NO: 204199 - DNA, 22 bp, Artificial Sequence
  Synthetic oligonucleotide; TTC chr2 60520852 60520873 60520869 60520874 +
ccaccggtgttttcgtgcaagc

SEQ ID NO: 204200 - DNA, 22 bp, Artificial Sequence
  Synthetic oligonucleotide; TTT chr2 60520864 60520885 60520881 60520886 +
tcgtgcaagcttagccccttct

SEQ ID NO: 204201 - DNA, 22 bp, Artificial Sequence
  Synthetic oligonucleotide; TTT chr2 60520865 60520886 60520882 60520887 +
cgtgcaagcttagccccttctt

SEQ ID NO: 204202 - DNA, 22 bp, Artificial Sequence
  Synthetic oligonucleotide; TTC chr2 60520866 60520887 60520883 60520888 +
gtgcaagcttagccccttcttt

SEQ ID NO: 204203 - DNA, 22 bp, Artificial Sequence
  Synthetic oligonucleotide; CTT chr2 60520876 60520897 60520893 60520898 +
agccccttctttgcagaaaaaa

SEQ ID NO: 204204 - DNA, 22 bp, Artificial Sequence
  Synthetic oligonucleotide; TTA chr2 60520877 60520898 60520894 60520899 +
gccccttctttgcagaaaaaaa

SEQ ID NO: 204205 - DNA, 22 bp, Artificial Sequence
  Synthetic oligonucleotide; CTT chr2 60520884 60520905 60520901 60520906 +
ctttgcagaaaaaaagatattg

SEQ ID NO: 204206 - DNA, 22 bp, Artificial Sequence
  Synthetic oligonucleotide; TTC chr2 60520885 60520906 60520902 60520907 +
tttgcagaaaaaaagatattga

SEQ ID NO: 204207 - DNA, 22 bp, Artificial Sequence
  Synthetic oligonucleotide; CTT chr2 60520887 60520908 60520904 60520909 +
tgcagaaaaaaagatattgatg

SEQ ID NO: 204208 - DNA, 22 bp, Artificial Sequence
  Synthetic oligonucleotide; TTT chr2 60520888 60520909 60520905 60520910 +
gcagaaaaaaagatattgatgt

SEQ ID NO: 204209 - DNA, 22 bp, Artificial Sequence
  Synthetic oligonucleotide; TTG chr2 60520889 60520910 60520906 60520911 +
cagaaaaaaagatattgatgtg

SEQ ID NO: 204210 - DNA, 22 bp, Artificial Sequence
  Synthetic oligonucleotide; TTG chr2 60520906 60520927 60520923 60520928 +
atgtgccaacagtagaaagaag

SEQ ID NO: 204211 - DNA, 22 bp, Artificial Sequence
  Synthetic oligonucleotide; TTA chr2 60520937 60520958 60520954 60520959 +
ttccagctctgtacacaacctt

SEQ ID NO: 204212 - DNA, 22 bp, Artificial Sequence
  Synthetic oligonucleotide; TTC chr2 60520940 60520961 60520957 60520962 +
cagctctgtacacaacctttgt

SEQ ID NO: 204213 - DNA, 22 bp, Artificial Sequence
  Synthetic oligonucleotide; CTC chr2 60520946 60520967 60520963 60520968 +
tgtacacaacctttgtcaaccc

SEQ ID NO: 204214 - DNA, 22 bp, Artificial Sequence
  Synthetic oligonucleotide; CTG chr2 60520948 60520969 60520965 60520970 +
tacacaacctttgtcaacccag

SEQ ID NO: 204215 - DNA, 22 bp, Artificial Sequence
  Synthetic oligonucleotide; CTT chr2 60520959 60520980 60520976 60520981 +
tgtcaacccagcatgataaaac

SEQ ID NO: 204216 - DNA, 22 bp, Artificial Sequence
  Synthetic oligonucleotide; TTT chr2 60520960 60520981 60520977 60520982 +
gtcaacccagcatgataaaacc

SEQ ID NO: 204217 - DNA, 22 bp, Artificial Sequence
  Synthetic oligonucleotide; TTG chr2 60520961 60520982 60520978 60520983 +
tcaacccagcatgataaaacca

SEQ ID NO: 204218 - DNA, 22 bp, Artificial Sequence
  Synthetic oligonucleotide; CTG chr2 60520989 60521010 60521006 60521011 +
ggaaactatttgtctaaacact

SEQ ID NO: 204219 - DNA, 22 bp, Artificial Sequence
  Synthetic oligonucleotide; CTA chr2 60520997 60521018 60521014 60521019 +
tttgtctaaacactttttggaa

SEQ ID NO: 204220 - DNA, 22 bp, Artificial Sequence
  Synthetic oligonucleotide; TTT chr2 60521000 60521021 60521017 60521022 +
gtctaaacactttttggaaagg

SEQ ID NO: 204221 - DNA, 22 bp, Artificial Sequence
  Synthetic oligonucleotide; TTG chr2 60521001 60521022 60521018 60521023 +
tctaaacactttttggaaaggg

SEQ ID NO: 204222 - DNA, 22 bp, Artificial Sequence
  Synthetic oligonucleotide; CTA chr2 60521005 60521026 60521022 60521027 +
aacactttttggaaagggatga

SEQ ID NO: 204223 - DNA, 22 bp, Artificial Sequence
  Synthetic oligonucleotide; CTT chr2 60521012 60521033 60521029 60521034 +
tttggaaagggatgaaatggag

SEQ ID NO: 204224 - DNA, 22 bp, Artificial Sequence
  Synthetic oligonucleotide; TTT chr2 60521013 60521034 60521030 60521035 +
ttggaaagggatgaaatggaga

SEQ ID NO: 204225 - DNA, 22 bp, Artificial Sequence
  Synthetic oligonucleotide; TTT chr2 60521014 60521035 60521031 60521036 +
tggaaagggatgaaatggagag

SEQ ID NO: 204226 - DNA, 22 bp, Artificial Sequence
  Synthetic oligonucleotide; TTT chr2 60521015 60521036 60521032 60521037 +
ggaaagggatgaaatggagagg

SEQ ID NO: 204227 - DNA, 22 bp, Artificial Sequence
  Synthetic oligonucleotide; TTG chr2 60521016 60521037 60521033 60521038 +
gaaagggatgaaatggagagga

SEQ ID NO: 204228 - DNA, 22 bp, Artificial Sequence
  Synthetic oligonucleotide; CTA chr2 60521060 60521081 60521077 60521082 +
gtggtcagcacacacacacaca

SEQ ID NO: 204229 - DNA, 22 bp, Artificial Sequence
  Synthetic oligonucleotide; CTC chr2 60521103 60521124 60521120 60521125 +
acacacacacacacacacacac

SEQ ID NO: 204230 - DNA, 22 bp, Artificial Sequence
  Synthetic oligonucleotide; CTC chr2 60521127 60521148 60521144 60521149 +
acacaaatccttgagggtgcca

SEQ ID NO: 204231 - DNA, 22 bp, Artificial Sequence
  Synthetic oligonucleotide; CTT chr2 60521139 60521160 60521156 60521161 +
gagggtgccaggttacatttct

SEQ ID NO: 204232 - DNA, 22 bp, Artificial Sequence
  Synthetic oligonucleotide; TTG chr2 60521140 60521161 60521157 60521162 +
agggtgccaggttacatttcta

SEQ ID NO: 204233 - DNA, 22 bp, Artificial Sequence
  Synthetic oligonucleotide; TTA chr2 60521154 60521175 60521171 60521176 +
catttctacaacagctgccttc

SEQ ID NO: 204234 - DNA, 22 bp, Artificial Sequence
  Synthetic oligonucleotide; TTT chr2 60521159 60521180 60521176 60521181 +
ctacaacagctgccttccattg

SEQ ID NO: 204235 - DNA, 22 bp, Artificial Sequence
  Synthetic oligonucleotide; TTC chr2 60521160 60521181 60521177 60521182 +
tacaacagctgccttccattgt

SEQ ID NO: 204236 - DNA, 22 bp, Artificial Sequence
  Synthetic oligonucleotide; CTA chr2 60521162 60521183 60521179 60521184 +
caacagctgccttccattgtct

SEQ ID NO: 204237 - DNA, 22 bp, Artificial Sequence
  Synthetic oligonucleotide; CTG chr2 60521171 60521192 60521188 60521193 +
ccttccattgtctactgccagt

SEQ ID NO: 204238 - DNA, 22 bp, Artificial Sequence
  Synthetic oligonucleotide; CTT chr2 60521175 60521196 60521192 60521197 +
ccattgtctactgccagtgaag

SEQ ID NO: 204239 - DNA, 22 bp, Artificial Sequence
  Synthetic oligonucleotide; TTC chr2 60521176 60521197 60521193 60521198 +
cattgtctactgccagtgaagc

SEQ ID NO: 204240 - DNA, 22 bp, Artificial Sequence
  Synthetic oligonucleotide; TTG chr2 60521181 60521202 60521198 60521203 +
tctactgccagtgaagccaaac

SEQ ID NO: 204241 - DNA, 22 bp, Artificial Sequence
  Synthetic oligonucleotide; CTA chr2 60521185 60521206 60521202 60521207 +
ctgccagtgaagccaaaccagc

SEQ ID NO: 204242 - DNA, 22 bp, Artificial Sequence
  Synthetic oligonucleotide; CTG chr2 60521188 60521209 60521205 60521210 +
ccagtgaagccaaaccagccta

SEQ ID NO: 204243 - DNA, 22 bp, Artificial Sequence
  Synthetic oligonucleotide; CTA chr2 60521210 60521231 60521227 60521232 +
aaatttaatttaatctgctgta

SEQ ID NO: 204244 - DNA, 22 bp, Artificial Sequence
  Synthetic oligonucleotide; TTT chr2 60521216 60521237 60521233 60521238 +
aatttaatctgctgtaaaccca

SEQ ID NO: 204245 - DNA, 22 bp, Artificial Sequence
  Synthetic oligonucleotide; TTA chr2 60521217 60521238 60521234 60521239 +
atttaatctgctgtaaacccaa

SEQ ID NO: 204246 - DNA, 22 bp, Artificial Sequence
  Synthetic oligonucleotide; TTT chr2 60521221 60521242 60521238 60521243 +
aatctgctgtaaacccaagtat

SEQ ID NO: 204247 - DNA, 22 bp, Artificial Sequence
  Synthetic oligonucleotide; TTA chr2 60521222 60521243 60521239 60521244 +
atctgctgtaaacccaagtatc

SEQ ID NO: 204248 - DNA, 22 bp, Artificial Sequence
  Synthetic oligonucleotide; CTG chr2 60521227 60521248 60521244 60521249 +
ctgtaaacccaagtatcaggca

SEQ ID NO: 204249 - DNA, 22 bp, Artificial Sequence
  Synthetic oligonucleotide; CTG chr2 60521230 60521251 60521247 60521252 +
taaacccaagtatcaggcactt

SEQ ID NO: 204250 - DNA, 22 bp, Artificial Sequence
  Synthetic oligonucleotide; CTT chr2 60521252 60521273 60521269 60521274 +
agatggcagctaaaagcgccac

SEQ ID NO: 204251 - DNA, 22 bp, Artificial Sequence
  Synthetic oligonucleotide; TTA chr2 60521253 60521274 60521270 60521275 +
gatggcagctaaaagcgccact

SEQ ID NO: 204252 - DNA, 22 bp, Artificial Sequence
  Synthetic oligonucleotide; CTA chr2 60521264 60521285 60521281 60521286 +
aaagcgccactctcagataact

SEQ ID NO: 204253 - DNA, 22 bp, Artificial Sequence
  Synthetic oligonucleotide; CTC chr2 60521276 60521297 60521293 60521298 +
tcagataactgagtgacacttg

SEQ ID NO: 204254 - DNA, 22 bp, Artificial Sequence
  Synthetic oligonucleotide; CTC chr2 60521278 60521299 60521295 60521300 +
agataactgagtgacacttgct

SEQ ID NO: 204255 - DNA, 22 bp, Artificial Sequence
  Synthetic oligonucleotide; CTG chr2 60521287 60521308 60521304 60521309 +
agtgacacttgctaataatagc

SEQ ID NO: 204256 - DNA, 22 bp, Artificial Sequence
  Synthetic oligonucleotide; CTT chr2 60521297 60521318 60521314 60521319 +
gctaataatagcctctgtgtga

SEQ ID NO: 204257 - DNA, 22 bp, Artificial Sequence
  Synthetic oligonucleotide; TTG chr2 60521298 60521319 60521315 60521320 +
ctaataatagcctctgtgtgaa

SEQ ID NO: 204258 - DNA, 22 bp, Artificial Sequence
  Synthetic oligonucleotide; CTA chr2 60521301 60521322 60521318 60521323 +
ataatagcctctgtgtgaagcg

SEQ ID NO: 204259 - DNA, 22 bp, Artificial Sequence
  Synthetic oligonucleotide; CTC chr2 60521312 60521333 60521329 60521334 +
tgtgtgaagcgagagagagcgg

SEQ ID NO: 204260 - DNA, 22 bp, Artificial Sequence
  Synthetic oligonucleotide; CTG chr2 60521314 60521335 60521331 60521336 +
tgtgaagcgagagagagcggac

SEQ ID NO: 204261 - DNA, 22 bp, Artificial Sequence
  Synthetic oligonucleotide; TTT chr2 60521340 60521361 60521357 60521362 +
tgtaaaaccagagggacccggg

SEQ ID NO: 204262 - DNA, 22 bp, Artificial Sequence
  Synthetic oligonucleotide; TTT chr2 60521341 60521362 60521358 60521363 +
gtaaaaccagagggacccgggc

SEQ ID NO: 204263 - DNA, 22 bp, Artificial Sequence
  Synthetic oligonucleotide; TTG chr2 60521342 60521363 60521359 60521364 +
taaaaccagagggacccgggcc

SEQ ID NO: 204264 - DNA, 22 bp, Artificial Sequence
  Synthetic oligonucleotide; CTG chr2 60521366 60521387 60521383 60521388 +
ggcctgggcctgggtctgggaa

SEQ ID NO: 204265 - DNA, 22 bp, Artificial Sequence
  Synthetic oligonucleotide; CTG chr2 60521372 60521393 60521389 60521394 +
ggcctgggtctgggaatggtgt

SEQ ID NO: 204266 - DNA, 22 bp, Artificial Sequence
  Synthetic oligonucleotide; CTG chr2 60521378 60521399 60521395 60521400 +
ggtctgggaatggtgtgatgtg

SEQ ID NO: 204267 - DNA, 22 bp, Artificial Sequence
  Synthetic oligonucleotide; CTG chr2 60521384 60521405 60521401 60521406 +
ggaatggtgtgatgtggttagg

SEQ ID NO: 204268 - DNA, 22 bp, Artificial Sequence
  Synthetic oligonucleotide; TTA chr2 60521404 60521425 60521421 60521426 +
ggccagtctcagcttccaggca

SEQ ID NO: 204269 - DNA, 22 bp, Artificial Sequence
  Synthetic oligonucleotide; CTC chr2 60521414 60521435 60521431 60521436 +
agcttccaggcagcagatacgg

SEQ ID NO: 204270 - DNA, 22 bp, Artificial Sequence
  Synthetic oligonucleotide; CTT chr2 60521419 60521440 60521436 60521441 +
ccaggcagcagatacggcagag

SEQ ID NO: 204271 - DNA, 22 bp, Artificial Sequence
  Synthetic oligonucleotide; TTC chr2 60521420 60521441 60521437 60521442 +
caggcagcagatacggcagaga

SEQ ID NO: 204272 - DNA, 22 bp, Artificial Sequence
  Synthetic oligonucleotide; CTC chr2 60521460 60521481 60521477 60521482 +
ccctgtgacgggctgcacgaag

SEQ ID NO: 204273 - DNA, 22 bp, Artificial Sequence
  Synthetic oligonucleotide; CTG chr2 60521465 60521486 60521482 60521487 +
tgacgggctgcacgaagcccac

SEQ ID NO: 204274 - DNA, 22 bp, Artificial Sequence
  Synthetic oligonucleotide; CTG chr2 60521475 60521496 60521492 60521497 +
cacgaagcccaccagtgaccta

SEQ ID NO: 204275 - DNA, 22 bp, Artificial Sequence
  Synthetic oligonucleotide; CTA chr2 60521497 60521518 60521514 60521519 +
gctttcaagtcacacagcgaca

SEQ ID NO: 204276 - DNA, 22 bp, Artificial Sequence
  Synthetic oligonucleotide; CTT chr2 60521501 60521522 60521518 60521523 +
tcaagtcacacagcgacagtcc

SEQ ID NO: 204277 - DNA, 22 bp, Artificial Sequence
  Synthetic oligonucleotide; TTT chr2 60521502 60521523 60521519 60521524 +
caagtcacacagcgacagtcct

SEQ ID NO: 204278 - DNA, 22 bp, Artificial Sequence
  Synthetic oligonucleotide; TTC chr2 60521503 60521524 60521520 60521525 +
aagtcacacagcgacagtcctg

SEQ ID NO: 204279 - DNA, 22 bp, Artificial Sequence
  Synthetic oligonucleotide; CTG chr2 60521525 60521546 60521542 60521547 +
gcttttgctatctagaagaaca

SEQ ID NO: 204280 - DNA, 22 bp, Artificial Sequence
  Synthetic oligonucleotide; CTT chr2 60521529 60521550 60521546 60521551 +
ttgctatctagaagaacaaaat

SEQ ID NO: 204281 - DNA, 22 bp, Artificial Sequence
  Synthetic oligonucleotide; TTT chr2 60521530 60521551 60521547 60521552 +
tgctatctagaagaacaaaatt

SEQ ID NO: 204282 - DNA, 22 bp, Artificial Sequence
  Synthetic oligonucleotide; TTT chr2 60521531 60521552 60521548 60521553 +
gctatctagaagaacaaaattc

SEQ ID NO: 204283 - DNA, 22 bp, Artificial Sequence
  Synthetic oligonucleotide; TTG chr2 60521532 60521553 60521549 60521554 +
ctatctagaagaacaaaattcc

SEQ ID NO: 204284 - DNA, 22 bp, Artificial Sequence
  Synthetic oligonucleotide; CTA chr2 60521535 60521556 60521552 60521557 +
tctagaagaacaaaattcccct

SEQ ID NO: 204285 - DNA, 22 bp, Artificial Sequence
  Synthetic oligonucleotide; CTA chr2 60521539 60521560 60521556 60521561 +
gaagaacaaaattcccctttcc

SEQ ID NO: 204286 - DNA, 22 bp, Artificial Sequence
  Synthetic oligonucleotide; TTC chr2 60521553 60521574 60521570 60521575 +
ccctttccagctctgcaattgc

SEQ ID NO: 204287 - DNA, 22 bp, Artificial Sequence
  Synthetic oligonucleotide; CTT chr2 60521558 60521579 60521575 60521580 +
tccagctctgcaattgccactc

SEQ ID NO: 204288 - DNA, 22 bp, Artificial Sequence
  Synthetic oligonucleotide; TTT chr2 60521559 60521580 60521576 60521581 +
ccagctctgcaattgccactct

SEQ ID NO: 204289 - DNA, 22 bp, Artificial Sequence
  Synthetic oligonucleotide; TTC chr2 60521560 60521581 60521577 60521582 +
cagctctgcaattgccactctg

SEQ ID NO: 204290 - DNA, 22 bp, Artificial Sequence
  Synthetic oligonucleotide; CTC chr2 60521566 60521587 60521583 60521588 +
tgcaattgccactctgctccct

SEQ ID NO: 204291 - DNA, 22 bp, Artificial Sequence
  Synthetic oligonucleotide; CTG chr2 60521568 60521589 60521585 60521590 +
caattgccactctgctcccttt

SEQ ID NO: 204292 - DNA, 22 bp, Artificial Sequence
  Synthetic oligonucleotide; TTG chr2 60521574 60521595 60521591 60521596 +
ccactctgctccctttcatctt

SEQ ID NO: 204293 - DNA, 22 bp, Artificial Sequence
  Synthetic oligonucleotide; CTC chr2 60521580 60521601 60521597 60521602 +
tgctccctttcatcttccatct

SEQ ID NO: 204294 - DNA, 22 bp, Artificial Sequence
  Synthetic oligonucleotide; CTG chr2 60521582 60521603 60521599 60521604 +
ctccctttcatcttccatcttg

SEQ ID NO: 204295 - DNA, 22 bp, Artificial Sequence
  Synthetic oligonucleotide; CTC chr2 60521585 60521606 60521602 60521607 +
cctttcatcttccatcttgtgc

SEQ ID NO: 204296 - DNA, 22 bp, Artificial Sequence
  Synthetic oligonucleotide; CTT chr2 60521589 60521610 60521606 60521611 +
tcatcttccatcttgtgcccca

SEQ ID NO: 204297 - DNA, 22 bp, Artificial Sequence
  Synthetic oligonucleotide; TTT chr2 60521590 60521611 60521607 60521612 +
catcttccatcttgtgccccag

SEQ ID NO: 204298 - DNA, 22 bp, Artificial Sequence
  Synthetic oligonucleotide; TTC chr2 60521591 60521612 60521608 60521613 +
atcttccatcttgtgccccagt

SEQ ID NO: 204299 - DNA, 22 bp, Artificial Sequence
  Synthetic oligonucleotide; CTT chr2 60521596 60521617 60521613 60521618 +
ccatcttgtgccccagtcctcc

SEQ ID NO: 204300 - DNA, 22 bp, Artificial Sequence
  Synthetic oligonucleotide; TTC chr2 60521597 60521618 60521614 60521619 +
catcttgtgccccagtcctccc

SEQ ID NO: 204301 - DNA, 22 bp, Artificial Sequence
  Synthetic oligonucleotide; CTT chr2 60521603 60521624 60521620 60521625 +
gtgccccagtcctcccttaaag

SEQ ID NO: 204302 - DNA, 22 bp, Artificial Sequence
  Synthetic oligonucleotide; TTG chr2 60521604 60521625 60521621 60521626 +
tgccccagtcctcccttaaagg

SEQ ID NO: 204303 - DNA, 22 bp, Artificial Sequence
  Synthetic oligonucleotide; CTC chr2 60521617 60521638 60521634 60521639 +
ccttaaagggaaggctgcttaa

SEQ ID NO: 204304 - DNA, 22 bp, Artificial Sequence
  Synthetic oligonucleotide; CTT chr2 60521621 60521642 60521638 60521643 +
aaagggaaggctgcttaaccct

SEQ ID NO: 204305 - DNA, 22 bp, Artificial Sequence
  Synthetic oligonucleotide; TTA chr2 60521622 60521643 60521639 60521644 +
aagggaaggctgcttaaccctt

SEQ ID NO: 204306 - DNA, 22 bp, Artificial Sequence
  Synthetic oligonucleotide; CTG chr2 60521634 60521655 60521651 60521656 +
cttaacccttgacgtgttcttt

SEQ ID NO: 204307 - DNA, 22 bp, Artificial Sequence
  Synthetic oligonucleotide; CTT chr2 60521637 60521658 60521654 60521659 +
aacccttgacgtgttctttgtc

SEQ ID NO: 204308 - DNA, 22 bp, Artificial Sequence
  Synthetic oligonucleotide; TTA chr2 60521638 60521659 60521655 60521660 +
acccttgacgtgttctttgtcc

SEQ ID NO: 204309 - DNA, 22 bp, Artificial Sequence
  Synthetic oligonucleotide; CTT chr2 60521644 60521665 60521661 60521666 +
gacgtgttctttgtccccttct

SEQ ID NO: 204310 - DNA, 22 bp, Artificial Sequence
  Synthetic oligonucleotide; TTG chr2 60521645 60521666 60521662 60521667 +
acgtgttctttgtccccttctt

SEQ ID NO: 204311 - DNA, 22 bp, Artificial Sequence
  Synthetic oligonucleotide; TTC chr2 60521653 60521674 60521670 60521675 +
tttgtccccttctttctgagag

SEQ ID NO: 204312 - DNA, 22 bp, Artificial Sequence
  Synthetic oligonucleotide; CTT chr2 60521655 60521676 60521672 60521677 +
tgtccccttctttctgagagtg

SEQ ID NO: 204313 - DNA, 22 bp, Artificial Sequence
  Synthetic oligonucleotide; TTT chr2 60521656 60521677 60521673 60521678 +
gtccccttctttctgagagtgt

SEQ ID NO: 204314 - DNA, 22 bp, Artificial Sequence
  Synthetic oligonucleotide; TTG chr2 60521657 60521678 60521674 60521679 +
tccccttctttctgagagtgtg

SEQ ID NO: 204315 - DNA, 22 bp, Artificial Sequence
  Synthetic oligonucleotide; CTT chr2 60521664 60521685 60521681 60521686 +
ctttctgagagtgtggtcaatc

SEQ ID NO: 204316 - DNA, 22 bp, Artificial Sequence
  Synthetic oligonucleotide; TTC chr2 60521665 60521686 60521682 60521687 +
tttctgagagtgtggtcaatct

SEQ ID NO: 204317 - DNA, 22 bp, Artificial Sequence
  Synthetic oligonucleotide; CTT chr2 60521667 60521688 60521684 60521689 +
tctgagagtgtggtcaatctcc

SEQ ID NO: 204318 - DNA, 22 bp, Artificial Sequence
  Synthetic oligonucleotide; TTT chr2 60521668 60521689 60521685 60521690 +
ctgagagtgtggtcaatctcct

SEQ ID NO: 204319 - DNA, 22 bp, Artificial Sequence
  Synthetic oligonucleotide; TTC chr2 60521669 60521690 60521686 60521691 +
tgagagtgtggtcaatctcctc

SEQ ID NO: 204320 - DNA, 22 bp, Artificial Sequence
  Synthetic oligonucleotide; CTG chr2 60521671 60521692 60521688 60521693 +
agagtgtggtcaatctcctctc

SEQ ID NO: 204321 - DNA, 22 bp, Artificial Sequence
  Synthetic oligonucleotide; CTC chr2 60521688 60521709 60521705 60521710 +
ctctcaggcaaatcatctttct

SEQ ID NO: 204322 - DNA, 22 bp, Artificial Sequence
  Synthetic oligonucleotide; CTC chr2 60521691 60521712 60521708 60521713 +
tcaggcaaatcatctttctcta

SEQ ID NO: 204323 - DNA, 22 bp, Artificial Sequence
  Synthetic oligonucleotide; CTC chr2 60521693 60521714 60521710 60521715 +
aggcaaatcatctttctctaat

SEQ ID NO: 204324 - DNA, 22 bp, Artificial Sequence
  Synthetic oligonucleotide; CTT chr2 60521707 60521728 60521724 60521729 +
tctctaatagccagggctcaaa

SEQ ID NO: 204325 - DNA, 22 bp, Artificial Sequence
  Synthetic oligonucleotide; TTT chr2 60521708 60521729 60521725 60521730 +
ctctaatagccagggctcaaat

SEQ ID NO: 204326 - DNA, 22 bp, Artificial Sequence
  Synthetic oligonucleotide; TTC chr2 60521709 60521730 60521726 60521731 +
tctaatagccagggctcaaatg

SEQ ID NO: 204327 - DNA, 22 bp, Artificial Sequence
  Synthetic oligonucleotide; CTC chr2 60521711 60521732 60521728 60521733 +
taatagccagggctcaaatggc

SEQ ID NO: 204328 - DNA, 22 bp, Artificial Sequence
  Synthetic oligonucleotide; CTA chr2 60521713 60521734 60521730 60521735 +
atagccagggctcaaatggcca

SEQ ID NO: 204329 - DNA, 22 bp, Artificial Sequence
  Synthetic oligonucleotide; CTC chr2 60521726 60521747 60521743 60521748 +
aaatggccaaagaaaggtccca

SEQ ID NO: 204330 - DNA, 22 bp, Artificial Sequence
  Synthetic oligonucleotide; CTT chr2 60521755 60521776 60521772 60521777 +
gtcttcataacactaccagcca

SEQ ID NO: 204331 - DNA, 22 bp, Artificial Sequence
  Synthetic oligonucleotide; TTG chr2 60521756 60521777 60521773 60521778 +
tcttcataacactaccagccac

SEQ ID NO: 204332 - DNA, 22 bp, Artificial Sequence
  Synthetic oligonucleotide; CTT chr2 60521760 60521781 60521777 60521782 +
cataacactaccagccacgtga

SEQ ID NO: 204333 - DNA, 22 bp, Artificial Sequence
  Synthetic oligonucleotide; TTC chr2 60521761 60521782 60521778 60521783 +
ataacactaccagccacgtgag

SEQ ID NO: 204334 - DNA, 22 bp, Artificial Sequence
  Synthetic oligonucleotide; CTA chr2 60521770 60521791 60521787 60521792 +
ccagccacgtgagcacgtccca

SEQ ID NO: 204335 - DNA, 22 bp, Artificial Sequence
  Synthetic oligonucleotide; CTG chr2 60521796 60521817 60521813 60521818 +
cttcttcctgaccctcaccacg

SEQ ID NO: 204336 - DNA, 22 bp, Artificial Sequence
  Synthetic oligonucleotide; CTT chr2 60521799 60521820 60521816 60521821 +
cttcctgaccctcaccacgagg

SEQ ID NO: 204337 - DNA, 22 bp, Artificial Sequence
  Synthetic oligonucleotide; TTC chr2 60521800 60521821 60521817 60521822 +
ttcctgaccctcaccacgaggc

SEQ ID NO: 204338 - DNA, 22 bp, Artificial Sequence
  Synthetic oligonucleotide; CTT chr2 60521802 60521823 60521819 60521824 +
cctgaccctcaccacgaggcac

SEQ ID NO: 204339 - DNA, 22 bp, Artificial Sequence
  Synthetic oligonucleotide; TTC chr2 60521803 60521824 60521820 60521825 +
ctgaccctcaccacgaggcaca

SEQ ID NO: 204340 - DNA, 22 bp, Artificial Sequence
  Synthetic oligonucleotide; CTG chr2 60521806 60521827 60521823 60521828 +
accctcaccacgaggcacagag

SEQ ID NO: 204341 - DNA, 22 bp, Artificial Sequence
  Synthetic oligonucleotide; CTC chr2 60521812 60521833 60521829 60521834 +
accacgaggcacagaggcacct

SEQ ID NO: 204342 - DNA, 22 bp, Artificial Sequence
  Synthetic oligonucleotide; CTG chr2 60521835 60521856 60521852 60521857 +
tgctgaaactcaagcaaacgcc

SEQ ID NO: 204343 - DNA, 22 bp, Artificial Sequence
  Synthetic oligonucleotide; CTG chr2 60521840 60521861 60521857 60521862 +
aaactcaagcaaacgccacatc

SEQ ID NO: 204344 - DNA, 22 bp, Artificial Sequence
  Synthetic oligonucleotide; CTC chr2 60521846 60521867 60521863 60521868 +
aagcaaacgccacatctgactc

SEQ ID NO: 204345 - DNA, 22 bp, Artificial Sequence
  Synthetic oligonucleotide; CTG chr2 60521864 60521885 60521881 60521886 +
actctgcctcatgcactgaaaa

SEQ ID NO: 204346 - DNA, 22 bp, Artificial Sequence
  Synthetic oligonucleotide; CTC chr2 60521868 60521889 60521885 60521890 +
tgcctcatgcactgaaaaagac

SEQ ID NO: 204347 - DNA, 22 bp, Artificial Sequence
  Synthetic oligonucleotide; CTG chr2 60521870 60521891 60521887 60521892 +
cctcatgcactgaaaaagacaa

SEQ ID NO: 204348 - DNA, 22 bp, Artificial Sequence
  Synthetic oligonucleotide; CTC chr2 60521874 60521895 60521891 60521896 +
atgcactgaaaaagacaaggga

SEQ ID NO: 204349 - DNA, 22 bp, Artificial Sequence
  Synthetic oligonucleotide; CTG chr2 60521882 60521903 60521899 60521904 +
aaaaagacaagggatctctgtt

SEQ ID NO: 204350 - DNA, 22 bp, Artificial Sequence
  Synthetic oligonucleotide; CTC chr2 60521900 60521921 60521917 60521922 +
tgttcttccaggagaatggggg

SEQ ID NO: 204351 - DNA, 22 bp, Artificial Sequence
  Synthetic oligonucleotide; CTG chr2 60521902 60521923 60521919 60521924 +
ttcttccaggagaatgggggac

SEQ ID NO: 204352 - DNA, 22 bp, Artificial Sequence
  Synthetic oligonucleotide; TTC chr2 60521905 60521926 60521922 60521927 +
ttccaggagaatgggggacagt

SEQ ID NO: 204353 - DNA, 22 bp, Artificial Sequence
  Synthetic oligonucleotide; CTT chr2 60521907 60521928 60521924 60521929 +
ccaggagaatgggggacagtgc

SEQ ID NO: 204354 - DNA, 22 bp, Artificial Sequence
  Synthetic oligonucleotide; TTC chr2 60521908 60521929 60521925 60521930 +
caggagaatgggggacagtgca

SEQ ID NO: 204355 - DNA, 22 bp, Artificial Sequence
  Synthetic oligonucleotide; CTT chr2 60521944 60521965 60521961 60521966 +
aaatgaccccttcacaatgaac

SEQ ID NO: 204356 - DNA, 22 bp, Artificial Sequence
  Synthetic oligonucleotide; TTA chr2 60521945 60521966 60521962 60521967 +
aatgaccccttcacaatgaact

SEQ ID NO: 204357 - DNA, 22 bp, Artificial Sequence
  Synthetic oligonucleotide; CTT chr2 60521956 60521977 60521973 60521978 +
cacaatgaacttcccagataca

SEQ ID NO: 204358 - DNA, 22 bp, Artificial Sequence
  Synthetic oligonucleotide; TTC chr2 60521957 60521978 60521974 60521979 +
acaatgaacttcccagatacaa

SEQ ID NO: 204359 - DNA, 22 bp, Artificial Sequence
  Synthetic oligonucleotide; CTT chr2 60521968 60521989 60521985 60521990 +
cccagatacaagacttgagctc

SEQ ID NO: 204360 - DNA, 22 bp, Artificial Sequence
  Synthetic oligonucleotide; TTC chr2 60521969 60521990 60521986 60521991 +
ccagatacaagacttgagctca

SEQ ID NO: 204361 - DNA, 22 bp, Artificial Sequence
  Synthetic oligonucleotide; CTT chr2 60521984 60522005 60522001 60522006 +
gagctcacaggtactttcttgc

SEQ ID NO: 204362 - DNA, 22 bp, Artificial Sequence
  Synthetic oligonucleotide; TTG chr2 60521985 60522006 60522002 60522007 +
agctcacaggtactttcttgcc

SEQ ID NO: 204363 - DNA, 22 bp, Artificial Sequence
  Synthetic oligonucleotide; CTC chr2 60521990 60522011 60522007 60522012 +
acaggtactttcttgcccatag

SEQ ID NO: 204364 - DNA, 22 bp, Artificial Sequence
  Synthetic oligonucleotide; CTT chr2 60522000 60522021 60522017 60522022 +
tcttgcccataggacacttgtc

SEQ ID NO: 204365 - DNA, 22 bp, Artificial Sequence
  Synthetic oligonucleotide; TTT chr2 60522001 60522022 60522018 60522023 +
cttgcccataggacacttgtcc

SEQ ID NO: 204366 - DNA, 22 bp, Artificial Sequence
  Synthetic oligonucleotide; TTC chr2 60522002 60522023 60522019 60522024 +
ttgcccataggacacttgtccc

SEQ ID NO: 204367 - DNA, 22 bp, Artificial Sequence
  Synthetic oligonucleotide; CTT chr2 60522004 60522025 60522021 60522026 +
gcccataggacacttgtcccct

SEQ ID NO: 204368 - DNA, 22 bp, Artificial Sequence
  Synthetic oligonucleotide; TTG chr2 60522005 60522026 60522022 60522027 +
cccataggacacttgtcccctt

SEQ ID NO: 204369 - DNA, 22 bp, Artificial Sequence
  Synthetic oligonucleotide; CTT chr2 60522019 60522040 60522036 60522041 +
gtccccttgctacctctgagcc

SEQ ID NO: 204370 - DNA, 22 bp, Artificial Sequence
  Synthetic oligonucleotide; TTG chr2 60522020 60522041 60522037 60522042 +
tccccttgctacctctgagcca

SEQ ID NO: 204371 - DNA, 22 bp, Artificial Sequence
  Synthetic oligonucleotide; CTT chr2 60522027 60522048 60522044 60522049 +
gctacctctgagccaaaccctt

SEQ ID NO: 204372 - DNA, 22 bp, Artificial Sequence
  Synthetic oligonucleotide; TTG chr2 60522028 60522049 60522045 60522050 +
ctacctctgagccaaacccttg

SEQ ID NO: 204373 - DNA, 22 bp, Artificial Sequence
  Synthetic oligonucleotide; CTA chr2 60522031 60522052 60522048 60522053 +
cctctgagccaaacccttggtg

SEQ ID NO: 204374 - DNA, 22 bp, Artificial Sequence
  Synthetic oligonucleotide; CTC chr2 60522035 60522056 60522052 60522057 +
tgagccaaacccttggtgaaga

SEQ ID NO: 204375 - DNA, 22 bp, Artificial Sequence
  Synthetic oligonucleotide; CTG chr2 60522037 60522058 60522054 60522059 +
agccaaacccttggtgaagaaa

SEQ ID NO: 204376 - DNA, 22 bp, Artificial Sequence
  Synthetic oligonucleotide; CTT chr2 60522049 60522070 60522066 60522071 +
ggtgaagaaacaacaccgacta

SEQ ID NO: 204377 - DNA, 22 bp, Artificial Sequence
  Synthetic oligonucleotide; TTG chr2 60522050 60522071 60522067 60522072 +
gtgaagaaacaacaccgactaa

SEQ ID NO: 204378 - DNA, 22 bp, Artificial Sequence
  Synthetic oligonucleotide; CTA chr2 60522071 60522092 60522088 60522093 +
aacaaggccatactgctctcca

SEQ ID NO: 204379 - DNA, 22 bp, Artificial Sequence
  Synthetic oligonucleotide; CTG chr2 60522086 60522107 60522103 60522108 +
ctctccaccagtcaggcaatac

SEQ ID NO: 204380 - DNA, 22 bp, Artificial Sequence
  Synthetic oligonucleotide; CTC chr2 60522089 60522110 60522106 60522111 +
tccaccagtcaggcaatacctt

SEQ ID NO: 204381 - DNA, 22 bp, Artificial Sequence
  Synthetic oligonucleotide; CTC chr2 60522091 60522112 60522108 60522113 +
caccagtcaggcaataccttta

SEQ ID NO: 204382 - DNA, 22 bp, Artificial Sequence
  Synthetic oligonucleotide; CTT chr2 60522111 60522132 60522128 60522133 +
tattttctggaaaaatctcaaa

SEQ ID NO: 204383 - DNA, 22 bp, Artificial Sequence
  Synthetic oligonucleotide; TTT chr2 60522112 60522133 60522129 60522134 +
attttctggaaaaatctcaaat

SEQ ID NO: 204384 - DNA, 22 bp, Artificial Sequence
  Synthetic oligonucleotide; TTA chr2 60522113 60522134 60522130 60522135 +
ttttctggaaaaatctcaaata

SEQ ID NO: 204385 - DNA, 22 bp, Artificial Sequence
  Synthetic oligonucleotide; TTT chr2 60522116 60522137 60522133 60522138 +
tctggaaaaatctcaaatacta

SEQ ID NO: 204386 - DNA, 22 bp, Artificial Sequence
  Synthetic oligonucleotide; TTT chr2 60522117 60522138 60522134 60522139 +
ctggaaaaatctcaaatactac

SEQ ID NO: 204387 - DNA, 22 bp, Artificial Sequence
  Synthetic oligonucleotide; TTC chr2 60522118 60522139 60522135 60522140 +
tggaaaaatctcaaatactaca

SEQ ID NO: 204388 - DNA, 22 bp, Artificial Sequence
  Synthetic oligonucleotide; CTG chr2 60522120 60522141 60522137 60522142 +
gaaaaatctcaaatactacaaa

SEQ ID NO: 204389 - DNA, 22 bp, Artificial Sequence
  Synthetic oligonucleotide; CTC chr2 60522130 60522151 60522147 60522152 +
aaatactacaaaagtagagaga

SEQ ID NO: 204390 - DNA, 22 bp, Artificial Sequence
  Synthetic oligonucleotide; CTA chr2 60522138 60522159 60522155 60522160 +
caaaagtagagagaatgttata

SEQ ID NO: 204391 - DNA, 22 bp, Artificial Sequence
  Synthetic oligonucleotide; TTA chr2 60522158 60522179 60522175 60522180 +
taaatcagtccccaagtccaca

SEQ ID NO: 204392 - DNA, 22 bp, Artificial Sequence
  Synthetic oligonucleotide; CTT chr2 60522184 60522205 60522201 60522206 +
ccagctccaaccaccacagctc

SEQ ID NO: 204393 - DNA, 22 bp, Artificial Sequence
  Synthetic oligonucleotide; TTC chr2 60522185 60522206 60522202 60522207 +
cagctccaaccaccacagctca

SEQ ID NO: 204394 - DNA, 22 bp, Artificial Sequence
  Synthetic oligonucleotide; CTC chr2 60522191 60522212 60522208 60522213 +
caaccaccacagctcacagtca

SEQ ID NO: 204395 - DNA, 22 bp, Artificial Sequence
  Synthetic oligonucleotide; CTC chr2 60522206 60522227 60522223 60522228 +
acagtcattcttgtcttctgta

SEQ ID NO: 204396 - DNA, 22 bp, Artificial Sequence
  Synthetic oligonucleotide; TTC chr2 60522216 60522237 60522233 60522238 +
ttgtcttctgtaaccctatcgc

SEQ ID NO: 204397 - DNA, 22 bp, Artificial Sequence
  Synthetic oligonucleotide; CTT chr2 60522218 60522239 60522235 60522240 +
gtcttctgtaaccctatcgcct

SEQ ID NO: 204398 - DNA, 22 bp, Artificial Sequence
  Synthetic oligonucleotide; TTG chr2 60522219 60522240 60522236 60522241 +
tcttctgtaaccctatcgcctc

SEQ ID NO: 204399 - DNA, 22 bp, Artificial Sequence
  Synthetic oligonucleotide; CTT chr2 60522223 60522244 60522240 60522245 +
ctgtaaccctatcgcctcccta

SEQ ID NO: 204400 - DNA, 22 bp, Artificial Sequence
  Synthetic oligonucleotide; TTC chr2 60522224 60522245 60522241 60522246 +
tgtaaccctatcgcctccctag

SEQ ID NO: 204401 - DNA, 22 bp, Artificial Sequence
  Synthetic oligonucleotide; CTG chr2 60522226 60522247 60522243 60522248 +
taaccctatcgcctccctagcc

SEQ ID NO: 204402 - DNA, 22 bp, Artificial Sequence
  Synthetic oligonucleotide; CTA chr2 60522234 60522255 60522251 60522256 +
tcgcctccctagcccattttat

SEQ ID NO: 204403 - DNA, 22 bp, Artificial Sequence
  Synthetic oligonucleotide; CTC chr2 60522241 60522262 60522258 60522263 +
cctagcccattttattatttaa

SEQ ID NO: 204404 - DNA, 22 bp, Artificial Sequence
  Synthetic oligonucleotide; CTA chr2 60522245 60522266 60522262 60522267 +
gcccattttattatttaagttg

SEQ ID NO: 204405 - DNA, 22 bp, Artificial Sequence
  Synthetic oligonucleotide; TTT chr2 60522253 60522274 60522270 60522275 +
tattatttaagttgatcccaga

SEQ ID NO: 204406 - DNA, 22 bp, Artificial Sequence
  Synthetic oligonucleotide; TTT chr2 60522254 60522275 60522271 60522276 +
attatttaagttgatcccagac

SEQ ID NO: 204407 - DNA, 22 bp, Artificial Sequence
  Synthetic oligonucleotide; TTA chr2 60522255 60522276 60522272 60522277 +
ttatttaagttgatcccagacg

SEQ ID NO: 204408 - DNA, 22 bp, Artificial Sequence
  Synthetic oligonucleotide; TTA chr2 60522258 60522279 60522275 60522280 +
tttaagttgatcccagacgtca

SEQ ID NO: 204409 - DNA, 22 bp, Artificial Sequence
  Synthetic oligonucleotide; TTT chr2 60522261 60522282 60522278 60522283 +
aagttgatcccagacgtcatat

SEQ ID NO: 204410 - DNA, 22 bp, Artificial Sequence
  Synthetic oligonucleotide; TTA chr2 60522262 60522283 60522279 60522284 +
agttgatcccagacgtcatatc

SEQ ID NO: 204411 - DNA, 22 bp, Artificial Sequence
  Synthetic oligonucleotide; TTG chr2 60522267 60522288 60522284 60522289 +
atcccagacgtcatatcatttc

SEQ ID NO: 204412 - DNA, 22 bp, Artificial Sequence
  Synthetic oligonucleotide; TTT chr2 60522288 60522309 60522305 60522310 +
catcagtaaacacctctgtatg

SEQ ID NO: 204413 - DNA, 22 bp, Artificial Sequence
  Synthetic oligonucleotide; TTC chr2 60522289 60522310 60522306 60522311 +
atcagtaaacacctctgtatgt

SEQ ID NO: 204414 - DNA, 22 bp, Artificial Sequence
  Synthetic oligonucleotide; CTC chr2 60522304 60522325 60522321 60522326 +
tgtatgtattttttaaacatag

SEQ ID NO: 204415 - DNA, 22 bp, Artificial Sequence
  Synthetic oligonucleotide; CTG chr2 60522306 60522327 60522323 60522328 +
tatgtattttttaaacatagga

SEQ ID NO: 204416 - DNA, 22 bp, Artificial Sequence
  Synthetic oligonucleotide; TTT chr2 60522315 60522336 60522332 60522337 +
tttaaacataggaactcgtttt

SEQ ID NO: 204417 - DNA, 22 bp, Artificial Sequence
  Synthetic oligonucleotide; TTT chr2 60522316 60522337 60522333 60522338 +
ttaaacataggaactcgttttt

SEQ ID NO: 204418 - DNA, 22 bp, Artificial Sequence
  Synthetic oligonucleotide; TTT chr2 60522317 60522338 60522334 60522339 +
taaacataggaactcgtttttt

SEQ ID NO: 204419 - DNA, 22 bp, Artificial Sequence
  Synthetic oligonucleotide; TTT chr2 60522318 60522339 60522335 60522340 +
aaacataggaactcgttttttt

SEQ ID NO: 204420 - DNA, 22 bp, Artificial Sequence
  Synthetic oligonucleotide; TTA chr2 60522319 60522340 60522336 60522341 +
aacataggaactcgtttttttt

SEQ ID NO: 204421 - DNA, 22 bp, Artificial Sequence
  Synthetic oligonucleotide; CTC chr2 60522332 60522353 60522349 60522354 +
gttttttttcttttaaatacaa

SEQ ID NO: 204422 - DNA, 22 bp, Artificial Sequence
  Synthetic oligonucleotide; TTT chr2 60522336 60522357 60522353 60522358 +
tttttcttttaaatacaactgc

SEQ ID NO: 204423 - DNA, 22 bp, Artificial Sequence
  Synthetic oligonucleotide; TTT chr2 60522337 60522358 60522354 60522359 +
ttttcttttaaatacaactgca

SEQ ID NO: 204424 - DNA, 22 bp, Artificial Sequence
  Synthetic oligonucleotide; TTT chr2 60522338 60522359 60522355 60522360 +
tttcttttaaatacaactgcaa

SEQ ID NO: 204425 - DNA, 22 bp, Artificial Sequence
  Synthetic oligonucleotide; TTT chr2 60522339 60522360 60522356 60522361 +
ttcttttaaatacaactgcaaa

SEQ ID NO: 204426 - DNA, 22 bp, Artificial Sequence
  Synthetic oligonucleotide; TTT chr2 60522340 60522361 60522357 60522362 +
tcttttaaatacaactgcaaaa

SEQ ID NO: 204427 - DNA, 22 bp, Artificial Sequence
  Synthetic oligonucleotide; TTT chr2 60522341 60522362 60522358 60522363 +
cttttaaatacaactgcaaaac

SEQ ID NO: 204428 - DNA, 22 bp, Artificial Sequence
  Synthetic oligonucleotide; TTC chr2 60522342 60522363 60522359 60522364 +
ttttaaatacaactgcaaaacc

SEQ ID NO: 204429 - DNA, 22 bp, Artificial Sequence
  Synthetic oligonucleotide; CTT chr2 60522344 60522365 60522361 60522366 +
ttaaatacaactgcaaaaccat

SEQ ID NO: 204430 - DNA, 22 bp, Artificial Sequence
  Synthetic oligonucleotide; TTT chr2 60522345 60522366 60522362 60522367 +
taaatacaactgcaaaaccatt

SEQ ID NO: 204431 - DNA, 22 bp, Artificial Sequence
  Synthetic oligonucleotide; TTT chr2 60522346 60522367 60522363 60522368 +
aaatacaactgcaaaaccatta

SEQ ID NO: 204432 - DNA, 22 bp, Artificial Sequence
  Synthetic oligonucleotide; TTA chr2 60522347 60522368 60522364 60522369 +
aatacaactgcaaaaccattat

SEQ ID NO: 204433 - DNA, 22 bp, Artificial Sequence
  Synthetic oligonucleotide; CTG chr2 60522357 60522378 60522374 60522379 +
caaaaccattatcacacctaaa

SEQ ID NO: 204434 - DNA, 22 bp, Artificial Sequence
  Synthetic oligonucleotide; TTA chr2 60522368 60522389 60522385 60522390 +
tcacacctaaaaataataaagt

SEQ ID NO: 204435 - DNA, 22 bp, Artificial Sequence
  Synthetic oligonucleotide; CTA chr2 60522377 60522398 60522394 60522399 +
aaaataataaagtcacaaataa

SEQ ID NO: 204436 - DNA, 22 bp, Artificial Sequence
  Synthetic oligonucleotide; TTA chr2 60522411 60522432 60522428 60522433 +
ccaaataggggagttattttaa

SEQ ID NO: 204437 - DNA, 22 bp, Artificial Sequence
  Synthetic oligonucleotide; TTA chr2 60522427 60522448 60522444 60522449 +
ttttaaactcagaaatacttct

SEQ ID NO: 204438 - DNA, 22 bp, Artificial Sequence
  Synthetic oligonucleotide; TTT chr2 60522430 60522451 60522447 60522452 +
taaactcagaaatacttctttc

SEQ ID NO: 204439 - DNA, 22 bp, Artificial Sequence
  Synthetic oligonucleotide; TTT chr2 60522431 60522452 60522448 60522453 +
aaactcagaaatacttctttcc

SEQ ID NO: 204440 - DNA, 22 bp, Artificial Sequence
  Synthetic oligonucleotide; TTA chr2 60522432 60522453 60522449 60522454 +
aactcagaaatacttctttcca

SEQ ID NO: 204441 - DNA, 22 bp, Artificial Sequence
  Synthetic oligonucleotide; CTC chr2 60522437 60522458 60522454 60522459 +
agaaatacttctttccatctgg

SEQ ID NO: 204442 - DNA, 22 bp, Artificial Sequence
  Synthetic oligonucleotide; CTT chr2 60522447 60522468 60522464 60522469 +
ctttccatctgggtcatgtttt

SEQ ID NO: 204443 - DNA, 22 bp, Artificial Sequence
  Synthetic oligonucleotide; TTC chr2 60522448 60522469 60522465 60522470 +
tttccatctgggtcatgttttg

SEQ ID NO: 204444 - DNA, 22 bp, Artificial Sequence
  Synthetic oligonucleotide; CTT chr2 60522450 60522471 60522467 60522472 +
tccatctgggtcatgttttgga

SEQ ID NO: 204445 - DNA, 22 bp, Artificial Sequence
  Synthetic oligonucleotide; TTT chr2 60522451 60522472 60522468 60522473 +
ccatctgggtcatgttttggag

SEQ ID NO: 204446 - DNA, 22 bp, Artificial Sequence
  Synthetic oligonucleotide; TTC chr2 60522452 60522473 60522469 60522474 +
catctgggtcatgttttggagg

SEQ ID NO: 204447 - DNA, 22 bp, Artificial Sequence
  Synthetic oligonucleotide; CTG chr2 60522458 60522479 60522475 60522480 +
ggtcatgttttggaggatccct

SEQ ID NO: 204448 - DNA, 22 bp, Artificial Sequence
  Synthetic oligonucleotide; TTT chr2 60522468 60522489 60522485 60522490 +
tggaggatcccttccagtgagg

SEQ ID NO: 204449 - DNA, 22 bp, Artificial Sequence
  Synthetic oligonucleotide; TTT chr2 60522469 60522490 60522486 60522491 +
ggaggatcccttccagtgaggt

SEQ ID NO: 204450 - DNA, 22 bp, Artificial Sequence
  Synthetic oligonucleotide; TTG chr2 60522470 60522491 60522487 60522492 +
gaggatcccttccagtgaggtt

SEQ ID NO: 204451 - DNA, 22 bp, Artificial Sequence
  Synthetic oligonucleotide; CTT chr2 60522481 60522502 60522498 60522503 +
ccagtgaggttcaagactgaag

SEQ ID NO: 204452 - DNA, 22 bp, Artificial Sequence
  Synthetic oligonucleotide; TTC chr2 60522482 60522503 60522499 60522504 +
cagtgaggttcaagactgaagc

SEQ ID NO: 204453 - DNA, 22 bp, Artificial Sequence
  Synthetic oligonucleotide; TTC chr2 60522493 60522514 60522510 60522515 +
aagactgaagctgccaagaaaa

SEQ ID NO: 204454 - DNA, 22 bp, Artificial Sequence
  Synthetic oligonucleotide; CTG chr2 60522500 60522521 60522517 60522522 +
aagctgccaagaaaagcttcag

SEQ ID NO: 204455 - DNA, 22 bp, Artificial Sequence
  Synthetic oligonucleotide; CTG chr2 60522506 60522527 60522523 60522528 +
ccaagaaaagcttcagagaatc

SEQ ID NO: 204456 - DNA, 22 bp, Artificial Sequence
  Synthetic oligonucleotide; CTT chr2 60522519 60522540 60522536 60522541 +
cagagaatcacactctctaaaa

SEQ ID NO: 204457 - DNA, 22 bp, Artificial Sequence
  Synthetic oligonucleotide; TTC chr2 60522520 60522541 60522537 60522542 +
agagaatcacactctctaaaaa

SEQ ID NO: 204458 - DNA, 22 bp, Artificial Sequence
  Synthetic oligonucleotide; CTC chr2 60522534 60522555 60522551 60522556 +
tctaaaaagggccttgtgtaaa

SEQ ID NO: 204459 - DNA, 22 bp, Artificial Sequence
  Synthetic oligonucleotide; CTC chr2 60522536 60522557 60522553 60522558 +
taaaaagggccttgtgtaaagc

SEQ ID NO: 204460 - DNA, 22 bp, Artificial Sequence
  Synthetic oligonucleotide; CTA chr2 60522538 60522559 60522555 60522560 +
aaaagggccttgtgtaaagcca

SEQ ID NO: 204461 - DNA, 22 bp, Artificial Sequence
  Synthetic oligonucleotide; CTT chr2 60522549 60522570 60522566 60522571 +
gtgtaaagccaccttgcatgtc

SEQ ID NO: 204462 - DNA, 22 bp, Artificial Sequence
  Synthetic oligonucleotide; TTG chr2 60522550 60522571 60522567 60522572 +
tgtaaagccaccttgcatgtca

SEQ ID NO: 204463 - DNA, 22 bp, Artificial Sequence
  Synthetic oligonucleotide; CTT chr2 60522564 60522585 60522581 60522586 +
gcatgtcagcccaagctcctgc

SEQ ID NO: 204464 - DNA, 22 bp, Artificial Sequence
  Synthetic oligonucleotide; TTG chr2 60522565 60522586 60522582 60522587 +
catgtcagcccaagctcctgcc

SEQ ID NO: 204465 - DNA, 22 bp, Artificial Sequence
  Synthetic oligonucleotide; CTC chr2 60522582 60522603 60522599 60522604 +
ctgccccttgcagtcctttgcc

SEQ ID NO: 204466 - DNA, 22 bp, Artificial Sequence
  Synthetic oligonucleotide; CTG chr2 60522585 60522606 60522602 60522607 +
ccccttgcagtcctttgccctg

SEQ ID NO: 204467 - DNA, 22 bp, Artificial Sequence
  Synthetic oligonucleotide; CTT chr2 60522591 60522612 60522608 60522613 +
gcagtcctttgccctgttcagg

SEQ ID NO: 204468 - DNA, 22 bp, Artificial Sequence
  Synthetic oligonucleotide; TTG chr2 60522592 60522613 60522609 60522614 +
cagtcctttgccctgttcaggg

SEQ ID NO: 204469 - DNA, 22 bp, Artificial Sequence
  Synthetic oligonucleotide; CTT chr2 60522600 60522621 60522617 60522622 +
tgccctgttcagggctgaatgc

SEQ ID NO: 204470 - DNA, 22 bp, Artificial Sequence
  Synthetic oligonucleotide; TTT chr2 60522601 60522622 60522618 60522623 +
gccctgttcagggctgaatgca

SEQ ID NO: 204471 - DNA, 22 bp, Artificial Sequence
  Synthetic oligonucleotide; TTG chr2 60522602 60522623 60522619 60522624 +
ccctgttcagggctgaatgcac

SEQ ID NO: 204472 - DNA, 22 bp, Artificial Sequence
  Synthetic oligonucleotide; CTG chr2 60522607 60522628 60522624 60522629 +
ttcagggctgaatgcaccctct

SEQ ID NO: 204473 - DNA, 22 bp, Artificial Sequence
  Synthetic oligonucleotide; TTC chr2 60522610 60522631 60522627 60522632 +
agggctgaatgcaccctctgag

SEQ ID NO: 204474 - DNA, 22 bp, Artificial Sequence
  Synthetic oligonucleotide; CTG chr2 60522617 60522638 60522634 60522639 +
aatgcaccctctgagagtctct

SEQ ID NO: 204475 - DNA, 22 bp, Artificial Sequence
  Synthetic oligonucleotide; CTC chr2 60522628 60522649 60522645 60522650 +
tgagagtctctgtgacagtcct

SEQ ID NO: 204476 - DNA, 22 bp, Artificial Sequence
  Synthetic oligonucleotide; CTG chr2 60522630 60522651 60522647 60522652 +
agagtctctgtgacagtcctcc

SEQ ID NO: 204477 - DNA, 22 bp, Artificial Sequence
  Synthetic oligonucleotide; CTC chr2 60522638 60522659 60522655 60522660 +
tgtgacagtcctcccacatcga

SEQ ID NO: 204478 - DNA, 22 bp, Artificial Sequence
  Synthetic oligonucleotide; CTG chr2 60522640 60522661 60522657 60522662 +
tgacagtcctcccacatcgact

SEQ ID NO: 204479 - DNA, 22 bp, Artificial Sequence
  Synthetic oligonucleotide; CTC chr2 60522651 60522672 60522668 60522673 +
ccacatcgactgccccacaggc

SEQ ID NO: 204480 - DNA, 22 bp, Artificial Sequence
  Synthetic oligonucleotide; CTG chr2 60522663 60522684 60522680 60522685 +
ccccacaggccctgagtctccc

SEQ ID NO: 204481 - DNA, 22 bp, Artificial Sequence
  Synthetic oligonucleotide; CTG chr2 60522677 60522698 60522694 60522699 +
agtctccctcactccccaccat

SEQ ID NO: 204482 - DNA, 22 bp, Artificial Sequence
  Synthetic oligonucleotide; CTC chr2 60522683 60522704 60522700 60522705 +
cctcactccccaccatgtggcc

SEQ ID NO: 204483 - DNA, 22 bp, Artificial Sequence
  Synthetic oligonucleotide; CTC chr2 60522687 60522708 60522704 60522709 +
actccccaccatgtggcccatc

SEQ ID NO: 204484 - DNA, 22 bp, Artificial Sequence
  Synthetic oligonucleotide; CTC chr2 60522691 60522712 60522708 60522713 +
cccaccatgtggcccatcacca

SEQ ID NO: 204485 - DNA, 22 bp, Artificial Sequence
  Synthetic oligonucleotide; CTC chr2 60522735 60522756 60522752 60522757 +
ccagtgttcagaactggaattc

SEQ ID NO: 204486 - DNA, 22 bp, Artificial Sequence
  Synthetic oligonucleotide; TTC chr2 60522744 60522765 60522761 60522766 +
agaactggaattcatttgtctt

SEQ ID NO: 204487 - DNA, 22 bp, Artificial Sequence
  Synthetic oligonucleotide; CTG chr2 60522751 60522772 60522768 60522773 +
gaattcatttgtcttggaagaa

SEQ ID NO: 204488 - DNA, 22 bp, Artificial Sequence
  Synthetic oligonucleotide; TTC chr2 60522757 60522778 60522774 60522779 +
atttgtcttggaagaaagtgtt

SEQ ID NO: 204489 - DNA, 22 bp, Artificial Sequence
  Synthetic oligonucleotide; TTT chr2 60522761 60522782 60522778 60522783 +
gtcttggaagaaagtgttctcc

SEQ ID NO: 204490 - DNA, 22 bp, Artificial Sequence
  Synthetic oligonucleotide; TTG chr2 60522762 60522783 60522779 60522784 +
tcttggaagaaagtgttctcct

SEQ ID NO: 204491 - DNA, 22 bp, Artificial Sequence
  Synthetic oligonucleotide; CTT chr2 60522766 60522787 60522783 60522788 +
ggaagaaagtgttctcctggac

SEQ ID NO: 204492 - DNA, 22 bp, Artificial Sequence
  Synthetic oligonucleotide; TTG chr2 60522767 60522788 60522784 60522789 +
gaagaaagtgttctcctggacg

SEQ ID NO: 204493 - DNA, 22 bp, Artificial Sequence
  Synthetic oligonucleotide; TTC chr2 60522780 60522801 60522797 60522802 +
tcctggacggttctgcacagaa

SEQ ID NO: 204494 - DNA, 22 bp, Artificial Sequence
  Synthetic oligonucleotide; CTC chr2 60522782 60522803 60522799 60522804 +
ctggacggttctgcacagaatt

SEQ ID NO: 204495 - DNA, 22 bp, Artificial Sequence
  Synthetic oligonucleotide; CTG chr2 60522785 60522806 60522802 60522807 +
gacggttctgcacagaattcat

SEQ ID NO: 204496 - DNA, 22 bp, Artificial Sequence
  Synthetic oligonucleotide; TTC chr2 60522793 60522814 60522810 60522815 +
tgcacagaattcattcacagag

SEQ ID NO: 204497 - DNA, 22 bp, Artificial Sequence
  Synthetic oligonucleotide; CTG chr2 60522795 60522816 60522812 60522817 +
cacagaattcattcacagagca

SEQ ID NO: 204498 - DNA, 22 bp, Artificial Sequence
  Synthetic oligonucleotide; TTC chr2 60522805 60522826 60522822 60522827 +
attcacagagcatgtcttggat

SEQ ID NO: 204499 - DNA, 22 bp, Artificial Sequence
  Synthetic oligonucleotide; TTC chr2 60522809 60522830 60522826 60522831 +
acagagcatgtcttggatatac

SEQ ID NO: 204500 - DNA, 22 bp, Artificial Sequence
  Synthetic oligonucleotide; CTT chr2 60522823 60522844 60522840 60522845 +
ggatatacagctgactagatat

SEQ ID NO: 204501 - DNA, 22 bp, Artificial Sequence
  Synthetic oligonucleotide; TTG chr2 60522824 60522845 60522841 60522846 +
gatatacagctgactagatatg

SEQ ID NO: 204502 - DNA, 22 bp, Artificial Sequence
  Synthetic oligonucleotide; CTG chr2 60522836 60522857 60522853 60522858 +
actagatatgtcagttatgttc

SEQ ID NO: 204503 - DNA, 22 bp, Artificial Sequence
  Synthetic oligonucleotide; CTA chr2 60522840 60522861 60522857 60522862 +
gatatgtcagttatgttccaaa

SEQ ID NO: 204504 - DNA, 22 bp, Artificial Sequence
  Synthetic oligonucleotide; TTA chr2 60522853 60522874 60522870 60522875 +
tgttccaaatgggttttcacag

SEQ ID NO: 204505 - DNA, 22 bp, Artificial Sequence
  Synthetic oligonucleotide; TTC chr2 60522858 60522879 60522875 60522880 +
caaatgggttttcacaggtcaa

SEQ ID NO: 204506 - DNA, 22 bp, Artificial Sequence
  Synthetic oligonucleotide; TTT chr2 60522869 60522890 60522886 60522891 +
tcacaggtcaaggttctgcagg

SEQ ID NO: 204507 - DNA, 22 bp, Artificial Sequence
  Synthetic oligonucleotide; TTT chr2 60522870 60522891 60522887 60522892 +
cacaggtcaaggttctgcaggc

SEQ ID NO: 204508 - DNA, 22 bp, Artificial Sequence
  Synthetic oligonucleotide; TTC chr2 60522871 60522892 60522888 60522893 +
acaggtcaaggttctgcaggca

SEQ ID NO: 204509 - DNA, 22 bp, Artificial Sequence
  Synthetic oligonucleotide; TTC chr2 60522885 60522906 60522902 60522907 +
tgcaggcaagagcaaatactat

SEQ ID NO: 204510 - DNA, 22 bp, Artificial Sequence
  Synthetic oligonucleotide; CTG chr2 60522887 60522908 60522904 60522909 +
caggcaagagcaaatactattt

SEQ ID NO: 204511 - DNA, 22 bp, Artificial Sequence
  Synthetic oligonucleotide; CTA chr2 60522906 60522927 60522923 60522928 +
tttttagacaggataaggtcaa

SEQ ID NO: 204512 - DNA, 22 bp, Artificial Sequence
  Synthetic oligonucleotide; TTT chr2 60522909 60522930 60522926 60522931 +
ttagacaggataaggtcaaaat

SEQ ID NO: 204513 - DNA, 22 bp, Artificial Sequence
  Synthetic oligonucleotide; TTT chr2 60522910 60522931 60522927 60522932 +
tagacaggataaggtcaaaatg

SEQ ID NO: 204514 - DNA, 22 bp, Artificial Sequence
  Synthetic oligonucleotide; TTT chr2 60522911 60522932 60522928 60522933 +
agacaggataaggtcaaaatgc

SEQ ID NO: 204515 - DNA, 22 bp, Artificial Sequence
  Synthetic oligonucleotide; TTA chr2 60522912 60522933 60522929 60522934 +
gacaggataaggtcaaaatgct

SEQ ID NO: 204516 - DNA, 22 bp, Artificial Sequence
  Synthetic oligonucleotide; CTT chr2 60522935 60522956 60522952 60522957 +
ttagagacagtgaggtctacaa

SEQ ID NO: 204517 - DNA, 22 bp, Artificial Sequence
  Synthetic oligonucleotide; TTT chr2 60522936 60522957 60522953 60522958 +
tagagacagtgaggtctacaat

SEQ ID NO: 204518 - DNA, 22 bp, Artificial Sequence
  Synthetic oligonucleotide; TTT chr2 60522937 60522958 60522954 60522959 +
agagacagtgaggtctacaata

SEQ ID NO: 204519 - DNA, 22 bp, Artificial Sequence
  Synthetic oligonucleotide; TTA chr2 60522938 60522959 60522955 60522960 +
gagacagtgaggtctacaataa

SEQ ID NO: 204520 - DNA, 22 bp, Artificial Sequence
  Synthetic oligonucleotide; CTA chr2 60522954 60522975 60522971 60522976 +
caataaaacctattgatcagcc

SEQ ID NO: 204521 - DNA, 22 bp, Artificial Sequence
  Synthetic oligonucleotide; CTA chr2 60522966 60522987 60522983 60522988 +
ttgatcagcctctggaactagt

SEQ ID NO: 204522 - DNA, 22 bp, Artificial Sequence
  Synthetic oligonucleotide; TTG chr2 60522969 60522990 60522986 60522991 +
atcagcctctggaactagtgct

SEQ ID NO: 204523 - DNA, 22 bp, Artificial Sequence
  Synthetic oligonucleotide; CTC chr2 60522978 60522999 60522995 60523000 +
tggaactagtgctccagagaga

SEQ ID NO: 204524 - DNA, 22 bp, Artificial Sequence
  Synthetic oligonucleotide; CTG chr2 60522980 60523001 60522997 60523002 +
gaactagtgctccagagagaca

SEQ ID NO: 204525 - DNA, 22 bp, Artificial Sequence
  Synthetic oligonucleotide; CTA chr2 60522986 60523007 60523003 60523008 +
gtgctccagagagacacagaga

SEQ ID NO: 204526 - DNA, 22 bp, Artificial Sequence
  Synthetic oligonucleotide; CTC chr2 60522992 60523013 60523009 60523014 +
cagagagacacagagattgaaa

SEQ ID NO: 204527 - DNA, 22 bp, Artificial Sequence
  Synthetic oligonucleotide; TTG chr2 60523011 60523032 60523028 60523033 +
aaacaaaaattgcctggccgtt

SEQ ID NO: 204528 - DNA, 22 bp, Artificial Sequence
  Synthetic oligonucleotide; TTG chr2 60523023 60523044 60523040 60523045 +
cctggccgttttctctgtagac

SEQ ID NO: 204529 - DNA, 22 bp, Artificial Sequence
  Synthetic oligonucleotide; CTG chr2 60523027 60523048 60523044 60523049 +
gccgttttctctgtagactctg

SEQ ID NO: 204530 - DNA, 22 bp, Artificial Sequence
  Synthetic oligonucleotide; TTT chr2 60523034 60523055 60523051 60523056 +
tctctgtagactctgtgggtaa

SEQ ID NO: 204531 - DNA, 22 bp, Artificial Sequence
  Synthetic oligonucleotide; TTT chr2 60523035 60523056 60523052 60523057 +
ctctgtagactctgtgggtaaa

SEQ ID NO: 204532 - DNA, 22 bp, Artificial Sequence
  Synthetic oligonucleotide; TTC chr2 60523036 60523057 60523053 60523058 +
tctgtagactctgtgggtaaaa

SEQ ID NO: 204533 - DNA, 22 bp, Artificial Sequence
  Synthetic oligonucleotide; CTC chr2 60523038 60523059 60523055 60523060 +
tgtagactctgtgggtaaaagc

SEQ ID NO: 204534 - DNA, 22 bp, Artificial Sequence
  Synthetic oligonucleotide; CTG chr2 60523040 60523061 60523057 60523062 +
tagactctgtgggtaaaagctt

SEQ ID NO: 204535 - DNA, 22 bp, Artificial Sequence
  Synthetic oligonucleotide; CTC chr2 60523047 60523068 60523064 60523069 +
tgtgggtaaaagcttgttggac

SEQ ID NO: 204536 - DNA, 22 bp, Artificial Sequence
  Synthetic oligonucleotide; CTG chr2 60523049 60523070 60523066 60523071 +
tgggtaaaagcttgttggactt

SEQ ID NO: 204537 - DNA, 22 bp, Artificial Sequence
  Synthetic oligonucleotide; CTT chr2 60523062 60523083 60523079 60523084 +
gttggacttaatatctttcagg

SEQ ID NO: 204538 - DNA, 22 bp, Artificial Sequence
  Synthetic oligonucleotide; TTG chr2 60523063 60523084 60523080 60523085 +
ttggacttaatatctttcagga

SEQ ID NO: 204539 - DNA, 22 bp, Artificial Sequence
  Synthetic oligonucleotide; TTG chr2 60523066 60523087 60523083 60523088 +
gacttaatatctttcaggatat

SEQ ID NO: 204540 - DNA, 22 bp, Artificial Sequence
  Synthetic oligonucleotide; CTT chr2 60523071 60523092 60523088 60523093 +
aatatctttcaggatataaaat

SEQ ID NO: 204541 - DNA, 22 bp, Artificial Sequence
  Synthetic oligonucleotide; TTA chr2 60523072 60523093 60523089 60523094 +
atatctttcaggatataaaata

SEQ ID NO: 204542 - DNA, 22 bp, Artificial Sequence
  Synthetic oligonucleotide; CTT chr2 60523079 60523100 60523096 60523101 +
tcaggatataaaataagtaaga

SEQ ID NO: 204543 - DNA, 22 bp, Artificial Sequence
  Synthetic oligonucleotide; TTT chr2 60523080 60523101 60523097 60523102 +
caggatataaaataagtaagaa

SEQ ID NO: 204544 - DNA, 22 bp, Artificial Sequence
  Synthetic oligonucleotide; TTC chr2 60523081 60523102 60523098 60523103 +
aggatataaaataagtaagaag

SEQ ID NO: 204545 - DNA, 22 bp, Artificial Sequence
  Synthetic oligonucleotide; CTG chr2 60523109 60523130 60523126 60523131 +
tgtacagattactgaagtccat

SEQ ID NO: 204546 - DNA, 22 bp, Artificial Sequence
  Synthetic oligonucleotide; TTA chr2 60523120 60523141 60523137 60523142 +
ctgaagtccatttaaccagatg

SEQ ID NO: 204547 - DNA, 22 bp, Artificial Sequence
  Synthetic oligonucleotide; CTG chr2 60523123 60523144 60523140 60523145 +
aagtccatttaaccagatgcag

SEQ ID NO: 204548 - DNA, 22 bp, Artificial Sequence
  Synthetic oligonucleotide; TTT chr2 60523133 60523154 60523150 60523155 +
aaccagatgcagaggcaggtca

SEQ ID NO: 204549 - DNA, 22 bp, Artificial Sequence
  Synthetic oligonucleotide; TTA chr2 60523134 60523155 60523151 60523156 +
accagatgcagaggcaggtcac

SEQ ID NO: 204550 - DNA, 22 bp, Artificial Sequence
  Synthetic oligonucleotide; CTC chr2 60523169 60523190 60523186 60523191 +
atggcagaaccgtaaagaaggg

SEQ ID NO: 204551 - DNA, 22 bp, Artificial Sequence
  Synthetic oligonucleotide; TTT chr2 60523197 60523218 60523214 60523219 +
caaggcaacacgtgttgcaacc

SEQ ID NO: 204552 - DNA, 22 bp, Artificial Sequence
  Synthetic oligonucleotide; TTC chr2 60523198 60523219 60523215 60523220 +
aaggcaacacgtgttgcaacct

SEQ ID NO: 204553 - DNA, 22 bp, Artificial Sequence
  Synthetic oligonucleotide; TTG chr2 60523214 60523235 60523231 60523236 +
caacctagagaaagaataaaca

SEQ ID NO: 204554 - DNA, 22 bp, Artificial Sequence
  Synthetic oligonucleotide; CTA chr2 60523221 60523242 60523238 60523243 +
gagaaagaataaacaccagtct

SEQ ID NO: 204555 - DNA, 22 bp, Artificial Sequence
  Synthetic oligonucleotide; CTT chr2 60523244 60523265 60523261 60523266 +
ctcaactcaggggaggcacaaa

SEQ ID NO: 204556 - DNA, 22 bp, Artificial Sequence
  Synthetic oligonucleotide; TTC chr2 60523245 60523266 60523262 60523267 +
tcaactcaggggaggcacaaag

SEQ ID NO: 204557 - DNA, 22 bp, Artificial Sequence
  Synthetic oligonucleotide; CTC chr2 60523247 60523268 60523264 60523269 +
aactcaggggaggcacaaagga

SEQ ID NO: 204558 - DNA, 22 bp, Artificial Sequence
  Synthetic oligonucleotide; CTC chr2 60523252 60523273 60523269 60523274 +
aggggaggcacaaaggacagcc

SEQ ID NO: 204559 - DNA, 22 bp, Artificial Sequence
  Synthetic oligonucleotide; CTG chr2 60523276 60523297 60523293 60523298 +
ccatccaggattcctgcttggg

SEQ ID NO: 204560 - DNA, 22 bp, Artificial Sequence
  Synthetic oligonucleotide; TTC chr2 60523289 60523310 60523306 60523311 +
ctgcttgggactgttgctccta

SEQ ID NO: 204561 - DNA, 22 bp, Artificial Sequence
  Synthetic oligonucleotide; CTG chr2 60523292 60523313 60523309 60523314 +
cttgggactgttgctcctaaat

SEQ ID NO: 204562 - DNA, 22 bp, Artificial Sequence
  Synthetic oligonucleotide; CTT chr2 60523295 60523316 60523312 60523317 +
gggactgttgctcctaaatttg

SEQ ID NO: 204563 - DNA, 22 bp, Artificial Sequence
  Synthetic oligonucleotide; TTG chr2 60523296 60523317 60523313 60523318 +
ggactgttgctcctaaatttgc

SEQ ID NO: 204564 - DNA, 22 bp, Artificial Sequence
  Synthetic oligonucleotide; CTG chr2 60523302 60523323 60523319 60523324 +
ttgctcctaaatttgccactat

SEQ ID NO: 204565 - DNA, 22 bp, Artificial Sequence
  Synthetic oligonucleotide; TTG chr2 60523305 60523326 60523322 60523327 +
ctcctaaatttgccactatgat

SEQ ID NO: 204566 - DNA, 22 bp, Artificial Sequence
  Synthetic oligonucleotide; CTC chr2 60523308 60523329 60523325 60523330 +
ctaaatttgccactatgatcct

SEQ ID NO: 204567 - DNA, 22 bp, Artificial Sequence
  Synthetic oligonucleotide; CTA chr2 60523311 60523332 60523328 60523333 +
aatttgccactatgatcctcaa

SEQ ID NO: 204568 - DNA, 22 bp, Artificial Sequence
  Synthetic oligonucleotide; TTT chr2 60523316 60523337 60523333 60523338 +
gccactatgatcctcaatccag

SEQ ID NO: 204569 - DNA, 22 bp, Artificial Sequence
  Synthetic oligonucleotide; TTG chr2 60523317 60523338 60523334 60523339 +
ccactatgatcctcaatccagc

SEQ ID NO: 204570 - DNA, 22 bp, Artificial Sequence
  Synthetic oligonucleotide; CTA chr2 60523323 60523344 60523340 60523345 +
tgatcctcaatccagcgctatg

SEQ ID NO: 204571 - DNA, 22 bp, Artificial Sequence
  Synthetic oligonucleotide; CTC chr2 60523331 60523352 60523348 60523353 +
aatccagcgctatgtgaacaac

SEQ ID NO: 204572 - DNA, 22 bp, Artificial Sequence
  Synthetic oligonucleotide; CTA chr2 60523343 60523364 60523360 60523365 +
tgtgaacaacagactttcagat

SEQ ID NO: 204573 - DNA, 22 bp, Artificial Sequence
  Synthetic oligonucleotide; CTT chr2 60523359 60523380 60523376 60523381 +
tcagataaatagtatggagata

SEQ ID NO: 204574 - DNA, 22 bp, Artificial Sequence
  Synthetic oligonucleotide; TTT chr2 60523360 60523381 60523377 60523382 +
cagataaatagtatggagataa

SEQ ID NO: 204575 - DNA, 22 bp, Artificial Sequence
  Synthetic oligonucleotide; TTC chr2 60523361 60523382 60523378 60523383 +
agataaatagtatggagataat

SEQ ID NO: 204576 - DNA, 22 bp, Artificial Sequence
  Synthetic oligonucleotide; TTT chr2 60523385 60523406 60523402 60523407 +
gcttaagtcagattttgatgaa

SEQ ID NO: 204577 - DNA, 22 bp, Artificial Sequence
  Synthetic oligonucleotide; TTG chr2 60523386 60523407 60523403 60523408 +
cttaagtcagattttgatgaaa

SEQ ID NO: 204578 - DNA, 22 bp, Artificial Sequence
  Synthetic oligonucleotide; CTT chr2 60523389 60523410 60523406 60523411 +
aagtcagattttgatgaaaagt

SEQ ID NO: 204579 - DNA, 22 bp, Artificial Sequence
  Synthetic oligonucleotide; TTA chr2 60523390 60523411 60523407 60523412 +
agtcagattttgatgaaaagtg

SEQ ID NO: 204580 - DNA, 22 bp, Artificial Sequence
  Synthetic oligonucleotide; TTT chr2 60523400 60523421 60523417 60523422 +
tgatgaaaagtggtttctacat

SEQ ID NO: 204581 - DNA, 22 bp, Artificial Sequence
  Synthetic oligonucleotide; TTT chr2 60523401 60523422 60523418 60523423 +
gatgaaaagtggtttctacatg

SEQ ID NO: 204582 - DNA, 22 bp, Artificial Sequence
  Synthetic oligonucleotide; TTG chr2 60523402 60523423 60523419 60523424 +
atgaaaagtggtttctacatgg

SEQ ID NO: 204583 - DNA, 22 bp, Artificial Sequence
  Synthetic oligonucleotide; TTT chr2 60523416 60523437 60523433 60523438 +
ctacatggatagctttcaaaaa

SEQ ID NO: 204584 - DNA, 22 bp, Artificial Sequence
  Synthetic oligonucleotide; TTC chr2 60523417 60523438 60523434 60523439 +
tacatggatagctttcaaaaac

SEQ ID NO: 204585 - DNA, 22 bp, Artificial Sequence
  Synthetic oligonucleotide; CTA chr2 60523419 60523440 60523436 60523441 +
catggatagctttcaaaaactt

SEQ ID NO: 204586 - DNA, 22 bp, Artificial Sequence
  Synthetic oligonucleotide; CTT chr2 60523431 60523452 60523448 60523453 +
tcaaaaacttctatattgattt

SEQ ID NO: 204587 - DNA, 22 bp, Artificial Sequence
  Synthetic oligonucleotide; TTT chr2 60523432 60523453 60523449 60523454 +
caaaaacttctatattgatttg

SEQ ID NO: 204588 - DNA, 22 bp, Artificial Sequence
  Synthetic oligonucleotide; TTC chr2 60523433 60523454 60523450 60523455 +
aaaaacttctatattgatttga

SEQ ID NO: 204589 - DNA, 22 bp, Artificial Sequence
  Synthetic oligonucleotide; CTT chr2 60523441 60523462 60523458 60523463 +
ctatattgatttgatggaatca

SEQ ID NO: 204590 - DNA, 22 bp, Artificial Sequence
  Synthetic oligonucleotide; TTC chr2 60523442 60523463 60523459 60523464 +
tatattgatttgatggaatcat

SEQ ID NO: 204591 - DNA, 22 bp, Artificial Sequence
  Synthetic oligonucleotide; CTA chr2 60523444 60523465 60523461 60523466 +
tattgatttgatggaatcatgg

SEQ ID NO: 204592 - DNA, 22 bp, Artificial Sequence
  Synthetic oligonucleotide; TTG chr2 60523449 60523470 60523466 60523471 +
atttgatggaatcatggtgaat

SEQ ID NO: 204593 - DNA, 22 bp, Artificial Sequence
  Synthetic oligonucleotide; TTT chr2 60523453 60523474 60523470 60523475 +
gatggaatcatggtgaattcta

SEQ ID NO: 204594 - DNA, 22 bp, Artificial Sequence
  Synthetic oligonucleotide; TTG chr2 60523454 60523475 60523471 60523476 +
atggaatcatggtgaattctaa

SEQ ID NO: 204595 - DNA, 22 bp, Artificial Sequence
  Synthetic oligonucleotide; TTC chr2 60523473 60523494 60523490 60523495 +
taaagactttcctattctctct

SEQ ID NO: 204596 - DNA, 22 bp, Artificial Sequence
  Synthetic oligonucleotide; CTA chr2 60523475 60523496 60523492 60523497 +
aagactttcctattctctctct

SEQ ID NO: 204597 - DNA, 22 bp, Artificial Sequence
  Synthetic oligonucleotide; CTT chr2 60523482 60523503 60523499 60523504 +
tcctattctctctctctccctt

SEQ ID NO: 204598 - DNA, 22 bp, Artificial Sequence
  Synthetic oligonucleotide; TTT chr2 60523483 60523504 60523500 60523505 +
cctattctctctctctcccttt

SEQ ID NO: 204599 - DNA, 22 bp, Artificial Sequence
  Synthetic oligonucleotide; TTC chr2 60523484 60523505 60523501 60523506 +
ctattctctctctctccctttc

SEQ ID NO: 204600 - DNA, 22 bp, Artificial Sequence
  Synthetic oligonucleotide; CTA chr2 60523487 60523508 60523504 60523509 +
ttctctctctctccctttctac

SEQ ID NO: 204601 - DNA, 22 bp, Artificial Sequence
  Synthetic oligonucleotide; TTC chr2 60523490 60523511 60523507 60523512 +
tctctctctccctttctacaca

SEQ ID NO: 204602 - DNA, 22 bp, Artificial Sequence
  Synthetic oligonucleotide; CTC chr2 60523492 60523513 60523509 60523514 +
tctctctccctttctacacaca

SEQ ID NO: 204603 - DNA, 22 bp, Artificial Sequence
  Synthetic oligonucleotide; CTC chr2 60523494 60523515 60523511 60523516 +
tctctccctttctacacacaca

SEQ ID NO: 204604 - DNA, 22 bp, Artificial Sequence
  Synthetic oligonucleotide; CTC chr2 60523496 60523517 60523513 60523518 +
tctccctttctacacacacaca

SEQ ID NO: 204605 - DNA, 22 bp, Artificial Sequence
  Synthetic oligonucleotide; CTC chr2 60523498 60523519 60523515 60523520 +
tccctttctacacacacacagg

SEQ ID NO: 204606 - DNA, 22 bp, Artificial Sequence
  Synthetic oligonucleotide; CTC chr2 60523500 60523521 60523517 60523522 +
cctttctacacacacacaggca

SEQ ID NO: 204607 - DNA, 22 bp, Artificial Sequence
  Synthetic oligonucleotide; CTT chr2 60523504 60523525 60523521 60523526 +
tctacacacacacaggcacaca

SEQ ID NO: 204608 - DNA, 22 bp, Artificial Sequence
  Synthetic oligonucleotide; TTT chr2 60523505 60523526 60523522 60523527 +
ctacacacacacaggcacacaa

SEQ ID NO: 204609 - DNA, 22 bp, Artificial Sequence
  Synthetic oligonucleotide; TTC chr2 60523506 60523527 60523523 60523528 +
tacacacacacaggcacacaac

SEQ ID NO: 204610 - DNA, 22 bp, Artificial Sequence
  Synthetic oligonucleotide; CTA chr2 60523508 60523529 60523525 60523530 +
cacacacacaggcacacaacta

SEQ ID NO: 204611 - DNA, 22 bp, Artificial Sequence
  Synthetic oligonucleotide; CTA chr2 60523530 60523551 60523547 60523552 +
tatatatattcatacatgcata

SEQ ID NO: 204612 - DNA, 22 bp, Artificial Sequence
  Synthetic oligonucleotide; TTC chr2 60523541 60523562 60523558 60523563 +
atacatgcatatacgtatgtat

SEQ ID NO: 204613 - DNA, 22 bp, Artificial Sequence
  Synthetic oligonucleotide; CTT chr2 60523618 60523639 60523635 60523640 +
tatcttatgatgacagtgttga

SEQ ID NO: 204614 - DNA, 22 bp, Artificial Sequence
  Synthetic oligonucleotide; TTT chr2 60523619 60523640 60523636 60523641 +
atcttatgatgacagtgttgat

SEQ ID NO: 204615 - DNA, 22 bp, Artificial Sequence
  Synthetic oligonucleotide; TTA chr2 60523620 60523641 60523637 60523642 +
tcttatgatgacagtgttgatg

SEQ ID NO: 204616 - DNA, 22 bp, Artificial Sequence
  Synthetic oligonucleotide; CTT chr2 60523624 60523645 60523641 60523646 +
atgatgacagtgttgatgtgtt

SEQ ID NO: 204617 - DNA, 22 bp, Artificial Sequence
  Synthetic oligonucleotide; TTA chr2 60523625 60523646 60523642 60523647 +
tgatgacagtgttgatgtgttt

SEQ ID NO: 204618 - DNA, 22 bp, Artificial Sequence
  Synthetic oligonucleotide; TTG chr2 60523639 60523660 60523656 60523661 +
atgtgtttggggattttttttt

SEQ ID NO: 204619 - DNA, 22 bp, Artificial Sequence
  Synthetic oligonucleotide; TTT chr2 60523647 60523668 60523664 60523669 +
ggggatttttttttttttcaaa

SEQ ID NO: 204620 - DNA, 22 bp, Artificial Sequence
  Synthetic oligonucleotide; TTG chr2 60523648 60523669 60523665 60523670 +
gggatttttttttttttcaaaa

SEQ ID NO: 204621 - DNA, 22 bp, Artificial Sequence
  Synthetic oligonucleotide; TTT chr2 60523655 60523676 60523672 60523677 +
ttttttttttcaaaaagagtta

SEQ ID NO: 204622 - DNA, 22 bp, Artificial Sequence
  Synthetic oligonucleotide; TTT chr2 60523656 60523677 60523673 60523678 +
tttttttttcaaaaagagttaa

SEQ ID NO: 204623 - DNA, 22 bp, Artificial Sequence
  Synthetic oligonucleotide; TTT chr2 60523657 60523678 60523674 60523679 +
ttttttttcaaaaagagttaat

SEQ ID NO: 204624 - DNA, 22 bp, Artificial Sequence
  Synthetic oligonucleotide; TTT chr2 60523658 60523679 60523675 60523680 +
tttttttcaaaaagagttaata

SEQ ID NO: 204625 - DNA, 22 bp, Artificial Sequence
  Synthetic oligonucleotide; TTT chr2 60523659 60523680 60523676 60523681 +
ttttttcaaaaagagttaataa

SEQ ID NO: 204626 - DNA, 22 bp, Artificial Sequence
  Synthetic oligonucleotide; TTT chr2 60523660 60523681 60523677 60523682 +
tttttcaaaaagagttaataag

SEQ ID NO: 204627 - DNA, 22 bp, Artificial Sequence
  Synthetic oligonucleotide; TTT chr2 60523661 60523682 60523678 60523683 +
ttttcaaaaagagttaataagc

SEQ ID NO: 204628 - DNA, 22 bp, Artificial Sequence
  Synthetic oligonucleotide; TTT chr2 60523662 60523683 60523679 60523684 +
tttcaaaaagagttaataagcc

SEQ ID NO: 204629 - DNA, 22 bp, Artificial Sequence
  Synthetic oligonucleotide; TTT chr2 60523663 60523684 60523680 60523685 +
ttcaaaaagagttaataagcct

SEQ ID NO: 204630 - DNA, 22 bp, Artificial Sequence
  Synthetic oligonucleotide; TTT chr2 60523664 60523685 60523681 60523686 +
tcaaaaagagttaataagcctt

SEQ ID NO: 204631 - DNA, 22 bp, Artificial Sequence
  Synthetic oligonucleotide; TTT chr2 60523665 60523686 60523682 60523687 +
caaaaagagttaataagccttt

SEQ ID NO: 204632 - DNA, 22 bp, Artificial Sequence
  Synthetic oligonucleotide; TTC chr2 60523666 60523687 60523683 60523688 +
aaaaagagttaataagcctttt

SEQ ID NO: 204633 - DNA, 22 bp, Artificial Sequence
  Synthetic oligonucleotide; TTA chr2 60523677 60523698 60523694 60523699 +
ataagccttttataggtgtacc

SEQ ID NO: 204634 - DNA, 22 bp, Artificial Sequence
  Synthetic oligonucleotide; CTT chr2 60523686 60523707 60523703 60523708 +
ttataggtgtaccacacaagac

SEQ ID NO: 204635 - DNA, 22 bp, Artificial Sequence
  Synthetic oligonucleotide; TTT chr2 60523687 60523708 60523704 60523709 +
tataggtgtaccacacaagact

SEQ ID NO: 204636 - DNA, 22 bp, Artificial Sequence
  Synthetic oligonucleotide; TTT chr2 60523688 60523709 60523705 60523710 +
ataggtgtaccacacaagactc

SEQ ID NO: 204637 - DNA, 22 bp, Artificial Sequence
  Synthetic oligonucleotide; TTA chr2 60523689 60523710 60523706 60523711 +
taggtgtaccacacaagactcc

SEQ ID NO: 204638 - DNA, 22 bp, Artificial Sequence
  Synthetic oligonucleotide; CTC chr2 60523710 60523731 60523727 60523732 +
cagtaagcaaaatcattcattg

SEQ ID NO: 204639 - DNA, 22 bp, Artificial Sequence
  Synthetic oligonucleotide; TTC chr2 60523728 60523749 60523745 60523750 +
attgccaggcaaaacttgagaa

SEQ ID NO: 204640 - DNA, 22 bp, Artificial Sequence
  Synthetic oligonucleotide; TTG chr2 60523732 60523753 60523749 60523754 +
ccaggcaaaacttgagaaatac

SEQ ID NO: 204641 - DNA, 22 bp, Artificial Sequence
  Synthetic oligonucleotide; CTT chr2 60523745 60523766 60523762 60523767 +
gagaaatacatttagaaatcat

SEQ ID NO: 204642 - DNA, 22 bp, Artificial Sequence
  Synthetic oligonucleotide; TTG chr2 60523746 60523767 60523763 60523768 +
agaaatacatttagaaatcata

SEQ ID NO: 204643 - DNA, 22 bp, Artificial Sequence
  Synthetic oligonucleotide; TTT chr2 60523758 60523779 60523775 60523780 +
agaaatcatacgagcacacagg

SEQ ID NO: 204644 - DNA, 22 bp, Artificial Sequence
  Synthetic oligonucleotide; TTA chr2 60523759 60523780 60523776 60523781 +
gaaatcatacgagcacacagga

SEQ ID NO: 204645 - DNA, 22 bp, Artificial Sequence
  Synthetic oligonucleotide; CTC chr2 60523785 60523806 60523802 60523807 +
aatcaagtaaatgaatcaccaa

SEQ ID NO: 204646 - DNA, 22 bp, Artificial Sequence
  Synthetic oligonucleotide; CTG chr2 60523824 60523845 60523841 60523846 +
gaaaattacttaactagcccaa

SEQ ID NO: 204647 - DNA, 22 bp, Artificial Sequence
  Synthetic oligonucleotide; TTA chr2 60523832 60523853 60523849 60523854 +
cttaactagcccaaacgttcaa

SEQ ID NO: 204648 - DNA, 22 bp, Artificial Sequence
  Synthetic oligonucleotide; CTT chr2 60523835 60523856 60523852 60523857 +
aactagcccaaacgttcaagaa

SEQ ID NO: 204649 - DNA, 22 bp, Artificial Sequence
  Synthetic oligonucleotide; TTA chr2 60523836 60523857 60523853 60523858 +
actagcccaaacgttcaagaat

SEQ ID NO: 204650 - DNA, 22 bp, Artificial Sequence
  Synthetic oligonucleotide; CTA chr2 60523840 60523861 60523857 60523862 +
gcccaaacgttcaagaattgac

SEQ ID NO: 204651 - DNA, 22 bp, Artificial Sequence
  Synthetic oligonucleotide; TTC chr2 60523852 60523873 60523869 60523874 +
aagaattgaccaaggtttaagc

SEQ ID NO: 204652 - DNA, 22 bp, Artificial Sequence
  Synthetic oligonucleotide; TTG chr2 60523860 60523881 60523877 60523882 +
accaaggtttaagcagtaaacc

SEQ ID NO: 204653 - DNA, 22 bp, Artificial Sequence
  Synthetic oligonucleotide; TTT chr2 60523870 60523891 60523887 60523892 +
aagcagtaaaccctaaataatt

SEQ ID NO: 204654 - DNA, 22 bp, Artificial Sequence
  Synthetic oligonucleotide; TTA chr2 60523871 60523892 60523888 60523893 +
agcagtaaaccctaaataattt

SEQ ID NO: 204655 - DNA, 22 bp, Artificial Sequence
  Synthetic oligonucleotide; CTA chr2 60523885 60523906 60523902 60523907 +
aataatttatttaagccaaata

SEQ ID NO: 204656 - DNA, 22 bp, Artificial Sequence
  Synthetic oligonucleotide; TTT chr2 60523893 60523914 60523910 60523915 +
atttaagccaaataggagcttt

SEQ ID NO: 204657 - DNA, 22 bp, Artificial Sequence
  Synthetic oligonucleotide; TTA chr2 60523894 60523915 60523911 60523916 +
tttaagccaaataggagcttta

SEQ ID NO: 204658 - DNA, 22 bp, Artificial Sequence
  Synthetic oligonucleotide; TTT chr2 60523897 60523918 60523914 60523919 +
aagccaaataggagctttaagc

SEQ ID NO: 204659 - DNA, 22 bp, Artificial Sequence
  Synthetic oligonucleotide; TTA chr2 60523898 60523919 60523915 60523920 +
agccaaataggagctttaagca

SEQ ID NO: 204660 - DNA, 22 bp, Artificial Sequence
  Synthetic oligonucleotide; CTT chr2 60523914 60523935 60523931 60523936 +
taagcacagacattaatgtaat

SEQ ID NO: 204661 - DNA, 22 bp, Artificial Sequence
  Synthetic oligonucleotide; TTT chr2 60523915 60523936 60523932 60523937 +
aagcacagacattaatgtaatg

SEQ ID NO: 204662 - DNA, 22 bp, Artificial Sequence
  Synthetic oligonucleotide; TTA chr2 60523916 60523937 60523933 60523938 +
agcacagacattaatgtaatgg

SEQ ID NO: 204663 - DNA, 22 bp, Artificial Sequence
  Synthetic oligonucleotide; TTA chr2 60523929 60523950 60523946 60523951 +
atgtaatggactatcccatctt

SEQ ID NO: 204664 - DNA, 22 bp, Artificial Sequence
  Synthetic oligonucleotide; CTA chr2 60523942 60523963 60523959 60523964 +
tcccatcttaaacttcagccag

SEQ ID NO: 204665 - DNA, 22 bp, Artificial Sequence
  Synthetic oligonucleotide; CTT chr2 60523951 60523972 60523968 60523973 +
aaacttcagccagagatctaaa

SEQ ID NO: 204666 - DNA, 22 bp, Artificial Sequence
  Synthetic oligonucleotide; TTA chr2 60523952 60523973 60523969 60523974 +
aacttcagccagagatctaaaa

SEQ ID NO: 204667 - DNA, 22 bp, Artificial Sequence
  Synthetic oligonucleotide; CTT chr2 60523957 60523978 60523974 60523979 +
cagccagagatctaaaactttg

SEQ ID NO: 204668 - DNA, 22 bp, Artificial Sequence
  Synthetic oligonucleotide; TTC chr2 60523958 60523979 60523975 60523980 +
agccagagatctaaaactttga

SEQ ID NO: 204669 - DNA, 22 bp, Artificial Sequence
  Synthetic oligonucleotide; CTA chr2 60523971 60523992 60523988 60523993 +
aaactttgaagtcaattatgtt

SEQ ID NO: 204670 - DNA, 22 bp, Artificial Sequence
  Synthetic oligonucleotide; CTT chr2 60523977 60523998 60523994 60523999 +
tgaagtcaattatgttcccata

SEQ ID NO: 204671 - DNA, 22 bp, Artificial Sequence
  Synthetic oligonucleotide; TTT chr2 60523978 60523999 60523995 60524000 +
gaagtcaattatgttcccataa

SEQ ID NO: 204672 - DNA, 22 bp, Artificial Sequence
  Synthetic oligonucleotide; TTG chr2 60523979 60524000 60523996 60524001 +
aagtcaattatgttcccataaa

SEQ ID NO: 204673 - DNA, 22 bp, Artificial Sequence
  Synthetic oligonucleotide; TTA chr2 60523989 60524010 60524006 60524011 +
tgttcccataaatacctctcca

SEQ ID NO: 204674 - DNA, 22 bp, Artificial Sequence
  Synthetic oligonucleotide; TTC chr2 60523994 60524015 60524011 60524016 +
ccataaatacctctccattatc

SEQ ID NO: 204675 - DNA, 22 bp, Artificial Sequence
  Synthetic oligonucleotide; CTC chr2 60524007 60524028 60524024 60524029 +
tccattatcaggggtgctttat

SEQ ID NO: 204676 - DNA, 22 bp, Artificial Sequence
  Synthetic oligonucleotide; CTC chr2 60524009 60524030 60524026 60524031 +
cattatcaggggtgctttattg

SEQ ID NO: 204677 - DNA, 22 bp, Artificial Sequence
  Synthetic oligonucleotide; TTA chr2 60524014 60524035 60524031 60524036 +
tcaggggtgctttattgtttga

SEQ ID NO: 204678 - DNA, 22 bp, Artificial Sequence
  Synthetic oligonucleotide; CTT chr2 60524026 60524047 60524043 60524048 +
tattgtttgagagactccggac

SEQ ID NO: 204679 - DNA, 22 bp, Artificial Sequence
  Synthetic oligonucleotide; TTT chr2 60524027 60524048 60524044 60524049 +
attgtttgagagactccggacc

SEQ ID NO: 204680 - DNA, 22 bp, Artificial Sequence
  Synthetic oligonucleotide; TTA chr2 60524028 60524049 60524045 60524050 +
ttgtttgagagactccggacca

SEQ ID NO: 204681 - DNA, 22 bp, Artificial Sequence
  Synthetic oligonucleotide; TTG chr2 60524031 60524052 60524048 60524053 +
tttgagagactccggaccacag

SEQ ID NO: 204682 - DNA, 22 bp, Artificial Sequence
  Synthetic oligonucleotide; TTT chr2 60524034 60524055 60524051 60524056 +
gagagactccggaccacaggaa

SEQ ID NO: 204683 - DNA, 22 bp, Artificial Sequence
  Synthetic oligonucleotide; TTG chr2 60524035 60524056 60524052 60524057 +
agagactccggaccacaggaac

SEQ ID NO: 204684 - DNA, 22 bp, Artificial Sequence
  Synthetic oligonucleotide; CTC chr2 60524043 60524064 60524060 60524065 +
cggaccacaggaactagtgtga

SEQ ID NO: 204685 - DNA, 22 bp, Artificial Sequence
  Synthetic oligonucleotide; CTA chr2 60524059 60524080 60524076 60524081 +
gtgtgaaaactggagggtatct

SEQ ID NO: 204686 - DNA, 22 bp, Artificial Sequence
  Synthetic oligonucleotide; CTG chr2 60524071 60524092 60524088 60524093 +
gagggtatcttcatttatcatc

SEQ ID NO: 204687 - DNA, 22 bp, Artificial Sequence
  Synthetic oligonucleotide; CTT chr2 60524082 60524103 60524099 60524104 +
catttatcatccgctcccattt

SEQ ID NO: 204688 - DNA, 22 bp, Artificial Sequence
  Synthetic oligonucleotide; TTC chr2 60524083 60524104 60524100 60524105 +
atttatcatccgctcccatttc

SEQ ID NO: 204689 - DNA, 22 bp, Artificial Sequence
  Synthetic oligonucleotide; TTT chr2 60524087 60524108 60524104 60524109 +
atcatccgctcccatttcgcaa

SEQ ID NO: 204690 - DNA, 22 bp, Artificial Sequence
  Synthetic oligonucleotide; TTA chr2 60524088 60524109 60524105 60524110 +
tcatccgctcccatttcgcaaa

SEQ ID NO: 204691 - DNA, 22 bp, Artificial Sequence
  Synthetic oligonucleotide; CTC chr2 60524098 60524119 60524115 60524120 +
ccatttcgcaaacaaaatatgc

SEQ ID NO: 204692 - DNA, 22 bp, Artificial Sequence
  Synthetic oligonucleotide; TTT chr2 60524104 60524125 60524121 60524126 +
cgcaaacaaaatatgccatggt

SEQ ID NO: 204693 - DNA, 22 bp, Artificial Sequence
  Synthetic oligonucleotide; TTC chr2 60524105 60524126 60524122 60524127 +
gcaaacaaaatatgccatggta

SEQ ID NO: 204694 - DNA, 22 bp, Artificial Sequence
  Synthetic oligonucleotide; CTA chr2 60524138 60524159 60524155 60524160 +
tatatcacattgtgacacagct

SEQ ID NO: 204695 - DNA, 22 bp, Artificial Sequence
  Synthetic oligonucleotide; TTG chr2 60524150 60524171 60524167 60524172 +
tgacacagctgaccgcattagt

SEQ ID NO: 204696 - DNA, 22 bp, Artificial Sequence
  Synthetic oligonucleotide; CTG chr2 60524161 60524182 60524178 60524183 +
accgcattagtgagccaagact

SEQ ID NO: 204697 - DNA, 22 bp, Artificial Sequence
  Synthetic oligonucleotide; TTA chr2 60524170 60524191 60524187 60524192 +
gtgagccaagactgtcctagcg

SEQ ID NO: 204698 - DNA, 22 bp, Artificial Sequence
  Synthetic oligonucleotide; CTG chr2 60524184 60524205 60524201 60524206 +
tcctagcggcagcttcctatca

SEQ ID NO: 204699 - DNA, 22 bp, Artificial Sequence
  Synthetic oligonucleotide; CTA chr2 60524189 60524210 60524206 60524211 +
gcggcagcttcctatcatgcat

SEQ ID NO: 204700 - DNA, 22 bp, Artificial Sequence
  Synthetic oligonucleotide; CTT chr2 60524199 60524220 60524216 60524221 +
cctatcatgcattaacaataca

SEQ ID NO: 204701 - DNA, 22 bp, Artificial Sequence
  Synthetic oligonucleotide; TTC chr2 60524200 60524221 60524217 60524222 +
ctatcatgcattaacaatacaa

SEQ ID NO: 204702 - DNA, 22 bp, Artificial Sequence
  Synthetic oligonucleotide; CTA chr2 60524203 60524224 60524220 60524225 +
tcatgcattaacaatacaacgg

SEQ ID NO: 204703 - DNA, 22 bp, Artificial Sequence
  Synthetic oligonucleotide; TTA chr2 60524213 60524234 60524230 60524235 +
acaatacaacggctgatacatt

SEQ ID NO: 204704 - DNA, 22 bp, Artificial Sequence
  Synthetic oligonucleotide; CTG chr2 60524228 60524249 60524245 60524250 +
atacatttgcacaacacaataa

SEQ ID NO: 204705 - DNA, 22 bp, Artificial Sequence
  Synthetic oligonucleotide; TTT chr2 60524236 60524257 60524253 60524258 +
gcacaacacaataagaggtggg

SEQ ID NO: 204706 - DNA, 22 bp, Artificial Sequence
  Synthetic oligonucleotide; TTG chr2 60524237 60524258 60524254 60524259 +
cacaacacaataagaggtgggg

SEQ ID NO: 204707 - DNA, 22 bp, Artificial Sequence
  Synthetic oligonucleotide; TTG chr2 60524276 60524297 60524293 60524298 +
ggctatgaaatcctaaacttca

SEQ ID NO: 204708 - DNA, 22 bp, Artificial Sequence
  Synthetic oligonucleotide; CTA chr2 60524281 60524302 60524298 60524303 +
tgaaatcctaaacttcatgtct

SEQ ID NO: 204709 - DNA, 22 bp, Artificial Sequence
  Synthetic oligonucleotide; CTA chr2 60524291 60524312 60524308 60524313 +
aacttcatgtctgaatacataa

SEQ ID NO: 204710 - DNA, 22 bp, Artificial Sequence
  Synthetic oligonucleotide; CTT chr2 60524296 60524317 60524313 60524318 +
catgtctgaatacataattttg

SEQ ID NO: 204711 - DNA, 22 bp, Artificial Sequence
  Synthetic oligonucleotide; TTC chr2 60524297 60524318 60524314 60524319 +
atgtctgaatacataattttgt

SEQ ID NO: 204712 - DNA, 22 bp, Artificial Sequence
  Synthetic oligonucleotide; CTG chr2 60524304 60524325 60524321 60524326 +
aatacataattttgtcacctat

SEQ ID NO: 204713 - DNA, 22 bp, Artificial Sequence
  Synthetic oligonucleotide; TTT chr2 60524316 60524337 60524333 60524338 +
tgtcacctatctctggcatgaa

SEQ ID NO: 204714 - DNA, 22 bp, Artificial Sequence
  Synthetic oligonucleotide; TTT chr2 60524317 60524338 60524334 60524339 +
gtcacctatctctggcatgaat

SEQ ID NO: 204715 - DNA, 22 bp, Artificial Sequence
  Synthetic oligonucleotide; TTG chr2 60524318 60524339 60524335 60524340 +
tcacctatctctggcatgaatg

SEQ ID NO: 204716 - DNA, 22 bp, Artificial Sequence
  Synthetic oligonucleotide; CTA chr2 60524325 60524346 60524342 60524347 +
tctctggcatgaatgttatcat

SEQ ID NO: 204717 - DNA, 22 bp, Artificial Sequence
  Synthetic oligonucleotide; CTC chr2 60524329 60524350 60524346 60524351 +
tggcatgaatgttatcatgctt

SEQ ID NO: 204718 - DNA, 22 bp, Artificial Sequence
  Synthetic oligonucleotide; CTG chr2 60524331 60524352 60524348 60524353 +
gcatgaatgttatcatgctttt

SEQ ID NO: 204719 - DNA, 22 bp, Artificial Sequence
  Synthetic oligonucleotide; TTA chr2 60524343 60524364 60524360 60524365 +
tcatgcttttatttcaggtaat

SEQ ID NO: 204720 - DNA, 22 bp, Artificial Sequence
  Synthetic oligonucleotide; CTT chr2 60524351 60524372 60524368 60524373 +
ttatttcaggtaataatggaag

SEQ ID NO: 204721 - DNA, 22 bp, Artificial Sequence
  Synthetic oligonucleotide; TTT chr2 60524352 60524373 60524369 60524374 +
tatttcaggtaataatggaagg

SEQ ID NO: 204722 - DNA, 22 bp, Artificial Sequence
  Synthetic oligonucleotide; TTT chr2 60524353 60524374 60524370 60524375 +
atttcaggtaataatggaaggg

SEQ ID NO: 204723 - DNA, 22 bp, Artificial Sequence
  Synthetic oligonucleotide; TTA chr2 60524354 60524375 60524371 60524376 +
tttcaggtaataatggaagggg

SEQ ID NO: 204724 - DNA, 22 bp, Artificial Sequence
  Synthetic oligonucleotide; TTT chr2 60524357 60524378 60524374 60524379 +
caggtaataatggaaggggaaa

SEQ ID NO: 204725 - DNA, 22 bp, Artificial Sequence
  Synthetic oligonucleotide; TTC chr2 60524358 60524379 60524375 60524380 +
aggtaataatggaaggggaaag

SEQ ID NO: 204726 - DNA, 22 bp, Artificial Sequence
  Synthetic oligonucleotide; CTC chr2 60524389 60524410 60524406 60524411 +
tggggggctgccattcattcgg

SEQ ID NO: 204727 - DNA, 22 bp, Artificial Sequence
  Synthetic oligonucleotide; CTG chr2 60524391 60524412 60524408 60524413 +
gggggctgccattcattcggcc

SEQ ID NO: 204728 - DNA, 22 bp, Artificial Sequence
  Synthetic oligonucleotide; CTG chr2 60524399 60524420 60524416 60524421 +
ccattcattcggcctgttattt

SEQ ID NO: 204729 - DNA, 22 bp, Artificial Sequence
  Synthetic oligonucleotide; TTC chr2 60524405 60524426 60524422 60524427 +
attcggcctgttatttgctttt

SEQ ID NO: 204730 - DNA, 22 bp, Artificial Sequence
  Synthetic oligonucleotide; TTC chr2 60524409 60524430 60524426 60524431 +
ggcctgttatttgcttttgggt

SEQ ID NO: 204731 - DNA, 22 bp, Artificial Sequence
  Synthetic oligonucleotide; CTG chr2 60524415 60524436 60524432 60524437 +
ttatttgcttttgggttgggtt

SEQ ID NO: 204732 - DNA, 22 bp, Artificial Sequence
  Synthetic oligonucleotide; TTA chr2 60524418 60524439 60524435 60524440 +
tttgcttttgggttgggttagg

SEQ ID NO: 204733 - DNA, 22 bp, Artificial Sequence
  Synthetic oligonucleotide; TTT chr2 60524421 60524442 60524438 60524443 +
gcttttgggttgggttagggct

SEQ ID NO: 204734 - DNA, 22 bp, Artificial Sequence
  Synthetic oligonucleotide; TTG chr2 60524422 60524443 60524439 60524444 +
cttttgggttgggttagggcta

SEQ ID NO: 204735 - DNA, 22 bp, Artificial Sequence
  Synthetic oligonucleotide; CTT chr2 60524425 60524446 60524442 60524447 +
ttgggttgggttagggctaaac

SEQ ID NO: 204736 - DNA, 22 bp, Artificial Sequence
  Synthetic oligonucleotide; TTT chr2 60524426 60524447 60524443 60524448 +
tgggttgggttagggctaaact

SEQ ID NO: 204737 - DNA, 22 bp, Artificial Sequence
  Synthetic oligonucleotide; TTT chr2 60524427 60524448 60524444 60524449 +
gggttgggttagggctaaactt

SEQ ID NO: 204738 - DNA, 22 bp, Artificial Sequence
  Synthetic oligonucleotide; TTG chr2 60524428 60524449 60524445 60524450 +
ggttgggttagggctaaacttt

SEQ ID NO: 204739 - DNA, 22 bp, Artificial Sequence
  Synthetic oligonucleotide; TTG chr2 60524433 60524454 60524450 60524455 +
ggttagggctaaactttatgtt

SEQ ID NO: 204740 - DNA, 22 bp, Artificial Sequence
  Synthetic oligonucleotide; TTA chr2 60524438 60524459 60524455 60524460 +
gggctaaactttatgttccttg

SEQ ID NO: 204741 - DNA, 22 bp, Artificial Sequence
  Synthetic oligonucleotide; CTA chr2 60524444 60524465 60524461 60524466 +
aactttatgttccttgtttttg

SEQ ID NO: 204742 - DNA, 22 bp, Artificial Sequence
  Synthetic oligonucleotide; CTT chr2 60524449 60524470 60524466 60524471 +
tatgttccttgtttttgttttt

SEQ ID NO: 204743 - DNA, 22 bp, Artificial Sequence
  Synthetic oligonucleotide; TTT chr2 60524450 60524471 60524467 60524472 +
atgttccttgtttttgtttttg

SEQ ID NO: 204744 - DNA, 22 bp, Artificial Sequence
  Synthetic oligonucleotide; TTA chr2 60524451 60524472 60524468 60524473 +
tgttccttgtttttgtttttgt

SEQ ID NO: 204745 - DNA, 22 bp, Artificial Sequence
  Synthetic oligonucleotide; TTC chr2 60524456 60524477 60524473 60524478 +
cttgtttttgtttttgtttttt

SEQ ID NO: 204746 - DNA, 22 bp, Artificial Sequence
  Synthetic oligonucleotide; CTT chr2 60524459 60524480 60524476 60524481 +
gtttttgtttttgttttttttt

SEQ ID NO: 204747 - DNA, 22 bp, Artificial Sequence
  Synthetic oligonucleotide; TTG chr2 60524460 60524481 60524477 60524482 +
tttttgtttttgtttttttttc

SEQ ID NO: 204748 - DNA, 22 bp, Artificial Sequence
  Synthetic oligonucleotide; TTT chr2 60524463 60524484 60524480 60524485 +
ttgtttttgtttttttttcttt

SEQ ID NO: 204749 - DNA, 22 bp, Artificial Sequence
  Synthetic oligonucleotide; TTT chr2 60524464 60524485 60524481 60524486 +
tgtttttgtttttttttctttt

SEQ ID NO: 204750 - DNA, 22 bp, Artificial Sequence
  Synthetic oligonucleotide; TTT chr2 60524465 60524486 60524482 60524487 +
gtttttgtttttttttcttttt

SEQ ID NO: 204751 - DNA, 22 bp, Artificial Sequence
  Synthetic oligonucleotide; TTG chr2 60524466 60524487 60524483 60524488 +
tttttgtttttttttctttttt

SEQ ID NO: 204752 - DNA, 22 bp, Artificial Sequence
  Synthetic oligonucleotide; TTT chr2 60524469 60524490 60524486 60524491 +
ttgtttttttttcttttttctt

SEQ ID NO: 204753 - DNA, 22 bp, Artificial Sequence
  Synthetic oligonucleotide; TTT chr2 60524470 60524491 60524487 60524492 +
tgtttttttttcttttttcttg

SEQ ID NO: 204754 - DNA, 22 bp, Artificial Sequence
  Synthetic oligonucleotide; TTT chr2 60524471 60524492 60524488 60524493 +
gtttttttttcttttttcttgt

SEQ ID NO: 204755 - DNA, 22 bp, Artificial Sequence
  Synthetic oligonucleotide; TTG chr2 60524472 60524493 60524489 60524494 +
tttttttttcttttttcttgtt

SEQ ID NO: 204756 - DNA, 22 bp, Artificial Sequence
  Synthetic oligonucleotide; TTT chr2 60524475 60524496 60524492 60524497 +
ttttttcttttttcttgttttt

SEQ ID NO: 204757 - DNA, 22 bp, Artificial Sequence
  Synthetic oligonucleotide; TTT chr2 60524476 60524497 60524493 60524498 +
tttttcttttttcttgtttttt

SEQ ID NO: 204758 - DNA, 22 bp, Artificial Sequence
  Synthetic oligonucleotide; TTT chr2 60524477 60524498 60524494 60524499 +
ttttcttttttcttgtttttta

SEQ ID NO: 204759 - DNA, 22 bp, Artificial Sequence
  Synthetic oligonucleotide; TTT chr2 60524478 60524499 60524495 60524500 +
tttcttttttcttgttttttaa

SEQ ID NO: 204760 - DNA, 22 bp, Artificial Sequence
  Synthetic oligonucleotide; TTT chr2 60524479 60524500 60524496 60524501 +
ttcttttttcttgttttttaag

SEQ ID NO: 204761 - DNA, 22 bp, Artificial Sequence
  Synthetic oligonucleotide; TTT chr2 60524480 60524501 60524497 60524502 +
tcttttttcttgttttttaaga

SEQ ID NO: 204762 - DNA, 22 bp, Artificial Sequence
  Synthetic oligonucleotide; TTT chr2 60524481 60524502 60524498 60524503 +
cttttttcttgttttttaagat

SEQ ID NO: 204763 - DNA, 22 bp, Artificial Sequence
  Synthetic oligonucleotide; TTC chr2 60524482 60524503 60524499 60524504 +
ttttttcttgttttttaagatt

SEQ ID NO: 204764 - DNA, 22 bp, Artificial Sequence
  Synthetic oligonucleotide; CTT chr2 60524484 60524505 60524501 60524506 +
ttttcttgttttttaagatttt

SEQ ID NO: 204765 - DNA, 22 bp, Artificial Sequence
  Synthetic oligonucleotide; TTT chr2 60524485 60524506 60524502 60524507 +
tttcttgttttttaagatttta

SEQ ID NO: 204766 - DNA, 22 bp, Artificial Sequence
  Synthetic oligonucleotide; TTT chr2 60524486 60524507 60524503 60524508 +
ttcttgttttttaagattttat

SEQ ID NO: 204767 - DNA, 22 bp, Artificial Sequence
  Synthetic oligonucleotide; TTT chr2 60524487 60524508 60524504 60524509 +
tcttgttttttaagattttatt

SEQ ID NO: 204768 - DNA, 22 bp, Artificial Sequence
  Synthetic oligonucleotide; TTT chr2 60524488 60524509 60524505 60524510 +
cttgttttttaagattttattt

SEQ ID NO: 204769 - DNA, 22 bp, Artificial Sequence
  Synthetic oligonucleotide; TTC chr2 60524489 60524510 60524506 60524511 +
ttgttttttaagattttatttt

SEQ ID NO: 204770 - DNA, 22 bp, Artificial Sequence
  Synthetic oligonucleotide; CTT chr2 60524491 60524512 60524508 60524513 +
gttttttaagattttattttgt

SEQ ID NO: 204771 - DNA, 22 bp, Artificial Sequence
  Synthetic oligonucleotide; TTG chr2 60524492 60524513 60524509 60524514 +
ttttttaagattttattttgtt

SEQ ID NO: 204772 - DNA, 22 bp, Artificial Sequence
  Synthetic oligonucleotide; TTT chr2 60524495 60524516 60524512 60524517 +
tttaagattttattttgttacc

SEQ ID NO: 204773 - DNA, 22 bp, Artificial Sequence
  Synthetic oligonucleotide; TTT chr2 60524496 60524517 60524513 60524518 +
ttaagattttattttgttacca

SEQ ID NO: 204774 - DNA, 22 bp, Artificial Sequence
  Synthetic oligonucleotide; TTT chr2 60524497 60524518 60524514 60524519 +
taagattttattttgttaccag

SEQ ID NO: 204775 - DNA, 22 bp, Artificial Sequence
  Synthetic oligonucleotide; TTT chr2 60524498 60524519 60524515 60524520 +
aagattttattttgttaccaga

SEQ ID NO: 204776 - DNA, 22 bp, Artificial Sequence
  Synthetic oligonucleotide; TTA chr2 60524499 60524520 60524516 60524521 +
agattttattttgttaccagag

SEQ ID NO: 204777 - DNA, 22 bp, Artificial Sequence
  Synthetic oligonucleotide; TTT chr2 60524505 60524526 60524522 60524527 +
tattttgttaccagagatagaa

SEQ ID NO: 204778 - DNA, 22 bp, Artificial Sequence
  Synthetic oligonucleotide; TTT chr2 60524506 60524527 60524523 60524528 +
attttgttaccagagatagaag

SEQ ID NO: 204779 - DNA, 22 bp, Artificial Sequence
  Synthetic oligonucleotide; TTA chr2 60524507 60524528 60524524 60524529 +
ttttgttaccagagatagaaga

SEQ ID NO: 204780 - DNA, 22 bp, Artificial Sequence
  Synthetic oligonucleotide; TTT chr2 60524510 60524531 60524527 60524532 +
tgttaccagagatagaagagca

SEQ ID NO: 204781 - DNA, 22 bp, Artificial Sequence
  Synthetic oligonucleotide; TTT chr2 60524511 60524532 60524528 60524533 +
gttaccagagatagaagagcat

SEQ ID NO: 204782 - DNA, 22 bp, Artificial Sequence
  Synthetic oligonucleotide; TTG chr2 60524512 60524533 60524529 60524534 +
ttaccagagatagaagagcatg

SEQ ID NO: 204783 - DNA, 22 bp, Artificial Sequence
  Synthetic oligonucleotide; TTA chr2 60524515 60524536 60524532 60524537 +
ccagagatagaagagcatgcaa

SEQ ID NO: 204784 - DNA, 22 bp, Artificial Sequence
  Synthetic oligonucleotide; CTG chr2 60524552 60524573 60524569 60524574 +
attaccagtgcccttacagagc

SEQ ID NO: 204785 - DNA, 22 bp, Artificial Sequence
  Synthetic oligonucleotide; TTA chr2 60524556 60524577 60524573 60524578 +
ccagtgcccttacagagcatgc

SEQ ID NO: 204786 - DNA, 22 bp, Artificial Sequence
  Synthetic oligonucleotide; CTT chr2 60524567 60524588 60524584 60524589 +
acagagcatgcctattaaaaat

SEQ ID NO: 204787 - DNA, 22 bp, Artificial Sequence
  Synthetic oligonucleotide; TTA chr2 60524568 60524589 60524585 60524590 +
cagagcatgcctattaaaaatc

SEQ ID NO: 204788 - DNA, 22 bp, Artificial Sequence
  Synthetic oligonucleotide; CTA chr2 60524581 60524602 60524598 60524603 +
ttaaaaatccccaaaacattat

SEQ ID NO: 204789 - DNA, 22 bp, Artificial Sequence
  Synthetic oligonucleotide; TTA chr2 60524584 60524605 60524601 60524606 +
aaaatccccaaaacattataaa

SEQ ID NO: 204790 - DNA, 22 bp, Artificial Sequence
  Synthetic oligonucleotide; TTA chr2 60524602 60524623 60524619 60524624 +
taaattaaagaggcagtaattt

SEQ ID NO: 204791 - DNA, 22 bp, Artificial Sequence
  Synthetic oligonucleotide; TTA chr2 60524609 60524630 60524626 60524631 +
aagaggcagtaatttaaataaa

SEQ ID NO: 204792 - DNA, 22 bp, Artificial Sequence
  Synthetic oligonucleotide; TTT chr2 60524624 60524645 60524641 60524646 +
aaataaattacctttttattga

SEQ ID NO: 204793 - DNA, 22 bp, Artificial Sequence
  Synthetic oligonucleotide; TTA chr2 60524625 60524646 60524642 60524647 +
aataaattacctttttattgaa

SEQ ID NO: 204794 - DNA, 22 bp, Artificial Sequence
  Synthetic oligonucleotide; TTA chr2 60524634 60524655 60524651 60524656 +
cctttttattgaagctatagat

SEQ ID NO: 204795 - DNA, 22 bp, Artificial Sequence
  Synthetic oligonucleotide; CTT chr2 60524638 60524659 60524655 60524660 +
tttattgaagctatagatctca

SEQ ID NO: 204796 - DNA, 22 bp, Artificial Sequence
  Synthetic oligonucleotide; TTT chr2 60524639 60524660 60524656 60524661 +
ttattgaagctatagatctcaa

SEQ ID NO: 204797 - DNA, 22 bp, Artificial Sequence
  Synthetic oligonucleotide; TTT chr2 60524640 60524661 60524657 60524662 +
tattgaagctatagatctcaag

SEQ ID NO: 204798 - DNA, 22 bp, Artificial Sequence
  Synthetic oligonucleotide; TTT chr2 60524641 60524662 60524658 60524663 +
attgaagctatagatctcaaga

SEQ ID NO: 204799 - DNA, 22 bp, Artificial Sequence
  Synthetic oligonucleotide; TTA chr2 60524642 60524663 60524659 60524664 +
ttgaagctatagatctcaagag

SEQ ID NO: 204800 - DNA, 22 bp, Artificial Sequence
  Synthetic oligonucleotide; TTG chr2 60524645 60524666 60524662 60524667 +
aagctatagatctcaagagtgc

SEQ ID NO: 204801 - DNA, 22 bp, Artificial Sequence
  Synthetic oligonucleotide; CTA chr2 60524651 60524672 60524668 60524673 +
tagatctcaagagtgcctgtgt

SEQ ID NO: 204802 - DNA, 22 bp, Artificial Sequence
  Synthetic oligonucleotide; CTC chr2 60524659 60524680 60524676 60524681 +
aagagtgcctgtgtcctacaag

SEQ ID NO: 204803 - DNA, 22 bp, Artificial Sequence
  Synthetic oligonucleotide; CTG chr2 60524670 60524691 60524687 60524692 +
tgtcctacaaggaacacatatt

SEQ ID NO: 204804 - DNA, 22 bp, Artificial Sequence
  Synthetic oligonucleotide; CTA chr2 60524677 60524698 60524694 60524699 +
caaggaacacatatttcacaac

SEQ ID NO: 204805 - DNA, 22 bp, Artificial Sequence
  Synthetic oligonucleotide; TTT chr2 60524693 60524714 60524710 60524715 +
cacaactgattcatttgcccct

SEQ ID NO: 204806 - DNA, 22 bp, Artificial Sequence
  Synthetic oligonucleotide; TTC chr2 60524694 60524715 60524711 60524716 +
acaactgattcatttgcccctt

SEQ ID NO: 204807 - DNA, 22 bp, Artificial Sequence
  Synthetic oligonucleotide; CTG chr2 60524701 60524722 60524718 60524723 +
attcatttgccccttactctga

SEQ ID NO: 204808 - DNA, 22 bp, Artificial Sequence
  Synthetic oligonucleotide; TTC chr2 60524705 60524726 60524722 60524727 +
atttgccccttactctgagcac

SEQ ID NO: 204809 - DNA, 22 bp, Artificial Sequence
  Synthetic oligonucleotide; TTT chr2 60524709 60524730 60524726 60524731 +
gccccttactctgagcacatgg

SEQ ID NO: 204810 - DNA, 22 bp, Artificial Sequence
  Synthetic oligonucleotide; TTG chr2 60524710 60524731 60524727 60524732 +
ccccttactctgagcacatggg

SEQ ID NO: 204811 - DNA, 22 bp, Artificial Sequence
  Synthetic oligonucleotide; CTT chr2 60524716 60524737 60524733 60524738 +
actctgagcacatgggataata

SEQ ID NO: 204812 - DNA, 22 bp, Artificial Sequence
  Synthetic oligonucleotide; TTA chr2 60524717 60524738 60524734 60524739 +
ctctgagcacatgggataataa

SEQ ID NO: 204813 - DNA, 22 bp, Artificial Sequence
  Synthetic oligonucleotide; CTC chr2 60524720 60524741 60524737 60524742 +
tgagcacatgggataataaaag

SEQ ID NO: 204814 - DNA, 22 bp, Artificial Sequence
  Synthetic oligonucleotide; CTG chr2 60524722 60524743 60524739 60524744 +
agcacatgggataataaaagaa

SEQ ID NO: 204815 - DNA, 22 bp, Artificial Sequence
  Synthetic oligonucleotide; TTT chr2 60524749 60524770 60524766 60524771 +
tagatcatcattatccaaagga

SEQ ID NO: 204816 - DNA, 22 bp, Artificial Sequence
  Synthetic oligonucleotide; TTT chr2 60524750 60524771 60524767 60524772 +
agatcatcattatccaaaggat

SEQ ID NO: 204817 - DNA, 22 bp, Artificial Sequence
  Synthetic oligonucleotide; TTA chr2 60524751 60524772 60524768 60524773 +
gatcatcattatccaaaggata

SEQ ID NO: 204818 - DNA, 22 bp, Artificial Sequence
  Synthetic oligonucleotide; TTA chr2 60524762 60524783 60524779 60524784 +
tccaaaggataactttgaatgc

SEQ ID NO: 204819 - DNA, 22 bp, Artificial Sequence
  Synthetic oligonucleotide; CTT chr2 60524777 60524798 60524794 60524799 +
tgaatgccctttttcagcatgc

SEQ ID NO: 204820 - DNA, 22 bp, Artificial Sequence
  Synthetic oligonucleotide; TTT chr2 60524778 60524799 60524795 60524800 +
gaatgccctttttcagcatgct

SEQ ID NO: 204821 - DNA, 22 bp, Artificial Sequence
  Synthetic oligonucleotide; TTG chr2 60524779 60524800 60524796 60524801 +
aatgccctttttcagcatgctt

SEQ ID NO: 204822 - DNA, 22 bp, Artificial Sequence
  Synthetic oligonucleotide; CTT chr2 60524788 60524809 60524805 60524810 +
tttcagcatgcttctgaaaaca

SEQ ID NO: 204823 - DNA, 22 bp, Artificial Sequence
  Synthetic oligonucleotide; TTT chr2 60524789 60524810 60524806 60524811 +
ttcagcatgcttctgaaaacat

SEQ ID NO: 204824 - DNA, 22 bp, Artificial Sequence
  Synthetic oligonucleotide; TTT chr2 60524790 60524811 60524807 60524812 +
tcagcatgcttctgaaaacatt

SEQ ID NO: 204825 - DNA, 22 bp, Artificial Sequence
  Synthetic oligonucleotide; TTT chr2 60524791 60524812 60524808 60524813 +
cagcatgcttctgaaaacattt

SEQ ID NO: 204826 - DNA, 22 bp, Artificial Sequence
  Synthetic oligonucleotide; TTC chr2 60524792 60524813 60524809 60524814 +
agcatgcttctgaaaacatttc

SEQ ID NO: 204827 - DNA, 22 bp, Artificial Sequence
  Synthetic oligonucleotide; CTT chr2 60524801 60524822 60524818 60524823 +
ctgaaaacatttcatatctcat

SEQ ID NO: 204828 - DNA, 22 bp, Artificial Sequence
  Synthetic oligonucleotide; TTC chr2 60524802 60524823 60524819 60524824 +
tgaaaacatttcatatctcatt

SEQ ID NO: 204829 - DNA, 22 bp, Artificial Sequence
  Synthetic oligonucleotide; CTG chr2 60524804 60524825 60524821 60524826 +
aaaacatttcatatctcattca

SEQ ID NO: 204830 - DNA, 22 bp, Artificial Sequence
  Synthetic oligonucleotide; TTT chr2 60524813 60524834 60524830 60524835 +
catatctcattcaatgccacat

SEQ ID NO: 204831 - DNA, 22 bp, Artificial Sequence
  Synthetic oligonucleotide; TTC chr2 60524814 60524835 60524831 60524836 +
atatctcattcaatgccacata

SEQ ID NO: 204832 - DNA, 22 bp, Artificial Sequence
  Synthetic oligonucleotide; CTC chr2 60524821 60524842 60524838 60524843 +
attcaatgccacatataaatgg

SEQ ID NO: 204833 - DNA, 22 bp, Artificial Sequence
  Synthetic oligonucleotide; TTC chr2 60524825 60524846 60524842 60524847 +
aatgccacatataaatggtatt

SEQ ID NO: 204834 - DNA, 22 bp, Artificial Sequence
  Synthetic oligonucleotide; TTT chr2 60524848 60524869 60524865 60524870 +
gctggacagtgtggaaaacaga

SEQ ID NO: 204835 - DNA, 22 bp, Artificial Sequence
  Synthetic oligonucleotide; TTG chr2 60524849 60524870 60524866 60524871 +
ctggacagtgtggaaaacagaa

SEQ ID NO: 204836 - DNA, 22 bp, Artificial Sequence
  Synthetic oligonucleotide; CTG chr2 60524852 60524873 60524869 60524874 +
gacagtgtggaaaacagaaaca

SEQ ID NO: 204837 - DNA, 22 bp, Artificial Sequence
  Synthetic oligonucleotide; CTA chr2 60524883 60524904 60524900 60524905 +
aaagccaatggtaaacaccaag

SEQ ID NO: 204838 - DNA, 22 bp, Artificial Sequence
  Synthetic oligonucleotide; TTT chr2 60524908 60524929 60524925 60524930 +
aaaaaatggattgcaaagatcg

SEQ ID NO: 204839 - DNA, 22 bp, Artificial Sequence
  Synthetic oligonucleotide; TTA chr2 60524909 60524930 60524926 60524931 +
aaaaatggattgcaaagatcgc

SEQ ID NO: 204840 - DNA, 22 bp, Artificial Sequence
  Synthetic oligonucleotide; TTG chr2 60524921 60524942 60524938 60524943 +
caaagatcgcatgtcccagaac

SEQ ID NO: 204841 - DNA, 22 bp, Artificial Sequence
  Synthetic oligonucleotide; CTT chr2 60524956 60524977 60524973 60524978 +
ttacctacatgatgaataaaaa

SEQ ID NO: 204842 - DNA, 22 bp, Artificial Sequence
  Synthetic oligonucleotide; TTT chr2 60524957 60524978 60524974 60524979 +
tacctacatgatgaataaaaaa

SEQ ID NO: 204843 - DNA, 22 bp, Artificial Sequence
  Synthetic oligonucleotide; TTT chr2 60524958 60524979 60524975 60524980 +
acctacatgatgaataaaaaaa

SEQ ID NO: 204844 - DNA, 22 bp, Artificial Sequence
  Synthetic oligonucleotide; TTA chr2 60524959 60524980 60524976 60524981 +
cctacatgatgaataaaaaaag

SEQ ID NO: 204845 - DNA, 22 bp, Artificial Sequence
  Synthetic oligonucleotide; CTA chr2 60524963 60524984 60524980 60524985 +
catgatgaataaaaaaagaaca

SEQ ID NO: 204846 - DNA, 22 bp, Artificial Sequence
  Synthetic oligonucleotide; TTT chr2 60524988 60525009 60525005 60525010 +
tccctcaatttatgctgtcttc

SEQ ID NO: 204847 - DNA, 22 bp, Artificial Sequence
  Synthetic oligonucleotide; TTT chr2 60524989 60525010 60525006 60525011 +
ccctcaatttatgctgtcttca

SEQ ID NO: 204848 - DNA, 22 bp, Artificial Sequence
  Synthetic oligonucleotide; TTC chr2 60524990 60525011 60525007 60525012 +
cctcaatttatgctgtcttcaa

SEQ ID NO: 204849 - DNA, 22 bp, Artificial Sequence
  Synthetic oligonucleotide; CTC chr2 60524994 60525015 60525011 60525016 +
aatttatgctgtcttcaacact

SEQ ID NO: 204850 - DNA, 22 bp, Artificial Sequence
  Synthetic oligonucleotide; TTT chr2 60524999 60525020 60525016 60525021 +
atgctgtcttcaacactaacag

SEQ ID NO: 204851 - DNA, 22 bp, Artificial Sequence
  Synthetic oligonucleotide; TTA chr2 60525000 60525021 60525017 60525022 +
tgctgtcttcaacactaacaga

SEQ ID NO: 204852 - DNA, 22 bp, Artificial Sequence
  Synthetic oligonucleotide; CTG chr2 60525005 60525026 60525022 60525027 +
tcttcaacactaacagagggag

SEQ ID NO: 204853 - DNA, 22 bp, Artificial Sequence
  Synthetic oligonucleotide; CTT chr2 60525009 60525030 60525026 60525031 +
caacactaacagagggagagtt

SEQ ID NO: 204854 - DNA, 22 bp, Artificial Sequence
  Synthetic oligonucleotide; TTC chr2 60525010 60525031 60525027 60525032 +
aacactaacagagggagagttc

SEQ ID NO: 204855 - DNA, 22 bp, Artificial Sequence
  Synthetic oligonucleotide; CTA chr2 60525017 60525038 60525034 60525039 +
acagagggagagttcttctaaa

SEQ ID NO: 204856 - DNA, 22 bp, Artificial Sequence
  Synthetic oligonucleotide; TTC chr2 60525032 60525053 60525049 60525054 +
ttctaaacatgttgcatcggat

SEQ ID NO: 204857 - DNA, 22 bp, Artificial Sequence
  Synthetic oligonucleotide; CTT chr2 60525034 60525055 60525051 60525056 +
ctaaacatgttgcatcggatgc

SEQ ID NO: 204858 - DNA, 22 bp, Artificial Sequence
  Synthetic oligonucleotide; TTC chr2 60525035 60525056 60525052 60525057 +
taaacatgttgcatcggatgcc

SEQ ID NO: 204859 - DNA, 22 bp, Artificial Sequence
  Synthetic oligonucleotide; CTA chr2 60525037 60525058 60525054 60525059 +
aacatgttgcatcggatgcctt

SEQ ID NO: 204860 - DNA, 22 bp, Artificial Sequence
  Synthetic oligonucleotide; TTG chr2 60525046 60525067 60525063 60525068 +
catcggatgcctttaacaagca

SEQ ID NO: 204861 - DNA, 22 bp, Artificial Sequence
  Synthetic oligonucleotide; CTT chr2 60525059 60525080 60525076 60525081 +
taacaagcaaaaattcctaact

SEQ ID NO: 204862 - DNA, 22 bp, Artificial Sequence
  Synthetic oligonucleotide; TTT chr2 60525060 60525081 60525077 60525082 +
aacaagcaaaaattcctaactc

SEQ ID NO: 204863 - DNA, 22 bp, Artificial Sequence
  Synthetic oligonucleotide; TTA chr2 60525061 60525082 60525078 60525083 +
acaagcaaaaattcctaactcc

SEQ ID NO: 204864 - DNA, 22 bp, Artificial Sequence
  Synthetic oligonucleotide; TTC chr2 60525075 60525096 60525092 60525097 +
ctaactccagggactcagcata

SEQ ID NO: 204865 - DNA, 22 bp, Artificial Sequence
  Synthetic oligonucleotide; CTA chr2 60525078 60525099 60525095 60525100 +
actccagggactcagcatatgt

SEQ ID NO: 204866 - DNA, 22 bp, Artificial Sequence
  Synthetic oligonucleotide; CTC chr2 60525082 60525103 60525099 60525104 +
cagggactcagcatatgtaggc

SEQ ID NO: 204867 - DNA, 22 bp, Artificial Sequence
  Synthetic oligonucleotide; CTC chr2 60525091 60525112 60525108 60525113 +
agcatatgtaggctatgtccat

SEQ ID NO: 204868 - DNA, 22 bp, Artificial Sequence
  Synthetic oligonucleotide; CTA chr2 60525106 60525127 60525123 60525128 +
tgtccatacagagaaaccagct

SEQ ID NO: 204869 - DNA, 22 bp, Artificial Sequence
  Synthetic oligonucleotide; CTT chr2 60525129 60525150 60525146 60525151 +
ttgggaggaggaaggaggaaaa

SEQ ID NO: 204870 - DNA, 22 bp, Artificial Sequence
  Synthetic oligonucleotide; TTT chr2 60525130 60525151 60525147 60525152 +
tgggaggaggaaggaggaaaat

SEQ ID NO: 204871 - DNA, 22 bp, Artificial Sequence
  Synthetic oligonucleotide; TTT chr2 60525131 60525152 60525148 60525153 +
gggaggaggaaggaggaaaata

SEQ ID NO: 204872 - DNA, 22 bp, Artificial Sequence
  Synthetic oligonucleotide; TTG chr2 60525132 60525153 60525149 60525154 +
ggaggaggaaggaggaaaatat

SEQ ID NO: 204873 - DNA, 22 bp, Artificial Sequence
  Synthetic oligonucleotide; CTG chr2 60525159 60525180 60525176 60525181 +
aattcagtcagttaattgaatt

SEQ ID NO: 204874 - DNA, 22 bp, Artificial Sequence
  Synthetic oligonucleotide; TTC chr2 60525164 60525185 60525181 60525186 +
agtcagttaattgaatttaaaa

SEQ ID NO: 204875 - DNA, 22 bp, Artificial Sequence
  Synthetic oligonucleotide; TTA chr2 60525173 60525194 60525190 60525195 +
attgaatttaaaatacctggtt

SEQ ID NO: 204876 - DNA, 22 bp, Artificial Sequence
  Synthetic oligonucleotide; TTG chr2 60525177 60525198 60525194 60525199 +
aatttaaaatacctggttgttt

SEQ ID NO: 204877 - DNA, 22 bp, Artificial Sequence
  Synthetic oligonucleotide; TTT chr2 60525182 60525203 60525199 60525204 +
aaaatacctggttgtttgaatt

SEQ ID NO: 204878 - DNA, 22 bp, Artificial Sequence
  Synthetic oligonucleotide; TTA chr2 60525183 60525204 60525200 60525205 +
aaatacctggttgtttgaattc

SEQ ID NO: 204879 - DNA, 22 bp, Artificial Sequence
  Synthetic oligonucleotide; CTG chr2 60525192 60525213 60525209 60525214 +
gttgtttgaattcaactatttc

SEQ ID NO: 204880 - DNA, 22 bp, Artificial Sequence
  Synthetic oligonucleotide; TTG chr2 60525196 60525217 60525213 60525218 +
tttgaattcaactatttctttt

SEQ ID NO: 204881 - DNA, 22 bp, Artificial Sequence
  Synthetic oligonucleotide; TTT chr2 60525199 60525220 60525216 60525221 +
gaattcaactatttctttttca

SEQ ID NO: 204882 - DNA, 22 bp, Artificial Sequence
  Synthetic oligonucleotide; TTG chr2 60525200 60525221 60525217 60525222 +
aattcaactatttctttttcaa

SEQ ID NO: 204883 - DNA, 22 bp, Artificial Sequence
  Synthetic oligonucleotide; TTC chr2 60525205 60525226 60525222 60525227 +
aactatttctttttcaaaaacg

SEQ ID NO: 204884 - DNA, 22 bp, Artificial Sequence
  Synthetic oligonucleotide; CTA chr2 60525210 60525231 60525227 60525232 +
tttctttttcaaaaacgtactt

SEQ ID NO: 204885 - DNA, 22 bp, Artificial Sequence
  Synthetic oligonucleotide; TTT chr2 60525213 60525234 60525230 60525235 +
ctttttcaaaaacgtacttcta

SEQ ID NO: 204886 - DNA, 22 bp, Artificial Sequence
  Synthetic oligonucleotide; TTC chr2 60525214 60525235 60525231 60525236 +
tttttcaaaaacgtacttctat

SEQ ID NO: 204887 - DNA, 22 bp, Artificial Sequence
  Synthetic oligonucleotide; CTT chr2 60525216 60525237 60525233 60525238 +
tttcaaaaacgtacttctattt

SEQ ID NO: 204888 - DNA, 22 bp, Artificial Sequence
  Synthetic oligonucleotide; TTT chr2 60525217 60525238 60525234 60525239 +
ttcaaaaacgtacttctatttt

SEQ ID NO: 204889 - DNA, 22 bp, Artificial Sequence
  Synthetic oligonucleotide; TTT chr2 60525218 60525239 60525235 60525240 +
tcaaaaacgtacttctattttg

SEQ ID NO: 204890 - DNA, 22 bp, Artificial Sequence
  Synthetic oligonucleotide; TTT chr2 60525219 60525240 60525236 60525241 +
caaaaacgtacttctattttga

SEQ ID NO: 204891 - DNA, 22 bp, Artificial Sequence
  Synthetic oligonucleotide; TTC chr2 60525220 60525241 60525237 60525242 +
aaaaacgtacttctattttgat

SEQ ID NO: 204892 - DNA, 22 bp, Artificial Sequence
  Synthetic oligonucleotide; CTT chr2 60525232 60525253 60525249 60525254 +
ctattttgatgtagttacattt

SEQ ID NO: 204893 - DNA, 22 bp, Artificial Sequence
  Synthetic oligonucleotide; TTC chr2 60525233 60525254 60525250 60525255 +
tattttgatgtagttacatttg

SEQ ID NO: 204894 - DNA, 22 bp, Artificial Sequence
  Synthetic oligonucleotide; CTA chr2 60525235 60525256 60525252 60525257 +
ttttgatgtagttacatttgcc

SEQ ID NO: 204895 - DNA, 22 bp, Artificial Sequence
  Synthetic oligonucleotide; TTT chr2 60525238 60525259 60525255 60525260 +
tgatgtagttacatttgcccaa

SEQ ID NO: 204896 - DNA, 22 bp, Artificial Sequence
  Synthetic oligonucleotide; TTT chr2 60525239 60525260 60525256 60525261 +
gatgtagttacatttgcccaaa

SEQ ID NO: 204897 - DNA, 22 bp, Artificial Sequence
  Synthetic oligonucleotide; TTG chr2 60525240 60525261 60525257 60525262 +
atgtagttacatttgcccaaaa

SEQ ID NO: 204898 - DNA, 22 bp, Artificial Sequence
  Synthetic oligonucleotide; TTA chr2 60525249 60525270 60525266 60525271 +
catttgcccaaaaaagcaaact

SEQ ID NO: 204899 - DNA, 22 bp, Artificial Sequence
  Synthetic oligonucleotide; TTT chr2 60525254 60525275 60525271 60525276 +
gcccaaaaaagcaaacttggag

SEQ ID NO: 204900 - DNA, 22 bp, Artificial Sequence
  Synthetic oligonucleotide; TTG chr2 60525255 60525276 60525272 60525277 +
cccaaaaaagcaaacttggaga

SEQ ID NO: 204901 - DNA, 22 bp, Artificial Sequence
  Synthetic oligonucleotide; CTT chr2 60525272 60525293 60525289 60525294 +
ggagaaaatacacattacattc

SEQ ID NO: 204902 - DNA, 22 bp, Artificial Sequence
  Synthetic oligonucleotide; TTG chr2 60525273 60525294 60525290 60525295 +
gagaaaatacacattacattct

SEQ ID NO: 204903 - DNA, 22 bp, Artificial Sequence
  Synthetic oligonucleotide; TTA chr2 60525289 60525310 60525306 60525311 +
cattctttggagtttttcaaaa

SEQ ID NO: 204904 - DNA, 22 bp, Artificial Sequence
  Synthetic oligonucleotide; TTC chr2 60525294 60525315 60525311 60525316 +
tttggagtttttcaaaaaaaac

SEQ ID NO: 204905 - DNA, 22 bp, Artificial Sequence
  Synthetic oligonucleotide; CTT chr2 60525296 60525317 60525313 60525318 +
tggagtttttcaaaaaaaacag

SEQ ID NO: 204906 - DNA, 22 bp, Artificial Sequence
  Synthetic oligonucleotide; TTT chr2 60525297 60525318 60525314 60525319 +
ggagtttttcaaaaaaaacagc

SEQ ID NO: 204907 - DNA, 22 bp, Artificial Sequence
  Synthetic oligonucleotide; TTG chr2 60525298 60525319 60525315 60525320 +
gagtttttcaaaaaaaacagct

SEQ ID NO: 204908 - DNA, 22 bp, Artificial Sequence
  Synthetic oligonucleotide; TTT chr2 60525304 60525325 60525321 60525326 +
ttcaaaaaaaacagcttgcaac

SEQ ID NO: 204909 - DNA, 22 bp, Artificial Sequence
  Synthetic oligonucleotide; TTT chr2 60525305 60525326 60525322 60525327 +
tcaaaaaaaacagcttgcaaca

SEQ ID NO: 204910 - DNA, 22 bp, Artificial Sequence
  Synthetic oligonucleotide; TTT chr2 60525306 60525327 60525323 60525328 +
caaaaaaaacagcttgcaacaa

SEQ ID NO: 204911 - DNA, 22 bp, Artificial Sequence
  Synthetic oligonucleotide; TTC chr2 60525307 60525328 60525324 60525329 +
aaaaaaaacagcttgcaacaat

SEQ ID NO: 204912 - DNA, 22 bp, Artificial Sequence
  Synthetic oligonucleotide; CTT chr2 60525321 60525342 60525338 60525343 +
gcaacaattaaaagatggagaa

SEQ ID NO: 204913 - DNA, 22 bp, Artificial Sequence
  Synthetic oligonucleotide; TTG chr2 60525322 60525343 60525339 60525344 +
caacaattaaaagatggagaaa

SEQ ID NO: 204914 - DNA, 22 bp, Artificial Sequence
  Synthetic oligonucleotide; TTA chr2 60525331 60525352 60525348 60525353 +
aaagatggagaaatcttataag

SEQ ID NO: 204915 - DNA, 22 bp, Artificial Sequence
  Synthetic oligonucleotide; CTT chr2 60525348 60525369 60525365 60525370 +
ataaggctggaaacttctgtga

SEQ ID NO: 204916 - DNA, 22 bp, Artificial Sequence
  Synthetic oligonucleotide; TTA chr2 60525349 60525370 60525366 60525371 +
taaggctggaaacttctgtgaa

SEQ ID NO: 204917 - DNA, 22 bp, Artificial Sequence
  Synthetic oligonucleotide; CTG chr2 60525357 60525378 60525374 60525379 +
gaaacttctgtgaattatcacc

SEQ ID NO: 204918 - DNA, 22 bp, Artificial Sequence
  Synthetic oligonucleotide; CTT chr2 60525364 60525385 60525381 60525386 +
ctgtgaattatcaccattccat

SEQ ID NO: 204919 - DNA, 22 bp, Artificial Sequence
  Synthetic oligonucleotide; TTC chr2 60525365 60525386 60525382 60525387 +
tgtgaattatcaccattccatt

SEQ ID NO: 204920 - DNA, 22 bp, Artificial Sequence
  Synthetic oligonucleotide; CTG chr2 60525367 60525388 60525384 60525389 +
tgaattatcaccattccattat

SEQ ID NO: 204921 - DNA, 22 bp, Artificial Sequence
  Synthetic oligonucleotide; TTA chr2 60525374 60525395 60525391 60525396 +
tcaccattccattatactgcac

SEQ ID NO: 204922 - DNA, 22 bp, Artificial Sequence
  Synthetic oligonucleotide; TTC chr2 60525383 60525404 60525400 60525405 +
cattatactgcacttcaatttt

SEQ ID NO: 204923 - DNA, 22 bp, Artificial Sequence
  Synthetic oligonucleotide; TTA chr2 60525388 60525409 60525405 60525410 +
tactgcacttcaattttgcttc

SEQ ID NO: 204924 - DNA, 22 bp, Artificial Sequence
  Synthetic oligonucleotide; CTG chr2 60525393 60525414 60525410 60525415 +
cacttcaattttgcttccagca

SEQ ID NO: 204925 - DNA, 22 bp, Artificial Sequence
  Synthetic oligonucleotide; CTT chr2 60525398 60525419 60525415 60525420 +
caattttgcttccagcaatttg

SEQ ID NO: 204926 - DNA, 22 bp, Artificial Sequence
  Synthetic oligonucleotide; TTC chr2 60525399 60525420 60525416 60525421 +
aattttgcttccagcaatttga

SEQ ID NO: 204927 - DNA, 22 bp, Artificial Sequence
  Synthetic oligonucleotide; TTT chr2 60525404 60525425 60525421 60525426 +
tgcttccagcaatttgaaagat

SEQ ID NO: 204928 - DNA, 22 bp, Artificial Sequence
  Synthetic oligonucleotide; TTT chr2 60525405 60525426 60525422 60525427 +
gcttccagcaatttgaaagatg

SEQ ID NO: 204929 - DNA, 22 bp, Artificial Sequence
  Synthetic oligonucleotide; TTG chr2 60525406 60525427 60525423 60525428 +
cttccagcaatttgaaagatgc

SEQ ID NO: 204930 - DNA, 22 bp, Artificial Sequence
  Synthetic oligonucleotide; CTT chr2 60525409 60525430 60525426 60525431 +
ccagcaatttgaaagatgcctt

SEQ ID NO: 204931 - DNA, 22 bp, Artificial Sequence
  Synthetic oligonucleotide; TTC chr2 60525410 60525431 60525427 60525432 +
cagcaatttgaaagatgccttt

SEQ ID NO: 204932 - DNA, 22 bp, Artificial Sequence
  Synthetic oligonucleotide; TTT chr2 60525419 60525440 60525436 60525441 +
gaaagatgcctttaagctttct

SEQ ID NO: 204933 - DNA, 22 bp, Artificial Sequence
  Synthetic oligonucleotide; TTG chr2 60525420 60525441 60525437 60525442 +
aaagatgcctttaagctttctg

SEQ ID NO: 204934 - DNA, 22 bp, Artificial Sequence
  Synthetic oligonucleotide; CTT chr2 60525431 60525452 60525448 60525453 +
taagctttctgttggggaatca

SEQ ID NO: 204935 - DNA, 22 bp, Artificial Sequence
  Synthetic oligonucleotide; TTT chr2 60525432 60525453 60525449 60525454 +
aagctttctgttggggaatcac

SEQ ID NO: 204936 - DNA, 22 bp, Artificial Sequence
  Synthetic oligonucleotide; TTA chr2 60525433 60525454 60525450 60525455 +
agctttctgttggggaatcacg

SEQ ID NO: 204937 - DNA, 22 bp, Artificial Sequence
  Synthetic oligonucleotide; CTT chr2 60525438 60525459 60525455 60525460 +
tctgttggggaatcacgaatcc

SEQ ID NO: 204938 - DNA, 22 bp, Artificial Sequence
  Synthetic oligonucleotide; TTT chr2 60525439 60525460 60525456 60525461 +
ctgttggggaatcacgaatcca

SEQ ID NO: 204939 - DNA, 22 bp, Artificial Sequence
  Synthetic oligonucleotide; TTC chr2 60525440 60525461 60525457 60525462 +
tgttggggaatcacgaatccaa

SEQ ID NO: 204940 - DNA, 22 bp, Artificial Sequence
  Synthetic oligonucleotide; CTG chr2 60525442 60525463 60525459 60525464 +
ttggggaatcacgaatccaagc

SEQ ID NO: 204941 - DNA, 22 bp, Artificial Sequence
  Synthetic oligonucleotide; TTG chr2 60525445 60525466 60525462 60525467 +
gggaatcacgaatccaagcctt

SEQ ID NO: 204942 - DNA, 22 bp, Artificial Sequence
  Synthetic oligonucleotide; CTT chr2 60525467 60525488 60525484 60525489 +
aatctccaccatagcttccatc

SEQ ID NO: 204943 - DNA, 22 bp, Artificial Sequence
  Synthetic oligonucleotide; TTA chr2 60525468 60525489 60525485 60525490 +
atctccaccatagcttccatct

SEQ ID NO: 204944 - DNA, 22 bp, Artificial Sequence
  Synthetic oligonucleotide; CTC chr2 60525473 60525494 60525490 60525495 +
caccatagcttccatctttgag

SEQ ID NO: 204945 - DNA, 22 bp, Artificial Sequence
  Synthetic oligonucleotide; CTT chr2 60525484 60525505 60525501 60525506 +
ccatctttgaggcaaatcaaga

SEQ ID NO: 204946 - DNA, 22 bp, Artificial Sequence
  Synthetic oligonucleotide; TTC chr2 60525485 60525506 60525502 60525507 +
catctttgaggcaaatcaagaa

SEQ ID NO: 204947 - DNA, 22 bp, Artificial Sequence
  Synthetic oligonucleotide; CTT chr2 60525491 60525512 60525508 60525513 +
tgaggcaaatcaagaaaataat

SEQ ID NO: 204948 - DNA, 22 bp, Artificial Sequence
  Synthetic oligonucleotide; TTT chr2 60525492 60525513 60525509 60525514 +
gaggcaaatcaagaaaataata

SEQ ID NO: 204949 - DNA, 22 bp, Artificial Sequence
  Synthetic oligonucleotide; TTG chr2 60525493 60525514 60525510 60525515 +
aggcaaatcaagaaaataatat

SEQ ID NO: 204950 - DNA, 22 bp, Artificial Sequence
  Synthetic oligonucleotide; TTC chr2 60525517 60525538 60525534 60525539 +
tgctgtctttgcaggtgagccc

SEQ ID NO: 204951 - DNA, 22 bp, Artificial Sequence
  Synthetic oligonucleotide; CTG chr2 60525519 60525540 60525536 60525541 +
ctgtctttgcaggtgagcccca

SEQ ID NO: 204952 - DNA, 22 bp, Artificial Sequence
  Synthetic oligonucleotide; CTG chr2 60525522 60525543 60525539 60525544 +
tctttgcaggtgagccccattc

SEQ ID NO: 204953 - DNA, 22 bp, Artificial Sequence
  Synthetic oligonucleotide; CTT chr2 60525526 60525547 60525543 60525548 +
tgcaggtgagccccattcagca

SEQ ID NO: 204954 - DNA, 22 bp, Artificial Sequence
  Synthetic oligonucleotide; TTT chr2 60525527 60525548 60525544 60525549 +
gcaggtgagccccattcagcaa

SEQ ID NO: 204955 - DNA, 22 bp, Artificial Sequence
  Synthetic oligonucleotide; TTG chr2 60525528 60525549 60525545 60525550 +
caggtgagccccattcagcaac

SEQ ID NO: 204956 - DNA, 22 bp, Artificial Sequence
  Synthetic oligonucleotide; TTC chr2 60525544 60525565 60525561 60525566 +
agcaactagattccaaaaaata

SEQ ID NO: 204957 - DNA, 22 bp, Artificial Sequence
  Synthetic oligonucleotide; CTA chr2 60525552 60525573 60525569 60525574 +
gattccaaaaaatagcagggag

SEQ ID NO: 204958 - DNA, 22 bp, Artificial Sequence
  Synthetic oligonucleotide; TTC chr2 60525557 60525578 60525574 60525579 +
caaaaaatagcagggagaaaac

SEQ ID NO: 204959 - DNA, 22 bp, Artificial Sequence
  Synthetic oligonucleotide; CTG chr2 60525581 60525602 60525598 60525603 +
gtcagtggtgttcatactatgc

SEQ ID NO: 204960 - DNA, 22 bp, Artificial Sequence
  Synthetic oligonucleotide; TTC chr2 60525594 60525615 60525611 60525616 +
atactatgctagaacatcatgg

SEQ ID NO: 204961 - DNA, 22 bp, Artificial Sequence
  Synthetic oligonucleotide; CTA chr2 60525600 60525621 60525617 60525622 +
tgctagaacatcatggggactt

SEQ ID NO: 204962 - DNA, 22 bp, Artificial Sequence
  Synthetic oligonucleotide; CTA chr2 60525605 60525626 60525622 60525627 +
gaacatcatggggacttagaga

SEQ ID NO: 204963 - DNA, 22 bp, Artificial Sequence
  Synthetic oligonucleotide; CTT chr2 60525622 60525643 60525639 60525644 +
agagacccacccagtccaaact

SEQ ID NO: 204964 - DNA, 22 bp, Artificial Sequence
  Synthetic oligonucleotide; TTA chr2 60525623 60525644 60525640 60525645 +
gagacccacccagtccaaacta

SEQ ID NO: 204965 - DNA, 22 bp, Artificial Sequence
  Synthetic oligonucleotide; CTA chr2 60525645 60525666 60525662 60525667 +
tctattttacctactttacaag

SEQ ID NO: 204966 - DNA, 22 bp, Artificial Sequence
  Synthetic oligonucleotide; CTA chr2 60525649 60525670 60525666 60525671 +
ttttacctactttacaagacaa

SEQ ID NO: 204967 - DNA, 22 bp, Artificial Sequence
  Synthetic oligonucleotide; TTT chr2 60525652 60525673 60525669 60525674 +
tacctactttacaagacaagga

SEQ ID NO: 204968 - DNA, 22 bp, Artificial Sequence
  Synthetic oligonucleotide; TTT chr2 60525653 60525674 60525670 60525675 +
acctactttacaagacaaggaa

SEQ ID NO: 204969 - DNA, 22 bp, Artificial Sequence
  Synthetic oligonucleotide; TTA chr2 60525654 60525675 60525671 60525676 +
cctactttacaagacaaggaaa

SEQ ID NO: 204970 - DNA, 22 bp, Artificial Sequence
  Synthetic oligonucleotide; CTA chr2 60525658 60525679 60525675 60525680 +
ctttacaagacaaggaaacaaa

SEQ ID NO: 204971 - DNA, 22 bp, Artificial Sequence
  Synthetic oligonucleotide; CTT chr2 60525661 60525682 60525678 60525683 +
tacaagacaaggaaacaaatgc

SEQ ID NO: 204972 - DNA, 22 bp, Artificial Sequence
  Synthetic oligonucleotide; TTT chr2 60525662 60525683 60525679 60525684 +
acaagacaaggaaacaaatgct

SEQ ID NO: 204973 - DNA, 22 bp, Artificial Sequence
  Synthetic oligonucleotide; TTA chr2 60525663 60525684 60525680 60525685 +
caagacaaggaaacaaatgcta

SEQ ID NO: 204974 - DNA, 22 bp, Artificial Sequence
  Synthetic oligonucleotide; CTA chr2 60525685 60525706 60525702 60525707 +
acaggtgaagggagcccaaaat

SEQ ID NO: 204975 - DNA, 22 bp, Artificial Sequence
  Synthetic oligonucleotide; CTC chr2 60525710 60525731 60525727 60525732 +
acagcatgatacaataagggtc

SEQ ID NO: 204976 - DNA, 22 bp, Artificial Sequence
  Synthetic oligonucleotide; CTG chr2 60525749 60525770 60525766 60525771 +
gttttcagatcagtgtctctct

SEQ ID NO: 204977 - DNA, 22 bp, Artificial Sequence
  Synthetic oligonucleotide; TTT chr2 60525753 60525774 60525770 60525775 +
tcagatcagtgtctctctgtta

SEQ ID NO: 204978 - DNA, 22 bp, Artificial Sequence
  Synthetic oligonucleotide; TTT chr2 60525754 60525775 60525771 60525776 +
cagatcagtgtctctctgttaa

SEQ ID NO: 204979 - DNA, 22 bp, Artificial Sequence
  Synthetic oligonucleotide; TTC chr2 60525755 60525776 60525772 60525777 +
agatcagtgtctctctgttaac

SEQ ID NO: 204980 - DNA, 22 bp, Artificial Sequence
  Synthetic oligonucleotide; CTC chr2 60525768 60525789 60525785 60525790 +
tctgttaacactaaaagtcaaa

SEQ ID NO: 204981 - DNA, 22 bp, Artificial Sequence
  Synthetic oligonucleotide; CTC chr2 60525770 60525791 60525787 60525792 +
tgttaacactaaaagtcaaagt

SEQ ID NO: 204982 - DNA, 22 bp, Artificial Sequence
  Synthetic oligonucleotide; CTG chr2 60525772 60525793 60525789 60525794 +
ttaacactaaaagtcaaagttt

SEQ ID NO: 204983 - DNA, 22 bp, Artificial Sequence
  Synthetic oligonucleotide; TTA chr2 60525775 60525796 60525792 60525797 +
acactaaaagtcaaagtttggt

SEQ ID NO: 204984 - DNA, 22 bp, Artificial Sequence
  Synthetic oligonucleotide; CTA chr2 60525781 60525802 60525798 60525803 +
aaagtcaaagtttggttctgga

SEQ ID NO: 204985 - DNA, 22 bp, Artificial Sequence
  Synthetic oligonucleotide; TTT chr2 60525794 60525815 60525811 60525816 +
ggttctggaaaatctgtaatgc

SEQ ID NO: 204986 - DNA, 22 bp, Artificial Sequence
  Synthetic oligonucleotide; TTG chr2 60525795 60525816 60525812 60525817 +
gttctggaaaatctgtaatgcc

SEQ ID NO: 204987 - DNA, 22 bp, Artificial Sequence
  Synthetic oligonucleotide; TTC chr2 60525799 60525820 60525816 60525821 +
tggaaaatctgtaatgcccaaa

SEQ ID NO: 204988 - DNA, 22 bp, Artificial Sequence
  Synthetic oligonucleotide; CTG chr2 60525801 60525822 60525818 60525823 +
gaaaatctgtaatgcccaaaag

SEQ ID NO: 204989 - DNA, 22 bp, Artificial Sequence
  Synthetic oligonucleotide; CTG chr2 60525810 60525831 60525827 60525832 +
taatgcccaaaagaccttaaat

SEQ ID NO: 204990 - DNA, 22 bp, Artificial Sequence
  Synthetic oligonucleotide; CTT chr2 60525828 60525849 60525845 60525850 +
aaatgccctccccccaaaccag

SEQ ID NO: 204991 - DNA, 22 bp, Artificial Sequence
  Synthetic oligonucleotide; TTA chr2 60525829 60525850 60525846 60525851 +
aatgccctccccccaaaccagt

SEQ ID NO: 204992 - DNA, 22 bp, Artificial Sequence
  Synthetic oligonucleotide; CTC chr2 60525838 60525859 60525855 60525860 +
cccccaaaccagtcttggtaat

SEQ ID NO: 204993 - DNA, 22 bp, Artificial Sequence
  Synthetic oligonucleotide; CTT chr2 60525854 60525875 60525871 60525876 +
ggtaatttctccatggctttca

SEQ ID NO: 204994 - DNA, 22 bp, Artificial Sequence
  Synthetic oligonucleotide; TTG chr2 60525855 60525876 60525872 60525877 +
gtaatttctccatggctttcac

SEQ ID NO: 204995 - DNA, 22 bp, Artificial Sequence
  Synthetic oligonucleotide; TTT chr2 60525862 60525883 60525879 60525884 +
ctccatggctttcacagaaggg

SEQ ID NO: 204996 - DNA, 22 bp, Artificial Sequence
  Synthetic oligonucleotide; TTC chr2 60525863 60525884 60525880 60525885 +
tccatggctttcacagaagggt

SEQ ID NO: 204997 - DNA, 22 bp, Artificial Sequence
  Synthetic oligonucleotide; CTC chr2 60525865 60525886 60525882 60525887 +
catggctttcacagaagggtaa

SEQ ID NO: 204998 - DNA, 22 bp, Artificial Sequence
  Synthetic oligonucleotide; CTT chr2 60525873 60525894 60525890 60525895 +
tcacagaagggtaaatgtctac

SEQ ID NO: 204999 - DNA, 22 bp, Artificial Sequence
  Synthetic oligonucleotide; TTT chr2 60525874 60525895 60525891 60525896 +
cacagaagggtaaatgtctact

SEQ ID NO: 205000 - DNA, 22 bp, Artificial Sequence
  Synthetic oligonucleotide; TTC chr2 60525875 60525896 60525892 60525897 +
acagaagggtaaatgtctactt

SEQ ID NO: 205001 - DNA, 22 bp, Artificial Sequence
  Synthetic oligonucleotide; CTA chr2 60525894 60525915 60525911 60525916 +
cttggaaggcctttactaattt

SEQ ID NO: 205002 - DNA, 22 bp, Artificial Sequence
  Synthetic oligonucleotide; CTT chr2 60525897 60525918 60525914 60525919 +
ggaaggcctttactaattttta

SEQ ID NO: 205003 - DNA, 22 bp, Artificial Sequence
  Synthetic oligonucleotide; TTG chr2 60525898 60525919 60525915 60525920 +
gaaggcctttactaatttttat

SEQ ID NO: 205004 - DNA, 22 bp, Artificial Sequence
  Synthetic oligonucleotide; CTT chr2 60525907 60525928 60525924 60525929 +
tactaatttttatgttatcttc

SEQ ID NO: 205005 - DNA, 22 bp, Artificial Sequence
  Synthetic oligonucleotide; TTT chr2 60525908 60525929 60525925 60525930 +
actaatttttatgttatcttct

SEQ ID NO: 205006 - DNA, 22 bp, Artificial Sequence
  Synthetic oligonucleotide; TTA chr2 60525909 60525930 60525926 60525931 +
ctaatttttatgttatcttctt

SEQ ID NO: 205007 - DNA, 22 bp, Artificial Sequence
  Synthetic oligonucleotide; CTA chr2 60525912 60525933 60525929 60525934 +
atttttatgttatcttcttcct

SEQ ID NO: 205008 - DNA, 22 bp, Artificial Sequence
  Synthetic oligonucleotide; TTT chr2 60525916 60525937 60525933 60525938 +
ttatgttatcttcttccttcat

SEQ ID NO: 205009 - DNA, 22 bp, Artificial Sequence
  Synthetic oligonucleotide; TTT chr2 60525917 60525938 60525934 60525939 +
tatgttatcttcttccttcatt

SEQ ID NO: 205010 - DNA, 22 bp, Artificial Sequence
  Synthetic oligonucleotide; TTT chr2 60525918 60525939 60525935 60525940 +
atgttatcttcttccttcattc

SEQ ID NO: 205011 - DNA, 22 bp, Artificial Sequence
  Synthetic oligonucleotide; TTA chr2 60525919 60525940 60525936 60525941 +
tgttatcttcttccttcattcg

SEQ ID NO: 205012 - DNA, 22 bp, Artificial Sequence
  Synthetic oligonucleotide; TTA chr2 60525924 60525945 60525941 60525946 +
tcttcttccttcattcgtgttt

SEQ ID NO: 205013 - DNA, 22 bp, Artificial Sequence
  Synthetic oligonucleotide; CTT chr2 60525928 60525949 60525945 60525950 +
cttccttcattcgtgtttggta

SEQ ID NO: 205014 - DNA, 22 bp, Artificial Sequence
  Synthetic oligonucleotide; TTC chr2 60525929 60525950 60525946 60525951 +
ttccttcattcgtgtttggtaa

SEQ ID NO: 205015 - DNA, 22 bp, Artificial Sequence
  Synthetic oligonucleotide; CTT chr2 60525931 60525952 60525948 60525953 +
ccttcattcgtgtttggtaatc

SEQ ID NO: 205016 - DNA, 22 bp, Artificial Sequence
  Synthetic oligonucleotide; TTC chr2 60525932 60525953 60525949 60525954 +
cttcattcgtgtttggtaatca

SEQ ID NO: 205017 - DNA, 22 bp, Artificial Sequence
  Synthetic oligonucleotide; CTT chr2 60525935 60525956 60525952 60525957 +
cattcgtgtttggtaatcaaaa

SEQ ID NO: 205018 - DNA, 22 bp, Artificial Sequence
  Synthetic oligonucleotide; TTC chr2 60525936 60525957 60525953 60525958 +
attcgtgtttggtaatcaaaaa

SEQ ID NO: 205019 - DNA, 22 bp, Artificial Sequence
  Synthetic oligonucleotide; TTC chr2 60525940 60525961 60525957 60525962 +
gtgtttggtaatcaaaaatagt

SEQ ID NO: 205020 - DNA, 22 bp, Artificial Sequence
  Synthetic oligonucleotide; TTT chr2 60525946 60525967 60525963 60525968 +
ggtaatcaaaaatagtttatca

SEQ ID NO: 205021 - DNA, 22 bp, Artificial Sequence
  Synthetic oligonucleotide; TTG chr2 60525947 60525968 60525964 60525969 +
gtaatcaaaaatagtttatcat

SEQ ID NO: 205022 - DNA, 22 bp, Artificial Sequence
  Synthetic oligonucleotide; TTT chr2 60525964 60525985 60525981 60525986 +
atcataatgctctcaattggaa

SEQ ID NO: 205023 - DNA, 22 bp, Artificial Sequence
  Synthetic oligonucleotide; TTA chr2 60525965 60525986 60525982 60525987 +
tcataatgctctcaattggaag

SEQ ID NO: 205024 - DNA, 22 bp, Artificial Sequence
  Synthetic oligonucleotide; CTC chr2 60525976 60525997 60525993 60525998 +
tcaattggaaggtcttcatact

SEQ ID NO: 205025 - DNA, 22 bp, Artificial Sequence
  Synthetic oligonucleotide; CTC chr2 60525978 60525999 60525995 60526000 +
aattggaaggtcttcatactac

SEQ ID NO: 205026 - DNA, 22 bp, Artificial Sequence
  Synthetic oligonucleotide; TTG chr2 60525983 60526004 60526000 60526005 +
gaaggtcttcatactacaggca

SEQ ID NO: 205027 - DNA, 22 bp, Artificial Sequence
  Synthetic oligonucleotide; CTT chr2 60525992 60526013 60526009 60526014 +
catactacaggcagatactgtt

SEQ ID NO: 205028 - DNA, 22 bp, Artificial Sequence
  Synthetic oligonucleotide; TTC chr2 60525993 60526014 60526010 60526015 +
atactacaggcagatactgtta

SEQ ID NO: 205029 - DNA, 22 bp, Artificial Sequence
  Synthetic oligonucleotide; CTA chr2 60525999 60526020 60526016 60526021 +
caggcagatactgttattttct

SEQ ID NO: 205030 - DNA, 22 bp, Artificial Sequence
  Synthetic oligonucleotide; CTG chr2 60526012 60526033 60526029 60526034 +
ttattttctggtagaggatggc

SEQ ID NO: 205031 - DNA, 22 bp, Artificial Sequence
  Synthetic oligonucleotide; TTA chr2 60526015 60526036 60526032 60526037 +
ttttctggtagaggatggcagc

SEQ ID NO: 205032 - DNA, 22 bp, Artificial Sequence
  Synthetic oligonucleotide; TTT chr2 60526018 60526039 60526035 60526040 +
tctggtagaggatggcagcagg

SEQ ID NO: 205033 - DNA, 22 bp, Artificial Sequence
  Synthetic oligonucleotide; TTT chr2 60526019 60526040 60526036 60526041 +
ctggtagaggatggcagcaggg

SEQ ID NO: 205034 - DNA, 22 bp, Artificial Sequence
  Synthetic oligonucleotide; TTC chr2 60526020 60526041 60526037 60526042 +
tggtagaggatggcagcagggc

SEQ ID NO: 205035 - DNA, 22 bp, Artificial Sequence
  Synthetic oligonucleotide; CTG chr2 60526022 60526043 60526039 60526044 +
gtagaggatggcagcagggctg

SEQ ID NO: 205036 - DNA, 22 bp, Artificial Sequence
  Synthetic oligonucleotide; CTG chr2 60526044 60526065 60526061 60526066 +
ggaaaaaagaatgtggtttttt

SEQ ID NO: 205037 - DNA, 22 bp, Artificial Sequence
  Synthetic oligonucleotide; TTT chr2 60526063 60526084 60526080 60526085 +
ttttctaaccacagtaggtttt

SEQ ID NO: 205038 - DNA, 22 bp, Artificial Sequence
  Synthetic oligonucleotide; TTT chr2 60526064 60526085 60526081 60526086 +
tttctaaccacagtaggttttt

SEQ ID NO: 205039 - DNA, 22 bp, Artificial Sequence
  Synthetic oligonucleotide; TTT chr2 60526065 60526086 60526082 60526087 +
ttctaaccacagtaggtttttt

SEQ ID NO: 205040 - DNA, 22 bp, Artificial Sequence
  Synthetic oligonucleotide; TTT chr2 60526066 60526087 60526083 60526088 +
tctaaccacagtaggttttttc

SEQ ID NO: 205041 - DNA, 22 bp, Artificial Sequence
  Synthetic oligonucleotide; TTT chr2 60526067 60526088 60526084 60526089 +
ctaaccacagtaggttttttct

SEQ ID NO: 205042 - DNA, 22 bp, Artificial Sequence
  Synthetic oligonucleotide; TTC chr2 60526068 60526089 60526085 60526090 +
taaccacagtaggttttttcta

SEQ ID NO: 205043 - DNA, 22 bp, Artificial Sequence
  Synthetic oligonucleotide; CTA chr2 60526070 60526091 60526087 60526092 +
accacagtaggttttttctata

SEQ ID NO: 205044 - DNA, 22 bp, Artificial Sequence
  Synthetic oligonucleotide; TTT chr2 60526084 60526105 60526101 60526106 +
tttctataacaatgatttcact

SEQ ID NO: 205045 - DNA, 22 bp, Artificial Sequence
  Synthetic oligonucleotide; TTT chr2 60526085 60526106 60526102 60526107 +
ttctataacaatgatttcactt

SEQ ID NO: 205046 - DNA, 22 bp, Artificial Sequence
  Synthetic oligonucleotide; TTT chr2 60526086 60526107 60526103 60526108 +
tctataacaatgatttcacttt

SEQ ID NO: 205047 - DNA, 22 bp, Artificial Sequence
  Synthetic oligonucleotide; TTT chr2 60526087 60526108 60526104 60526109 +
ctataacaatgatttcactttc

SEQ ID NO: 205048 - DNA, 22 bp, Artificial Sequence
  Synthetic oligonucleotide; TTC chr2 60526088 60526109 60526105 60526110 +
tataacaatgatttcactttct

SEQ ID NO: 205049 - DNA, 22 bp, Artificial Sequence
  Synthetic oligonucleotide; CTA chr2 60526090 60526111 60526107 60526112 +
taacaatgatttcactttctag

SEQ ID NO: 205050 - DNA, 22 bp, Artificial Sequence
  Synthetic oligonucleotide; TTT chr2 60526102 60526123 60526119 60526124 +
cactttctagatataaaacagg

SEQ ID NO: 205051 - DNA, 22 bp, Artificial Sequence
  Synthetic oligonucleotide; TTC chr2 60526103 60526124 60526120 60526125 +
actttctagatataaaacaggc

SEQ ID NO: 205052 - DNA, 22 bp, Artificial Sequence
  Synthetic oligonucleotide; CTT chr2 60526107 60526128 60526124 60526129 +
tctagatataaaacaggcatgg

SEQ ID NO: 205053 - DNA, 22 bp, Artificial Sequence
  Synthetic oligonucleotide; TTT chr2 60526108 60526129 60526125 60526130 +
ctagatataaaacaggcatggt

SEQ ID NO: 205054 - DNA, 22 bp, Artificial Sequence
  Synthetic oligonucleotide; TTC chr2 60526109 60526130 60526126 60526131 +
tagatataaaacaggcatggtt

SEQ ID NO: 205055 - DNA, 22 bp, Artificial Sequence
  Synthetic oligonucleotide; CTA chr2 60526111 60526132 60526128 60526133 +
gatataaaacaggcatggtttc

SEQ ID NO: 205056 - DNA, 22 bp, Artificial Sequence
  Synthetic oligonucleotide; TTT chr2 60526132 60526153 60526149 60526154 +
ctctcaccctgaacttctgcaa

SEQ ID NO: 205057 - DNA, 22 bp, Artificial Sequence
  Synthetic oligonucleotide; TTC chr2 60526133 60526154 60526150 60526155 +
tctcaccctgaacttctgcaaa

SEQ ID NO: 205058 - DNA, 22 bp, Artificial Sequence
  Synthetic oligonucleotide; CTC chr2 60526135 60526156 60526152 60526157 +
tcaccctgaacttctgcaaaat

SEQ ID NO: 205059 - DNA, 22 bp, Artificial Sequence
  Synthetic oligonucleotide; CTC chr2 60526137 60526158 60526154 60526159 +
accctgaacttctgcaaaatct

SEQ ID NO: 205060 - DNA, 22 bp, Artificial Sequence
  Synthetic oligonucleotide; CTG chr2 60526143 60526164 60526160 60526165 +
aacttctgcaaaatctagattt

SEQ ID NO: 205061 - DNA, 22 bp, Artificial Sequence
  Synthetic oligonucleotide; CTT chr2 60526148 60526169 60526165 60526170 +
ctgcaaaatctagatttgatca

SEQ ID NO: 205062 - DNA, 22 bp, Artificial Sequence
  Synthetic oligonucleotide; TTC chr2 60526149 60526170 60526166 60526171 +
tgcaaaatctagatttgatcaa

SEQ ID NO: 205063 - DNA, 22 bp, Artificial Sequence
  Synthetic oligonucleotide; CTG chr2 60526151 60526172 60526168 60526173 +
caaaatctagatttgatcaaat

SEQ ID NO: 205064 - DNA, 22 bp, Artificial Sequence
  Synthetic oligonucleotide; CTA chr2 60526160 60526181 60526177 60526182 +
gatttgatcaaattcagaaact

SEQ ID NO: 205065 - DNA, 22 bp, Artificial Sequence
  Synthetic oligonucleotide; TTT chr2 60526165 60526186 60526182 60526187 +
gatcaaattcagaaactggtga

SEQ ID NO: 205066 - DNA, 22 bp, Artificial Sequence
  Synthetic oligonucleotide; TTG chr2 60526166 60526187 60526183 60526188 +
atcaaattcagaaactggtgat

SEQ ID NO: 205067 - DNA, 22 bp, Artificial Sequence
  Synthetic oligonucleotide; TTC chr2 60526175 60526196 60526192 60526197 +
agaaactggtgatttgatcaaa

SEQ ID NO: 205068 - DNA, 22 bp, Artificial Sequence
  Synthetic oligonucleotide; CTG chr2 60526183 60526204 60526200 60526205 +
gtgatttgatcaaattcagaat

SEQ ID NO: 205069 - DNA, 22 bp, Artificial Sequence
  Synthetic oligonucleotide; TTT chr2 60526190 60526211 60526207 60526212 +
gatcaaattcagaatcccatat

SEQ ID NO: 205070 - DNA, 22 bp, Artificial Sequence
  Synthetic oligonucleotide; TTG chr2 60526191 60526212 60526208 60526213 +
atcaaattcagaatcccatatt

SEQ ID NO: 205071 - DNA, 22 bp, Artificial Sequence
  Synthetic oligonucleotide; TTC chr2 60526200 60526221 60526217 60526222 +
agaatcccatattttgggatga

SEQ ID NO: 205072 - DNA, 22 bp, Artificial Sequence
  Synthetic oligonucleotide; TTT chr2 60526214 60526235 60526231 60526236 +
tgggatgatgtgttctagcaga

SEQ ID NO: 205073 - DNA, 22 bp, Artificial Sequence
  Synthetic oligonucleotide; TTT chr2 60526215 60526236 60526232 60526237 +
gggatgatgtgttctagcagaa

SEQ ID NO: 205074 - DNA, 22 bp, Artificial Sequence
  Synthetic oligonucleotide; TTG chr2 60526216 60526237 60526233 60526238 +
ggatgatgtgttctagcagaaa

SEQ ID NO: 205075 - DNA, 22 bp, Artificial Sequence
  Synthetic oligonucleotide; TTC chr2 60526229 60526250 60526246 60526251 +
tagcagaaagctattggttggc

SEQ ID NO: 205076 - DNA, 22 bp, Artificial Sequence
  Synthetic oligonucleotide; CTA chr2 60526231 60526252 60526248 60526253 +
gcagaaagctattggttggcta

SEQ ID NO: 205077 - DNA, 22 bp, Artificial Sequence
  Synthetic oligonucleotide; CTA chr2 60526242 60526263 60526259 60526264 +
ttggttggctatattttgctct

SEQ ID NO: 205078 - DNA, 22 bp, Artificial Sequence
  Synthetic oligonucleotide; TTG chr2 60526245 60526266 60526262 60526267 +
gttggctatattttgctctttc

SEQ ID NO: 205079 - DNA, 22 bp, Artificial Sequence
  Synthetic oligonucleotide; TTG chr2 60526249 60526270 60526266 60526271 +
gctatattttgctctttcttcc

SEQ ID NO: 205080 - DNA, 22 bp, Artificial Sequence
  Synthetic oligonucleotide; CTA chr2 60526253 60526274 60526270 60526275 +
tattttgctctttcttccccaa

SEQ ID NO: 205081 - DNA, 22 bp, Artificial Sequence
  Synthetic oligonucleotide; TTT chr2 60526258 60526279 60526275 60526280 +
tgctctttcttccccaaaagat

SEQ ID NO: 205082 - DNA, 22 bp, Artificial Sequence
  Synthetic oligonucleotide; TTT chr2 60526259 60526280 60526276 60526281 +
gctctttcttccccaaaagatt

SEQ ID NO: 205083 - DNA, 22 bp, Artificial Sequence
  Synthetic oligonucleotide; TTG chr2 60526260 60526281 60526277 60526282 +
ctctttcttccccaaaagattt

SEQ ID NO: 205084 - DNA, 22 bp, Artificial Sequence
  Synthetic oligonucleotide; CTC chr2 60526263 60526284 60526280 60526285 +
tttcttccccaaaagattttta

SEQ ID NO: 205085 - DNA, 22 bp, Artificial Sequence
  Synthetic oligonucleotide; CTT chr2 60526265 60526286 60526282 60526287 +
tcttccccaaaagatttttaaa

SEQ ID NO: 205086 - DNA, 22 bp, Artificial Sequence
  Synthetic oligonucleotide; TTT chr2 60526266 60526287 60526283 60526288 +
cttccccaaaagatttttaaat

SEQ ID NO: 205087 - DNA, 22 bp, Artificial Sequence
  Synthetic oligonucleotide; TTC chr2 60526267 60526288 60526284 60526289 +
ttccccaaaagatttttaaata

SEQ ID NO: 205088 - DNA, 22 bp, Artificial Sequence
  Synthetic oligonucleotide; CTT chr2 60526269 60526290 60526286 60526291 +
ccccaaaagatttttaaatagt

SEQ ID NO: 205089 - DNA, 22 bp, Artificial Sequence
  Synthetic oligonucleotide; TTC chr2 60526270 60526291 60526287 60526292 +
cccaaaagatttttaaatagtt

SEQ ID NO: 205090 - DNA, 22 bp, Artificial Sequence
  Synthetic oligonucleotide; TTT chr2 60526282 60526303 60526299 60526304 +
ttaaatagttttcatctttaaa

SEQ ID NO: 205091 - DNA, 22 bp, Artificial Sequence
  Synthetic oligonucleotide; TTT chr2 60526283 60526304 60526300 60526305 +
taaatagttttcatctttaaaa

SEQ ID NO: 205092 - DNA, 22 bp, Artificial Sequence
  Synthetic oligonucleotide; TTT chr2 60526284 60526305 60526301 60526306 +
aaatagttttcatctttaaaag

SEQ ID NO: 205093 - DNA, 22 bp, Artificial Sequence
  Synthetic oligonucleotide; TTA chr2 60526285 60526306 60526302 60526307 +
aatagttttcatctttaaaagg

SEQ ID NO: 205094 - DNA, 22 bp, Artificial Sequence
  Synthetic oligonucleotide; TTT chr2 60526293 60526314 60526310 60526315 +
tcatctttaaaaggatttcaac

SEQ ID NO: 205095 - DNA, 22 bp, Artificial Sequence
  Synthetic oligonucleotide; TTT chr2 60526294 60526315 60526311 60526316 +
catctttaaaaggatttcaact

SEQ ID NO: 205096 - DNA, 22 bp, Artificial Sequence
  Synthetic oligonucleotide; TTC chr2 60526295 60526316 60526312 60526317 +
atctttaaaaggatttcaactt

SEQ ID NO: 205097 - DNA, 22 bp, Artificial Sequence
  Synthetic oligonucleotide; CTT chr2 60526300 60526321 60526317 60526322 +
taaaaggatttcaacttcagat

SEQ ID NO: 205098 - DNA, 22 bp, Artificial Sequence
  Synthetic oligonucleotide; TTT chr2 60526301 60526322 60526318 60526323 +
aaaaggatttcaacttcagatt

SEQ ID NO: 205099 - DNA, 22 bp, Artificial Sequence
  Synthetic oligonucleotide; TTA chr2 60526302 60526323 60526319 60526324 +
aaaggatttcaacttcagattg

SEQ ID NO: 205100 - DNA, 22 bp, Artificial Sequence
  Synthetic oligonucleotide; TTT chr2 60526311 60526332 60526328 60526333 +
caacttcagattgtgcccacgc

SEQ ID NO: 205101 - DNA, 22 bp, Artificial Sequence
  Synthetic oligonucleotide; TTC chr2 60526312 60526333 60526329 60526334 +
aacttcagattgtgcccacgcc

SEQ ID NO: 205102 - DNA, 22 bp, Artificial Sequence
  Synthetic oligonucleotide; CTT chr2 60526317 60526338 60526334 60526339 +
cagattgtgcccacgccaaagt

SEQ ID NO: 205103 - DNA, 22 bp, Artificial Sequence
  Synthetic oligonucleotide; TTC chr2 60526318 60526339 60526335 60526340 +
agattgtgcccacgccaaagtc

SEQ ID NO: 205104 - DNA, 22 bp, Artificial Sequence
  Synthetic oligonucleotide; TTG chr2 60526324 60526345 60526341 60526346 +
tgcccacgccaaagtctctata

SEQ ID NO: 205105 - DNA, 22 bp, Artificial Sequence
  Synthetic oligonucleotide; CTC chr2 60526342 60526363 60526359 60526364 +
tatacatctaatcaataaataa

SEQ ID NO: 205106 - DNA, 22 bp, Artificial Sequence
  Synthetic oligonucleotide; CTA chr2 60526344 60526365 60526361 60526366 +
tacatctaatcaataaataaat

SEQ ID NO: 205107 - DNA, 22 bp, Artificial Sequence
  Synthetic oligonucleotide; CTA chr2 60526352 60526373 60526369 60526374 +
atcaataaataaataagacaaa

SEQ ID NO: 205108 - DNA, 22 bp, Artificial Sequence
  Synthetic oligonucleotide; TTT chr2 60526391 60526412 60526408 60526413 +
atcctttaccatttgggaagtg

SEQ ID NO: 205109 - DNA, 22 bp, Artificial Sequence
  Synthetic oligonucleotide; TTA chr2 60526392 60526413 60526409 60526414 +
tcctttaccatttgggaagtgt

SEQ ID NO: 205110 - DNA, 22 bp, Artificial Sequence
  Synthetic oligonucleotide; CTT chr2 60526397 60526418 60526414 60526419 +
taccatttgggaagtgtacatt

SEQ ID NO: 205111 - DNA, 22 bp, Artificial Sequence
  Synthetic oligonucleotide; TTT chr2 60526398 60526419 60526415 60526420 +
accatttgggaagtgtacatta

SEQ ID NO: 205112 - DNA, 22 bp, Artificial Sequence
  Synthetic oligonucleotide; TTA chr2 60526399 60526420 60526416 60526421 +
ccatttgggaagtgtacattaa

SEQ ID NO: 205113 - DNA, 22 bp, Artificial Sequence
  Synthetic oligonucleotide; TTT chr2 60526405 60526426 60526422 60526427 +
gggaagtgtacattaattactg

SEQ ID NO: 205114 - DNA, 22 bp, Artificial Sequence
  Synthetic oligonucleotide; TTG chr2 60526406 60526427 60526423 60526428 +
ggaagtgtacattaattactgc

SEQ ID NO: 205115 - DNA, 22 bp, Artificial Sequence
  Synthetic oligonucleotide; TTA chr2 60526420 60526441 60526437 60526442 +
attactgcagattgtctcctat

SEQ ID NO: 205116 - DNA, 22 bp, Artificial Sequence
  Synthetic oligonucleotide; TTA chr2 60526424 60526445 60526441 60526446 +
ctgcagattgtctcctatgcat

SEQ ID NO: 205117 - DNA, 22 bp, Artificial Sequence
  Synthetic oligonucleotide; CTG chr2 60526427 60526448 60526444 60526449 +
cagattgtctcctatgcatctc

SEQ ID NO: 205118 - DNA, 22 bp, Artificial Sequence
  Synthetic oligonucleotide; TTG chr2 60526434 60526455 60526451 60526456 +
tctcctatgcatctccccccac

SEQ ID NO: 205119 - DNA, 22 bp, Artificial Sequence
  Synthetic oligonucleotide; CTC chr2 60526438 60526459 60526455 60526460 +
ctatgcatctccccccaccccc

SEQ ID NO: 205120 - DNA, 22 bp, Artificial Sequence
  Synthetic oligonucleotide; CTA chr2 60526441 60526462 60526458 60526463 +
tgcatctccccccaccccctct

SEQ ID NO: 205121 - DNA, 22 bp, Artificial Sequence
  Synthetic oligonucleotide; CTC chr2 60526449 60526470 60526466 60526471 +
cccccaccccctctgcatcgca

SEQ ID NO: 205122 - DNA, 22 bp, Artificial Sequence
  Synthetic oligonucleotide; CTC chr2 60526462 60526483 60526479 60526484 +
tgcatcgcagacagcagtgctc

SEQ ID NO: 205123 - DNA, 22 bp, Artificial Sequence
  Synthetic oligonucleotide; CTG chr2 60526464 60526485 60526481 60526486 +
catcgcagacagcagtgctcaa

SEQ ID NO: 205124 - DNA, 22 bp, Artificial Sequence
  Synthetic oligonucleotide; CTC chr2 60526484 60526505 60526501 60526506 +
aaaagggtccgcaaaataaaaa

SEQ ID NO: 205125 - DNA, 22 bp, Artificial Sequence
  Synthetic oligonucleotide; TTA chr2 60526521 60526542 60526538 60526543 +
aatgggtatttataattagaac

SEQ ID NO: 205126 - DNA, 22 bp, Artificial Sequence
  Synthetic oligonucleotide; TTT chr2 60526532 60526553 60526549 60526554 +
ataattagaacttaataatttg

SEQ ID NO: 205127 - DNA, 22 bp, Artificial Sequence
  Synthetic oligonucleotide; TTA chr2 60526533 60526554 60526550 60526555 +
taattagaacttaataatttgc

SEQ ID NO: 205128 - DNA, 22 bp, Artificial Sequence
  Synthetic oligonucleotide; TTA chr2 60526539 60526560 60526556 60526561 +
gaacttaataatttgcatcagg

SEQ ID NO: 205129 - DNA, 22 bp, Artificial Sequence
  Synthetic oligonucleotide; CTT chr2 60526545 60526566 60526562 60526567 +
aataatttgcatcagggacaaa

SEQ ID NO: 205130 - DNA, 22 bp, Artificial Sequence
  Synthetic oligonucleotide; TTA chr2 60526546 60526567 60526563 60526568 +
ataatttgcatcagggacaaat

SEQ ID NO: 205131 - DNA, 22 bp, Artificial Sequence
  Synthetic oligonucleotide; TTT chr2 60526553 60526574 60526570 60526575 +
gcatcagggacaaatgagctct

SEQ ID NO: 205132 - DNA, 22 bp, Artificial Sequence
  Synthetic oligonucleotide; TTG chr2 60526554 60526575 60526571 60526576 +
catcagggacaaatgagctctg

SEQ ID NO: 205133 - DNA, 22 bp, Artificial Sequence
  Synthetic oligonucleotide; CTC chr2 60526574 60526595 60526591 60526596 +
tgattttaatctgcagcgcatt

SEQ ID NO: 205134 - DNA, 22 bp, Artificial Sequence
  Synthetic oligonucleotide; CTG chr2 60526576 60526597 60526593 60526598 +
attttaatctgcagcgcattta

SEQ ID NO: 205135 - DNA, 22 bp, Artificial Sequence
  Synthetic oligonucleotide; TTT chr2 60526580 60526601 60526597 60526602 +
taatctgcagcgcatttagatt

SEQ ID NO: 205136 - DNA, 22 bp, Artificial Sequence
  Synthetic oligonucleotide; TTT chr2 60526581 60526602 60526598 60526603 +
aatctgcagcgcatttagatta

SEQ ID NO: 205137 - DNA, 22 bp, Artificial Sequence
  Synthetic oligonucleotide; TTA chr2 60526582 60526603 60526599 60526604 +
atctgcagcgcatttagattag

SEQ ID NO: 205138 - DNA, 22 bp, Artificial Sequence
  Synthetic oligonucleotide; CTG chr2 60526587 60526608 60526604 60526609 +
cagcgcatttagattagcccaa

SEQ ID NO: 205139 - DNA, 22 bp, Artificial Sequence
  Synthetic oligonucleotide; TTT chr2 60526597 60526618 60526614 60526619 +
agattagcccaaagatagtgta

SEQ ID NO: 205140 - DNA, 22 bp, Artificial Sequence
  Synthetic oligonucleotide; TTA chr2 60526598 60526619 60526615 60526620 +
gattagcccaaagatagtgtaa

SEQ ID NO: 205141 - DNA, 22 bp, Artificial Sequence
  Synthetic oligonucleotide; TTA chr2 60526603 60526624 60526620 60526625 +
gcccaaagatagtgtaatttga

SEQ ID NO: 205142 - DNA, 22 bp, Artificial Sequence
  Synthetic oligonucleotide; TTT chr2 60526623 60526644 60526640 60526645 +
gatggtttataggcctcctctc

SEQ ID NO: 205143 - DNA, 22 bp, Artificial Sequence
  Synthetic oligonucleotide; TTG chr2 60526624 60526645 60526641 60526646 +
atggtttataggcctcctctcg

SEQ ID NO: 205144 - DNA, 22 bp, Artificial Sequence
  Synthetic oligonucleotide; TTT chr2 60526631 60526652 60526648 60526653 +
ataggcctcctctcggattatg

SEQ ID NO: 205145 - DNA, 22 bp, Artificial Sequence
  Synthetic oligonucleotide; TTA chr2 60526632 60526653 60526649 60526654 +
taggcctcctctcggattatga

SEQ ID NO: 205146 - DNA, 22 bp, Artificial Sequence
  Synthetic oligonucleotide; CTC chr2 60526640 60526661 60526657 60526662 +
ctctcggattatgaaacaatac

SEQ ID NO: 205147 - DNA, 22 bp, Artificial Sequence
  Synthetic oligonucleotide; CTC chr2 60526643 60526664 60526660 60526665 +
tcggattatgaaacaataccaa

SEQ ID NO: 205148 - DNA, 22 bp, Artificial Sequence
  Synthetic oligonucleotide; CTC chr2 60526645 60526666 60526662 60526667 +
ggattatgaaacaataccaagc

SEQ ID NO: 205149 - DNA, 22 bp, Artificial Sequence
  Synthetic oligonucleotide; TTA chr2 60526651 60526672 60526668 60526673 +
tgaaacaataccaagccttcaa

SEQ ID NO: 205150 - DNA, 22 bp, Artificial Sequence
  Synthetic oligonucleotide; CTT chr2 60526670 60526691 60526687 60526692 +
caagtgcagtgtgtctatgtca

SEQ ID NO: 205151 - DNA, 22 bp, Artificial Sequence
  Synthetic oligonucleotide; TTC chr2 60526671 60526692 60526688 60526693 +
aagtgcagtgtgtctatgtcag

SEQ ID NO: 205152 - DNA, 22 bp, Artificial Sequence
  Synthetic oligonucleotide; CTA chr2 60526687 60526708 60526704 60526709 +
tgtcaggagggtgttaaagaag

SEQ ID NO: 205153 - DNA, 22 bp, Artificial Sequence
  Synthetic oligonucleotide; TTA chr2 60526703 60526724 60526720 60526725 +
aagaagaagatgcaatgaaaat

SEQ ID NO: 205154 - DNA, 22 bp, Artificial Sequence
  Synthetic oligonucleotide; TTT chr2 60526729 60526750 60526746 60526751 +
gacaacgtgaaagcagccataa

SEQ ID NO: 205155 - DNA, 22 bp, Artificial Sequence
  Synthetic oligonucleotide; TTG chr2 60526730 60526751 60526747 60526752 +
acaacgtgaaagcagccataaa

SEQ ID NO: 205156 - DNA, 22 bp, Artificial Sequence
  Synthetic oligonucleotide; TTA chr2 60526755 60526776 60526772 60526777 +
catgacaactgtgtaaaagtca

SEQ ID NO: 205157 - DNA, 22 bp, Artificial Sequence
  Synthetic oligonucleotide; CTG chr2 60526766 60526787 60526783 60526788 +
tgtaaaagtcatgatgaaacaa

SEQ ID NO: 205158 - DNA, 22 bp, Artificial Sequence
  Synthetic oligonucleotide; CTG chr2 60526799 60526820 60526816 60526821 +
acctataatgcgtctgattcat

SEQ ID NO: 205159 - DNA, 22 bp, Artificial Sequence
  Synthetic oligonucleotide; CTA chr2 60526804 60526825 60526821 60526826 +
taatgcgtctgattcattgtga

SEQ ID NO: 205160 - DNA, 22 bp, Artificial Sequence
  Synthetic oligonucleotide; CTG chr2 60526815 60526836 60526832 60526837 +
attcattgtgacacacacaact

SEQ ID NO: 205161 - DNA, 22 bp, Artificial Sequence
  Synthetic oligonucleotide; TTC chr2 60526819 60526840 60526836 60526841 +
attgtgacacacacaactccct

SEQ ID NO: 205162 - DNA, 22 bp, Artificial Sequence
  Synthetic oligonucleotide; TTG chr2 60526823 60526844 60526840 60526845 +
tgacacacacaactccctgcgc

SEQ ID NO: 205163 - DNA, 22 bp, Artificial Sequence
  Synthetic oligonucleotide; CTC chr2 60526838 60526859 60526855 60526860 +
cctgcgctaatctctgcccagc

SEQ ID NO: 205164 - DNA, 22 bp, Artificial Sequence
  Synthetic oligonucleotide; CTG chr2 60526842 60526863 60526859 60526864 +
cgctaatctctgcccagccaac

SEQ ID NO: 205165 - DNA, 22 bp, Artificial Sequence
  Synthetic oligonucleotide; CTA chr2 60526847 60526868 60526864 60526869 +
atctctgcccagccaacgcatt

SEQ ID NO: 205166 - DNA, 22 bp, Artificial Sequence
  Synthetic oligonucleotide; CTC chr2 60526852 60526873 60526869 60526874 +
tgcccagccaacgcattcttaa

SEQ ID NO: 205167 - DNA, 22 bp, Artificial Sequence
  Synthetic oligonucleotide; CTG chr2 60526854 60526875 60526871 60526876 +
cccagccaacgcattcttaagc

SEQ ID NO: 205168 - DNA, 22 bp, Artificial Sequence
  Synthetic oligonucleotide; TTC chr2 60526870 60526891 60526887 60526892 +
ttaagcggggaactacttagca

SEQ ID NO: 205169 - DNA, 22 bp, Artificial Sequence
  Synthetic oligonucleotide; CTT chr2 60526872 60526893 60526889 60526894 +
aagcggggaactacttagcacc

SEQ ID NO: 205170 - DNA, 22 bp, Artificial Sequence
  Synthetic oligonucleotide; TTA chr2 60526873 60526894 60526890 60526895 +
agcggggaactacttagcacca

SEQ ID NO: 205171 - DNA, 22 bp, Artificial Sequence
  Synthetic oligonucleotide; CTA chr2 60526885 60526906 60526902 60526907 +
cttagcaccaggaacgttgtaa

SEQ ID NO: 205172 - DNA, 22 bp, Artificial Sequence
  Synthetic oligonucleotide; CTT chr2 60526888 60526909 60526905 60526910 +
agcaccaggaacgttgtaaatt

SEQ ID NO: 205173 - DNA, 22 bp, Artificial Sequence
  Synthetic oligonucleotide; TTA chr2 60526889 60526910 60526906 60526911 +
gcaccaggaacgttgtaaatta

SEQ ID NO: 205174 - DNA, 22 bp, Artificial Sequence
  Synthetic oligonucleotide; TTG chr2 60526904 60526925 60526921 60526926 +
taaattatcactagtcaacagc

SEQ ID NO: 205175 - DNA, 22 bp, Artificial Sequence
  Synthetic oligonucleotide; TTA chr2 60526911 60526932 60526928 60526933 +
tcactagtcaacagcattgatt

SEQ ID NO: 205176 - DNA, 22 bp, Artificial Sequence
  Synthetic oligonucleotide; CTA chr2 60526917 60526938 60526934 60526939 +
gtcaacagcattgatttttagt

SEQ ID NO: 205177 - DNA, 22 bp, Artificial Sequence
  Synthetic oligonucleotide; TTG chr2 60526930 60526951 60526947 60526952 +
atttttagtcgacatttcaatc

SEQ ID NO: 205178 - DNA, 22 bp, Artificial Sequence
  Synthetic oligonucleotide; TTT chr2 60526934 60526955 60526951 60526956 +
ttagtcgacatttcaatcaggt

SEQ ID NO: 205179 - DNA, 22 bp, Artificial Sequence
  Synthetic oligonucleotide; TTT chr2 60526935 60526956 60526952 60526957 +
tagtcgacatttcaatcaggtt

SEQ ID NO: 205180 - DNA, 22 bp, Artificial Sequence
  Synthetic oligonucleotide; TTT chr2 60526936 60526957 60526953 60526958 +
agtcgacatttcaatcaggttg

SEQ ID NO: 205181 - DNA, 22 bp, Artificial Sequence
  Synthetic oligonucleotide; TTA chr2 60526937 60526958 60526954 60526959 +
gtcgacatttcaatcaggttga

SEQ ID NO: 205182 - DNA, 22 bp, Artificial Sequence
  Synthetic oligonucleotide; TTT chr2 60526947 60526968 60526964 60526969 +
caatcaggttgaagtagaaata

SEQ ID NO: 205183 - DNA, 22 bp, Artificial Sequence
  Synthetic oligonucleotide; TTC chr2 60526948 60526969 60526965 60526970 +
aatcaggttgaagtagaaatac

SEQ ID NO: 205184 - DNA, 22 bp, Artificial Sequence
  Synthetic oligonucleotide; TTG chr2 60526958 60526979 60526975 60526980 +
aagtagaaatactacccggctc

SEQ ID NO: 205185 - DNA, 22 bp, Artificial Sequence
  Synthetic oligonucleotide; CTA chr2 60526972 60526993 60526989 60526994 +
cccggctcatccaacagcctct

SEQ ID NO: 205186 - DNA, 22 bp, Artificial Sequence
  Synthetic oligonucleotide; CTC chr2 60526980 60527001 60526997 60527002 +
atccaacagcctcttaaccagt

SEQ ID NO: 205187 - DNA, 22 bp, Artificial Sequence
  Synthetic oligonucleotide; CTC chr2 60526993 60527014 60527010 60527015 +
ttaaccagtccactgcccctct

SEQ ID NO: 205188 - DNA, 22 bp, Artificial Sequence
  Synthetic oligonucleotide; CTT chr2 60526995 60527016 60527012 60527017 +
aaccagtccactgcccctctga

SEQ ID NO: 205189 - DNA, 22 bp, Artificial Sequence
  Synthetic oligonucleotide; TTA chr2 60526996 60527017 60527013 60527018 +
accagtccactgcccctctgag

SEQ ID NO: 205190 - DNA, 22 bp, Artificial Sequence
  Synthetic oligonucleotide; CTG chr2 60527008 60527029 60527025 60527030 +
cccctctgaggtctccccggtt

SEQ ID NO: 205191 - DNA, 22 bp, Artificial Sequence
  Synthetic oligonucleotide; CTC chr2 60527014 60527035 60527031 60527036 +
tgaggtctccccggttatggct

SEQ ID NO: 205192 - DNA, 22 bp, Artificial Sequence
  Synthetic oligonucleotide; CTG chr2 60527016 60527037 60527033 60527038 +
aggtctccccggttatggcttt

SEQ ID NO: 205193 - DNA, 22 bp, Artificial Sequence
  Synthetic oligonucleotide; CTC chr2 60527023 60527044 60527040 60527045 +
cccggttatggctttgctaaat

SEQ ID NO: 205194 - DNA, 22 bp, Artificial Sequence
  Synthetic oligonucleotide; TTA chr2 60527031 60527052 60527048 60527053 +
tggctttgctaaatttccattg

SEQ ID NO: 205195 - DNA, 22 bp, Artificial Sequence
  Synthetic oligonucleotide; CTT chr2 60527037 60527058 60527054 60527059 +
tgctaaatttccattgctctca

SEQ ID NO: 205196 - DNA, 22 bp, Artificial Sequence
  Synthetic oligonucleotide; TTT chr2 60527038 60527059 60527055 60527060 +
gctaaatttccattgctctcac

SEQ ID NO: 205197 - DNA, 22 bp, Artificial Sequence
  Synthetic oligonucleotide; TTG chr2 60527039 60527060 60527056 60527061 +
ctaaatttccattgctctcacc

SEQ ID NO: 205198 - DNA, 22 bp, Artificial Sequence
  Synthetic oligonucleotide; CTA chr2 60527042 60527063 60527059 60527064 +
aatttccattgctctcaccatt

SEQ ID NO: 205199 - DNA, 22 bp, Artificial Sequence
  Synthetic oligonucleotide; TTT chr2 60527047 60527068 60527064 60527069 +
ccattgctctcaccattcgata

SEQ ID NO: 205200 - DNA, 22 bp, Artificial Sequence
  Synthetic oligonucleotide; TTC chr2 60527048 60527069 60527065 60527070 +
cattgctctcaccattcgatat

SEQ ID NO: 205201 - DNA, 22 bp, Artificial Sequence
  Synthetic oligonucleotide; TTG chr2 60527053 60527074 60527070 60527075 +
ctctcaccattcgatatttatt

SEQ ID NO: 205202 - DNA, 22 bp, Artificial Sequence
  Synthetic oligonucleotide; CTC chr2 60527056 60527077 60527073 60527078 +
tcaccattcgatatttattgta

SEQ ID NO: 205203 - DNA, 22 bp, Artificial Sequence
  Synthetic oligonucleotide; CTC chr2 60527058 60527079 60527075 60527080 +
accattcgatatttattgtagc

SEQ ID NO: 205204 - DNA, 22 bp, Artificial Sequence
  Synthetic oligonucleotide; TTC chr2 60527065 60527086 60527082 60527087 +
gatatttattgtagctttgcca

SEQ ID NO: 205205 - DNA, 22 bp, Artificial Sequence
  Synthetic oligonucleotide; TTT chr2 60527072 60527093 60527089 60527094 +
attgtagctttgccacatccag

SEQ ID NO: 205206 - DNA, 22 bp, Artificial Sequence
  Synthetic oligonucleotide; TTA chr2 60527073 60527094 60527090 60527095 +
ttgtagctttgccacatccagg

SEQ ID NO: 205207 - DNA, 22 bp, Artificial Sequence
  Synthetic oligonucleotide; TTG chr2 60527076 60527097 60527093 60527098 +
tagctttgccacatccaggcac

SEQ ID NO: 205208 - DNA, 22 bp, Artificial Sequence
  Synthetic oligonucleotide; CTT chr2 60527082 60527103 60527099 60527104 +
tgccacatccaggcacttggcc

SEQ ID NO: 205209 - DNA, 22 bp, Artificial Sequence
  Synthetic oligonucleotide; TTT chr2 60527083 60527104 60527100 60527105 +
gccacatccaggcacttggcct

SEQ ID NO: 205210 - DNA, 22 bp, Artificial Sequence
  Synthetic oligonucleotide; TTG chr2 60527084 60527105 60527101 60527106 +
ccacatccaggcacttggcctg

SEQ ID NO: 205211 - DNA, 22 bp, Artificial Sequence
  Synthetic oligonucleotide; CTT chr2 60527100 60527121 60527117 60527122 +
ggcctgaagggtcaccggcctg

SEQ ID NO: 205212 - DNA, 22 bp, Artificial Sequence
  Synthetic oligonucleotide; TTG chr2 60527101 60527122 60527118 60527123 +
gcctgaagggtcaccggcctgc

SEQ ID NO: 205213 - DNA, 22 bp, Artificial Sequence
  Synthetic oligonucleotide; CTG chr2 60527106 60527127 60527123 60527128 +
aagggtcaccggcctgcctctt

SEQ ID NO: 205214 - DNA, 22 bp, Artificial Sequence
  Synthetic oligonucleotide; CTG chr2 60527122 60527143 60527139 60527144 +
cctcttgggacatcaaatttgt

SEQ ID NO: 205215 - DNA, 22 bp, Artificial Sequence
  Synthetic oligonucleotide; CTC chr2 60527126 60527147 60527143 60527148 +
ttgggacatcaaatttgtgctt

SEQ ID NO: 205216 - DNA, 22 bp, Artificial Sequence
  Synthetic oligonucleotide; CTT chr2 60527128 60527149 60527145 60527150 +
gggacatcaaatttgtgcttac

SEQ ID NO: 205217 - DNA, 22 bp, Artificial Sequence
  Synthetic oligonucleotide; TTG chr2 60527129 60527150 60527146 60527151 +
ggacatcaaatttgtgcttacc

SEQ ID NO: 205218 - DNA, 22 bp, Artificial Sequence
  Synthetic oligonucleotide; TTT chr2 60527142 60527163 60527159 60527164 +
gtgcttacctaacgaaggcaga

SEQ ID NO: 205219 - DNA, 22 bp, Artificial Sequence
  Synthetic oligonucleotide; TTG chr2 60527143 60527164 60527160 60527165 +
tgcttacctaacgaaggcagaa

SEQ ID NO: 205220 - DNA, 22 bp, Artificial Sequence
  Synthetic oligonucleotide; CTT chr2 60527148 60527169 60527165 60527170 +
acctaacgaaggcagaaacaga

SEQ ID NO: 205221 - DNA, 22 bp, Artificial Sequence
  Synthetic oligonucleotide; TTA chr2 60527149 60527170 60527166 60527171 +
cctaacgaaggcagaaacagaa

SEQ ID NO: 205222 - DNA, 22 bp, Artificial Sequence
  Synthetic oligonucleotide; CTA chr2 60527153 60527174 60527170 60527175 +
acgaaggcagaaacagaaaaag

SEQ ID NO: 205223 - DNA, 22 bp, Artificial Sequence
  Synthetic oligonucleotide; CTG chr2 60527213 60527234 60527230 60527235 +
attttcactgattttcaaggga

SEQ ID NO: 205224 - DNA, 22 bp, Artificial Sequence
  Synthetic oligonucleotide; TTT chr2 60527217 60527238 60527234 60527239 +
tcactgattttcaagggaagag

SEQ ID NO: 205225 - DNA, 22 bp, Artificial Sequence
  Synthetic oligonucleotide; TTT chr2 60527218 60527239 60527235 60527240 +
cactgattttcaagggaagaga

SEQ ID NO: 205226 - DNA, 22 bp, Artificial Sequence
  Synthetic oligonucleotide; TTC chr2 60527219 60527240 60527236 60527241 +
actgattttcaagggaagagaa

SEQ ID NO: 205227 - DNA, 22 bp, Artificial Sequence
  Synthetic oligonucleotide; CTG chr2 60527223 60527244 60527240 60527245 +
attttcaagggaagagaaggaa

SEQ ID NO: 205228 - DNA, 22 bp, Artificial Sequence
  Synthetic oligonucleotide; TTT chr2 60527227 60527248 60527244 60527249 +
tcaagggaagagaaggaaaact

SEQ ID NO: 205229 - DNA, 22 bp, Artificial Sequence
  Synthetic oligonucleotide; TTT chr2 60527228 60527249 60527245 60527250 +
caagggaagagaaggaaaacta

SEQ ID NO: 205230 - DNA, 22 bp, Artificial Sequence
  Synthetic oligonucleotide; TTC chr2 60527229 60527250 60527246 60527251 +
aagggaagagaaggaaaactag

SEQ ID NO: 205231 - DNA, 22 bp, Artificial Sequence
  Synthetic oligonucleotide; CTA chr2 60527250 60527271 60527267 60527272 +
gggggtgcgagcgagggaaata

SEQ ID NO: 205232 - DNA, 22 bp, Artificial Sequence
  Synthetic oligonucleotide; TTC chr2 60527282 60527303 60527299 60527304 +
taaagccatgatacgcctttta

SEQ ID NO: 205233 - DNA, 22 bp, Artificial Sequence
  Synthetic oligonucleotide; CTA chr2 60527284 60527305 60527301 60527306 +
aagccatgatacgccttttatc

SEQ ID NO: 205234 - DNA, 22 bp, Artificial Sequence
  Synthetic oligonucleotide; CTT chr2 60527301 60527322 60527318 60527323 +
ttatcatttcagctttatcatt

SEQ ID NO: 205235 - DNA, 22 bp, Artificial Sequence
  Synthetic oligonucleotide; TTT chr2 60527302 60527323 60527319 60527324 +
tatcatttcagctttatcattt

SEQ ID NO: 205236 - DNA, 22 bp, Artificial Sequence
  Synthetic oligonucleotide; TTT chr2 60527303 60527324 60527320 60527325 +
atcatttcagctttatcatttc

SEQ ID NO: 205237 - DNA, 22 bp, Artificial Sequence
  Synthetic oligonucleotide; TTA chr2 60527304 60527325 60527321 60527326 +
tcatttcagctttatcatttca

SEQ ID NO: 205238 - DNA, 22 bp, Artificial Sequence
  Synthetic oligonucleotide; TTT chr2 60527310 60527331 60527327 60527332 +
cagctttatcatttcagtctag

SEQ ID NO: 205239 - DNA, 22 bp, Artificial Sequence
  Synthetic oligonucleotide; TTC chr2 60527311 60527332 60527328 60527333 +
agctttatcatttcagtctagg

SEQ ID NO: 205240 - DNA, 22 bp, Artificial Sequence
  Synthetic oligonucleotide; CTT chr2 60527316 60527337 60527333 60527338 +
tatcatttcagtctaggagacc

SEQ ID NO: 205241 - DNA, 22 bp, Artificial Sequence
  Synthetic oligonucleotide; TTT chr2 60527317 60527338 60527334 60527339 +
atcatttcagtctaggagaccc

SEQ ID NO: 205242 - DNA, 22 bp, Artificial Sequence
  Synthetic oligonucleotide; TTA chr2 60527318 60527339 60527335 60527340 +
tcatttcagtctaggagaccca

SEQ ID NO: 205243 - DNA, 22 bp, Artificial Sequence
  Synthetic oligonucleotide; TTT chr2 60527324 60527345 60527341 60527346 +
cagtctaggagacccagcaaat

SEQ ID NO: 205244 - DNA, 22 bp, Artificial Sequence
  Synthetic oligonucleotide; TTC chr2 60527325 60527346 60527342 60527347 +
agtctaggagacccagcaaata

SEQ ID NO: 205245 - DNA, 22 bp, Artificial Sequence
  Synthetic oligonucleotide; CTA chr2 60527331 60527352 60527348 60527353 +
ggagacccagcaaataaaacta

SEQ ID NO: 205246 - DNA, 22 bp, Artificial Sequence
  Synthetic oligonucleotide; CTA chr2 60527353 60527374 60527370 60527375 +
agagcttctcttccagggtgac

SEQ ID NO: 205247 - DNA, 22 bp, Artificial Sequence
  Synthetic oligonucleotide; CTT chr2 60527360 60527381 60527377 60527382 +
ctcttccagggtgacaagggag

SEQ ID NO: 205248 - DNA, 22 bp, Artificial Sequence
  Synthetic oligonucleotide; TTC chr2 60527361 60527382 60527378 60527383 +
tcttccagggtgacaagggaga

SEQ ID NO: 205249 - DNA, 22 bp, Artificial Sequence
  Synthetic oligonucleotide; CTC chr2 60527363 60527384 60527380 60527385 +
ttccagggtgacaagggagaac

SEQ ID NO: 205250 - DNA, 22 bp, Artificial Sequence
  Synthetic oligonucleotide; CTT chr2 60527365 60527386 60527382 60527387 +
ccagggtgacaagggagaacca

SEQ ID NO: 205251 - DNA, 22 bp, Artificial Sequence
  Synthetic oligonucleotide; TTC chr2 60527366 60527387 60527383 60527388 +
cagggtgacaagggagaaccac

SEQ ID NO: 205252 - DNA, 22 bp, Artificial Sequence
  Synthetic oligonucleotide; CTA chr2 60527390 60527411 60527407 60527412 +
cactcttgacccaagggtatgt

SEQ ID NO: 205253 - DNA, 22 bp, Artificial Sequence
  Synthetic oligonucleotide; CTC chr2 60527395 60527416 60527412 60527417 +
ttgacccaagggtatgtagaga

SEQ ID NO: 205254 - DNA, 22 bp, Artificial Sequence
  Synthetic oligonucleotide; CTT chr2 60527397 60527418 60527414 60527419 +
gacccaagggtatgtagagaca

SEQ ID NO: 205255 - DNA, 22 bp, Artificial Sequence
  Synthetic oligonucleotide; TTG chr2 60527398 60527419 60527415 60527420 +
acccaagggtatgtagagacaa

SEQ ID NO: 205256 - DNA, 22 bp, Artificial Sequence
  Synthetic oligonucleotide; CTT chr2 60527458 60527479 60527475 60527480 +
gcatgacctccattgaggacgt

SEQ ID NO: 205257 - DNA, 22 bp, Artificial Sequence
  Synthetic oligonucleotide; TTG chr2 60527459 60527480 60527476 60527481 +
catgacctccattgaggacgtc

SEQ ID NO: 205258 - DNA, 22 bp, Artificial Sequence
  Synthetic oligonucleotide; CTC chr2 60527468 60527489 60527485 60527490 +
cattgaggacgtccatgccccg

SEQ ID NO: 205259 - DNA, 22 bp, Artificial Sequence
  Synthetic oligonucleotide; TTG chr2 60527473 60527494 60527490 60527495 +
aggacgtccatgccccgggaca

SEQ ID NO: 205260 - DNA, 22 bp, Artificial Sequence
  Synthetic oligonucleotide; CTT chr2 60527519 60527540 60527536 60527541 +
tggagctcttgacccacatgga

SEQ ID NO: 205261 - DNA, 22 bp, Artificial Sequence
  Synthetic oligonucleotide; TTT chr2 60527520 60527541 60527537 60527542 +
ggagctcttgacccacatggat

SEQ ID NO: 205262 - DNA, 22 bp, Artificial Sequence
  Synthetic oligonucleotide; TTG chr2 60527521 60527542 60527538 60527543 +
gagctcttgacccacatggatt

SEQ ID NO: 205263 - DNA, 22 bp, Artificial Sequence
  Synthetic oligonucleotide; CTC chr2 60527527 60527548 60527544 60527549 +
ttgacccacatggattctcagc

SEQ ID NO: 205264 - DNA, 22 bp, Artificial Sequence
  Synthetic oligonucleotide; CTT chr2 60527529 60527550 60527546 60527551 +
gacccacatggattctcagcag

SEQ ID NO: 205265 - DNA, 22 bp, Artificial Sequence
  Synthetic oligonucleotide; TTG chr2 60527530 60527551 60527547 60527552 +
acccacatggattctcagcagc

SEQ ID NO: 205266 - DNA, 22 bp, Artificial Sequence
  Synthetic oligonucleotide; TTC chr2 60527544 60527565 60527561 60527566 +
tcagcagccacctccatcccac

SEQ ID NO: 205267 - DNA, 22 bp, Artificial Sequence
  Synthetic oligonucleotide; CTC chr2 60527546 60527567 60527563 60527568 +
agcagccacctccatcccacct

SEQ ID NO: 205268 - DNA, 22 bp, Artificial Sequence
  Synthetic oligonucleotide; CTC chr2 60527558 60527579 60527575 60527580 +
catcccacctcaaactcagaag

SEQ ID NO: 205269 - DNA, 22 bp, Artificial Sequence
  Synthetic oligonucleotide; CTC chr2 60527569 60527590 60527586 60527591 +
aaactcagaagacaacctggat

SEQ ID NO: 205270 - DNA, 22 bp, Artificial Sequence
  Synthetic oligonucleotide; CTC chr2 60527575 60527596 60527592 60527597 +
agaagacaacctggatgtgacc

SEQ ID NO: 205271 - DNA, 22 bp, Artificial Sequence
  Synthetic oligonucleotide; CTG chr2 60527588 60527609 60527605 60527610 +
gatgtgaccgacaacttctttg

SEQ ID NO: 205272 - DNA, 22 bp, Artificial Sequence
  Synthetic oligonucleotide; CTT chr2 60527605 60527626 60527622 60527627 +
ctttgtgatggatctgaacagc

SEQ ID NO: 205273 - DNA, 22 bp, Artificial Sequence
  Synthetic oligonucleotide; TTC chr2 60527606 60527627 60527623 60527628 +
tttgtgatggatctgaacagcc

SEQ ID NO: 205274 - DNA, 22 bp, Artificial Sequence
  Synthetic oligonucleotide; CTT chr2 60527608 60527629 60527625 60527630 +
tgtgatggatctgaacagcctc

SEQ ID NO: 205275 - DNA, 22 bp, Artificial Sequence
  Synthetic oligonucleotide; TTT chr2 60527609 60527630 60527626 60527631 +
gtgatggatctgaacagcctcc

SEQ ID NO: 205276 - DNA, 22 bp, Artificial Sequence
  Synthetic oligonucleotide; TTG chr2 60527610 60527631 60527627 60527632 +
tgatggatctgaacagcctccc

SEQ ID NO: 205277 - DNA, 22 bp, Artificial Sequence
  Synthetic oligonucleotide; CTG chr2 60527621 60527642 60527638 60527643 +
aacagcctcccttggttctagc

SEQ ID NO: 205278 - DNA, 22 bp, Artificial Sequence
  Synthetic oligonucleotide; CTC chr2 60527630 60527651 60527647 60527652 +
ccttggttctagcagaaggact

SEQ ID NO: 205279 - DNA, 22 bp, Artificial Sequence
  Synthetic oligonucleotide; CTT chr2 60527634 60527655 60527651 60527656 +
ggttctagcagaaggacttacc

SEQ ID NO: 205280 - DNA, 22 bp, Artificial Sequence
  Synthetic oligonucleotide; TTG chr2 60527635 60527656 60527652 60527657 +
gttctagcagaaggacttacca

SEQ ID NO: 205281 - DNA, 22 bp, Artificial Sequence
  Synthetic oligonucleotide; TTC chr2 60527639 60527660 60527656 60527661 +
tagcagaaggacttaccaagtg

SEQ ID NO: 205282 - DNA, 22 bp, Artificial Sequence
  Synthetic oligonucleotide; CTA chr2 60527641 60527662 60527658 60527663 +
gcagaaggacttaccaagtgag

SEQ ID NO: 205283 - DNA, 22 bp, Artificial Sequence
  Synthetic oligonucleotide; CTT chr2 60527653 60527674 60527670 60527675 +
accaagtgagcagagctcccat

SEQ ID NO: 205284 - DNA, 22 bp, Artificial Sequence
  Synthetic oligonucleotide; TTA chr2 60527654 60527675 60527671 60527676 +
ccaagtgagcagagctcccatc

SEQ ID NO: 205285 - DNA, 22 bp, Artificial Sequence
  Synthetic oligonucleotide; CTC chr2 60527671 60527692 60527688 60527693 +
ccatccgatactcgccagtgct

SEQ ID NO: 205286 - DNA, 22 bp, Artificial Sequence
  Synthetic oligonucleotide; CTC chr2 60527684 60527705 60527701 60527706 +
gccagtgctgaggccaactctt

SEQ ID NO: 205287 - DNA, 22 bp, Artificial Sequence
  Synthetic oligonucleotide; CTG chr2 60527694 60527715 60527711 60527716 +
aggccaactcttccactcctcc

SEQ ID NO: 205288 - DNA, 22 bp, Artificial Sequence
  Synthetic oligonucleotide; CTC chr2 60527704 60527725 60527721 60527726 +
ttccactcctcccacggggcct

SEQ ID NO: 205289 - DNA, 22 bp, Artificial Sequence
  Synthetic oligonucleotide; CTT chr2 60527706 60527727 60527723 60527728 +
ccactcctcccacggggcctcc

SEQ ID NO: 205290 - DNA, 22 bp, Artificial Sequence
  Synthetic oligonucleotide; TTC chr2 60527707 60527728 60527724 60527729 +
cactcctcccacggggcctccg

SEQ ID NO: 205291 - DNA, 22 bp, Artificial Sequence
  Synthetic oligonucleotide; CTC chr2 60527712 60527733 60527729 60527734 +
ctcccacggggcctccgcatga

SEQ ID NO: 205292 - DNA, 22 bp, Artificial Sequence
  Synthetic oligonucleotide; CTC chr2 60527715 60527736 60527732 60527737 +
ccacggggcctccgcatgaagt

SEQ ID NO: 205293 - DNA, 22 bp, Artificial Sequence
  Synthetic oligonucleotide; CTC chr2 60527727 60527748 60527744 60527749 +
cgcatgaagtaggcgcttctca

SEQ ID NO: 205294 - DNA, 22 bp, Artificial Sequence
  Synthetic oligonucleotide; CTT chr2 60527745 60527766 60527762 60527767 +
ctcaactaccaaatgattctga

SEQ ID NO: 205295 - DNA, 22 bp, Artificial Sequence
  Synthetic oligonucleotide; TTC chr2 60527746 60527767 60527763 60527768 +
tcaactaccaaatgattctgaa

SEQ ID NO: 205296 - DNA, 22 bp, Artificial Sequence
  Synthetic oligonucleotide; CTC chr2 60527748 60527769 60527765 60527770 +
aactaccaaatgattctgaaat

SEQ ID NO: 205297 - DNA, 22 bp, Artificial Sequence
  Synthetic oligonucleotide; CTA chr2 60527753 60527774 60527770 60527775 +
ccaaatgattctgaaattctct

SEQ ID NO: 205298 - DNA, 22 bp, Artificial Sequence
  Synthetic oligonucleotide; TTC chr2 60527764 60527785 60527781 60527786 +
tgaaattctctcagtggaggtc

SEQ ID NO: 205299 - DNA, 22 bp, Artificial Sequence
  Synthetic oligonucleotide; CTG chr2 60527766 60527787 60527783 60527788 +
aaattctctcagtggaggtcta

SEQ ID NO: 205300 - DNA, 22 bp, Artificial Sequence
  Synthetic oligonucleotide; TTC chr2 60527772 60527793 60527789 60527794 +
tctcagtggaggtctatgttag

SEQ ID NO: 205301 - DNA, 22 bp, Artificial Sequence
  Synthetic oligonucleotide; CTC chr2 60527774 60527795 60527791 60527796 +
tcagtggaggtctatgttagcc

SEQ ID NO: 205302 - DNA, 22 bp, Artificial Sequence
  Synthetic oligonucleotide; CTC chr2 60527776 60527797 60527793 60527798 +
agtggaggtctatgttagcctg

SEQ ID NO: 205303 - DNA, 22 bp, Artificial Sequence
  Synthetic oligonucleotide; CTA chr2 60527788 60527809 60527805 60527810 +
tgttagcctggccaatttgaaa

SEQ ID NO: 205304 - DNA, 22 bp, Artificial Sequence
  Synthetic oligonucleotide; TTA chr2 60527793 60527814 60527810 60527815 +
gcctggccaatttgaaaggatg

SEQ ID NO: 205305 - DNA, 22 bp, Artificial Sequence
  Synthetic oligonucleotide; CTG chr2 60527798 60527819 60527815 60527820 +
gccaatttgaaaggatggagaa

SEQ ID NO: 205306 - DNA, 22 bp, Artificial Sequence
  Synthetic oligonucleotide; TTT chr2 60527806 60527827 60527823 60527828 +
gaaaggatggagaatacaggaa

SEQ ID NO: 205307 - DNA, 22 bp, Artificial Sequence
  Synthetic oligonucleotide; TTG chr2 60527807 60527828 60527824 60527829 +
aaaggatggagaatacaggaaa

SEQ ID NO: 205308 - DNA, 22 bp, Artificial Sequence
  Synthetic oligonucleotide; TTT chr2 60527841 60527862 60527858 60527863 +
ggttttggaatacattgtgtaa

SEQ ID NO: 205309 - DNA, 22 bp, Artificial Sequence
  Synthetic oligonucleotide; TTG chr2 60527842 60527863 60527859 60527864 +
gttttggaatacattgtgtaat

SEQ ID NO: 205310 - DNA, 22 bp, Artificial Sequence
  Synthetic oligonucleotide; TTT chr2 60527846 60527867 60527863 60527868 +
tggaatacattgtgtaatccat

SEQ ID NO: 205311 - DNA, 22 bp, Artificial Sequence
  Synthetic oligonucleotide; TTT chr2 60527847 60527868 60527864 60527869 +
ggaatacattgtgtaatccatc

SEQ ID NO: 205312 - DNA, 22 bp, Artificial Sequence
  Synthetic oligonucleotide; TTG chr2 60527848 60527869 60527865 60527870 +
gaatacattgtgtaatccatct

SEQ ID NO: 205313 - DNA, 22 bp, Artificial Sequence
  Synthetic oligonucleotide; TTG chr2 60527858 60527879 60527875 60527880 +
tgtaatccatctgcaacgaacc

SEQ ID NO: 205314 - DNA, 22 bp, Artificial Sequence
  Synthetic oligonucleotide; CTG chr2 60527871 60527892 60527888 60527893 +
caacgaacctcaggtcttgctt

SEQ ID NO: 205315 - DNA, 22 bp, Artificial Sequence
  Synthetic oligonucleotide; CTC chr2 60527882 60527903 60527899 60527904 +
aggtcttgcttcagcaaatatt

SEQ ID NO: 205316 - DNA, 22 bp, Artificial Sequence
  Synthetic oligonucleotide; CTT chr2 60527889 60527910 60527906 60527911 +
gcttcagcaaatattaatagcg

SEQ ID NO: 205317 - DNA, 22 bp, Artificial Sequence
  Synthetic oligonucleotide; TTG chr2 60527890 60527911 60527907 60527912 +
cttcagcaaatattaatagcgt

SEQ ID NO: 205318 - DNA, 22 bp, Artificial Sequence
  Synthetic oligonucleotide; CTT chr2 60527893 60527914 60527910 60527915 +
cagcaaatattaatagcgtcag

SEQ ID NO: 205319 - DNA, 22 bp, Artificial Sequence
  Synthetic oligonucleotide; TTC chr2 60527894 60527915 60527911 60527916 +
agcaaatattaatagcgtcagg

SEQ ID NO: 205320 - DNA, 22 bp, Artificial Sequence
  Synthetic oligonucleotide; TTA chr2 60527905 60527926 60527922 60527927 +
atagcgtcagggcagcctgtgg

SEQ ID NO: 205321 - DNA, 22 bp, Artificial Sequence
  Synthetic oligonucleotide; CTG chr2 60527924 60527945 60527941 60527946 +
tggagtgactgggagaggccac

SEQ ID NO: 205322 - DNA, 22 bp, Artificial Sequence
  Synthetic oligonucleotide; CTG chr2 60527935 60527956 60527952 60527957 +
ggagaggccaccacgcagctga

SEQ ID NO: 205323 - DNA, 22 bp, Artificial Sequence
  Synthetic oligonucleotide; CTG chr2 60527956 60527977 60527973 60527978 +
aaaacttgcctctggggaagcc

SEQ ID NO: 205324 - DNA, 22 bp, Artificial Sequence
  Synthetic oligonucleotide; CTT chr2 60527963 60527984 60527980 60527985 +
gcctctggggaagccacatgcg

SEQ ID NO: 205325 - DNA, 22 bp, Artificial Sequence
  Synthetic oligonucleotide; TTG chr2 60527964 60527985 60527981 60527986 +
cctctggggaagccacatgcgg

SEQ ID NO: 205326 - DNA, 22 bp, Artificial Sequence
  Synthetic oligonucleotide; CTC chr2 60527968 60527989 60527985 60527990 +
tggggaagccacatgcggatca

SEQ ID NO: 205327 - DNA, 22 bp, Artificial Sequence
  Synthetic oligonucleotide; CTG chr2 60527970 60527991 60527987 60527992 +
gggaagccacatgcggatcata

SEQ ID NO: 205328 - DNA, 22 bp, Artificial Sequence
  Synthetic oligonucleotide; CTG chr2 60528000 60528021 60528017 60528022 +
ttgactgcagtttccattcaaa

SEQ ID NO: 205329 - DNA, 22 bp, Artificial Sequence
  Synthetic oligonucleotide; TTG chr2 60528003 60528024 60528020 60528025 +
actgcagtttccattcaaaact

SEQ ID NO: 205330 - DNA, 22 bp, Artificial Sequence
  Synthetic oligonucleotide; CTG chr2 60528007 60528028 60528024 60528029 +
cagtttccattcaaaacttccc

SEQ ID NO: 205331 - DNA, 22 bp, Artificial Sequence
  Synthetic oligonucleotide; TTT chr2 60528013 60528034 60528030 60528035 +
ccattcaaaacttccctcaagt

SEQ ID NO: 205332 - DNA, 22 bp, Artificial Sequence
  Synthetic oligonucleotide; TTC chr2 60528014 60528035 60528031 60528036 +
cattcaaaacttccctcaagtt

SEQ ID NO: 205333 - DNA, 22 bp, Artificial Sequence
  Synthetic oligonucleotide; TTC chr2 60528019 60528040 60528036 60528041 +
aaaacttccctcaagtttccag

SEQ ID NO: 205334 - DNA, 22 bp, Artificial Sequence
  Synthetic oligonucleotide; CTT chr2 60528026 60528047 60528043 60528048 +
ccctcaagtttccagcatgcct

SEQ ID NO: 205335 - DNA, 22 bp, Artificial Sequence
  Synthetic oligonucleotide; TTC chr2 60528027 60528048 60528044 60528049 +
cctcaagtttccagcatgcctt

SEQ ID NO: 205336 - DNA, 22 bp, Artificial Sequence
  Synthetic oligonucleotide; CTC chr2 60528031 60528052 60528048 60528053 +
aagtttccagcatgccttccgg

SEQ ID NO: 205337 - DNA, 22 bp, Artificial Sequence
  Synthetic oligonucleotide; TTT chr2 60528037 60528058 60528054 60528059 +
ccagcatgccttccggacttgc

SEQ ID NO: 205338 - DNA, 22 bp, Artificial Sequence
  Synthetic oligonucleotide; TTC chr2 60528038 60528059 60528055 60528060 +
cagcatgccttccggacttgcc

SEQ ID NO: 205339 - DNA, 22 bp, Artificial Sequence
  Synthetic oligonucleotide; CTT chr2 60528049 60528070 60528066 60528071 +
ccggacttgccttaccacagcc

SEQ ID NO: 205340 - DNA, 22 bp, Artificial Sequence
  Synthetic oligonucleotide; TTC chr2 60528050 60528071 60528067 60528072 +
cggacttgccttaccacagcct

SEQ ID NO: 205341 - DNA, 22 bp, Artificial Sequence
  Synthetic oligonucleotide; CTT chr2 60528057 60528078 60528074 60528079 +
gccttaccacagccttgttcag

SEQ ID NO: 205342 - DNA, 22 bp, Artificial Sequence
  Synthetic oligonucleotide; TTG chr2 60528058 60528079 60528075 60528080 +
ccttaccacagccttgttcagc

SEQ ID NO: 205343 - DNA, 22 bp, Artificial Sequence
  Synthetic oligonucleotide; CTT chr2 60528062 60528083 60528079 60528084 +
accacagccttgttcagccaga

SEQ ID NO: 205344 - DNA, 22 bp, Artificial Sequence
  Synthetic oligonucleotide; TTA chr2 60528063 60528084 60528080 60528085 +
ccacagccttgttcagccagaa

SEQ ID NO: 205345 - DNA, 22 bp, Artificial Sequence
  Synthetic oligonucleotide; CTT chr2 60528073 60528094 60528090 60528095 +
gttcagccagaaatgaaaacct

SEQ ID NO: 205346 - DNA, 22 bp, Artificial Sequence
  Synthetic oligonucleotide; TTG chr2 60528074 60528095 60528091 60528096 +
ttcagccagaaatgaaaacctc

SEQ ID NO: 205347 - DNA, 22 bp, Artificial Sequence
  Synthetic oligonucleotide; TTC chr2 60528077 60528098 60528094 60528099 +
agccagaaatgaaaacctcctc

SEQ ID NO: 205348 - DNA, 22 bp, Artificial Sequence
  Synthetic oligonucleotide; CTC chr2 60528096 60528117 60528113 60528118 +
ctcgaagcagattatgaccccc

SEQ ID NO: 205349 - DNA, 22 bp, Artificial Sequence
  Synthetic oligonucleotide; CTC chr2 60528099 60528120 60528116 60528121 +
gaagcagattatgaccccccag

SEQ ID NO: 205350 - DNA, 22 bp, Artificial Sequence
  Synthetic oligonucleotide; TTA chr2 60528110 60528131 60528127 60528132 +
tgaccccccagaacccatcgtc

SEQ ID NO: 205351 - DNA, 22 bp, Artificial Sequence
  Synthetic oligonucleotide; CTA chr2 60528135 60528156 60528152 60528157 +
agaaacaccactgccacgcaca

SEQ ID NO: 205352 - DNA, 22 bp, Artificial Sequence
  Synthetic oligonucleotide; CTG chr2 60528148 60528169 60528165 60528170 +
ccacgcacactcactcacactc

SEQ ID NO: 205353 - DNA, 22 bp, Artificial Sequence
  Synthetic oligonucleotide; CTC chr2 60528160 60528181 60528177 60528182 +
actcacactcagtctctccctc

SEQ ID NO: 205354 - DNA, 22 bp, Artificial Sequence
  Synthetic oligonucleotide; CTC chr2 60528164 60528185 60528181 60528186 +
acactcagtctctccctccctg

SEQ ID NO: 205355 - DNA, 22 bp, Artificial Sequence
  Synthetic oligonucleotide; CTC chr2 60528170 60528191 60528187 60528192 +
agtctctccctccctgtataat

SEQ ID NO: 205356 - DNA, 22 bp, Artificial Sequence
  Synthetic oligonucleotide; CTC chr2 60528176 60528197 60528193 60528198 +
tccctccctgtataattctgat

SEQ ID NO: 205357 - DNA, 22 bp, Artificial Sequence
  Synthetic oligonucleotide; CTC chr2 60528178 60528199 60528195 60528200 +
cctccctgtataattctgattc

SEQ ID NO: 205358 - DNA, 22 bp, Artificial Sequence
  Synthetic oligonucleotide; CTC chr2 60528182 60528203 60528199 60528204 +
cctgtataattctgattctccc

SEQ ID NO: 205359 - DNA, 22 bp, Artificial Sequence
  Synthetic oligonucleotide; CTG chr2 60528186 60528207 60528203 60528208 +
tataattctgattctccccagc

SEQ ID NO: 205360 - DNA, 22 bp, Artificial Sequence
  Synthetic oligonucleotide; TTC chr2 60528194 60528215 60528211 60528216 +
tgattctccccagcctttgaag

SEQ ID NO: 205361 - DNA, 22 bp, Artificial Sequence
  Synthetic oligonucleotide; CTG chr2 60528196 60528217 60528213 60528218 +
attctccccagcctttgaaggt

SEQ ID NO: 205362 - DNA, 22 bp, Artificial Sequence
  Synthetic oligonucleotide; TTC chr2 60528200 60528221 60528217 60528222 +
tccccagcctttgaaggtacga

SEQ ID NO: 205363 - DNA, 22 bp, Artificial Sequence
  Synthetic oligonucleotide; CTC chr2 60528202 60528223 60528219 60528224 +
cccagcctttgaaggtacgatc

SEQ ID NO: 205364 - DNA, 22 bp, Artificial Sequence
  Synthetic oligonucleotide; CTT chr2 60528211 60528232 60528228 60528233 +
tgaaggtacgatccgagaagta

SEQ ID NO: 205365 - DNA, 22 bp, Artificial Sequence
  Synthetic oligonucleotide; TTT chr2 60528212 60528233 60528229 60528234 +
gaaggtacgatccgagaagtaa

SEQ ID NO: 205366 - DNA, 22 bp, Artificial Sequence
  Synthetic oligonucleotide; TTG chr2 60528213 60528234 60528230 60528235 +
aaggtacgatccgagaagtaaa

SEQ ID NO: 205367 - DNA, 22 bp, Artificial Sequence
  Synthetic oligonucleotide; CTG chr2 60528261 60528282 60528278 60528283 +
ctgcaggccaagcctcaccact

SEQ ID NO: 205368 - DNA, 22 bp, Artificial Sequence
  Synthetic oligonucleotide; CTG chr2 60528264 60528285 60528281 60528286 +
caggccaagcctcaccacttct

SEQ ID NO: 205369 - DNA, 22 bp, Artificial Sequence
  Synthetic oligonucleotide; CTC chr2 60528277 60528298 60528294 60528299 +
accacttcttaaaagtccgagc

SEQ ID NO: 205370 - DNA, 22 bp, Artificial Sequence
  Synthetic oligonucleotide; CTT chr2 60528284 60528305 60528301 60528306 +
cttaaaagtccgagcttagttt

SEQ ID NO: 205371 - DNA, 22 bp, Artificial Sequence
  Synthetic oligonucleotide; TTC chr2 60528285 60528306 60528302 60528307 +
ttaaaagtccgagcttagtttc

SEQ ID NO: 205372 - DNA, 22 bp, Artificial Sequence
  Synthetic oligonucleotide; CTT chr2 60528287 60528308 60528304 60528309 +
aaaagtccgagcttagtttctc

SEQ ID NO: 205373 - DNA, 22 bp, Artificial Sequence
  Synthetic oligonucleotide; TTA chr2 60528288 60528309 60528305 60528310 +
aaagtccgagcttagtttctca

SEQ ID NO: 205374 - DNA, 22 bp, Artificial Sequence
  Synthetic oligonucleotide; CTT chr2 60528301 60528322 60528318 60528323 +
agtttctcattcagcccactgc

SEQ ID NO: 205375 - DNA, 22 bp, Artificial Sequence
  Synthetic oligonucleotide; TTA chr2 60528302 60528323 60528319 60528324 +
gtttctcattcagcccactgca

SEQ ID NO: 205376 - DNA, 22 bp, Artificial Sequence
  Synthetic oligonucleotide; TTT chr2 60528306 60528327 60528323 60528328 +
ctcattcagcccactgcagtct

SEQ ID NO: 205377 - DNA, 22 bp, Artificial Sequence
  Synthetic oligonucleotide; TTC chr2 60528307 60528328 60528324 60528329 +
tcattcagcccactgcagtctc

SEQ ID NO: 205378 - DNA, 22 bp, Artificial Sequence
  Synthetic oligonucleotide; CTC chr2 60528309 60528330 60528326 60528331 +
attcagcccactgcagtctcct

SEQ ID NO: 205379 - DNA, 22 bp, Artificial Sequence
  Synthetic oligonucleotide; TTC chr2 60528313 60528334 60528330 60528335 +
agcccactgcagtctcctgacc

SEQ ID NO: 205380 - DNA, 22 bp, Artificial Sequence
  Synthetic oligonucleotide; CTG chr2 60528322 60528343 60528339 60528344 +
cagtctcctgaccaagccacac

SEQ ID NO: 205381 - DNA, 22 bp, Artificial Sequence
  Synthetic oligonucleotide; CTC chr2 60528329 60528350 60528346 60528351 +
ctgaccaagccacacacaaaca

SEQ ID NO: 205382 - DNA, 22 bp, Artificial Sequence
  Synthetic oligonucleotide; CTG chr2 60528332 60528353 60528349 60528354 +
accaagccacacacaaacagta

SEQ ID NO: 205383 - DNA, 22 bp, Artificial Sequence
  Synthetic oligonucleotide; CTC chr2 60528361 60528382 60528378 60528383 +
ctccctctgtttctcaggaccc

SEQ ID NO: 205384 - DNA, 22 bp, Artificial Sequence
  Synthetic oligonucleotide; CTC chr2 60528364 60528385 60528381 60528386 +
cctctgtttctcaggaccctca

SEQ ID NO: 205385 - DNA, 22 bp, Artificial Sequence
  Synthetic oligonucleotide; CTC chr2 60528368 60528389 60528385 60528390 +
tgtttctcaggaccctcacttg

SEQ ID NO: 205386 - DNA, 22 bp, Artificial Sequence
  Synthetic oligonucleotide; CTG chr2 60528370 60528391 60528387 60528392 +
tttctcaggaccctcacttgat

SEQ ID NO: 205387 - DNA, 22 bp, Artificial Sequence
  Synthetic oligonucleotide; TTT chr2 60528373 60528394 60528390 60528395 +
ctcaggaccctcacttgatttc

SEQ ID NO: 205388 - DNA, 22 bp, Artificial Sequence
  Synthetic oligonucleotide; TTC chr2 60528374 60528395 60528391 60528396 +
tcaggaccctcacttgatttca

SEQ ID NO: 205389 - DNA, 22 bp, Artificial Sequence
  Synthetic oligonucleotide; CTC chr2 60528376 60528397 60528393 60528398 +
aggaccctcacttgatttcagg

SEQ ID NO: 205390 - DNA, 22 bp, Artificial Sequence
  Synthetic oligonucleotide; CTC chr2 60528385 60528406 60528402 60528407 +
acttgatttcaggctcattctg

SEQ ID NO: 205391 - DNA, 22 bp, Artificial Sequence
  Synthetic oligonucleotide; CTT chr2 60528389 60528410 60528406 60528411 +
gatttcaggctcattctggaca

SEQ ID NO: 205392 - DNA, 22 bp, Artificial Sequence
  Synthetic oligonucleotide; TTG chr2 60528390 60528411 60528407 60528412 +
atttcaggctcattctggacag

SEQ ID NO: 205393 - DNA, 22 bp, Artificial Sequence
  Synthetic oligonucleotide; TTT chr2 60528394 60528415 60528411 60528416 +
caggctcattctggacagatgg

SEQ ID NO: 205394 - DNA, 22 bp, Artificial Sequence
  Synthetic oligonucleotide; TTC chr2 60528395 60528416 60528412 60528417 +
aggctcattctggacagatggg

SEQ ID NO: 205395 - DNA, 22 bp, Artificial Sequence
  Synthetic oligonucleotide; CTC chr2 60528401 60528422 60528418 60528423 +
attctggacagatggggaaatg

SEQ ID NO: 205396 - DNA, 22 bp, Artificial Sequence
  Synthetic oligonucleotide; TTC chr2 60528405 60528426 60528422 60528427 +
tggacagatggggaaatgacta

SEQ ID NO: 205397 - DNA, 22 bp, Artificial Sequence
  Synthetic oligonucleotide; CTG chr2 60528407 60528428 60528424 60528429 +
gacagatggggaaatgactact

SEQ ID NO: 205398 - DNA, 22 bp, Artificial Sequence
  Synthetic oligonucleotide; CTA chr2 60528427 60528448 60528444 60528449 +
cttgcaaagcaggattccttac

SEQ ID NO: 205399 - DNA, 22 bp, Artificial Sequence
  Synthetic oligonucleotide; CTT chr2 60528430 60528451 60528447 60528452 +
gcaaagcaggattccttacatt

SEQ ID NO: 205400 - DNA, 22 bp, Artificial Sequence
  Synthetic oligonucleotide; TTG chr2 60528431 60528452 60528448 60528453 +
caaagcaggattccttacattg

SEQ ID NO: 205401 - DNA, 22 bp, Artificial Sequence
  Synthetic oligonucleotide; TTC chr2 60528444 60528465 60528461 60528466 +
cttacattgcaacttttcccaa

SEQ ID NO: 205402 - DNA, 22 bp, Artificial Sequence
  Synthetic oligonucleotide; CTT chr2 60528447 60528468 60528464 60528469 +
acattgcaacttttcccaacag

SEQ ID NO: 205403 - DNA, 22 bp, Artificial Sequence
  Synthetic oligonucleotide; TTA chr2 60528448 60528469 60528465 60528470 +
cattgcaacttttcccaacagc

SEQ ID NO: 205404 - DNA, 22 bp, Artificial Sequence
  Synthetic oligonucleotide; TTG chr2 60528453 60528474 60528470 60528475 +
caacttttcccaacagctccgt

SEQ ID NO: 205405 - DNA, 22 bp, Artificial Sequence
  Synthetic oligonucleotide; CTT chr2 60528459 60528480 60528476 60528481 +
ttcccaacagctccgtgctcct

SEQ ID NO: 205406 - DNA, 22 bp, Artificial Sequence
  Synthetic oligonucleotide; TTT chr2 60528460 60528481 60528477 60528482 +
tcccaacagctccgtgctcctt

SEQ ID NO: 205407 - DNA, 22 bp, Artificial Sequence
  Synthetic oligonucleotide; TTT chr2 60528461 60528482 60528478 60528483 +
cccaacagctccgtgctccttc

SEQ ID NO: 205408 - DNA, 22 bp, Artificial Sequence
  Synthetic oligonucleotide; TTC chr2 60528462 60528483 60528479 60528484 +
ccaacagctccgtgctccttca

SEQ ID NO: 205409 - DNA, 22 bp, Artificial Sequence
  Synthetic oligonucleotide; CTC chr2 60528472 60528493 60528489 60528494 +
cgtgctccttcaatatgcccag

SEQ ID NO: 205410 - DNA, 22 bp, Artificial Sequence
  Synthetic oligonucleotide; CTC chr2 60528479 60528500 60528496 60528501 +
cttcaatatgcccagaactgga

SEQ ID NO: 205411 - DNA, 22 bp, Artificial Sequence
  Synthetic oligonucleotide; CTT chr2 60528482 60528503 60528499 60528504 +
caatatgcccagaactggaggg

SEQ ID NO: 205412 - DNA, 22 bp, Artificial Sequence
  Synthetic oligonucleotide; TTC chr2 60528483 60528504 60528500 60528505 +
aatatgcccagaactggagggg

SEQ ID NO: 205413 - DNA, 22 bp, Artificial Sequence
  Synthetic oligonucleotide; CTG chr2 60528499 60528520 60528516 60528521 +
gaggggaacattcttctctttc

SEQ ID NO: 205414 - DNA, 22 bp, Artificial Sequence
  Synthetic oligonucleotide; TTC chr2 60528512 60528533 60528529 60528534 +
ttctctttcccagaagattgaa

SEQ ID NO: 205415 - DNA, 22 bp, Artificial Sequence
  Synthetic oligonucleotide; CTT chr2 60528514 60528535 60528531 60528536 +
ctctttcccagaagattgaaaa

SEQ ID NO: 205416 - DNA, 22 bp, Artificial Sequence
  Synthetic oligonucleotide; TTC chr2 60528515 60528536 60528532 60528537 +
tctttcccagaagattgaaaaa

SEQ ID NO: 205417 - DNA, 22 bp, Artificial Sequence
  Synthetic oligonucleotide; CTC chr2 60528517 60528538 60528534 60528539 +
tttcccagaagattgaaaaact

SEQ ID NO: 205418 - DNA, 22 bp, Artificial Sequence
  Synthetic oligonucleotide; CTT chr2 60528519 60528540 60528536 60528541 +
tcccagaagattgaaaaacttg

SEQ ID NO: 205419 - DNA, 22 bp, Artificial Sequence
  Synthetic oligonucleotide; TTT chr2 60528520 60528541 60528537 60528542 +
cccagaagattgaaaaacttga

SEQ ID NO: 205420 - DNA, 22 bp, Artificial Sequence
  Synthetic oligonucleotide; TTC chr2 60528521 60528542 60528538 60528543 +
ccagaagattgaaaaacttgac

SEQ ID NO: 205421 - DNA, 22 bp, Artificial Sequence
  Synthetic oligonucleotide; TTG chr2 60528532 60528553 60528549 60528554 +
aaaaacttgaccacagaaccca

SEQ ID NO: 205422 - DNA, 22 bp, Artificial Sequence
  Synthetic oligonucleotide; CTT chr2 60528540 60528561 60528557 60528562 +
gaccacagaacccatgggaggg

SEQ ID NO: 205423 - DNA, 22 bp, Artificial Sequence
  Synthetic oligonucleotide; TTG chr2 60528541 60528562 60528558 60528563 +
accacagaacccatgggaggga

SEQ ID NO: 205424 - DNA, 22 bp, Artificial Sequence
  Synthetic oligonucleotide; CTG chr2 60528569 60528590 60528586 60528591 +
tccagcaccagagcttcctgcc

SEQ ID NO: 205425 - DNA, 22 bp, Artificial Sequence
  Synthetic oligonucleotide; CTT chr2 60528585 60528606 60528602 60528607 +
cctgcccagttgttgcctggca

SEQ ID NO: 205426 - DNA, 22 bp, Artificial Sequence
  Synthetic oligonucleotide; TTC chr2 60528586 60528607 60528603 60528608 +
ctgcccagttgttgcctggcac

SEQ ID NO: 205427 - DNA, 22 bp, Artificial Sequence
  Synthetic oligonucleotide; CTG chr2 60528589 60528610 60528606 60528611 +
cccagttgttgcctggcaccgc

SEQ ID NO: 205428 - DNA, 22 bp, Artificial Sequence
  Synthetic oligonucleotide; TTG chr2 60528597 60528618 60528614 60528619 +
ttgcctggcaccgctgaagaaa

SEQ ID NO: 205429 - DNA, 22 bp, Artificial Sequence
  Synthetic oligonucleotide; TTG chr2 60528600 60528621 60528617 60528622 +
cctggcaccgctgaagaaagct

SEQ ID NO: 205430 - DNA, 22 bp, Artificial Sequence
  Synthetic oligonucleotide; CTG chr2 60528604 60528625 60528621 60528626 +
gcaccgctgaagaaagctgcaa

SEQ ID NO: 205431 - DNA, 22 bp, Artificial Sequence
  Synthetic oligonucleotide; CTG chr2 60528613 60528634 60528630 60528635 +
aagaaagctgcaaacgtactga

SEQ ID NO: 205432 - DNA, 22 bp, Artificial Sequence
  Synthetic oligonucleotide; CTG chr2 60528623 60528644 60528640 60528645 +
caaacgtactgaagaggtagca

SEQ ID NO: 205433 - DNA, 22 bp, Artificial Sequence
  Synthetic oligonucleotide; CTG chr2 60528634 60528655 60528651 60528656 +
aagaggtagcagagggtggcgg

SEQ ID NO: 205434 - DNA, 22 bp, Artificial Sequence
  Synthetic oligonucleotide; TTG chr2 60528674 60528695 60528691 60528696 +
aacaactgtggaccctcaggga

SEQ ID NO: 205435 - DNA, 22 bp, Artificial Sequence
  Synthetic oligonucleotide; CTG chr2 60528682 60528703 60528699 60528704 +
tggaccctcagggaagtcattt

SEQ ID NO: 205436 - DNA, 22 bp, Artificial Sequence
  Synthetic oligonucleotide; CTC chr2 60528691 60528712 60528708 60528713 +
agggaagtcatttaacccttga

SEQ ID NO: 205437 - DNA, 22 bp, Artificial Sequence
  Synthetic oligonucleotide; TTT chr2 60528704 60528725 60528721 60528726 +
aacccttgatgaaccccaattt

SEQ ID NO: 205438 - DNA, 22 bp, Artificial Sequence
  Synthetic oligonucleotide; TTA chr2 60528705 60528726 60528722 60528727 +
acccttgatgaaccccaatttc

SEQ ID NO: 205439 - DNA, 22 bp, Artificial Sequence
  Synthetic oligonucleotide; CTT chr2 60528711 60528732 60528728 60528733 +
gatgaaccccaatttcctcctc

SEQ ID NO: 205440 - DNA, 22 bp, Artificial Sequence
  Synthetic oligonucleotide; TTG chr2 60528712 60528733 60528729 60528734 +
atgaaccccaatttcctcctct

SEQ ID NO: 205441 - DNA, 22 bp, Artificial Sequence
  Synthetic oligonucleotide; TTT chr2 60528726 60528747 60528743 60528748 +
cctcctctaccaaatgaggcta

SEQ ID NO: 205442 - DNA, 22 bp, Artificial Sequence
  Synthetic oligonucleotide; TTC chr2 60528727 60528748 60528744 60528749 +
ctcctctaccaaatgaggctaa

SEQ ID NO: 205443 - DNA, 22 bp, Artificial Sequence
  Synthetic oligonucleotide; CTC chr2 60528730 60528751 60528747 60528752 +
ctctaccaaatgaggctaatgg

SEQ ID NO: 205444 - DNA, 22 bp, Artificial Sequence
  Synthetic oligonucleotide; CTC chr2 60528733 60528754 60528750 60528755 +
taccaaatgaggctaatgggag

SEQ ID NO: 205445 - DNA, 22 bp, Artificial Sequence
  Synthetic oligonucleotide; CTA chr2 60528735 60528756 60528752 60528757 +
ccaaatgaggctaatgggagtg

SEQ ID NO: 205446 - DNA, 22 bp, Artificial Sequence
  Synthetic oligonucleotide; CTA chr2 60528748 60528769 60528765 60528770 +
atgggagtgtttcctttccgag

SEQ ID NO: 205447 - DNA, 22 bp, Artificial Sequence
  Synthetic oligonucleotide; TTT chr2 60528760 60528781 60528777 60528782 +
cctttccgaggttgttgtggga

SEQ ID NO: 205448 - DNA, 22 bp, Artificial Sequence
  Synthetic oligonucleotide; TTC chr2 60528761 60528782 60528778 60528783 +
ctttccgaggttgttgtgggat

SEQ ID NO: 205449 - DNA, 22 bp, Artificial Sequence
  Synthetic oligonucleotide; CTT chr2 60528764 60528785 60528781 60528786 +
tccgaggttgttgtgggatgga

SEQ ID NO: 205450 - DNA, 22 bp, Artificial Sequence
  Synthetic oligonucleotide; TTT chr2 60528765 60528786 60528782 60528787 +
ccgaggttgttgtgggatggaa

SEQ ID NO: 205451 - DNA, 22 bp, Artificial Sequence
  Synthetic oligonucleotide; TTC chr2 60528766 60528787 60528783 60528788 +
cgaggttgttgtgggatggaat

SEQ ID NO: 205452 - DNA, 22 bp, Artificial Sequence
  Synthetic oligonucleotide; TTG chr2 60528774 60528795 60528791 60528796 +
ttgtgggatggaatatcaatgt

SEQ ID NO: 205453 - DNA, 22 bp, Artificial Sequence
  Synthetic oligonucleotide; TTG chr2 60528777 60528798 60528794 60528799 +
tgggatggaatatcaatgtgtc

SEQ ID NO: 205454 - DNA, 22 bp, Artificial Sequence
  Synthetic oligonucleotide; TTC chr2 60528830 60528851 60528847 60528852 +
tggaggtgcagcccccggagcg

SEQ ID NO: 205455 - DNA, 22 bp, Artificial Sequence
  Synthetic oligonucleotide; CTG chr2 60528832 60528853 60528849 60528854 +
gaggtgcagcccccggagcgag

SEQ ID NO: 205456 - DNA, 22 bp, Artificial Sequence
  Synthetic oligonucleotide; CTG chr2 60528863 60528884 60528880 60528885 +
tgctttccctcatttacttctc

SEQ ID NO: 205457 - DNA, 22 bp, Artificial Sequence
  Synthetic oligonucleotide; CTT chr2 60528868 60528889 60528885 60528890 +
tccctcatttacttctcacatg

SEQ ID NO: 205458 - DNA, 22 bp, Artificial Sequence
  Synthetic oligonucleotide; TTT chr2 60528869 60528890 60528886 60528891 +
ccctcatttacttctcacatgg

SEQ ID NO: 205459 - DNA, 22 bp, Artificial Sequence
  Synthetic oligonucleotide; TTC chr2 60528870 60528891 60528887 60528892 +
cctcatttacttctcacatgga

SEQ ID NO: 205460 - DNA, 22 bp, Artificial Sequence
  Synthetic oligonucleotide; CTC chr2 60528874 60528895 60528891 60528896 +
atttacttctcacatggactct

SEQ ID NO: 205461 - DNA, 22 bp, Artificial Sequence
  Synthetic oligonucleotide; TTT chr2 60528878 60528899 60528895 60528900 +
acttctcacatggactctatga

SEQ ID NO: 205462 - DNA, 22 bp, Artificial Sequence
  Synthetic oligonucleotide; TTA chr2 60528879 60528900 60528896 60528901 +
cttctcacatggactctatgag

SEQ ID NO: 205463 - DNA, 22 bp, Artificial Sequence
  Synthetic oligonucleotide; CTT chr2 60528882 60528903 60528899 60528904 +
ctcacatggactctatgaggta

SEQ ID NO: 205464 - DNA, 22 bp, Artificial Sequence
  Synthetic oligonucleotide; TTC chr2 60528883 60528904 60528900 60528905 +
tcacatggactctatgaggtaa

SEQ ID NO: 205465 - DNA, 22 bp, Artificial Sequence
  Synthetic oligonucleotide; CTC chr2 60528885 60528906 60528902 60528907 +
acatggactctatgaggtaagg

SEQ ID NO: 205466 - DNA, 22 bp, Artificial Sequence
  Synthetic oligonucleotide; CTC chr2 60528895 60528916 60528912 60528917 +
tatgaggtaagggaccttgagt

SEQ ID NO: 205467 - DNA, 22 bp, Artificial Sequence
  Synthetic oligonucleotide; CTA chr2 60528897 60528918 60528914 60528919 +
tgaggtaagggaccttgagtta

SEQ ID NO: 205468 - DNA, 22 bp, Artificial Sequence
  Synthetic oligonucleotide; CTT chr2 60528913 60528934 60528930 60528935 +
gagttatctccatttcacagag

SEQ ID NO: 205469 - DNA, 22 bp, Artificial Sequence
  Synthetic oligonucleotide; TTG chr2 60528914 60528935 60528931 60528936 +
agttatctccatttcacagaga

SEQ ID NO: 205470 - DNA, 22 bp, Artificial Sequence
  Synthetic oligonucleotide; TTA chr2 60528919 60528940 60528936 60528941 +
tctccatttcacagagaggtga

SEQ ID NO: 205471 - DNA, 22 bp, Artificial Sequence
  Synthetic oligonucleotide; CTC chr2 60528923 60528944 60528940 60528945 +
catttcacagagaggtgaaatg

SEQ ID NO: 205472 - DNA, 22 bp, Artificial Sequence
  Synthetic oligonucleotide; TTT chr2 60528928 60528949 60528945 60528950 +
cacagagaggtgaaatgattcc

SEQ ID NO: 205473 - DNA, 22 bp, Artificial Sequence
  Synthetic oligonucleotide; TTC chr2 60528929 60528950 60528946 60528951 +
acagagaggtgaaatgattccc

SEQ ID NO: 205474 - DNA, 22 bp, Artificial Sequence
  Synthetic oligonucleotide; TTC chr2 60528949 60528970 60528966 60528971 +
cctcagactctcccaaccagct

SEQ ID NO: 205475 - DNA, 22 bp, Artificial Sequence
  Synthetic oligonucleotide; CTC chr2 60528953 60528974 60528970 60528975 +
agactctcccaaccagctagca

SEQ ID NO: 205476 - DNA, 22 bp, Artificial Sequence
  Synthetic oligonucleotide; CTC chr2 60528959 60528980 60528976 60528981 +
tcccaaccagctagcagtaaca

SEQ ID NO: 205477 - DNA, 22 bp, Artificial Sequence
  Synthetic oligonucleotide; CTC chr2 60528961 60528982 60528978 60528983 +
ccaaccagctagcagtaacata

SEQ ID NO: 205478 - DNA, 22 bp, Artificial Sequence
  Synthetic oligonucleotide; CTA chr2 60528972 60528993 60528989 60528994 +
gcagtaacatagaaatctgaac

SEQ ID NO: 205479 - DNA, 22 bp, Artificial Sequence
  Synthetic oligonucleotide; CTG chr2 60528991 60529012 60529008 60529013 +
aacccagagtaactgtgtcaca

SEQ ID NO: 205480 - DNA, 22 bp, Artificial Sequence
  Synthetic oligonucleotide; CTG chr2 60529006 60529027 60529023 60529028 +
tgtcacacacccaggcaggcac

SEQ ID NO: 205481 - DNA, 22 bp, Artificial Sequence
  Synthetic oligonucleotide; CTC chr2 60529035 60529056 60529052 60529057 +
tcgtaaggcaacacacgtctat

SEQ ID NO: 205482 - DNA, 22 bp, Artificial Sequence
  Synthetic oligonucleotide; CTC chr2 60529037 60529058 60529054 60529059 +
gtaaggcaacacacgtctatgg

SEQ ID NO: 205483 - DNA, 22 bp, Artificial Sequence
  Synthetic oligonucleotide; CTA chr2 60529056 60529077 60529073 60529078 +
tggggagaggggactcccaccc

SEQ ID NO: 205484 - DNA, 22 bp, Artificial Sequence
  Synthetic oligonucleotide; CTC chr2 60529072 60529093 60529089 60529094 +
ccacccacgagggagctgccac

SEQ ID NO: 205485 - DNA, 22 bp, Artificial Sequence
  Synthetic oligonucleotide; CTG chr2 60529090 60529111 60529107 60529112 +
ccaccagaaacataatgagacc

SEQ ID NO: 205486 - DNA, 22 bp, Artificial Sequence
  Synthetic oligonucleotide; CTG chr2 60529115 60529136 60529132 60529137 +
agctctttagacccccacctgc

SEQ ID NO: 205487 - DNA, 22 bp, Artificial Sequence
  Synthetic oligonucleotide; CTC chr2 60529120 60529141 60529137 60529142 +
tttagacccccacctgccctgc

SEQ ID NO: 205488 - DNA, 22 bp, Artificial Sequence
  Synthetic oligonucleotide; CTT chr2 60529122 60529143 60529139 60529144 +
tagacccccacctgccctgctc

SEQ ID NO: 205489 - DNA, 22 bp, Artificial Sequence
  Synthetic oligonucleotide; TTT chr2 60529123 60529144 60529140 60529145 +
agacccccacctgccctgctct

SEQ ID NO: 205490 - DNA, 22 bp, Artificial Sequence
  Synthetic oligonucleotide; TTA chr2 60529124 60529145 60529141 60529146 +
gacccccacctgccctgctctt

SEQ ID NO: 205491 - DNA, 22 bp, Artificial Sequence
  Synthetic oligonucleotide; CTG chr2 60529136 60529157 60529153 60529158 +
ccctgctcttctctcatcccaa

SEQ ID NO: 205492 - DNA, 22 bp, Artificial Sequence
  Synthetic oligonucleotide; CTG chr2 60529141 60529162 60529158 60529163 +
ctcttctctcatcccaacctgc

SEQ ID NO: 205493 - DNA, 22 bp, Artificial Sequence
  Synthetic oligonucleotide; CTC chr2 60529144 60529165 60529161 60529166 +
ttctctcatcccaacctgctca

SEQ ID NO: 205494 - DNA, 22 bp, Artificial Sequence
  Synthetic oligonucleotide; CTT chr2 60529146 60529167 60529163 60529168 +
ctctcatcccaacctgctcacc

SEQ ID NO: 205495 - DNA, 22 bp, Artificial Sequence
  Synthetic oligonucleotide; TTC chr2 60529147 60529168 60529164 60529169 +
tctcatcccaacctgctcaccc

SEQ ID NO: 205496 - DNA, 22 bp, Artificial Sequence
  Synthetic oligonucleotide; CTC chr2 60529149 60529170 60529166 60529171 +
tcatcccaacctgctcacccca

SEQ ID NO: 205497 - DNA, 22 bp, Artificial Sequence
  Synthetic oligonucleotide; CTC chr2 60529151 60529172 60529168 60529173 +
atcccaacctgctcaccccata

SEQ ID NO: 205498 - DNA, 22 bp, Artificial Sequence
  Synthetic oligonucleotide; CTG chr2 60529162 60529183 60529179 60529184 +
ctcaccccataatgggggaact

SEQ ID NO: 205499 - DNA, 22 bp, Artificial Sequence
  Synthetic oligonucleotide; CTC chr2 60529165 60529186 60529182 60529187 +
accccataatgggggaactact

SEQ ID NO: 205500 - DNA, 22 bp, Artificial Sequence
  Synthetic oligonucleotide; CTA chr2 60529185 60529206 60529202 60529207 +
ctttgagaccccaggagcacac

SEQ ID NO: 205501 - DNA, 22 bp, Artificial Sequence
  Synthetic oligonucleotide; CTT chr2 60529188 60529209 60529205 60529210 +
tgagaccccaggagcacacagt

SEQ ID NO: 205502 - DNA, 22 bp, Artificial Sequence
  Synthetic oligonucleotide; TTT chr2 60529189 60529210 60529206 60529211 +
gagaccccaggagcacacagtt

SEQ ID NO: 205503 - DNA, 22 bp, Artificial Sequence
  Synthetic oligonucleotide; TTG chr2 60529190 60529211 60529207 60529212 +
agaccccaggagcacacagttc

SEQ ID NO: 205504 - DNA, 22 bp, Artificial Sequence
  Synthetic oligonucleotide; TTC chr2 60529212 60529233 60529229 60529234 +
caagccatgagtcataaccgta

SEQ ID NO: 205505 - DNA, 22 bp, Artificial Sequence
  Synthetic oligonucleotide; CTT chr2 60529248 60529269 60529265 60529270 +
ttgtgacatgttttaccatgtg

SEQ ID NO: 205506 - DNA, 22 bp, Artificial Sequence
  Synthetic oligonucleotide; TTT chr2 60529249 60529270 60529266 60529271 +
tgtgacatgttttaccatgtgc

SEQ ID NO: 205507 - DNA, 22 bp, Artificial Sequence
  Synthetic oligonucleotide; TTT chr2 60529250 60529271 60529267 60529272 +
gtgacatgttttaccatgtgcc

SEQ ID NO: 205508 - DNA, 22 bp, Artificial Sequence
  Synthetic oligonucleotide; TTG chr2 60529251 60529272 60529268 60529273 +
tgacatgttttaccatgtgccc

SEQ ID NO: 205509 - DNA, 22 bp, Artificial Sequence
  Synthetic oligonucleotide; TTT chr2 60529261 60529282 60529278 60529283 +
taccatgtgcccagcactgagc

SEQ ID NO: 205510 - DNA, 22 bp, Artificial Sequence
  Synthetic oligonucleotide; TTT chr2 60529262 60529283 60529279 60529284 +
accatgtgcccagcactgagcc

SEQ ID NO: 205511 - DNA, 22 bp, Artificial Sequence
  Synthetic oligonucleotide; TTA chr2 60529263 60529284 60529280 60529285 +
ccatgtgcccagcactgagccc

SEQ ID NO: 205512 - DNA, 22 bp, Artificial Sequence
  Synthetic oligonucleotide; CTG chr2 60529280 60529301 60529297 60529302 +
agcccagcgcccccacatgctc

SEQ ID NO: 205513 - DNA, 22 bp, Artificial Sequence
  Synthetic oligonucleotide; CTC chr2 60529302 60529323 60529319 60529324 +
tcataggatgctcaaaggccct

SEQ ID NO: 205514 - DNA, 22 bp, Artificial Sequence
  Synthetic oligonucleotide; CTC chr2 60529304 60529325 60529321 60529326 +
ataggatgctcaaaggccctat

SEQ ID NO: 205515 - DNA, 22 bp, Artificial Sequence
  Synthetic oligonucleotide; CTC chr2 60529315 60529336 60529332 60529337 +
aaaggccctatgaggcaagccc

SEQ ID NO: 205516 - DNA, 22 bp, Artificial Sequence
  Synthetic oligonucleotide; CTA chr2 60529325 60529346 60529342 60529347 +
tgaggcaagccccgtgattctc

SEQ ID NO: 205517 - DNA, 22 bp, Artificial Sequence
  Synthetic oligonucleotide; TTC chr2 60529345 60529366 60529362 60529367 +
tccccactttacagattgagga

SEQ ID NO: 205518 - DNA, 22 bp, Artificial Sequence
  Synthetic oligonucleotide; CTC chr2 60529347 60529368 60529364 60529369 +
cccactttacagattgaggaag

SEQ ID NO: 205519 - DNA, 22 bp, Artificial Sequence
  Synthetic oligonucleotide; CTT chr2 60529354 60529375 60529371 60529376 +
tacagattgaggaagcggaggc

SEQ ID NO: 205520 - DNA, 22 bp, Artificial Sequence
  Synthetic oligonucleotide; TTT chr2 60529355 60529376 60529372 60529377 +
acagattgaggaagcggaggct

SEQ ID NO: 205521 - DNA, 22 bp, Artificial Sequence
  Synthetic oligonucleotide; TTA chr2 60529356 60529377 60529373 60529378 +
cagattgaggaagcggaggctt

SEQ ID NO: 205522 - DNA, 22 bp, Artificial Sequence
  Synthetic oligonucleotide; TTG chr2 60529363 60529384 60529380 60529385 +
aggaagcggaggcttagggaat

SEQ ID NO: 205523 - DNA, 22 bp, Artificial Sequence
  Synthetic oligonucleotide; CTT chr2 60529378 60529399 60529395 60529400 +
agggaatgaaatctgcccaagg

SEQ ID NO: 205524 - DNA, 22 bp, Artificial Sequence
  Synthetic oligonucleotide; TTA chr2 60529379 60529400 60529396 60529401 +
gggaatgaaatctgcccaaggt

SEQ ID NO: 205525 - DNA, 22 bp, Artificial Sequence
  Synthetic oligonucleotide; CTG chr2 60529393 60529414 60529410 60529415 +
cccaaggttgcacaactagaaa

SEQ ID NO: 205526 - DNA, 22 bp, Artificial Sequence
  Synthetic oligonucleotide; TTG chr2 60529403 60529424 60529420 60529425 +
cacaactagaaatggtattact

SEQ ID NO: 205527 - DNA, 22 bp, Artificial Sequence
  Synthetic oligonucleotide; CTA chr2 60529411 60529432 60529428 60529433 +
gaaatggtattacttctttacc

SEQ ID NO: 205528 - DNA, 22 bp, Artificial Sequence
  Synthetic oligonucleotide; TTA chr2 60529423 60529444 60529440 60529445 +
cttctttaccctcagcctaaac

SEQ ID NO: 205529 - DNA, 22 bp, Artificial Sequence
  Synthetic oligonucleotide; CTT chr2 60529426 60529447 60529443 60529448 +
ctttaccctcagcctaaaccat

SEQ ID NO: 205530 - DNA, 22 bp, Artificial Sequence
  Synthetic oligonucleotide; TTC chr2 60529427 60529448 60529444 60529449 +
tttaccctcagcctaaaccatt

SEQ ID NO: 205531 - DNA, 22 bp, Artificial Sequence
  Synthetic oligonucleotide; CTT chr2 60529429 60529450 60529446 60529451 +
taccctcagcctaaaccatttt

SEQ ID NO: 205532 - DNA, 22 bp, Artificial Sequence
  Synthetic oligonucleotide; TTT chr2 60529430 60529451 60529447 60529452 +
accctcagcctaaaccatttta

SEQ ID NO: 205533 - DNA, 22 bp, Artificial Sequence
  Synthetic oligonucleotide; TTA chr2 60529431 60529452 60529448 60529453 +
ccctcagcctaaaccattttat

SEQ ID NO: 205534 - DNA, 22 bp, Artificial Sequence
  Synthetic oligonucleotide; CTC chr2 60529436 60529457 60529453 60529458 +
agcctaaaccattttatttcgt

SEQ ID NO: 205535 - DNA, 22 bp, Artificial Sequence
  Synthetic oligonucleotide; CTA chr2 60529442 60529463 60529459 60529464 +
aaccattttatttcgtgtaatc

SEQ ID NO: 205536 - DNA, 22 bp, Artificial Sequence
  Synthetic oligonucleotide; TTT chr2 60529450 60529471 60529467 60529472 +
tatttcgtgtaatcaaagagaa

SEQ ID NO: 205537 - DNA, 22 bp, Artificial Sequence
  Synthetic oligonucleotide; TTT chr2 60529451 60529472 60529468 60529473 +
atttcgtgtaatcaaagagaag

SEQ ID NO: 205538 - DNA, 22 bp, Artificial Sequence
  Synthetic oligonucleotide; TTA chr2 60529452 60529473 60529469 60529474 +
tttcgtgtaatcaaagagaaga

SEQ ID NO: 205539 - DNA, 22 bp, Artificial Sequence
  Synthetic oligonucleotide; TTT chr2 60529455 60529476 60529472 60529477 +
cgtgtaatcaaagagaagaaga

SEQ ID NO: 205540 - DNA, 22 bp, Artificial Sequence
  Synthetic oligonucleotide; TTC chr2 60529456 60529477 60529473 60529478 +
gtgtaatcaaagagaagaagaa

SEQ ID NO: 205541 - DNA, 22 bp, Artificial Sequence
  Synthetic oligonucleotide; TTT chr2 60529514 60529535 60529531 60529536 +
cccctctttctgtccctcctcc

SEQ ID NO: 205542 - DNA, 22 bp, Artificial Sequence
  Synthetic oligonucleotide; TTC chr2 60529515 60529536 60529532 60529537 +
ccctctttctgtccctcctccc

SEQ ID NO: 205543 - DNA, 22 bp, Artificial Sequence
  Synthetic oligonucleotide; CTC chr2 60529520 60529541 60529537 60529542 +
tttctgtccctcctccctttct

SEQ ID NO: 205544 - DNA, 22 bp, Artificial Sequence
  Synthetic oligonucleotide; CTT chr2 60529522 60529543 60529539 60529544 +
tctgtccctcctccctttctta

SEQ ID NO: 205545 - DNA, 22 bp, Artificial Sequence
  Synthetic oligonucleotide; TTT chr2 60529523 60529544 60529540 60529545 +
ctgtccctcctccctttcttac

SEQ ID NO: 205546 - DNA, 22 bp, Artificial Sequence
  Synthetic oligonucleotide; TTC chr2 60529524 60529545 60529541 60529546 +
tgtccctcctccctttcttacc

SEQ ID NO: 205547 - DNA, 22 bp, Artificial Sequence
  Synthetic oligonucleotide; CTG chr2 60529526 60529547 60529543 60529548 +
tccctcctccctttcttaccag

SEQ ID NO: 205548 - DNA, 22 bp, Artificial Sequence
  Synthetic oligonucleotide; CTC chr2 60529532 60529553 60529549 60529554 +
ctccctttcttaccagctcagg

SEQ ID NO: 205549 - DNA, 22 bp, Artificial Sequence
  Synthetic oligonucleotide; CTC chr2 60529535 60529556 60529552 60529557 +
cctttcttaccagctcaggtta

SEQ ID NO: 205550 - DNA, 22 bp, Artificial Sequence
  Synthetic oligonucleotide; CTT chr2 60529539 60529560 60529556 60529561 +
tcttaccagctcaggttacaaa

SEQ ID NO: 205551 - DNA, 22 bp, Artificial Sequence
  Synthetic oligonucleotide; TTT chr2 60529540 60529561 60529557 60529562 +
cttaccagctcaggttacaaag

SEQ ID NO: 205552 - DNA, 22 bp, Artificial Sequence
  Synthetic oligonucleotide; TTC chr2 60529541 60529562 60529558 60529563 +
ttaccagctcaggttacaaaga

SEQ ID NO: 205553 - DNA, 22 bp, Artificial Sequence
  Synthetic oligonucleotide; CTT chr2 60529543 60529564 60529560 60529565 +
accagctcaggttacaaagaca

SEQ ID NO: 205554 - DNA, 22 bp, Artificial Sequence
  Synthetic oligonucleotide; TTA chr2 60529544 60529565 60529561 60529566 +
ccagctcaggttacaaagacat

SEQ ID NO: 205555 - DNA, 22 bp, Artificial Sequence
  Synthetic oligonucleotide; CTC chr2 60529551 60529572 60529568 60529573 +
aggttacaaagacatctaggtg

SEQ ID NO: 205556 - DNA, 22 bp, Artificial Sequence
  Synthetic oligonucleotide; TTA chr2 60529557 60529578 60529574 60529579 +
caaagacatctaggtgggagag

SEQ ID NO: 205557 - DNA, 22 bp, Artificial Sequence
  Synthetic oligonucleotide; CTA chr2 60529569 60529590 60529586 60529591 +
ggtgggagagaagactgcctct

SEQ ID NO: 205558 - DNA, 22 bp, Artificial Sequence
  Synthetic oligonucleotide; CTG chr2 60529586 60529607 60529603 60529608 +
cctctaagggcttggctgagtt

SEQ ID NO: 205559 - DNA, 22 bp, Artificial Sequence
  Synthetic oligonucleotide; CTC chr2 60529590 60529611 60529607 60529612 +
taagggcttggctgagttggcg

SEQ ID NO: 205560 - DNA, 22 bp, Artificial Sequence
  Synthetic oligonucleotide; CTA chr2 60529592 60529613 60529609 60529614 +
agggcttggctgagttggcggg

SEQ ID NO: 205561 - DNA, 22 bp, Artificial Sequence
  Synthetic oligonucleotide; CTT chr2 60529599 60529620 60529616 60529621 +
ggctgagttggcgggcgggagc

SEQ ID NO: 205562 - DNA, 22 bp, Artificial Sequence
  Synthetic oligonucleotide; TTG chr2 60529600 60529621 60529617 60529622 +
gctgagttggcgggcgggagcg

SEQ ID NO: 205563 - DNA, 22 bp, Artificial Sequence
  Synthetic oligonucleotide; CTG chr2 60529604 60529625 60529621 60529626 +
agttggcgggcgggagcggggg

SEQ ID NO: 205564 - DNA, 22 bp, Artificial Sequence
  Synthetic oligonucleotide; TTG chr2 60529609 60529630 60529626 60529631 +
gcgggcgggagcgggggcaggt

SEQ ID NO: 205565 - DNA, 22 bp, Artificial Sequence
  Synthetic oligonucleotide; TTT chr2 60529664 60529685 60529681 60529686 +
tcccagtttttatttgctacta

SEQ ID NO: 205566 - DNA, 22 bp, Artificial Sequence
  Synthetic oligonucleotide; TTT chr2 60529665 60529686 60529682 60529687 +
cccagtttttatttgctactag

SEQ ID NO: 205567 - DNA, 22 bp, Artificial Sequence
  Synthetic oligonucleotide; TTC chr2 60529666 60529687 60529683 60529688 +
ccagtttttatttgctactaga

SEQ ID NO: 205568 - DNA, 22 bp, Artificial Sequence
  Synthetic oligonucleotide; TTT chr2 60529673 60529694 60529690 60529695 +
ttatttgctactagaaaaggag

SEQ ID NO: 205569 - DNA, 22 bp, Artificial Sequence
  Synthetic oligonucleotide; TTT chr2 60529674 60529695 60529691 60529696 +
tatttgctactagaaaaggaga

SEQ ID NO: 205570 - DNA, 22 bp, Artificial Sequence
  Synthetic oligonucleotide; TTT chr2 60529675 60529696 60529692 60529697 +
atttgctactagaaaaggagaa

SEQ ID NO: 205571 - DNA, 22 bp, Artificial Sequence
  Synthetic oligonucleotide; TTA chr2 60529676 60529697 60529693 60529698 +
tttgctactagaaaaggagaag

SEQ ID NO: 205572 - DNA, 22 bp, Artificial Sequence
  Synthetic oligonucleotide; TTT chr2 60529679 60529700 60529696 60529701 +
gctactagaaaaggagaaggaa

SEQ ID NO: 205573 - DNA, 22 bp, Artificial Sequence
  Synthetic oligonucleotide; TTG chr2 60529680 60529701 60529697 60529702 +
ctactagaaaaggagaaggaaa

SEQ ID NO: 205574 - DNA, 22 bp, Artificial Sequence
  Synthetic oligonucleotide; CTA chr2 60529683 60529704 60529700 60529705 +
ctagaaaaggagaaggaaatcc

SEQ ID NO: 205575 - DNA, 22 bp, Artificial Sequence
  Synthetic oligonucleotide; CTA chr2 60529686 60529707 60529703 60529708 +
gaaaaggagaaggaaatcctgc

SEQ ID NO: 205576 - DNA, 22 bp, Artificial Sequence
  Synthetic oligonucleotide; CTG chr2 60529707 60529728 60529724 60529729 +
cctcccttatgaggcctagcca

SEQ ID NO: 205577 - DNA, 22 bp, Artificial Sequence
  Synthetic oligonucleotide; CTC chr2 60529711 60529732 60529728 60529733 +
ccttatgaggcctagccagggg

SEQ ID NO: 205578 - DNA, 22 bp, Artificial Sequence
  Synthetic oligonucleotide; CTT chr2 60529715 60529736 60529732 60529737 +
atgaggcctagccaggggaagt

SEQ ID NO: 205579 - DNA, 22 bp, Artificial Sequence
  Synthetic oligonucleotide; TTA chr2 60529716 60529737 60529733 60529738 +
tgaggcctagccaggggaagta

SEQ ID NO: 205580 - DNA, 22 bp, Artificial Sequence
  Synthetic oligonucleotide; CTA chr2 60529725 60529746 60529742 60529747 +
gccaggggaagtaaatgtgatt

SEQ ID NO: 205581 - DNA, 22 bp, Artificial Sequence
  Synthetic oligonucleotide; TTT chr2 60529748 60529769 60529765 60529770 +
tatcacattttatatagatgtg

SEQ ID NO: 205582 - DNA, 22 bp, Artificial Sequence
  Synthetic oligonucleotide; TTT chr2 60529749 60529770 60529766 60529771 +
atcacattttatatagatgtgc

SEQ ID NO: 205583 - DNA, 22 bp, Artificial Sequence
  Synthetic oligonucleotide; TTA chr2 60529750 60529771 60529767 60529772 +
tcacattttatatagatgtgca

SEQ ID NO: 205584 - DNA, 22 bp, Artificial Sequence
  Synthetic oligonucleotide; TTT chr2 60529758 60529779 60529775 60529780 +
tatatagatgtgcacaatggtg

SEQ ID NO: 205585 - DNA, 22 bp, Artificial Sequence
  Synthetic oligonucleotide; TTT chr2 60529759 60529780 60529776 60529781 +
atatagatgtgcacaatggtgc

SEQ ID NO: 205586 - DNA, 22 bp, Artificial Sequence
  Synthetic oligonucleotide; TTA chr2 60529760 60529781 60529777 60529782 +
tatagatgtgcacaatggtgcc

SEQ ID NO: 205587 - DNA, 22 bp, Artificial Sequence
  Synthetic oligonucleotide; CTT chr2 60529784 60529805 60529801 60529806 +
ttcaagtctatgatgggaaaaa

SEQ ID NO: 205588 - DNA, 22 bp, Artificial Sequence
  Synthetic oligonucleotide; TTT chr2 60529785 60529806 60529802 60529807 +
tcaagtctatgatgggaaaaat

SEQ ID NO: 205589 - DNA, 22 bp, Artificial Sequence
  Synthetic oligonucleotide; TTT chr2 60529786 60529807 60529803 60529808 +
caagtctatgatgggaaaaata

SEQ ID NO: 205590 - DNA, 22 bp, Artificial Sequence
  Synthetic oligonucleotide; TTC chr2 60529787 60529808 60529804 60529809 +
aagtctatgatgggaaaaatat

SEQ ID NO: 205591 - DNA, 22 bp, Artificial Sequence
  Synthetic oligonucleotide; CTA chr2 60529794 60529815 60529811 60529816 +
tgatgggaaaaatattttttat

SEQ ID NO: 205592 - DNA, 22 bp, Artificial Sequence
  Synthetic oligonucleotide; TTT chr2 60529811 60529832 60529828 60529833 +
tttattgtgtgaatatcatttc

SEQ ID NO: 205593 - DNA, 22 bp, Artificial Sequence
  Synthetic oligonucleotide; TTT chr2 60529812 60529833 60529829 60529834 +
ttattgtgtgaatatcatttca

SEQ ID NO: 205594 - DNA, 22 bp, Artificial Sequence
  Synthetic oligonucleotide; TTT chr2 60529813 60529834 60529830 60529835 +
tattgtgtgaatatcatttcag

SEQ ID NO: 205595 - DNA, 22 bp, Artificial Sequence
  Synthetic oligonucleotide; TTT chr2 60529814 60529835 60529831 60529836 +
attgtgtgaatatcatttcaga

SEQ ID NO: 205596 - DNA, 22 bp, Artificial Sequence
  Synthetic oligonucleotide; TTA chr2 60529815 60529836 60529832 60529837 +
ttgtgtgaatatcatttcagac

SEQ ID NO: 205597 - DNA, 22 bp, Artificial Sequence
  Synthetic oligonucleotide; TTG chr2 60529818 60529839 60529835 60529840 +
tgtgaatatcatttcagacagg

SEQ ID NO: 205598 - DNA, 22 bp, Artificial Sequence
  Synthetic oligonucleotide; TTT chr2 60529832 60529853 60529849 60529854 +
cagacaggtccccaaaccactt

SEQ ID NO: 205599 - DNA, 22 bp, Artificial Sequence
  Synthetic oligonucleotide; TTC chr2 60529833 60529854 60529850 60529855 +
agacaggtccccaaaccacttg

SEQ ID NO: 205600 - DNA, 22 bp, Artificial Sequence
  Synthetic oligonucleotide; CTT chr2 60529854 60529875 60529871 60529876 +
gaaagccctggtgtcccctagg

SEQ ID NO: 205601 - DNA, 22 bp, Artificial Sequence
  Synthetic oligonucleotide; TTG chr2 60529855 60529876 60529872 60529877 +
aaagccctggtgtcccctaggt

SEQ ID NO: 205602 - DNA, 22 bp, Artificial Sequence
  Synthetic oligonucleotide; CTG chr2 60529864 60529885 60529881 60529886 +
gtgtcccctaggtgggattcta

SEQ ID NO: 205603 - DNA, 22 bp, Artificial Sequence
  Synthetic oligonucleotide; CTA chr2 60529874 60529895 60529891 60529896 +
ggtgggattctatgaacccagc

SEQ ID NO: 205604 - DNA, 22 bp, Artificial Sequence
  Synthetic oligonucleotide; TTC chr2 60529884 60529905 60529901 60529906 +
tatgaacccagctttagcccca

SEQ ID NO: 205605 - DNA, 22 bp, Artificial Sequence
  Synthetic oligonucleotide; CTA chr2 60529886 60529907 60529903 60529908 +
tgaacccagctttagccccagc

SEQ ID NO: 205606 - DNA, 22 bp, Artificial Sequence
  Synthetic oligonucleotide; CTT chr2 60529898 60529919 60529915 60529920 +
tagccccagcagctcctctggt

SEQ ID NO: 205607 - DNA, 22 bp, Artificial Sequence
  Synthetic oligonucleotide; TTT chr2 60529899 60529920 60529916 60529921 +
agccccagcagctcctctggtg

SEQ ID NO: 205608 - DNA, 22 bp, Artificial Sequence
  Synthetic oligonucleotide; TTA chr2 60529900 60529921 60529917 60529922 +
gccccagcagctcctctggtgg

SEQ ID NO: 205609 - DNA, 22 bp, Artificial Sequence
  Synthetic oligonucleotide; CTC chr2 60529913 60529934 60529930 60529935 +
ctctggtgggaactagaacatg

SEQ ID NO: 205610 - DNA, 22 bp, Artificial Sequence
  Synthetic oligonucleotide; CTC chr2 60529916 60529937 60529933 60529938 +
tggtgggaactagaacatgcct

SEQ ID NO: 205611 - DNA, 22 bp, Artificial Sequence
  Synthetic oligonucleotide; CTG chr2 60529918 60529939 60529935 60529940 +
gtgggaactagaacatgcctcc

SEQ ID NO: 205612 - DNA, 22 bp, Artificial Sequence
  Synthetic oligonucleotide; CTA chr2 60529928 60529949 60529945 60529950 +
gaacatgcctcctgccagttag

SEQ ID NO: 205613 - DNA, 22 bp, Artificial Sequence
  Synthetic oligonucleotide; CTC chr2 60529939 60529960 60529956 60529961 +
ctgccagttagtaacagggaaa

SEQ ID NO: 205614 - DNA, 22 bp, Artificial Sequence
  Synthetic oligonucleotide; CTG chr2 60529942 60529963 60529959 60529964 +
ccagttagtaacagggaaattc

SEQ ID NO: 205615 - DNA, 22 bp, Artificial Sequence
  Synthetic oligonucleotide; TTA chr2 60529949 60529970 60529966 60529971 +
gtaacagggaaattcaattact

SEQ ID NO: 205616 - DNA, 22 bp, Artificial Sequence
  Synthetic oligonucleotide; TTC chr2 60529964 60529985 60529981 60529986 +
aattacttcgccacttgtggca

SEQ ID NO: 205617 - DNA, 22 bp, Artificial Sequence
  Synthetic oligonucleotide; TTA chr2 60529969 60529990 60529986 60529991 +
cttcgccacttgtggcaggagg

SEQ ID NO: 205618 - DNA, 22 bp, Artificial Sequence
  Synthetic oligonucleotide; CTT chr2 60529972 60529993 60529989 60529994 +
cgccacttgtggcaggagggca

SEQ ID NO: 205619 - DNA, 22 bp, Artificial Sequence
  Synthetic oligonucleotide; TTC chr2 60529973 60529994 60529990 60529995 +
gccacttgtggcaggagggcaa

SEQ ID NO: 205620 - DNA, 22 bp, Artificial Sequence
  Synthetic oligonucleotide; CTT chr2 60529980 60530001 60529997 60530002 +
gtggcaggagggcaaagactgc

SEQ ID NO: 205621 - DNA, 22 bp, Artificial Sequence
  Synthetic oligonucleotide; TTG chr2 60529981 60530002 60529998 60530003 +
tggcaggagggcaaagactgca

SEQ ID NO: 205622 - DNA, 22 bp, Artificial Sequence
  Synthetic oligonucleotide; CTG chr2 60530001 60530022 60530018 60530023 +
cacattaaaagagctaaaaatg

SEQ ID NO: 205623 - DNA, 22 bp, Artificial Sequence
  Synthetic oligonucleotide; TTA chr2 60530008 60530029 60530025 60530030 +
aaagagctaaaaatgtcaggaa

SEQ ID NO: 205624 - DNA, 22 bp, Artificial Sequence
  Synthetic oligonucleotide; CTA chr2 60530017 60530038 60530034 60530039 +
aaaatgtcaggaagttattggg

SEQ ID NO: 205625 - DNA, 22 bp, Artificial Sequence
  Synthetic oligonucleotide; TTA chr2 60530034 60530055 60530051 60530056 +
ttgggatgatgactcctgcttg

SEQ ID NO: 205626 - DNA, 22 bp, Artificial Sequence
  Synthetic oligonucleotide; TTG chr2 60530037 60530058 60530054 60530059 +
ggatgatgactcctgcttgcca

SEQ ID NO: 205627 - DNA, 22 bp, Artificial Sequence
  Synthetic oligonucleotide; CTC chr2 60530049 60530070 60530066 60530071 +
ctgcttgccaacattcatatat

SEQ ID NO: 205628 - DNA, 22 bp, Artificial Sequence
  Synthetic oligonucleotide; CTG chr2 60530052 60530073 60530069 60530074 +
cttgccaacattcatatatgaa

SEQ ID NO: 205629 - DNA, 22 bp, Artificial Sequence
  Synthetic oligonucleotide; CTT chr2 60530055 60530076 60530072 60530077 +
gccaacattcatatatgaatgc

SEQ ID NO: 205630 - DNA, 22 bp, Artificial Sequence
  Synthetic oligonucleotide; TTG chr2 60530056 60530077 60530073 60530078 +
ccaacattcatatatgaatgca

SEQ ID NO: 205631 - DNA, 22 bp, Artificial Sequence
  Synthetic oligonucleotide; TTC chr2 60530065 60530086 60530082 60530087 +
atatatgaatgcataatgtcac

SEQ ID NO: 205632 - DNA, 22 bp, Artificial Sequence
  Synthetic oligonucleotide; CTA chr2 60530096 60530117 60530113 60530118 +
aaaaacacaggaagaggccaag

SEQ ID NO: 205633 - DNA, 22 bp, Artificial Sequence
  Synthetic oligonucleotide; TTT chr2 60530163 60530184 60530180 60530185 +
gccatcggtcctgggtcctgcc

SEQ ID NO: 205634 - DNA, 22 bp, Artificial Sequence
  Synthetic oligonucleotide; TTG chr2 60530164 60530185 60530181 60530186 +
ccatcggtcctgggtcctgccc

SEQ ID NO: 205635 - DNA, 22 bp, Artificial Sequence
  Synthetic oligonucleotide; CTG chr2 60530176 60530197 60530193 60530198 +
ggtcctgcccaggaaaggctgc

SEQ ID NO: 205636 - DNA, 22 bp, Artificial Sequence
  Synthetic oligonucleotide; CTG chr2 60530183 60530204 60530200 60530205 +
cccaggaaaggctgcgcctcta

SEQ ID NO: 205637 - DNA, 22 bp, Artificial Sequence
  Synthetic oligonucleotide; CTG chr2 60530197 60530218 60530214 60530219 +
cgcctctaacaagagcaccttt

SEQ ID NO: 205638 - DNA, 22 bp, Artificial Sequence
  Synthetic oligonucleotide; CTC chr2 60530203 60530224 60530220 60530225 +
taacaagagcaccttttcccca

SEQ ID NO: 205639 - DNA, 22 bp, Artificial Sequence
  Synthetic oligonucleotide; CTA chr2 60530205 60530226 60530222 60530227 +
acaagagcaccttttccccacc

SEQ ID NO: 205640 - DNA, 22 bp, Artificial Sequence
  Synthetic oligonucleotide; CTT chr2 60530218 60530239 60530235 60530240 +
ttccccacccctggcctttctt

SEQ ID NO: 205641 - DNA, 22 bp, Artificial Sequence
  Synthetic oligonucleotide; TTT chr2 60530219 60530240 60530236 60530241 +
tccccacccctggcctttcttg

SEQ ID NO: 205642 - DNA, 22 bp, Artificial Sequence
  Synthetic oligonucleotide; TTT chr2 60530220 60530241 60530237 60530242 +
ccccacccctggcctttcttga

SEQ ID NO: 205643 - DNA, 22 bp, Artificial Sequence
  Synthetic oligonucleotide; TTC chr2 60530221 60530242 60530238 60530243 +
cccacccctggcctttcttgag

SEQ ID NO: 205644 - DNA, 22 bp, Artificial Sequence
  Synthetic oligonucleotide; CTG chr2 60530231 60530252 60530248 60530253 +
gcctttcttgagccttccttga

SEQ ID NO: 205645 - DNA, 22 bp, Artificial Sequence
  Synthetic oligonucleotide; CTT chr2 60530236 60530257 60530253 60530258 +
tcttgagccttccttgagcctt

SEQ ID NO: 205646 - DNA, 22 bp, Artificial Sequence
  Synthetic oligonucleotide; TTT chr2 60530237 60530258 60530254 60530259 +
cttgagccttccttgagccttc

SEQ ID NO: 205647 - DNA, 22 bp, Artificial Sequence
  Synthetic oligonucleotide; TTC chr2 60530238 60530259 60530255 60530260 +
ttgagccttccttgagccttcc

SEQ ID NO: 205648 - DNA, 22 bp, Artificial Sequence
  Synthetic oligonucleotide; CTT chr2 60530240 60530261 60530257 60530262 +
gagccttccttgagccttcctt

SEQ ID NO: 205649 - DNA, 22 bp, Artificial Sequence
  Synthetic oligonucleotide; TTG chr2 60530241 60530262 60530258 60530263 +
agccttccttgagccttccttg

SEQ ID NO: 205650 - DNA, 22 bp, Artificial Sequence
  Synthetic oligonucleotide; CTT chr2 60530247 60530268 60530264 60530269 +
ccttgagccttccttgcatatt

SEQ ID NO: 205651 - DNA, 22 bp, Artificial Sequence
  Synthetic oligonucleotide; TTC chr2 60530248 60530269 60530265 60530270 +
cttgagccttccttgcatatta

SEQ ID NO: 205652 - DNA, 22 bp, Artificial Sequence
  Synthetic oligonucleotide; CTT chr2 60530251 60530272 60530268 60530273 +
gagccttccttgcatattatcg

SEQ ID NO: 205653 - DNA, 22 bp, Artificial Sequence
  Synthetic oligonucleotide; TTG chr2 60530252 60530273 60530269 60530274 +
agccttccttgcatattatcgt

SEQ ID NO: 205654 - DNA, 22 bp, Artificial Sequence
  Synthetic oligonucleotide; CTT chr2 60530258 60530279 60530275 60530280 +
ccttgcatattatcgttctcag

SEQ ID NO: 205655 - DNA, 22 bp, Artificial Sequence
  Synthetic oligonucleotide; TTC chr2 60530259 60530280 60530276 60530281 +
cttgcatattatcgttctcagc

SEQ ID NO: 205656 - DNA, 22 bp, Artificial Sequence
  Synthetic oligonucleotide; CTT chr2 60530262 60530283 60530279 60530284 +
gcatattatcgttctcagccac

SEQ ID NO: 205657 - DNA, 22 bp, Artificial Sequence
  Synthetic oligonucleotide; TTG chr2 60530263 60530284 60530280 60530285 +
catattatcgttctcagccacc

SEQ ID NO: 205658 - DNA, 22 bp, Artificial Sequence
  Synthetic oligonucleotide; TTA chr2 60530270 60530291 60530287 60530292 +
tcgttctcagccaccgacagct

SEQ ID NO: 205659 - DNA, 22 bp, Artificial Sequence
  Synthetic oligonucleotide; TTC chr2 60530276 60530297 60530293 60530298 +
tcagccaccgacagcttaattc

SEQ ID NO: 205660 - DNA, 22 bp, Artificial Sequence
  Synthetic oligonucleotide; CTC chr2 60530278 60530299 60530295 60530300 +
agccaccgacagcttaattcac

SEQ ID NO: 205661 - DNA, 22 bp, Artificial Sequence
  Synthetic oligonucleotide; CTT chr2 60530293 60530314 60530310 60530315 +
aattcacaggcccttccaacaa

SEQ ID NO: 205662 - DNA, 22 bp, Artificial Sequence
  Synthetic oligonucleotide; TTA chr2 60530294 60530315 60530311 60530316 +
attcacaggcccttccaacaag

SEQ ID NO: 205663 - DNA, 22 bp, Artificial Sequence
  Synthetic oligonucleotide; TTC chr2 60530298 60530319 60530315 60530320 +
acaggcccttccaacaagttaa

SEQ ID NO: 205664 - DNA, 22 bp, Artificial Sequence
  Synthetic oligonucleotide; CTT chr2 60530308 60530329 60530325 60530330 +
ccaacaagttaaacttcagcca

SEQ ID NO: 205665 - DNA, 22 bp, Artificial Sequence
  Synthetic oligonucleotide; TTC chr2 60530309 60530330 60530326 60530331 +
caacaagttaaacttcagccat

SEQ ID NO: 205666 - DNA, 22 bp, Artificial Sequence
  Synthetic oligonucleotide; TTA chr2 60530319 60530340 60530336 60530341 +
aacttcagccatttaaaaaaaa

SEQ ID NO: 205667 - DNA, 22 bp, Artificial Sequence
  Synthetic oligonucleotide; CTT chr2 60530324 60530345 60530341 60530346 +
cagccatttaaaaaaaaaaaaa

SEQ ID NO: 205668 - DNA, 22 bp, Artificial Sequence
  Synthetic oligonucleotide; TTC chr2 60530325 60530346 60530342 60530347 +
agccatttaaaaaaaaaaaaaa

SEQ ID NO: 205669 - DNA, 22 bp, Artificial Sequence
  Synthetic oligonucleotide; TTT chr2 60530333 60530354 60530350 60530355 +
aaaaaaaaaaaaaaaaaagagt

SEQ ID NO: 205670 - DNA, 22 bp, Artificial Sequence
  Synthetic oligonucleotide; TTA chr2 60530334 60530355 60530351 60530356 +
aaaaaaaaaaaaaaaaagagtt

SEQ ID NO: 205671 - DNA, 22 bp, Artificial Sequence
  Synthetic oligonucleotide; TTT chr2 60530357 60530378 60530374 60530379 +
ccactgatttcttacctgcaca

SEQ ID NO: 205672 - DNA, 22 bp, Artificial Sequence
  Synthetic oligonucleotide; TTC chr2 60530358 60530379 60530375 60530380 +
cactgatttcttacctgcacac

SEQ ID NO: 205673 - DNA, 22 bp, Artificial Sequence
  Synthetic oligonucleotide; CTG chr2 60530363 60530384 60530380 60530385 +
atttcttacctgcacacgcagg

SEQ ID NO: 205674 - DNA, 22 bp, Artificial Sequence
  Synthetic oligonucleotide; TTT chr2 60530367 60530388 60530384 60530389 +
cttacctgcacacgcaggcacg

SEQ ID NO: 205675 - DNA, 22 bp, Artificial Sequence
  Synthetic oligonucleotide; TTC chr2 60530368 60530389 60530385 60530390 +
ttacctgcacacgcaggcacgc

SEQ ID NO: 205676 - DNA, 22 bp, Artificial Sequence
  Synthetic oligonucleotide; CTT chr2 60530370 60530391 60530387 60530392 +
acctgcacacgcaggcacgccg

SEQ ID NO: 205677 - DNA, 22 bp, Artificial Sequence
  Synthetic oligonucleotide; TTA chr2 60530371 60530392 60530388 60530393 +
cctgcacacgcaggcacgccgg

SEQ ID NO: 205678 - DNA, 22 bp, Artificial Sequence
  Synthetic oligonucleotide; CTG chr2 60530375 60530396 60530392 60530397 +
cacacgcaggcacgccggccac

SEQ ID NO: 205679 - DNA, 22 bp, Artificial Sequence
  Synthetic oligonucleotide; CTG chr2 60530411 60530432 60530428 60530433 +
caccacgagctctcacacctgg

SEQ ID NO: 205680 - DNA, 22 bp, Artificial Sequence
  Synthetic oligonucleotide; CTC chr2 60530423 60530444 60530440 60530445 +
tcacacctggtcgcctgaacac

SEQ ID NO: 205681 - DNA, 22 bp, Artificial Sequence
  Synthetic oligonucleotide; CTC chr2 60530425 60530446 60530442 60530447 +
acacctggtcgcctgaacacaa

SEQ ID NO: 205682 - DNA, 22 bp, Artificial Sequence
  Synthetic oligonucleotide; CTG chr2 60530432 60530453 60530449 60530454 +
gtcgcctgaacacaaccaaacc

SEQ ID NO: 205683 - DNA, 22 bp, Artificial Sequence
  Synthetic oligonucleotide; CTG chr2 60530440 60530461 60530457 60530462 +
aacacaaccaaacccttcccat

SEQ ID NO: 205684 - DNA, 22 bp, Artificial Sequence
  Synthetic oligonucleotide; CTT chr2 60530457 60530478 60530474 60530479 +
cccatctggccctcgggttact

SEQ ID NO: 205685 - DNA, 22 bp, Artificial Sequence
  Synthetic oligonucleotide; TTC chr2 60530458 60530479 60530475 60530480 +
ccatctggccctcgggttactg

SEQ ID NO: 205686 - DNA, 22 bp, Artificial Sequence
  Synthetic oligonucleotide; CTG chr2 60530465 60530486 60530482 60530487 +
gccctcgggttactggcgttat

SEQ ID NO: 205687 - DNA, 22 bp, Artificial Sequence
  Synthetic oligonucleotide; CTC chr2 60530471 60530492 60530488 60530493 +
gggttactggcgttatcacaac

SEQ ID NO: 205688 - DNA, 22 bp, Artificial Sequence
  Synthetic oligonucleotide; TTA chr2 60530477 60530498 60530494 60530499 +
ctggcgttatcacaactttttt

SEQ ID NO: 205689 - DNA, 22 bp, Artificial Sequence
  Synthetic oligonucleotide; CTG chr2 60530480 60530501 60530497 60530502 +
gcgttatcacaactttttttcc

SEQ ID NO: 205690 - DNA, 22 bp, Artificial Sequence
  Synthetic oligonucleotide; TTA chr2 60530486 60530507 60530503 60530508 +
tcacaactttttttcccaacgg

SEQ ID NO: 205691 - DNA, 22 bp, Artificial Sequence
  Synthetic oligonucleotide; CTT chr2 60530495 60530516 60530512 60530517 +
tttttcccaacggcaagccagg

SEQ ID NO: 205692 - DNA, 22 bp, Artificial Sequence
  Synthetic oligonucleotide; TTT chr2 60530496 60530517 60530513 60530518 +
ttttcccaacggcaagccagga

SEQ ID NO: 205693 - DNA, 22 bp, Artificial Sequence
  Synthetic oligonucleotide; TTT chr2 60530497 60530518 60530514 60530519 +
tttcccaacggcaagccaggaa

SEQ ID NO: 205694 - DNA, 22 bp, Artificial Sequence
  Synthetic oligonucleotide; TTT chr2 60530498 60530519 60530515 60530520 +
ttcccaacggcaagccaggaaa

SEQ ID NO: 205695 - DNA, 22 bp, Artificial Sequence
  Synthetic oligonucleotide; TTT chr2 60530499 60530520 60530516 60530521 +
tcccaacggcaagccaggaaag

SEQ ID NO: 205696 - DNA, 22 bp, Artificial Sequence
  Synthetic oligonucleotide; TTT chr2 60530500 60530521 60530517 60530522 +
cccaacggcaagccaggaaaga

SEQ ID NO: 205697 - DNA, 22 bp, Artificial Sequence
  Synthetic oligonucleotide; TTC chr2 60530501 60530522 60530518 60530523 +
ccaacggcaagccaggaaagat

SEQ ID NO: 205698 - DNA, 22 bp, Artificial Sequence
  Synthetic oligonucleotide; CTG chr2 60530554 60530575 60530571 60530576 +
gcctcaactggttcagaggagg

SEQ ID NO: 205699 - DNA, 22 bp, Artificial Sequence
  Synthetic oligonucleotide; CTC chr2 60530559 60530580 60530576 60530581 +
aactggttcagaggagggaaaa

SEQ ID NO: 205700 - DNA, 22 bp, Artificial Sequence
  Synthetic oligonucleotide; CTG chr2 60530564 60530585 60530581 60530586 +
gttcagaggagggaaaaaattg

SEQ ID NO: 205701 - DNA, 22 bp, Artificial Sequence
  Synthetic oligonucleotide; TTC chr2 60530568 60530589 60530585 60530590 +
agaggagggaaaaaattgagct

SEQ ID NO: 205702 - DNA, 22 bp, Artificial Sequence
  Synthetic oligonucleotide; TTG chr2 60530586 60530607 60530603 60530608 +
agctgtgcgtctcttttttttt

SEQ ID NO: 205703 - DNA, 22 bp, Artificial Sequence
  Synthetic oligonucleotide; CTG chr2 60530591 60530612 60530608 60530613 +
tgcgtctctttttttttttatt

SEQ ID NO: 205704 - DNA, 22 bp, Artificial Sequence
  Synthetic oligonucleotide; CTC chr2 60530599 60530620 60530616 60530621 +
tttttttttttattttttattt

SEQ ID NO: 205705 - DNA, 22 bp, Artificial Sequence
  Synthetic oligonucleotide; CTT chr2 60530601 60530622 60530618 60530623 +
tttttttttattttttattttt

SEQ ID NO: 205706 - DNA, 22 bp, Artificial Sequence
  Synthetic oligonucleotide; TTT chr2 60530602 60530623 60530619 60530624 +
ttttttttattttttatttttt

SEQ ID NO: 205707 - DNA, 22 bp, Artificial Sequence
  Synthetic oligonucleotide; TTT chr2 60530603 60530624 60530620 60530625 +
tttttttattttttattttttt

SEQ ID NO: 205708 - DNA, 22 bp, Artificial Sequence
  Synthetic oligonucleotide; TTT chr2 60530604 60530625 60530621 60530626 +
ttttttattttttatttttttg

SEQ ID NO: 205709 - DNA, 22 bp, Artificial Sequence
  Synthetic oligonucleotide; TTT chr2 60530605 60530626 60530622 60530627 +
tttttattttttatttttttgc

SEQ ID NO: 205710 - DNA, 22 bp, Artificial Sequence
  Synthetic oligonucleotide; TTT chr2 60530606 60530627 60530623 60530628 +
ttttattttttatttttttgcc

SEQ ID NO: 205711 - DNA, 22 bp, Artificial Sequence
  Synthetic oligonucleotide; TTT chr2 60530607 60530628 60530624 60530629 +
tttattttttatttttttgcct

SEQ ID NO: 205712 - DNA, 22 bp, Artificial Sequence
  Synthetic oligonucleotide; TTT chr2 60530608 60530629 60530625 60530630 +
ttattttttatttttttgcctt

SEQ ID NO: 205713 - DNA, 22 bp, Artificial Sequence
  Synthetic oligonucleotide; TTT chr2 60530609 60530630 60530626 60530631 +
tattttttatttttttgccttt

SEQ ID NO: 205714 - DNA, 22 bp, Artificial Sequence
  Synthetic oligonucleotide; TTT chr2 60530610 60530631 60530627 60530632 +
attttttatttttttgccttta

SEQ ID NO: 205715 - DNA, 22 bp, Artificial Sequence
  Synthetic oligonucleotide; TTA chr2 60530611 60530632 60530628 60530633 +
ttttttatttttttgcctttag

SEQ ID NO: 205716 - DNA, 22 bp, Artificial Sequence
  Synthetic oligonucleotide; TTT chr2 60530614 60530635 60530631 60530636 +
tttatttttttgcctttagcca

SEQ ID NO: 205717 - DNA, 22 bp, Artificial Sequence
  Synthetic oligonucleotide; TTT chr2 60530615 60530636 60530632 60530637 +
ttatttttttgcctttagccaa

SEQ ID NO: 205718 - DNA, 22 bp, Artificial Sequence
  Synthetic oligonucleotide; TTT chr2 60530616 60530637 60530633 60530638 +
tatttttttgcctttagccaaa

SEQ ID NO: 205719 - DNA, 22 bp, Artificial Sequence
  Synthetic oligonucleotide; TTT chr2 60530617 60530638 60530634 60530639 +
atttttttgcctttagccaaaa

SEQ ID NO: 205720 - DNA, 22 bp, Artificial Sequence
  Synthetic oligonucleotide; TTA chr2 60530618 60530639 60530635 60530640 +
tttttttgcctttagccaaaag

SEQ ID NO: 205721 - DNA, 22 bp, Artificial Sequence
  Synthetic oligonucleotide; TTT chr2 60530621 60530642 60530638 60530643 +
ttttgcctttagccaaaagacc

SEQ ID NO: 205722 - DNA, 22 bp, Artificial Sequence
  Synthetic oligonucleotide; TTT chr2 60530622 60530643 60530639 60530644 +
tttgcctttagccaaaagacca

SEQ ID NO: 205723 - DNA, 22 bp, Artificial Sequence
  Synthetic oligonucleotide; TTT chr2 60530623 60530644 60530640 60530645 +
ttgcctttagccaaaagaccag

SEQ ID NO: 205724 - DNA, 22 bp, Artificial Sequence
  Synthetic oligonucleotide; TTT chr2 60530624 60530645 60530641 60530646 +
tgcctttagccaaaagaccagg

SEQ ID NO: 205725 - DNA, 22 bp, Artificial Sequence
  Synthetic oligonucleotide; TTT chr2 60530625 60530646 60530642 60530647 +
gcctttagccaaaagaccaggg

SEQ ID NO: 205726 - DNA, 22 bp, Artificial Sequence
  Synthetic oligonucleotide; TTG chr2 60530626 60530647 60530643 60530648 +
cctttagccaaaagaccaggga

SEQ ID NO: 205727 - DNA, 22 bp, Artificial Sequence
  Synthetic oligonucleotide; CTT chr2 60530630 60530651 60530647 60530652 +
tagccaaaagaccagggagcat

SEQ ID NO: 205728 - DNA, 22 bp, Artificial Sequence
  Synthetic oligonucleotide; TTT chr2 60530631 60530652 60530648 60530653 +
agccaaaagaccagggagcatt

SEQ ID NO: 205729 - DNA, 22 bp, Artificial Sequence
  Synthetic oligonucleotide; TTA chr2 60530632 60530653 60530649 60530654 +
gccaaaagaccagggagcattt

SEQ ID NO: 205730 - DNA, 22 bp, Artificial Sequence
  Synthetic oligonucleotide; TTT chr2 60530654 60530675 60530671 60530676 +
gatgtacagtcagcaggtattt

SEQ ID NO: 205731 - DNA, 22 bp, Artificial Sequence
  Synthetic oligonucleotide; TTG chr2 60530655 60530676 60530672 60530677 +
atgtacagtcagcaggtattta

SEQ ID NO: 205732 - DNA, 22 bp, Artificial Sequence
  Synthetic oligonucleotide; TTT chr2 60530676 60530697 60530693 60530698 +
aaaaaagaaagaaagaaaaagg

SEQ ID NO: 205733 - DNA, 22 bp, Artificial Sequence
  Synthetic oligonucleotide; TTA chr2 60530677 60530698 60530694 60530699 +
aaaaagaaagaaagaaaaagga

SEQ ID NO: 205734 - DNA, 22 bp, Artificial Sequence
  Synthetic oligonucleotide; CTG chr2 60530713 60530734 60530730 60530735 +
aaaaggcttggctgcactgggg

SEQ ID NO: 205735 - DNA, 22 bp, Artificial Sequence
  Synthetic oligonucleotide; CTT chr2 60530722 60530743 60530739 60530744 +
ggctgcactggggccctgacac

SEQ ID NO: 205736 - DNA, 22 bp, Artificial Sequence
  Synthetic oligonucleotide; TTG chr2 60530723 60530744 60530740 60530745 +
gctgcactggggccctgacacg

SEQ ID NO: 205737 - DNA, 22 bp, Artificial Sequence
  Synthetic oligonucleotide; CTG chr2 60530727 60530748 60530744 60530749 +
cactggggccctgacacgctct

SEQ ID NO: 205738 - DNA, 22 bp, Artificial Sequence
  Synthetic oligonucleotide; CTG chr2 60530732 60530753 60530749 60530754 +
gggccctgacacgctctcatct

SEQ ID NO: 205739 - DNA, 22 bp, Artificial Sequence
  Synthetic oligonucleotide; CTG chr2 60530740 60530761 60530757 60530762 +
acacgctctcatctaaagcctg

SEQ ID NO: 205740 - DNA, 22 bp, Artificial Sequence
  Synthetic oligonucleotide; CTC chr2 60530748 60530769 60530765 60530770 +
tcatctaaagcctggccctcgg

SEQ ID NO: 205741 - DNA, 22 bp, Artificial Sequence
  Synthetic oligonucleotide; CTC chr2 60530750 60530771 60530767 60530772 +
atctaaagcctggccctcggcc

SEQ ID NO: 205742 - DNA, 22 bp, Artificial Sequence
  Synthetic oligonucleotide; CTA chr2 60530755 60530776 60530772 60530777 +
aagcctggccctcggccaagtt

SEQ ID NO: 205743 - DNA, 22 bp, Artificial Sequence
  Synthetic oligonucleotide; CTG chr2 60530762 60530783 60530779 60530784 +
gccctcggccaagttcatctgt

SEQ ID NO: 205744 - DNA, 22 bp, Artificial Sequence
  Synthetic oligonucleotide; CTC chr2 60530768 60530789 60530785 60530790 +
ggccaagttcatctgttaatgg

SEQ ID NO: 205745 - DNA, 22 bp, Artificial Sequence
  Synthetic oligonucleotide; TTC chr2 60530778 60530799 60530795 60530800 +
atctgttaatggacaaccacaa

SEQ ID NO: 205746 - DNA, 22 bp, Artificial Sequence
  Synthetic oligonucleotide; CTG chr2 60530783 60530804 60530800 60530805 +
ttaatggacaaccacaaccagg

SEQ ID NO: 205747 - DNA, 22 bp, Artificial Sequence
  Synthetic oligonucleotide; TTA chr2 60530786 60530807 60530803 60530808 +
atggacaaccacaaccagggcc

SEQ ID NO: 205748 - DNA, 22 bp, Artificial Sequence
  Synthetic oligonucleotide; CTG chr2 60530810 60530831 60530827 60530832 +
cacctcccccacctcccactac

SEQ ID NO: 205749 - DNA, 22 bp, Artificial Sequence
  Synthetic oligonucleotide; CTC chr2 60530816 60530837 60530833 60530838 +
ccccacctcccactacccctcc

SEQ ID NO: 205750 - DNA, 22 bp, Artificial Sequence
  Synthetic oligonucleotide; CTC chr2 60530825 60530846 60530842 60530847 +
ccactacccctcctgagtcttc

SEQ ID NO: 205751 - DNA, 22 bp, Artificial Sequence
  Synthetic oligonucleotide; CTA chr2 60530831 60530852 60530848 60530853 +
cccctcctgagtcttctctgtt

SEQ ID NO: 205752 - DNA, 22 bp, Artificial Sequence
  Synthetic oligonucleotide; CTC chr2 60530837 60530858 60530854 60530859 +
ctgagtcttctctgttctccta

SEQ ID NO: 205753 - DNA, 22 bp, Artificial Sequence
  Synthetic oligonucleotide; CTG chr2 60530840 60530861 60530857 60530862 +
agtcttctctgttctcctacct

SEQ ID NO: 205754 - DNA, 22 bp, Artificial Sequence
  Synthetic oligonucleotide; CTT chr2 60530846 60530867 60530863 60530868 +
ctctgttctcctacctctttcg

SEQ ID NO: 205755 - DNA, 22 bp, Artificial Sequence
  Synthetic oligonucleotide; TTC chr2 60530847 60530868 60530864 60530869 +
tctgttctcctacctctttcga

SEQ ID NO: 205756 - DNA, 22 bp, Artificial Sequence
  Synthetic oligonucleotide; CTC chr2 60530849 60530870 60530866 60530871 +
tgttctcctacctctttcgagc

SEQ ID NO: 205757 - DNA, 22 bp, Artificial Sequence
  Synthetic oligonucleotide; CTG chr2 60530851 60530872 60530868 60530873 +
ttctcctacctctttcgagctc

SEQ ID NO: 205758 - DNA, 22 bp, Artificial Sequence
  Synthetic oligonucleotide; TTC chr2 60530854 60530875 60530871 60530876 +
tcctacctctttcgagctccta

SEQ ID NO: 205759 - DNA, 22 bp, Artificial Sequence
  Synthetic oligonucleotide; CTC chr2 60530856 60530877 60530873 60530878 +
ctacctctttcgagctcctaaa

SEQ ID NO: 205760 - DNA, 22 bp, Artificial Sequence
  Synthetic oligonucleotide; CTA chr2 60530859 60530880 60530876 60530881 +
cctctttcgagctcctaaaaac

SEQ ID NO: 205761 - DNA, 22 bp, Artificial Sequence
  Synthetic oligonucleotide; CTC chr2 60530863 60530884 60530880 60530885 +
tttcgagctcctaaaaactaga

SEQ ID NO: 205762 - DNA, 22 bp, Artificial Sequence
  Synthetic oligonucleotide; CTT chr2 60530865 60530886 60530882 60530887 +
tcgagctcctaaaaactagaca

SEQ ID NO: 205763 - DNA, 22 bp, Artificial Sequence
  Synthetic oligonucleotide; TTT chr2 60530866 60530887 60530883 60530888 +
cgagctcctaaaaactagacat

SEQ ID NO: 205764 - DNA, 22 bp, Artificial Sequence
  Synthetic oligonucleotide; TTC chr2 60530867 60530888 60530884 60530889 +
gagctcctaaaaactagacatc

SEQ ID NO: 205765 - DNA, 22 bp, Artificial Sequence
  Synthetic oligonucleotide; CTC chr2 60530873 60530894 60530890 60530895 +
ctaaaaactagacatcgattat

SEQ ID NO: 205766 - DNA, 22 bp, Artificial Sequence
  Synthetic oligonucleotide; CTA chr2 60530876 60530897 60530893 60530898 +
aaaactagacatcgattatgtc

SEQ ID NO: 205767 - DNA, 22 bp, Artificial Sequence
  Synthetic oligonucleotide; CTA chr2 60530883 60530904 60530900 60530905 +
gacatcgattatgtctgcgctt

SEQ ID NO: 205768 - DNA, 22 bp, Artificial Sequence
  Synthetic oligonucleotide; TTA chr2 60530894 60530915 60530911 60530916 +
tgtctgcgcttttccctttcta

SEQ ID NO: 205769 - DNA, 22 bp, Artificial Sequence
  Synthetic oligonucleotide; CTG chr2 60530900 60530921 60530917 60530922 +
cgcttttccctttctattcaag

SEQ ID NO: 205770 - DNA, 22 bp, Artificial Sequence
  Synthetic oligonucleotide; CTT chr2 60530905 60530926 60530922 60530927 +
ttccctttctattcaagataaa

SEQ ID NO: 205771 - DNA, 22 bp, Artificial Sequence
  Synthetic oligonucleotide; TTT chr2 60530906 60530927 60530923 60530928 +
tccctttctattcaagataaac

SEQ ID NO: 205772 - DNA, 22 bp, Artificial Sequence
  Synthetic oligonucleotide; TTT chr2 60530907 60530928 60530924 60530929 +
ccctttctattcaagataaaca

SEQ ID NO: 205773 - DNA, 22 bp, Artificial Sequence
  Synthetic oligonucleotide; TTC chr2 60530908 60530929 60530925 60530930 +
cctttctattcaagataaacaa

SEQ ID NO: 205774 - DNA, 22 bp, Artificial Sequence
  Synthetic oligonucleotide; CTT chr2 60530912 60530933 60530929 60530934 +
tctattcaagataaacaaagtg

SEQ ID NO: 205775 - DNA, 22 bp, Artificial Sequence
  Synthetic oligonucleotide; TTT chr2 60530913 60530934 60530930 60530935 +
ctattcaagataaacaaagtgc

SEQ ID NO: 205776 - DNA, 22 bp, Artificial Sequence
  Synthetic oligonucleotide; TTC chr2 60530914 60530935 60530931 60530936 +
tattcaagataaacaaagtgct

SEQ ID NO: 205777 - DNA, 22 bp, Artificial Sequence
  Synthetic oligonucleotide; CTA chr2 60530916 60530937 60530933 60530938 +
ttcaagataaacaaagtgcttc

SEQ ID NO: 205778 - DNA, 22 bp, Artificial Sequence
  Synthetic oligonucleotide; TTC chr2 60530919 60530940 60530936 60530941 +
aagataaacaaagtgcttcaag

SEQ ID NO: 205779 - DNA, 22 bp, Artificial Sequence
  Synthetic oligonucleotide; CTT chr2 60530937 60530958 60530954 60530959 +
caagttcagggcgcaccctggg

SEQ ID NO: 205780 - DNA, 22 bp, Artificial Sequence
  Synthetic oligonucleotide; TTC chr2 60530938 60530959 60530955 60530960 +
aagttcagggcgcaccctggga

SEQ ID NO: 205781 - DNA, 22 bp, Artificial Sequence
  Synthetic oligonucleotide; TTC chr2 60530944 60530965 60530961 60530966 +
agggcgcaccctgggacccctg

SEQ ID NO: 205782 - DNA, 22 bp, Artificial Sequence
  Synthetic oligonucleotide; CTG chr2 60530957 60530978 60530974 60530979 +
ggacccctgacaaaacaatcta

SEQ ID NO: 205783 - DNA, 22 bp, Artificial Sequence
  Synthetic oligonucleotide; CTG chr2 60530966 60530987 60530983 60530988 +
acaaaacaatctatcattctgt

SEQ ID NO: 205784 - DNA, 22 bp, Artificial Sequence
  Synthetic oligonucleotide; CTA chr2 60530979 60531000 60530996 60531001 +
tcattctgtctgctaaaccagt

SEQ ID NO: 205785 - DNA, 22 bp, Artificial Sequence
  Synthetic oligonucleotide; TTC chr2 60530985 60531006 60531002 60531007 +
tgtctgctaaaccagtctggct

SEQ ID NO: 205786 - DNA, 22 bp, Artificial Sequence
  Synthetic oligonucleotide; CTG chr2 60530987 60531008 60531004 60531009 +
tctgctaaaccagtctggctac

SEQ ID NO: 205787 - DNA, 22 bp, Artificial Sequence
  Synthetic oligonucleotide; CTG chr2 60530991 60531012 60531008 60531013 +
ctaaaccagtctggctacacca

SEQ ID NO: 205788 - DNA, 22 bp, Artificial Sequence
  Synthetic oligonucleotide; CTA chr2 60530994 60531015 60531011 60531016 +
aaccagtctggctacaccatgg

SEQ ID NO: 205789 - DNA, 22 bp, Artificial Sequence
  Synthetic oligonucleotide; CTG chr2 60531004 60531025 60531021 60531026 +
gctacaccatggccagggagag

SEQ ID NO: 205790 - DNA, 22 bp, Artificial Sequence
  Synthetic oligonucleotide; CTA chr2 60531008 60531029 60531025 60531030 +
caccatggccagggagagtaac

SEQ ID NO: 205791 - DNA, 22 bp, Artificial Sequence
  Synthetic oligonucleotide; CTC chr2 60531034 60531055 60531051 60531056 +
ccaatgtacaattttccctttg

SEQ ID NO: 205792 - DNA, 22 bp, Artificial Sequence
  Synthetic oligonucleotide; TTT chr2 60531048 60531069 60531065 60531070 +
tccctttgtgctccttccctct

SEQ ID NO: 205793 - DNA, 22 bp, Artificial Sequence
  Synthetic oligonucleotide; TTT chr2 60531049 60531070 60531066 60531071 +
ccctttgtgctccttccctctt

SEQ ID NO: 205794 - DNA, 22 bp, Artificial Sequence
  Synthetic oligonucleotide; TTC chr2 60531050 60531071 60531067 60531072 +
cctttgtgctccttccctcttg

SEQ ID NO: 205795 - DNA, 22 bp, Artificial Sequence
  Synthetic oligonucleotide; CTT chr2 60531054 60531075 60531071 60531076 +
tgtgctccttccctcttgccac

SEQ ID NO: 205796 - DNA, 22 bp, Artificial Sequence
  Synthetic oligonucleotide; TTT chr2 60531055 60531076 60531072 60531077 +
gtgctccttccctcttgccact

SEQ ID NO: 205797 - DNA, 22 bp, Artificial Sequence
  Synthetic oligonucleotide; TTG chr2 60531056 60531077 60531073 60531078 +
tgctccttccctcttgccacta

SEQ ID NO: 205798 - DNA, 22 bp, Artificial Sequence
  Synthetic oligonucleotide; CTC chr2 60531061 60531082 60531078 60531083 +
cttccctcttgccactaacctc

SEQ ID NO: 205799 - DNA, 22 bp, Artificial Sequence
  Synthetic oligonucleotide; CTT chr2 60531064 60531085 60531081 60531086 +
ccctcttgccactaacctcttt

SEQ ID NO: 205800 - DNA, 22 bp, Artificial Sequence
  Synthetic oligonucleotide; TTC chr2 60531065 60531086 60531082 60531087 +
cctcttgccactaacctctttt

SEQ ID NO: 205801 - DNA, 22 bp, Artificial Sequence
  Synthetic oligonucleotide; CTC chr2 60531069 60531090 60531086 60531091 +
ttgccactaacctcttttcttt

SEQ ID NO: 205802 - DNA, 22 bp, Artificial Sequence
  Synthetic oligonucleotide; CTT chr2 60531071 60531092 60531088 60531093 +
gccactaacctcttttctttac

SEQ ID NO: 205803 - DNA, 22 bp, Artificial Sequence
  Synthetic oligonucleotide; TTG chr2 60531072 60531093 60531089 60531094 +
ccactaacctcttttctttacc

SEQ ID NO: 205804 - DNA, 22 bp, Artificial Sequence
  Synthetic oligonucleotide; CTA chr2 60531078 60531099 60531095 60531100 +
acctcttttctttaccaccttc

SEQ ID NO: 205805 - DNA, 22 bp, Artificial Sequence
  Synthetic oligonucleotide; CTC chr2 60531083 60531104 60531100 60531105 +
ttttctttaccaccttctccgg

SEQ ID NO: 205806 - DNA, 22 bp, Artificial Sequence
  Synthetic oligonucleotide; CTT chr2 60531085 60531106 60531102 60531107 +
ttctttaccaccttctccggag

SEQ ID NO: 205807 - DNA, 22 bp, Artificial Sequence
  Synthetic oligonucleotide; TTT chr2 60531086 60531107 60531103 60531108 +
tctttaccaccttctccggagc

SEQ ID NO: 205808 - DNA, 22 bp, Artificial Sequence
  Synthetic oligonucleotide; TTT chr2 60531087 60531108 60531104 60531109 +
ctttaccaccttctccggagca

SEQ ID NO: 205809 - DNA, 22 bp, Artificial Sequence
  Synthetic oligonucleotide; TTC chr2 60531088 60531109 60531105 60531110 +
tttaccaccttctccggagcag

SEQ ID NO: 205810 - DNA, 22 bp, Artificial Sequence
  Synthetic oligonucleotide; CTT chr2 60531090 60531111 60531107 60531112 +
taccaccttctccggagcagat

SEQ ID NO: 205811 - DNA, 22 bp, Artificial Sequence
  Synthetic oligonucleotide; TTT chr2 60531091 60531112 60531108 60531113 +
accaccttctccggagcagatg

SEQ ID NO: 205812 - DNA, 22 bp, Artificial Sequence
  Synthetic oligonucleotide; TTA chr2 60531092 60531113 60531109 60531114 +
ccaccttctccggagcagatgg

SEQ ID NO: 205813 - DNA, 22 bp, Artificial Sequence
  Synthetic oligonucleotide; CTT chr2 60531099 60531120 60531116 60531121 +
ctccggagcagatggacttgac

SEQ ID NO: 205814 - DNA, 22 bp, Artificial Sequence
  Synthetic oligonucleotide; TTC chr2 60531100 60531121 60531117 60531122 +
tccggagcagatggacttgacc

SEQ ID NO: 205815 - DNA, 22 bp, Artificial Sequence
  Synthetic oligonucleotide; CTC chr2 60531102 60531123 60531119 60531124 +
cggagcagatggacttgaccac

SEQ ID NO: 205816 - DNA, 22 bp, Artificial Sequence
  Synthetic oligonucleotide; CTT chr2 60531118 60531139 60531135 60531140 +
gaccactttgcttaagcccctc

SEQ ID NO: 205817 - DNA, 22 bp, Artificial Sequence
  Synthetic oligonucleotide; TTG chr2 60531119 60531140 60531136 60531141 +
accactttgcttaagcccctcc

SEQ ID NO: 205818 - DNA, 22 bp, Artificial Sequence
  Synthetic oligonucleotide; CTT chr2 60531126 60531147 60531143 60531148 +
tgcttaagcccctcctggcaac

SEQ ID NO: 205819 - DNA, 22 bp, Artificial Sequence
  Synthetic oligonucleotide; TTT chr2 60531127 60531148 60531144 60531149 +
gcttaagcccctcctggcaacc

SEQ ID NO: 205820 - DNA, 22 bp, Artificial Sequence
  Synthetic oligonucleotide; TTG chr2 60531128 60531149 60531145 60531150 +
cttaagcccctcctggcaacct

SEQ ID NO: 205821 - DNA, 22 bp, Artificial Sequence
  Synthetic oligonucleotide; CTT chr2 60531131 60531152 60531148 60531153 +
aagcccctcctggcaacctcag

SEQ ID NO: 205822 - DNA, 22 bp, Artificial Sequence
  Synthetic oligonucleotide; TTA chr2 60531132 60531153 60531149 60531154 +
agcccctcctggcaacctcaga

SEQ ID NO: 205823 - DNA, 22 bp, Artificial Sequence
  Synthetic oligonucleotide; CTC chr2 60531140 60531161 60531157 60531162 +
ctggcaacctcagaaattagag

SEQ ID NO: 205824 - DNA, 22 bp, Artificial Sequence
  Synthetic oligonucleotide; CTG chr2 60531143 60531164 60531160 60531165 +
gcaacctcagaaattagagaaa

SEQ ID NO: 205825 - DNA, 22 bp, Artificial Sequence
  Synthetic oligonucleotide; CTC chr2 60531151 60531172 60531168 60531173 +
agaaattagagaaaaaaaaaaa

SEQ ID NO: 205826 - DNA, 22 bp, Artificial Sequence
  Synthetic oligonucleotide; TTA chr2 60531159 60531180 60531176 60531181 +
gagaaaaaaaaaaaaagagctc

SEQ ID NO: 205827 - DNA, 22 bp, Artificial Sequence
  Synthetic oligonucleotide; CTC chr2 60531181 60531202 60531198 60531203 +
ctggctaccctactccggtcca

SEQ ID NO: 205828 - DNA, 22 bp, Artificial Sequence
  Synthetic oligonucleotide; CTG chr2 60531184 60531205 60531201 60531206 +
gctaccctactccggtccaggt

SEQ ID NO: 205829 - DNA, 22 bp, Artificial Sequence
  Synthetic oligonucleotide; CTA chr2 60531188 60531209 60531205 60531210 +
ccctactccggtccaggttttt

SEQ ID NO: 205830 - DNA, 22 bp, Artificial Sequence
  Synthetic oligonucleotide; CTA chr2 60531193 60531214 60531210 60531215 +
ctccggtccaggtttttctcct

SEQ ID NO: 205831 - DNA, 22 bp, Artificial Sequence
  Synthetic oligonucleotide; CTC chr2 60531196 60531217 60531213 60531218 +
cggtccaggtttttctcctccc

SEQ ID NO: 205832 - DNA, 22 bp, Artificial Sequence
  Synthetic oligonucleotide; TTT chr2 60531208 60531229 60531225 60531230 +
ttctcctccctctgtgttgccc

SEQ ID NO: 205833 - DNA, 22 bp, Artificial Sequence
  Synthetic oligonucleotide; TTT chr2 60531209 60531230 60531226 60531231 +
tctcctccctctgtgttgcccg

SEQ ID NO: 205834 - DNA, 22 bp, Artificial Sequence
  Synthetic oligonucleotide; TTT chr2 60531210 60531231 60531227 60531232 +
ctcctccctctgtgttgcccga

SEQ ID NO: 205835 - DNA, 22 bp, Artificial Sequence
  Synthetic oligonucleotide; TTC chr2 60531211 60531232 60531228 60531233 +
tcctccctctgtgttgcccgac

SEQ ID NO: 205836 - DNA, 22 bp, Artificial Sequence
  Synthetic oligonucleotide; CTC chr2 60531213 60531234 60531230 60531235 +
ctccctctgtgttgcccgacgg

SEQ ID NO: 205837 - DNA, 22 bp, Artificial Sequence
  Synthetic oligonucleotide; CTC chr2 60531216 60531237 60531233 60531238 +
cctctgtgttgcccgacggtcc

SEQ ID NO: 205838 - DNA, 22 bp, Artificial Sequence
  Synthetic oligonucleotide; CTC chr2 60531220 60531241 60531237 60531242 +
tgtgttgcccgacggtcctgca

SEQ ID NO: 205839 - DNA, 22 bp, Artificial Sequence
  Synthetic oligonucleotide; CTG chr2 60531222 60531243 60531239 60531244 +
tgttgcccgacggtcctgcaca

SEQ ID NO: 205840 - DNA, 22 bp, Artificial Sequence
  Synthetic oligonucleotide; TTG chr2 60531227 60531248 60531244 60531249 +
cccgacggtcctgcacacacag

SEQ ID NO: 205841 - DNA, 22 bp, Artificial Sequence
  Synthetic oligonucleotide; CTG chr2 60531240 60531261 60531257 60531262 +
cacacacagacacaaatcccgt

SEQ ID NO: 205842 - DNA, 22 bp, Artificial Sequence
  Synthetic oligonucleotide; TTG chr2 60531264 60531285 60531281 60531286 +
gacccacagaatcttttcgacc

SEQ ID NO: 205843 - DNA, 22 bp, Artificial Sequence
  Synthetic oligonucleotide; CTT chr2 60531279 60531300 60531296 60531301 +
ttcgaccctctcacactaacac

SEQ ID NO: 205844 - DNA, 22 bp, Artificial Sequence
  Synthetic oligonucleotide; TTT chr2 60531280 60531301 60531297 60531302 +
tcgaccctctcacactaacact

SEQ ID NO: 205845 - DNA, 22 bp, Artificial Sequence
  Synthetic oligonucleotide; TTT chr2 60531281 60531302 60531298 60531303 +
cgaccctctcacactaacacta

SEQ ID NO: 205846 - DNA, 22 bp, Artificial Sequence
  Synthetic oligonucleotide; TTC chr2 60531282 60531303 60531299 60531304 +
gaccctctcacactaacactaa

SEQ ID NO: 205847 - DNA, 22 bp, Artificial Sequence
  Synthetic oligonucleotide; CTC chr2 60531289 60531310 60531306 60531311 +
tcacactaacactaaaccagaa

SEQ ID NO: 205848 - DNA, 22 bp, Artificial Sequence
  Synthetic oligonucleotide; CTC chr2 60531291 60531312 60531308 60531313 +
acactaacactaaaccagaaaa

SEQ ID NO: 205849 - DNA, 22 bp, Artificial Sequence
  Synthetic oligonucleotide; CTA chr2 60531297 60531318 60531314 60531319 +
acactaaaccagaaaataaatt

SEQ ID NO: 205850 - DNA, 22 bp, Artificial Sequence
  Synthetic oligonucleotide; CTA chr2 60531303 60531324 60531320 60531325 +
aaccagaaaataaattaaatac

SEQ ID NO: 205851 - DNA, 22 bp, Artificial Sequence
  Synthetic oligonucleotide; TTA chr2 60531320 60531341 60531337 60531342 +
aatactgggactgccccctcct

SEQ ID NO: 205852 - DNA, 22 bp, Artificial Sequence
  Synthetic oligonucleotide; CTG chr2 60531327 60531348 60531344 60531349 +
ggactgccccctcctttgcgtt

SEQ ID NO: 205853 - DNA, 22 bp, Artificial Sequence
  Synthetic oligonucleotide; CTG chr2 60531333 60531354 60531350 60531355 +
ccccctcctttgcgttctgcaa

SEQ ID NO: 205854 - DNA, 22 bp, Artificial Sequence
  Synthetic oligonucleotide; CTC chr2 60531340 60531361 60531357 60531362 +
ctttgcgttctgcaagaatatt

SEQ ID NO: 205855 - DNA, 22 bp, Artificial Sequence
  Synthetic oligonucleotide; CTT chr2 60531343 60531364 60531360 60531365 +
tgcgttctgcaagaatatttta

SEQ ID NO: 205856 - DNA, 22 bp, Artificial Sequence
  Synthetic oligonucleotide; TTT chr2 60531344 60531365 60531361 60531366 +
gcgttctgcaagaatattttaa

SEQ ID NO: 205857 - DNA, 22 bp, Artificial Sequence
  Synthetic oligonucleotide; TTG chr2 60531345 60531366 60531362 60531367 +
cgttctgcaagaatattttaag

SEQ ID NO: 205858 - DNA, 22 bp, Artificial Sequence
  Synthetic oligonucleotide; TTC chr2 60531350 60531371 60531367 60531372 +
tgcaagaatattttaagtgagt

SEQ ID NO: 205859 - DNA, 22 bp, Artificial Sequence
  Synthetic oligonucleotide; CTG chr2 60531352 60531373 60531369 60531374 +
caagaatattttaagtgagttt

SEQ ID NO: 205860 - DNA, 22 bp, Artificial Sequence
  Synthetic oligonucleotide; TTT chr2 60531363 60531384 60531380 60531385 +
taagtgagttttgttttaaatc

SEQ ID NO: 205861 - DNA, 22 bp, Artificial Sequence
  Synthetic oligonucleotide; TTT chr2 60531364 60531385 60531381 60531386 +
aagtgagttttgttttaaatca

SEQ ID NO: 205862 - DNA, 22 bp, Artificial Sequence
  Synthetic oligonucleotide; TTA chr2 60531365 60531386 60531382 60531387 +
agtgagttttgttttaaatcat

SEQ ID NO: 205863 - DNA, 22 bp, Artificial Sequence
  Synthetic oligonucleotide; TTT chr2 60531374 60531395 60531391 60531396 +
tgttttaaatcatatccattaa

SEQ ID NO: 205864 - DNA, 22 bp, Artificial Sequence
  Synthetic oligonucleotide; TTT chr2 60531375 60531396 60531392 60531397 +
gttttaaatcatatccattaat

SEQ ID NO: 205865 - DNA, 22 bp, Artificial Sequence
  Synthetic oligonucleotide; TTG chr2 60531376 60531397 60531393 60531398 +
ttttaaatcatatccattaatt

SEQ ID NO: 205866 - DNA, 22 bp, Artificial Sequence
  Synthetic oligonucleotide; TTT chr2 60531379 60531400 60531396 60531401 +
taaatcatatccattaatttac

SEQ ID NO: 205867 - DNA, 22 bp, Artificial Sequence
  Synthetic oligonucleotide; TTT chr2 60531380 60531401 60531397 60531402 +
aaatcatatccattaatttacc

SEQ ID NO: 205868 - DNA, 22 bp, Artificial Sequence
  Synthetic oligonucleotide; TTA chr2 60531381 60531402 60531398 60531403 +
aatcatatccattaatttaccc

SEQ ID NO: 205869 - DNA, 22 bp, Artificial Sequence
  Synthetic oligonucleotide; TTA chr2 60531395 60531416 60531412 60531417 +
atttaccctgacttgcaattaa

SEQ ID NO: 205870 - DNA, 22 bp, Artificial Sequence
  Synthetic oligonucleotide; TTT chr2 60531399 60531420 60531416 60531421 +
accctgacttgcaattaaatgc

SEQ ID NO: 205871 - DNA, 22 bp, Artificial Sequence
  Synthetic oligonucleotide; TTA chr2 60531400 60531421 60531417 60531422 +
ccctgacttgcaattaaatgca

SEQ ID NO: 205872 - DNA, 22 bp, Artificial Sequence
  Synthetic oligonucleotide; CTG chr2 60531405 60531426 60531422 60531427 +
acttgcaattaaatgcaagcac

SEQ ID NO: 205873 - DNA, 22 bp, Artificial Sequence
  Synthetic oligonucleotide; CTT chr2 60531409 60531430 60531426 60531431 +
gcaattaaatgcaagcacactt

SEQ ID NO: 205874 - DNA, 22 bp, Artificial Sequence
  Synthetic oligonucleotide; TTG chr2 60531410 60531431 60531427 60531432 +
caattaaatgcaagcacacttt

SEQ ID NO: 205875 - DNA, 22 bp, Artificial Sequence
  Synthetic oligonucleotide; TTA chr2 60531416 60531437 60531433 60531438 +
aatgcaagcacactttttacaa

SEQ ID NO: 205876 - DNA, 22 bp, Artificial Sequence
  Synthetic oligonucleotide; CTT chr2 60531431 60531452 60531448 60531453 +
tttacaaccagtacggaatgca

SEQ ID NO: 205877 - DNA, 22 bp, Artificial Sequence
  Synthetic oligonucleotide; TTT chr2 60531432 60531453 60531449 60531454 +
ttacaaccagtacggaatgcat

SEQ ID NO: 205878 - DNA, 22 bp, Artificial Sequence
  Synthetic oligonucleotide; TTT chr2 60531433 60531454 60531450 60531455 +
tacaaccagtacggaatgcatt

SEQ ID NO: 205879 - DNA, 22 bp, Artificial Sequence
  Synthetic oligonucleotide; TTT chr2 60531434 60531455 60531451 60531456 +
acaaccagtacggaatgcatta

SEQ ID NO: 205880 - DNA, 22 bp, Artificial Sequence
  Synthetic oligonucleotide; TTA chr2 60531435 60531456 60531452 60531457 +
caaccagtacggaatgcattaa

SEQ ID NO: 205881 - DNA, 22 bp, Artificial Sequence
  Synthetic oligonucleotide; TTA chr2 60531456 60531477 60531473 60531478 +
attataactacaaatggtcaaa

SEQ ID NO: 205882 - DNA, 22 bp, Artificial Sequence
  Synthetic oligonucleotide; TTA chr2 60531460 60531481 60531477 60531482 +
taactacaaatggtcaaatgag

SEQ ID NO: 205883 - DNA, 22 bp, Artificial Sequence
  Synthetic oligonucleotide; CTA chr2 60531466 60531487 60531483 60531488 +
caaatggtcaaatgagagcaag

SEQ ID NO: 205884 - DNA, 22 bp, Artificial Sequence
  Synthetic oligonucleotide; CTC chr2 60531495 60531516 60531512 60531517 +
caaaaaatattaataaaataca

SEQ ID NO: 205885 - DNA, 22 bp, Artificial Sequence
  Synthetic oligonucleotide; TTA chr2 60531507 60531528 60531524 60531529 +
ataaaatacataataaataata

SEQ ID NO: 205886 - DNA, 22 bp, Artificial Sequence
  Synthetic oligonucleotide; TTA chr2 60531532 60531553 60531549 60531554 +
atgaaacaaaaatagattcata

SEQ ID NO: 205887 - DNA, 22 bp, Artificial Sequence
  Synthetic oligonucleotide; TTC chr2 60531551 60531572 60531568 60531573 +
ataagccttggccagggctttt

SEQ ID NO: 205888 - DNA, 22 bp, Artificial Sequence
  Synthetic oligonucleotide; CTT chr2 60531560 60531581 60531577 60531582 +
ggccagggcttttattatttca

SEQ ID NO: 205889 - DNA, 22 bp, Artificial Sequence
  Synthetic oligonucleotide; TTG chr2 60531561 60531582 60531578 60531583 +
gccagggcttttattatttcat

SEQ ID NO: 205890 - DNA, 22 bp, Artificial Sequence
  Synthetic oligonucleotide; CTT chr2 60531571 60531592 60531588 60531593 +
ttattatttcatgcaaggggaa

SEQ ID NO: 205891 - DNA, 22 bp, Artificial Sequence
  Synthetic oligonucleotide; TTT chr2 60531572 60531593 60531589 60531594 +
tattatttcatgcaaggggaaa

SEQ ID NO: 205892 - DNA, 22 bp, Artificial Sequence
  Synthetic oligonucleotide; TTT chr2 60531573 60531594 60531590 60531595 +
attatttcatgcaaggggaaag

SEQ ID NO: 205893 - DNA, 22 bp, Artificial Sequence
  Synthetic oligonucleotide; TTA chr2 60531574 60531595 60531591 60531596 +
ttatttcatgcaaggggaaagt

SEQ ID NO: 205894 - DNA, 22 bp, Artificial Sequence
  Synthetic oligonucleotide; TTA chr2 60531577 60531598 60531594 60531599 +
tttcatgcaaggggaaagtcca

SEQ ID NO: 205895 - DNA, 22 bp, Artificial Sequence
  Synthetic oligonucleotide; TTT chr2 60531580 60531601 60531597 60531602 +
catgcaaggggaaagtccagcc

SEQ ID NO: 205896 - DNA, 22 bp, Artificial Sequence
  Synthetic oligonucleotide; TTC chr2 60531581 60531602 60531598 60531603 +
atgcaaggggaaagtccagcca

SEQ ID NO: 205897 - DNA, 22 bp, Artificial Sequence
  Synthetic oligonucleotide; CTT chr2 60531612 60531633 60531629 60531634 +
gctccatacactttggcaggac

SEQ ID NO: 205898 - DNA, 22 bp, Artificial Sequence
  Synthetic oligonucleotide; TTG chr2 60531613 60531634 60531630 60531635 +
ctccatacactttggcaggact

SEQ ID NO: 205899 - DNA, 22 bp, Artificial Sequence
  Synthetic oligonucleotide; CTC chr2 60531616 60531637 60531633 60531638 +
catacactttggcaggactcag

SEQ ID NO: 205900 - DNA, 22 bp, Artificial Sequence
  Synthetic oligonucleotide; CTT chr2 60531625 60531646 60531642 60531647 +
tggcaggactcagaccaaccac

SEQ ID NO: 205901 - DNA, 22 bp, Artificial Sequence
  Synthetic oligonucleotide; TTT chr2 60531626 60531647 60531643 60531648 +
ggcaggactcagaccaaccact

SEQ ID NO: 205902 - DNA, 22 bp, Artificial Sequence
  Synthetic oligonucleotide; TTG chr2 60531627 60531648 60531644 60531649 +
gcaggactcagaccaaccacta

SEQ ID NO: 205903 - DNA, 22 bp, Artificial Sequence
  Synthetic oligonucleotide; CTC chr2 60531636 60531657 60531653 60531658 +
agaccaaccactaccattaaac

SEQ ID NO: 205904 - DNA, 22 bp, Artificial Sequence
  Synthetic oligonucleotide; CTA chr2 60531649 60531670 60531666 60531671 +
ccattaaactcaagagcgtgtt

SEQ ID NO: 205905 - DNA, 22 bp, Artificial Sequence
  Synthetic oligonucleotide; TTA chr2 60531655 60531676 60531672 60531677 +
aactcaagagcgtgttttggca

SEQ ID NO: 205906 - DNA, 22 bp, Artificial Sequence
  Synthetic oligonucleotide; CTC chr2 60531660 60531681 60531677 60531682 +
aagagcgtgttttggcagtgcc

SEQ ID NO: 205907 - DNA, 22 bp, Artificial Sequence
  Synthetic oligonucleotide; TTT chr2 60531672 60531693 60531689 60531694 +
tggcagtgccctggcattgggg

SEQ ID NO: 205908 - DNA, 22 bp, Artificial Sequence
  Synthetic oligonucleotide; TTT chr2 60531673 60531694 60531690 60531695 +
ggcagtgccctggcattggggg

SEQ ID NO: 205909 - DNA, 22 bp, Artificial Sequence
  Synthetic oligonucleotide; TTG chr2 60531674 60531695 60531691 60531696 +
gcagtgccctggcattgggggg

SEQ ID NO: 205910 - DNA, 22 bp, Artificial Sequence
  Synthetic oligonucleotide; CTG chr2 60531685 60531706 60531702 60531707 +
gcattggggggccctgtgcaga

SEQ ID NO: 205911 - DNA, 22 bp, Artificial Sequence
  Synthetic oligonucleotide; TTG chr2 60531691 60531712 60531708 60531713 +
gggggccctgtgcagacaccac

SEQ ID NO: 205912 - DNA, 22 bp, Artificial Sequence
  Synthetic oligonucleotide; CTG chr2 60531701 60531722 60531718 60531723 +
tgcagacaccaccaggagacgc

SEQ ID NO: 205913 - DNA, 22 bp, Artificial Sequence
  Synthetic oligonucleotide; CTG chr2 60531725 60531746 60531742 60531747 +
accccagtacccaaggcagggt

SEQ ID NO: 205914 - DNA, 22 bp, Artificial Sequence
  Synthetic oligonucleotide; CTT chr2 60531759 60531780 60531776 60531781 +
attcagcctttccatgtggtcg

SEQ ID NO: 205915 - DNA, 22 bp, Artificial Sequence
  Synthetic oligonucleotide; TTA chr2 60531760 60531781 60531777 60531782 +
ttcagcctttccatgtggtcgg

SEQ ID NO: 205916 - DNA, 22 bp, Artificial Sequence
  Synthetic oligonucleotide; TTC chr2 60531763 60531784 60531780 60531785 +
agcctttccatgtggtcgggaa

SEQ ID NO: 205917 - DNA, 22 bp, Artificial Sequence
  Synthetic oligonucleotide; CTT chr2 60531769 60531790 60531786 60531791 +
tccatgtggtcgggaagttacc

SEQ ID NO: 205918 - DNA, 22 bp, Artificial Sequence
  Synthetic oligonucleotide; TTT chr2 60531770 60531791 60531787 60531792 +
ccatgtggtcgggaagttaccc

SEQ ID NO: 205919 - DNA, 22 bp, Artificial Sequence
  Synthetic oligonucleotide; TTC chr2 60531771 60531792 60531788 60531793 +
catgtggtcgggaagttaccca

SEQ ID NO: 205920 - DNA, 22 bp, Artificial Sequence
  Synthetic oligonucleotide; TTA chr2 60531789 60531810 60531806 60531811 +
cccacaggctgcttccctcttc

SEQ ID NO: 205921 - DNA, 22 bp, Artificial Sequence
  Synthetic oligonucleotide; CTG chr2 60531800 60531821 60531817 60531822 +
cttccctcttcctaaccaccct

SEQ ID NO: 205922 - DNA, 22 bp, Artificial Sequence
  Synthetic oligonucleotide; CTT chr2 60531803 60531824 60531820 60531825 +
ccctcttcctaaccaccctctc

SEQ ID NO: 205923 - DNA, 22 bp, Artificial Sequence
  Synthetic oligonucleotide; TTC chr2 60531804 60531825 60531821 60531826 +
cctcttcctaaccaccctctct

SEQ ID NO: 205924 - DNA, 22 bp, Artificial Sequence
  Synthetic oligonucleotide; CTC chr2 60531808 60531829 60531825 60531830 +
ttcctaaccaccctctctgccg

SEQ ID NO: 205925 - DNA, 22 bp, Artificial Sequence
  Synthetic oligonucleotide; CTT chr2 60531810 60531831 60531827 60531832 +
cctaaccaccctctctgccggc

SEQ ID NO: 205926 - DNA, 22 bp, Artificial Sequence
  Synthetic oligonucleotide; TTC chr2 60531811 60531832 60531828 60531833 +
ctaaccaccctctctgccggcc

SEQ ID NO: 205927 - DNA, 22 bp, Artificial Sequence
  Synthetic oligonucleotide; CTA chr2 60531814 60531835 60531831 60531836 +
accaccctctctgccggccgca

SEQ ID NO: 205928 - DNA, 22 bp, Artificial Sequence
  Synthetic oligonucleotide; CTC chr2 60531823 60531844 60531840 60531845 +
tctgccggccgcagctgttctg

SEQ ID NO: 205929 - DNA, 22 bp, Artificial Sequence
  Synthetic oligonucleotide; CTC chr2 60531825 60531846 60531842 60531847 +
tgccggccgcagctgttctgtc

SEQ ID NO: 205930 - DNA, 22 bp, Artificial Sequence
  Synthetic oligonucleotide; CTG chr2 60531827 60531848 60531844 60531849 +
ccggccgcagctgttctgtcag

SEQ ID NO: 205931 - DNA, 22 bp, Artificial Sequence
  Synthetic oligonucleotide; CTG chr2 60531840 60531861 60531857 60531862 +
ttctgtcagtgtccaccctgcc

SEQ ID NO: 205932 - DNA, 22 bp, Artificial Sequence
  Synthetic oligonucleotide; TTC chr2 60531843 60531864 60531860 60531865 +
tgtcagtgtccaccctgcccct

SEQ ID NO: 205933 - DNA, 22 bp, Artificial Sequence
  Synthetic oligonucleotide; CTG chr2 60531845 60531866 60531862 60531867 +
tcagtgtccaccctgcccctca

SEQ ID NO: 205934 - DNA, 22 bp, Artificial Sequence
  Synthetic oligonucleotide; CTG chr2 60531860 60531881 60531877 60531882 +
cccctcaaaggacaaatgaaat

SEQ ID NO: 205935 - DNA, 22 bp, Artificial Sequence
  Synthetic oligonucleotide; CTC chr2 60531866 60531887 60531883 60531888 +
aaaggacaaatgaaatccccca

SEQ ID NO: 205936 - DNA, 22 bp, Artificial Sequence
  Synthetic oligonucleotide; CTA chr2 60531914 60531935 60531931 60531936 +
aatgaagaactcaagactaggg

SEQ ID NO: 205937 - DNA, 22 bp, Artificial Sequence
  Synthetic oligonucleotide; CTC chr2 60531926 60531947 60531943 60531948 +
aagactagggcaccatgagcat

SEQ ID NO: 205938 - DNA, 22 bp, Artificial Sequence
  Synthetic oligonucleotide; CTA chr2 60531933 60531954 60531950 60531955 +
gggcaccatgagcatctgggtt

SEQ ID NO: 205939 - DNA, 22 bp, Artificial Sequence
  Synthetic oligonucleotide; CTG chr2 60531951 60531972 60531968 60531973 +
ggttaaggctcggaatcctgca

SEQ ID NO: 205940 - DNA, 22 bp, Artificial Sequence
  Synthetic oligonucleotide; TTA chr2 60531956 60531977 60531973 60531978 +
aggctcggaatcctgcaccagc

SEQ ID NO: 205941 - DNA, 22 bp, Artificial Sequence
  Synthetic oligonucleotide; CTC chr2 60531962 60531983 60531979 60531984 +
ggaatcctgcaccagcgttgga

SEQ ID NO: 205942 - DNA, 22 bp, Artificial Sequence
  Synthetic oligonucleotide; CTG chr2 60531971 60531992 60531988 60531993 +
caccagcgttggaagctgcctt

SEQ ID NO: 205943 - DNA, 22 bp, Artificial Sequence
  Synthetic oligonucleotide; TTG chr2 60531982 60532003 60531999 60532004 +
gaagctgcctttgttcctgcca

SEQ ID NO: 205944 - DNA, 22 bp, Artificial Sequence
  Synthetic oligonucleotide; CTG chr2 60531989 60532010 60532006 60532011 +
cctttgttcctgccacaccgcc

SEQ ID NO: 205945 - DNA, 22 bp, Artificial Sequence
  Synthetic oligonucleotide; CTT chr2 60531993 60532014 60532010 60532015 +
tgttcctgccacaccgccgggc

SEQ ID NO: 205946 - DNA, 22 bp, Artificial Sequence
  Synthetic oligonucleotide; TTT chr2 60531994 60532015 60532011 60532016 +
gttcctgccacaccgccgggcc

SEQ ID NO: 205947 - DNA, 22 bp, Artificial Sequence
  Synthetic oligonucleotide; TTG chr2 60531995 60532016 60532012 60532017 +
ttcctgccacaccgccgggccc

SEQ ID NO: 205948 - DNA, 22 bp, Artificial Sequence
  Synthetic oligonucleotide; TTC chr2 60531998 60532019 60532015 60532020 +
ctgccacaccgccgggcccctg

SEQ ID NO: 205949 - DNA, 22 bp, Artificial Sequence
  Synthetic oligonucleotide; CTG chr2 60532001 60532022 60532018 60532023 +
ccacaccgccgggcccctgcta

SEQ ID NO: 205950 - DNA, 22 bp, Artificial Sequence
  Synthetic oligonucleotide; CTG chr2 60532020 60532041 60532037 60532042 +
ctaacctgtctccacaacactc

SEQ ID NO: 205951 - DNA, 22 bp, Artificial Sequence
  Synthetic oligonucleotide; CTA chr2 60532023 60532044 60532040 60532045 +
acctgtctccacaacactcagc

SEQ ID NO: 205952 - DNA, 22 bp, Artificial Sequence
  Synthetic oligonucleotide; CTG chr2 60532028 60532049 60532045 60532050 +
tctccacaacactcagcctcac

SEQ ID NO: 205953 - DNA, 22 bp, Artificial Sequence
  Synthetic oligonucleotide; CTC chr2 60532032 60532053 60532049 60532054 +
cacaacactcagcctcacgcct

SEQ ID NO: 205954 - DNA, 22 bp, Artificial Sequence
  Synthetic oligonucleotide; CTC chr2 60532042 60532063 60532059 60532064 +
agcctcacgcctcaccccagca

SEQ ID NO: 205955 - DNA, 22 bp, Artificial Sequence
  Synthetic oligonucleotide; CTC chr2 60532048 60532069 60532065 60532070 +
acgcctcaccccagcactccct

SEQ ID NO: 205956 - DNA, 22 bp, Artificial Sequence
  Synthetic oligonucleotide; CTC chr2 60532055 60532076 60532072 60532077 +
accccagcactccctgcctctg

SEQ ID NO: 205957 - DNA, 22 bp, Artificial Sequence
  Synthetic oligonucleotide; CTC chr2 60532067 60532088 60532084 60532089 +
cctgcctctgcccctcccccca

SEQ ID NO: 205958 - DNA, 22 bp, Artificial Sequence
  Synthetic oligonucleotide; CTG chr2 60532071 60532092 60532088 60532093 +
cctctgcccctccccccaaatc

SEQ ID NO: 205959 - DNA, 22 bp, Artificial Sequence
  Synthetic oligonucleotide; CTC chr2 60532075 60532096 60532092 60532097 +
tgcccctccccccaaatccaac

SEQ ID NO: 205960 - DNA, 22 bp, Artificial Sequence
  Synthetic oligonucleotide; CTG chr2 60532077 60532098 60532094 60532099 +
cccctccccccaaatccaacac

SEQ ID NO: 205961 - DNA, 22 bp, Artificial Sequence
  Synthetic oligonucleotide; CTC chr2 60532083 60532104 60532100 60532105 +
cccccaaatccaacacacccac

SEQ ID NO: 205962 - DNA, 22 bp, Artificial Sequence
  Synthetic oligonucleotide; CTA chr2 60532121 60532142 60532138 60532143 +
attaagatcaggaagaaatttg

SEQ ID NO: 205963 - DNA, 22 bp, Artificial Sequence
  Synthetic oligonucleotide; TTA chr2 60532125 60532146 60532142 60532147 +
agatcaggaagaaatttgcatt

SEQ ID NO: 205964 - DNA, 22 bp, Artificial Sequence
  Synthetic oligonucleotide; TTT chr2 60532142 60532163 60532159 60532164 +
gcattttcttttcactgtaccc

SEQ ID NO: 205965 - DNA, 22 bp, Artificial Sequence
  Synthetic oligonucleotide; TTG chr2 60532143 60532164 60532160 60532165 +
cattttcttttcactgtacccc

SEQ ID NO: 205966 - DNA, 22 bp, Artificial Sequence
  Synthetic oligonucleotide; TTT chr2 60532148 60532169 60532165 60532170 +
tcttttcactgtacccccagta

SEQ ID NO: 205967 - DNA, 22 bp, Artificial Sequence
  Synthetic oligonucleotide; TTT chr2 60532149 60532170 60532166 60532171 +
cttttcactgtacccccagtaa

SEQ ID NO: 205968 - DNA, 22 bp, Artificial Sequence
  Synthetic oligonucleotide; TTC chr2 60532150 60532171 60532167 60532172 +
ttttcactgtacccccagtaat

SEQ ID NO: 205969 - DNA, 22 bp, Artificial Sequence
  Synthetic oligonucleotide; CTT chr2 60532152 60532173 60532169 60532174 +
ttcactgtacccccagtaatca

SEQ ID NO: 205970 - DNA, 22 bp, Artificial Sequence
  Synthetic oligonucleotide; TTT chr2 60532153 60532174 60532170 60532175 +
tcactgtacccccagtaatcac

SEQ ID NO: 205971 - DNA, 22 bp, Artificial Sequence
  Synthetic oligonucleotide; TTT chr2 60532154 60532175 60532171 60532176 +
cactgtacccccagtaatcaca

SEQ ID NO: 205972 - DNA, 22 bp, Artificial Sequence
  Synthetic oligonucleotide; TTC chr2 60532155 60532176 60532172 60532177 +
actgtacccccagtaatcacag

SEQ ID NO: 205973 - DNA, 22 bp, Artificial Sequence
  Synthetic oligonucleotide; CTG chr2 60532159 60532180 60532176 60532181 +
tacccccagtaatcacagaagt

SEQ ID NO: 205974 - DNA, 22 bp, Artificial Sequence
  Synthetic oligonucleotide; TTC chr2 60532183 60532204 60532200 60532205 +
ttcaaattttgagaattttgtt

SEQ ID NO: 205975 - DNA, 22 bp, Artificial Sequence
  Synthetic oligonucleotide; CTT chr2 60532185 60532206 60532202 60532207 +
caaattttgagaattttgttcc

SEQ ID NO: 205976 - DNA, 22 bp, Artificial Sequence
  Synthetic oligonucleotide; TTC chr2 60532186 60532207 60532203 60532208 +
aaattttgagaattttgttcct

SEQ ID NO: 205977 - DNA, 22 bp, Artificial Sequence
  Synthetic oligonucleotide; TTT chr2 60532192 60532213 60532209 60532214 +
tgagaattttgttcctctgcta

SEQ ID NO: 205978 - DNA, 22 bp, Artificial Sequence
  Synthetic oligonucleotide; TTT chr2 60532193 60532214 60532210 60532215 +
gagaattttgttcctctgctaa

SEQ ID NO: 205979 - DNA, 22 bp, Artificial Sequence
  Synthetic oligonucleotide; TTG chr2 60532194 60532215 60532211 60532216 +
agaattttgttcctctgctaat

SEQ ID NO: 205980 - DNA, 22 bp, Artificial Sequence
  Synthetic oligonucleotide; TTT chr2 60532201 60532222 60532218 60532223 +
tgttcctctgctaattatttcc

SEQ ID NO: 205981 - DNA, 22 bp, Artificial Sequence
  Synthetic oligonucleotide; TTT chr2 60532202 60532223 60532219 60532224 +
gttcctctgctaattatttccc

SEQ ID NO: 205982 - DNA, 22 bp, Artificial Sequence
  Synthetic oligonucleotide; TTG chr2 60532203 60532224 60532220 60532225 +
ttcctctgctaattatttccct

SEQ ID NO: 205983 - DNA, 22 bp, Artificial Sequence
  Synthetic oligonucleotide; TTC chr2 60532206 60532227 60532223 60532228 +
ctctgctaattatttccctcat

SEQ ID NO: 205984 - DNA, 22 bp, Artificial Sequence
  Synthetic oligonucleotide; CTC chr2 60532209 60532230 60532226 60532231 +
tgctaattatttccctcatttt

SEQ ID NO: 205985 - DNA, 22 bp, Artificial Sequence
  Synthetic oligonucleotide; CTG chr2 60532211 60532232 60532228 60532233 +
ctaattatttccctcattttgc

SEQ ID NO: 205986 - DNA, 22 bp, Artificial Sequence
  Synthetic oligonucleotide; CTA chr2 60532214 60532235 60532231 60532236 +
attatttccctcattttgcatt

SEQ ID NO: 205987 - DNA, 22 bp, Artificial Sequence
  Synthetic oligonucleotide; TTA chr2 60532218 60532239 60532235 60532240 +
tttccctcattttgcatttcaa

SEQ ID NO: 205988 - DNA, 22 bp, Artificial Sequence
  Synthetic oligonucleotide; TTT chr2 60532221 60532242 60532238 60532243 +
ccctcattttgcatttcaaggc

SEQ ID NO: 205989 - DNA, 22 bp, Artificial Sequence
  Synthetic oligonucleotide; TTC chr2 60532222 60532243 60532239 60532244 +
cctcattttgcatttcaaggca

SEQ ID NO: 205990 - DNA, 22 bp, Artificial Sequence
  Synthetic oligonucleotide; CTC chr2 60532226 60532247 60532243 60532248 +
attttgcatttcaaggcacaaa

SEQ ID NO: 205991 - DNA, 22 bp, Artificial Sequence
  Synthetic oligonucleotide; TTT chr2 60532230 60532251 60532247 60532252 +
tgcatttcaaggcacaaagaca

SEQ ID NO: 205992 - DNA, 22 bp, Artificial Sequence
  Synthetic oligonucleotide; TTT chr2 60532231 60532252 60532248 60532253 +
gcatttcaaggcacaaagacag

SEQ ID NO: 205993 - DNA, 22 bp, Artificial Sequence
  Synthetic oligonucleotide; TTG chr2 60532232 60532253 60532249 60532254 +
catttcaaggcacaaagacagt

SEQ ID NO: 205994 - DNA, 22 bp, Artificial Sequence
  Synthetic oligonucleotide; TTT chr2 60532237 60532258 60532254 60532259 +
caaggcacaaagacagtctatc

SEQ ID NO: 205995 - DNA, 22 bp, Artificial Sequence
  Synthetic oligonucleotide; TTC chr2 60532238 60532259 60532255 60532260 +
aaggcacaaagacagtctatct

SEQ ID NO: 205996 - DNA, 22 bp, Artificial Sequence
  Synthetic oligonucleotide; CTA chr2 60532257 60532278 60532274 60532279 +
tctcactggtggtctattaata

SEQ ID NO: 205997 - DNA, 22 bp, Artificial Sequence
  Synthetic oligonucleotide; CTC chr2 60532261 60532282 60532278 60532283 +
actggtggtctattaatagttt

SEQ ID NO: 205998 - DNA, 22 bp, Artificial Sequence
  Synthetic oligonucleotide; CTG chr2 60532265 60532286 60532282 60532287 +
gtggtctattaatagtttgaag

SEQ ID NO: 205999 - DNA, 22 bp, Artificial Sequence
  Synthetic oligonucleotide; CTA chr2 60532273 60532294 60532290 60532295 +
ttaatagtttgaagttttgagc

SEQ ID NO: 206000 - DNA, 22 bp, Artificial Sequence
  Synthetic oligonucleotide; TTA chr2 60532276 60532297 60532293 60532298 +
atagtttgaagttttgagcgtc

SEQ ID NO: 206001 - DNA, 22 bp, Artificial Sequence
  Synthetic oligonucleotide; TTT chr2 60532283 60532304 60532300 60532305 +
gaagttttgagcgtcagaaggt

SEQ ID NO: 206002 - DNA, 22 bp, Artificial Sequence
  Synthetic oligonucleotide; TTG chr2 60532284 60532305 60532301 60532306 +
aagttttgagcgtcagaaggtg

SEQ ID NO: 206003 - DNA, 22 bp, Artificial Sequence
  Synthetic oligonucleotide; TTT chr2 60532290 60532311 60532307 60532312 +
tgagcgtcagaaggtggttgtt

SEQ ID NO: 206004 - DNA, 22 bp, Artificial Sequence
  Synthetic oligonucleotide; TTT chr2 60532291 60532312 60532308 60532313 +
gagcgtcagaaggtggttgttg

SEQ ID NO: 206005 - DNA, 22 bp, Artificial Sequence
  Synthetic oligonucleotide; TTG chr2 60532292 60532313 60532309 60532314 +
agcgtcagaaggtggttgttgc

SEQ ID NO: 206006 - DNA, 22 bp, Artificial Sequence
  Synthetic oligonucleotide; TTG chr2 60532310 60532331 60532327 60532332 +
ttgctttttggtttttgggttt

SEQ ID NO: 206007 - DNA, 22 bp, Artificial Sequence
  Synthetic oligonucleotide; TTG chr2 60532313 60532334 60532330 60532335 +
ctttttggtttttgggtttttt

SEQ ID NO: 206008 - DNA, 22 bp, Artificial Sequence
  Synthetic oligonucleotide; CTT chr2 60532316 60532337 60532333 60532338 +
tttggtttttgggttttttttt

SEQ ID NO: 206009 - DNA, 22 bp, Artificial Sequence
  Synthetic oligonucleotide; TTT chr2 60532317 60532338 60532334 60532339 +
ttggtttttgggtttttttttt

SEQ ID NO: 206010 - DNA, 22 bp, Artificial Sequence
  Synthetic oligonucleotide; TTT chr2 60532318 60532339 60532335 60532340 +
tggtttttgggttttttttttt

SEQ ID NO: 206011 - DNA, 22 bp, Artificial Sequence
  Synthetic oligonucleotide; TTT chr2 60532319 60532340 60532336 60532341 +
ggtttttgggtttttttttttt

SEQ ID NO: 206012 - DNA, 22 bp, Artificial Sequence
  Synthetic oligonucleotide; TTG chr2 60532320 60532341 60532337 60532342 +
gtttttgggttttttttttttt

SEQ ID NO: 206013 - DNA, 22 bp, Artificial Sequence
  Synthetic oligonucleotide; TTT chr2 60532324 60532345 60532341 60532346 +
ttgggtttttttttttttcctt

SEQ ID NO: 206014 - DNA, 22 bp, Artificial Sequence
  Synthetic oligonucleotide; TTT chr2 60532325 60532346 60532342 60532347 +
tgggtttttttttttttccttt

SEQ ID NO: 206015 - DNA, 22 bp, Artificial Sequence
  Synthetic oligonucleotide; TTT chr2 60532326 60532347 60532343 60532348 +
gggtttttttttttttcctttt

SEQ ID NO: 206016 - DNA, 22 bp, Artificial Sequence
  Synthetic oligonucleotide; TTG chr2 60532327 60532348 60532344 60532349 +
ggtttttttttttttcctttta

SEQ ID NO: 206017 - DNA, 22 bp, Artificial Sequence
  Synthetic oligonucleotide; TTT chr2 60532332 60532353 60532349 60532354 +
ttttttttttccttttaaaact

SEQ ID NO: 206018 - DNA, 22 bp, Artificial Sequence
  Synthetic oligonucleotide; TTT chr2 60532333 60532354 60532350 60532355 +
tttttttttccttttaaaacta

SEQ ID NO: 206019 - DNA, 22 bp, Artificial Sequence
  Synthetic oligonucleotide; TTT chr2 60532334 60532355 60532351 60532356 +
ttttttttccttttaaaactat

SEQ ID NO: 206020 - DNA, 22 bp, Artificial Sequence
  Synthetic oligonucleotide; TTT chr2 60532335 60532356 60532352 60532357 +
tttttttccttttaaaactatt

SEQ ID NO: 206021 - DNA, 22 bp, Artificial Sequence
  Synthetic oligonucleotide; TTT chr2 60532336 60532357 60532353 60532358 +
ttttttccttttaaaactattc

SEQ ID NO: 206022 - DNA, 22 bp, Artificial Sequence
  Synthetic oligonucleotide; TTT chr2 60532337 60532358 60532354 60532359 +
tttttccttttaaaactattct

SEQ ID NO: 206023 - DNA, 22 bp, Artificial Sequence
  Synthetic oligonucleotide; TTT chr2 60532338 60532359 60532355 60532360 +
ttttccttttaaaactattctg

SEQ ID NO: 206024 - DNA, 22 bp, Artificial Sequence
  Synthetic oligonucleotide; TTT chr2 60532339 60532360 60532356 60532361 +
tttccttttaaaactattctgt

SEQ ID NO: 206025 - DNA, 22 bp, Artificial Sequence
  Synthetic oligonucleotide; TTT chr2 60532340 60532361 60532357 60532362 +
ttccttttaaaactattctgtc

SEQ ID NO: 206026 - DNA, 22 bp, Artificial Sequence
  Synthetic oligonucleotide; TTT chr2 60532341 60532362 60532358 60532363 +
tccttttaaaactattctgtca

SEQ ID NO: 206027 - DNA, 22 bp, Artificial Sequence
  Synthetic oligonucleotide; TTT chr2 60532342 60532363 60532359 60532364 +
ccttttaaaactattctgtcat

SEQ ID NO: 206028 - DNA, 22 bp, Artificial Sequence
  Synthetic oligonucleotide; TTC chr2 60532343 60532364 60532360 60532365 +
cttttaaaactattctgtcatt

SEQ ID NO: 206029 - DNA, 22 bp, Artificial Sequence
  Synthetic oligonucleotide; CTT chr2 60532346 60532367 60532363 60532368 +
ttaaaactattctgtcatttcc

SEQ ID NO: 206030 - DNA, 22 bp, Artificial Sequence
  Synthetic oligonucleotide; TTT chr2 60532347 60532368 60532364 60532369 +
taaaactattctgtcatttcca

SEQ ID NO: 206031 - DNA, 22 bp, Artificial Sequence
  Synthetic oligonucleotide; TTT chr2 60532348 60532369 60532365 60532370 +
aaaactattctgtcatttccag

SEQ ID NO: 206032 - DNA, 22 bp, Artificial Sequence
  Synthetic oligonucleotide; TTA chr2 60532349 60532370 60532366 60532371 +
aaactattctgtcatttccagt

SEQ ID NO: 206033 - DNA, 22 bp, Artificial Sequence
  Synthetic oligonucleotide; CTA chr2 60532355 60532376 60532372 60532377 +
ttctgtcatttccagtttttta

SEQ ID NO: 206034 - DNA, 22 bp, Artificial Sequence
  Synthetic oligonucleotide; TTC chr2 60532358 60532379 60532375 60532380 +
tgtcatttccagttttttaaaa

SEQ ID NO: 206035 - DNA, 22 bp, Artificial Sequence
  Synthetic oligonucleotide; CTG chr2 60532360 60532381 60532377 60532382 +
tcatttccagttttttaaaaag

SEQ ID NO: 206036 - DNA, 22 bp, Artificial Sequence
  Synthetic oligonucleotide; TTT chr2 60532366 60532387 60532383 60532388 +
ccagttttttaaaaaggttttg

SEQ ID NO: 206037 - DNA, 22 bp, Artificial Sequence
  Synthetic oligonucleotide; TTC chr2 60532367 60532388 60532384 60532389 +
cagttttttaaaaaggttttgt

SEQ ID NO: 206038 - DNA, 22 bp, Artificial Sequence
  Synthetic oligonucleotide; TTT chr2 60532373 60532394 60532390 60532395 +
tttaaaaaggttttgttttgtt

SEQ ID NO: 206039 - DNA, 22 bp, Artificial Sequence
  Synthetic oligonucleotide; TTT chr2 60532374 60532395 60532391 60532396 +
ttaaaaaggttttgttttgttt

SEQ ID NO: 206040 - DNA, 22 bp, Artificial Sequence
  Synthetic oligonucleotide; TTT chr2 60532375 60532396 60532392 60532397 +
taaaaaggttttgttttgtttt

SEQ ID NO: 206041 - DNA, 22 bp, Artificial Sequence
  Synthetic oligonucleotide; TTT chr2 60532376 60532397 60532393 60532398 +
aaaaaggttttgttttgttttg

SEQ ID NO: 206042 - DNA, 22 bp, Artificial Sequence
  Synthetic oligonucleotide; TTA chr2 60532377 60532398 60532394 60532399 +
aaaaggttttgttttgttttgc

SEQ ID NO: 206043 - DNA, 22 bp, Artificial Sequence
  Synthetic oligonucleotide; TTT chr2 60532386 60532407 60532403 60532408 +
tgttttgttttgctttgttttt

SEQ ID NO: 206044 - DNA, 22 bp, Artificial Sequence
  Synthetic oligonucleotide; TTT chr2 60532387 60532408 60532404 60532409 +
gttttgttttgctttgtttttt

SEQ ID NO: 206045 - DNA, 22 bp, Artificial Sequence
  Synthetic oligonucleotide; TTG chr2 60532388 60532409 60532405 60532410 +
ttttgttttgctttgttttttg

SEQ ID NO: 206046 - DNA, 22 bp, Artificial Sequence
  Synthetic oligonucleotide; TTT chr2 60532391 60532412 60532408 60532413 +
tgttttgctttgttttttgttt

SEQ ID NO: 206047 - DNA, 22 bp, Artificial Sequence
  Synthetic oligonucleotide; TTT chr2 60532392 60532413 60532409 60532414 +
gttttgctttgttttttgtttt

SEQ ID NO: 206048 - DNA, 22 bp, Artificial Sequence
  Synthetic oligonucleotide; TTG chr2 60532393 60532414 60532410 60532415 +
ttttgctttgttttttgttttt

SEQ ID NO: 206049 - DNA, 22 bp, Artificial Sequence
  Synthetic oligonucleotide; TTT chr2 60532396 60532417 60532413 60532418 +
tgctttgttttttgtttttttg

SEQ ID NO: 206050 - DNA, 22 bp, Artificial Sequence
  Synthetic oligonucleotide; TTT chr2 60532397 60532418 60532414 60532419 +
gctttgttttttgtttttttgt

SEQ ID NO: 206051 - DNA, 22 bp, Artificial Sequence
  Synthetic oligonucleotide; TTG chr2 60532398 60532419 60532415 60532420 +
ctttgttttttgtttttttgtt

SEQ ID NO: 206052 - DNA, 22 bp, Artificial Sequence
  Synthetic oligonucleotide; CTT chr2 60532401 60532422 60532418 60532423 +
tgttttttgtttttttgttttt

SEQ ID NO: 206053 - DNA, 22 bp, Artificial Sequence
  Synthetic oligonucleotide; TTT chr2 60532402 60532423 60532419 60532424 +
gttttttgtttttttgtttttc

SEQ ID NO: 206054 - DNA, 22 bp, Artificial Sequence
  Synthetic oligonucleotide; TTG chr2 60532403 60532424 60532420 60532425 +
ttttttgtttttttgtttttct

SEQ ID NO: 206055 - DNA, 22 bp, Artificial Sequence
  Synthetic oligonucleotide; TTT chr2 60532406 60532427 60532423 60532428 +
tttgtttttttgtttttctttt

SEQ ID NO: 206056 - DNA, 22 bp, Artificial Sequence
  Synthetic oligonucleotide; TTT chr2 60532407 60532428 60532424 60532429 +
ttgtttttttgtttttcttttt

SEQ ID NO: 206057 - DNA, 22 bp, Artificial Sequence
  Synthetic oligonucleotide; TTT chr2 60532408 60532429 60532425 60532430 +
tgtttttttgtttttctttttt

SEQ ID NO: 206058 - DNA, 22 bp, Artificial Sequence
  Synthetic oligonucleotide; TTT chr2 60532409 60532430 60532426 60532431 +
gtttttttgtttttcttttttt

SEQ ID NO: 206059 - DNA, 22 bp, Artificial Sequence
  Synthetic oligonucleotide; TTG chr2 60532410 60532431 60532427 60532432 +
tttttttgtttttctttttttg

SEQ ID NO: 206060 - DNA, 22 bp, Artificial Sequence
  Synthetic oligonucleotide; TTT chr2 60532413 60532434 60532430 60532435 +
ttttgtttttctttttttggtg

SEQ ID NO: 206061 - DNA, 22 bp, Artificial Sequence
  Synthetic oligonucleotide; TTT chr2 60532414 60532435 60532431 60532436 +
tttgtttttctttttttggtgg

SEQ ID NO: 206062 - DNA, 22 bp, Artificial Sequence
  Synthetic oligonucleotide; TTT chr2 60532415 60532436 60532432 60532437 +
ttgtttttctttttttggtggt

SEQ ID NO: 206063 - DNA, 22 bp, Artificial Sequence
  Synthetic oligonucleotide; TTT chr2 60532416 60532437 60532433 60532438 +
tgtttttctttttttggtggtg

SEQ ID NO: 206064 - DNA, 22 bp, Artificial Sequence
  Synthetic oligonucleotide; TTT chr2 60532417 60532438 60532434 60532439 +
gtttttctttttttggtggtgg

SEQ ID NO: 206065 - DNA, 22 bp, Artificial Sequence
  Synthetic oligonucleotide; TTG chr2 60532418 60532439 60532435 60532440 +
tttttctttttttggtggtggt

SEQ ID NO: 206066 - DNA, 22 bp, Artificial Sequence
  Synthetic oligonucleotide; TTT chr2 60532421 60532442 60532438 60532443 +
ttctttttttggtggtggtggc

SEQ ID NO: 206067 - DNA, 22 bp, Artificial Sequence
  Synthetic oligonucleotide; TTT chr2 60532422 60532443 60532439 60532444 +
tctttttttggtggtggtggcg

SEQ ID NO: 206068 - DNA, 22 bp, Artificial Sequence
  Synthetic oligonucleotide; TTT chr2 60532423 60532444 60532440 60532445 +
ctttttttggtggtggtggcgt

SEQ ID NO: 206069 - DNA, 22 bp, Artificial Sequence
  Synthetic oligonucleotide; TTC chr2 60532424 60532445 60532441 60532446 +
tttttttggtggtggtggcgtt

SEQ ID NO: 206070 - DNA, 22 bp, Artificial Sequence
  Synthetic oligonucleotide; CTT chr2 60532426 60532447 60532443 60532448 +
tttttggtggtggtggcgttaa

SEQ ID NO: 206071 - DNA, 22 bp, Artificial Sequence
  Synthetic oligonucleotide; TTT chr2 60532427 60532448 60532444 60532449 +
ttttggtggtggtggcgttaat

SEQ ID NO: 206072 - DNA, 22 bp, Artificial Sequence
  Synthetic oligonucleotide; TTT chr2 60532428 60532449 60532445 60532450 +
tttggtggtggtggcgttaatg

SEQ ID NO: 206073 - DNA, 22 bp, Artificial Sequence
  Synthetic oligonucleotide; TTT chr2 60532429 60532450 60532446 60532451 +
ttggtggtggtggcgttaatgt

SEQ ID NO: 206074 - DNA, 22 bp, Artificial Sequence
  Synthetic oligonucleotide; TTT chr2 60532430 60532451 60532447 60532452 +
tggtggtggtggcgttaatgtt

SEQ ID NO: 206075 - DNA, 22 bp, Artificial Sequence
  Synthetic oligonucleotide; TTT chr2 60532431 60532452 60532448 60532453 +
ggtggtggtggcgttaatgttt

SEQ ID NO: 206076 - DNA, 22 bp, Artificial Sequence
  Synthetic oligonucleotide; TTG chr2 60532432 60532453 60532449 60532454 +
gtggtggtggcgttaatgtttc

SEQ ID NO: 206077 - DNA, 22 bp, Artificial Sequence
  Synthetic oligonucleotide; TTA chr2 60532447 60532468 60532464 60532469 +
atgtttcttcagaaagacagct

SEQ ID NO: 206078 - DNA, 22 bp, Artificial Sequence
  Synthetic oligonucleotide; TTT chr2 60532453 60532474 60532470 60532475 +
cttcagaaagacagcttctggg

SEQ ID NO: 206079 - DNA, 22 bp, Artificial Sequence
  Synthetic oligonucleotide; TTC chr2 60532454 60532475 60532471 60532476 +
ttcagaaagacagcttctgggc

SEQ ID NO: 206080 - DNA, 22 bp, Artificial Sequence
  Synthetic oligonucleotide; CTT chr2 60532456 60532477 60532473 60532478 +
cagaaagacagcttctgggcca

SEQ ID NO: 206081 - DNA, 22 bp, Artificial Sequence
  Synthetic oligonucleotide; TTC chr2 60532457 60532478 60532474 60532479 +
agaaagacagcttctgggccac

SEQ ID NO: 206082 - DNA, 22 bp, Artificial Sequence
  Synthetic oligonucleotide; CTT chr2 60532470 60532491 60532487 60532492 +
ctgggccactctgggtattatg

SEQ ID NO: 206083 - DNA, 22 bp, Artificial Sequence
  Synthetic oligonucleotide; TTC chr2 60532471 60532492 60532488 60532493 +
tgggccactctgggtattatga

SEQ ID NO: 206084 - DNA, 22 bp, Artificial Sequence
  Synthetic oligonucleotide; CTG chr2 60532473 60532494 60532490 60532495 +
ggccactctgggtattatgatt

SEQ ID NO: 206085 - DNA, 22 bp, Artificial Sequence
  Synthetic oligonucleotide; CTC chr2 60532481 60532502 60532498 60532503 +
tgggtattatgatttggtttcc

SEQ ID NO: 206086 - DNA, 22 bp, Artificial Sequence
  Synthetic oligonucleotide; CTG chr2 60532483 60532504 60532500 60532505 +
ggtattatgatttggtttcccc

SEQ ID NO: 206087 - DNA, 22 bp, Artificial Sequence
  Synthetic oligonucleotide; TTA chr2 60532490 60532511 60532507 60532512 +
tgatttggtttcccccttacaa

SEQ ID NO: 206088 - DNA, 22 bp, Artificial Sequence
  Synthetic oligonucleotide; TTT chr2 60532496 60532517 60532513 60532518 +
ggtttcccccttacaatagtta

SEQ ID NO: 206089 - DNA, 22 bp, Artificial Sequence
  Synthetic oligonucleotide; TTG chr2 60532497 60532518 60532514 60532519 +
gtttcccccttacaatagttac

SEQ ID NO: 206090 - DNA, 22 bp, Artificial Sequence
  Synthetic oligonucleotide; TTT chr2 60532501 60532522 60532518 60532523 +
cccccttacaatagttactctc

SEQ ID NO: 206091 - DNA, 22 bp, Artificial Sequence
  Synthetic oligonucleotide; TTC chr2 60532502 60532523 60532519 60532524 +
ccccttacaatagttactctct

SEQ ID NO: 206092 - DNA, 22 bp, Artificial Sequence
  Synthetic oligonucleotide; CTT chr2 60532508 60532529 60532525 60532530 +
acaatagttactctctgcctgg

SEQ ID NO: 206093 - DNA, 22 bp, Artificial Sequence
  Synthetic oligonucleotide; TTA chr2 60532509 60532530 60532526 60532531 +
caatagttactctctgcctggt

SEQ ID NO: 206094 - DNA, 22 bp, Artificial Sequence
  Synthetic oligonucleotide; TTA chr2 60532518 60532539 60532535 60532540 +
ctctctgcctggtttactgatt

SEQ ID NO: 206095 - DNA, 22 bp, Artificial Sequence
  Synthetic oligonucleotide; CTC chr2 60532521 60532542 60532538 60532543 +
tctgcctggtttactgatttac

SEQ ID NO: 206096 - DNA, 22 bp, Artificial Sequence
  Synthetic oligonucleotide; CTC chr2 60532523 60532544 60532540 60532545 +
tgcctggtttactgatttacag

SEQ ID NO: 206097 - DNA, 22 bp, Artificial Sequence
  Synthetic oligonucleotide; CTG chr2 60532525 60532546 60532542 60532547 +
cctggtttactgatttacagaa

SEQ ID NO: 206098 - DNA, 22 bp, Artificial Sequence
  Synthetic oligonucleotide; CTG chr2 60532529 60532550 60532546 60532551 +
gtttactgatttacagaacctt

SEQ ID NO: 206099 - DNA, 22 bp, Artificial Sequence
  Synthetic oligonucleotide; TTT chr2 60532533 60532554 60532550 60532555 +
actgatttacagaaccttggta

SEQ ID NO: 206100 - DNA, 22 bp, Artificial Sequence
  Synthetic oligonucleotide; TTA chr2 60532534 60532555 60532551 60532556 +
ctgatttacagaaccttggtat

SEQ ID NO: 206101 - DNA, 22 bp, Artificial Sequence
  Synthetic oligonucleotide; CTG chr2 60532537 60532558 60532554 60532559 +
atttacagaaccttggtatgtg

SEQ ID NO: 206102 - DNA, 22 bp, Artificial Sequence
  Synthetic oligonucleotide; TTT chr2 60532541 60532562 60532558 60532563 +
acagaaccttggtatgtgaatg

SEQ ID NO: 206103 - DNA, 22 bp, Artificial Sequence
  Synthetic oligonucleotide; TTA chr2 60532542 60532563 60532559 60532564 +
cagaaccttggtatgtgaatgg

SEQ ID NO: 206104 - DNA, 22 bp, Artificial Sequence
  Synthetic oligonucleotide; CTT chr2 60532551 60532572 60532568 60532573 +
ggtatgtgaatggcgaaaaaga

SEQ ID NO: 206105 - DNA, 22 bp, Artificial Sequence
  Synthetic oligonucleotide; TTG chr2 60532552 60532573 60532569 60532574 +
gtatgtgaatggcgaaaaagaa

SEQ ID NO: 206106 - DNA, 22 bp, Artificial Sequence
  Synthetic oligonucleotide; TTC chr2 60532601 60532622 60532618 60532623 +
cttggcataaggatatgtttgc

SEQ ID NO: 206107 - DNA, 22 bp, Artificial Sequence
  Synthetic oligonucleotide; CTT chr2 60532604 60532625 60532621 60532626 +
ggcataaggatatgtttgctga

SEQ ID NO: 206108 - DNA, 22 bp, Artificial Sequence
  Synthetic oligonucleotide; TTG chr2 60532605 60532626 60532622 60532627 +
gcataaggatatgtttgctgat

SEQ ID NO: 206109 - DNA, 22 bp, Artificial Sequence
  Synthetic oligonucleotide; TTT chr2 60532621 60532642 60532638 60532643 +
gctgatcaaatttcagatcatg

SEQ ID NO: 206110 - DNA, 22 bp, Artificial Sequence
  Synthetic oligonucleotide; TTG chr2 60532622 60532643 60532639 60532644 +
ctgatcaaatttcagatcatgt

SEQ ID NO: 206111 - DNA, 22 bp, Artificial Sequence
  Synthetic oligonucleotide; CTG chr2 60532625 60532646 60532642 60532647 +
atcaaatttcagatcatgtgtt

SEQ ID NO: 206112 - DNA, 22 bp, Artificial Sequence
  Synthetic oligonucleotide; TTT chr2 60532634 60532655 60532651 60532656 +
cagatcatgtgttgttcattat

SEQ ID NO: 206113 - DNA, 22 bp, Artificial Sequence
  Synthetic oligonucleotide; TTC chr2 60532635 60532656 60532652 60532657 +
agatcatgtgttgttcattatt

SEQ ID NO: 206114 - DNA, 22 bp, Artificial Sequence
  Synthetic oligonucleotide; TTG chr2 60532648 60532669 60532665 60532670 +
ttcattattatgactttacttg

SEQ ID NO: 206115 - DNA, 22 bp, Artificial Sequence
  Synthetic oligonucleotide; TTC chr2 60532651 60532672 60532668 60532673 +
attattatgactttacttgaaa

SEQ ID NO: 206116 - DNA, 22 bp, Artificial Sequence
  Synthetic oligonucleotide; TTA chr2 60532655 60532676 60532672 60532677 +
ttatgactttacttgaaaaaca

SEQ ID NO: 206117 - DNA, 22 bp, Artificial Sequence
  Synthetic oligonucleotide; TTA chr2 60532658 60532679 60532675 60532680 +
tgactttacttgaaaaacagtt

SEQ ID NO: 206118 - DNA, 22 bp, Artificial Sequence
  Synthetic oligonucleotide; CTT chr2 60532664 60532685 60532681 60532686 +
tacttgaaaaacagtttgccac

SEQ ID NO: 206119 - DNA, 22 bp, Artificial Sequence
  Synthetic oligonucleotide; TTT chr2 60532665 60532686 60532682 60532687 +
acttgaaaaacagtttgccaca

SEQ ID NO: 206120 - DNA, 22 bp, Artificial Sequence
  Synthetic oligonucleotide; TTA chr2 60532666 60532687 60532683 60532688 +
cttgaaaaacagtttgccacag

SEQ ID NO: 206121 - DNA, 22 bp, Artificial Sequence
  Synthetic oligonucleotide; CTT chr2 60532669 60532690 60532686 60532691 +
gaaaaacagtttgccacagtga

SEQ ID NO: 206122 - DNA, 22 bp, Artificial Sequence
  Synthetic oligonucleotide; TTG chr2 60532670 60532691 60532687 60532692 +
aaaaacagtttgccacagtgag

SEQ ID NO: 206123 - DNA, 22 bp, Artificial Sequence
  Synthetic oligonucleotide; TTT chr2 60532681 60532702 60532698 60532703 +
gccacagtgagatggattcact

SEQ ID NO: 206124 - DNA, 22 bp, Artificial Sequence
  Synthetic oligonucleotide; TTG chr2 60532682 60532703 60532699 60532704 +
ccacagtgagatggattcactt

SEQ ID NO: 206125 - DNA, 22 bp, Artificial Sequence
  Synthetic oligonucleotide; TTC chr2 60532700 60532721 60532717 60532722 +
acttatatgctttctacccctc

SEQ ID NO: 206126 - DNA, 22 bp, Artificial Sequence
  Synthetic oligonucleotide; CTT chr2 60532704 60532725 60532721 60532726 +
atatgctttctacccctccact

SEQ ID NO: 206127 - DNA, 22 bp, Artificial Sequence
  Synthetic oligonucleotide; TTA chr2 60532705 60532726 60532722 60532727 +
tatgctttctacccctccactc

SEQ ID NO: 206128 - DNA, 22 bp, Artificial Sequence
  Synthetic oligonucleotide; CTT chr2 60532712 60532733 60532729 60532734 +
tctacccctccactccctttaa

SEQ ID NO: 206129 - DNA, 22 bp, Artificial Sequence
  Synthetic oligonucleotide; TTT chr2 60532713 60532734 60532730 60532735 +
ctacccctccactccctttaag

SEQ ID NO: 206130 - DNA, 22 bp, Artificial Sequence
  Synthetic oligonucleotide; TTC chr2 60532714 60532735 60532731 60532736 +
tacccctccactccctttaagt

SEQ ID NO: 206131 - DNA, 22 bp, Artificial Sequence
  Synthetic oligonucleotide; CTA chr2 60532716 60532737 60532733 60532738 +
cccctccactccctttaagtac

SEQ ID NO: 206132 - DNA, 22 bp, Artificial Sequence
  Synthetic oligonucleotide; CTC chr2 60532722 60532743 60532739 60532744 +
cactccctttaagtacttcgaa

SEQ ID NO: 206133 - DNA, 22 bp, Artificial Sequence
  Synthetic oligonucleotide; CTC chr2 60532727 60532748 60532744 60532749 +
cctttaagtacttcgaaaaaca

SEQ ID NO: 206134 - DNA, 22 bp, Artificial Sequence
  Synthetic oligonucleotide; CTT chr2 60532731 60532752 60532748 60532753 +
taagtacttcgaaaaacagtac

SEQ ID NO: 206135 - DNA, 22 bp, Artificial Sequence
  Synthetic oligonucleotide; TTT chr2 60532732 60532753 60532749 60532754 +
aagtacttcgaaaaacagtaca

SEQ ID NO: 206136 - DNA, 22 bp, Artificial Sequence
  Synthetic oligonucleotide; TTA chr2 60532733 60532754 60532750 60532755 +
agtacttcgaaaaacagtacaa

SEQ ID NO: 206137 - DNA, 22 bp, Artificial Sequence
  Synthetic oligonucleotide; CTT chr2 60532740 60532761 60532757 60532762 +
cgaaaaacagtacaattttttt

SEQ ID NO: 206138 - DNA, 22 bp, Artificial Sequence
  Synthetic oligonucleotide; TTC chr2 60532741 60532762 60532758 60532763 +
gaaaaacagtacaattttttta

SEQ ID NO: 206139 - DNA, 22 bp, Artificial Sequence
  Synthetic oligonucleotide; TTT chr2 60532758 60532779 60532775 60532780 +
ttttaaaggtagatttaaagca

SEQ ID NO: 206140 - DNA, 22 bp, Artificial Sequence
  Synthetic oligonucleotide; TTT chr2 60532759 60532780 60532776 60532781 +
tttaaaggtagatttaaagcat

SEQ ID NO: 206141 - DNA, 22 bp, Artificial Sequence
  Synthetic oligonucleotide; TTT chr2 60532760 60532781 60532777 60532782 +
ttaaaggtagatttaaagcatt

SEQ ID NO: 206142 - DNA, 22 bp, Artificial Sequence
  Synthetic oligonucleotide; TTT chr2 60532761 60532782 60532778 60532783 +
taaaggtagatttaaagcatta

SEQ ID NO: 206143 - DNA, 22 bp, Artificial Sequence
  Synthetic oligonucleotide; TTT chr2 60532762 60532783 60532779 60532784 +
aaaggtagatttaaagcattaa

SEQ ID NO: 206144 - DNA, 22 bp, Artificial Sequence
  Synthetic oligonucleotide; TTA chr2 60532763 60532784 60532780 60532785 +
aaggtagatttaaagcattaac

SEQ ID NO: 206145 - DNA, 22 bp, Artificial Sequence
  Synthetic oligonucleotide; TTT chr2 60532774 60532795 60532791 60532796 +
aaagcattaactggtttggatt

SEQ ID NO: 206146 - DNA, 22 bp, Artificial Sequence
  Synthetic oligonucleotide; TTA chr2 60532775 60532796 60532792 60532797 +
aagcattaactggtttggatta

SEQ ID NO: 206147 - DNA, 22 bp, Artificial Sequence
  Synthetic oligonucleotide; TTA chr2 60532783 60532804 60532800 60532805 +
actggtttggattaaaacaatg

SEQ ID NO: 206148 - DNA, 22 bp, Artificial Sequence
  Synthetic oligonucleotide; CTG chr2 60532787 60532808 60532804 60532809 +
gtttggattaaaacaatgtttc

SEQ ID NO: 206149 - DNA, 22 bp, Artificial Sequence
  Synthetic oligonucleotide; TTT chr2 60532791 60532812 60532808 60532813 +
ggattaaaacaatgtttcacca

SEQ ID NO: 206150 - DNA, 22 bp, Artificial Sequence
  Synthetic oligonucleotide; TTG chr2 60532792 60532813 60532809 60532814 +
gattaaaacaatgtttcaccat

SEQ ID NO: 206151 - DNA, 22 bp, Artificial Sequence
  Synthetic oligonucleotide; TTA chr2 60532797 60532818 60532814 60532819 +
aaacaatgtttcaccatctgta

SEQ ID NO: 206152 - DNA, 22 bp, Artificial Sequence
  Synthetic oligonucleotide; TTT chr2 60532808 60532829 60532825 60532830 +
caccatctgtaaattccctgaa

SEQ ID NO: 206153 - DNA, 22 bp, Artificial Sequence
  Synthetic oligonucleotide; TTC chr2 60532809 60532830 60532826 60532831 +
accatctgtaaattccctgaaa

SEQ ID NO: 206154 - DNA, 22 bp, Artificial Sequence
  Synthetic oligonucleotide; CTG chr2 60532817 60532838 60532834 60532839 +
taaattccctgaaaatacattt

SEQ ID NO: 206155 - DNA, 22 bp, Artificial Sequence
  Synthetic oligonucleotide; TTC chr2 60532824 60532845 60532841 60532846 +
cctgaaaatacattttcaaaag

SEQ ID NO: 206156 - DNA, 22 bp, Artificial Sequence
  Synthetic oligonucleotide; CTG chr2 60532828 60532849 60532845 60532850 +
aaaatacattttcaaaagactt

SEQ ID NO: 206157 - DNA, 22 bp, Artificial Sequence
  Synthetic oligonucleotide; TTT chr2 60532839 60532860 60532856 60532861 +
tcaaaagacttatgcaaagcca

SEQ ID NO: 206158 - DNA, 22 bp, Artificial Sequence
  Synthetic oligonucleotide; TTT chr2 60532840 60532861 60532857 60532862 +
caaaagacttatgcaaagccac

SEQ ID NO: 206159 - DNA, 22 bp, Artificial Sequence
  Synthetic oligonucleotide; TTC chr2 60532841 60532862 60532858 60532863 +
aaaagacttatgcaaagccaca

SEQ ID NO: 206160 - DNA, 22 bp, Artificial Sequence
  Synthetic oligonucleotide; CTT chr2 60532850 60532871 60532867 60532872 +
atgcaaagccacatgattttga

SEQ ID NO: 206161 - DNA, 22 bp, Artificial Sequence
  Synthetic oligonucleotide; TTA chr2 60532851 60532872 60532868 60532873 +
tgcaaagccacatgattttgaa

SEQ ID NO: 206162 - DNA, 22 bp, Artificial Sequence
  Synthetic oligonucleotide; TTT chr2 60532869 60532890 60532886 60532891 +
tgaaggagctaatgagattgtc

SEQ ID NO: 206163 - DNA, 22 bp, Artificial Sequence
  Synthetic oligonucleotide; TTT chr2 60532870 60532891 60532887 60532892 +
gaaggagctaatgagattgtcc

SEQ ID NO: 206164 - DNA, 22 bp, Artificial Sequence
  Synthetic oligonucleotide; TTG chr2 60532871 60532892 60532888 60532893 +
aaggagctaatgagattgtccc

SEQ ID NO: 206165 - DNA, 22 bp, Artificial Sequence
  Synthetic oligonucleotide; CTA chr2 60532880 60532901 60532897 60532902 +
atgagattgtcccaccaccaaa

SEQ ID NO: 206166 - DNA, 22 bp, Artificial Sequence
  Synthetic oligonucleotide; TTG chr2 60532889 60532910 60532906 60532911 +
tcccaccaccaaaatttaatgg

SEQ ID NO: 206167 - DNA, 22 bp, Artificial Sequence
  Synthetic oligonucleotide; TTT chr2 60532906 60532927 60532923 60532928 +
aatggtgacttaagaaattcta

SEQ ID NO: 206168 - DNA, 22 bp, Artificial Sequence
  Synthetic oligonucleotide; TTA chr2 60532907 60532928 60532924 60532929 +
atggtgacttaagaaattctaa

SEQ ID NO: 206169 - DNA, 22 bp, Artificial Sequence
  Synthetic oligonucleotide; CTT chr2 60532917 60532938 60532934 60532939 +
aagaaattctaatactttttat

SEQ ID NO: 206170 - DNA, 22 bp, Artificial Sequence
  Synthetic oligonucleotide; TTA chr2 60532918 60532939 60532935 60532940 +
agaaattctaatactttttatt

SEQ ID NO: 206171 - DNA, 22 bp, Artificial Sequence
  Synthetic oligonucleotide; TTC chr2 60532926 60532947 60532943 60532948 +
taatactttttatttacttcct

SEQ ID NO: 206172 - DNA, 22 bp, Artificial Sequence
  Synthetic oligonucleotide; CTA chr2 60532928 60532949 60532945 60532950 +
atactttttatttacttcctgt

SEQ ID NO: 206173 - DNA, 22 bp, Artificial Sequence
  Synthetic oligonucleotide; CTT chr2 60532934 60532955 60532951 60532956 +
tttatttacttcctgtagaatt

SEQ ID NO: 206174 - DNA, 22 bp, Artificial Sequence
  Synthetic oligonucleotide; TTT chr2 60532935 60532956 60532952 60532957 +
ttatttacttcctgtagaatta

SEQ ID NO: 206175 - DNA, 22 bp, Artificial Sequence
  Synthetic oligonucleotide; TTT chr2 60532936 60532957 60532953 60532958 +
tatttacttcctgtagaattat

SEQ ID NO: 206176 - DNA, 22 bp, Artificial Sequence
  Synthetic oligonucleotide; TTT chr2 60532937 60532958 60532954 60532959 +
atttacttcctgtagaattatt

SEQ ID NO: 206177 - DNA, 22 bp, Artificial Sequence
  Synthetic oligonucleotide; TTA chr2 60532938 60532959 60532955 60532960 +
tttacttcctgtagaattattt

SEQ ID NO: 206178 - DNA, 22 bp, Artificial Sequence
  Synthetic oligonucleotide; TTT chr2 60532941 60532962 60532958 60532963 +
acttcctgtagaattatttgtg

SEQ ID NO: 206179 - DNA, 22 bp, Artificial Sequence
  Synthetic oligonucleotide; TTA chr2 60532942 60532963 60532959 60532964 +
cttcctgtagaattatttgtgt

SEQ ID NO: 206180 - DNA, 22 bp, Artificial Sequence
  Synthetic oligonucleotide; CTT chr2 60532945 60532966 60532962 60532967 +
cctgtagaattatttgtgtact

SEQ ID NO: 206181 - DNA, 22 bp, Artificial Sequence
  Synthetic oligonucleotide; TTC chr2 60532946 60532967 60532963 60532968 +
ctgtagaattatttgtgtactt

SEQ ID NO: 206182 - DNA, 22 bp, Artificial Sequence
  Synthetic oligonucleotide; CTG chr2 60532949 60532970 60532966 60532971 +
tagaattatttgtgtacttgac

SEQ ID NO: 206183 - DNA, 22 bp, Artificial Sequence
  Synthetic oligonucleotide; TTA chr2 60532957 60532978 60532974 60532979 +
tttgtgtacttgacatttatac

SEQ ID NO: 206184 - DNA, 22 bp, Artificial Sequence
  Synthetic oligonucleotide; TTT chr2 60532960 60532981 60532977 60532982 +
gtgtacttgacatttatacagt

SEQ ID NO: 206185 - DNA, 22 bp, Artificial Sequence
  Synthetic oligonucleotide; TTG chr2 60532961 60532982 60532978 60532983 +
tgtacttgacatttatacagtt

SEQ ID NO: 206186 - DNA, 22 bp, Artificial Sequence
  Synthetic oligonucleotide; CTT chr2 60532968 60532989 60532985 60532990 +
gacatttatacagtttctccat

SEQ ID NO: 206187 - DNA, 22 bp, Artificial Sequence
  Synthetic oligonucleotide; TTG chr2 60532969 60532990 60532986 60532991 +
acatttatacagtttctccatt

SEQ ID NO: 206188 - DNA, 22 bp, Artificial Sequence
  Synthetic oligonucleotide; TTT chr2 60532975 60532996 60532992 60532997 +
atacagtttctccattatataa

SEQ ID NO: 206189 - DNA, 22 bp, Artificial Sequence
  Synthetic oligonucleotide; TTA chr2 60532976 60532997 60532993 60532998 +
tacagtttctccattatataac

SEQ ID NO: 206190 - DNA, 22 bp, Artificial Sequence
  Synthetic oligonucleotide; TTT chr2 60532984 60533005 60533001 60533006 +
ctccattatataacaatctacc

SEQ ID NO: 206191 - DNA, 22 bp, Artificial Sequence
  Synthetic oligonucleotide; TTC chr2 60532985 60533006 60533002 60533007 +
tccattatataacaatctaccc

SEQ ID NO: 206192 - DNA, 22 bp, Artificial Sequence
  Synthetic oligonucleotide; CTC chr2 60532987 60533008 60533004 60533009 +
cattatataacaatctaccctg

SEQ ID NO: 206193 - DNA, 22 bp, Artificial Sequence
  Synthetic oligonucleotide; TTA chr2 60532992 60533013 60533009 60533014 +
tataacaatctaccctgggtac

SEQ ID NO: 206194 - DNA, 22 bp, Artificial Sequence
  Synthetic oligonucleotide; CTA chr2 60533004 60533025 60533021 60533026 +
ccctgggtacactagattatgc

SEQ ID NO: 206195 - DNA, 22 bp, Artificial Sequence
  Synthetic oligonucleotide; CTG chr2 60533009 60533030 60533026 60533031 +
ggtacactagattatgccaatc

SEQ ID NO: 206196 - DNA, 22 bp, Artificial Sequence
  Synthetic oligonucleotide; CTA chr2 60533018 60533039 60533035 60533040 +
gattatgccaatctattagaat

SEQ ID NO: 206197 - DNA, 22 bp, Artificial Sequence
  Synthetic oligonucleotide; TTA chr2 60533023 60533044 60533040 60533045 +
tgccaatctattagaatgaaat

SEQ ID NO: 206198 - DNA, 22 bp, Artificial Sequence
  Synthetic oligonucleotide; CTA chr2 60533033 60533054 60533050 60533055 +
ttagaatgaaatttgtactcca

SEQ ID NO: 206199 - DNA, 22 bp, Artificial Sequence
  Synthetic oligonucleotide; TTA chr2 60533036 60533057 60533053 60533058 +
gaatgaaatttgtactccatat

SEQ ID NO: 206200 - DNA, 22 bp, Artificial Sequence
  Synthetic oligonucleotide; TTT chr2 60533047 60533068 60533064 60533069 +
gtactccatataagcagaagtt

SEQ ID NO: 206201 - DNA, 22 bp, Artificial Sequence
  Synthetic oligonucleotide; TTG chr2 60533048 60533069 60533065 60533070 +
tactccatataagcagaagttt

SEQ ID NO: 206202 - DNA, 22 bp, Artificial Sequence
  Synthetic oligonucleotide; CTC chr2 60533053 60533074 60533070 60533075 +
catataagcagaagtttccagt

SEQ ID NO: 206203 - DNA, 22 bp, Artificial Sequence
  Synthetic oligonucleotide; TTT chr2 60533070 60533091 60533087 60533092 +
ccagtcacttttgacttaccat

SEQ ID NO: 206204 - DNA, 22 bp, Artificial Sequence
  Synthetic oligonucleotide; TTC chr2 60533071 60533092 60533088 60533093 +
cagtcacttttgacttaccatt

SEQ ID NO: 206205 - DNA, 22 bp, Artificial Sequence
  Synthetic oligonucleotide; CTT chr2 60533080 60533101 60533097 60533102 +
ttgacttaccattatgtttcaa

SEQ ID NO: 206206 - DNA, 22 bp, Artificial Sequence
  Synthetic oligonucleotide; TTT chr2 60533081 60533102 60533098 60533103 +
tgacttaccattatgtttcaat

SEQ ID NO: 206207 - DNA, 22 bp, Artificial Sequence
  Synthetic oligonucleotide; TTT chr2 60533082 60533103 60533099 60533104 +
gacttaccattatgtttcaatg

SEQ ID NO: 206208 - DNA, 22 bp, Artificial Sequence
  Synthetic oligonucleotide; TTG chr2 60533083 60533104 60533100 60533105 +
acttaccattatgtttcaatgt

SEQ ID NO: 206209 - DNA, 22 bp, Artificial Sequence
  Synthetic oligonucleotide; CTT chr2 60533087 60533108 60533104 60533109 +
accattatgtttcaatgtaaag

SEQ ID NO: 206210 - DNA, 22 bp, Artificial Sequence
  Synthetic oligonucleotide; TTA chr2 60533088 60533109 60533105 60533110 +
ccattatgtttcaatgtaaagt

SEQ ID NO: 206211 - DNA, 22 bp, Artificial Sequence
  Synthetic oligonucleotide; TTA chr2 60533094 60533115 60533111 60533116 +
tgtttcaatgtaaagtgttatt

SEQ ID NO: 206212 - DNA, 22 bp, Artificial Sequence
  Synthetic oligonucleotide; TTT chr2 60533099 60533120 60533116 60533121 +
caatgtaaagtgttattatagc

SEQ ID NO: 206213 - DNA, 22 bp, Artificial Sequence
  Synthetic oligonucleotide; TTC chr2 60533100 60533121 60533117 60533122 +
aatgtaaagtgttattatagca

SEQ ID NO: 206214 - DNA, 22 bp, Artificial Sequence
  Synthetic oligonucleotide; TTA chr2 60533114 60533135 60533131 60533136 +
ttatagcagagtataaagcaca

SEQ ID NO: 206215 - DNA, 22 bp, Artificial Sequence
  Synthetic oligonucleotide; TTA chr2 60533117 60533138 60533134 60533139 +
tagcagagtataaagcacagct

SEQ ID NO: 206216 - DNA, 22 bp, Artificial Sequence
  Synthetic oligonucleotide; CTC chr2 60533140 60533161 60533157 60533162 +
ctccatgctcacgtttttaact

SEQ ID NO: 206217 - DNA, 22 bp, Artificial Sequence
  Synthetic oligonucleotide; CTC chr2 60533143 60533164 60533160 60533165 +
catgctcacgtttttaactcta

SEQ ID NO: 206218 - DNA, 22 bp, Artificial Sequence
  Synthetic oligonucleotide; CTC chr2 60533150 60533171 60533167 60533172 +
acgtttttaactctaatactgt

SEQ ID NO: 206219 - DNA, 22 bp, Artificial Sequence
  Synthetic oligonucleotide; TTT chr2 60533156 60533177 60533173 60533178 +
ttaactctaatactgtaatctt

SEQ ID NO: 206220 - DNA, 22 bp, Artificial Sequence
  Synthetic oligonucleotide; TTT chr2 60533157 60533178 60533174 60533179 +
taactctaatactgtaatcttt

SEQ ID NO: 206221 - DNA, 22 bp, Artificial Sequence
  Synthetic oligonucleotide; TTT chr2 60533158 60533179 60533175 60533180 +
aactctaatactgtaatctttc

SEQ ID NO: 206222 - DNA, 22 bp, Artificial Sequence
  Synthetic oligonucleotide; TTA chr2 60533159 60533180 60533176 60533181 +
actctaatactgtaatctttct

SEQ ID NO: 206223 - DNA, 22 bp, Artificial Sequence
  Synthetic oligonucleotide; CTC chr2 60533163 60533184 60533180 60533185 +
taatactgtaatctttcttgct

SEQ ID NO: 206224 - DNA, 22 bp, Artificial Sequence
  Synthetic oligonucleotide; CTA chr2 60533165 60533186 60533182 60533187 +
atactgtaatctttcttgctgc

SEQ ID NO: 206225 - DNA, 22 bp, Artificial Sequence
  Synthetic oligonucleotide; CTG chr2 60533171 60533192 60533188 60533193 +
taatctttcttgctgcttctag

SEQ ID NO: 206226 - DNA, 22 bp, Artificial Sequence
  Synthetic oligonucleotide; CTT chr2 60533178 60533199 60533195 60533200 +
tcttgctgcttctagggctgtg

SEQ ID NO: 206227 - DNA, 22 bp, Artificial Sequence
  Synthetic oligonucleotide; TTT chr2 60533179 60533200 60533196 60533201 +
cttgctgcttctagggctgtgt

SEQ ID NO: 206228 - DNA, 22 bp, Artificial Sequence
  Synthetic oligonucleotide; TTC chr2 60533180 60533201 60533197 60533202 +
ttgctgcttctagggctgtgtc

SEQ ID NO: 206229 - DNA, 22 bp, Artificial Sequence
  Synthetic oligonucleotide; CTT chr2 60533182 60533203 60533199 60533204 +
gctgcttctagggctgtgtcag

SEQ ID NO: 206230 - DNA, 22 bp, Artificial Sequence
  Synthetic oligonucleotide; TTG chr2 60533183 60533204 60533200 60533205 +
ctgcttctagggctgtgtcagt

SEQ ID NO: 206231 - DNA, 22 bp, Artificial Sequence
  Synthetic oligonucleotide; CTG chr2 60533186 60533207 60533203 60533208 +
cttctagggctgtgtcagtgtt

SEQ ID NO: 206232 - DNA, 22 bp, Artificial Sequence
  Synthetic oligonucleotide; CTT chr2 60533189 60533210 60533206 60533211 +
ctagggctgtgtcagtgtttac

SEQ ID NO: 206233 - DNA, 22 bp, Artificial Sequence
  Synthetic oligonucleotide; TTC chr2 60533190 60533211 60533207 60533212 +
tagggctgtgtcagtgtttaca

SEQ ID NO: 206234 - DNA, 22 bp, Artificial Sequence
  Synthetic oligonucleotide; CTA chr2 60533192 60533213 60533209 60533214 +
gggctgtgtcagtgtttacatt

SEQ ID NO: 206235 - DNA, 22 bp, Artificial Sequence
  Synthetic oligonucleotide; CTG chr2 60533198 60533219 60533215 60533220 +
tgtcagtgtttacattcctgga

SEQ ID NO: 206236 - DNA, 22 bp, Artificial Sequence
  Synthetic oligonucleotide; TTT chr2 60533209 60533230 60533226 60533231 +
acattcctggaagttaaataaa

SEQ ID NO: 206237 - DNA, 22 bp, Artificial Sequence
  Synthetic oligonucleotide; TTA chr2 60533210 60533231 60533227 60533232 +
cattcctggaagttaaataaac

SEQ ID NO: 206238 - DNA, 22 bp, Artificial Sequence
  Synthetic oligonucleotide; TTC chr2 60533215 60533236 60533232 60533237 +
ctggaagttaaataaaccgaca

SEQ ID NO: 206239 - DNA, 22 bp, Artificial Sequence
  Synthetic oligonucleotide; CTG chr2 60533218 60533239 60533235 60533240 +
gaagttaaataaaccgacatgg

SEQ ID NO: 206240 - DNA, 22 bp, Artificial Sequence
  Synthetic oligonucleotide; TTA chr2 60533225 60533246 60533242 60533247 +
aataaaccgacatggcaaaact

SEQ ID NO: 206241 - DNA, 22 bp, Artificial Sequence
  Synthetic oligonucleotide; CTC chr2 60533248 60533269 60533265 60533270 +
ctggatagactgaataataagg

SEQ ID NO: 206242 - DNA, 22 bp, Artificial Sequence
  Synthetic oligonucleotide; CTG chr2 60533251 60533272 60533268 60533273 +
gatagactgaataataaggctt

SEQ ID NO: 206243 - DNA, 22 bp, Artificial Sequence
  Synthetic oligonucleotide; CTG chr2 60533260 60533281 60533277 60533282 +
aataataaggcttgtgatgact

SEQ ID NO: 206244 - DNA, 22 bp, Artificial Sequence
  Synthetic oligonucleotide; CTT chr2 60533273 60533294 60533290 60533295 +
gtgatgactaaattgtttactt

SEQ ID NO: 206245 - DNA, 22 bp, Artificial Sequence
  Synthetic oligonucleotide; TTG chr2 60533274 60533295 60533291 60533296 +
tgatgactaaattgtttacttt

SEQ ID NO: 206246 - DNA, 22 bp, Artificial Sequence
  Synthetic oligonucleotide; CTA chr2 60533283 60533304 60533300 60533305 +
aattgtttactttttaccttgt

SEQ ID NO: 206247 - DNA, 22 bp, Artificial Sequence
  Synthetic oligonucleotide; TTG chr2 60533288 60533309 60533305 60533310 +
tttactttttaccttgttagga

SEQ ID NO: 206248 - DNA, 22 bp, Artificial Sequence
  Synthetic oligonucleotide; TTT chr2 60533291 60533312 60533308 60533313 +
actttttaccttgttaggatcc

SEQ ID NO: 206249 - DNA, 22 bp, Artificial Sequence
  Synthetic oligonucleotide; TTA chr2 60533292 60533313 60533309 60533314 +
ctttttaccttgttaggatccc

SEQ ID NO: 206250 - DNA, 22 bp, Artificial Sequence
  Synthetic oligonucleotide; CTT chr2 60533295 60533316 60533312 60533317 +
tttaccttgttaggatcccttt

SEQ ID NO: 206251 - DNA, 22 bp, Artificial Sequence
  Synthetic oligonucleotide; TTT chr2 60533296 60533317 60533313 60533318 +
ttaccttgttaggatccctttc

SEQ ID NO: 206252 - DNA, 22 bp, Artificial Sequence
  Synthetic oligonucleotide; TTT chr2 60533297 60533318 60533314 60533319 +
taccttgttaggatccctttct

SEQ ID NO: 206253 - DNA, 22 bp, Artificial Sequence
  Synthetic oligonucleotide; TTT chr2 60533298 60533319 60533315 60533320 +
accttgttaggatccctttctt

SEQ ID NO: 206254 - DNA, 22 bp, Artificial Sequence
  Synthetic oligonucleotide; TTA chr2 60533299 60533320 60533316 60533321 +
ccttgttaggatccctttcttg

SEQ ID NO: 206255 - DNA, 22 bp, Artificial Sequence
  Synthetic oligonucleotide; CTT chr2 60533303 60533324 60533320 60533325 +
gttaggatccctttcttgtaaa

SEQ ID NO: 206256 - DNA, 22 bp, Artificial Sequence
  Synthetic oligonucleotide; TTG chr2 60533304 60533325 60533321 60533326 +
ttaggatccctttcttgtaaag

SEQ ID NO: 206257 - DNA, 22 bp, Artificial Sequence
  Synthetic oligonucleotide; TTA chr2 60533307 60533328 60533324 60533329 +
ggatccctttcttgtaaagttt

SEQ ID NO: 206258 - DNA, 22 bp, Artificial Sequence
  Synthetic oligonucleotide; CTT chr2 60533316 60533337 60533333 60533338 +
tcttgtaaagtttgggggagag

SEQ ID NO: 206259 - DNA, 22 bp, Artificial Sequence
  Synthetic oligonucleotide; TTT chr2 60533317 60533338 60533334 60533339 +
cttgtaaagtttgggggagaga

SEQ ID NO: 206260 - DNA, 22 bp, Artificial Sequence
  Synthetic oligonucleotide; TTC chr2 60533318 60533339 60533335 60533340 +
ttgtaaagtttgggggagagag

SEQ ID NO: 206261 - DNA, 22 bp, Artificial Sequence
  Synthetic oligonucleotide; CTT chr2 60533320 60533341 60533337 60533342 +
gtaaagtttgggggagagagag

SEQ ID NO: 206262 - DNA, 22 bp, Artificial Sequence
  Synthetic oligonucleotide; TTG chr2 60533321 60533342 60533338 60533343 +
taaagtttgggggagagagaga

SEQ ID NO: 206263 - DNA, 22 bp, Artificial Sequence
  Synthetic oligonucleotide; TTT chr2 60533329 60533350 60533346 60533351 +
gggggagagagagaggagagaa

SEQ ID NO: 206264 - DNA, 22 bp, Artificial Sequence
  Synthetic oligonucleotide; TTG chr2 60533330 60533351 60533347 60533352 +
ggggagagagagaggagagaaa

SEQ ID NO: 206265 - DNA, 22 bp, Artificial Sequence
  Synthetic oligonucleotide; TTT chr2 60533399 60533420 60533416 60533421 +
atacactggcttccatatgtca

SEQ ID NO: 206266 - DNA, 22 bp, Artificial Sequence
  Synthetic oligonucleotide; TTA chr2 60533400 60533421 60533417 60533422 +
tacactggcttccatatgtcac

SEQ ID NO: 206267 - DNA, 22 bp, Artificial Sequence
  Synthetic oligonucleotide; CTG chr2 60533407 60533428 60533424 60533429 +
gcttccatatgtcacaaagacc

SEQ ID NO: 206268 - DNA, 22 bp, Artificial Sequence
  Synthetic oligonucleotide; CTT chr2 60533411 60533432 60533428 60533433 +
ccatatgtcacaaagaccttcc

SEQ ID NO: 206269 - DNA, 22 bp, Artificial Sequence
  Synthetic oligonucleotide; TTC chr2 60533412 60533433 60533429 60533434 +
catatgtcacaaagaccttcct

SEQ ID NO: 206270 - DNA, 22 bp, Artificial Sequence
  Synthetic oligonucleotide; CTT chr2 60533431 60533452 60533448 60533453 +
cctatccacagccaacgcgact

SEQ ID NO: 206271 - DNA, 22 bp, Artificial Sequence
  Synthetic oligonucleotide; TTC chr2 60533432 60533453 60533449 60533454 +
ctatccacagccaacgcgactg

SEQ ID NO: 206272 - DNA, 22 bp, Artificial Sequence
  Synthetic oligonucleotide; CTA chr2 60533435 60533456 60533452 60533457 +
tccacagccaacgcgactgaag

SEQ ID NO: 206273 - DNA, 22 bp, Artificial Sequence
  Synthetic oligonucleotide; CTG chr2 60533454 60533475 60533471 60533476 +
aagcagcatgcataagttagtg

SEQ ID NO: 206274 - DNA, 22 bp, Artificial Sequence
  Synthetic oligonucleotide; TTA chr2 60533473 60533494 60533490 60533495 +
gtgttgcttgttttgttttctt

SEQ ID NO: 206275 - DNA, 22 bp, Artificial Sequence
  Synthetic oligonucleotide; TTG chr2 60533479 60533500 60533496 60533501 +
cttgttttgttttcttaaatac

SEQ ID NO: 206276 - DNA, 22 bp, Artificial Sequence
  Synthetic oligonucleotide; CTT chr2 60533482 60533503 60533499 60533504 +
gttttgttttcttaaataccgg

SEQ ID NO: 206277 - DNA, 22 bp, Artificial Sequence
  Synthetic oligonucleotide; TTG chr2 60533483 60533504 60533500 60533505 +
ttttgttttcttaaataccggg

SEQ ID NO: 206278 - DNA, 22 bp, Artificial Sequence
  Synthetic oligonucleotide; TTT chr2 60533486 60533507 60533503 60533508 +
tgttttcttaaataccgggtca

SEQ ID NO: 206279 - DNA, 22 bp, Artificial Sequence
  Synthetic oligonucleotide; TTT chr2 60533487 60533508 60533504 60533509 +
gttttcttaaataccgggtcag

SEQ ID NO: 206280 - DNA, 22 bp, Artificial Sequence
  Synthetic oligonucleotide; TTG chr2 60533488 60533509 60533505 60533510 +
ttttcttaaataccgggtcagc

SEQ ID NO: 206281 - DNA, 22 bp, Artificial Sequence
  Synthetic oligonucleotide; TTT chr2 60533491 60533512 60533508 60533513 +
tcttaaataccgggtcagctga

SEQ ID NO: 206282 - DNA, 22 bp, Artificial Sequence
  Synthetic oligonucleotide; TTT chr2 60533492 60533513 60533509 60533514 +
cttaaataccgggtcagctgaa

SEQ ID NO: 206283 - DNA, 22 bp, Artificial Sequence
  Synthetic oligonucleotide; TTC chr2 60533493 60533514 60533510 60533515 +
ttaaataccgggtcagctgaat

SEQ ID NO: 206284 - DNA, 22 bp, Artificial Sequence
  Synthetic oligonucleotide; CTT chr2 60533495 60533516 60533512 60533517 +
aaataccgggtcagctgaatac

SEQ ID NO: 206285 - DNA, 22 bp, Artificial Sequence
  Synthetic oligonucleotide; TTA chr2 60533496 60533517 60533513 60533518 +
aataccgggtcagctgaatacc

SEQ ID NO: 206286 - DNA, 22 bp, Artificial Sequence
  Synthetic oligonucleotide; CTG chr2 60533512 60533533 60533529 60533534 +
aatacccctttctccactgccc

SEQ ID NO: 206287 - DNA, 22 bp, Artificial Sequence
  Synthetic oligonucleotide; CTT chr2 60533522 60533543 60533539 60533544 +
tctccactgcccactcagcccc

SEQ ID NO: 206288 - DNA, 22 bp, Artificial Sequence
  Synthetic oligonucleotide; TTT chr2 60533523 60533544 60533540 60533545 +
ctccactgcccactcagcccca

SEQ ID NO: 206289 - DNA, 22 bp, Artificial Sequence
  Synthetic oligonucleotide; TTC chr2 60533524 60533545 60533541 60533546 +
tccactgcccactcagccccac

SEQ ID NO: 206290 - DNA, 22 bp, Artificial Sequence
  Synthetic oligonucleotide; CTC chr2 60533526 60533547 60533543 60533548 +
cactgcccactcagccccacat

SEQ ID NO: 206291 - DNA, 22 bp, Artificial Sequence
  Synthetic oligonucleotide; CTG chr2 60533531 60533552 60533548 60533553 +
cccactcagccccacataaagt

SEQ ID NO: 206292 - DNA, 22 bp, Artificial Sequence
  Synthetic oligonucleotide; CTC chr2 60533538 60533559 60533555 60533560 +
agccccacataaagtatgaaga

SEQ ID NO: 206293 - DNA, 22 bp, Artificial Sequence
  Synthetic oligonucleotide; TTT chr2 60533563 60533584 60533580 60533585 +
tttttgaccattttcaaatagc

SEQ ID NO: 206294 - DNA, 22 bp, Artificial Sequence
  Synthetic oligonucleotide; TTT chr2 60533564 60533585 60533581 60533586 +
ttttgaccattttcaaatagca

SEQ ID NO: 206295 - DNA, 22 bp, Artificial Sequence
  Synthetic oligonucleotide; TTT chr2 60533565 60533586 60533582 60533587 +
tttgaccattttcaaatagcaa

SEQ ID NO: 206296 - DNA, 22 bp, Artificial Sequence
  Synthetic oligonucleotide; TTT chr2 60533566 60533587 60533583 60533588 +
ttgaccattttcaaatagcaaa

SEQ ID NO: 206297 - DNA, 22 bp, Artificial Sequence
  Synthetic oligonucleotide; TTT chr2 60533567 60533588 60533584 60533589 +
tgaccattttcaaatagcaaat

SEQ ID NO: 206298 - DNA, 22 bp, Artificial Sequence
  Synthetic oligonucleotide; TTT chr2 60533568 60533589 60533585 60533590 +
gaccattttcaaatagcaaatt

SEQ ID NO: 206299 - DNA, 22 bp, Artificial Sequence
  Synthetic oligonucleotide; TTG chr2 60533569 60533590 60533586 60533591 +
accattttcaaatagcaaatta

SEQ ID NO: 206300 - DNA, 22 bp, Artificial Sequence
  Synthetic oligonucleotide; TTT chr2 60533576 60533597 60533593 60533598 +
tcaaatagcaaattatccatta

SEQ ID NO: 206301 - DNA, 22 bp, Artificial Sequence
  Synthetic oligonucleotide; TTT chr2 60533577 60533598 60533594 60533599 +
caaatagcaaattatccattag

SEQ ID NO: 206302 - DNA, 22 bp, Artificial Sequence
  Synthetic oligonucleotide; TTC chr2 60533578 60533599 60533595 60533600 +
aaatagcaaattatccattaga

SEQ ID NO: 206303 - DNA, 22 bp, Artificial Sequence
  Synthetic oligonucleotide; TTA chr2 60533591 60533612 60533608 60533613 +
tccattagatttcatcatatct

SEQ ID NO: 206304 - DNA, 22 bp, Artificial Sequence
  Synthetic oligonucleotide; TTA chr2 60533598 60533619 60533615 60533620 +
gatttcatcatatcttagtaaa

SEQ ID NO: 206305 - DNA, 22 bp, Artificial Sequence
  Synthetic oligonucleotide; TTT chr2 60533603 60533624 60533620 60533625 +
catcatatcttagtaaagcaat

SEQ ID NO: 206306 - DNA, 22 bp, Artificial Sequence
  Synthetic oligonucleotide; TTC chr2 60533604 60533625 60533621 60533626 +
atcatatcttagtaaagcaatt

SEQ ID NO: 206307 - DNA, 22 bp, Artificial Sequence
  Synthetic oligonucleotide; CTT chr2 60533614 60533635 60533631 60533636 +
agtaaagcaattacatcaagaa

SEQ ID NO: 206308 - DNA, 22 bp, Artificial Sequence
  Synthetic oligonucleotide; TTA chr2 60533615 60533636 60533632 60533637 +
gtaaagcaattacatcaagaaa

SEQ ID NO: 206309 - DNA, 22 bp, Artificial Sequence
  Synthetic oligonucleotide; TTA chr2 60533627 60533648 60533644 60533649 +
catcaagaaaatgatagtgcgt

SEQ ID NO: 206310 - DNA, 22 bp, Artificial Sequence
  Synthetic oligonucleotide; TTA chr2 60533662 60533683 60533679 60533684 +
tgcatgcagttggccggagacc

SEQ ID NO: 206311 - DNA, 22 bp, Artificial Sequence
  Synthetic oligonucleotide; TTG chr2 60533674 60533695 60533691 60533696 +
gccggagaccaaaggctgtgaa

SEQ ID NO: 206312 - DNA, 22 bp, Artificial Sequence
  Synthetic oligonucleotide; CTG chr2 60533692 60533713 60533709 60533714 +
tgaagtcggagagggcagaatc

SEQ ID NO: 206313 - DNA, 22 bp, Artificial Sequence
  Synthetic oligonucleotide; CTC chr2 60533718 60533739 60533735 60533740 +
gacacacacaaataaaaagccc

SEQ ID NO: 206314 - DNA, 22 bp, Artificial Sequence
  Synthetic oligonucleotide; CTG chr2 60533743 60533764 60533760 60533765 +
gatctcacagatggaccccatc

SEQ ID NO: 206315 - DNA, 22 bp, Artificial Sequence
  Synthetic oligonucleotide; CTC chr2 60533749 60533770 60533766 60533771 +
acagatggaccccatcagttca

SEQ ID NO: 206316 - DNA, 22 bp, Artificial Sequence
  Synthetic oligonucleotide; TTC chr2 60533770 60533791 60533787 60533792 +
atcttactgcctaaaaagttca

SEQ ID NO: 206317 - DNA, 22 bp, Artificial Sequence
  Synthetic oligonucleotide; CTT chr2 60533775 60533796 60533792 60533797 +
actgcctaaaaagttcatgcac

SEQ ID NO: 206318 - DNA, 22 bp, Artificial Sequence
  Synthetic oligonucleotide; TTA chr2 60533776 60533797 60533793 60533798 +
ctgcctaaaaagttcatgcact

SEQ ID NO: 206319 - DNA, 22 bp, Artificial Sequence
  Synthetic oligonucleotide; CTG chr2 60533779 60533800 60533796 60533801 +
cctaaaaagttcatgcacttaa

SEQ ID NO: 206320 - DNA, 22 bp, Artificial Sequence
  Synthetic oligonucleotide; CTA chr2 60533783 60533804 60533800 60533805 +
aaaagttcatgcacttaataat

SEQ ID NO: 206321 - DNA, 22 bp, Artificial Sequence
  Synthetic oligonucleotide; TTC chr2 60533791 60533812 60533808 60533813 +
atgcacttaataatttatttgt

SEQ ID NO: 206322 - DNA, 22 bp, Artificial Sequence
  Synthetic oligonucleotide; CTT chr2 60533799 60533820 60533816 60533821 +
aataatttatttgtgttctgga

SEQ ID NO: 206323 - DNA, 22 bp, Artificial Sequence
  Synthetic oligonucleotide; TTA chr2 60533800 60533821 60533817 60533822 +
ataatttatttgtgttctggat

SEQ ID NO: 206324 - DNA, 22 bp, Artificial Sequence
  Synthetic oligonucleotide; TTT chr2 60533807 60533828 60533824 60533829 +
atttgtgttctggatactgttt

SEQ ID NO: 206325 - DNA, 22 bp, Artificial Sequence
  Synthetic oligonucleotide; TTA chr2 60533808 60533829 60533825 60533830 +
tttgtgttctggatactgtttc

SEQ ID NO: 206326 - DNA, 22 bp, Artificial Sequence
  Synthetic oligonucleotide; TTT chr2 60533811 60533832 60533828 60533833 +
gtgttctggatactgtttccca

SEQ ID NO: 206327 - DNA, 22 bp, Artificial Sequence
  Synthetic oligonucleotide; TTG chr2 60533812 60533833 60533829 60533834 +
tgttctggatactgtttcccag

SEQ ID NO: 206328 - DNA, 22 bp, Artificial Sequence
  Synthetic oligonucleotide; TTC chr2 60533817 60533838 60533834 60533839 +
tggatactgtttcccagctgaa

SEQ ID NO: 206329 - DNA, 22 bp, Artificial Sequence
  Synthetic oligonucleotide; CTG chr2 60533819 60533840 60533836 60533841 +
gatactgtttcccagctgaata

SEQ ID NO: 206330 - DNA, 22 bp, Artificial Sequence
  Synthetic oligonucleotide; CTG chr2 60533826 60533847 60533843 60533848 +
tttcccagctgaatattaacaa

SEQ ID NO: 206331 - DNA, 22 bp, Artificial Sequence
  Synthetic oligonucleotide; TTT chr2 60533829 60533850 60533846 60533851 +
cccagctgaatattaacaactt

SEQ ID NO: 206332 - DNA, 22 bp, Artificial Sequence
  Synthetic oligonucleotide; TTC chr2 60533830 60533851 60533847 60533852 +
ccagctgaatattaacaacttt

SEQ ID NO: 206333 - DNA, 22 bp, Artificial Sequence
  Synthetic oligonucleotide; CTG chr2 60533837 60533858 60533854 60533859 +
aatattaacaactttaaactga

SEQ ID NO: 206334 - DNA, 22 bp, Artificial Sequence
  Synthetic oligonucleotide; TTA chr2 60533844 60533865 60533861 60533866 +
acaactttaaactgaagcatgc

SEQ ID NO: 206335 - DNA, 22 bp, Artificial Sequence
  Synthetic oligonucleotide; CTT chr2 60533851 60533872 60533868 60533873 +
taaactgaagcatgcttttagc

SEQ ID NO: 206336 - DNA, 22 bp, Artificial Sequence
  Synthetic oligonucleotide; TTT chr2 60533852 60533873 60533869 60533874 +
aaactgaagcatgcttttagca

SEQ ID NO: 206337 - DNA, 22 bp, Artificial Sequence
  Synthetic oligonucleotide; TTA chr2 60533853 60533874 60533870 60533875 +
aactgaagcatgcttttagcat

SEQ ID NO: 206338 - DNA, 22 bp, Artificial Sequence
  Synthetic oligonucleotide; CTG chr2 60533858 60533879 60533875 60533880 +
aagcatgcttttagcatggtat

SEQ ID NO: 206339 - DNA, 22 bp, Artificial Sequence
  Synthetic oligonucleotide; CTT chr2 60533868 60533889 60533885 60533890 +
ttagcatggtatggatggaagt

SEQ ID NO: 206340 - DNA, 22 bp, Artificial Sequence
  Synthetic oligonucleotide; TTT chr2 60533869 60533890 60533886 60533891 +
tagcatggtatggatggaagtc

SEQ ID NO: 206341 - DNA, 22 bp, Artificial Sequence
  Synthetic oligonucleotide; TTT chr2 60533870 60533891 60533887 60533892 +
agcatggtatggatggaagtca

SEQ ID NO: 206342 - DNA, 22 bp, Artificial Sequence
  Synthetic oligonucleotide; TTA chr2 60533871 60533892 60533888 60533893 +
gcatggtatggatggaagtcac

SEQ ID NO: 206343 - DNA, 22 bp, Artificial Sequence
  Synthetic oligonucleotide; CTA chr2 60533908 60533929 60533925 60533930 +
ggtccctcggaggttaaaatta

SEQ ID NO: 206344 - DNA, 22 bp, Artificial Sequence
  Synthetic oligonucleotide; CTC chr2 60533916 60533937 60533933 60533938 +
ggaggttaaaattatagttatg

SEQ ID NO: 206345 - DNA, 22 bp, Artificial Sequence
  Synthetic oligonucleotide; TTA chr2 60533924 60533945 60533941 60533946 +
aaattatagttatgtttcttac

SEQ ID NO: 206346 - DNA, 22 bp, Artificial Sequence
  Synthetic oligonucleotide; TTA chr2 60533930 60533951 60533947 60533952 +
tagttatgtttcttacacactg

SEQ ID NO: 206347 - DNA, 22 bp, Artificial Sequence
  Synthetic oligonucleotide; TTA chr2 60533936 60533957 60533953 60533958 +
tgtttcttacacactgttcatt

SEQ ID NO: 206348 - DNA, 22 bp, Artificial Sequence
  Synthetic oligonucleotide; TTT chr2 60533941 60533962 60533958 60533963 +
cttacacactgttcattttcca

SEQ ID NO: 206349 - DNA, 22 bp, Artificial Sequence
  Synthetic oligonucleotide; TTC chr2 60533942 60533963 60533959 60533964 +
ttacacactgttcattttccat

SEQ ID NO: 206350 - DNA, 22 bp, Artificial Sequence
  Synthetic oligonucleotide; CTT chr2 60533944 60533965 60533961 60533966 +
acacactgttcattttccatca

SEQ ID NO: 206351 - DNA, 22 bp, Artificial Sequence
  Synthetic oligonucleotide; TTA chr2 60533945 60533966 60533962 60533967 +
cacactgttcattttccatcac

SEQ ID NO: 206352 - DNA, 22 bp, Artificial Sequence
  Synthetic oligonucleotide; CTG chr2 60533952 60533973 60533969 60533974 +
ttcattttccatcacaatttat

SEQ ID NO: 206353 - DNA, 22 bp, Artificial Sequence
  Synthetic oligonucleotide; TTC chr2 60533955 60533976 60533972 60533977 +
attttccatcacaatttatttt

SEQ ID NO: 206354 - DNA, 22 bp, Artificial Sequence
  Synthetic oligonucleotide; TTT chr2 60533959 60533980 60533976 60533981 +
tccatcacaatttattttcttt

SEQ ID NO: 206355 - DNA, 22 bp, Artificial Sequence
  Synthetic oligonucleotide; TTT chr2 60533960 60533981 60533977 60533982 +
ccatcacaatttattttctttc

SEQ ID NO: 206356 - DNA, 22 bp, Artificial Sequence
  Synthetic oligonucleotide; TTC chr2 60533961 60533982 60533978 60533983 +
catcacaatttattttctttca

SEQ ID NO: 206357 - DNA, 22 bp, Artificial Sequence
  Synthetic oligonucleotide; TTT chr2 60533972 60533993 60533989 60533994 +
attttctttcattaaacattcg

SEQ ID NO: 206358 - DNA, 22 bp, Artificial Sequence
  Synthetic oligonucleotide; TTA chr2 60533973 60533994 60533990 60533995 +
ttttctttcattaaacattcgt

SEQ ID NO: 206359 - DNA, 22 bp, Artificial Sequence
  Synthetic oligonucleotide; TTT chr2 60533976 60533997 60533993 60533998 +
tctttcattaaacattcgtttt

SEQ ID NO: 206360 - DNA, 22 bp, Artificial Sequence
  Synthetic oligonucleotide; TTT chr2 60533977 60533998 60533994 60533999 +
ctttcattaaacattcgtttta

SEQ ID NO: 206361 - DNA, 22 bp, Artificial Sequence
  Synthetic oligonucleotide; TTC chr2 60533978 60533999 60533995 60534000 +
tttcattaaacattcgttttaa

SEQ ID NO: 206362 - DNA, 22 bp, Artificial Sequence
  Synthetic oligonucleotide; CTT chr2 60533980 60534001 60533997 60534002 +
tcattaaacattcgttttaatc

SEQ ID NO: 206363 - DNA, 22 bp, Artificial Sequence
  Synthetic oligonucleotide; TTT chr2 60533981 60534002 60533998 60534003 +
cattaaacattcgttttaatca

SEQ ID NO: 206364 - DNA, 22 bp, Artificial Sequence
  Synthetic oligonucleotide; TTC chr2 60533982 60534003 60533999 60534004 +
attaaacattcgttttaatcag

SEQ ID NO: 206365 - DNA, 22 bp, Artificial Sequence
  Synthetic oligonucleotide; TTA chr2 60533986 60534007 60534003 60534008 +
aacattcgttttaatcagaata

SEQ ID NO: 206366 - DNA, 22 bp, Artificial Sequence
  Synthetic oligonucleotide; TTC chr2 60533993 60534014 60534010 60534015 +
gttttaatcagaatatcagtta

SEQ ID NO: 206367 - DNA, 22 bp, Artificial Sequence
  Synthetic oligonucleotide; TTT chr2 60533997 60534018 60534014 60534019 +
taatcagaatatcagttacact

SEQ ID NO: 206368 - DNA, 22 bp, Artificial Sequence
  Synthetic oligonucleotide; TTT chr2 60533998 60534019 60534015 60534020 +
aatcagaatatcagttacactg

SEQ ID NO: 206369 - DNA, 22 bp, Artificial Sequence
  Synthetic oligonucleotide; TTA chr2 60533999 60534020 60534016 60534021 +
atcagaatatcagttacactgt

SEQ ID NO: 206370 - DNA, 22 bp, Artificial Sequence
  Synthetic oligonucleotide; TTA chr2 60534015 60534036 60534032 60534037 +
cactgttctgattctgcttgtt

SEQ ID NO: 206371 - DNA, 22 bp, Artificial Sequence
  Synthetic oligonucleotide; CTG chr2 60534020 60534041 60534037 60534042 +
ttctgattctgcttgttaacca

SEQ ID NO: 206372 - DNA, 22 bp, Artificial Sequence
  Synthetic oligonucleotide; TTC chr2 60534023 60534044 60534040 60534045 +
tgattctgcttgttaaccagtg

SEQ ID NO: 206373 - DNA, 22 bp, Artificial Sequence
  Synthetic oligonucleotide; CTG chr2 60534025 60534046 60534042 60534047 +
attctgcttgttaaccagtgat

SEQ ID NO: 206374 - DNA, 22 bp, Artificial Sequence
  Synthetic oligonucleotide; TTC chr2 60534029 60534050 60534046 60534051 +
tgcttgttaaccagtgataaac

SEQ ID NO: 206375 - DNA, 22 bp, Artificial Sequence
  Synthetic oligonucleotide; CTG chr2 60534031 60534052 60534048 60534053 +
cttgttaaccagtgataaactc

SEQ ID NO: 206376 - DNA, 22 bp, Artificial Sequence
  Synthetic oligonucleotide; CTT chr2 60534034 60534055 60534051 60534056 +
gttaaccagtgataaactcata

SEQ ID NO: 206377 - DNA, 22 bp, Artificial Sequence
  Synthetic oligonucleotide; TTG chr2 60534035 60534056 60534052 60534057 +
ttaaccagtgataaactcataa

SEQ ID NO: 206378 - DNA, 22 bp, Artificial Sequence
  Synthetic oligonucleotide; TTA chr2 60534038 60534059 60534055 60534060 +
accagtgataaactcataaacc

SEQ ID NO: 206379 - DNA, 22 bp, Artificial Sequence
  Synthetic oligonucleotide; CTC chr2 60534053 60534074 60534070 60534075 +
ataaaccaaagatgaacatcaa

SEQ ID NO: 206380 - DNA, 22 bp, Artificial Sequence
  Synthetic oligonucleotide; TTA chr2 60534092 60534113 60534109 60534114 +
ttcaacagcaaaggcaaacacc

SEQ ID NO: 206381 - DNA, 22 bp, Artificial Sequence
  Synthetic oligonucleotide; TTC chr2 60534095 60534116 60534112 60534117 +
aacagcaaaggcaaacaccaaa

SEQ ID NO: 206382 - DNA, 22 bp, Artificial Sequence
  Synthetic oligonucleotide; CTC chr2 60534128 60534149 60534145 60534150 +
tcaaaaatcggaaaccgttagt

SEQ ID NO: 206383 - DNA, 22 bp, Artificial Sequence
  Synthetic oligonucleotide; CTC chr2 60534130 60534151 60534147 60534152 +
aaaaatcggaaaccgttagtta

SEQ ID NO: 206384 - DNA, 22 bp, Artificial Sequence
  Synthetic oligonucleotide; TTA chr2 60534148 60534169 60534165 60534170 +
gttagcaccttgttttcaccac

SEQ ID NO: 206385 - DNA, 22 bp, Artificial Sequence
  Synthetic oligonucleotide; TTA chr2 60534152 60534173 60534169 60534174 +
gcaccttgttttcaccaccagg

SEQ ID NO: 206386 - DNA, 22 bp, Artificial Sequence
  Synthetic oligonucleotide; CTT chr2 60534159 60534180 60534176 60534181 +
gttttcaccaccagggcactcg

SEQ ID NO: 206387 - DNA, 22 bp, Artificial Sequence
  Synthetic oligonucleotide; TTG chr2 60534160 60534181 60534177 60534182 +
ttttcaccaccagggcactcgt

SEQ ID NO: 206388 - DNA, 22 bp, Artificial Sequence
  Synthetic oligonucleotide; TTT chr2 60534163 60534184 60534180 60534185 +
tcaccaccagggcactcgtgta

SEQ ID NO: 206389 - DNA, 22 bp, Artificial Sequence
  Synthetic oligonucleotide; TTT chr2 60534164 60534185 60534181 60534186 +
caccaccagggcactcgtgtac

SEQ ID NO: 206390 - DNA, 22 bp, Artificial Sequence
  Synthetic oligonucleotide; TTC chr2 60534165 60534186 60534182 60534187 +
accaccagggcactcgtgtacc

SEQ ID NO: 206391 - DNA, 22 bp, Artificial Sequence
  Synthetic oligonucleotide; CTC chr2 60534180 60534201 60534197 60534202 +
gtgtaccttgagggagacactg

SEQ ID NO: 206392 - DNA, 22 bp, Artificial Sequence
  Synthetic oligonucleotide; CTT chr2 60534189 60534210 60534206 60534211 +
gagggagacactgggagcccag

SEQ ID NO: 206393 - DNA, 22 bp, Artificial Sequence
  Synthetic oligonucleotide; TTG chr2 60534190 60534211 60534207 60534212 +
agggagacactgggagcccagg

SEQ ID NO: 206394 - DNA, 22 bp, Artificial Sequence
  Synthetic oligonucleotide; CTG chr2 60534202 60534223 60534219 60534224 +
ggagcccagggagcctggagac

SEQ ID NO: 206395 - DNA, 22 bp, Artificial Sequence
  Synthetic oligonucleotide; CTG chr2 60534219 60534240 60534236 60534241 +
gagaccaggatatactttggtg

SEQ ID NO: 206396 - DNA, 22 bp, Artificial Sequence
  Synthetic oligonucleotide; CTT chr2 60534236 60534257 60534253 60534258 +
tggtgatgaggggaggacacat

SEQ ID NO: 206397 - DNA, 22 bp, Artificial Sequence
  Synthetic oligonucleotide; TTT chr2 60534237 60534258 60534254 60534259 +
ggtgatgaggggaggacacatt

SEQ ID NO: 206398 - DNA, 22 bp, Artificial Sequence
  Synthetic oligonucleotide; TTG chr2 60534238 60534259 60534255 60534260 +
gtgatgaggggaggacacattg

SEQ ID NO: 206399 - DNA, 22 bp, Artificial Sequence
  Synthetic oligonucleotide; TTG chr2 60534260 60534281 60534277 60534282 +
tagctcagagcagcagctgaat

SEQ ID NO: 206400 - DNA, 22 bp, Artificial Sequence
  Synthetic oligonucleotide; CTC chr2 60534266 60534287 60534283 60534288 +
agagcagcagctgaatgagaaa

SEQ ID NO: 206401 - DNA, 22 bp, Artificial Sequence
  Synthetic oligonucleotide; CTG chr2 60534279 60534300 60534296 60534301 +
aatgagaaaacttacttgatct

SEQ ID NO: 206402 - DNA, 22 bp, Artificial Sequence
  Synthetic oligonucleotide; CTT chr2 60534292 60534313 60534309 60534314 +
acttgatctaaaagataaaaga

SEQ ID NO: 206403 - DNA, 22 bp, Artificial Sequence
  Synthetic oligonucleotide; TTA chr2 60534293 60534314 60534310 60534315 +
cttgatctaaaagataaaagag

SEQ ID NO: 206404 - DNA, 22 bp, Artificial Sequence
  Synthetic oligonucleotide; CTT chr2 60534296 60534317 60534313 60534318 +
gatctaaaagataaaagagtca

SEQ ID NO: 206405 - DNA, 22 bp, Artificial Sequence
  Synthetic oligonucleotide; TTG chr2 60534297 60534318 60534314 60534319 +
atctaaaagataaaagagtcag

SEQ ID NO: 206406 - DNA, 22 bp, Artificial Sequence
  Synthetic oligonucleotide; CTA chr2 60534302 60534323 60534319 60534324 +
aaagataaaagagtcagccaaa

SEQ ID NO: 206407 - DNA, 22 bp, Artificial Sequence
  Synthetic oligonucleotide; CTT chr2 60534341 60534362 60534358 60534363 +
taggtgccagccatctatctaa

SEQ ID NO: 206408 - DNA, 22 bp, Artificial Sequence
  Synthetic oligonucleotide; TTT chr2 60534342 60534363 60534359 60534364 +
aggtgccagccatctatctaaa

SEQ ID NO: 206409 - DNA, 22 bp, Artificial Sequence
  Synthetic oligonucleotide; TTA chr2 60534343 60534364 60534360 60534365 +
ggtgccagccatctatctaaag

SEQ ID NO: 206410 - DNA, 22 bp, Artificial Sequence
  Synthetic oligonucleotide; CTA chr2 60534358 60534379 60534375 60534380 +
tctaaagaagaaacctaaagca

SEQ ID NO: 206411 - DNA, 22 bp, Artificial Sequence
  Synthetic oligonucleotide; CTA chr2 60534362 60534383 60534379 60534384 +
aagaagaaacctaaagcattgt

SEQ ID NO: 206412 - DNA, 22 bp, Artificial Sequence
  Synthetic oligonucleotide; CTA chr2 60534375 60534396 60534392 60534397 +
aagcattgttagaaaggtttgt

SEQ ID NO: 206413 - DNA, 22 bp, Artificial Sequence
  Synthetic oligonucleotide; TTG chr2 60534383 60534404 60534400 60534405 +
ttagaaaggtttgtagttctgt

SEQ ID NO: 206414 - DNA, 22 bp, Artificial Sequence
  Synthetic oligonucleotide; TTA chr2 60534386 60534407 60534403 60534408 +
gaaaggtttgtagttctgtagc

SEQ ID NO: 206415 - DNA, 22 bp, Artificial Sequence
  Synthetic oligonucleotide; TTT chr2 60534395 60534416 60534412 60534417 +
gtagttctgtagccttccctcc

SEQ ID NO: 206416 - DNA, 22 bp, Artificial Sequence
  Synthetic oligonucleotide; TTG chr2 60534396 60534417 60534413 60534418 +
tagttctgtagccttccctcct

SEQ ID NO: 206417 - DNA, 22 bp, Artificial Sequence
  Synthetic oligonucleotide; TTC chr2 60534402 60534423 60534419 60534424 +
tgtagccttccctcctccaaag

SEQ ID NO: 206418 - DNA, 22 bp, Artificial Sequence
  Synthetic oligonucleotide; CTG chr2 60534404 60534425 60534421 60534426 +
tagccttccctcctccaaagga

SEQ ID NO: 206419 - DNA, 22 bp, Artificial Sequence
  Synthetic oligonucleotide; CTT chr2 60534411 60534432 60534428 60534433 +
ccctcctccaaaggaggaacct

SEQ ID NO: 206420 - DNA, 22 bp, Artificial Sequence
  Synthetic oligonucleotide; TTC chr2 60534412 60534433 60534429 60534434 +
cctcctccaaaggaggaacctg

SEQ ID NO: 206421 - DNA, 22 bp, Artificial Sequence
  Synthetic oligonucleotide; CTC chr2 60534416 60534437 60534433 60534438 +
ctccaaaggaggaacctgatgt

SEQ ID NO: 206422 - DNA, 22 bp, Artificial Sequence
  Synthetic oligonucleotide; CTC chr2 60534419 60534440 60534436 60534441 +
caaaggaggaacctgatgtctt

SEQ ID NO: 206423 - DNA, 22 bp, Artificial Sequence
  Synthetic oligonucleotide; CTG chr2 60534434 60534455 60534451 60534456 +
atgtcttaatacactataatag

SEQ ID NO: 206424 - DNA, 22 bp, Artificial Sequence
  Synthetic oligonucleotide; CTT chr2 60534441 60534462 60534458 60534463 +
aatacactataatagccaaggc

SEQ ID NO: 206425 - DNA, 22 bp, Artificial Sequence
  Synthetic oligonucleotide; TTA chr2 60534442 60534463 60534459 60534464 +
atacactataatagccaaggct

SEQ ID NO: 206426 - DNA, 22 bp, Artificial Sequence
  Synthetic oligonucleotide; CTA chr2 60534450 60534471 60534467 60534472 +
taatagccaaggcttcctgcca

SEQ ID NO: 206427 - DNA, 22 bp, Artificial Sequence
  Synthetic oligonucleotide; CTT chr2 60534465 60534486 60534482 60534487 +
cctgccatcaaactgctaacaa

SEQ ID NO: 206428 - DNA, 22 bp, Artificial Sequence
  Synthetic oligonucleotide; TTC chr2 60534466 60534487 60534483 60534488 +
ctgccatcaaactgctaacaat

SEQ ID NO: 206429 - DNA, 22 bp, Artificial Sequence
  Synthetic oligonucleotide; CTG chr2 60534469 60534490 60534486 60534491 +
ccatcaaactgctaacaataaa

SEQ ID NO: 206430 - DNA, 22 bp, Artificial Sequence
  Synthetic oligonucleotide; CTG chr2 60534480 60534501 60534497 60534502 +
ctaacaataaaactgccctgca

SEQ ID NO: 206431 - DNA, 22 bp, Artificial Sequence
  Synthetic oligonucleotide; CTA chr2 60534483 60534504 60534500 60534505 +
acaataaaactgccctgcaatg

SEQ ID NO: 206432 - DNA, 22 bp, Artificial Sequence
  Synthetic oligonucleotide; CTG chr2 60534495 60534516 60534512 60534517 +
ccctgcaatgttcgtggggaac

SEQ ID NO: 206433 - DNA, 22 bp, Artificial Sequence
  Synthetic oligonucleotide; CTG chr2 60534500 60534521 60534517 60534522 +
caatgttcgtggggaacagaaa

SEQ ID NO: 206434 - DNA, 22 bp, Artificial Sequence
  Synthetic oligonucleotide; TTC chr2 60534508 60534529 60534525 60534530 +
gtggggaacagaaacaggcaat

SEQ ID NO: 206435 - DNA, 22 bp, Artificial Sequence
  Synthetic oligonucleotide; TTT chr2 60534538 60534559 60534555 60534560 +
ctctatgtatctggaagtgcct

SEQ ID NO: 206436 - DNA, 22 bp, Artificial Sequence
  Synthetic oligonucleotide; TTC chr2 60534539 60534560 60534556 60534561 +
tctatgtatctggaagtgcctc

SEQ ID NO: 206437 - DNA, 22 bp, Artificial Sequence
  Synthetic oligonucleotide; CTC chr2 60534541 60534562 60534558 60534563 +
tatgtatctggaagtgcctcaa

SEQ ID NO: 206438 - DNA, 22 bp, Artificial Sequence
  Synthetic oligonucleotide; CTA chr2 60534543 60534564 60534560 60534565 +
tgtatctggaagtgcctcaatc

SEQ ID NO: 206439 - DNA, 22 bp, Artificial Sequence
  Synthetic oligonucleotide; CTG chr2 60534551 60534572 60534568 60534573 +
gaagtgcctcaatcatatactt

SEQ ID NO: 206440 - DNA, 22 bp, Artificial Sequence
  Synthetic oligonucleotide; CTC chr2 60534561 60534582 60534578 60534583 +
aatcatatacttaaattttaca

SEQ ID NO: 206441 - DNA, 22 bp, Artificial Sequence
  Synthetic oligonucleotide; CTT chr2 60534573 60534594 60534590 60534595 +
aaattttacagtcttctcccca

SEQ ID NO: 206442 - DNA, 22 bp, Artificial Sequence
  Synthetic oligonucleotide; TTA chr2 60534574 60534595 60534591 60534596 +
aattttacagtcttctccccaa

SEQ ID NO: 206443 - DNA, 22 bp, Artificial Sequence
  Synthetic oligonucleotide; TTT chr2 60534579 60534600 60534596 60534601 +
tacagtcttctccccaaatgag

SEQ ID NO: 206444 - DNA, 22 bp, Artificial Sequence
  Synthetic oligonucleotide; TTT chr2 60534580 60534601 60534597 60534602 +
acagtcttctccccaaatgaga

SEQ ID NO: 206445 - DNA, 22 bp, Artificial Sequence
  Synthetic oligonucleotide; TTA chr2 60534581 60534602 60534598 60534603 +
cagtcttctccccaaatgagaa

SEQ ID NO: 206446 - DNA, 22 bp, Artificial Sequence
  Synthetic oligonucleotide; CTT chr2 60534588 60534609 60534605 60534610 +
ctccccaaatgagaacgatttc

SEQ ID NO: 206447 - DNA, 22 bp, Artificial Sequence
  Synthetic oligonucleotide; TTC chr2 60534589 60534610 60534606 60534611 +
tccccaaatgagaacgatttcc

SEQ ID NO: 206448 - DNA, 22 bp, Artificial Sequence
  Synthetic oligonucleotide; CTC chr2 60534591 60534612 60534608 60534613 +
cccaaatgagaacgatttccag

SEQ ID NO: 206449 - DNA, 22 bp, Artificial Sequence
  Synthetic oligonucleotide; TTT chr2 60534609 60534630 60534626 60534631 +
ccagccaacacgttcacaaact

SEQ ID NO: 206450 - DNA, 22 bp, Artificial Sequence
  Synthetic oligonucleotide; TTC chr2 60534610 60534631 60534627 60534632 +
cagccaacacgttcacaaactg

SEQ ID NO: 206451 - DNA, 22 bp, Artificial Sequence
  Synthetic oligonucleotide; TTC chr2 60534624 60534645 60534641 60534646 +
acaaactgtacttaacgttaaa

SEQ ID NO: 206452 - DNA, 22 bp, Artificial Sequence
  Synthetic oligonucleotide; CTG chr2 60534632 60534653 60534649 60534654 +
tacttaacgttaaaagaaaacg

SEQ ID NO: 206453 - DNA, 22 bp, Artificial Sequence
  Synthetic oligonucleotide; CTT chr2 60534637 60534658 60534654 60534659 +
aacgttaaaagaaaacggataa

SEQ ID NO: 206454 - DNA, 22 bp, Artificial Sequence
  Synthetic oligonucleotide; TTA chr2 60534638 60534659 60534655 60534660 +
acgttaaaagaaaacggataaa

SEQ ID NO: 206455 - DNA, 22 bp, Artificial Sequence
  Synthetic oligonucleotide; TTA chr2 60534644 60534665 60534661 60534666 +
aaagaaaacggataaaacatat

SEQ ID NO: 206456 - DNA, 22 bp, Artificial Sequence
  Synthetic oligonucleotide; TTA chr2 60534673 60534694 60534690 60534695 +
ctcaaggttagacttctaattc

SEQ ID NO: 206457 - DNA, 22 bp, Artificial Sequence
  Synthetic oligonucleotide; CTC chr2 60534676 60534697 60534693 60534698 +
aaggttagacttctaattcctc

SEQ ID NO: 206458 - DNA, 22 bp, Artificial Sequence
  Synthetic oligonucleotide; TTA chr2 60534683 60534704 60534700 60534705 +
gacttctaattcctcaattcac

SEQ ID NO: 206459 - DNA, 22 bp, Artificial Sequence
  Synthetic oligonucleotide; CTT chr2 60534688 60534709 60534705 60534710 +
ctaattcctcaattcactaaag

SEQ ID NO: 206460 - DNA, 22 bp, Artificial Sequence
  Synthetic oligonucleotide; TTC chr2 60534689 60534710 60534706 60534711 +
taattcctcaattcactaaagg

SEQ ID NO: 206461 - DNA, 22 bp, Artificial Sequence
  Synthetic oligonucleotide; CTA chr2 60534691 60534712 60534708 60534713 +
attcctcaattcactaaaggaa

SEQ ID NO: 206462 - DNA, 22 bp, Artificial Sequence
  Synthetic oligonucleotide; TTC chr2 60534695 60534716 60534712 60534717 +
ctcaattcactaaaggaaactt

SEQ ID NO: 206463 - DNA, 22 bp, Artificial Sequence
  Synthetic oligonucleotide; CTC chr2 60534698 60534719 60534715 60534720 +
aattcactaaaggaaacttggc

SEQ ID NO: 206464 - DNA, 22 bp, Artificial Sequence
  Synthetic oligonucleotide; TTC chr2 60534703 60534724 60534720 60534725 +
actaaaggaaacttggcaagaa

SEQ ID NO: 206465 - DNA, 22 bp, Artificial Sequence
  Synthetic oligonucleotide; CTA chr2 60534707 60534728 60534724 60534729 +
aaggaaacttggcaagaagatg

SEQ ID NO: 206466 - DNA, 22 bp, Artificial Sequence
  Synthetic oligonucleotide; CTT chr2 60534717 60534738 60534734 60534739 +
ggcaagaagatgcatcattttg

SEQ ID NO: 206467 - DNA, 22 bp, Artificial Sequence
  Synthetic oligonucleotide; TTG chr2 60534718 60534739 60534735 60534740 +
gcaagaagatgcatcattttgc

SEQ ID NO: 206468 - DNA, 22 bp, Artificial Sequence
  Synthetic oligonucleotide; TTT chr2 60534737 60534758 60534754 60534759 +
tgctcctttctactggggcatc

SEQ ID NO: 206469 - DNA, 22 bp, Artificial Sequence
  Synthetic oligonucleotide; TTT chr2 60534738 60534759 60534755 60534760 +
gctcctttctactggggcatct

SEQ ID NO: 206470 - DNA, 22 bp, Artificial Sequence
  Synthetic oligonucleotide; TTG chr2 60534739 60534760 60534756 60534761 +
ctcctttctactggggcatctg

SEQ ID NO: 206471 - DNA, 22 bp, Artificial Sequence
  Synthetic oligonucleotide; CTC chr2 60534742 60534763 60534759 60534764 +
ctttctactggggcatctgagg

SEQ ID NO: 206472 - DNA, 22 bp, Artificial Sequence
  Synthetic oligonucleotide; CTT chr2 60534745 60534766 60534762 60534767 +
tctactggggcatctgaggagg

SEQ ID NO: 206473 - DNA, 22 bp, Artificial Sequence
  Synthetic oligonucleotide; TTT chr2 60534746 60534767 60534763 60534768 +
ctactggggcatctgaggagga

SEQ ID NO: 206474 - DNA, 22 bp, Artificial Sequence
  Synthetic oligonucleotide; TTC chr2 60534747 60534768 60534764 60534769 +
tactggggcatctgaggaggag

SEQ ID NO: 206475 - DNA, 22 bp, Artificial Sequence
  Synthetic oligonucleotide; CTA chr2 60534749 60534770 60534766 60534771 +
ctggggcatctgaggaggagag

SEQ ID NO: 206476 - DNA, 22 bp, Artificial Sequence
  Synthetic oligonucleotide; CTG chr2 60534752 60534773 60534769 60534774 +
gggcatctgaggaggagagcca

SEQ ID NO: 206477 - DNA, 22 bp, Artificial Sequence
  Synthetic oligonucleotide; CTG chr2 60534761 60534782 60534778 60534783 +
aggaggagagccactgaggcag

SEQ ID NO: 206478 - DNA, 22 bp, Artificial Sequence
  Synthetic oligonucleotide; CTG chr2 60534777 60534798 60534794 60534799 +
aggcagctaatacacaaaacat

SEQ ID NO: 206479 - DNA, 22 bp, Artificial Sequence
  Synthetic oligonucleotide; CTA chr2 60534786 60534807 60534803 60534808 +
atacacaaaacatgatcaaaag

SEQ ID NO: 206480 - DNA, 22 bp, Artificial Sequence
  Synthetic oligonucleotide; TTA chr2 60534814 60534835 60534831 60534836 +
acaacagcttcatatgcaaatt

SEQ ID NO: 206481 - DNA, 22 bp, Artificial Sequence
  Synthetic oligonucleotide; CTT chr2 60534824 60534845 60534841 60534846 +
catatgcaaattacattaatga

SEQ ID NO: 206482 - DNA, 22 bp, Artificial Sequence
  Synthetic oligonucleotide; TTC chr2 60534825 60534846 60534842 60534847 +
atatgcaaattacattaatgaa

SEQ ID NO: 206483 - DNA, 22 bp, Artificial Sequence
  Synthetic oligonucleotide; TTA chr2 60534837 60534858 60534854 60534859 +
cattaatgaaggagtgcaaagt

SEQ ID NO: 206484 - DNA, 22 bp, Artificial Sequence
  Synthetic oligonucleotide; TTA chr2 60534842 60534863 60534859 60534864 +
atgaaggagtgcaaagtcatca

SEQ ID NO: 206485 - DNA, 22 bp, Artificial Sequence
  Synthetic oligonucleotide; TTA chr2 60534873 60534894 60534890 60534895 +
aatatgtcaaatctcttggtga

SEQ ID NO: 206486 - DNA, 22 bp, Artificial Sequence
  Synthetic oligonucleotide; CTC chr2 60534888 60534909 60534905 60534910 +
ttggtgaacttttaatcttgag

SEQ ID NO: 206487 - DNA, 22 bp, Artificial Sequence
  Synthetic oligonucleotide; CTT chr2 60534890 60534911 60534907 60534912 +
ggtgaacttttaatcttgagaa

SEQ ID NO: 206488 - DNA, 22 bp, Artificial Sequence
  Synthetic oligonucleotide; TTG chr2 60534891 60534912 60534908 60534913 +
gtgaacttttaatcttgagaag

SEQ ID NO: 206489 - DNA, 22 bp, Artificial Sequence
  Synthetic oligonucleotide; CTT chr2 60534899 60534920 60534916 60534921 +
ttaatcttgagaagaaaaaaca

SEQ ID NO: 206490 - DNA, 22 bp, Artificial Sequence
  Synthetic oligonucleotide; TTT chr2 60534900 60534921 60534917 60534922 +
taatcttgagaagaaaaaacac

SEQ ID NO: 206491 - DNA, 22 bp, Artificial Sequence
  Synthetic oligonucleotide; TTT chr2 60534901 60534922 60534918 60534923 +
aatcttgagaagaaaaaacact

SEQ ID NO: 206492 - DNA, 22 bp, Artificial Sequence
  Synthetic oligonucleotide; TTA chr2 60534902 60534923 60534919 60534924 +
atcttgagaagaaaaaacactg

SEQ ID NO: 206493 - DNA, 22 bp, Artificial Sequence
  Synthetic oligonucleotide; CTT chr2 60534907 60534928 60534924 60534929 +
gagaagaaaaaacactgcttta

SEQ ID NO: 206494 - DNA, 22 bp, Artificial Sequence
  Synthetic oligonucleotide; TTG chr2 60534908 60534929 60534925 60534930 +
agaagaaaaaacactgctttaa

SEQ ID NO: 206495 - DNA, 22 bp, Artificial Sequence
  Synthetic oligonucleotide; CTG chr2 60534924 60534945 60534941 60534946 +
ctttaatttttttacatcatca

SEQ ID NO: 206496 - DNA, 22 bp, Artificial Sequence
  Synthetic oligonucleotide; CTT chr2 60534927 60534948 60534944 60534949 +
taatttttttacatcatcaatt

SEQ ID NO: 206497 - DNA, 22 bp, Artificial Sequence
  Synthetic oligonucleotide; TTT chr2 60534928 60534949 60534945 60534950 +
aatttttttacatcatcaattt

SEQ ID NO: 206498 - DNA, 22 bp, Artificial Sequence
  Synthetic oligonucleotide; TTA chr2 60534929 60534950 60534946 60534951 +
atttttttacatcatcaatttt

SEQ ID NO: 206499 - DNA, 22 bp, Artificial Sequence
  Synthetic oligonucleotide; TTT chr2 60534933 60534954 60534950 60534955 +
ttttacatcatcaattttgcaa

SEQ ID NO: 206500 - DNA, 22 bp, Artificial Sequence
  Synthetic oligonucleotide; TTT chr2 60534934 60534955 60534951 60534956 +
tttacatcatcaattttgcaag

SEQ ID NO: 206501 - DNA, 22 bp, Artificial Sequence
  Synthetic oligonucleotide; TTT chr2 60534935 60534956 60534952 60534957 +
ttacatcatcaattttgcaaga

SEQ ID NO: 206502 - DNA, 22 bp, Artificial Sequence
  Synthetic oligonucleotide; TTT chr2 60534936 60534957 60534953 60534958 +
tacatcatcaattttgcaagat

SEQ ID NO: 206503 - DNA, 22 bp, Artificial Sequence
  Synthetic oligonucleotide; TTT chr2 60534937 60534958 60534954 60534959 +
acatcatcaattttgcaagatt

SEQ ID NO: 206504 - DNA, 22 bp, Artificial Sequence
  Synthetic oligonucleotide; TTA chr2 60534938 60534959 60534955 60534960 +
catcatcaattttgcaagattg

SEQ ID NO: 206505 - DNA, 22 bp, Artificial Sequence
  Synthetic oligonucleotide; TTT chr2 60534950 60534971 60534967 60534972 +
tgcaagattgaaaatctaagaa

SEQ ID NO: 206506 - DNA, 22 bp, Artificial Sequence
  Synthetic oligonucleotide; TTT chr2 60534951 60534972 60534968 60534973 +
gcaagattgaaaatctaagaat

SEQ ID NO: 206507 - DNA, 22 bp, Artificial Sequence
  Synthetic oligonucleotide; TTG chr2 60534952 60534973 60534969 60534974 +
caagattgaaaatctaagaatc

SEQ ID NO: 206508 - DNA, 22 bp, Artificial Sequence
  Synthetic oligonucleotide; TTG chr2 60534960 60534981 60534977 60534982 +
aaaatctaagaatcttggtgct

SEQ ID NO: 206509 - DNA, 22 bp, Artificial Sequence
  Synthetic oligonucleotide; CTA chr2 60534968 60534989 60534985 60534990 +
agaatcttggtgctataaacaa

SEQ ID NO: 206510 - DNA, 22 bp, Artificial Sequence
  Synthetic oligonucleotide; CTT chr2 60534976 60534997 60534993 60534998 +
ggtgctataaacaattttcacc

SEQ ID NO: 206511 - DNA, 22 bp, Artificial Sequence
  Synthetic oligonucleotide; TTG chr2 60534977 60534998 60534994 60534999 +
gtgctataaacaattttcacct

SEQ ID NO: 206512 - DNA, 22 bp, Artificial Sequence
  Synthetic oligonucleotide; CTA chr2 60534983 60535004 60535000 60535005 +
taaacaattttcaccttttttt

SEQ ID NO: 206513 - DNA, 22 bp, Artificial Sequence
  Synthetic oligonucleotide; TTT chr2 60534993 60535014 60535010 60535015 +
tcaccttttttttctccttcag

SEQ ID NO: 206514 - DNA, 22 bp, Artificial Sequence
  Synthetic oligonucleotide; TTT chr2 60534994 60535015 60535011 60535016 +
caccttttttttctccttcagc

SEQ ID NO: 206515 - DNA, 22 bp, Artificial Sequence
  Synthetic oligonucleotide; TTC chr2 60534995 60535016 60535012 60535017 +
accttttttttctccttcagca

SEQ ID NO: 206516 - DNA, 22 bp, Artificial Sequence
  Synthetic oligonucleotide; CTT chr2 60535000 60535021 60535017 60535022 +
ttttttctccttcagcaggctg

SEQ ID NO: 206517 - DNA, 22 bp, Artificial Sequence
  Synthetic oligonucleotide; TTT chr2 60535001 60535022 60535018 60535023 +
tttttctccttcagcaggctga

SEQ ID NO: 206518 - DNA, 22 bp, Artificial Sequence
  Synthetic oligonucleotide; TTT chr2 60535002 60535023 60535019 60535024 +
ttttctccttcagcaggctgac

SEQ ID NO: 206519 - DNA, 22 bp, Artificial Sequence
  Synthetic oligonucleotide; TTT chr2 60535003 60535024 60535020 60535025 +
tttctccttcagcaggctgaca

SEQ ID NO: 206520 - DNA, 22 bp, Artificial Sequence
  Synthetic oligonucleotide; TTT chr2 60535004 60535025 60535021 60535026 +
ttctccttcagcaggctgacag

SEQ ID NO: 206521 - DNA, 22 bp, Artificial Sequence
  Synthetic oligonucleotide; TTT chr2 60535005 60535026 60535022 60535027 +
tctccttcagcaggctgacagg

SEQ ID NO: 206522 - DNA, 22 bp, Artificial Sequence
  Synthetic oligonucleotide; TTT chr2 60535006 60535027 60535023 60535028 +
ctccttcagcaggctgacaggc

SEQ ID NO: 206523 - DNA, 22 bp, Artificial Sequence
  Synthetic oligonucleotide; TTC chr2 60535007 60535028 60535024 60535029 +
tccttcagcaggctgacaggcc

SEQ ID NO: 206524 - DNA, 22 bp, Artificial Sequence
  Synthetic oligonucleotide; CTC chr2 60535009 60535030 60535026 60535031 +
cttcagcaggctgacaggccag

SEQ ID NO: 206525 - DNA, 22 bp, Artificial Sequence
  Synthetic oligonucleotide; CTT chr2 60535012 60535033 60535029 60535034 +
cagcaggctgacaggccagcct

SEQ ID NO: 206526 - DNA, 22 bp, Artificial Sequence
  Synthetic oligonucleotide; TTC chr2 60535013 60535034 60535030 60535035 +
agcaggctgacaggccagcctg

SEQ ID NO: 206527 - DNA, 22 bp, Artificial Sequence
  Synthetic oligonucleotide; CTG chr2 60535022 60535043 60535039 60535044 +
acaggccagcctgatgtgcacc

SEQ ID NO: 206528 - DNA, 22 bp, Artificial Sequence
  Synthetic oligonucleotide; CTG chr2 60535035 60535056 60535052 60535057 +
atgtgcaccgaatgtacatgtt

SEQ ID NO: 206529 - DNA, 22 bp, Artificial Sequence
  Synthetic oligonucleotide; TTA chr2 60535058 60535079 60535075 60535080 +
ataggccaatcaaaaatgcaaa

SEQ ID NO: 206530 - DNA, 22 bp, Artificial Sequence
  Synthetic oligonucleotide; TTC chr2 60535087 60535108 60535104 60535109 +
gcaattactggaaggacctaat

SEQ ID NO: 206531 - DNA, 22 bp, Artificial Sequence
  Synthetic oligonucleotide; TTA chr2 60535094 60535115 60535111 60535116 +
ctggaaggacctaatggtcatt

SEQ ID NO: 206532 - DNA, 22 bp, Artificial Sequence
  Synthetic oligonucleotide; CTG chr2 60535097 60535118 60535114 60535119 +
gaaggacctaatggtcattaga

SEQ ID NO: 206533 - DNA, 22 bp, Artificial Sequence
  Synthetic oligonucleotide; CTA chr2 60535107 60535128 60535124 60535129 +
atggtcattagaatttacaact

SEQ ID NO: 206534 - DNA, 22 bp, Artificial Sequence
  Synthetic oligonucleotide; TTA chr2 60535117 60535138 60535134 60535139 +
gaatttacaactaggtaatgaa

SEQ ID NO: 206535 - DNA, 22 bp, Artificial Sequence
  Synthetic oligonucleotide; TTT chr2 60535123 60535144 60535140 60535145 +
acaactaggtaatgaactgaag

SEQ ID NO: 206536 - DNA, 22 bp, Artificial Sequence
  Synthetic oligonucleotide; TTA chr2 60535124 60535145 60535141 60535146 +
caactaggtaatgaactgaagt

SEQ ID NO: 206537 - DNA, 22 bp, Artificial Sequence
  Synthetic oligonucleotide; CTA chr2 60535130 60535151 60535147 60535152 +
ggtaatgaactgaagtctgccc

SEQ ID NO: 206538 - DNA, 22 bp, Artificial Sequence
  Synthetic oligonucleotide; CTG chr2 60535142 60535163 60535159 60535164 +
aagtctgcccacaccatgcata

SEQ ID NO: 206539 - DNA, 22 bp, Artificial Sequence
  Synthetic oligonucleotide; CTG chr2 60535149 60535170 60535166 60535171 +
cccacaccatgcatattcataa

SEQ ID NO: 206540 - DNA, 22 bp, Artificial Sequence
  Synthetic oligonucleotide; TTC chr2 60535167 60535188 60535184 60535189 +
ataaagcaatttagcctttgaa

SEQ ID NO: 206541 - DNA, 22 bp, Artificial Sequence
  Synthetic oligonucleotide; TTT chr2 60535179 60535200 60535196 60535201 +
agcctttgaagattaaagaagt

SEQ ID NO: 206542 - DNA, 22 bp, Artificial Sequence
  Synthetic oligonucleotide; TTA chr2 60535180 60535201 60535197 60535202 +
gcctttgaagattaaagaagtg

SEQ ID NO: 206543 - DNA, 22 bp, Artificial Sequence
  Synthetic oligonucleotide; CTT chr2 60535185 60535206 60535202 60535207 +
tgaagattaaagaagtgcttaa

SEQ ID NO: 206544 - DNA, 22 bp, Artificial Sequence
  Synthetic oligonucleotide; TTT chr2 60535186 60535207 60535203 60535208 +
gaagattaaagaagtgcttaaa

SEQ ID NO: 206545 - DNA, 22 bp, Artificial Sequence
  Synthetic oligonucleotide; TTG chr2 60535187 60535208 60535204 60535209 +
aagattaaagaagtgcttaaaa

SEQ ID NO: 206546 - DNA, 22 bp, Artificial Sequence
  Synthetic oligonucleotide; TTA chr2 60535194 60535215 60535211 60535216 +
aagaagtgcttaaaattcaaat

SEQ ID NO: 206547 - DNA, 22 bp, Artificial Sequence
  Synthetic oligonucleotide; CTT chr2 60535205 60535226 60535222 60535227 +
aaaattcaaatgagctttagca

SEQ ID NO: 206548 - DNA, 22 bp, Artificial Sequence
  Synthetic oligonucleotide; TTA chr2 60535206 60535227 60535223 60535228 +
aaattcaaatgagctttagcaa

SEQ ID NO: 206549 - DNA, 22 bp, Artificial Sequence
  Synthetic oligonucleotide; TTC chr2 60535212 60535233 60535229 60535234 +
aaatgagctttagcaaattatc

SEQ ID NO: 206550 - DNA, 22 bp, Artificial Sequence
  Synthetic oligonucleotide; CTT chr2 60535222 60535243 60535239 60535244 +
tagcaaattatcagtaagattc

SEQ ID NO: 206551 - DNA, 22 bp, Artificial Sequence
  Synthetic oligonucleotide; TTT chr2 60535223 60535244 60535240 60535245 +
agcaaattatcagtaagattca

SEQ ID NO: 206552 - DNA, 22 bp, Artificial Sequence
  Synthetic oligonucleotide; TTA chr2 60535224 60535245 60535241 60535246 +
gcaaattatcagtaagattcat

SEQ ID NO: 206553 - DNA, 22 bp, Artificial Sequence
  Synthetic oligonucleotide; TTA chr2 60535232 60535253 60535249 60535254 +
tcagtaagattcatccaaaaag

SEQ ID NO: 206554 - DNA, 22 bp, Artificial Sequence
  Synthetic oligonucleotide; TTC chr2 60535244 60535265 60535261 60535266 +
atccaaaaagcaaagggttttt

SEQ ID NO: 206555 - DNA, 22 bp, Artificial Sequence
  Synthetic oligonucleotide; TTT chr2 60535264 60535285 60535281 60535286 +
ttcttcctatgatttcctcatt

SEQ ID NO: 206556 - DNA, 22 bp, Artificial Sequence
  Synthetic oligonucleotide; TTT chr2 60535265 60535286 60535282 60535287 +
tcttcctatgatttcctcattt

SEQ ID NO: 206557 - DNA, 22 bp, Artificial Sequence
  Synthetic oligonucleotide; TTT chr2 60535266 60535287 60535283 60535288 +
cttcctatgatttcctcatttt

SEQ ID NO: 206558 - DNA, 22 bp, Artificial Sequence
  Synthetic oligonucleotide; TTC chr2 60535267 60535288 60535284 60535289 +
ttcctatgatttcctcattttt

SEQ ID NO: 206559 - DNA, 22 bp, Artificial Sequence
  Synthetic oligonucleotide; CTT chr2 60535269 60535290 60535286 60535291 +
cctatgatttcctcattttttt

SEQ ID NO: 206560 - DNA, 22 bp, Artificial Sequence
  Synthetic oligonucleotide; TTC chr2 60535270 60535291 60535287 60535292 +
ctatgatttcctcattttttta

SEQ ID NO: 206561 - DNA, 22 bp, Artificial Sequence
  Synthetic oligonucleotide; CTA chr2 60535273 60535294 60535290 60535295 +
tgatttcctcatttttttaatg

SEQ ID NO: 206562 - DNA, 22 bp, Artificial Sequence
  Synthetic oligonucleotide; TTT chr2 60535279 60535300 60535296 60535301 +
cctcatttttttaatgcaaaat

SEQ ID NO: 206563 - DNA, 22 bp, Artificial Sequence
  Synthetic oligonucleotide; TTC chr2 60535280 60535301 60535297 60535302 +
ctcatttttttaatgcaaaatt

SEQ ID NO: 206564 - DNA, 22 bp, Artificial Sequence
  Synthetic oligonucleotide; CTC chr2 60535283 60535304 60535300 60535305 +
atttttttaatgcaaaattgta

SEQ ID NO: 206565 - DNA, 22 bp, Artificial Sequence
  Synthetic oligonucleotide; TTT chr2 60535287 60535308 60535304 60535309 +
ttttaatgcaaaattgtaatat

SEQ ID NO: 206566 - DNA, 22 bp, Artificial Sequence
  Synthetic oligonucleotide; TTT chr2 60535288 60535309 60535305 60535310 +
tttaatgcaaaattgtaatatc

SEQ ID NO: 206567 - DNA, 22 bp, Artificial Sequence
  Synthetic oligonucleotide; TTT chr2 60535289 60535310 60535306 60535311 +
ttaatgcaaaattgtaatatct

SEQ ID NO: 206568 - DNA, 22 bp, Artificial Sequence
  Synthetic oligonucleotide; TTT chr2 60535290 60535311 60535307 60535312 +
taatgcaaaattgtaatatctt

SEQ ID NO: 206569 - DNA, 22 bp, Artificial Sequence
  Synthetic oligonucleotide; TTT chr2 60535291 60535312 60535308 60535313 +
aatgcaaaattgtaatatcttc

SEQ ID NO: 206570 - DNA, 22 bp, Artificial Sequence
  Synthetic oligonucleotide; TTA chr2 60535292 60535313 60535309 60535314 +
atgcaaaattgtaatatcttcc

SEQ ID NO: 206571 - DNA, 22 bp, Artificial Sequence
  Synthetic oligonucleotide; TTG chr2 60535303 60535324 60535320 60535325 +
taatatcttccagactgagctt

SEQ ID NO: 206572 - DNA, 22 bp, Artificial Sequence
  Synthetic oligonucleotide; CTT chr2 60535312 60535333 60535329 60535334 +
ccagactgagcttaaactaaac

SEQ ID NO: 206573 - DNA, 22 bp, Artificial Sequence
  Synthetic oligonucleotide; TTC chr2 60535313 60535334 60535330 60535335 +
cagactgagcttaaactaaaca

SEQ ID NO: 206574 - DNA, 22 bp, Artificial Sequence
  Synthetic oligonucleotide; CTG chr2 60535320 60535341 60535337 60535342 +
agcttaaactaaacatagagct

SEQ ID NO: 206575 - DNA, 22 bp, Artificial Sequence
  Synthetic oligonucleotide; CTT chr2 60535325 60535346 60535342 60535347 +
aaactaaacatagagcttctag

SEQ ID NO: 206576 - DNA, 22 bp, Artificial Sequence
  Synthetic oligonucleotide; TTA chr2 60535326 60535347 60535343 60535348 +
aactaaacatagagcttctagt

SEQ ID NO: 206577 - DNA, 22 bp, Artificial Sequence
  Synthetic oligonucleotide; CTA chr2 60535331 60535352 60535348 60535353 +
aacatagagcttctagtcaagc

SEQ ID NO: 206578 - DNA, 22 bp, Artificial Sequence
  Synthetic oligonucleotide; CTT chr2 60535343 60535364 60535360 60535365 +
ctagtcaagccaaaggggctaa

SEQ ID NO: 206579 - DNA, 22 bp, Artificial Sequence
  Synthetic oligonucleotide; TTC chr2 60535344 60535365 60535361 60535366 +
tagtcaagccaaaggggctaag

SEQ ID NO: 206580 - DNA, 22 bp, Artificial Sequence
  Synthetic oligonucleotide; CTA chr2 60535346 60535367 60535363 60535368 +
gtcaagccaaaggggctaagat

SEQ ID NO: 206581 - DNA, 22 bp, Artificial Sequence
  Synthetic oligonucleotide; CTA chr2 60535364 60535385 60535381 60535386 +
agatacaaacagaggctgcaaa

SEQ ID NO: 206582 - DNA, 22 bp, Artificial Sequence
  Synthetic oligonucleotide; CTG chr2 60535382 60535403 60535399 60535404 +
caaacatcgtcacggactttgt

SEQ ID NO: 206583 - DNA, 22 bp, Artificial Sequence
  Synthetic oligonucleotide; CTT chr2 60535401 60535422 60535418 60535423 +
tgttcataaaactaagccctta

SEQ ID NO: 206584 - DNA, 22 bp, Artificial Sequence
  Synthetic oligonucleotide; TTT chr2 60535402 60535423 60535419 60535424 +
gttcataaaactaagcccttaa

SEQ ID NO: 206585 - DNA, 22 bp, Artificial Sequence
  Synthetic oligonucleotide; TTG chr2 60535403 60535424 60535420 60535425 +
ttcataaaactaagcccttaag

SEQ ID NO: 206586 - DNA, 22 bp, Artificial Sequence
  Synthetic oligonucleotide; TTC chr2 60535406 60535427 60535423 60535428 +
ataaaactaagcccttaagagc

SEQ ID NO: 206587 - DNA, 22 bp, Artificial Sequence
  Synthetic oligonucleotide; CTA chr2 60535415 60535436 60535432 60535437 +
agcccttaagagccaaacctat

SEQ ID NO: 206588 - DNA, 22 bp, Artificial Sequence
  Synthetic oligonucleotide; CTT chr2 60535422 60535443 60535439 60535444 +
aagagccaaacctatctctaaa

SEQ ID NO: 206589 - DNA, 22 bp, Artificial Sequence
  Synthetic oligonucleotide; TTA chr2 60535423 60535444 60535440 60535445 +
agagccaaacctatctctaaac

SEQ ID NO: 206590 - DNA, 22 bp, Artificial Sequence
  Synthetic oligonucleotide; CTA chr2 60535436 60535457 60535453 60535458 +
tctctaaacatggtaatttatc

SEQ ID NO: 206591 - DNA, 22 bp, Artificial Sequence
  Synthetic oligonucleotide; CTC chr2 60535440 60535461 60535457 60535462 +
taaacatggtaatttatcaaaa

SEQ ID NO: 206592 - DNA, 22 bp, Artificial Sequence
  Synthetic oligonucleotide; CTA chr2 60535442 60535463 60535459 60535464 +
aacatggtaatttatcaaaaac

SEQ ID NO: 206593 - DNA, 22 bp, Artificial Sequence
  Synthetic oligonucleotide; TTT chr2 60535455 60535476 60535472 60535477 +
atcaaaaacagcccagagtcgc

SEQ ID NO: 206594 - DNA, 22 bp, Artificial Sequence
  Synthetic oligonucleotide; TTA chr2 60535456 60535477 60535473 60535478 +
tcaaaaacagcccagagtcgct

SEQ ID NO: 206595 - DNA, 22 bp, Artificial Sequence
  Synthetic oligonucleotide; CTC chr2 60535479 60535500 60535496 60535501 +
ataggcaatactgcatagtcct

SEQ ID NO: 206596 - DNA, 22 bp, Artificial Sequence
  Synthetic oligonucleotide; CTG chr2 60535492 60535513 60535509 60535514 +
catagtcctccaacagaacaga

SEQ ID NO: 206597 - DNA, 22 bp, Artificial Sequence
  Synthetic oligonucleotide; CTC chr2 60535502 60535523 60535519 60535524 +
caacagaacagattaacacgag

SEQ ID NO: 206598 - DNA, 22 bp, Artificial Sequence
  Synthetic oligonucleotide; TTA chr2 60535517 60535538 60535534 60535539 +
acacgagtccctccacccttcc

SEQ ID NO: 206599 - DNA, 22 bp, Artificial Sequence
  Synthetic oligonucleotide; CTC chr2 60535530 60535551 60535547 60535552 +
cacccttccaaaaagccttttc

SEQ ID NO: 206600 - DNA, 22 bp, Artificial Sequence
  Synthetic oligonucleotide; CTT chr2 60535537 60535558 60535554 60535559 +
ccaaaaagccttttccccctca

SEQ ID NO: 206601 - DNA, 22 bp, Artificial Sequence
  Synthetic oligonucleotide; TTC chr2 60535538 60535559 60535555 60535560 +
caaaaagccttttccccctcaa

SEQ ID NO: 206602 - DNA, 22 bp, Artificial Sequence
  Synthetic oligonucleotide; CTT chr2 60535549 60535570 60535566 60535571 +
ttccccctcaagttgtctctcc

SEQ ID NO: 206603 - DNA, 22 bp, Artificial Sequence
  Synthetic oligonucleotide; TTT chr2 60535550 60535571 60535567 60535572 +
tccccctcaagttgtctctcct

SEQ ID NO: 206604 - DNA, 22 bp, Artificial Sequence
  Synthetic oligonucleotide; TTT chr2 60535551 60535572 60535568 60535573 +
ccccctcaagttgtctctcctg

SEQ ID NO: 206605 - DNA, 22 bp, Artificial Sequence
  Synthetic oligonucleotide; TTC chr2 60535552 60535573 60535569 60535574 +
cccctcaagttgtctctcctgt

SEQ ID NO: 206606 - DNA, 22 bp, Artificial Sequence
  Synthetic oligonucleotide; CTC chr2 60535558 60535579 60535575 60535580 +
aagttgtctctcctgtgtaaac

SEQ ID NO: 206607 - DNA, 22 bp, Artificial Sequence
  Synthetic oligonucleotide; TTG chr2 60535564 60535585 60535581 60535586 +
tctctcctgtgtaaacatccac

SEQ ID NO: 206608 - DNA, 22 bp, Artificial Sequence
  Synthetic oligonucleotide; CTC chr2 60535568 60535589 60535585 60535590 +
tcctgtgtaaacatccactgtg

SEQ ID NO: 206609 - DNA, 22 bp, Artificial Sequence
  Synthetic oligonucleotide; CTC chr2 60535570 60535591 60535587 60535592 +
ctgtgtaaacatccactgtggt

SEQ ID NO: 206610 - DNA, 22 bp, Artificial Sequence
  Synthetic oligonucleotide; CTG chr2 60535573 60535594 60535590 60535595 +
tgtaaacatccactgtggtata

SEQ ID NO: 206611 - DNA, 22 bp, Artificial Sequence
  Synthetic oligonucleotide; CTG chr2 60535588 60535609 60535605 60535610 +
tggtataaaaacagctttttca

SEQ ID NO: 206612 - DNA, 22 bp, Artificial Sequence
  Synthetic oligonucleotide; CTT chr2 60535605 60535626 60535622 60535627 +
tttcattggcttggagtggcat

SEQ ID NO: 206613 - DNA, 22 bp, Artificial Sequence
  Synthetic oligonucleotide; TTT chr2 60535606 60535627 60535623 60535628 +
ttcattggcttggagtggcatt

SEQ ID NO: 206614 - DNA, 22 bp, Artificial Sequence
  Synthetic oligonucleotide; TTT chr2 60535607 60535628 60535624 60535629 +
tcattggcttggagtggcatta

SEQ ID NO: 206615 - DNA, 22 bp, Artificial Sequence
  Synthetic oligonucleotide; TTT chr2 60535608 60535629 60535625 60535630 +
cattggcttggagtggcattaa

SEQ ID NO: 206616 - DNA, 22 bp, Artificial Sequence
  Synthetic oligonucleotide; TTC chr2 60535609 60535630 60535626 60535631 +
attggcttggagtggcattaat

SEQ ID NO: 206617 - DNA, 22 bp, Artificial Sequence
  Synthetic oligonucleotide; TTG chr2 60535613 60535634 60535630 60535635 +
gcttggagtggcattaatttta

SEQ ID NO: 206618 - DNA, 22 bp, Artificial Sequence
  Synthetic oligonucleotide; CTT chr2 60535617 60535638 60535634 60535639 +
ggagtggcattaattttagaag

SEQ ID NO: 206619 - DNA, 22 bp, Artificial Sequence
  Synthetic oligonucleotide; TTG chr2 60535618 60535639 60535635 60535640 +
gagtggcattaattttagaagt

SEQ ID NO: 206620 - DNA, 22 bp, Artificial Sequence
  Synthetic oligonucleotide; TTA chr2 60535629 60535650 60535646 60535651 +
attttagaagtttctgcttcca

SEQ ID NO: 206621 - DNA, 22 bp, Artificial Sequence
  Synthetic oligonucleotide; TTT chr2 60535633 60535654 60535650 60535655 +
tagaagtttctgcttccaaagg

SEQ ID NO: 206622 - DNA, 22 bp, Artificial Sequence
  Synthetic oligonucleotide; TTT chr2 60535634 60535655 60535651 60535656 +
agaagtttctgcttccaaaggg

SEQ ID NO: 206623 - DNA, 22 bp, Artificial Sequence
  Synthetic oligonucleotide; TTA chr2 60535635 60535656 60535652 60535657 +
gaagtttctgcttccaaaggga

SEQ ID NO: 206624 - DNA, 22 bp, Artificial Sequence
  Synthetic oligonucleotide; TTT chr2 60535642 60535663 60535659 60535664 +
ctgcttccaaagggaaaccagc

SEQ ID NO: 206625 - DNA, 22 bp, Artificial Sequence
  Synthetic oligonucleotide; TTC chr2 60535643 60535664 60535660 60535665 +
tgcttccaaagggaaaccagca

SEQ ID NO: 206626 - DNA, 22 bp, Artificial Sequence
  Synthetic oligonucleotide; CTG chr2 60535645 60535666 60535662 60535667 +
cttccaaagggaaaccagcaag

SEQ ID NO: 206627 - DNA, 22 bp, Artificial Sequence
  Synthetic oligonucleotide; CTT chr2 60535648 60535669 60535665 60535670 +
ccaaagggaaaccagcaagaaa

SEQ ID NO: 206628 - DNA, 22 bp, Artificial Sequence
  Synthetic oligonucleotide; TTC chr2 60535649 60535670 60535666 60535671 +
caaagggaaaccagcaagaaag

SEQ ID NO: 206629 - DNA, 22 bp, Artificial Sequence
  Synthetic oligonucleotide; CTG chr2 60535703 60535724 60535720 60535725 +
gtttacttctgaggagtgcaaa

SEQ ID NO: 206630 - DNA, 22 bp, Artificial Sequence
  Synthetic oligonucleotide; TTT chr2 60535707 60535728 60535724 60535729 +
acttctgaggagtgcaaatcct

SEQ ID NO: 206631 - DNA, 22 bp, Artificial Sequence
  Synthetic oligonucleotide; TTA chr2 60535708 60535729 60535725 60535730 +
cttctgaggagtgcaaatcctg

SEQ ID NO: 206632 - DNA, 22 bp, Artificial Sequence
  Synthetic oligonucleotide; CTT chr2 60535711 60535732 60535728 60535733 +
ctgaggagtgcaaatcctgttg

SEQ ID NO: 206633 - DNA, 22 bp, Artificial Sequence
  Synthetic oligonucleotide; TTC chr2 60535712 60535733 60535729 60535734 +
tgaggagtgcaaatcctgttgc

SEQ ID NO: 206634 - DNA, 22 bp, Artificial Sequence
  Synthetic oligonucleotide; CTG chr2 60535714 60535735 60535731 60535736 +
aggagtgcaaatcctgttgctt

SEQ ID NO: 206635 - DNA, 22 bp, Artificial Sequence
  Synthetic oligonucleotide; CTG chr2 60535730 60535751 60535747 60535752 +
ttgcttgagatttgcctttctg

SEQ ID NO: 206636 - DNA, 22 bp, Artificial Sequence
  Synthetic oligonucleotide; TTG chr2 60535733 60535754 60535750 60535755 +
cttgagatttgcctttctgatt

SEQ ID NO: 206637 - DNA, 22 bp, Artificial Sequence
  Synthetic oligonucleotide; CTT chr2 60535736 60535757 60535753 60535758 +
gagatttgcctttctgatttcc

SEQ ID NO: 206638 - DNA, 22 bp, Artificial Sequence
  Synthetic oligonucleotide; TTG chr2 60535737 60535758 60535754 60535759 +
agatttgcctttctgatttcct

SEQ ID NO: 206639 - DNA, 22 bp, Artificial Sequence
  Synthetic oligonucleotide; TTT chr2 60535743 60535764 60535760 60535765 +
gcctttctgatttcctccattc

SEQ ID NO: 206640 - DNA, 22 bp, Artificial Sequence
  Synthetic oligonucleotide; TTG chr2 60535744 60535765 60535761 60535766 +
cctttctgatttcctccattcg

SEQ ID NO: 206641 - DNA, 22 bp, Artificial Sequence
  Synthetic oligonucleotide; CTT chr2 60535748 60535769 60535765 60535770 +
tctgatttcctccattcggcac

SEQ ID NO: 206642 - DNA, 22 bp, Artificial Sequence
  Synthetic oligonucleotide; TTT chr2 60535749 60535770 60535766 60535771 +
ctgatttcctccattcggcacc

SEQ ID NO: 206643 - DNA, 22 bp, Artificial Sequence
  Synthetic oligonucleotide; TTC chr2 60535750 60535771 60535767 60535772 +
tgatttcctccattcggcacca

SEQ ID NO: 206644 - DNA, 22 bp, Artificial Sequence
  Synthetic oligonucleotide; CTG chr2 60535752 60535773 60535769 60535774 +
atttcctccattcggcaccagc

SEQ ID NO: 206645 - DNA, 22 bp, Artificial Sequence
  Synthetic oligonucleotide; TTT chr2 60535756 60535777 60535773 60535778 +
cctccattcggcaccagccgca

SEQ ID NO: 206646 - DNA, 22 bp, Artificial Sequence
  Synthetic oligonucleotide; TTC chr2 60535757 60535778 60535774 60535779 +
ctccattcggcaccagccgcat

SEQ ID NO: 206647 - DNA, 22 bp, Artificial Sequence
  Synthetic oligonucleotide; CTC chr2 60535760 60535781 60535777 60535782 +
cattcggcaccagccgcattta

SEQ ID NO: 206648 - DNA, 22 bp, Artificial Sequence
  Synthetic oligonucleotide; TTC chr2 60535765 60535786 60535782 60535787 +
ggcaccagccgcatttaatcca

SEQ ID NO: 206649 - DNA, 22 bp, Artificial Sequence
  Synthetic oligonucleotide; TTT chr2 60535781 60535802 60535798 60535803 +
aatccatggtgaacgggtcatg

SEQ ID NO: 206650 - DNA, 22 bp, Artificial Sequence
  Synthetic oligonucleotide; TTA chr2 60535782 60535803 60535799 60535804 +
atccatggtgaacgggtcatgc

SEQ ID NO: 206651 - DNA, 22 bp, Artificial Sequence
  Synthetic oligonucleotide; CTG chr2 60535816 60535837 60535833 60535838 +
acattcagaaagttgtggtgtc

SEQ ID NO: 206652 - DNA, 22 bp, Artificial Sequence
  Synthetic oligonucleotide; TTC chr2 60535822 60535843 60535839 60535844 +
agaaagttgtggtgtccaccca

SEQ ID NO: 206653 - DNA, 22 bp, Artificial Sequence
  Synthetic oligonucleotide; TTG chr2 60535831 60535852 60535848 60535853 +
tggtgtccacccaccaccacca

SEQ ID NO: 206654 - DNA, 22 bp, Artificial Sequence
  Synthetic oligonucleotide; TTA chr2 60535867 60535888 60535884 60535889 +
ttagagagtatcgtgggaacct

SEQ ID NO: 206655 - DNA, 22 bp, Artificial Sequence
  Synthetic oligonucleotide; TTA chr2 60535870 60535891 60535887 60535892 +
gagagtatcgtgggaacctgga

SEQ ID NO: 206656 - DNA, 22 bp, Artificial Sequence
  Synthetic oligonucleotide; CTG chr2 60535890 60535911 60535907 60535912 +
gatttgcaggctttccaattac

SEQ ID NO: 206657 - DNA, 22 bp, Artificial Sequence
  Synthetic oligonucleotide; TTT chr2 60535895 60535916 60535912 60535917 +
gcaggctttccaattactagtc

SEQ ID NO: 206658 - DNA, 22 bp, Artificial Sequence
  Synthetic oligonucleotide; TTG chr2 60535896 60535917 60535913 60535918 +
caggctttccaattactagtct

SEQ ID NO: 206659 - DNA, 22 bp, Artificial Sequence
  Synthetic oligonucleotide; CTT chr2 60535903 60535924 60535920 60535925 +
tccaattactagtctggagaag

SEQ ID NO: 206660 - DNA, 22 bp, Artificial Sequence
  Synthetic oligonucleotide; TTT chr2 60535904 60535925 60535921 60535926 +
ccaattactagtctggagaaga

SEQ ID NO: 206661 - DNA, 22 bp, Artificial Sequence
  Synthetic oligonucleotide; TTC chr2 60535905 60535926 60535922 60535927 +
caattactagtctggagaagaa

SEQ ID NO: 206662 - DNA, 22 bp, Artificial Sequence
  Synthetic oligonucleotide; TTA chr2 60535911 60535932 60535928 60535933 +
ctagtctggagaagaatccttt

SEQ ID NO: 206663 - DNA, 22 bp, Artificial Sequence
  Synthetic oligonucleotide; CTA chr2 60535914 60535935 60535931 60535936 +
gtctggagaagaatcctttgct

SEQ ID NO: 206664 - DNA, 22 bp, Artificial Sequence
  Synthetic oligonucleotide; CTG chr2 60535919 60535940 60535936 60535941 +
gagaagaatcctttgcttgaat

SEQ ID NO: 206665 - DNA, 22 bp, Artificial Sequence
  Synthetic oligonucleotide; CTT chr2 60535932 60535953 60535949 60535954 +
tgcttgaatgctaactcacacc

SEQ ID NO: 206666 - DNA, 22 bp, Artificial Sequence
  Synthetic oligonucleotide; TTT chr2 60535933 60535954 60535950 60535955 +
gcttgaatgctaactcacacct

SEQ ID NO: 206667 - DNA, 22 bp, Artificial Sequence
  Synthetic oligonucleotide; TTG chr2 60535934 60535955 60535951 60535956 +
cttgaatgctaactcacacctt

SEQ ID NO: 206668 - DNA, 22 bp, Artificial Sequence
  Synthetic oligonucleotide; CTT chr2 60535937 60535958 60535954 60535959 +
gaatgctaactcacaccttgct

SEQ ID NO: 206669 - DNA, 22 bp, Artificial Sequence
  Synthetic oligonucleotide; TTG chr2 60535938 60535959 60535955 60535960 +
aatgctaactcacaccttgcta

SEQ ID NO: 206670 - DNA, 22 bp, Artificial Sequence
  Synthetic oligonucleotide; CTA chr2 60535945 60535966 60535962 60535967 +
actcacaccttgctaacctcct

SEQ ID NO: 206671 - DNA, 22 bp, Artificial Sequence
  Synthetic oligonucleotide; CTC chr2 60535949 60535970 60535966 60535971 +
acaccttgctaacctcctgaca

SEQ ID NO: 206672 - DNA, 22 bp, Artificial Sequence
  Synthetic oligonucleotide; CTT chr2 60535956 60535977 60535973 60535978 +
gctaacctcctgacatttaaaa

SEQ ID NO: 206673 - DNA, 22 bp, Artificial Sequence
  Synthetic oligonucleotide; TTG chr2 60535957 60535978 60535974 60535979 +
ctaacctcctgacatttaaaaa

SEQ ID NO: 206674 - DNA, 22 bp, Artificial Sequence
  Synthetic oligonucleotide; CTA chr2 60535960 60535981 60535977 60535982 +
acctcctgacatttaaaaaatt

SEQ ID NO: 206675 - DNA, 22 bp, Artificial Sequence
  Synthetic oligonucleotide; CTC chr2 60535965 60535986 60535982 60535987 +
ctgacatttaaaaaattctagt

SEQ ID NO: 206676 - DNA, 22 bp, Artificial Sequence
  Synthetic oligonucleotide; CTG chr2 60535968 60535989 60535985 60535990 +
acatttaaaaaattctagtgac

SEQ ID NO: 206677 - DNA, 22 bp, Artificial Sequence
  Synthetic oligonucleotide; TTT chr2 60535974 60535995 60535991 60535996 +
aaaaaattctagtgacagaatt

SEQ ID NO: 206678 - DNA, 22 bp, Artificial Sequence
  Synthetic oligonucleotide; TTA chr2 60535975 60535996 60535992 60535997 +
aaaaattctagtgacagaattc

SEQ ID NO: 206679 - DNA, 22 bp, Artificial Sequence
  Synthetic oligonucleotide; TTC chr2 60535983 60536004 60536000 60536005 +
tagtgacagaattcccaatgaa

SEQ ID NO: 206680 - DNA, 22 bp, Artificial Sequence
  Synthetic oligonucleotide; CTA chr2 60535985 60536006 60536002 60536007 +
gtgacagaattcccaatgaact

SEQ ID NO: 206681 - DNA, 22 bp, Artificial Sequence
  Synthetic oligonucleotide; TTC chr2 60535997 60536018 60536014 60536019 +
ccaatgaactcctcctcttcct

SEQ ID NO: 206682 - DNA, 22 bp, Artificial Sequence
  Synthetic oligonucleotide; CTC chr2 60536008 60536029 60536025 60536030 +
ctcctcttcctcccaaccccaa

SEQ ID NO: 206683 - DNA, 22 bp, Artificial Sequence
  Synthetic oligonucleotide; CTC chr2 60536011 60536032 60536028 60536033 +
ctcttcctcccaaccccaacct

SEQ ID NO: 206684 - DNA, 22 bp, Artificial Sequence
  Synthetic oligonucleotide; CTC chr2 60536014 60536035 60536031 60536036 +
ttcctcccaaccccaacctctc

SEQ ID NO: 206685 - DNA, 22 bp, Artificial Sequence
  Synthetic oligonucleotide; CTT chr2 60536016 60536037 60536033 60536038 +
cctcccaaccccaacctctcca

SEQ ID NO: 206686 - DNA, 22 bp, Artificial Sequence
  Synthetic oligonucleotide; TTC chr2 60536017 60536038 60536034 60536039 +
ctcccaaccccaacctctccaa

SEQ ID NO: 206687 - DNA, 22 bp, Artificial Sequence
  Synthetic oligonucleotide; CTC chr2 60536020 60536041 60536037 60536042 +
ccaaccccaacctctccaaccc

SEQ ID NO: 206688 - DNA, 22 bp, Artificial Sequence
  Synthetic oligonucleotide; CTC chr2 60536034 60536055 60536051 60536056 +
tccaacccaggtgaaagcaaga

SEQ ID NO: 206689 - DNA, 22 bp, Artificial Sequence
  Synthetic oligonucleotide; CTC chr2 60536036 60536057 60536053 60536058 +
caacccaggtgaaagcaagaaa

SEQ ID NO: 206690 - DNA, 22 bp, Artificial Sequence
  Synthetic oligonucleotide; TTA chr2 60536068 60536089 60536085 60536090 +
agtcctatctcagctggtgtgc

SEQ ID NO: 206691 - DNA, 22 bp, Artificial Sequence
  Synthetic oligonucleotide; CTA chr2 60536075 60536096 60536092 60536097 +
tctcagctggtgtgcaagtcag

SEQ ID NO: 206692 - DNA, 22 bp, Artificial Sequence
  Synthetic oligonucleotide; CTC chr2 60536079 60536100 60536096 60536101 +
agctggtgtgcaagtcagactg

SEQ ID NO: 206693 - DNA, 22 bp, Artificial Sequence
  Synthetic oligonucleotide; CTG chr2 60536084 60536105 60536101 60536106 +
gtgtgcaagtcagactgagaat

SEQ ID NO: 206694 - DNA, 22 bp, Artificial Sequence
  Synthetic oligonucleotide; CTG chr2 60536101 60536122 60536118 60536123 +
agaataacagcttcgaaaggcc

SEQ ID NO: 206695 - DNA, 22 bp, Artificial Sequence
  Synthetic oligonucleotide; CTT chr2 60536114 60536135 60536131 60536136 +
cgaaaggccacgtgtcccagct

SEQ ID NO: 206696 - DNA, 22 bp, Artificial Sequence
  Synthetic oligonucleotide; TTC chr2 60536115 60536136 60536132 60536137 +
gaaaggccacgtgtcccagctt

SEQ ID NO: 206697 - DNA, 22 bp, Artificial Sequence
  Synthetic oligonucleotide; CTT chr2 60536137 60536158 60536154 60536159 +
accgctccactgctagacccaa

SEQ ID NO: 206698 - DNA, 22 bp, Artificial Sequence
  Synthetic oligonucleotide; TTA chr2 60536138 60536159 60536155 60536160 +
ccgctccactgctagacccaaa

SEQ ID NO: 206699 - DNA, 22 bp, Artificial Sequence
  Synthetic oligonucleotide; CTC chr2 60536144 60536165 60536161 60536166 +
cactgctagacccaaaagctct

SEQ ID NO: 206700 - DNA, 22 bp, Artificial Sequence
  Synthetic oligonucleotide; CTG chr2 60536149 60536170 60536166 60536171 +
ctagacccaaaagctctctgct

SEQ ID NO: 206701 - DNA, 22 bp, Artificial Sequence
  Synthetic oligonucleotide; CTA chr2 60536152 60536173 60536169 60536174 +
gacccaaaagctctctgctgtg

SEQ ID NO: 206702 - DNA, 22 bp, Artificial Sequence
  Synthetic oligonucleotide; CTC chr2 60536165 60536186 60536182 60536187 +
tctgctgtggggatttcatttg

SEQ ID NO: 206703 - DNA, 22 bp, Artificial Sequence
  Synthetic oligonucleotide; CTC chr2 60536167 60536188 60536184 60536189 +
tgctgtggggatttcatttgaa

SEQ ID NO: 206704 - DNA, 22 bp, Artificial Sequence
  Synthetic oligonucleotide; CTG chr2 60536169 60536190 60536186 60536191 +
ctgtggggatttcatttgaact

SEQ ID NO: 206705 - DNA, 22 bp, Artificial Sequence
  Synthetic oligonucleotide; CTG chr2 60536172 60536193 60536189 60536194 +
tggggatttcatttgaactgct

SEQ ID NO: 206706 - DNA, 22 bp, Artificial Sequence
  Synthetic oligonucleotide; TTT chr2 60536181 60536202 60536198 60536203 +
catttgaactgctatcgaagaa

SEQ ID NO: 206707 - DNA, 22 bp, Artificial Sequence
  Synthetic oligonucleotide; TTC chr2 60536182 60536203 60536199 60536204 +
atttgaactgctatcgaagaat

SEQ ID NO: 206708 - DNA, 22 bp, Artificial Sequence
  Synthetic oligonucleotide; TTT chr2 60536186 60536207 60536203 60536208 +
gaactgctatcgaagaatattc

SEQ ID NO: 206709 - DNA, 22 bp, Artificial Sequence
  Synthetic oligonucleotide; TTG chr2 60536187 60536208 60536204 60536209 +
aactgctatcgaagaatattcc

SEQ ID NO: 206710 - DNA, 22 bp, Artificial Sequence
  Synthetic oligonucleotide; CTG chr2 60536192 60536213 60536209 60536214 +
ctatcgaagaatattccaagaa

SEQ ID NO: 206711 - DNA, 22 bp, Artificial Sequence
  Synthetic oligonucleotide; CTA chr2 60536195 60536216 60536212 60536217 +
tcgaagaatattccaagaacct

SEQ ID NO: 206712 - DNA, 22 bp, Artificial Sequence
  Synthetic oligonucleotide; TTC chr2 60536208 60536229 60536225 60536230 +
caagaacctctctccgcaccct

SEQ ID NO: 206713 - DNA, 22 bp, Artificial Sequence
  Synthetic oligonucleotide; CTC chr2 60536218 60536239 60536235 60536240 +
tctccgcacccttctccccctc

SEQ ID NO: 206714 - DNA, 22 bp, Artificial Sequence
  Synthetic oligonucleotide; CTC chr2 60536220 60536241 60536237 60536242 +
tccgcacccttctccccctctc

SEQ ID NO: 206715 - DNA, 22 bp, Artificial Sequence
  Synthetic oligonucleotide; CTC chr2 60536222 60536243 60536239 60536244 +
cgcacccttctccccctctctc

SEQ ID NO: 206716 - DNA, 22 bp, Artificial Sequence
  Synthetic oligonucleotide; CTT chr2 60536231 60536252 60536248 60536253 +
ctccccctctctcccccagcct

SEQ ID NO: 206717 - DNA, 22 bp, Artificial Sequence
  Synthetic oligonucleotide; TTC chr2 60536232 60536253 60536249 60536254 +
tccccctctctcccccagcctc

SEQ ID NO: 206718 - DNA, 22 bp, Artificial Sequence
  Synthetic oligonucleotide; CTC chr2 60536234 60536255 60536251 60536256 +
cccctctctcccccagcctcag

SEQ ID NO: 206719 - DNA, 22 bp, Artificial Sequence
  Synthetic oligonucleotide; CTC chr2 60536240 60536261 60536257 60536262 +
tctcccccagcctcagactttc

SEQ ID NO: 206720 - DNA, 22 bp, Artificial Sequence
  Synthetic oligonucleotide; CTC chr2 60536242 60536263 60536259 60536264 +
tcccccagcctcagactttctc

SEQ ID NO: 206721 - DNA, 22 bp, Artificial Sequence
  Synthetic oligonucleotide; CTC chr2 60536244 60536265 60536261 60536266 +
ccccagcctcagactttctcct

SEQ ID NO: 206722 - DNA, 22 bp, Artificial Sequence
  Synthetic oligonucleotide; CTC chr2 60536254 60536275 60536271 60536276 +
agactttctcctagagttgatc

SEQ ID NO: 206723 - DNA, 22 bp, Artificial Sequence
  Synthetic oligonucleotide; CTT chr2 60536260 60536281 60536277 60536282 +
tctcctagagttgatcttaccg

SEQ ID NO: 206724 - DNA, 22 bp, Artificial Sequence
  Synthetic oligonucleotide; TTT chr2 60536261 60536282 60536278 60536283 +
ctcctagagttgatcttaccgg

SEQ ID NO: 206725 - DNA, 22 bp, Artificial Sequence
  Synthetic oligonucleotide; TTC chr2 60536262 60536283 60536279 60536284 +
tcctagagttgatcttaccgga

SEQ ID NO: 206726 - DNA, 22 bp, Artificial Sequence
  Synthetic oligonucleotide; CTC chr2 60536264 60536285 60536281 60536286 +
ctagagttgatcttaccggaaa

SEQ ID NO: 206727 - DNA, 22 bp, Artificial Sequence
  Synthetic oligonucleotide; CTA chr2 60536267 60536288 60536284 60536289 +
gagttgatcttaccggaaatgt

SEQ ID NO: 206728 - DNA, 22 bp, Artificial Sequence
  Synthetic oligonucleotide; TTG chr2 60536273 60536294 60536290 60536295 +
atcttaccggaaatgtggatgt

SEQ ID NO: 206729 - DNA, 22 bp, Artificial Sequence
  Synthetic oligonucleotide; CTT chr2 60536278 60536299 60536295 60536300 +
accggaaatgtggatgttatca

SEQ ID NO: 206730 - DNA, 22 bp, Artificial Sequence
  Synthetic oligonucleotide; TTA chr2 60536279 60536300 60536296 60536301 +
ccggaaatgtggatgttatcaa

SEQ ID NO: 206731 - DNA, 22 bp, Artificial Sequence
  Synthetic oligonucleotide; TTA chr2 60536297 60536318 60536314 60536319 +
tcaaggaaatcggaaagagaag

SEQ ID NO: 206732 - DNA, 22 bp, Artificial Sequence
  Synthetic oligonucleotide; CTC chr2 60536332 60536353 60536349 60536354 +
aggtactaccccctgatttctt

SEQ ID NO: 206733 - DNA, 22 bp, Artificial Sequence
  Synthetic oligonucleotide; CTA chr2 60536340 60536361 60536357 60536362 +
ccccctgatttcttaactctct

SEQ ID NO: 206734 - DNA, 22 bp, Artificial Sequence
  Synthetic oligonucleotide; CTG chr2 60536347 60536368 60536364 60536369 +
atttcttaactctcttatcctt

SEQ ID NO: 206735 - DNA, 22 bp, Artificial Sequence
  Synthetic oligonucleotide; TTT chr2 60536351 60536372 60536368 60536373 +
cttaactctcttatccttgggc

SEQ ID NO: 206736 - DNA, 22 bp, Artificial Sequence
  Synthetic oligonucleotide; TTC chr2 60536352 60536373 60536369 60536374 +
ttaactctcttatccttgggcc

SEQ ID NO: 206737 - DNA, 22 bp, Artificial Sequence
  Synthetic oligonucleotide; CTT chr2 60536354 60536375 60536371 60536376 +
aactctcttatccttgggccct

SEQ ID NO: 206738 - DNA, 22 bp, Artificial Sequence
  Synthetic oligonucleotide; TTA chr2 60536355 60536376 60536372 60536377 +
actctcttatccttgggccctg

SEQ ID NO: 206739 - DNA, 22 bp, Artificial Sequence
  Synthetic oligonucleotide; CTC chr2 60536359 60536380 60536376 60536381 +
tcttatccttgggccctgctca

SEQ ID NO: 206740 - DNA, 22 bp, Artificial Sequence
  Synthetic oligonucleotide; CTC chr2 60536361 60536382 60536378 60536383 +
ttatccttgggccctgctcaga

SEQ ID NO: 206741 - DNA, 22 bp, Artificial Sequence
  Synthetic oligonucleotide; CTT chr2 60536363 60536384 60536380 60536385 +
atccttgggccctgctcagaaa

SEQ ID NO: 206742 - DNA, 22 bp, Artificial Sequence
  Synthetic oligonucleotide; TTA chr2 60536364 60536385 60536381 60536386 +
tccttgggccctgctcagaaat

SEQ ID NO: 206743 - DNA, 22 bp, Artificial Sequence
  Synthetic oligonucleotide; CTT chr2 60536369 60536390 60536386 60536391 +
gggccctgctcagaaatgtgcc

SEQ ID NO: 206744 - DNA, 22 bp, Artificial Sequence
  Synthetic oligonucleotide; TTG chr2 60536370 60536391 60536387 60536392 +
ggccctgctcagaaatgtgcca

SEQ ID NO: 206745 - DNA, 22 bp, Artificial Sequence
  Synthetic oligonucleotide; CTG chr2 60536377 60536398 60536394 60536399 +
ctcagaaatgtgccacatttta

SEQ ID NO: 206746 - DNA, 22 bp, Artificial Sequence
  Synthetic oligonucleotide; CTC chr2 60536380 60536401 60536397 60536402 +
agaaatgtgccacattttaaca

SEQ ID NO: 206747 - DNA, 22 bp, Artificial Sequence
  Synthetic oligonucleotide; TTT chr2 60536397 60536418 60536414 60536419 +
taacatttattagaaaggatag

SEQ ID NO: 206748 - DNA, 22 bp, Artificial Sequence
  Synthetic oligonucleotide; TTT chr2 60536398 60536419 60536415 60536420 +
aacatttattagaaaggatagg

SEQ ID NO: 206749 - DNA, 22 bp, Artificial Sequence
  Synthetic oligonucleotide; TTA chr2 60536399 60536420 60536416 60536421 +
acatttattagaaaggatagga

SEQ ID NO: 206750 - DNA, 22 bp, Artificial Sequence
  Synthetic oligonucleotide; TTT chr2 60536405 60536426 60536422 60536427 +
attagaaaggataggatgcaga

SEQ ID NO: 206751 - DNA, 22 bp, Artificial Sequence
  Synthetic oligonucleotide; TTA chr2 60536406 60536427 60536423 60536428 +
ttagaaaggataggatgcagag

SEQ ID NO: 206752 - DNA, 22 bp, Artificial Sequence
  Synthetic oligonucleotide; TTA chr2 60536409 60536430 60536426 60536431 +
gaaaggataggatgcagagctg

SEQ ID NO: 206753 - DNA, 22 bp, Artificial Sequence
  Synthetic oligonucleotide; CTG chr2 60536431 60536452 60536448 60536453 +
catggaacccacatccacaacc

SEQ ID NO: 206754 - DNA, 22 bp, Artificial Sequence
  Synthetic oligonucleotide; CTG chr2 60536458 60536479 60536475 60536480 +
tatgagccacaggtccacagtc

SEQ ID NO: 206755 - DNA, 22 bp, Artificial Sequence
  Synthetic oligonucleotide; CTG chr2 60536483 60536504 60536500 60536505 +
accaattccgtttgacactaat

SEQ ID NO: 206756 - DNA, 22 bp, Artificial Sequence
  Synthetic oligonucleotide; TTC chr2 60536491 60536512 60536508 60536513 +
cgtttgacactaatgttactct

SEQ ID NO: 206757 - DNA, 22 bp, Artificial Sequence
  Synthetic oligonucleotide; TTT chr2 60536496 60536517 60536513 60536518 +
gacactaatgttactctacatg

SEQ ID NO: 206758 - DNA, 22 bp, Artificial Sequence
  Synthetic oligonucleotide; TTG chr2 60536497 60536518 60536514 60536519 +
acactaatgttactctacatga

SEQ ID NO: 206759 - DNA, 22 bp, Artificial Sequence
  Synthetic oligonucleotide; CTA chr2 60536503 60536524 60536520 60536525 +
atgttactctacatgagtagag

SEQ ID NO: 206760 - DNA, 22 bp, Artificial Sequence
  Synthetic oligonucleotide; TTA chr2 60536509 60536530 60536526 60536531 +
ctctacatgagtagagttcaat

SEQ ID NO: 206761 - DNA, 22 bp, Artificial Sequence
  Synthetic oligonucleotide; CTC chr2 60536512 60536533 60536529 60536534 +
tacatgagtagagttcaatgag

SEQ ID NO: 206762 - DNA, 22 bp, Artificial Sequence
  Synthetic oligonucleotide; CTA chr2 60536514 60536535 60536531 60536536 +
catgagtagagttcaatgaggg

SEQ ID NO: 206763 - DNA, 22 bp, Artificial Sequence
  Synthetic oligonucleotide; TTC chr2 60536528 60536549 60536545 60536550 +
aatgagggttgatatgggatgt

SEQ ID NO: 206764 - DNA, 22 bp, Artificial Sequence
  Synthetic oligonucleotide; TTG chr2 60536539 60536560 60536556 60536561 +
atatgggatgtgacagggcaaa

SEQ ID NO: 206765 - DNA, 22 bp, Artificial Sequence
  Synthetic oligonucleotide; TTA chr2 60536570 60536591 60536587 60536592 +
gattaaaaacaaaagtttagaa

SEQ ID NO: 206766 - DNA, 22 bp, Artificial Sequence
  Synthetic oligonucleotide; TTA chr2 60536575 60536596 60536592 60536597 +
aaaacaaaagtttagaaaccaa

SEQ ID NO: 206767 - DNA, 22 bp, Artificial Sequence
  Synthetic oligonucleotide; TTT chr2 60536588 60536609 60536605 60536610 +
agaaaccaatgctacactacag

SEQ ID NO: 206768 - DNA, 22 bp, Artificial Sequence
  Synthetic oligonucleotide; TTA chr2 60536589 60536610 60536606 60536611 +
gaaaccaatgctacactacaga

SEQ ID NO: 206769 - DNA, 22 bp, Artificial Sequence
  Synthetic oligonucleotide; CTA chr2 60536602 60536623 60536619 60536624 +
cactacagagcaaatgggactt

SEQ ID NO: 206770 - DNA, 22 bp, Artificial Sequence
  Synthetic oligonucleotide; CTA chr2 60536607 60536628 60536624 60536629 +
cagagcaaatgggacttgaagg

SEQ ID NO: 206771 - DNA, 22 bp, Artificial Sequence
  Synthetic oligonucleotide; CTT chr2 60536624 60536645 60536641 60536646 +
gaaggccaaatttcccctaact

SEQ ID NO: 206772 - DNA, 22 bp, Artificial Sequence
  Synthetic oligonucleotide; TTG chr2 60536625 60536646 60536642 60536647 +
aaggccaaatttcccctaactg

SEQ ID NO: 206773 - DNA, 22 bp, Artificial Sequence
  Synthetic oligonucleotide; TTT chr2 60536637 60536658 60536654 60536659 +
cccctaactgccttcaagtgat

SEQ ID NO: 206774 - DNA, 22 bp, Artificial Sequence
  Synthetic oligonucleotide; TTC chr2 60536638 60536659 60536655 60536660 +
ccctaactgccttcaagtgatt

SEQ ID NO: 206775 - DNA, 22 bp, Artificial Sequence
  Synthetic oligonucleotide; CTA chr2 60536643 60536664 60536660 60536665 +
actgccttcaagtgattttccc

SEQ ID NO: 206776 - DNA, 22 bp, Artificial Sequence
  Synthetic oligonucleotide; CTG chr2 60536647 60536668 60536664 60536669 +
ccttcaagtgattttccctatt

SEQ ID NO: 206777 - DNA, 22 bp, Artificial Sequence
  Synthetic oligonucleotide; CTT chr2 60536651 60536672 60536668 60536673 +
caagtgattttccctattagag

SEQ ID NO: 206778 - DNA, 22 bp, Artificial Sequence
  Synthetic oligonucleotide; TTC chr2 60536652 60536673 60536669 60536674 +
aagtgattttccctattagagc

SEQ ID NO: 206779 - DNA, 22 bp, Artificial Sequence
  Synthetic oligonucleotide; TTT chr2 60536661 60536682 60536678 60536683 +
tccctattagagcgtttgcctg

SEQ ID NO: 206780 - DNA, 22 bp, Artificial Sequence
  Synthetic oligonucleotide; TTT chr2 60536662 60536683 60536679 60536684 +
ccctattagagcgtttgcctgc

SEQ ID NO: 206781 - DNA, 22 bp, Artificial Sequence
  Synthetic oligonucleotide; TTC chr2 60536663 60536684 60536680 60536685 +
cctattagagcgtttgcctgcc

SEQ ID NO: 206782 - DNA, 22 bp, Artificial Sequence
  Synthetic oligonucleotide; CTA chr2 60536667 60536688 60536684 60536689 +
ttagagcgtttgcctgccaccc

SEQ ID NO: 206783 - DNA, 22 bp, Artificial Sequence
  Synthetic oligonucleotide; TTA chr2 60536670 60536691 60536687 60536692 +
gagcgtttgcctgccacccccc

SEQ ID NO: 206784 - DNA, 22 bp, Artificial Sequence
  Synthetic oligonucleotide; TTT chr2 60536678 60536699 60536695 60536700 +
gcctgccacccccctgctggca

SEQ ID NO: 206785 - DNA, 22 bp, Artificial Sequence
  Synthetic oligonucleotide; TTG chr2 60536679 60536700 60536696 60536701 +
cctgccacccccctgctggcaa

SEQ ID NO: 206786 - DNA, 22 bp, Artificial Sequence
  Synthetic oligonucleotide; CTG chr2 60536683 60536704 60536700 60536705 +
ccacccccctgctggcaacacc

SEQ ID NO: 206787 - DNA, 22 bp, Artificial Sequence
  Synthetic oligonucleotide; CTG chr2 60536694 60536715 60536711 60536716 +
ctggcaacaccgcaatcacatc

SEQ ID NO: 206788 - DNA, 22 bp, Artificial Sequence
  Synthetic oligonucleotide; CTG chr2 60536697 60536718 60536714 60536719 +
gcaacaccgcaatcacatcaga

SEQ ID NO: 206789 - DNA, 22 bp, Artificial Sequence
  Synthetic oligonucleotide; CTT chr2 60536749 60536770 60536766 60536771 +
gagatattcctctttaaataca

SEQ ID NO: 206790 - DNA, 22 bp, Artificial Sequence
  Synthetic oligonucleotide; TTG chr2 60536750 60536771 60536767 60536772 +
agatattcctctttaaatacaa

SEQ ID NO: 206791 - DNA, 22 bp, Artificial Sequence
  Synthetic oligonucleotide; TTC chr2 60536758 60536779 60536775 60536780 +
ctctttaaatacaatacctata

SEQ ID NO: 206792 - DNA, 22 bp, Artificial Sequence
  Synthetic oligonucleotide; CTC chr2 60536761 60536782 60536778 60536783 +
tttaaatacaatacctatatac

SEQ ID NO: 206793 - DNA, 22 bp, Artificial Sequence
  Synthetic oligonucleotide; CTT chr2 60536763 60536784 60536780 60536785 +
taaatacaatacctatatactt

SEQ ID NO: 206794 - DNA, 22 bp, Artificial Sequence
  Synthetic oligonucleotide; TTT chr2 60536764 60536785 60536781 60536786 +
aaatacaatacctatatactta

SEQ ID NO: 206795 - DNA, 22 bp, Artificial Sequence
  Synthetic oligonucleotide; TTA chr2 60536765 60536786 60536782 60536787 +
aatacaatacctatatacttaa

SEQ ID NO: 206796 - DNA, 22 bp, Artificial Sequence
  Synthetic oligonucleotide; CTA chr2 60536778 60536799 60536795 60536800 +
tatacttaatatatagcaatta

SEQ ID NO: 206797 - DNA, 22 bp, Artificial Sequence
  Synthetic oligonucleotide; CTT chr2 60536785 60536806 60536802 60536807 +
aatatatagcaattaacttctg

SEQ ID NO: 206798 - DNA, 22 bp, Artificial Sequence
  Synthetic oligonucleotide; TTA chr2 60536786 60536807 60536803 60536808 +
atatatagcaattaacttctgg

SEQ ID NO: 206799 - DNA, 22 bp, Artificial Sequence
  Synthetic oligonucleotide; TTA chr2 60536800 60536821 60536817 60536822 +
acttctggtcagcagtgtgcag

SEQ ID NO: 206800 - DNA, 22 bp, Artificial Sequence
  Synthetic oligonucleotide; CTT chr2 60536804 60536825 60536821 60536826 +
ctggtcagcagtgtgcaggcag

SEQ ID NO: 206801 - DNA, 22 bp, Artificial Sequence
  Synthetic oligonucleotide; TTC chr2 60536805 60536826 60536822 60536827 +
tggtcagcagtgtgcaggcagc

SEQ ID NO: 206802 - DNA, 22 bp, Artificial Sequence
  Synthetic oligonucleotide; CTG chr2 60536807 60536828 60536824 60536829 +
gtcagcagtgtgcaggcagcag

SEQ ID NO: 206803 - DNA, 22 bp, Artificial Sequence
  Synthetic oligonucleotide; CTG chr2 60536833 60536854 60536850 60536855 +
ccccaagcagataggaggggag

SEQ ID NO: 206804 - DNA, 22 bp, Artificial Sequence
  Synthetic oligonucleotide; CTG chr2 60536870 60536891 60536887 60536892 +
ggacaagcacaaaagacaggtc

SEQ ID NO: 206805 - DNA, 22 bp, Artificial Sequence
  Synthetic oligonucleotide; CTG chr2 60536907 60536928 60536924 60536929 +
ctgtcagcagctgaattatttt

SEQ ID NO: 206806 - DNA, 22 bp, Artificial Sequence
  Synthetic oligonucleotide; CTG chr2 60536910 60536931 60536927 60536932 +
tcagcagctgaattatttttat

SEQ ID NO: 206807 - DNA, 22 bp, Artificial Sequence
  Synthetic oligonucleotide; CTG chr2 60536920 60536941 60536937 60536942 +
aattatttttatacaggaattt

SEQ ID NO: 206808 - DNA, 22 bp, Artificial Sequence
  Synthetic oligonucleotide; TTA chr2 60536925 60536946 60536942 60536947 +
tttttatacaggaatttttatc

SEQ ID NO: 206809 - DNA, 22 bp, Artificial Sequence
  Synthetic oligonucleotide; TTT chr2 60536928 60536949 60536945 60536950 +
ttatacaggaatttttatctct

SEQ ID NO: 206810 - DNA, 22 bp, Artificial Sequence
  Synthetic oligonucleotide; TTT chr2 60536929 60536950 60536946 60536951 +
tatacaggaatttttatctcta

SEQ ID NO: 206811 - DNA, 22 bp, Artificial Sequence
  Synthetic oligonucleotide; TTT chr2 60536930 60536951 60536947 60536952 +
atacaggaatttttatctctat

SEQ ID NO: 206812 - DNA, 22 bp, Artificial Sequence
  Synthetic oligonucleotide; TTA chr2 60536931 60536952 60536948 60536953 +
tacaggaatttttatctctatt

SEQ ID NO: 206813 - DNA, 22 bp, Artificial Sequence
  Synthetic oligonucleotide; TTT chr2 60536942 60536963 60536959 60536964 +
ttatctctattgtacaaacaag

SEQ ID NO: 206814 - DNA, 22 bp, Artificial Sequence
  Synthetic oligonucleotide; TTT chr2 60536943 60536964 60536960 60536965 +
tatctctattgtacaaacaagt

SEQ ID NO: 206815 - DNA, 22 bp, Artificial Sequence
  Synthetic oligonucleotide; TTT chr2 60536944 60536965 60536961 60536966 +
atctctattgtacaaacaagta

SEQ ID NO: 206816 - DNA, 22 bp, Artificial Sequence
  Synthetic oligonucleotide; TTA chr2 60536945 60536966 60536962 60536967 +
tctctattgtacaaacaagtac

SEQ ID NO: 206817 - DNA, 22 bp, Artificial Sequence
  Synthetic oligonucleotide; CTC chr2 60536949 60536970 60536966 60536971 +
tattgtacaaacaagtacgtgt

SEQ ID NO: 206818 - DNA, 22 bp, Artificial Sequence
  Synthetic oligonucleotide; CTA chr2 60536951 60536972 60536968 60536973 +
ttgtacaaacaagtacgtgtct

SEQ ID NO: 206819 - DNA, 22 bp, Artificial Sequence
  Synthetic oligonucleotide; TTG chr2 60536954 60536975 60536971 60536976 +
tacaaacaagtacgtgtctgtg

SEQ ID NO: 206820 - DNA, 22 bp, Artificial Sequence
  Synthetic oligonucleotide; CTG chr2 60536974 60536995 60536991 60536996 +
tgctgacttgttaagcaatcca

SEQ ID NO: 206821 - DNA, 22 bp, Artificial Sequence
  Synthetic oligonucleotide; CTG chr2 60536979 60537000 60536996 60537001 +
acttgttaagcaatccacttgt

SEQ ID NO: 206822 - DNA, 22 bp, Artificial Sequence
  Synthetic oligonucleotide; CTT chr2 60536983 60537004 60537000 60537005 +
gttaagcaatccacttgtatgt

SEQ ID NO: 206823 - DNA, 22 bp, Artificial Sequence
  Synthetic oligonucleotide; TTG chr2 60536984 60537005 60537001 60537006 +
ttaagcaatccacttgtatgta

SEQ ID NO: 206824 - DNA, 22 bp, Artificial Sequence
  Synthetic oligonucleotide; TTA chr2 60536987 60537008 60537004 60537009 +
agcaatccacttgtatgtagaa

SEQ ID NO: 206825 - DNA, 22 bp, Artificial Sequence
  Synthetic oligonucleotide; CTT chr2 60536999 60537020 60537016 60537021 +
gtatgtagaataagattttttt

SEQ ID NO: 206826 - DNA, 22 bp, Artificial Sequence
  Synthetic oligonucleotide; TTG chr2 60537000 60537021 60537017 60537022 +
tatgtagaataagatttttttt

SEQ ID NO: 206827 - DNA, 22 bp, Artificial Sequence
  Synthetic oligonucleotide; TTT chr2 60537017 60537038 60537034 60537039 +
tttttctttcttgctaccagtc

SEQ ID NO: 206828 - DNA, 22 bp, Artificial Sequence
  Synthetic oligonucleotide; TTT chr2 60537018 60537039 60537035 60537040 +
ttttctttcttgctaccagtca

SEQ ID NO: 206829 - DNA, 22 bp, Artificial Sequence
  Synthetic oligonucleotide; TTT chr2 60537019 60537040 60537036 60537041 +
tttctttcttgctaccagtcac

SEQ ID NO: 206830 - DNA, 22 bp, Artificial Sequence
  Synthetic oligonucleotide; TTT chr2 60537020 60537041 60537037 60537042 +
ttctttcttgctaccagtcaca

SEQ ID NO: 206831 - DNA, 22 bp, Artificial Sequence
  Synthetic oligonucleotide; TTT chr2 60537021 60537042 60537038 60537043 +
tctttcttgctaccagtcacac

SEQ ID NO: 206832 - DNA, 22 bp, Artificial Sequence
  Synthetic oligonucleotide; TTT chr2 60537022 60537043 60537039 60537044 +
ctttcttgctaccagtcacaca

SEQ ID NO: 206833 - DNA, 22 bp, Artificial Sequence
  Synthetic oligonucleotide; TTC chr2 60537023 60537044 60537040 60537045 +
tttcttgctaccagtcacacag

SEQ ID NO: 206834 - DNA, 22 bp, Artificial Sequence
  Synthetic oligonucleotide; CTT chr2 60537025 60537046 60537042 60537047 +
tcttgctaccagtcacacagct

SEQ ID NO: 206835 - DNA, 22 bp, Artificial Sequence
  Synthetic oligonucleotide; TTT chr2 60537026 60537047 60537043 60537048 +
cttgctaccagtcacacagctc

SEQ ID NO: 206836 - DNA, 22 bp, Artificial Sequence
  Synthetic oligonucleotide; TTC chr2 60537027 60537048 60537044 60537049 +
ttgctaccagtcacacagctcc

SEQ ID NO: 206837 - DNA, 22 bp, Artificial Sequence
  Synthetic oligonucleotide; CTT chr2 60537029 60537050 60537046 60537051 +
gctaccagtcacacagctccaa

SEQ ID NO: 206838 - DNA, 22 bp, Artificial Sequence
  Synthetic oligonucleotide; TTG chr2 60537030 60537051 60537047 60537052 +
ctaccagtcacacagctccaag

SEQ ID NO: 206839 - DNA, 22 bp, Artificial Sequence
  Synthetic oligonucleotide; CTA chr2 60537033 60537054 60537050 60537055 +
ccagtcacacagctccaagatc

SEQ ID NO: 206840 - DNA, 22 bp, Artificial Sequence
  Synthetic oligonucleotide; CTC chr2 60537048 60537069 60537065 60537070 +
caagatcagaagaaatacatag

SEQ ID NO: 206841 - DNA, 22 bp, Artificial Sequence
  Synthetic oligonucleotide; CTT chr2 60537074 60537095 60537091 60537096 +
tgaagctgctcaaatgttttag

SEQ ID NO: 206842 - DNA, 22 bp, Artificial Sequence
  Synthetic oligonucleotide; TTT chr2 60537075 60537096 60537092 60537097 +
gaagctgctcaaatgttttagt

SEQ ID NO: 206843 - DNA, 22 bp, Artificial Sequence
  Synthetic oligonucleotide; TTG chr2 60537076 60537097 60537093 60537098 +
aagctgctcaaatgttttagtt

SEQ ID NO: 206844 - DNA, 22 bp, Artificial Sequence
  Synthetic oligonucleotide; CTG chr2 60537082 60537103 60537099 60537104 +
ctcaaatgttttagttaaaagg

SEQ ID NO: 206845 - DNA, 22 bp, Artificial Sequence
  Synthetic oligonucleotide; CTC chr2 60537085 60537106 60537102 60537107 +
aaatgttttagttaaaaggaca

SEQ ID NO: 206846 - DNA, 22 bp, Artificial Sequence
  Synthetic oligonucleotide; TTT chr2 60537093 60537114 60537110 60537115 +
tagttaaaaggacagcagttgt

SEQ ID NO: 206847 - DNA, 22 bp, Artificial Sequence
  Synthetic oligonucleotide; TTT chr2 60537094 60537115 60537111 60537116 +
agttaaaaggacagcagttgtt

SEQ ID NO: 206848 - DNA, 22 bp, Artificial Sequence
  Synthetic oligonucleotide; TTA chr2 60537095 60537116 60537112 60537117 +
gttaaaaggacagcagttgttt

SEQ ID NO: 206849 - DNA, 22 bp, Artificial Sequence
  Synthetic oligonucleotide; TTA chr2 60537099 60537120 60537116 60537121 +
aaaggacagcagttgttttcaa

SEQ ID NO: 206850 - DNA, 22 bp, Artificial Sequence
  Synthetic oligonucleotide; TTG chr2 60537114 60537135 60537131 60537136 +
ttttcaaagatccaagagtatc

SEQ ID NO: 206851 - DNA, 22 bp, Artificial Sequence
  Synthetic oligonucleotide; TTT chr2 60537117 60537138 60537134 60537139 +
tcaaagatccaagagtatcttt

SEQ ID NO: 206852 - DNA, 22 bp, Artificial Sequence
  Synthetic oligonucleotide; TTT chr2 60537118 60537139 60537135 60537140 +
caaagatccaagagtatcttta

SEQ ID NO: 206853 - DNA, 22 bp, Artificial Sequence
  Synthetic oligonucleotide; TTC chr2 60537119 60537140 60537136 60537141 +
aaagatccaagagtatctttat

SEQ ID NO: 206854 - DNA, 22 bp, Artificial Sequence
  Synthetic oligonucleotide; CTT chr2 60537138 60537159 60537155 60537160 +
tatcagaattaaatttttcctt

SEQ ID NO: 206855 - DNA, 22 bp, Artificial Sequence
  Synthetic oligonucleotide; TTT chr2 60537139 60537160 60537156 60537161 +
atcagaattaaatttttcctta

SEQ ID NO: 206856 - DNA, 22 bp, Artificial Sequence
  Synthetic oligonucleotide; TTA chr2 60537140 60537161 60537157 60537162 +
tcagaattaaatttttccttat

SEQ ID NO: 206857 - DNA, 22 bp, Artificial Sequence
  Synthetic oligonucleotide; TTA chr2 60537149 60537170 60537166 60537171 +
aatttttccttattgatttttt

SEQ ID NO: 206858 - DNA, 22 bp, Artificial Sequence
  Synthetic oligonucleotide; TTT chr2 60537154 60537175 60537171 60537176 +
ttccttattgatttttttctcc

SEQ ID NO: 206859 - DNA, 22 bp, Artificial Sequence
  Synthetic oligonucleotide; TTT chr2 60537155 60537176 60537172 60537177 +
tccttattgatttttttctcct

SEQ ID NO: 206860 - DNA, 22 bp, Artificial Sequence
  Synthetic oligonucleotide; TTT chr2 60537156 60537177 60537173 60537178 +
ccttattgatttttttctcctt

SEQ ID NO: 206861 - DNA, 22 bp, Artificial Sequence
  Synthetic oligonucleotide; TTC chr2 60537157 60537178 60537174 60537179 +
cttattgatttttttctcctta

SEQ ID NO: 206862 - DNA, 22 bp, Artificial Sequence
  Synthetic oligonucleotide; CTT chr2 60537160 60537181 60537177 60537182 +
attgatttttttctccttaaca

SEQ ID NO: 206863 - DNA, 22 bp, Artificial Sequence
  Synthetic oligonucleotide; TTA chr2 60537161 60537182 60537178 60537183 +
ttgatttttttctccttaacat

SEQ ID NO: 206864 - DNA, 22 bp, Artificial Sequence
  Synthetic oligonucleotide; TTG chr2 60537164 60537185 60537181 60537186 +
atttttttctccttaacataac

SEQ ID NO: 206865 - DNA, 22 bp, Artificial Sequence
  Synthetic oligonucleotide; TTT chr2 60537168 60537189 60537185 60537190 +
ttttctccttaacataacaaaa

SEQ ID NO: 206866 - DNA, 22 bp, Artificial Sequence
  Synthetic oligonucleotide; TTT chr2 60537169 60537190 60537186 60537191 +
tttctccttaacataacaaaaa

SEQ ID NO: 206867 - DNA, 22 bp, Artificial Sequence
  Synthetic oligonucleotide; TTT chr2 60537170 60537191 60537187 60537192 +
ttctccttaacataacaaaaac

SEQ ID NO: 206868 - DNA, 22 bp, Artificial Sequence
  Synthetic oligonucleotide; TTT chr2 60537171 60537192 60537188 60537193 +
tctccttaacataacaaaaaca

SEQ ID NO: 206869 - DNA, 22 bp, Artificial Sequence
  Synthetic oligonucleotide; TTT chr2 60537172 60537193 60537189 60537194 +
ctccttaacataacaaaaacat

SEQ ID NO: 206870 - DNA, 22 bp, Artificial Sequence
  Synthetic oligonucleotide; TTC chr2 60537173 60537194 60537190 60537195 +
tccttaacataacaaaaacata

SEQ ID NO: 206871 - DNA, 22 bp, Artificial Sequence
  Synthetic oligonucleotide; CTC chr2 60537175 60537196 60537192 60537197 +
cttaacataacaaaaacataac

SEQ ID NO: 206872 - DNA, 22 bp, Artificial Sequence
  Synthetic oligonucleotide; CTT chr2 60537178 60537199 60537195 60537200 +
aacataacaaaaacataacatg

SEQ ID NO: 206873 - DNA, 22 bp, Artificial Sequence
  Synthetic oligonucleotide; TTA chr2 60537179 60537200 60537196 60537201 +
acataacaaaaacataacatga

SEQ ID NO: 206874 - DNA, 22 bp, Artificial Sequence
  Synthetic oligonucleotide; TTA chr2 60537209 60537230 60537226 60537231 +
cgatttattattaaaatttttt

SEQ ID NO: 206875 - DNA, 22 bp, Artificial Sequence
  Synthetic oligonucleotide; TTT chr2 60537215 60537236 60537232 60537237 +
attattaaaatttttttcagcc

SEQ ID NO: 206876 - DNA, 22 bp, Artificial Sequence
  Synthetic oligonucleotide; TTA chr2 60537216 60537237 60537233 60537238 +
ttattaaaatttttttcagcct

SEQ ID NO: 206877 - DNA, 22 bp, Artificial Sequence
  Synthetic oligonucleotide; TTA chr2 60537219 60537240 60537236 60537241 +
ttaaaatttttttcagccttta

SEQ ID NO: 206878 - DNA, 22 bp, Artificial Sequence
  Synthetic oligonucleotide; TTA chr2 60537222 60537243 60537239 60537244 +
aaatttttttcagcctttaaat

SEQ ID NO: 206879 - DNA, 22 bp, Artificial Sequence
  Synthetic oligonucleotide; TTT chr2 60537228 60537249 60537245 60537250 +
ttttcagcctttaaatcattct

SEQ ID NO: 206880 - DNA, 22 bp, Artificial Sequence
  Synthetic oligonucleotide; TTT chr2 60537229 60537250 60537246 60537251 +
tttcagcctttaaatcattctt

SEQ ID NO: 206881 - DNA, 22 bp, Artificial Sequence
  Synthetic oligonucleotide; TTT chr2 60537230 60537251 60537247 60537252 +
ttcagcctttaaatcattcttc

SEQ ID NO: 206882 - DNA, 22 bp, Artificial Sequence
  Synthetic oligonucleotide; TTT chr2 60537231 60537252 60537248 60537253 +
tcagcctttaaatcattcttca

SEQ ID NO: 206883 - DNA, 22 bp, Artificial Sequence
  Synthetic oligonucleotide; TTT chr2 60537232 60537253 60537249 60537254 +
cagcctttaaatcattcttcag

SEQ ID NO: 206884 - DNA, 22 bp, Artificial Sequence
  Synthetic oligonucleotide; TTC chr2 60537233 60537254 60537250 60537255 +
agcctttaaatcattcttcagt

SEQ ID NO: 206885 - DNA, 22 bp, Artificial Sequence
  Synthetic oligonucleotide; CTT chr2 60537239 60537260 60537256 60537261 +
taaatcattcttcagtagccaa

SEQ ID NO: 206886 - DNA, 22 bp, Artificial Sequence
  Synthetic oligonucleotide; TTT chr2 60537240 60537261 60537257 60537262 +
aaatcattcttcagtagccaat

SEQ ID NO: 206887 - DNA, 22 bp, Artificial Sequence
  Synthetic oligonucleotide; TTA chr2 60537241 60537262 60537258 60537263 +
aatcattcttcagtagccaatg

SEQ ID NO: 206888 - DNA, 22 bp, Artificial Sequence
  Synthetic oligonucleotide; TTC chr2 60537249 60537270 60537266 60537271 +
ttcagtagccaatgttcagttt

SEQ ID NO: 206889 - DNA, 22 bp, Artificial Sequence
  Synthetic oligonucleotide; CTT chr2 60537251 60537272 60537268 60537273 +
cagtagccaatgttcagtttta

SEQ ID NO: 206890 - DNA, 22 bp, Artificial Sequence
  Synthetic oligonucleotide; TTC chr2 60537252 60537273 60537269 60537274 +
agtagccaatgttcagttttaa

SEQ ID NO: 206891 - DNA, 22 bp, Artificial Sequence
  Synthetic oligonucleotide; TTC chr2 60537266 60537287 60537283 60537288 +
agttttaaatgtaaaggaataa

SEQ ID NO: 206892 - DNA, 22 bp, Artificial Sequence
  Synthetic oligonucleotide; TTT chr2 60537271 60537292 60537288 60537293 +
taaatgtaaaggaataattttt

SEQ ID NO: 206893 - DNA, 22 bp, Artificial Sequence
  Synthetic oligonucleotide; TTT chr2 60537272 60537293 60537289 60537294 +
aaatgtaaaggaataatttttt

SEQ ID NO: 206894 - DNA, 22 bp, Artificial Sequence
  Synthetic oligonucleotide; TTA chr2 60537273 60537294 60537290 60537295 +
aatgtaaaggaataattttttt

SEQ ID NO: 206895 - DNA, 22 bp, Artificial Sequence
  Synthetic oligonucleotide; TTT chr2 60537291 60537312 60537308 60537313 +
ttttaaaatattagggtgtgat

SEQ ID NO: 206896 - DNA, 22 bp, Artificial Sequence
  Synthetic oligonucleotide; TTT chr2 60537292 60537313 60537309 60537314 +
tttaaaatattagggtgtgatg

SEQ ID NO: 206897 - DNA, 22 bp, Artificial Sequence
  Synthetic oligonucleotide; TTT chr2 60537293 60537314 60537310 60537315 +
ttaaaatattagggtgtgatgg

SEQ ID NO: 206898 - DNA, 22 bp, Artificial Sequence
  Synthetic oligonucleotide; TTT chr2 60537294 60537315 60537311 60537316 +
taaaatattagggtgtgatgga

SEQ ID NO: 206899 - DNA, 22 bp, Artificial Sequence
  Synthetic oligonucleotide; TTT chr2 60537295 60537316 60537312 60537317 +
aaaatattagggtgtgatggag

SEQ ID NO: 206900 - DNA, 22 bp, Artificial Sequence
  Synthetic oligonucleotide; TTA chr2 60537296 60537317 60537313 60537318 +
aaatattagggtgtgatggaga

SEQ ID NO: 206901 - DNA, 22 bp, Artificial Sequence
  Synthetic oligonucleotide; TTA chr2 60537304 60537325 60537321 60537326 +
gggtgtgatggagagaaactca

SEQ ID NO: 206902 - DNA, 22 bp, Artificial Sequence
  Synthetic oligonucleotide; CTC chr2 60537325 60537346 60537342 60537347 +
acgagatttaagatttaacatt

SEQ ID NO: 206903 - DNA, 22 bp, Artificial Sequence
  Synthetic oligonucleotide; TTT chr2 60537334 60537355 60537351 60537356 +
aagatttaacattggttaatgc

SEQ ID NO: 206904 - DNA, 22 bp, Artificial Sequence
  Synthetic oligonucleotide; TTA chr2 60537335 60537356 60537352 60537357 +
agatttaacattggttaatgca

SEQ ID NO: 206905 - DNA, 22 bp, Artificial Sequence
  Synthetic oligonucleotide; TTT chr2 60537341 60537362 60537358 60537363 +
aacattggttaatgcattgttt

SEQ ID NO: 206906 - DNA, 22 bp, Artificial Sequence
  Synthetic oligonucleotide; TTA chr2 60537342 60537363 60537359 60537364 +
acattggttaatgcattgtttt

SEQ ID NO: 206907 - DNA, 22 bp, Artificial Sequence
  Synthetic oligonucleotide; TTG chr2 60537348 60537369 60537365 60537370 +
gttaatgcattgttttaactgg

SEQ ID NO: 206908 - DNA, 22 bp, Artificial Sequence
  Synthetic oligonucleotide; TTA chr2 60537352 60537373 60537369 60537374 +
atgcattgttttaactggaaac

SEQ ID NO: 206909 - DNA, 22 bp, Artificial Sequence
  Synthetic oligonucleotide; TTG chr2 60537360 60537381 60537377 60537382 +
ttttaactggaaactgaaagga

SEQ ID NO: 206910 - DNA, 22 bp, Artificial Sequence
  Synthetic oligonucleotide; TTT chr2 60537363 60537384 60537380 60537385 +
taactggaaactgaaaggatcg

SEQ ID NO: 206911 - DNA, 22 bp, Artificial Sequence
  Synthetic oligonucleotide; TTT chr2 60537364 60537385 60537381 60537386 +
aactggaaactgaaaggatcgg

SEQ ID NO: 206912 - DNA, 22 bp, Artificial Sequence
  Synthetic oligonucleotide; TTA chr2 60537365 60537386 60537382 60537387 +
actggaaactgaaaggatcggg

SEQ ID NO: 206913 - DNA, 22 bp, Artificial Sequence
  Synthetic oligonucleotide; CTG chr2 60537369 60537390 60537386 60537391 +
gaaactgaaaggatcggggcag

SEQ ID NO: 206914 - DNA, 22 bp, Artificial Sequence
  Synthetic oligonucleotide; CTG chr2 60537376 60537397 60537393 60537398 +
aaaggatcggggcaggggagtt

SEQ ID NO: 206915 - DNA, 22 bp, Artificial Sequence
  Synthetic oligonucleotide; TTA chr2 60537399 60537420 60537416 60537421 +
aaatggggagtaaatggttcac

SEQ ID NO: 206916 - DNA, 22 bp, Artificial Sequence
  Synthetic oligonucleotide; TTC chr2 60537419 60537440 60537436 60537441 +
actgaggggttcccccctaaat

SEQ ID NO: 206917 - DNA, 22 bp, Artificial Sequence
  Synthetic oligonucleotide; CTG chr2 60537423 60537444 60537440 60537445 +
aggggttcccccctaaatgtaa

SEQ ID NO: 206918 - DNA, 22 bp, Artificial Sequence
  Synthetic oligonucleotide; TTC chr2 60537431 60537452 60537448 60537453 +
ccccctaaatgtaaataaatca

SEQ ID NO: 206919 - DNA, 22 bp, Artificial Sequence
  Synthetic oligonucleotide; CTA chr2 60537438 60537459 60537455 60537460 +
aatgtaaataaatcataaaatc

SEQ ID NO: 206920 - DNA, 22 bp, Artificial Sequence
  Synthetic oligonucleotide; CTT chr2 60537472 60537493 60537489 60537494 +
gagttggtgaaggagaatactt

SEQ ID NO: 206921 - DNA, 22 bp, Artificial Sequence
  Synthetic oligonucleotide; TTG chr2 60537473 60537494 60537490 60537495 +
agttggtgaaggagaatacttc

SEQ ID NO: 206922 - DNA, 22 bp, Artificial Sequence
  Synthetic oligonucleotide; TTG chr2 60537478 60537499 60537495 60537500 +
gtgaaggagaatacttcaggtt

SEQ ID NO: 206923 - DNA, 22 bp, Artificial Sequence
  Synthetic oligonucleotide; CTT chr2 60537494 60537515 60537511 60537516 +
caggtttggttctcttagtttt

SEQ ID NO: 206924 - DNA, 22 bp, Artificial Sequence
  Synthetic oligonucleotide; TTC chr2 60537495 60537516 60537512 60537517 +
aggtttggttctcttagttttt

SEQ ID NO: 206925 - DNA, 22 bp, Artificial Sequence
  Synthetic oligonucleotide; TTT chr2 60537501 60537522 60537518 60537523 +
ggttctcttagttttttgaggt

SEQ ID NO: 206926 - DNA, 22 bp, Artificial Sequence
  Synthetic oligonucleotide; TTG chr2 60537502 60537523 60537519 60537524 +
gttctcttagttttttgaggtt

SEQ ID NO: 206927 - DNA, 22 bp, Artificial Sequence
  Synthetic oligonucleotide; TTC chr2 60537506 60537527 60537523 60537528 +
tcttagttttttgaggtttgtt

SEQ ID NO: 206928 - DNA, 22 bp, Artificial Sequence
  Synthetic oligonucleotide; CTC chr2 60537508 60537529 60537525 60537530 +
ttagttttttgaggtttgtttt

SEQ ID NO: 206929 - DNA, 22 bp, Artificial Sequence
  Synthetic oligonucleotide; CTT chr2 60537510 60537531 60537527 60537532 +
agttttttgaggtttgtttttg

SEQ ID NO: 206930 - DNA, 22 bp, Artificial Sequence
  Synthetic oligonucleotide; TTA chr2 60537511 60537532 60537528 60537533 +
gttttttgaggtttgtttttgt

SEQ ID NO: 206931 - DNA, 22 bp, Artificial Sequence
  Synthetic oligonucleotide; TTT chr2 60537515 60537536 60537532 60537537 +
tttgaggtttgtttttgtttga

SEQ ID NO: 206932 - DNA, 22 bp, Artificial Sequence
  Synthetic oligonucleotide; TTT chr2 60537516 60537537 60537533 60537538 +
ttgaggtttgtttttgtttgag

SEQ ID NO: 206933 - DNA, 22 bp, Artificial Sequence
  Synthetic oligonucleotide; TTT chr2 60537517 60537538 60537534 60537539 +
tgaggtttgtttttgtttgagg

SEQ ID NO: 206934 - DNA, 22 bp, Artificial Sequence
  Synthetic oligonucleotide; TTT chr2 60537518 60537539 60537535 60537540 +
gaggtttgtttttgtttgagga

SEQ ID NO: 206935 - DNA, 22 bp, Artificial Sequence
  Synthetic oligonucleotide; TTG chr2 60537519 60537540 60537536 60537541 +
aggtttgtttttgtttgaggag

SEQ ID NO: 206936 - DNA, 22 bp, Artificial Sequence
  Synthetic oligonucleotide; TTT chr2 60537525 60537546 60537542 60537547 +
gtttttgtttgaggaggtgcag

SEQ ID NO: 206937 - DNA, 22 bp, Artificial Sequence
  Synthetic oligonucleotide; TTG chr2 60537526 60537547 60537543 60537548 +
tttttgtttgaggaggtgcagg

SEQ ID NO: 206938 - DNA, 22 bp, Artificial Sequence
  Synthetic oligonucleotide; TTT chr2 60537529 60537550 60537546 60537551 +
ttgtttgaggaggtgcagggat

SEQ ID NO: 206939 - DNA, 22 bp, Artificial Sequence
  Synthetic oligonucleotide; TTT chr2 60537530 60537551 60537547 60537552 +
tgtttgaggaggtgcagggatt

SEQ ID NO: 206940 - DNA, 22 bp, Artificial Sequence
  Synthetic oligonucleotide; TTT chr2 60537531 60537552 60537548 60537553 +
gtttgaggaggtgcagggattg

SEQ ID NO: 206941 - DNA, 22 bp, Artificial Sequence
  Synthetic oligonucleotide; TTG chr2 60537532 60537553 60537549 60537554 +
tttgaggaggtgcagggattgg

SEQ ID NO: 206942 - DNA, 22 bp, Artificial Sequence
  Synthetic oligonucleotide; TTT chr2 60537535 60537556 60537552 60537557 +
gaggaggtgcagggattggcca

SEQ ID NO: 206943 - DNA, 22 bp, Artificial Sequence
  Synthetic oligonucleotide; TTG chr2 60537536 60537557 60537553 60537558 +
aggaggtgcagggattggccaa

SEQ ID NO: 206944 - DNA, 22 bp, Artificial Sequence
  Synthetic oligonucleotide; TTG chr2 60537553 60537574 60537570 60537575 +
gccaaatattaaaactctatat

SEQ ID NO: 206945 - DNA, 22 bp, Artificial Sequence
  Synthetic oligonucleotide; TTA chr2 60537564 60537585 60537581 60537586 +
aaactctatatttaaaatgtac

SEQ ID NO: 206946 - DNA, 22 bp, Artificial Sequence
  Synthetic oligonucleotide; CTC chr2 60537570 60537591 60537587 60537592 +
tatatttaaaatgtacaggaac

SEQ ID NO: 206947 - DNA, 22 bp, Artificial Sequence
  Synthetic oligonucleotide; CTA chr2 60537572 60537593 60537589 60537594 +
tatttaaaatgtacaggaacag

SEQ ID NO: 206948 - DNA, 22 bp, Artificial Sequence
  Synthetic oligonucleotide; TTT chr2 60537577 60537598 60537594 60537599 +
aaaatgtacaggaacagacttg

SEQ ID NO: 206949 - DNA, 22 bp, Artificial Sequence
  Synthetic oligonucleotide; TTA chr2 60537578 60537599 60537595 60537600 +
aaatgtacaggaacagacttgg

SEQ ID NO: 206950 - DNA, 22 bp, Artificial Sequence
  Synthetic oligonucleotide; CTT chr2 60537598 60537619 60537615 60537620 +
ggcacatagtgctttgtgctcc

SEQ ID NO: 206951 - DNA, 22 bp, Artificial Sequence
  Synthetic oligonucleotide; TTG chr2 60537599 60537620 60537616 60537621 +
gcacatagtgctttgtgctcca

SEQ ID NO: 206952 - DNA, 22 bp, Artificial Sequence
  Synthetic oligonucleotide; CTT chr2 60537612 60537633 60537629 60537634 +
tgtgctccaacataagaatcca

SEQ ID NO: 206953 - DNA, 22 bp, Artificial Sequence
  Synthetic oligonucleotide; TTT chr2 60537613 60537634 60537630 60537635 +
gtgctccaacataagaatccaa

SEQ ID NO: 206954 - DNA, 22 bp, Artificial Sequence
  Synthetic oligonucleotide; TTG chr2 60537614 60537635 60537631 60537636 +
tgctccaacataagaatccaag

SEQ ID NO: 206955 - DNA, 22 bp, Artificial Sequence
  Synthetic oligonucleotide; CTC chr2 60537619 60537640 60537636 60537641 +
caacataagaatccaagctaca

SEQ ID NO: 206956 - DNA, 22 bp, Artificial Sequence
  Synthetic oligonucleotide; CTA chr2 60537639 60537660 60537656 60537661 +
cactttatttccctaaaaatta

SEQ ID NO: 206957 - DNA, 22 bp, Artificial Sequence
  Synthetic oligonucleotide; CTT chr2 60537644 60537665 60537661 60537666 +
tatttccctaaaaattaacaga

SEQ ID NO: 206958 - DNA, 22 bp, Artificial Sequence
  Synthetic oligonucleotide; TTT chr2 60537645 60537666 60537662 60537667 +
atttccctaaaaattaacagat

SEQ ID NO: 206959 - DNA, 22 bp, Artificial Sequence
  Synthetic oligonucleotide; TTA chr2 60537646 60537667 60537663 60537668 +
tttccctaaaaattaacagatg

SEQ ID NO: 206960 - DNA, 22 bp, Artificial Sequence
  Synthetic oligonucleotide; TTT chr2 60537649 60537670 60537666 60537671 +
ccctaaaaattaacagatgtga

SEQ ID NO: 206961 - DNA, 22 bp, Artificial Sequence
  Synthetic oligonucleotide; TTC chr2 60537650 60537671 60537667 60537672 +
cctaaaaattaacagatgtgat

SEQ ID NO: 206962 - DNA, 22 bp, Artificial Sequence
  Synthetic oligonucleotide; CTA chr2 60537654 60537675 60537671 60537676 +
aaaattaacagatgtgatttcc

SEQ ID NO: 206963 - DNA, 22 bp, Artificial Sequence
  Synthetic oligonucleotide; TTA chr2 60537661 60537682 60537678 60537683 +
acagatgtgatttccttgcagc

SEQ ID NO: 206964 - DNA, 22 bp, Artificial Sequence
  Synthetic oligonucleotide; TTT chr2 60537674 60537695 60537691 60537696 +
ccttgcagcctttttatgcatc

SEQ ID NO: 206965 - DNA, 22 bp, Artificial Sequence
  Synthetic oligonucleotide; TTC chr2 60537675 60537696 60537692 60537697 +
cttgcagcctttttatgcatca

SEQ ID NO: 206966 - DNA, 22 bp, Artificial Sequence
  Synthetic oligonucleotide; CTT chr2 60537678 60537699 60537695 60537700 +
gcagcctttttatgcatcatta

SEQ ID NO: 206967 - DNA, 22 bp, Artificial Sequence
  Synthetic oligonucleotide; TTG chr2 60537679 60537700 60537696 60537701 +
cagcctttttatgcatcattac

SEQ ID NO: 206968 - DNA, 22 bp, Artificial Sequence
  Synthetic oligonucleotide; CTT chr2 60537686 60537707 60537703 60537708 +
tttatgcatcattacatattaa

SEQ ID NO: 206969 - DNA, 22 bp, Artificial Sequence
  Synthetic oligonucleotide; TTT chr2 60537687 60537708 60537704 60537709 +
ttatgcatcattacatattaag

SEQ ID NO: 206970 - DNA, 22 bp, Artificial Sequence
  Synthetic oligonucleotide; TTT chr2 60537688 60537709 60537705 60537710 +
tatgcatcattacatattaaga

SEQ ID NO: 206971 - DNA, 22 bp, Artificial Sequence
  Synthetic oligonucleotide; TTT chr2 60537689 60537710 60537706 60537711 +
atgcatcattacatattaagaa

SEQ ID NO: 206972 - DNA, 22 bp, Artificial Sequence
  Synthetic oligonucleotide; TTA chr2 60537690 60537711 60537707 60537712 +
tgcatcattacatattaagaaa

SEQ ID NO: 206973 - DNA, 22 bp, Artificial Sequence
  Synthetic oligonucleotide; TTA chr2 60537700 60537721 60537717 60537722 +
catattaagaaaatgaacaact

SEQ ID NO: 206974 - DNA, 22 bp, Artificial Sequence
  Synthetic oligonucleotide; TTA chr2 60537707 60537728 60537724 60537729 +
agaaaatgaacaactgatgaat

SEQ ID NO: 206975 - DNA, 22 bp, Artificial Sequence
  Synthetic oligonucleotide; CTG chr2 60537723 60537744 60537740 60537745 +
atgaatataaatttaaatgccc

SEQ ID NO: 206976 - DNA, 22 bp, Artificial Sequence
  Synthetic oligonucleotide; TTT chr2 60537737 60537758 60537754 60537759 +
aaatgccctgatgcttagcaaa

SEQ ID NO: 206977 - DNA, 22 bp, Artificial Sequence
  Synthetic oligonucleotide; TTA chr2 60537738 60537759 60537755 60537760 +
aatgccctgatgcttagcaaaa

SEQ ID NO: 206978 - DNA, 22 bp, Artificial Sequence
  Synthetic oligonucleotide; CTG chr2 60537747 60537768 60537764 60537769 +
atgcttagcaaaaagcttcctt

SEQ ID NO: 206979 - DNA, 22 bp, Artificial Sequence
  Synthetic oligonucleotide; CTT chr2 60537753 60537774 60537770 60537775 +
agcaaaaagcttccttgtgttt

SEQ ID NO: 206980 - DNA, 22 bp, Artificial Sequence
  Synthetic oligonucleotide; TTA chr2 60537754 60537775 60537771 60537776 +
gcaaaaagcttccttgtgtttt

SEQ ID NO: 206981 - DNA, 22 bp, Artificial Sequence
  Synthetic oligonucleotide; CTT chr2 60537765 60537786 60537782 60537787 +
ccttgtgttttttagaaagttc

SEQ ID NO: 206982 - DNA, 22 bp, Artificial Sequence
  Synthetic oligonucleotide; TTC chr2 60537766 60537787 60537783 60537788 +
cttgtgttttttagaaagttca

SEQ ID NO: 206983 - DNA, 22 bp, Artificial Sequence
  Synthetic oligonucleotide; CTT chr2 60537769 60537790 60537786 60537791 +
gtgttttttagaaagttcaaaa

SEQ ID NO: 206984 - DNA, 22 bp, Artificial Sequence
  Synthetic oligonucleotide; TTG chr2 60537770 60537791 60537787 60537792 +
tgttttttagaaagttcaaaaa

SEQ ID NO: 206985 - DNA, 22 bp, Artificial Sequence
  Synthetic oligonucleotide; TTT chr2 60537775 60537796 60537792 60537797 +
tttagaaagttcaaaaagcaaa

SEQ ID NO: 206986 - DNA, 22 bp, Artificial Sequence
  Synthetic oligonucleotide; TTT chr2 60537776 60537797 60537793 60537798 +
ttagaaagttcaaaaagcaaat

SEQ ID NO: 206987 - DNA, 22 bp, Artificial Sequence
  Synthetic oligonucleotide; TTT chr2 60537777 60537798 60537794 60537799 +
tagaaagttcaaaaagcaaata

SEQ ID NO: 206988 - DNA, 22 bp, Artificial Sequence
  Synthetic oligonucleotide; TTT chr2 60537778 60537799 60537795 60537800 +
agaaagttcaaaaagcaaatag

SEQ ID NO: 206989 - DNA, 22 bp, Artificial Sequence
  Synthetic oligonucleotide; TTA chr2 60537779 60537800 60537796 60537801 +
gaaagttcaaaaagcaaataga

SEQ ID NO: 206990 - DNA, 22 bp, Artificial Sequence
  Synthetic oligonucleotide; TTC chr2 60537787 60537808 60537804 60537809 +
aaaaagcaaatagaaaggcgag

SEQ ID NO: 206991 - DNA, 22 bp, Artificial Sequence
  Synthetic oligonucleotide; CTG chr2 60537829 60537850 60537846 60537851 +
gttttctttttgaaggcaccct

SEQ ID NO: 206992 - DNA, 22 bp, Artificial Sequence
  Synthetic oligonucleotide; TTT chr2 60537833 60537854 60537850 60537855 +
tctttttgaaggcacccttgca

SEQ ID NO: 206993 - DNA, 22 bp, Artificial Sequence
  Synthetic oligonucleotide; TTT chr2 60537834 60537855 60537851 60537856 +
ctttttgaaggcacccttgcag

SEQ ID NO: 206994 - DNA, 22 bp, Artificial Sequence
  Synthetic oligonucleotide; TTC chr2 60537835 60537856 60537852 60537857 +
tttttgaaggcacccttgcagg

SEQ ID NO: 206995 - DNA, 22 bp, Artificial Sequence
  Synthetic oligonucleotide; CTT chr2 60537837 60537858 60537854 60537859 +
tttgaaggcacccttgcaggtt

SEQ ID NO: 206996 - DNA, 22 bp, Artificial Sequence
  Synthetic oligonucleotide; TTT chr2 60537838 60537859 60537855 60537860 +
ttgaaggcacccttgcaggttt

SEQ ID NO: 206997 - DNA, 22 bp, Artificial Sequence
  Synthetic oligonucleotide; TTT chr2 60537839 60537860 60537856 60537861 +
tgaaggcacccttgcaggtttc

SEQ ID NO: 206998 - DNA, 22 bp, Artificial Sequence
  Synthetic oligonucleotide; TTT chr2 60537840 60537861 60537857 60537862 +
gaaggcacccttgcaggtttca

SEQ ID NO: 206999 - DNA, 22 bp, Artificial Sequence
  Synthetic oligonucleotide; TTG chr2 60537841 60537862 60537858 60537863 +
aaggcacccttgcaggtttcac

SEQ ID NO: 207000 - DNA, 22 bp, Artificial Sequence
  Synthetic oligonucleotide; CTT chr2 60537852 60537873 60537869 60537874 +
gcaggtttcacaataattccat

SEQ ID NO: 207001 - DNA, 22 bp, Artificial Sequence
  Synthetic oligonucleotide; TTG chr2 60537853 60537874 60537870 60537875 +
caggtttcacaataattccatt

SEQ ID NO: 207002 - DNA, 22 bp, Artificial Sequence
  Synthetic oligonucleotide; TTT chr2 60537860 60537881 60537877 60537882 +
cacaataattccattctttatt

SEQ ID NO: 207003 - DNA, 22 bp, Artificial Sequence
  Synthetic oligonucleotide; TTC chr2 60537861 60537882 60537878 60537883 +
acaataattccattctttattt

SEQ ID NO: 207004 - DNA, 22 bp, Artificial Sequence
  Synthetic oligonucleotide; TTC chr2 60537871 60537892 60537888 60537893 +
cattctttattttaatgggagt

SEQ ID NO: 207005 - DNA, 22 bp, Artificial Sequence
  Synthetic oligonucleotide; TTC chr2 60537876 60537897 60537893 60537898 +
tttattttaatgggagttttta

SEQ ID NO: 207006 - DNA, 22 bp, Artificial Sequence
  Synthetic oligonucleotide; CTT chr2 60537878 60537899 60537895 60537900 +
tattttaatgggagtttttaat

SEQ ID NO: 207007 - DNA, 22 bp, Artificial Sequence
  Synthetic oligonucleotide; TTT chr2 60537879 60537900 60537896 60537901 +
attttaatgggagtttttaatc

SEQ ID NO: 207008 - DNA, 22 bp, Artificial Sequence
  Synthetic oligonucleotide; TTA chr2 60537880 60537901 60537897 60537902 +
ttttaatgggagtttttaatca

SEQ ID NO: 207009 - DNA, 22 bp, Artificial Sequence
  Synthetic oligonucleotide; TTT chr2 60537883 60537904 60537900 60537905 +
taatgggagtttttaatcagtg

SEQ ID NO: 207010 - DNA, 22 bp, Artificial Sequence
  Synthetic oligonucleotide; TTT chr2 60537884 60537905 60537901 60537906 +
aatgggagtttttaatcagtgg

SEQ ID NO: 207011 - DNA, 22 bp, Artificial Sequence
  Synthetic oligonucleotide; TTA chr2 60537885 60537906 60537902 60537907 +
atgggagtttttaatcagtgga

SEQ ID NO: 207012 - DNA, 22 bp, Artificial Sequence
  Synthetic oligonucleotide; TTT chr2 60537895 60537916 60537912 60537917 +
ttaatcagtggattcgcctcta

SEQ ID NO: 207013 - DNA, 22 bp, Artificial Sequence
  Synthetic oligonucleotide; TTT chr2 60537896 60537917 60537913 60537918 +
taatcagtggattcgcctctat

SEQ ID NO: 207014 - DNA, 22 bp, Artificial Sequence
  Synthetic oligonucleotide; TTT chr2 60537897 60537918 60537914 60537919 +
aatcagtggattcgcctctatc

SEQ ID NO: 207015 - DNA, 22 bp, Artificial Sequence
  Synthetic oligonucleotide; TTA chr2 60537898 60537919 60537915 60537920 +
atcagtggattcgcctctatct

SEQ ID NO: 207016 - DNA, 22 bp, Artificial Sequence
  Synthetic oligonucleotide; TTC chr2 60537910 60537931 60537927 60537932 +
gcctctatctaaaactaaaatc

SEQ ID NO: 207017 - DNA, 22 bp, Artificial Sequence
  Synthetic oligonucleotide; CTC chr2 60537915 60537936 60537932 60537937 +
tatctaaaactaaaatcaaatt

SEQ ID NO: 207018 - DNA, 22 bp, Artificial Sequence
  Synthetic oligonucleotide; CTA chr2 60537917 60537938 60537934 60537939 +
tctaaaactaaaatcaaattgt

SEQ ID NO: 207019 - DNA, 22 bp, Artificial Sequence
  Synthetic oligonucleotide; CTA chr2 60537921 60537942 60537938 60537943 +
aaactaaaatcaaattgtaggt

SEQ ID NO: 207020 - DNA, 22 bp, Artificial Sequence
  Synthetic oligonucleotide; CTA chr2 60537927 60537948 60537944 60537949 +
aaatcaaattgtaggtgcaatt

SEQ ID NO: 207021 - DNA, 22 bp, Artificial Sequence
  Synthetic oligonucleotide; TTG chr2 60537938 60537959 60537955 60537960 +
taggtgcaattgttcattggca

SEQ ID NO: 207022 - DNA, 22 bp, Artificial Sequence
  Synthetic oligonucleotide; TTG chr2 60537950 60537971 60537967 60537972 +
ttcattggcaatgctaacaaca

SEQ ID NO: 207023 - DNA, 22 bp, Artificial Sequence
  Synthetic oligonucleotide; TTC chr2 60537953 60537974 60537970 60537975 +
attggcaatgctaacaacagtg

SEQ ID NO: 207024 - DNA, 22 bp, Artificial Sequence
  Synthetic oligonucleotide; TTG chr2 60537957 60537978 60537974 60537979 +
gcaatgctaacaacagtgagaa

SEQ ID NO: 207025 - DNA, 22 bp, Artificial Sequence
  Synthetic oligonucleotide; CTA chr2 60537966 60537987 60537983 60537988 +
acaacagtgagaatacaaacaa

SEQ ID NO: 207026 - DNA, 22 bp, Artificial Sequence
  Synthetic oligonucleotide; CTC chr2 60537994 60538015 60538011 60538016 +
attgtgagtgaccaaaggtccc

SEQ ID NO: 207027 - DNA, 22 bp, Artificial Sequence
  Synthetic oligonucleotide; TTG chr2 60537998 60538019 60538015 60538020 +
tgagtgaccaaaggtccccagg

SEQ ID NO: 207028 - DNA, 22 bp, Artificial Sequence
  Synthetic oligonucleotide; CTT chr2 60538029 60538050 60538046 60538051 +
catcaacatacctgctccaggt

SEQ ID NO: 207029 - DNA, 22 bp, Artificial Sequence
  Synthetic oligonucleotide; TTC chr2 60538030 60538051 60538047 60538052 +
atcaacatacctgctccaggtt

SEQ ID NO: 207030 - DNA, 22 bp, Artificial Sequence
  Synthetic oligonucleotide; CTG chr2 60538043 60538064 60538060 60538065 +
ctccaggttcccactgggaatt

SEQ ID NO: 207031 - DNA, 22 bp, Artificial Sequence
  Synthetic oligonucleotide; CTC chr2 60538046 60538067 60538063 60538068 +
caggttcccactgggaattctc

SEQ ID NO: 207032 - DNA, 22 bp, Artificial Sequence
  Synthetic oligonucleotide; TTC chr2 60538053 60538074 60538070 60538075 +
ccactgggaattctctggcaga

SEQ ID NO: 207033 - DNA, 22 bp, Artificial Sequence
  Synthetic oligonucleotide; CTG chr2 60538059 60538080 60538076 60538081 +
ggaattctctggcagagactga

SEQ ID NO: 207034 - DNA, 22 bp, Artificial Sequence
  Synthetic oligonucleotide; TTC chr2 60538066 60538087 60538083 60538088 +
tctggcagagactgattcagtt

SEQ ID NO: 207035 - DNA, 22 bp, Artificial Sequence
  Synthetic oligonucleotide; CTC chr2 60538068 60538089 60538085 60538090 +
tggcagagactgattcagttct

SEQ ID NO: 207036 - DNA, 22 bp, Artificial Sequence
  Synthetic oligonucleotide; CTG chr2 60538070 60538091 60538087 60538092 +
gcagagactgattcagttctga

SEQ ID NO: 207037 - DNA, 22 bp, Artificial Sequence
  Synthetic oligonucleotide; CTG chr2 60538080 60538101 60538097 60538102 +
attcagttctgaataacatgct

SEQ ID NO: 207038 - DNA, 22 bp, Artificial Sequence
  Synthetic oligonucleotide; TTC chr2 60538084 60538105 60538101 60538106 +
agttctgaataacatgctgcca

SEQ ID NO: 207039 - DNA, 22 bp, Artificial Sequence
  Synthetic oligonucleotide; TTC chr2 60538089 60538110 60538106 60538111 +
tgaataacatgctgccagccct

SEQ ID NO: 207040 - DNA, 22 bp, Artificial Sequence
  Synthetic oligonucleotide; CTG chr2 60538091 60538112 60538108 60538113 +
aataacatgctgccagccctat

SEQ ID NO: 207041 - DNA, 22 bp, Artificial Sequence
  Synthetic oligonucleotide; CTG chr2 60538103 60538124 60538120 60538125 +
ccagccctatctggaaaagggt

SEQ ID NO: 207042 - DNA, 22 bp, Artificial Sequence
  Synthetic oligonucleotide; CTA chr2 60538112 60538133 60538129 60538134 +
tctggaaaagggtgtgcaaggc

SEQ ID NO: 207043 - DNA, 22 bp, Artificial Sequence
  Synthetic oligonucleotide; CTG chr2 60538116 60538137 60538133 60538138 +
gaaaagggtgtgcaaggcgcct

SEQ ID NO: 207044 - DNA, 22 bp, Artificial Sequence
  Synthetic oligonucleotide; CTT chr2 60538139 60538160 60538156 60538161 +
ctcgcctcttttacaggaagtt

SEQ ID NO: 207045 - DNA, 22 bp, Artificial Sequence
  Synthetic oligonucleotide; TTC chr2 60538140 60538161 60538157 60538162 +
tcgcctcttttacaggaagttt

SEQ ID NO: 207046 - DNA, 22 bp, Artificial Sequence
  Synthetic oligonucleotide; CTC chr2 60538142 60538163 60538159 60538164 +
gcctcttttacaggaagtttaa

SEQ ID NO: 207047 - DNA, 22 bp, Artificial Sequence
  Synthetic oligonucleotide; CTC chr2 60538147 60538168 60538164 60538169 +
ttttacaggaagtttaaacctg

SEQ ID NO: 207048 - DNA, 22 bp, Artificial Sequence
  Synthetic oligonucleotide; CTT chr2 60538149 60538170 60538166 60538171 +
ttacaggaagtttaaacctgat

SEQ ID NO: 207049 - DNA, 22 bp, Artificial Sequence
  Synthetic oligonucleotide; TTT chr2 60538150 60538171 60538167 60538172 +
tacaggaagtttaaacctgatc

SEQ ID NO: 207050 - DNA, 22 bp, Artificial Sequence
  Synthetic oligonucleotide; TTT chr2 60538151 60538172 60538168 60538173 +
acaggaagtttaaacctgatca

SEQ ID NO: 207051 - DNA, 22 bp, Artificial Sequence
  Synthetic oligonucleotide; TTA chr2 60538152 60538173 60538169 60538174 +
caggaagtttaaacctgatcat

SEQ ID NO: 207052 - DNA, 22 bp, Artificial Sequence
  Synthetic oligonucleotide; TTT chr2 60538162 60538183 60538179 60538184 +
aaacctgatcatctcaccttta

SEQ ID NO: 207053 - DNA, 22 bp, Artificial Sequence
  Synthetic oligonucleotide; TTA chr2 60538163 60538184 60538180 60538185 +
aacctgatcatctcacctttag

SEQ ID NO: 207054 - DNA, 22 bp, Artificial Sequence
  Synthetic oligonucleotide; CTG chr2 60538169 60538190 60538186 60538191 +
atcatctcacctttaggtatat

SEQ ID NO: 207055 - DNA, 22 bp, Artificial Sequence
  Synthetic oligonucleotide; CTC chr2 60538177 60538198 60538194 60538199 +
acctttaggtatatataatttg

SEQ ID NO: 207056 - DNA, 22 bp, Artificial Sequence
  Synthetic oligonucleotide; CTT chr2 60538182 60538203 60538199 60538204 +
taggtatatataatttgttgtt

SEQ ID NO: 207057 - DNA, 22 bp, Artificial Sequence
  Synthetic oligonucleotide; TTT chr2 60538183 60538204 60538200 60538205 +
aggtatatataatttgttgttt

SEQ ID NO: 207058 - DNA, 22 bp, Artificial Sequence
  Synthetic oligonucleotide; TTA chr2 60538184 60538205 60538201 60538206 +
ggtatatataatttgttgttta

SEQ ID NO: 207059 - DNA, 22 bp, Artificial Sequence
  Synthetic oligonucleotide; TTT chr2 60538198 60538219 60538215 60538220 +
gttgtttagcactctgagaact

SEQ ID NO: 207060 - DNA, 22 bp, Artificial Sequence
  Synthetic oligonucleotide; TTG chr2 60538199 60538220 60538216 60538221 +
ttgtttagcactctgagaactt

SEQ ID NO: 207061 - DNA, 22 bp, Artificial Sequence
  Synthetic oligonucleotide; TTG chr2 60538202 60538223 60538219 60538224 +
tttagcactctgagaacttggt

SEQ ID NO: 207062 - DNA, 22 bp, Artificial Sequence
  Synthetic oligonucleotide; TTT chr2 60538205 60538226 60538222 60538227 +
agcactctgagaacttggtatt

SEQ ID NO: 207063 - DNA, 22 bp, Artificial Sequence
  Synthetic oligonucleotide; TTA chr2 60538206 60538227 60538223 60538228 +
gcactctgagaacttggtattt

SEQ ID NO: 207064 - DNA, 22 bp, Artificial Sequence
  Synthetic oligonucleotide; CTC chr2 60538212 60538233 60538229 60538234 +
tgagaacttggtattttatcta

SEQ ID NO: 207065 - DNA, 22 bp, Artificial Sequence
  Synthetic oligonucleotide; CTG chr2 60538214 60538235 60538231 60538236 +
agaacttggtattttatctatc

SEQ ID NO: 207066 - DNA, 22 bp, Artificial Sequence
  Synthetic oligonucleotide; CTT chr2 60538221 60538242 60538238 60538243 +
ggtattttatctatctaaagag

SEQ ID NO: 207067 - DNA, 22 bp, Artificial Sequence
  Synthetic oligonucleotide; TTG chr2 60538222 60538243 60538239 60538244 +
gtattttatctatctaaagaga

SEQ ID NO: 207068 - DNA, 22 bp, Artificial Sequence
  Synthetic oligonucleotide; TTT chr2 60538228 60538249 60538245 60538250 +
tatctatctaaagagatcaaaa

SEQ ID NO: 207069 - DNA, 22 bp, Artificial Sequence
  Synthetic oligonucleotide; TTT chr2 60538229 60538250 60538246 60538251 +
atctatctaaagagatcaaaaa

SEQ ID NO: 207070 - DNA, 22 bp, Artificial Sequence
  Synthetic oligonucleotide; TTA chr2 60538230 60538251 60538247 60538252 +
tctatctaaagagatcaaaaag

SEQ ID NO: 207071 - DNA, 22 bp, Artificial Sequence
  Synthetic oligonucleotide; CTA chr2 60538234 60538255 60538251 60538256 +
tctaaagagatcaaaaagggca

SEQ ID NO: 207072 - DNA, 22 bp, Artificial Sequence
  Synthetic oligonucleotide; CTA chr2 60538238 60538259 60538255 60538260 +
aagagatcaaaaagggcaaaag

SEQ ID NO: 207073 - DNA, 22 bp, Artificial Sequence
  Synthetic oligonucleotide; CTG chr2 60538273 60538294 60538290 60538295 +
aggcccagcctagctctggtgc

SEQ ID NO: 207074 - DNA, 22 bp, Artificial Sequence
  Synthetic oligonucleotide; CTA chr2 60538285 60538306 60538302 60538307 +
gctctggtgcatacgtcaatcg

SEQ ID NO: 207075 - DNA, 22 bp, Artificial Sequence
  Synthetic oligonucleotide; CTC chr2 60538289 60538310 60538306 60538311 +
tggtgcatacgtcaatcgtgca

SEQ ID NO: 207076 - DNA, 22 bp, Artificial Sequence
  Synthetic oligonucleotide; CTG chr2 60538291 60538312 60538308 60538313 +
gtgcatacgtcaatcgtgcact

SEQ ID NO: 207077 - DNA, 22 bp, Artificial Sequence
  Synthetic oligonucleotide; CTG chr2 60538314 60538335 60538331 60538336 +
cgcgttgccttagaggagcaac

SEQ ID NO: 207078 - DNA, 22 bp, Artificial Sequence
  Synthetic oligonucleotide; TTG chr2 60538321 60538342 60538338 60538343 +
ccttagaggagcaacctgtgca

SEQ ID NO: 207079 - DNA, 22 bp, Artificial Sequence
  Synthetic oligonucleotide; CTT chr2 60538325 60538346 60538342 60538347 +
agaggagcaacctgtgcaggta

SEQ ID NO: 207080 - DNA, 22 bp, Artificial Sequence
  Synthetic oligonucleotide; TTA chr2 60538326 60538347 60538343 60538348 +
gaggagcaacctgtgcaggtaa

SEQ ID NO: 207081 - DNA, 22 bp, Artificial Sequence
  Synthetic oligonucleotide; CTG chr2 60538339 60538360 60538356 60538361 +
tgcaggtaaatcttccagcagc

SEQ ID NO: 207082 - DNA, 22 bp, Artificial Sequence
  Synthetic oligonucleotide; CTT chr2 60538353 60538374 60538370 60538375 +
ccagcagcattgcatcagatcc

SEQ ID NO: 207083 - DNA, 22 bp, Artificial Sequence
  Synthetic oligonucleotide; TTC chr2 60538354 60538375 60538371 60538376 +
cagcagcattgcatcagatcca

SEQ ID NO: 207084 - DNA, 22 bp, Artificial Sequence
  Synthetic oligonucleotide; TTG chr2 60538365 60538386 60538382 60538387 +
catcagatccactcacatcagt

SEQ ID NO: 207085 - DNA, 22 bp, Artificial Sequence
  Synthetic oligonucleotide; CTC chr2 60538379 60538400 60538396 60538401 +
acatcagtctccagggtgaacc

SEQ ID NO: 207086 - DNA, 22 bp, Artificial Sequence
  Synthetic oligonucleotide; CTC chr2 60538390 60538411 60538407 60538412 +
cagggtgaaccaagagatgaca

SEQ ID NO: 207087 - DNA, 22 bp, Artificial Sequence
  Synthetic oligonucleotide; CTT chr2 60538415 60538436 60538432 60538437 +
cagttccctgtctgcaaacttc

SEQ ID NO: 207088 - DNA, 22 bp, Artificial Sequence
  Synthetic oligonucleotide; TTC chr2 60538416 60538437 60538433 60538438 +
agttccctgtctgcaaacttct

SEQ ID NO: 207089 - DNA, 22 bp, Artificial Sequence
  Synthetic oligonucleotide; TTC chr2 60538421 60538442 60538438 60538443 +
cctgtctgcaaacttctaattc

SEQ ID NO: 207090 - DNA, 22 bp, Artificial Sequence
  Synthetic oligonucleotide; CTG chr2 60538425 60538446 60538442 60538447 +
tctgcaaacttctaattcgcca

SEQ ID NO: 207091 - DNA, 22 bp, Artificial Sequence
  Synthetic oligonucleotide; CTG chr2 60538429 60538450 60538446 60538451 +
caaacttctaattcgccagttc

SEQ ID NO: 207092 - DNA, 22 bp, Artificial Sequence
  Synthetic oligonucleotide; CTT chr2 60538436 60538457 60538453 60538458 +
ctaattcgccagttcttagcag

SEQ ID NO: 207093 - DNA, 22 bp, Artificial Sequence
  Synthetic oligonucleotide; TTC chr2 60538437 60538458 60538454 60538459 +
taattcgccagttcttagcagc

SEQ ID NO: 207094 - DNA, 22 bp, Artificial Sequence
  Synthetic oligonucleotide; CTA chr2 60538439 60538460 60538456 60538461 +
attcgccagttcttagcagctt

SEQ ID NO: 207095 - DNA, 22 bp, Artificial Sequence
  Synthetic oligonucleotide; TTC chr2 60538443 60538464 60538460 60538465 +
gccagttcttagcagcttattt

SEQ ID NO: 207096 - DNA, 22 bp, Artificial Sequence
  Synthetic oligonucleotide; TTC chr2 60538451 60538472 60538468 60538473 +
ttagcagcttatttttccaagt

SEQ ID NO: 207097 - DNA, 22 bp, Artificial Sequence
  Synthetic oligonucleotide; CTT chr2 60538453 60538474 60538470 60538475 +
agcagcttatttttccaagtgt

SEQ ID NO: 207098 - DNA, 22 bp, Artificial Sequence
  Synthetic oligonucleotide; TTA chr2 60538454 60538475 60538471 60538476 +
gcagcttatttttccaagtgtt

SEQ ID NO: 207099 - DNA, 22 bp, Artificial Sequence
  Synthetic oligonucleotide; CTT chr2 60538461 60538482 60538478 60538483 +
atttttccaagtgttttgtttc

SEQ ID NO: 207100 - DNA, 22 bp, Artificial Sequence
  Synthetic oligonucleotide; TTA chr2 60538462 60538483 60538479 60538484 +
tttttccaagtgttttgtttca

SEQ ID NO: 207101 - DNA, 22 bp, Artificial Sequence
  Synthetic oligonucleotide; TTT chr2 60538465 60538486 60538482 60538487 +
ttccaagtgttttgtttcagga

SEQ ID NO: 207102 - DNA, 22 bp, Artificial Sequence
  Synthetic oligonucleotide; TTT chr2 60538466 60538487 60538483 60538488 +
tccaagtgttttgtttcaggaa

SEQ ID NO: 207103 - DNA, 22 bp, Artificial Sequence
  Synthetic oligonucleotide; TTT chr2 60538467 60538488 60538484 60538489 +
ccaagtgttttgtttcaggaaa

SEQ ID NO: 207104 - DNA, 22 bp, Artificial Sequence
  Synthetic oligonucleotide; TTC chr2 60538468 60538489 60538485 60538490 +
caagtgttttgtttcaggaaac

SEQ ID NO: 207105 - DNA, 22 bp, Artificial Sequence
  Synthetic oligonucleotide; TTT chr2 60538477 60538498 60538494 60538499 +
tgtttcaggaaacgtgtatttt

SEQ ID NO: 207106 - DNA, 22 bp, Artificial Sequence
  Synthetic oligonucleotide; TTT chr2 60538478 60538499 60538495 60538500 +
gtttcaggaaacgtgtattttt

SEQ ID NO: 207107 - DNA, 22 bp, Artificial Sequence
  Synthetic oligonucleotide; TTG chr2 60538479 60538500 60538496 60538501 +
tttcaggaaacgtgtatttttc

SEQ ID NO: 207108 - DNA, 22 bp, Artificial Sequence
  Synthetic oligonucleotide; TTT chr2 60538482 60538503 60538499 60538504 +
caggaaacgtgtatttttcttt

SEQ ID NO: 207109 - DNA, 22 bp, Artificial Sequence
  Synthetic oligonucleotide; TTC chr2 60538483 60538504 60538500 60538505 +
aggaaacgtgtatttttcttta

SEQ ID NO: 207110 - DNA, 22 bp, Artificial Sequence
  Synthetic oligonucleotide; TTT chr2 60538498 60538519 60538515 60538520 +
ttctttatacgttttgtggatc

SEQ ID NO: 207111 - DNA, 22 bp, Artificial Sequence
  Synthetic oligonucleotide; TTT chr2 60538499 60538520 60538516 60538521 +
tctttatacgttttgtggatct

SEQ ID NO: 207112 - DNA, 22 bp, Artificial Sequence
  Synthetic oligonucleotide; TTT chr2 60538500 60538521 60538517 60538522 +
ctttatacgttttgtggatcta

SEQ ID NO: 207113 - DNA, 22 bp, Artificial Sequence
  Synthetic oligonucleotide; TTC chr2 60538501 60538522 60538518 60538523 +
tttatacgttttgtggatctac

SEQ ID NO: 207114 - DNA, 22 bp, Artificial Sequence
  Synthetic oligonucleotide; CTT chr2 60538503 60538524 60538520 60538525 +
tatacgttttgtggatctacca

SEQ ID NO: 207115 - DNA, 22 bp, Artificial Sequence
  Synthetic oligonucleotide; TTT chr2 60538504 60538525 60538521 60538526 +
atacgttttgtggatctaccac

SEQ ID NO: 207116 - DNA, 22 bp, Artificial Sequence
  Synthetic oligonucleotide; TTA chr2 60538505 60538526 60538522 60538527 +
tacgttttgtggatctaccaca

SEQ ID NO: 207117 - DNA, 22 bp, Artificial Sequence
  Synthetic oligonucleotide; TTT chr2 60538512 60538533 60538529 60538534 +
tgtggatctaccacaactgctt

SEQ ID NO: 207118 - DNA, 22 bp, Artificial Sequence
  Synthetic oligonucleotide; TTT chr2 60538513 60538534 60538530 60538535 +
gtggatctaccacaactgcttc

SEQ ID NO: 207119 - DNA, 22 bp, Artificial Sequence
  Synthetic oligonucleotide; TTG chr2 60538514 60538535 60538531 60538536 +
tggatctaccacaactgcttct

SEQ ID NO: 207120 - DNA, 22 bp, Artificial Sequence
  Synthetic oligonucleotide; CTA chr2 60538522 60538543 60538539 60538544 +
ccacaactgcttctgacagctg

SEQ ID NO: 207121 - DNA, 22 bp, Artificial Sequence
  Synthetic oligonucleotide; CTG chr2 60538531 60538552 60538548 60538553 +
cttctgacagctgttgattctg

SEQ ID NO: 207122 - DNA, 22 bp, Artificial Sequence
  Synthetic oligonucleotide; CTT chr2 60538534 60538555 60538551 60538556 +
ctgacagctgttgattctgtta

SEQ ID NO: 207123 - DNA, 22 bp, Artificial Sequence
  Synthetic oligonucleotide; TTC chr2 60538535 60538556 60538552 60538557 +
tgacagctgttgattctgttaa

SEQ ID NO: 207124 - DNA, 22 bp, Artificial Sequence
  Synthetic oligonucleotide; CTG chr2 60538537 60538558 60538554 60538559 +
acagctgttgattctgttaaag

SEQ ID NO: 207125 - DNA, 22 bp, Artificial Sequence
  Synthetic oligonucleotide; CTG chr2 60538544 60538565 60538561 60538566 +
ttgattctgttaaaggaacaca

SEQ ID NO: 207126 - DNA, 22 bp, Artificial Sequence
  Synthetic oligonucleotide; TTG chr2 60538547 60538568 60538564 60538569 +
attctgttaaaggaacacatta

SEQ ID NO: 207127 - DNA, 22 bp, Artificial Sequence
  Synthetic oligonucleotide; TTC chr2 60538551 60538572 60538568 60538573 +
tgttaaaggaacacattataaa

SEQ ID NO: 207128 - DNA, 22 bp, Artificial Sequence
  Synthetic oligonucleotide; CTG chr2 60538553 60538574 60538570 60538575 +
ttaaaggaacacattataaaaa

SEQ ID NO: 207129 - DNA, 22 bp, Artificial Sequence
  Synthetic oligonucleotide; TTA chr2 60538556 60538577 60538573 60538578 +
aaggaacacattataaaaatct

SEQ ID NO: 207130 - DNA, 22 bp, Artificial Sequence
  Synthetic oligonucleotide; TTA chr2 60538569 60538590 60538586 60538591 +
taaaaatcttctttaaaacctc

SEQ ID NO: 207131 - DNA, 22 bp, Artificial Sequence
  Synthetic oligonucleotide; CTT chr2 60538579 60538600 60538596 60538601 +
ctttaaaacctcaagcaatgtg

SEQ ID NO: 207132 - DNA, 22 bp, Artificial Sequence
  Synthetic oligonucleotide; TTC chr2 60538580 60538601 60538597 60538602 +
tttaaaacctcaagcaatgtgg

SEQ ID NO: 207133 - DNA, 22 bp, Artificial Sequence
  Synthetic oligonucleotide; CTT chr2 60538582 60538603 60538599 60538604 +
taaaacctcaagcaatgtggac

SEQ ID NO: 207134 - DNA, 22 bp, Artificial Sequence
  Synthetic oligonucleotide; TTT chr2 60538583 60538604 60538600 60538605 +
aaaacctcaagcaatgtggact

SEQ ID NO: 207135 - DNA, 22 bp, Artificial Sequence
  Synthetic oligonucleotide; TTA chr2 60538584 60538605 60538601 60538606 +
aaacctcaagcaatgtggactc

SEQ ID NO: 207136 - DNA, 22 bp, Artificial Sequence
  Synthetic oligonucleotide; CTC chr2 60538591 60538612 60538608 60538613 +
aagcaatgtggactcaaaaata

SEQ ID NO: 207137 - DNA, 22 bp, Artificial Sequence
  Synthetic oligonucleotide; CTC chr2 60538606 60538627 60538623 60538628 +
aaaaatataatggtgaaatatt

SEQ ID NO: 207138 - DNA, 22 bp, Artificial Sequence
  Synthetic oligonucleotide; TTT chr2 60538629 60538650 60538646 60538651 +
taatggaattccagttgaaagt

SEQ ID NO: 207139 - DNA, 22 bp, Artificial Sequence
  Synthetic oligonucleotide; TTT chr2 60538630 60538651 60538647 60538652 +
aatggaattccagttgaaagtt

SEQ ID NO: 207140 - DNA, 22 bp, Artificial Sequence
  Synthetic oligonucleotide; TTA chr2 60538631 60538652 60538648 60538653 +
atggaattccagttgaaagttg

SEQ ID NO: 207141 - DNA, 22 bp, Artificial Sequence
  Synthetic oligonucleotide; TTC chr2 60538640 60538661 60538657 60538662 +
cagttgaaagttgttttttaaa

SEQ ID NO: 207142 - DNA, 22 bp, Artificial Sequence
  Synthetic oligonucleotide; TTG chr2 60538646 60538667 60538663 60538668 +
aaagttgttttttaaaaaaagt

SEQ ID NO: 207143 - DNA, 22 bp, Artificial Sequence
  Synthetic oligonucleotide; TTG chr2 60538653 60538674 60538670 60538675 +
ttttttaaaaaaagtacaaatg

SEQ ID NO: 207144 - DNA, 22 bp, Artificial Sequence
  Synthetic oligonucleotide; TTT chr2 60538656 60538677 60538673 60538678 +
tttaaaaaaagtacaaatgaag

SEQ ID NO: 207145 - DNA, 22 bp, Artificial Sequence
  Synthetic oligonucleotide; TTT chr2 60538657 60538678 60538674 60538679 +
ttaaaaaaagtacaaatgaagg

SEQ ID NO: 207146 - DNA, 22 bp, Artificial Sequence
  Synthetic oligonucleotide; TTT chr2 60538658 60538679 60538675 60538680 +
taaaaaaagtacaaatgaaggt

SEQ ID NO: 207147 - DNA, 22 bp, Artificial Sequence
  Synthetic oligonucleotide; TTT chr2 60538659 60538680 60538676 60538681 +
aaaaaaagtacaaatgaaggta

SEQ ID NO: 207148 - DNA, 22 bp, Artificial Sequence
  Synthetic oligonucleotide; TTA chr2 60538660 60538681 60538677 60538682 +
aaaaaagtacaaatgaaggtac

SEQ ID NO: 207149 - DNA, 22 bp, Artificial Sequence
  Synthetic oligonucleotide; CTT chr2 60538692 60538713 60538709 60538714 +
tagatcagtactagatttaaac

SEQ ID NO: 207150 - DNA, 22 bp, Artificial Sequence
  Synthetic oligonucleotide; TTT chr2 60538693 60538714 60538710 60538715 +
agatcagtactagatttaaact

SEQ ID NO: 207151 - DNA, 22 bp, Artificial Sequence
  Synthetic oligonucleotide; TTA chr2 60538694 60538715 60538711 60538716 +
gatcagtactagatttaaactg

SEQ ID NO: 207152 - DNA, 22 bp, Artificial Sequence
  Synthetic oligonucleotide; CTA chr2 60538705 60538726 60538722 60538727 +
gatttaaactgaatgtctctct

SEQ ID NO: 207153 - DNA, 22 bp, Artificial Sequence
  Synthetic oligonucleotide; TTT chr2 60538710 60538731 60538727 60538732 +
aaactgaatgtctctctctctc

SEQ ID NO: 207154 - DNA, 22 bp, Artificial Sequence
  Synthetic oligonucleotide; TTA chr2 60538711 60538732 60538728 60538733 +
aactgaatgtctctctctctct

SEQ ID NO: 207155 - DNA, 22 bp, Artificial Sequence
  Synthetic oligonucleotide; CTG chr2 60538716 60538737 60538733 60538738 +
aatgtctctctctctctctctc

SEQ ID NO: 207156 - DNA, 22 bp, Artificial Sequence
  Synthetic oligonucleotide; CTC chr2 60538724 60538745 60538741 60538746 +
tctctctctctctctctgtgtg

SEQ ID NO: 207157 - DNA, 22 bp, Artificial Sequence
  Synthetic oligonucleotide; CTC chr2 60538726 60538747 60538743 60538748 +
tctctctctctctctgtgtgtg

SEQ ID NO: 207158 - DNA, 22 bp, Artificial Sequence
  Synthetic oligonucleotide; CTC chr2 60538728 60538749 60538745 60538750 +
tctctctctctctgtgtgtgtg

SEQ ID NO: 207159 - DNA, 22 bp, Artificial Sequence
  Synthetic oligonucleotide; CTC chr2 60538730 60538751 60538747 60538752 +
tctctctctctgtgtgtgtgtg

SEQ ID NO: 207160 - DNA, 22 bp, Artificial Sequence
  Synthetic oligonucleotide; CTC chr2 60538732 60538753 60538749 60538754 +
tctctctctgtgtgtgtgtgtg

SEQ ID NO: 207161 - DNA, 22 bp, Artificial Sequence
  Synthetic oligonucleotide; CTC chr2 60538734 60538755 60538751 60538756 +
tctctctgtgtgtgtgtgtgtg

SEQ ID NO: 207162 - DNA, 22 bp, Artificial Sequence
  Synthetic oligonucleotide; CTC chr2 60538736 60538757 60538753 60538758 +
tctctgtgtgtgtgtgtgtgtg

SEQ ID NO: 207163 - DNA, 22 bp, Artificial Sequence
  Synthetic oligonucleotide; CTC chr2 60538738 60538759 60538755 60538760 +
tctgtgtgtgtgtgtgtgtgtg

SEQ ID NO: 207164 - DNA, 22 bp, Artificial Sequence
  Synthetic oligonucleotide; CTC chr2 60538740 60538761 60538757 60538762 +
tgtgtgtgtgtgtgtgtgtgtg

SEQ ID NO: 207165 - DNA, 22 bp, Artificial Sequence
  Synthetic oligonucleotide; CTG chr2 60538742 60538763 60538759 60538764 +
tgtgtgtgtgtgtgtgtgtgtg

SEQ ID NO: 207166 - DNA, 22 bp, Artificial Sequence
  Synthetic oligonucleotide; TTG chr2 60538806 60538827 60538823 60538828 +
caaatcaccacaaatatttaca

SEQ ID NO: 207167 - DNA, 22 bp, Artificial Sequence
  Synthetic oligonucleotide; TTT chr2 60538825 60538846 60538842 60538847 +
acactgtactccctttgttcaa

SEQ ID NO: 207168 - DNA, 22 bp, Artificial Sequence
  Synthetic oligonucleotide; TTA chr2 60538826 60538847 60538843 60538848 +
cactgtactccctttgttcaaa

SEQ ID NO: 207169 - DNA, 22 bp, Artificial Sequence
  Synthetic oligonucleotide; CTG chr2 60538831 60538852 60538848 60538853 +
tactccctttgttcaaatcaca

SEQ ID NO: 207170 - DNA, 22 bp, Artificial Sequence
  Synthetic oligonucleotide; CTC chr2 60538836 60538857 60538853 60538858 +
cctttgttcaaatcacatactt

SEQ ID NO: 207171 - DNA, 22 bp, Artificial Sequence
  Synthetic oligonucleotide; CTT chr2 60538840 60538861 60538857 60538862 +
tgttcaaatcacatacttttaa

SEQ ID NO: 207172 - DNA, 22 bp, Artificial Sequence
  Synthetic oligonucleotide; TTT chr2 60538841 60538862 60538858 60538863 +
gttcaaatcacatacttttaac

SEQ ID NO: 207173 - DNA, 22 bp, Artificial Sequence
  Synthetic oligonucleotide; TTG chr2 60538842 60538863 60538859 60538864 +
ttcaaatcacatacttttaacg

SEQ ID NO: 207174 - DNA, 22 bp, Artificial Sequence
  Synthetic oligonucleotide; TTC chr2 60538845 60538866 60538862 60538867 +
aaatcacatacttttaacggga

SEQ ID NO: 207175 - DNA, 22 bp, Artificial Sequence
  Synthetic oligonucleotide; CTT chr2 60538858 60538879 60538875 60538880 +
ttaacgggaaaagctggaactg

SEQ ID NO: 207176 - DNA, 22 bp, Artificial Sequence
  Synthetic oligonucleotide; TTT chr2 60538859 60538880 60538876 60538881 +
taacgggaaaagctggaactgt

SEQ ID NO: 207177 - DNA, 22 bp, Artificial Sequence
  Synthetic oligonucleotide; TTT chr2 60538860 60538881 60538877 60538882 +
aacgggaaaagctggaactgtg

SEQ ID NO: 207178 - DNA, 22 bp, Artificial Sequence
  Synthetic oligonucleotide; TTA chr2 60538861 60538882 60538878 60538883 +
acgggaaaagctggaactgtgg

SEQ ID NO: 207179 - DNA, 22 bp, Artificial Sequence
  Synthetic oligonucleotide; CTG chr2 60538874 60538895 60538891 60538896 +
gaactgtggctatttaaaattt

SEQ ID NO: 207180 - DNA, 22 bp, Artificial Sequence
  Synthetic oligonucleotide; CTG chr2 60538880 60538901 60538897 60538902 +
tggctatttaaaattttaaata

SEQ ID NO: 207181 - DNA, 22 bp, Artificial Sequence
  Synthetic oligonucleotide; CTA chr2 60538886 60538907 60538903 60538908 +
tttaaaattttaaatattcaaa

SEQ ID NO: 207182 - DNA, 22 bp, Artificial Sequence
  Synthetic oligonucleotide; TTT chr2 60538889 60538910 60538906 60538911 +
aaaattttaaatattcaaacgc

SEQ ID NO: 207183 - DNA, 22 bp, Artificial Sequence
  Synthetic oligonucleotide; TTA chr2 60538890 60538911 60538907 60538912 +
aaattttaaatattcaaacgcc

SEQ ID NO: 207184 - DNA, 22 bp, Artificial Sequence
  Synthetic oligonucleotide; TTT chr2 60538896 60538917 60538913 60538918 +
taaatattcaaacgcctgtaat

SEQ ID NO: 207185 - DNA, 22 bp, Artificial Sequence
  Synthetic oligonucleotide; TTT chr2 60538897 60538918 60538914 60538919 +
aaatattcaaacgcctgtaatt

SEQ ID NO: 207186 - DNA, 22 bp, Artificial Sequence
  Synthetic oligonucleotide; TTA chr2 60538898 60538919 60538915 60538920 +
aatattcaaacgcctgtaatta

SEQ ID NO: 207187 - DNA, 22 bp, Artificial Sequence
  Synthetic oligonucleotide; TTC chr2 60538905 60538926 60538922 60538927 +
aaacgcctgtaattaaccatat

SEQ ID NO: 207188 - DNA, 22 bp, Artificial Sequence
  Synthetic oligonucleotide; CTG chr2 60538914 60538935 60538931 60538936 +
taattaaccatatgaaacaaat

SEQ ID NO: 207189 - DNA, 22 bp, Artificial Sequence
  Synthetic oligonucleotide; TTA chr2 60538920 60538941 60538937 60538942 +
accatatgaaacaaattatgtt

SEQ ID NO: 207190 - DNA, 22 bp, Artificial Sequence
  Synthetic oligonucleotide; TTA chr2 60538938 60538959 60538955 60538960 +
tgttgcatttctccataccagc

SEQ ID NO: 207191 - DNA, 22 bp, Artificial Sequence
  Synthetic oligonucleotide; TTG chr2 60538943 60538964 60538960 60538965 +
catttctccataccagcacatg

SEQ ID NO: 207192 - DNA, 22 bp, Artificial Sequence
  Synthetic oligonucleotide; TTT chr2 60538948 60538969 60538965 60538970 +
ctccataccagcacatgcaaaa

SEQ ID NO: 207193 - DNA, 22 bp, Artificial Sequence
  Synthetic oligonucleotide; TTC chr2 60538949 60538970 60538966 60538971 +
tccataccagcacatgcaaaaa

SEQ ID NO: 207194 - DNA, 22 bp, Artificial Sequence
  Synthetic oligonucleotide; CTC chr2 60538951 60538972 60538968 60538973 +
cataccagcacatgcaaaaaaa

SEQ ID NO: 207195 - DNA, 22 bp, Artificial Sequence
  Synthetic oligonucleotide; TTC chr2 60538976 60538997 60538993 60538998 +
tggtggtgaattgggaggtggc

SEQ ID NO: 207196 - DNA, 22 bp, Artificial Sequence
  Synthetic oligonucleotide; CTG chr2 60538978 60538999 60538995 60539000 +
gtggtgaattgggaggtggcag

SEQ ID NO: 207197 - DNA, 22 bp, Artificial Sequence
  Synthetic oligonucleotide; TTG chr2 60538989 60539010 60539006 60539011 +
ggaggtggcagagttggggaga

SEQ ID NO: 207198 - DNA, 22 bp, Artificial Sequence
  Synthetic oligonucleotide; TTG chr2 60539005 60539026 60539022 60539027 +
gggagacaactccaagagaaga

SEQ ID NO: 207199 - DNA, 22 bp, Artificial Sequence
  Synthetic oligonucleotide; CTC chr2 60539017 60539038 60539034 60539039 +
caagagaagaaaaggatgatgt

SEQ ID NO: 207200 - DNA, 22 bp, Artificial Sequence
  Synthetic oligonucleotide; TTT chr2 60539041 60539062 60539058 60539063 +
tcatttcgctatagatcaaagg

SEQ ID NO: 207201 - DNA, 22 bp, Artificial Sequence
  Synthetic oligonucleotide; TTT chr2 60539042 60539063 60539059 60539064 +
catttcgctatagatcaaagga

SEQ ID NO: 207202 - DNA, 22 bp, Artificial Sequence
  Synthetic oligonucleotide; TTC chr2 60539043 60539064 60539060 60539065 +
atttcgctatagatcaaaggag

SEQ ID NO: 207203 - DNA, 22 bp, Artificial Sequence
  Synthetic oligonucleotide; TTT chr2 60539047 60539068 60539064 60539069 +
cgctatagatcaaaggagaaca

SEQ ID NO: 207204 - DNA, 22 bp, Artificial Sequence
  Synthetic oligonucleotide; TTC chr2 60539048 60539069 60539065 60539070 +
gctatagatcaaaggagaacaa

SEQ ID NO: 207205 - DNA, 22 bp, Artificial Sequence
  Synthetic oligonucleotide; CTA chr2 60539052 60539073 60539069 60539074 +
tagatcaaaggagaacaagaat

SEQ ID NO: 207206 - DNA, 22 bp, Artificial Sequence
  Synthetic oligonucleotide; CTG chr2 60539082 60539103 60539099 60539104 +
tggcatatcgagcatttttcca

SEQ ID NO: 207207 - DNA, 22 bp, Artificial Sequence
  Synthetic oligonucleotide; TTT chr2 60539099 60539120 60539116 60539121 +
ttccattgctgtctttcacact

SEQ ID NO: 207208 - DNA, 22 bp, Artificial Sequence
  Synthetic oligonucleotide; TTT chr2 60539100 60539121 60539117 60539122 +
tccattgctgtctttcacactg

SEQ ID NO: 207209 - DNA, 22 bp, Artificial Sequence
  Synthetic oligonucleotide; TTT chr2 60539101 60539122 60539118 60539123 +
ccattgctgtctttcacactgg

SEQ ID NO: 207210 - DNA, 22 bp, Artificial Sequence
  Synthetic oligonucleotide; TTC chr2 60539102 60539123 60539119 60539124 +
cattgctgtctttcacactggg

SEQ ID NO: 207211 - DNA, 22 bp, Artificial Sequence
  Synthetic oligonucleotide; TTG chr2 60539107 60539128 60539124 60539129 +
ctgtctttcacactgggctatc

SEQ ID NO: 207212 - DNA, 22 bp, Artificial Sequence
  Synthetic oligonucleotide; CTG chr2 60539110 60539131 60539127 60539132 +
tctttcacactgggctatctaa

SEQ ID NO: 207213 - DNA, 22 bp, Artificial Sequence
  Synthetic oligonucleotide; CTT chr2 60539114 60539135 60539131 60539136 +
tcacactgggctatctaagttt

SEQ ID NO: 207214 - DNA, 22 bp, Artificial Sequence
  Synthetic oligonucleotide; TTT chr2 60539115 60539136 60539132 60539137 +
cacactgggctatctaagttta

SEQ ID NO: 207215 - DNA, 22 bp, Artificial Sequence
  Synthetic oligonucleotide; TTC chr2 60539116 60539137 60539133 60539138 +
acactgggctatctaagtttat

SEQ ID NO: 207216 - DNA, 22 bp, Artificial Sequence
  Synthetic oligonucleotide; CTG chr2 60539122 60539143 60539139 60539144 +
ggctatctaagtttatacaatt

SEQ ID NO: 207217 - DNA, 22 bp, Artificial Sequence
  Synthetic oligonucleotide; CTA chr2 60539127 60539148 60539144 60539149 +
tctaagtttatacaattcccca

SEQ ID NO: 207218 - DNA, 22 bp, Artificial Sequence
  Synthetic oligonucleotide; CTA chr2 60539131 60539152 60539148 60539153 +
agtttatacaattccccagact

SEQ ID NO: 207219 - DNA, 22 bp, Artificial Sequence
  Synthetic oligonucleotide; TTT chr2 60539136 60539157 60539153 60539158 +
atacaattccccagactagctg

SEQ ID NO: 207220 - DNA, 22 bp, Artificial Sequence
  Synthetic oligonucleotide; TTA chr2 60539137 60539158 60539154 60539159 +
tacaattccccagactagctgc

SEQ ID NO: 207221 - DNA, 22 bp, Artificial Sequence
  Synthetic oligonucleotide; TTC chr2 60539145 60539166 60539162 60539167 +
cccagactagctgcatattaag

SEQ ID NO: 207222 - DNA, 22 bp, Artificial Sequence
  Synthetic oligonucleotide; CTA chr2 60539154 60539175 60539171 60539176 +
gctgcatattaagcttgctgtg

SEQ ID NO: 207223 - DNA, 22 bp, Artificial Sequence
  Synthetic oligonucleotide; CTG chr2 60539158 60539179 60539175 60539180 +
catattaagcttgctgtgtaca

SEQ ID NO: 207224 - DNA, 22 bp, Artificial Sequence
  Synthetic oligonucleotide; TTA chr2 60539165 60539186 60539182 60539187 +
agcttgctgtgtacagctttat

SEQ ID NO: 207225 - DNA, 22 bp, Artificial Sequence
  Synthetic oligonucleotide; CTT chr2 60539170 60539191 60539187 60539192 +
gctgtgtacagctttattatgg

SEQ ID NO: 207226 - DNA, 22 bp, Artificial Sequence
  Synthetic oligonucleotide; TTG chr2 60539171 60539192 60539188 60539193 +
ctgtgtacagctttattatggt

SEQ ID NO: 207227 - DNA, 22 bp, Artificial Sequence
  Synthetic oligonucleotide; CTG chr2 60539174 60539195 60539191 60539196 +
tgtacagctttattatggtgtg

SEQ ID NO: 207228 - DNA, 22 bp, Artificial Sequence
  Synthetic oligonucleotide; CTT chr2 60539184 60539205 60539201 60539206 +
tattatggtgtggtggtggaag

SEQ ID NO: 207229 - DNA, 22 bp, Artificial Sequence
  Synthetic oligonucleotide; TTT chr2 60539185 60539206 60539202 60539207 +
attatggtgtggtggtggaaga

SEQ ID NO: 207230 - DNA, 22 bp, Artificial Sequence
  Synthetic oligonucleotide; TTA chr2 60539186 60539207 60539203 60539208 +
ttatggtgtggtggtggaagaa

SEQ ID NO: 207231 - DNA, 22 bp, Artificial Sequence
  Synthetic oligonucleotide; TTA chr2 60539189 60539210 60539206 60539211 +
tggtgtggtggtggaagaagca

SEQ ID NO: 207232 - DNA, 22 bp, Artificial Sequence
  Synthetic oligonucleotide; TTA chr2 60539214 60539235 60539231 60539236 +
atattccagctccgcatctgac

SEQ ID NO: 207233 - DNA, 22 bp, Artificial Sequence
  Synthetic oligonucleotide; TTC chr2 60539220 60539241 60539237 60539242 +
cagctccgcatctgacagggca

SEQ ID NO: 207234 - DNA, 22 bp, Artificial Sequence
  Synthetic oligonucleotide; CTC chr2 60539226 60539247 60539243 60539248 +
cgcatctgacagggcatttaca

SEQ ID NO: 207235 - DNA, 22 bp, Artificial Sequence
  Synthetic oligonucleotide; CTG chr2 60539234 60539255 60539251 60539256 +
acagggcatttacatgcgccca

SEQ ID NO: 207236 - DNA, 22 bp, Artificial Sequence
  Synthetic oligonucleotide; TTT chr2 60539245 60539266 60539262 60539267 +
acatgcgcccatctgagcggca

SEQ ID NO: 207237 - DNA, 22 bp, Artificial Sequence
  Synthetic oligonucleotide; TTA chr2 60539246 60539267 60539263 60539268 +
catgcgcccatctgagcggcac

SEQ ID NO: 207238 - DNA, 22 bp, Artificial Sequence
  Synthetic oligonucleotide; CTG chr2 60539260 60539281 60539277 60539282 +
agcggcacctgagagctcctcc

SEQ ID NO: 207239 - DNA, 22 bp, Artificial Sequence
  Synthetic oligonucleotide; CTG chr2 60539271 60539292 60539288 60539293 +
agagctcctccaaggtgcagta

SEQ ID NO: 207240 - DNA, 22 bp, Artificial Sequence
  Synthetic oligonucleotide; CTC chr2 60539278 60539299 60539295 60539300 +
ctccaaggtgcagtaactgtgc

SEQ ID NO: 207241 - DNA, 22 bp, Artificial Sequence
  Synthetic oligonucleotide; CTC chr2 60539281 60539302 60539298 60539303 +
caaggtgcagtaactgtgcgcc

SEQ ID NO: 207242 - DNA, 22 bp, Artificial Sequence
  Synthetic oligonucleotide; CTG chr2 60539297 60539318 60539314 60539319 +
tgcgcctattgtaaaggcaaat

SEQ ID NO: 207243 - DNA, 22 bp, Artificial Sequence
  Synthetic oligonucleotide; CTA chr2 60539305 60539326 60539322 60539327 +
ttgtaaaggcaaatgaagctca

SEQ ID NO: 207244 - DNA, 22 bp, Artificial Sequence
  Synthetic oligonucleotide; TTG chr2 60539308 60539329 60539325 60539330 +
taaaggcaaatgaagctcacct

SEQ ID NO: 207245 - DNA, 22 bp, Artificial Sequence
  Synthetic oligonucleotide; CTC chr2 60539326 60539347 60539343 60539348 +
acctattccctgctgggatcag

SEQ ID NO: 207246 - DNA, 22 bp, Artificial Sequence
  Synthetic oligonucleotide; CTA chr2 60539331 60539352 60539348 60539353 +
ttccctgctgggatcagaagtg

SEQ ID NO: 207247 - DNA, 22 bp, Artificial Sequence
  Synthetic oligonucleotide; TTC chr2 60539334 60539355 60539351 60539356 +
cctgctgggatcagaagtgacc

SEQ ID NO: 207248 - DNA, 22 bp, Artificial Sequence
  Synthetic oligonucleotide; CTG chr2 60539338 60539359 60539355 60539360 +
ctgggatcagaagtgacctcac

SEQ ID NO: 207249 - DNA, 22 bp, Artificial Sequence
  Synthetic oligonucleotide; CTG chr2 60539341 60539362 60539358 60539363 +
ggatcagaagtgacctcaccac

SEQ ID NO: 207250 - DNA, 22 bp, Artificial Sequence
  Synthetic oligonucleotide; CTC chr2 60539358 60539379 60539375 60539380 +
accaccccccatgcctcaaatc

SEQ ID NO: 207251 - DNA, 22 bp, Artificial Sequence
  Synthetic oligonucleotide; CTC chr2 60539375 60539396 60539392 60539397 +
aaatccttcccttgccaaccta

SEQ ID NO: 207252 - DNA, 22 bp, Artificial Sequence
  Synthetic oligonucleotide; CTT chr2 60539383 60539404 60539400 60539405 +
cccttgccaacctaactcaatg

SEQ ID NO: 207253 - DNA, 22 bp, Artificial Sequence
  Synthetic oligonucleotide; TTC chr2 60539384 60539405 60539401 60539406 +
ccttgccaacctaactcaatgc

SEQ ID NO: 207254 - DNA, 22 bp, Artificial Sequence
  Synthetic oligonucleotide; CTT chr2 60539388 60539409 60539405 60539410 +
gccaacctaactcaatgccatt

SEQ ID NO: 207255 - DNA, 22 bp, Artificial Sequence
  Synthetic oligonucleotide; TTG chr2 60539389 60539410 60539406 60539411 +
ccaacctaactcaatgccattg

SEQ ID NO: 207256 - DNA, 22 bp, Artificial Sequence
  Synthetic oligonucleotide; CTA chr2 60539397 60539418 60539414 60539419 +
actcaatgccattgcagaatga

SEQ ID NO: 207257 - DNA, 22 bp, Artificial Sequence
  Synthetic oligonucleotide; CTC chr2 60539401 60539422 60539418 60539423 +
aatgccattgcagaatgacgaa

SEQ ID NO: 207258 - DNA, 22 bp, Artificial Sequence
  Synthetic oligonucleotide; TTG chr2 60539411 60539432 60539428 60539433 +
cagaatgacgaatgagctcaga

SEQ ID NO: 207259 - DNA, 22 bp, Artificial Sequence
  Synthetic oligonucleotide; CTC chr2 60539430 60539451 60539447 60539452 +
agaaatagaccccaagttacta

SEQ ID NO: 207260 - DNA, 22 bp, Artificial Sequence
  Synthetic oligonucleotide; TTA chr2 60539449 60539470 60539466 60539471 +
ctaaccctgctaagaacagcaa

SEQ ID NO: 207261 - DNA, 22 bp, Artificial Sequence
  Synthetic oligonucleotide; CTA chr2 60539452 60539473 60539469 60539474 +
accctgctaagaacagcaaaag

SEQ ID NO: 207262 - DNA, 22 bp, Artificial Sequence
  Synthetic oligonucleotide; CTG chr2 60539458 60539479 60539475 60539480 +
ctaagaacagcaaaagcctttg

SEQ ID NO: 207263 - DNA, 22 bp, Artificial Sequence
  Synthetic oligonucleotide; CTA chr2 60539461 60539482 60539478 60539483 +
agaacagcaaaagcctttgctg

SEQ ID NO: 207264 - DNA, 22 bp, Artificial Sequence
  Synthetic oligonucleotide; CTT chr2 60539478 60539499 60539495 60539500 +
tgctgaaatgttttaaaaatgc

SEQ ID NO: 207265 - DNA, 22 bp, Artificial Sequence
  Synthetic oligonucleotide; TTT chr2 60539479 60539500 60539496 60539501 +
gctgaaatgttttaaaaatgca

SEQ ID NO: 207266 - DNA, 22 bp, Artificial Sequence
  Synthetic oligonucleotide; TTG chr2 60539480 60539501 60539497 60539502 +
ctgaaatgttttaaaaatgcat

SEQ ID NO: 207267 - DNA, 22 bp, Artificial Sequence
  Synthetic oligonucleotide; CTG chr2 60539483 60539504 60539500 60539505 +
aaatgttttaaaaatgcatagg

SEQ ID NO: 207268 - DNA, 22 bp, Artificial Sequence
  Synthetic oligonucleotide; TTT chr2 60539491 60539512 60539508 60539513 +
taaaaatgcatagggagtgcag

SEQ ID NO: 207269 - DNA, 22 bp, Artificial Sequence
  Synthetic oligonucleotide; TTT chr2 60539492 60539513 60539509 60539514 +
aaaaatgcatagggagtgcagc

SEQ ID NO: 207270 - DNA, 22 bp, Artificial Sequence
  Synthetic oligonucleotide; TTA chr2 60539493 60539514 60539510 60539515 +
aaaatgcatagggagtgcagct

SEQ ID NO: 207271 - DNA, 22 bp, Artificial Sequence
  Synthetic oligonucleotide; CTG chr2 60539516 60539537 60539533 60539538 +
gccagtaaaaagcagggagaca

SEQ ID NO: 207272 - DNA, 22 bp, Artificial Sequence
  Synthetic oligonucleotide; TTC chr2 60539543 60539564 60539560 60539565 +
caatgaacccaatatggaataa

SEQ ID NO: 207273 - DNA, 22 bp, Artificial Sequence
  Synthetic oligonucleotide; TTA chr2 60539569 60539590 60539586 60539591 +
cattttaaaactgattagaaat

SEQ ID NO: 207274 - DNA, 22 bp, Artificial Sequence
  Synthetic oligonucleotide; TTT chr2 60539574 60539595 60539591 60539596 +
taaaactgattagaaatacagt

SEQ ID NO: 207275 - DNA, 22 bp, Artificial Sequence
  Synthetic oligonucleotide; TTT chr2 60539575 60539596 60539592 60539597 +
aaaactgattagaaatacagtc

SEQ ID NO: 207276 - DNA, 22 bp, Artificial Sequence
  Synthetic oligonucleotide; TTA chr2 60539576 60539597 60539593 60539598 +
aaactgattagaaatacagtct

SEQ ID NO: 207277 - DNA, 22 bp, Artificial Sequence
  Synthetic oligonucleotide; CTG chr2 60539582 60539603 60539599 60539604 +
attagaaatacagtctgatgtt

SEQ ID NO: 207278 - DNA, 22 bp, Artificial Sequence
  Synthetic oligonucleotide; TTA chr2 60539586 60539607 60539603 60539608 +
gaaatacagtctgatgtttact

SEQ ID NO: 207279 - DNA, 22 bp, Artificial Sequence
  Synthetic oligonucleotide; CTG chr2 60539599 60539620 60539616 60539621 +
atgtttactggcttcaaattga

SEQ ID NO: 207280 - DNA, 22 bp, Artificial Sequence
  Synthetic oligonucleotide; TTT chr2 60539605 60539626 60539622 60539627 +
actggcttcaaattgagtttgg

SEQ ID NO: 207281 - DNA, 22 bp, Artificial Sequence
  Synthetic oligonucleotide; TTA chr2 60539606 60539627 60539623 60539628 +
ctggcttcaaattgagtttggc

SEQ ID NO: 207282 - DNA, 22 bp, Artificial Sequence
  Synthetic oligonucleotide; CTG chr2 60539609 60539630 60539626 60539631 +
gcttcaaattgagtttggcatc

SEQ ID NO: 207283 - DNA, 22 bp, Artificial Sequence
  Synthetic oligonucleotide; CTT chr2 60539613 60539634 60539630 60539635 +
caaattgagtttggcatcaagt

SEQ ID NO: 207284 - DNA, 22 bp, Artificial Sequence
  Synthetic oligonucleotide; TTC chr2 60539614 60539635 60539631 60539636 +
aaattgagtttggcatcaagta

SEQ ID NO: 207285 - DNA, 22 bp, Artificial Sequence
  Synthetic oligonucleotide; TTG chr2 60539620 60539641 60539637 60539642 +
agtttggcatcaagtatactgg

SEQ ID NO: 207286 - DNA, 22 bp, Artificial Sequence
  Synthetic oligonucleotide; TTT chr2 60539625 60539646 60539642 60539647 +
ggcatcaagtatactggcttta

SEQ ID NO: 207287 - DNA, 22 bp, Artificial Sequence
  Synthetic oligonucleotide; TTG chr2 60539626 60539647 60539643 60539648 +
gcatcaagtatactggctttaa

SEQ ID NO: 207288 - DNA, 22 bp, Artificial Sequence
  Synthetic oligonucleotide; CTG chr2 60539641 60539662 60539658 60539663 +
gctttaataatgctggcacttt

SEQ ID NO: 207289 - DNA, 22 bp, Artificial Sequence
  Synthetic oligonucleotide; CTT chr2 60539645 60539666 60539662 60539667 +
taataatgctggcacttttaaa

SEQ ID NO: 207290 - DNA, 22 bp, Artificial Sequence
  Synthetic oligonucleotide; TTT chr2 60539646 60539667 60539663 60539668 +
aataatgctggcacttttaaaa

SEQ ID NO: 207291 - DNA, 22 bp, Artificial Sequence
  Synthetic oligonucleotide; TTA chr2 60539647 60539668 60539664 60539669 +
ataatgctggcacttttaaaat

SEQ ID NO: 207292 - DNA, 22 bp, Artificial Sequence
  Synthetic oligonucleotide; CTG chr2 60539656 60539677 60539673 60539678 +
gcacttttaaaattattattat

SEQ ID NO: 207293 - DNA, 22 bp, Artificial Sequence
  Synthetic oligonucleotide; CTT chr2 60539662 60539683 60539679 60539684 +
ttaaaattattattattttaaa

SEQ ID NO: 207294 - DNA, 22 bp, Artificial Sequence
  Synthetic oligonucleotide; TTT chr2 60539663 60539684 60539680 60539685 +
taaaattattattattttaaat

SEQ ID NO: 207295 - DNA, 22 bp, Artificial Sequence
  Synthetic oligonucleotide; TTT chr2 60539664 60539685 60539681 60539686 +
aaaattattattattttaaatc

SEQ ID NO: 207296 - DNA, 22 bp, Artificial Sequence
  Synthetic oligonucleotide; TTA chr2 60539665 60539686 60539682 60539687 +
aaattattattattttaaatct

SEQ ID NO: 207297 - DNA, 22 bp, Artificial Sequence
  Synthetic oligonucleotide; TTA chr2 60539671 60539692 60539688 60539693 +
ttattattttaaatctgccttt

SEQ ID NO: 207298 - DNA, 22 bp, Artificial Sequence
  Synthetic oligonucleotide; TTA chr2 60539674 60539695 60539691 60539696 +
ttattttaaatctgcctttggt

SEQ ID NO: 207299 - DNA, 22 bp, Artificial Sequence
  Synthetic oligonucleotide; TTA chr2 60539677 60539698 60539694 60539699 +
ttttaaatctgcctttggtctc

SEQ ID NO: 207300 - DNA, 22 bp, Artificial Sequence
  Synthetic oligonucleotide; TTT chr2 60539680 60539701 60539697 60539702 +
taaatctgcctttggtctctag

SEQ ID NO: 207301 - DNA, 22 bp, Artificial Sequence
  Synthetic oligonucleotide; TTT chr2 60539681 60539702 60539698 60539703 +
aaatctgcctttggtctctagg

SEQ ID NO: 207302 - DNA, 22 bp, Artificial Sequence
  Synthetic oligonucleotide; TTA chr2 60539682 60539703 60539699 60539704 +
aatctgcctttggtctctagga

SEQ ID NO: 207303 - DNA, 22 bp, Artificial Sequence
  Synthetic oligonucleotide; CTG chr2 60539688 60539709 60539705 60539710 +
cctttggtctctaggagcacat

SEQ ID NO: 207304 - DNA, 22 bp, Artificial Sequence
  Synthetic oligonucleotide; CTT chr2 60539692 60539713 60539709 60539714 +
tggtctctaggagcacatgtag

SEQ ID NO: 207305 - DNA, 22 bp, Artificial Sequence
  Synthetic oligonucleotide; TTT chr2 60539693 60539714 60539710 60539715 +
ggtctctaggagcacatgtaga

SEQ ID NO: 207306 - DNA, 22 bp, Artificial Sequence
  Synthetic oligonucleotide; TTG chr2 60539694 60539715 60539711 60539716 +
gtctctaggagcacatgtagag

SEQ ID NO: 207307 - DNA, 22 bp, Artificial Sequence
  Synthetic oligonucleotide; CTC chr2 60539699 60539720 60539716 60539721 +
taggagcacatgtagagagcta

SEQ ID NO: 207308 - DNA, 22 bp, Artificial Sequence
  Synthetic oligonucleotide; CTA chr2 60539701 60539722 60539718 60539723 +
ggagcacatgtagagagctaaa

SEQ ID NO: 207309 - DNA, 22 bp, Artificial Sequence
  Synthetic oligonucleotide; CTA chr2 60539721 60539742 60539738 60539743 +
aagaattcttatttgtcaggtt

SEQ ID NO: 207310 - DNA, 22 bp, Artificial Sequence
  Synthetic oligonucleotide; TTC chr2 60539729 60539750 60539746 60539751 +
ttatttgtcaggttacatttcc

SEQ ID NO: 207311 - DNA, 22 bp, Artificial Sequence
  Synthetic oligonucleotide; CTT chr2 60539731 60539752 60539748 60539753 +
atttgtcaggttacatttcctg

SEQ ID NO: 207312 - DNA, 22 bp, Artificial Sequence
  Synthetic oligonucleotide; TTA chr2 60539732 60539753 60539749 60539754 +
tttgtcaggttacatttcctgg

SEQ ID NO: 207313 - DNA, 22 bp, Artificial Sequence
  Synthetic oligonucleotide; TTT chr2 60539735 60539756 60539752 60539757 +
gtcaggttacatttcctggaaa

SEQ ID NO: 207314 - DNA, 22 bp, Artificial Sequence
  Synthetic oligonucleotide; TTG chr2 60539736 60539757 60539753 60539758 +
tcaggttacatttcctggaaat

SEQ ID NO: 207315 - DNA, 22 bp, Artificial Sequence
  Synthetic oligonucleotide; TTA chr2 60539744 60539765 60539761 60539766 +
catttcctggaaattaagtttg

SEQ ID NO: 207316 - DNA, 22 bp, Artificial Sequence
  Synthetic oligonucleotide; TTT chr2 60539749 60539770 60539766 60539771 +
cctggaaattaagtttgtgaca

SEQ ID NO: 207317 - DNA, 22 bp, Artificial Sequence
  Synthetic oligonucleotide; TTC chr2 60539750 60539771 60539767 60539772 +
ctggaaattaagtttgtgacag

SEQ ID NO: 207318 - DNA, 22 bp, Artificial Sequence
  Synthetic oligonucleotide; CTG chr2 60539753 60539774 60539770 60539775 +
gaaattaagtttgtgacagaaa

SEQ ID NO: 207319 - DNA, 22 bp, Artificial Sequence
  Synthetic oligonucleotide; TTA chr2 60539760 60539781 60539777 60539782 +
agtttgtgacagaaaatgactc

SEQ ID NO: 207320 - DNA, 22 bp, Artificial Sequence
  Synthetic oligonucleotide; TTT chr2 60539765 60539786 60539782 60539787 +
gtgacagaaaatgactccagta

SEQ ID NO: 207321 - DNA, 22 bp, Artificial Sequence
  Synthetic oligonucleotide; TTG chr2 60539766 60539787 60539783 60539788 +
tgacagaaaatgactccagtag

SEQ ID NO: 207322 - DNA, 22 bp, Artificial Sequence
  Synthetic oligonucleotide; CTC chr2 60539782 60539803 60539799 60539804 +
cagtagcaataatatggttcgt

SEQ ID NO: 207323 - DNA, 22 bp, Artificial Sequence
  Synthetic oligonucleotide; TTC chr2 60539802 60539823 60539819 60539824 +
gtgctcaaattaattaggtcat

SEQ ID NO: 207324 - DNA, 22 bp, Artificial Sequence
  Synthetic oligonucleotide; CTC chr2 60539808 60539829 60539825 60539830 +
aaattaattaggtcatgttgta

SEQ ID NO: 207325 - DNA, 22 bp, Artificial Sequence
  Synthetic oligonucleotide; TTA chr2 60539814 60539835 60539831 60539836 +
attaggtcatgttgtaaaaact

SEQ ID NO: 207326 - DNA, 22 bp, Artificial Sequence
  Synthetic oligonucleotide; TTA chr2 60539818 60539839 60539835 60539840 +
ggtcatgttgtaaaaactacgt

SEQ ID NO: 207327 - DNA, 22 bp, Artificial Sequence
  Synthetic oligonucleotide; TTG chr2 60539828 60539849 60539845 60539850 +
taaaaactacgtggcaaattac

SEQ ID NO: 207328 - DNA, 22 bp, Artificial Sequence
  Synthetic oligonucleotide; CTA chr2 60539837 60539858 60539854 60539859 +
cgtggcaaattacaaaggtaaa

SEQ ID NO: 207329 - DNA, 22 bp, Artificial Sequence
  Synthetic oligonucleotide; TTA chr2 60539849 60539870 60539866 60539871 +
caaaggtaaatttactgatatt

SEQ ID NO: 207330 - DNA, 22 bp, Artificial Sequence
  Synthetic oligonucleotide; TTT chr2 60539862 60539883 60539879 60539884 +
actgatattggccagtgctcta

SEQ ID NO: 207331 - DNA, 22 bp, Artificial Sequence
  Synthetic oligonucleotide; TTA chr2 60539863 60539884 60539880 60539885 +
ctgatattggccagtgctctat

SEQ ID NO: 207332 - DNA, 22 bp, Artificial Sequence
  Synthetic oligonucleotide; CTG chr2 60539866 60539887 60539883 60539888 +
atattggccagtgctctatacc

SEQ ID NO: 207333 - DNA, 22 bp, Artificial Sequence
  Synthetic oligonucleotide; TTG chr2 60539872 60539893 60539889 60539894 +
gccagtgctctataccctggtc

SEQ ID NO: 207334 - DNA, 22 bp, Artificial Sequence
  Synthetic oligonucleotide; CTC chr2 60539882 60539903 60539899 60539904 +
tataccctggtcgtaaagggga

SEQ ID NO: 207335 - DNA, 22 bp, Artificial Sequence
  Synthetic oligonucleotide; CTA chr2 60539884 60539905 60539901 60539906 +
taccctggtcgtaaaggggaga

SEQ ID NO: 207336 - DNA, 22 bp, Artificial Sequence
  Synthetic oligonucleotide; CTG chr2 60539891 60539912 60539908 60539913 +
gtcgtaaaggggagaagctgtt

SEQ ID NO: 207337 - DNA, 22 bp, Artificial Sequence
  Synthetic oligonucleotide; CTG chr2 60539911 60539932 60539928 60539933 +
tttaaggatgcccatttaccta

SEQ ID NO: 207338 - DNA, 22 bp, Artificial Sequence
  Synthetic oligonucleotide; TTT chr2 60539914 60539935 60539931 60539936 +
aaggatgcccatttacctaggt

SEQ ID NO: 207339 - DNA, 22 bp, Artificial Sequence
  Synthetic oligonucleotide; TTA chr2 60539915 60539936 60539932 60539937 +
aggatgcccatttacctaggta

SEQ ID NO: 207340 - DNA, 22 bp, Artificial Sequence
  Synthetic oligonucleotide; TTT chr2 60539928 60539949 60539945 60539950 +
acctaggtaggagaaaagaacc

SEQ ID NO: 207341 - DNA, 22 bp, Artificial Sequence
  Synthetic oligonucleotide; TTA chr2 60539929 60539950 60539946 60539951 +
cctaggtaggagaaaagaacca

SEQ ID NO: 207342 - DNA, 22 bp, Artificial Sequence
  Synthetic oligonucleotide; CTA chr2 60539933 60539954 60539950 60539955 +
ggtaggagaaaagaaccaagga

SEQ ID NO: 207343 - DNA, 22 bp, Artificial Sequence
  Synthetic oligonucleotide; TTT chr2 60539978 60539999 60539995 60540000 +
cctatttgtattacaaataaaa

SEQ ID NO: 207344 - DNA, 22 bp, Artificial Sequence
  Synthetic oligonucleotide; TTC chr2 60539979 60540000 60539996 60540001 +
ctatttgtattacaaataaaaa

SEQ ID NO: 207345 - DNA, 22 bp, Artificial Sequence
  Synthetic oligonucleotide; CTA chr2 60539982 60540003 60539999 60540004 +
tttgtattacaaataaaaatag

SEQ ID NO: 207346 - DNA, 22 bp, Artificial Sequence
  Synthetic oligonucleotide; TTT chr2 60539985 60540006 60540002 60540007 +
gtattacaaataaaaatagtag

SEQ ID NO: 207347 - DNA, 22 bp, Artificial Sequence
  Synthetic oligonucleotide; TTG chr2 60539986 60540007 60540003 60540008 +
tattacaaataaaaatagtagt

SEQ ID NO: 207348 - DNA, 22 bp, Artificial Sequence
  Synthetic oligonucleotide; TTA chr2 60539991 60540012 60540008 60540013 +
caaataaaaatagtagtcatta

SEQ ID NO: 207349 - DNA, 22 bp, Artificial Sequence
  Synthetic oligonucleotide; TTA chr2 60540013 60540034 60540030 60540035 +
tccattaaattatatagtctga

SEQ ID NO: 207350 - DNA, 22 bp, Artificial Sequence
  Synthetic oligonucleotide; TTA chr2 60540020 60540041 60540037 60540042 +
aattatatagtctgaacatatt

SEQ ID NO: 207351 - DNA, 22 bp, Artificial Sequence
  Synthetic oligonucleotide; TTA chr2 60540025 60540046 60540042 60540047 +
tatagtctgaacatattttatg

SEQ ID NO: 207352 - DNA, 22 bp, Artificial Sequence
  Synthetic oligonucleotide; CTG chr2 60540034 60540055 60540051 60540056 +
aacatattttatgaacttcatt

SEQ ID NO: 207353 - DNA, 22 bp, Artificial Sequence
  Synthetic oligonucleotide; TTT chr2 60540043 60540064 60540060 60540065 +
tatgaacttcattaatgtcatc

SEQ ID NO: 207354 - DNA, 22 bp, Artificial Sequence
  Synthetic oligonucleotide; TTT chr2 60540044 60540065 60540061 60540066 +
atgaacttcattaatgtcatcc

SEQ ID NO: 207355 - DNA, 22 bp, Artificial Sequence
  Synthetic oligonucleotide; TTA chr2 60540045 60540066 60540062 60540067 +
tgaacttcattaatgtcatcca

SEQ ID NO: 207356 - DNA, 22 bp, Artificial Sequence
  Synthetic oligonucleotide; CTT chr2 60540052 60540073 60540069 60540074 +
cattaatgtcatccaaattgat

SEQ ID NO: 207357 - DNA, 22 bp, Artificial Sequence
  Synthetic oligonucleotide; TTC chr2 60540053 60540074 60540070 60540075 +
attaatgtcatccaaattgata

SEQ ID NO: 207358 - DNA, 22 bp, Artificial Sequence
  Synthetic oligonucleotide; TTA chr2 60540057 60540078 60540074 60540079 +
atgtcatccaaattgatacata

SEQ ID NO: 207359 - DNA, 22 bp, Artificial Sequence
  Synthetic oligonucleotide; TTG chr2 60540072 60540093 60540089 60540094 +
atacataacataaaaacctgct

SEQ ID NO: 207360 - DNA, 22 bp, Artificial Sequence
  Synthetic oligonucleotide; CTG chr2 60540092 60540113 60540109 60540114 +
cttgatttgaaataatgttaaa

SEQ ID NO: 207361 - DNA, 22 bp, Artificial Sequence
  Synthetic oligonucleotide; CTT chr2 60540095 60540116 60540112 60540117 +
gatttgaaataatgttaaaagt

SEQ ID NO: 207362 - DNA, 22 bp, Artificial Sequence
  Synthetic oligonucleotide; TTG chr2 60540096 60540117 60540113 60540118 +
atttgaaataatgttaaaagtg

SEQ ID NO: 207363 - DNA, 22 bp, Artificial Sequence
  Synthetic oligonucleotide; TTT chr2 60540100 60540121 60540117 60540122 +
gaaataatgttaaaagtgggct

SEQ ID NO: 207364 - DNA, 22 bp, Artificial Sequence
  Synthetic oligonucleotide; TTG chr2 60540101 60540122 60540118 60540123 +
aaataatgttaaaagtgggctc

SEQ ID NO: 207365 - DNA, 22 bp, Artificial Sequence
  Synthetic oligonucleotide; TTA chr2 60540112 60540133 60540129 60540134 +
aaagtgggctctaagttagaat

SEQ ID NO: 207366 - DNA, 22 bp, Artificial Sequence
  Synthetic oligonucleotide; CTC chr2 60540123 60540144 60540140 60540145 +
taagttagaatcttttttttta

SEQ ID NO: 207367 - DNA, 22 bp, Artificial Sequence
  Synthetic oligonucleotide; CTA chr2 60540125 60540146 60540142 60540147 +
agttagaatctttttttttaat

SEQ ID NO: 207368 - DNA, 22 bp, Artificial Sequence
  Synthetic oligonucleotide; TTA chr2 60540130 60540151 60540147 60540152 +
gaatctttttttttaatccttg

SEQ ID NO: 207369 - DNA, 22 bp, Artificial Sequence
  Synthetic oligonucleotide; CTT chr2 60540137 60540158 60540154 60540159 +
tttttttaatccttgaaataac

SEQ ID NO: 207370 - DNA, 22 bp, Artificial Sequence
  Synthetic oligonucleotide; TTT chr2 60540138 60540159 60540155 60540160 +
ttttttaatccttgaaataaca

SEQ ID NO: 207371 - DNA, 22 bp, Artificial Sequence
  Synthetic oligonucleotide; TTT chr2 60540139 60540160 60540156 60540161 +
tttttaatccttgaaataacaa

SEQ ID NO: 207372 - DNA, 22 bp, Artificial Sequence
  Synthetic oligonucleotide; TTT chr2 60540140 60540161 60540157 60540162 +
ttttaatccttgaaataacaac

SEQ ID NO: 207373 - DNA, 22 bp, Artificial Sequence
  Synthetic oligonucleotide; TTT chr2 60540141 60540162 60540158 60540163 +
tttaatccttgaaataacaaca

SEQ ID NO: 207374 - DNA, 22 bp, Artificial Sequence
  Synthetic oligonucleotide; TTT chr2 60540142 60540163 60540159 60540164 +
ttaatccttgaaataacaacac

SEQ ID NO: 207375 - DNA, 22 bp, Artificial Sequence
  Synthetic oligonucleotide; TTT chr2 60540143 60540164 60540160 60540165 +
taatccttgaaataacaacact

SEQ ID NO: 207376 - DNA, 22 bp, Artificial Sequence
  Synthetic oligonucleotide; TTT chr2 60540144 60540165 60540161 60540166 +
aatccttgaaataacaacactg

SEQ ID NO: 207377 - DNA, 22 bp, Artificial Sequence
  Synthetic oligonucleotide; TTA chr2 60540145 60540166 60540162 60540167 +
atccttgaaataacaacactgc

SEQ ID NO: 207378 - DNA, 22 bp, Artificial Sequence
  Synthetic oligonucleotide; CTT chr2 60540151 60540172 60540168 60540173 +
gaaataacaacactgctgacat

SEQ ID NO: 207379 - DNA, 22 bp, Artificial Sequence
  Synthetic oligonucleotide; TTG chr2 60540152 60540173 60540169 60540174 +
aaataacaacactgctgacata

SEQ ID NO: 207380 - DNA, 22 bp, Artificial Sequence
  Synthetic oligonucleotide; CTG chr2 60540166 60540187 60540183 60540188 +
ctgacatagccatgacccaaat

SEQ ID NO: 207381 - DNA, 22 bp, Artificial Sequence
  Synthetic oligonucleotide; CTG chr2 60540169 60540190 60540186 60540191 +
acatagccatgacccaaatgaa

SEQ ID NO: 207382 - DNA, 22 bp, Artificial Sequence
  Synthetic oligonucleotide; CTG chr2 60540196 60540217 60540213 60540218 +
aacaagcagaaaggtactaaag

SEQ ID NO: 207383 - DNA, 22 bp, Artificial Sequence
  Synthetic oligonucleotide; CTA chr2 60540215 60540236 60540232 60540237 +
aagatgcttggtgattaaatct

SEQ ID NO: 207384 - DNA, 22 bp, Artificial Sequence
  Synthetic oligonucleotide; CTT chr2 60540224 60540245 60540241 60540246 +
ggtgattaaatctcatgctaaa

SEQ ID NO: 207385 - DNA, 22 bp, Artificial Sequence
  Synthetic oligonucleotide; TTG chr2 60540225 60540246 60540242 60540247 +
gtgattaaatctcatgctaaaa

SEQ ID NO: 207386 - DNA, 22 bp, Artificial Sequence
  Synthetic oligonucleotide; TTA chr2 60540232 60540253 60540249 60540254 +
aatctcatgctaaaaaagtggc

SEQ ID NO: 207387 - DNA, 22 bp, Artificial Sequence
  Synthetic oligonucleotide; CTC chr2 60540238 60540259 60540255 60540260 +
atgctaaaaaagtggcaaggtg

SEQ ID NO: 207388 - DNA, 22 bp, Artificial Sequence
  Synthetic oligonucleotide; CTA chr2 60540244 60540265 60540261 60540266 +
aaaaagtggcaaggtgccaggc

SEQ ID NO: 207389 - DNA, 22 bp, Artificial Sequence
  Synthetic oligonucleotide; CTG chr2 60540268 60540289 60540285 60540290 +
ggtccagcttgatgctaagtgc

SEQ ID NO: 207390 - DNA, 22 bp, Artificial Sequence
  Synthetic oligonucleotide; CTT chr2 60540278 60540299 60540295 60540300 +
gatgctaagtgctttttattgc

SEQ ID NO: 207391 - DNA, 22 bp, Artificial Sequence
  Synthetic oligonucleotide; TTG chr2 60540279 60540300 60540296 60540301 +
atgctaagtgctttttattgca

SEQ ID NO: 207392 - DNA, 22 bp, Artificial Sequence
  Synthetic oligonucleotide; CTA chr2 60540285 60540306 60540302 60540307 +
agtgctttttattgcacaaagc

SEQ ID NO: 207393 - DNA, 22 bp, Artificial Sequence
  Synthetic oligonucleotide; CTT chr2 60540292 60540313 60540309 60540314 +
tttattgcacaaagctggtact

SEQ ID NO: 207394 - DNA, 22 bp, Artificial Sequence
  Synthetic oligonucleotide; TTT chr2 60540293 60540314 60540310 60540315 +
ttattgcacaaagctggtacta

SEQ ID NO: 207395 - DNA, 22 bp, Artificial Sequence
  Synthetic oligonucleotide; TTT chr2 60540294 60540315 60540311 60540316 +
tattgcacaaagctggtactac

SEQ ID NO: 207396 - DNA, 22 bp, Artificial Sequence
  Synthetic oligonucleotide; TTT chr2 60540295 60540316 60540312 60540317 +
attgcacaaagctggtactact

SEQ ID NO: 207397 - DNA, 22 bp, Artificial Sequence
  Synthetic oligonucleotide; TTA chr2 60540296 60540317 60540313 60540318 +
ttgcacaaagctggtactactg

SEQ ID NO: 207398 - DNA, 22 bp, Artificial Sequence
  Synthetic oligonucleotide; TTG chr2 60540299 60540320 60540316 60540321 +
cacaaagctggtactactgtat

SEQ ID NO: 207399 - DNA, 22 bp, Artificial Sequence
  Synthetic oligonucleotide; CTG chr2 60540309 60540330 60540326 60540331 +
gtactactgtatgtaaaaacag

SEQ ID NO: 207400 - DNA, 22 bp, Artificial Sequence
  Synthetic oligonucleotide; CTA chr2 60540315 60540336 60540332 60540337 +
ctgtatgtaaaaacagacttgg

SEQ ID NO: 207401 - DNA, 22 bp, Artificial Sequence
  Synthetic oligonucleotide; CTG chr2 60540318 60540339 60540335 60540340 +
tatgtaaaaacagacttgggct

SEQ ID NO: 207402 - DNA, 22 bp, Artificial Sequence
  Synthetic oligonucleotide; CTT chr2 60540335 60540356 60540352 60540357 +
gggcttggggtaaattttgtca

SEQ ID NO: 207403 - DNA, 22 bp, Artificial Sequence
  Synthetic oligonucleotide; TTG chr2 60540336 60540357 60540353 60540358 +
ggcttggggtaaattttgtcaa

SEQ ID NO: 207404 - DNA, 22 bp, Artificial Sequence
  Synthetic oligonucleotide; CTT chr2 60540341 60540362 60540358 60540363 +
ggggtaaattttgtcaaatgac

SEQ ID NO: 207405 - DNA, 22 bp, Artificial Sequence
  Synthetic oligonucleotide; TTG chr2 60540342 60540363 60540359 60540364 +
gggtaaattttgtcaaatgact

SEQ ID NO: 207406 - DNA, 22 bp, Artificial Sequence
  Synthetic oligonucleotide; TTT chr2 60540352 60540373 60540369 60540374 +
tgtcaaatgacttctttgtgca

SEQ ID NO: 207407 - DNA, 22 bp, Artificial Sequence
  Synthetic oligonucleotide; TTT chr2 60540353 60540374 60540370 60540375 +
gtcaaatgacttctttgtgcaa

SEQ ID NO: 207408 - DNA, 22 bp, Artificial Sequence
  Synthetic oligonucleotide; TTG chr2 60540354 60540375 60540371 60540376 +
tcaaatgacttctttgtgcaat

SEQ ID NO: 207409 - DNA, 22 bp, Artificial Sequence
  Synthetic oligonucleotide; CTT chr2 60540365 60540386 60540382 60540387 +
ctttgtgcaataaagggtgtga

SEQ ID NO: 207410 - DNA, 22 bp, Artificial Sequence
  Synthetic oligonucleotide; TTC chr2 60540366 60540387 60540383 60540388 +
tttgtgcaataaagggtgtgaa

SEQ ID NO: 207411 - DNA, 22 bp, Artificial Sequence
  Synthetic oligonucleotide; CTT chr2 60540368 60540389 60540385 60540390 +
tgtgcaataaagggtgtgaaca

SEQ ID NO: 207412 - DNA, 22 bp, Artificial Sequence
  Synthetic oligonucleotide; TTT chr2 60540369 60540390 60540386 60540391 +
gtgcaataaagggtgtgaacag

SEQ ID NO: 207413 - DNA, 22 bp, Artificial Sequence
  Synthetic oligonucleotide; TTG chr2 60540370 60540391 60540387 60540392 +
tgcaataaagggtgtgaacaga

SEQ ID NO: 207414 - DNA, 22 bp, Artificial Sequence
  Synthetic oligonucleotide; TTA chr2 60540409 60540430 60540426 60540431 +
aattaacatccagtgacgcaat

SEQ ID NO: 207415 - DNA, 22 bp, Artificial Sequence
  Synthetic oligonucleotide; TTA chr2 60540414 60540435 60540431 60540436 +
acatccagtgacgcaatcttgg

SEQ ID NO: 207416 - DNA, 22 bp, Artificial Sequence
  Synthetic oligonucleotide; CTT chr2 60540434 60540455 60540451 60540456 +
ggtgcatctccctagctgtgct

SEQ ID NO: 207417 - DNA, 22 bp, Artificial Sequence
  Synthetic oligonucleotide; TTG chr2 60540435 60540456 60540452 60540457 +
gtgcatctccctagctgtgctt

SEQ ID NO: 207418 - DNA, 22 bp, Artificial Sequence
  Synthetic oligonucleotide; CTC chr2 60540444 60540465 60540461 60540466 +
cctagctgtgctttctacttcg

SEQ ID NO: 207419 - DNA, 22 bp, Artificial Sequence
  Synthetic oligonucleotide; CTA chr2 60540448 60540469 60540465 60540470 +
gctgtgctttctacttcggtta

SEQ ID NO: 207420 - DNA, 22 bp, Artificial Sequence
  Synthetic oligonucleotide; CTG chr2 60540452 60540473 60540469 60540474 +
tgctttctacttcggttaaatt

SEQ ID NO: 207421 - DNA, 22 bp, Artificial Sequence
  Synthetic oligonucleotide; CTT chr2 60540457 60540478 60540474 60540479 +
tctacttcggttaaatttaata

SEQ ID NO: 207422 - DNA, 22 bp, Artificial Sequence
  Synthetic oligonucleotide; TTT chr2 60540458 60540479 60540475 60540480 +
ctacttcggttaaatttaatat

SEQ ID NO: 207423 - DNA, 22 bp, Artificial Sequence
  Synthetic oligonucleotide; TTC chr2 60540459 60540480 60540476 60540481 +
tacttcggttaaatttaatatt

SEQ ID NO: 207424 - DNA, 22 bp, Artificial Sequence
  Synthetic oligonucleotide; CTA chr2 60540461 60540482 60540478 60540483 +
cttcggttaaatttaatatttc

SEQ ID NO: 207425 - DNA, 22 bp, Artificial Sequence
  Synthetic oligonucleotide; CTT chr2 60540464 60540485 60540481 60540486 +
cggttaaatttaatatttcccc

SEQ ID NO: 207426 - DNA, 22 bp, Artificial Sequence
  Synthetic oligonucleotide; TTC chr2 60540465 60540486 60540482 60540487 +
ggttaaatttaatatttccccc

SEQ ID NO: 207427 - DNA, 22 bp, Artificial Sequence
  Synthetic oligonucleotide; TTA chr2 60540470 60540491 60540487 60540492 +
aatttaatatttccccccaaag

SEQ ID NO: 207428 - DNA, 22 bp, Artificial Sequence
  Synthetic oligonucleotide; TTT chr2 60540475 60540496 60540492 60540497 +
aatatttccccccaaaggaaag

SEQ ID NO: 207429 - DNA, 22 bp, Artificial Sequence
  Synthetic oligonucleotide; TTA chr2 60540476 60540497 60540493 60540498 +
atatttccccccaaaggaaagc

SEQ ID NO: 207430 - DNA, 22 bp, Artificial Sequence
  Synthetic oligonucleotide; TTT chr2 60540482 60540503 60540499 60540504 +
ccccccaaaggaaagccaaaat

SEQ ID NO: 207431 - DNA, 22 bp, Artificial Sequence
  Synthetic oligonucleotide; TTC chr2 60540483 60540504 60540500 60540505 +
cccccaaaggaaagccaaaatt

SEQ ID NO: 207432 - DNA, 22 bp, Artificial Sequence
  Synthetic oligonucleotide; TTT chr2 60540506 60540527 60540523 60540528 +
gtttcctttcttactgaccagc

SEQ ID NO: 207433 - DNA, 22 bp, Artificial Sequence
  Synthetic oligonucleotide; TTG chr2 60540507 60540528 60540524 60540529 +
tttcctttcttactgaccagca

SEQ ID NO: 207434 - DNA, 22 bp, Artificial Sequence
  Synthetic oligonucleotide; TTT chr2 60540510 60540531 60540527 60540532 +
cctttcttactgaccagcacgc

SEQ ID NO: 207435 - DNA, 22 bp, Artificial Sequence
  Synthetic oligonucleotide; TTC chr2 60540511 60540532 60540528 60540533 +
ctttcttactgaccagcacgca

SEQ ID NO: 207436 - DNA, 22 bp, Artificial Sequence
  Synthetic oligonucleotide; CTT chr2 60540514 60540535 60540531 60540536 +
tcttactgaccagcacgcaaag

SEQ ID NO: 207437 - DNA, 22 bp, Artificial Sequence
  Synthetic oligonucleotide; TTT chr2 60540515 60540536 60540532 60540537 +
cttactgaccagcacgcaaagc

SEQ ID NO: 207438 - DNA, 22 bp, Artificial Sequence
  Synthetic oligonucleotide; TTC chr2 60540516 60540537 60540533 60540538 +
ttactgaccagcacgcaaagcc

SEQ ID NO: 207439 - DNA, 22 bp, Artificial Sequence
  Synthetic oligonucleotide; CTT chr2 60540518 60540539 60540535 60540540 +
actgaccagcacgcaaagccac

SEQ ID NO: 207440 - DNA, 22 bp, Artificial Sequence
  Synthetic oligonucleotide; TTA chr2 60540519 60540540 60540536 60540541 +
ctgaccagcacgcaaagccacc

SEQ ID NO: 207441 - DNA, 22 bp, Artificial Sequence
  Synthetic oligonucleotide; CTG chr2 60540522 60540543 60540539 60540544 +
accagcacgcaaagccaccatt

SEQ ID NO: 207442 - DNA, 22 bp, Artificial Sequence
  Synthetic oligonucleotide; TTC chr2 60540545 60540566 60540562 60540567 +
acctattctcctttattaaaca

SEQ ID NO: 207443 - DNA, 22 bp, Artificial Sequence
  Synthetic oligonucleotide; CTA chr2 60540550 60540571 60540567 60540572 +
ttctcctttattaaacattttc

SEQ ID NO: 207444 - DNA, 22 bp, Artificial Sequence
  Synthetic oligonucleotide; TTC chr2 60540553 60540574 60540570 60540575 +
tcctttattaaacattttcatt

SEQ ID NO: 207445 - DNA, 22 bp, Artificial Sequence
  Synthetic oligonucleotide; CTC chr2 60540555 60540576 60540572 60540577 +
ctttattaaacattttcattga

SEQ ID NO: 207446 - DNA, 22 bp, Artificial Sequence
  Synthetic oligonucleotide; CTT chr2 60540558 60540579 60540575 60540580 +
tattaaacattttcattgagaa

SEQ ID NO: 207447 - DNA, 22 bp, Artificial Sequence
  Synthetic oligonucleotide; TTT chr2 60540559 60540580 60540576 60540581 +
attaaacattttcattgagaaa

SEQ ID NO: 207448 - DNA, 22 bp, Artificial Sequence
  Synthetic oligonucleotide; TTA chr2 60540560 60540581 60540577 60540582 +
ttaaacattttcattgagaaat

SEQ ID NO: 207449 - DNA, 22 bp, Artificial Sequence
  Synthetic oligonucleotide; TTA chr2 60540563 60540584 60540580 60540585 +
aacattttcattgagaaatcac

SEQ ID NO: 207450 - DNA, 22 bp, Artificial Sequence
  Synthetic oligonucleotide; TTT chr2 60540570 60540591 60540587 60540592 +
tcattgagaaatcacaaaaatc

SEQ ID NO: 207451 - DNA, 22 bp, Artificial Sequence
  Synthetic oligonucleotide; TTT chr2 60540571 60540592 60540588 60540593 +
cattgagaaatcacaaaaatct

SEQ ID NO: 207452 - DNA, 22 bp, Artificial Sequence
  Synthetic oligonucleotide; TTC chr2 60540572 60540593 60540589 60540594 +
attgagaaatcacaaaaatcta

SEQ ID NO: 207453 - DNA, 22 bp, Artificial Sequence
  Synthetic oligonucleotide; TTG chr2 60540576 60540597 60540593 60540598 +
agaaatcacaaaaatctaaaaa

SEQ ID NO: 207454 - DNA, 22 bp, Artificial Sequence
  Synthetic oligonucleotide; CTA chr2 60540594 60540615 60540611 60540616 +
aaaaatgtttccctaggatttg

SEQ ID NO: 207455 - DNA, 22 bp, Artificial Sequence
  Synthetic oligonucleotide; TTT chr2 60540604 60540625 60540621 60540626 +
ccctaggatttgcatgtttttt

SEQ ID NO: 207456 - DNA, 22 bp, Artificial Sequence
  Synthetic oligonucleotide; TTC chr2 60540605 60540626 60540622 60540627 +
cctaggatttgcatgtttttta

SEQ ID NO: 207457 - DNA, 22 bp, Artificial Sequence
  Synthetic oligonucleotide; CTA chr2 60540609 60540630 60540626 60540631 +
ggatttgcatgttttttatgta

SEQ ID NO: 207458 - DNA, 22 bp, Artificial Sequence
  Synthetic oligonucleotide; TTT chr2 60540615 60540636 60540632 60540637 +
gcatgttttttatgtaccccaa

SEQ ID NO: 207459 - DNA, 22 bp, Artificial Sequence
  Synthetic oligonucleotide; TTG chr2 60540616 60540637 60540633 60540638 +
catgttttttatgtaccccaat

SEQ ID NO: 207460 - DNA, 22 bp, Artificial Sequence
  Synthetic oligonucleotide; TTT chr2 60540623 60540644 60540640 60540645 +
tttatgtaccccaatttagtac

SEQ ID NO: 207461 - DNA, 22 bp, Artificial Sequence
  Synthetic oligonucleotide; TTT chr2 60540624 60540645 60540641 60540646 +
ttatgtaccccaatttagtact

SEQ ID NO: 207462 - DNA, 22 bp, Artificial Sequence
  Synthetic oligonucleotide; TTT chr2 60540625 60540646 60540642 60540647 +
tatgtaccccaatttagtactc

SEQ ID NO: 207463 - DNA, 22 bp, Artificial Sequence
  Synthetic oligonucleotide; TTT chr2 60540626 60540647 60540643 60540648 +
atgtaccccaatttagtactcc

SEQ ID NO: 207464 - DNA, 22 bp, Artificial Sequence
  Synthetic oligonucleotide; TTA chr2 60540627 60540648 60540644 60540649 +
tgtaccccaatttagtactccc

SEQ ID NO: 207465 - DNA, 22 bp, Artificial Sequence
  Synthetic oligonucleotide; TTT chr2 60540640 60540661 60540657 60540662 +
agtactcccacattagccaaac

SEQ ID NO: 207466 - DNA, 22 bp, Artificial Sequence
  Synthetic oligonucleotide; TTA chr2 60540641 60540662 60540658 60540663 +
gtactcccacattagccaaact

SEQ ID NO: 207467 - DNA, 22 bp, Artificial Sequence
  Synthetic oligonucleotide; CTC chr2 60540647 60540668 60540664 60540669 +
ccacattagccaaactacatgg

SEQ ID NO: 207468 - DNA, 22 bp, Artificial Sequence
  Synthetic oligonucleotide; TTA chr2 60540655 60540676 60540672 60540677 +
gccaaactacatggaagctgca

SEQ ID NO: 207469 - DNA, 22 bp, Artificial Sequence
  Synthetic oligonucleotide; CTA chr2 60540664 60540685 60540681 60540686 +
catggaagctgcagtgtgaaat

SEQ ID NO: 207470 - DNA, 22 bp, Artificial Sequence
  Synthetic oligonucleotide; CTG chr2 60540675 60540696 60540692 60540697 +
cagtgtgaaattaatgattttc

SEQ ID NO: 207471 - DNA, 22 bp, Artificial Sequence
  Synthetic oligonucleotide; TTA chr2 60540688 60540709 60540705 60540710 +
atgattttccaggactctaaaa

SEQ ID NO: 207472 - DNA, 22 bp, Artificial Sequence
  Synthetic oligonucleotide; TTT chr2 60540695 60540716 60540712 60540717 +
tccaggactctaaaagatgcca

SEQ ID NO: 207473 - DNA, 22 bp, Artificial Sequence
  Synthetic oligonucleotide; TTT chr2 60540696 60540717 60540713 60540718 +
ccaggactctaaaagatgccat

SEQ ID NO: 207474 - DNA, 22 bp, Artificial Sequence
  Synthetic oligonucleotide; TTC chr2 60540697 60540718 60540714 60540719 +
caggactctaaaagatgccatt

SEQ ID NO: 207475 - DNA, 22 bp, Artificial Sequence
  Synthetic oligonucleotide; CTC chr2 60540705 60540726 60540722 60540727 +
taaaagatgccattaataagca

SEQ ID NO: 207476 - DNA, 22 bp, Artificial Sequence
  Synthetic oligonucleotide; CTA chr2 60540707 60540728 60540724 60540729 +
aaagatgccattaataagcatc

SEQ ID NO: 207477 - DNA, 22 bp, Artificial Sequence
  Synthetic oligonucleotide; TTA chr2 60540720 60540741 60540737 60540742 +
ataagcatccaactcgcctcct

SEQ ID NO: 207478 - DNA, 22 bp, Artificial Sequence
  Synthetic oligonucleotide; CTC chr2 60540735 60540756 60540752 60540757 +
gcctcctccctgagctgaaggt

SEQ ID NO: 207479 - DNA, 22 bp, Artificial Sequence
  Synthetic oligonucleotide; CTC chr2 60540740 60540761 60540757 60540762 +
ctccctgagctgaaggttgcct

SEQ ID NO: 207480 - DNA, 22 bp, Artificial Sequence
  Synthetic oligonucleotide; CTC chr2 60540743 60540764 60540760 60540765 +
cctgagctgaaggttgcctgtc

SEQ ID NO: 207481 - DNA, 22 bp, Artificial Sequence
  Synthetic oligonucleotide; CTG chr2 60540747 60540768 60540764 60540769 +
agctgaaggttgcctgtcctga

SEQ ID NO: 207482 - DNA, 22 bp, Artificial Sequence
  Synthetic oligonucleotide; CTG chr2 60540752 60540773 60540769 60540774 +
aaggttgcctgtcctgaccctg

SEQ ID NO: 207483 - DNA, 22 bp, Artificial Sequence
  Synthetic oligonucleotide; TTG chr2 60540759 60540780 60540776 60540781 +
cctgtcctgaccctgcctgcac

SEQ ID NO: 207484 - DNA, 22 bp, Artificial Sequence
  Synthetic oligonucleotide; CTG chr2 60540763 60540784 60540780 60540785 +
tcctgaccctgcctgcacgttt

SEQ ID NO: 207485 - DNA, 22 bp, Artificial Sequence
  Synthetic oligonucleotide; CTG chr2 60540768 60540789 60540785 60540790 +
accctgcctgcacgtttctaca

SEQ ID NO: 207486 - DNA, 22 bp, Artificial Sequence
  Synthetic oligonucleotide; CTG chr2 60540774 60540795 60540791 60540796 +
cctgcacgtttctacacccagt

SEQ ID NO: 207487 - DNA, 22 bp, Artificial Sequence
  Synthetic oligonucleotide; CTG chr2 60540778 60540799 60540795 60540800 +
cacgtttctacacccagttgca

SEQ ID NO: 207488 - DNA, 22 bp, Artificial Sequence
  Synthetic oligonucleotide; TTT chr2 60540785 60540806 60540802 60540807 +
ctacacccagttgcattttcca

SEQ ID NO: 207489 - DNA, 22 bp, Artificial Sequence
  Synthetic oligonucleotide; TTC chr2 60540786 60540807 60540803 60540808 +
tacacccagttgcattttccag

SEQ ID NO: 207490 - DNA, 22 bp, Artificial Sequence
  Synthetic oligonucleotide; CTA chr2 60540788 60540809 60540805 60540810 +
cacccagttgcattttccagcc

SEQ ID NO: 207491 - DNA, 22 bp, Artificial Sequence
  Synthetic oligonucleotide; TTG chr2 60540798 60540819 60540815 60540820 +
cattttccagcccatgtgcagc

SEQ ID NO: 207492 - DNA, 22 bp, Artificial Sequence
  Synthetic oligonucleotide; TTT chr2 60540803 60540824 60540820 60540825 +
tccagcccatgtgcagctccac

SEQ ID NO: 207493 - DNA, 22 bp, Artificial Sequence
  Synthetic oligonucleotide; TTT chr2 60540804 60540825 60540821 60540826 +
ccagcccatgtgcagctccaca

SEQ ID NO: 207494 - DNA, 22 bp, Artificial Sequence
  Synthetic oligonucleotide; TTC chr2 60540805 60540826 60540822 60540827 +
cagcccatgtgcagctccacaa

SEQ ID NO: 207495 - DNA, 22 bp, Artificial Sequence
  Synthetic oligonucleotide; CTC chr2 60540822 60540843 60540839 60540844 +
cacaattatatgccacattcac

SEQ ID NO: 207496 - DNA, 22 bp, Artificial Sequence
  Synthetic oligonucleotide; TTA chr2 60540830 60540851 60540847 60540852 +
tatgccacattcactaagagaa

SEQ ID NO: 207497 - DNA, 22 bp, Artificial Sequence
  Synthetic oligonucleotide; TTC chr2 60540842 60540863 60540859 60540864 +
actaagagaaaggtgtgcaaaa

SEQ ID NO: 207498 - DNA, 22 bp, Artificial Sequence
  Synthetic oligonucleotide; CTA chr2 60540846 60540867 60540863 60540868 +
agagaaaggtgtgcaaaacata

SEQ ID NO: 207499 - DNA, 22 bp, Artificial Sequence
  Synthetic oligonucleotide; TTT chr2 60540871 60540892 60540888 60540893 +
cagatcctttatagtaaaggca

SEQ ID NO: 207500 - DNA, 22 bp, Artificial Sequence
  Synthetic oligonucleotide; TTC chr2 60540872 60540893 60540889 60540894 +
agatcctttatagtaaaggcac

SEQ ID NO: 207501 - DNA, 22 bp, Artificial Sequence
  Synthetic oligonucleotide; CTT chr2 60540880 60540901 60540897 60540902 +
tatagtaaaggcacaacttgca

SEQ ID NO: 207502 - DNA, 22 bp, Artificial Sequence
  Synthetic oligonucleotide; TTT chr2 60540881 60540902 60540898 60540903 +
atagtaaaggcacaacttgcaa

SEQ ID NO: 207503 - DNA, 22 bp, Artificial Sequence
  Synthetic oligonucleotide; TTA chr2 60540882 60540903 60540899 60540904 +
tagtaaaggcacaacttgcaac

SEQ ID NO: 207504 - DNA, 22 bp, Artificial Sequence
  Synthetic oligonucleotide; CTT chr2 60540899 60540920 60540916 60540921 +
gcaacacaacaaggaatggggt

SEQ ID NO: 207505 - DNA, 22 bp, Artificial Sequence
  Synthetic oligonucleotide; TTG chr2 60540900 60540921 60540917 60540922 +
caacacaacaaggaatggggtg

SEQ ID NO: 207506 - DNA, 22 bp, Artificial Sequence
  Synthetic oligonucleotide; TTT chr2 60540926 60540947 60540943 60540948 +
aagaaattacagcactggtttt

SEQ ID NO: 207507 - DNA, 22 bp, Artificial Sequence
  Synthetic oligonucleotide; TTA chr2 60540927 60540948 60540944 60540949 +
agaaattacagcactggttttg

SEQ ID NO: 207508 - DNA, 22 bp, Artificial Sequence
  Synthetic oligonucleotide; TTA chr2 60540935 60540956 60540952 60540957 +
cagcactggttttgtgtgtgtg

SEQ ID NO: 207509 - DNA, 22 bp, Artificial Sequence
  Synthetic oligonucleotide; CTG chr2 60540943 60540964 60540960 60540965 +
gttttgtgtgtgtgtgtgtgtg

SEQ ID NO: 207510 - DNA, 22 bp, Artificial Sequence
  Synthetic oligonucleotide; TTT chr2 60540947 60540968 60540964 60540969 +
tgtgtgtgtgtgtgtgtgtgtg

SEQ ID NO: 207511 - DNA, 22 bp, Artificial Sequence
  Synthetic oligonucleotide; TTT chr2 60540948 60540969 60540965 60540970 +
gtgtgtgtgtgtgtgtgtgtgt

SEQ ID NO: 207512 - DNA, 22 bp, Artificial Sequence
  Synthetic oligonucleotide; TTG chr2 60540949 60540970 60540966 60540971 +
tgtgtgtgtgtgtgtgtgtgtg

SEQ ID NO: 207513 - DNA, 22 bp, Artificial Sequence
  Synthetic oligonucleotide; TTA chr2 60540997 60541018 60541014 60541019 +
ttttgtttttttgtttttttaa

SEQ ID NO: 207514 - DNA, 22 bp, Artificial Sequence
  Synthetic oligonucleotide; TTT chr2 60541000 60541021 60541017 60541022 +
tgtttttttgtttttttaagct

SEQ ID NO: 207515 - DNA, 22 bp, Artificial Sequence
  Synthetic oligonucleotide; TTT chr2 60541001 60541022 60541018 60541023 +
gtttttttgtttttttaagctt

SEQ ID NO: 207516 - DNA, 22 bp, Artificial Sequence
  Synthetic oligonucleotide; TTG chr2 60541002 60541023 60541019 60541024 +
tttttttgtttttttaagcttt

SEQ ID NO: 207517 - DNA, 22 bp, Artificial Sequence
  Synthetic oligonucleotide; TTT chr2 60541005 60541026 60541022 60541027 +
ttttgtttttttaagctttcac

SEQ ID NO: 207518 - DNA, 22 bp, Artificial Sequence
  Synthetic oligonucleotide; TTT chr2 60541006 60541027 60541023 60541028 +
tttgtttttttaagctttcaca

SEQ ID NO: 207519 - DNA, 22 bp, Artificial Sequence
  Synthetic oligonucleotide; TTT chr2 60541007 60541028 60541024 60541029 +
ttgtttttttaagctttcacag

SEQ ID NO: 207520 - DNA, 22 bp, Artificial Sequence
  Synthetic oligonucleotide; TTT chr2 60541008 60541029 60541025 60541030 +
tgtttttttaagctttcacaga

SEQ ID NO: 207521 - DNA, 22 bp, Artificial Sequence
  Synthetic oligonucleotide; TTT chr2 60541009 60541030 60541026 60541031 +
gtttttttaagctttcacagaa

SEQ ID NO: 207522 - DNA, 22 bp, Artificial Sequence
  Synthetic oligonucleotide; TTG chr2 60541010 60541031 60541027 60541032 +
tttttttaagctttcacagaat

SEQ ID NO: 207523 - DNA, 22 bp, Artificial Sequence
  Synthetic oligonucleotide; TTT chr2 60541013 60541034 60541030 60541035 +
ttttaagctttcacagaataaa

SEQ ID NO: 207524 - DNA, 22 bp, Artificial Sequence
  Synthetic oligonucleotide; TTT chr2 60541014 60541035 60541031 60541036 +
tttaagctttcacagaataaac

SEQ ID NO: 207525 - DNA, 22 bp, Artificial Sequence
  Synthetic oligonucleotide; TTT chr2 60541015 60541036 60541032 60541037 +
ttaagctttcacagaataaaca

SEQ ID NO: 207526 - DNA, 22 bp, Artificial Sequence
  Synthetic oligonucleotide; TTT chr2 60541016 60541037 60541033 60541038 +
taagctttcacagaataaacac

SEQ ID NO: 207527 - DNA, 22 bp, Artificial Sequence
  Synthetic oligonucleotide; TTT chr2 60541017 60541038 60541034 60541039 +
aagctttcacagaataaacaca

SEQ ID NO: 207528 - DNA, 22 bp, Artificial Sequence
  Synthetic oligonucleotide; TTA chr2 60541018 60541039 60541035 60541040 +
agctttcacagaataaacacag

SEQ ID NO: 207529 - DNA, 22 bp, Artificial Sequence
  Synthetic oligonucleotide; CTT chr2 60541023 60541044 60541040 60541045 +
tcacagaataaacacagagaac

SEQ ID NO: 207530 - DNA, 22 bp, Artificial Sequence
  Synthetic oligonucleotide; TTT chr2 60541024 60541045 60541041 60541046 +
cacagaataaacacagagaacg

SEQ ID NO: 207531 - DNA, 22 bp, Artificial Sequence
  Synthetic oligonucleotide; TTC chr2 60541025 60541046 60541042 60541047 +
acagaataaacacagagaacgg

SEQ ID NO: 207532 - DNA, 22 bp, Artificial Sequence
  Synthetic oligonucleotide; CTT chr2 60541058 60541079 60541075 60541080 +
tgtccccctctgctcctgttct

SEQ ID NO: 207533 - DNA, 22 bp, Artificial Sequence
  Synthetic oligonucleotide; TTT chr2 60541059 60541080 60541076 60541081 +
gtccccctctgctcctgttctt

SEQ ID NO: 207534 - DNA, 22 bp, Artificial Sequence
  Synthetic oligonucleotide; TTG chr2 60541060 60541081 60541077 60541082 +
tccccctctgctcctgttcttg

SEQ ID NO: 207535 - DNA, 22 bp, Artificial Sequence
  Synthetic oligonucleotide; CTC chr2 60541068 60541089 60541085 60541090 +
tgctcctgttcttgaagtgaat

SEQ ID NO: 207536 - DNA, 22 bp, Artificial Sequence
  Synthetic oligonucleotide; CTG chr2 60541070 60541091 60541087 60541092 +
ctcctgttcttgaagtgaatac

SEQ ID NO: 207537 - DNA, 22 bp, Artificial Sequence
  Synthetic oligonucleotide; CTC chr2 60541073 60541094 60541090 60541095 +
ctgttcttgaagtgaatacata

SEQ ID NO: 207538 - DNA, 22 bp, Artificial Sequence
  Synthetic oligonucleotide; CTG chr2 60541076 60541097 60541093 60541098 +
ttcttgaagtgaatacatattt

SEQ ID NO: 207539 - DNA, 22 bp, Artificial Sequence
  Synthetic oligonucleotide; TTC chr2 60541079 60541100 60541096 60541101 +
ttgaagtgaatacatatttgtg

SEQ ID NO: 207540 - DNA, 22 bp, Artificial Sequence
  Synthetic oligonucleotide; CTT chr2 60541081 60541102 60541098 60541103 +
gaagtgaatacatatttgtgtt

SEQ ID NO: 207541 - DNA, 22 bp, Artificial Sequence
  Synthetic oligonucleotide; TTG chr2 60541082 60541103 60541099 60541104 +
aagtgaatacatatttgtgttt

SEQ ID NO: 207542 - DNA, 22 bp, Artificial Sequence
  Synthetic oligonucleotide; TTT chr2 60541098 60541119 60541115 60541120 +
gtgtttccaataaaaggccatt

SEQ ID NO: 207543 - DNA, 22 bp, Artificial Sequence
  Synthetic oligonucleotide; TTG chr2 60541099 60541120 60541116 60541121 +
tgtttccaataaaaggccattt

SEQ ID NO: 207544 - DNA, 22 bp, Artificial Sequence
  Synthetic oligonucleotide; TTT chr2 60541104 60541125 60541121 60541126 +
ccaataaaaggccatttttaca

SEQ ID NO: 207545 - DNA, 22 bp, Artificial Sequence
  Synthetic oligonucleotide; TTC chr2 60541105 60541126 60541122 60541127 +
caataaaaggccatttttacat

SEQ ID NO: 207546 - DNA, 22 bp, Artificial Sequence
  Synthetic oligonucleotide; TTT chr2 60541121 60541142 60541138 60541143 +
ttacattaactgtctgtaacag

SEQ ID NO: 207547 - DNA, 22 bp, Artificial Sequence
  Synthetic oligonucleotide; TTT chr2 60541122 60541143 60541139 60541144 +
tacattaactgtctgtaacagc

SEQ ID NO: 207548 - DNA, 22 bp, Artificial Sequence
  Synthetic oligonucleotide; TTT chr2 60541123 60541144 60541140 60541145 +
acattaactgtctgtaacagca

SEQ ID NO: 207549 - DNA, 22 bp, Artificial Sequence
  Synthetic oligonucleotide; TTA chr2 60541124 60541145 60541141 60541146 +
cattaactgtctgtaacagcag

SEQ ID NO: 207550 - DNA, 22 bp, Artificial Sequence
  Synthetic oligonucleotide; TTA chr2 60541129 60541150 60541146 60541151 +
actgtctgtaacagcaggagac

SEQ ID NO: 207551 - DNA, 22 bp, Artificial Sequence
  Synthetic oligonucleotide; CTG chr2 60541133 60541154 60541150 60541155 +
tctgtaacagcaggagacagaa

SEQ ID NO: 207552 - DNA, 22 bp, Artificial Sequence
  Synthetic oligonucleotide; CTG chr2 60541137 60541158 60541154 60541159 +
taacagcaggagacagaaaaac

SEQ ID NO: 207553 - DNA, 22 bp, Artificial Sequence
  Synthetic oligonucleotide; CTA chr2 60541161 60541182 60541178 60541183 +
acacaatctccacatcacacac

SEQ ID NO: 207554 - DNA, 22 bp, Artificial Sequence
  Synthetic oligonucleotide; CTC chr2 60541171 60541192 60541188 60541193 +
cacatcacacacaggatgatct

SEQ ID NO: 207555 - DNA, 22 bp, Artificial Sequence
  Synthetic oligonucleotide; CTT chr2 60541194 60541215 60541211 60541216 +
catatcacgtggacctattctc

SEQ ID NO: 207556 - DNA, 22 bp, Artificial Sequence
  Synthetic oligonucleotide; TTC chr2 60541195 60541216 60541212 60541217 +
atatcacgtggacctattctca

SEQ ID NO: 207557 - DNA, 22 bp, Artificial Sequence
  Synthetic oligonucleotide; CTA chr2 60541211 60541232 60541228 60541233 +
ttctcaaaacattatttataaa

SEQ ID NO: 207558 - DNA, 22 bp, Artificial Sequence
  Synthetic oligonucleotide; TTC chr2 60541214 60541235 60541231 60541236 +
tcaaaacattatttataaaaga

SEQ ID NO: 207559 - DNA, 22 bp, Artificial Sequence
  Synthetic oligonucleotide; CTC chr2 60541216 60541237 60541233 60541238 +
aaaacattatttataaaagatg

SEQ ID NO: 207560 - DNA, 22 bp, Artificial Sequence
  Synthetic oligonucleotide; TTA chr2 60541225 60541246 60541242 60541247 +
tttataaaagatgactaggaaa

SEQ ID NO: 207561 - DNA, 22 bp, Artificial Sequence
  Synthetic oligonucleotide; TTT chr2 60541228 60541249 60541245 60541250 +
ataaaagatgactaggaaaatg

SEQ ID NO: 207562 - DNA, 22 bp, Artificial Sequence
  Synthetic oligonucleotide; TTA chr2 60541229 60541250 60541246 60541251 +
taaaagatgactaggaaaatgc

SEQ ID NO: 207563 - DNA, 22 bp, Artificial Sequence
  Synthetic oligonucleotide; CTA chr2 60541242 60541263 60541259 60541264 +
ggaaaatgcacaatgcatcttt

SEQ ID NO: 207564 - DNA, 22 bp, Artificial Sequence
  Synthetic oligonucleotide; CTT chr2 60541263 60541284 60541280 60541285 +
ttctgtgtcaccacaagggtaa

SEQ ID NO: 207565 - DNA, 22 bp, Artificial Sequence
  Synthetic oligonucleotide; TTT chr2 60541264 60541285 60541281 60541286 +
tctgtgtcaccacaagggtaat

SEQ ID NO: 207566 - DNA, 22 bp, Artificial Sequence
  Synthetic oligonucleotide; TTT chr2 60541265 60541286 60541282 60541287 +
ctgtgtcaccacaagggtaatg

SEQ ID NO: 207567 - DNA, 22 bp, Artificial Sequence
  Synthetic oligonucleotide; TTC chr2 60541266 60541287 60541283 60541288 +
tgtgtcaccacaagggtaatgt

SEQ ID NO: 207568 - DNA, 22 bp, Artificial Sequence
  Synthetic oligonucleotide; CTG chr2 60541268 60541289 60541285 60541290 +
tgtcaccacaagggtaatgtct

SEQ ID NO: 207569 - DNA, 22 bp, Artificial Sequence
  Synthetic oligonucleotide; CTG chr2 60541291 60541312 60541308 60541313 +
aagaagtttgggatctttagga

SEQ ID NO: 207570 - DNA, 22 bp, Artificial Sequence
  Synthetic oligonucleotide; TTT chr2 60541300 60541321 60541317 60541322 +
gggatctttaggatcttctaca

SEQ ID NO: 207571 - DNA, 22 bp, Artificial Sequence
  Synthetic oligonucleotide; TTG chr2 60541301 60541322 60541318 60541323 +
ggatctttaggatcttctacat

SEQ ID NO: 207572 - DNA, 22 bp, Artificial Sequence
  Synthetic oligonucleotide; CTT chr2 60541308 60541329 60541325 60541330 +
taggatcttctacattttagat

SEQ ID NO: 207573 - DNA, 22 bp, Artificial Sequence
  Synthetic oligonucleotide; TTT chr2 60541309 60541330 60541326 60541331 +
aggatcttctacattttagata

SEQ ID NO: 207574 - DNA, 22 bp, Artificial Sequence
  Synthetic oligonucleotide; TTA chr2 60541310 60541331 60541327 60541332 +
ggatcttctacattttagatat

SEQ ID NO: 207575 - DNA, 22 bp, Artificial Sequence
  Synthetic oligonucleotide; CTT chr2 60541317 60541338 60541334 60541339 +
ctacattttagatatatttttt

SEQ ID NO: 207576 - DNA, 22 bp, Artificial Sequence
  Synthetic oligonucleotide; TTC chr2 60541318 60541339 60541335 60541340 +
tacattttagatatattttttt

SEQ ID NO: 207577 - DNA, 22 bp, Artificial Sequence
  Synthetic oligonucleotide; CTA chr2 60541320 60541341 60541337 60541342 +
cattttagatatattttttttt

SEQ ID NO: 207578 - DNA, 22 bp, Artificial Sequence
  Synthetic oligonucleotide; TTT chr2 60541325 60541346 60541342 60541347 +
tagatatattttttttttcctt

SEQ ID NO: 207579 - DNA, 22 bp, Artificial Sequence
  Synthetic oligonucleotide; TTT chr2 60541326 60541347 60541343 60541348 +
agatatattttttttttccttt

SEQ ID NO: 207580 - DNA, 22 bp, Artificial Sequence
  Synthetic oligonucleotide; TTA chr2 60541327 60541348 60541344 60541349 +
gatatattttttttttcctttt

SEQ ID NO: 207581 - DNA, 22 bp, Artificial Sequence
  Synthetic oligonucleotide; TTT chr2 60541336 60541357 60541353 60541358 +
tttttttccttttggctttcct

SEQ ID NO: 207582 - DNA, 22 bp, Artificial Sequence
  Synthetic oligonucleotide; TTT chr2 60541337 60541358 60541354 60541359 +
ttttttccttttggctttcctt

SEQ ID NO: 207583 - DNA, 22 bp, Artificial Sequence
  Synthetic oligonucleotide; TTT chr2 60541338 60541359 60541355 60541360 +
tttttccttttggctttcctta

SEQ ID NO: 207584 - DNA, 22 bp, Artificial Sequence
  Synthetic oligonucleotide; TTT chr2 60541339 60541360 60541356 60541361 +
ttttccttttggctttccttag

SEQ ID NO: 207585 - DNA, 22 bp, Artificial Sequence
  Synthetic oligonucleotide; TTT chr2 60541340 60541361 60541357 60541362 +
tttccttttggctttccttagt

SEQ ID NO: 207586 - DNA, 22 bp, Artificial Sequence
  Synthetic oligonucleotide; TTT chr2 60541341 60541362 60541358 60541363 +
ttccttttggctttccttagta

SEQ ID NO: 207587 - DNA, 22 bp, Artificial Sequence
  Synthetic oligonucleotide; TTT chr2 60541342 60541363 60541359 60541364 +
tccttttggctttccttagtaa

SEQ ID NO: 207588 - DNA, 22 bp, Artificial Sequence
  Synthetic oligonucleotide; TTT chr2 60541343 60541364 60541360 60541365 +
ccttttggctttccttagtaag

SEQ ID NO: 207589 - DNA, 22 bp, Artificial Sequence
  Synthetic oligonucleotide; TTC chr2 60541344 60541365 60541361 60541366 +
cttttggctttccttagtaagt

SEQ ID NO: 207590 - DNA, 22 bp, Artificial Sequence
  Synthetic oligonucleotide; CTT chr2 60541347 60541368 60541364 60541369 +
ttggctttccttagtaagttta

SEQ ID NO: 207591 - DNA, 22 bp, Artificial Sequence
  Synthetic oligonucleotide; TTT chr2 60541348 60541369 60541365 60541370 +
tggctttccttagtaagtttag

SEQ ID NO: 207592 - DNA, 22 bp, Artificial Sequence
  Synthetic oligonucleotide; TTT chr2 60541349 60541370 60541366 60541371 +
ggctttccttagtaagtttagc

SEQ ID NO: 207593 - DNA, 22 bp, Artificial Sequence
  Synthetic oligonucleotide; TTG chr2 60541350 60541371 60541367 60541372 +
gctttccttagtaagtttagca

SEQ ID NO: 207594 - DNA, 22 bp, Artificial Sequence
  Synthetic oligonucleotide; CTT chr2 60541354 60541375 60541371 60541376 +
tccttagtaagtttagcagcca

SEQ ID NO: 207595 - DNA, 22 bp, Artificial Sequence
  Synthetic oligonucleotide; TTT chr2 60541355 60541376 60541372 60541377 +
ccttagtaagtttagcagccat

SEQ ID NO: 207596 - DNA, 22 bp, Artificial Sequence
  Synthetic oligonucleotide; TTC chr2 60541356 60541377 60541373 60541378 +
cttagtaagtttagcagccatg

SEQ ID NO: 207597 - DNA, 22 bp, Artificial Sequence
  Synthetic oligonucleotide; CTT chr2 60541359 60541380 60541376 60541381 +
agtaagtttagcagccatgcgg

SEQ ID NO: 207598 - DNA, 22 bp, Artificial Sequence
  Synthetic oligonucleotide; TTA chr2 60541360 60541381 60541377 60541382 +
gtaagtttagcagccatgcggg

SEQ ID NO: 207599 - DNA, 22 bp, Artificial Sequence
  Synthetic oligonucleotide; TTT chr2 60541368 60541389 60541385 60541390 +
agcagccatgcgggccactgtg

SEQ ID NO: 207600 - DNA, 22 bp, Artificial Sequence
  Synthetic oligonucleotide; TTA chr2 60541369 60541390 60541386 60541391 +
gcagccatgcgggccactgtgt

SEQ ID NO: 207601 - DNA, 22 bp, Artificial Sequence
  Synthetic oligonucleotide; CTG chr2 60541388 60541409 60541405 60541410 +
tgtttaattaagctttcaaaag

SEQ ID NO: 207602 - DNA, 22 bp, Artificial Sequence
  Synthetic oligonucleotide; TTT chr2 60541393 60541414 60541410 60541415 +
aattaagctttcaaaagtcctg

SEQ ID NO: 207603 - DNA, 22 bp, Artificial Sequence
  Synthetic oligonucleotide; TTA chr2 60541394 60541415 60541411 60541416 +
attaagctttcaaaagtcctga

SEQ ID NO: 207604 - DNA, 22 bp, Artificial Sequence
  Synthetic oligonucleotide; TTA chr2 60541398 60541419 60541415 60541420 +
agctttcaaaagtcctgacaat

SEQ ID NO: 207605 - DNA, 22 bp, Artificial Sequence
  Synthetic oligonucleotide; CTT chr2 60541403 60541424 60541420 60541425 +
tcaaaagtcctgacaatgccaa

SEQ ID NO: 207606 - DNA, 22 bp, Artificial Sequence
  Synthetic oligonucleotide; TTT chr2 60541404 60541425 60541421 60541426 +
caaaagtcctgacaatgccaac

SEQ ID NO: 207607 - DNA, 22 bp, Artificial Sequence
  Synthetic oligonucleotide; TTC chr2 60541405 60541426 60541422 60541427 +
aaaagtcctgacaatgccaaca

SEQ ID NO: 207608 - DNA, 22 bp, Artificial Sequence
  Synthetic oligonucleotide; CTG chr2 60541415 60541436 60541432 60541437 +
acaatgccaacaattgtaggac

SEQ ID NO: 207609 - DNA, 22 bp, Artificial Sequence
  Synthetic oligonucleotide; TTG chr2 60541431 60541452 60541448 60541453 +
taggacacttctgcggctcaat

SEQ ID NO: 207610 - DNA, 22 bp, Artificial Sequence
  Synthetic oligonucleotide; CTT chr2 60541441 60541462 60541458 60541463 +
ctgcggctcaatcatgcaatca

SEQ ID NO: 207611 - DNA, 22 bp, Artificial Sequence
  Synthetic oligonucleotide; TTC chr2 60541442 60541463 60541459 60541464 +
tgcggctcaatcatgcaatcac

SEQ ID NO: 207612 - DNA, 22 bp, Artificial Sequence
  Synthetic oligonucleotide; CTG chr2 60541444 60541465 60541461 60541466 +
cggctcaatcatgcaatcactg

SEQ ID NO: 207613 - DNA, 22 bp, Artificial Sequence
  Synthetic oligonucleotide; CTC chr2 60541450 60541471 60541467 60541472 +
aatcatgcaatcactgtgacag

SEQ ID NO: 207614 - DNA, 22 bp, Artificial Sequence
  Synthetic oligonucleotide; CTG chr2 60541466 60541487 60541483 60541488 +
tgacagttctatttacaatttg

SEQ ID NO: 207615 - DNA, 22 bp, Artificial Sequence
  Synthetic oligonucleotide; TTC chr2 60541475 60541496 60541492 60541497 +
tatttacaatttgtcttagaaa

SEQ ID NO: 207616 - DNA, 22 bp, Artificial Sequence
  Synthetic oligonucleotide; CTA chr2 60541477 60541498 60541494 60541499 +
tttacaatttgtcttagaaaga

SEQ ID NO: 207617 - DNA, 22 bp, Artificial Sequence
  Synthetic oligonucleotide; TTT chr2 60541480 60541501 60541497 60541502 +
acaatttgtcttagaaagagtt

SEQ ID NO: 207618 - DNA, 22 bp, Artificial Sequence
  Synthetic oligonucleotide; TTA chr2 60541481 60541502 60541498 60541503 +
caatttgtcttagaaagagttt

SEQ ID NO: 207619 - DNA, 22 bp, Artificial Sequence
  Synthetic oligonucleotide; TTT chr2 60541487 60541508 60541504 60541509 +
gtcttagaaagagtttctctga

SEQ ID NO: 207620 - DNA, 22 bp, Artificial Sequence
  Synthetic oligonucleotide; TTG chr2 60541488 60541509 60541505 60541510 +
tcttagaaagagtttctctgac

SEQ ID NO: 207621 - DNA, 22 bp, Artificial Sequence
  Synthetic oligonucleotide; CTT chr2 60541492 60541513 60541509 60541514 +
agaaagagtttctctgacattg

SEQ ID NO: 207622 - DNA, 22 bp, Artificial Sequence
  Synthetic oligonucleotide; TTA chr2 60541493 60541514 60541510 60541515 +
gaaagagtttctctgacattgt

SEQ ID NO: 207623 - DNA, 22 bp, Artificial Sequence
  Synthetic oligonucleotide; TTT chr2 60541503 60541524 60541520 60541525 +
ctctgacattgtactttgacaa

SEQ ID NO: 207624 - DNA, 22 bp, Artificial Sequence
  Synthetic oligonucleotide; TTC chr2 60541504 60541525 60541521 60541526 +
tctgacattgtactttgacaaa

SEQ ID NO: 207625 - DNA, 22 bp, Artificial Sequence
  Synthetic oligonucleotide; CTC chr2 60541506 60541527 60541523 60541528 +
tgacattgtactttgacaaaac

SEQ ID NO: 207626 - DNA, 22 bp, Artificial Sequence
  Synthetic oligonucleotide; CTG chr2 60541508 60541529 60541525 60541530 +
acattgtactttgacaaaacat

SEQ ID NO: 207627 - DNA, 22 bp, Artificial Sequence
  Synthetic oligonucleotide; TTG chr2 60541514 60541535 60541531 60541536 +
tactttgacaaaacatccaagc

SEQ ID NO: 207628 - DNA, 22 bp, Artificial Sequence
  Synthetic oligonucleotide; CTT chr2 60541519 60541540 60541536 60541541 +
tgacaaaacatccaagctgcca

SEQ ID NO: 207629 - DNA, 22 bp, Artificial Sequence
  Synthetic oligonucleotide; TTT chr2 60541520 60541541 60541537 60541542 +
gacaaaacatccaagctgccag

SEQ ID NO: 207630 - DNA, 22 bp, Artificial Sequence
  Synthetic oligonucleotide; TTG chr2 60541521 60541542 60541538 60541543 +
acaaaacatccaagctgccagt

SEQ ID NO: 207631 - DNA, 22 bp, Artificial Sequence
  Synthetic oligonucleotide; CTG chr2 60541538 60541559 60541555 60541560 +
ccagttcacaacctttctctgt

SEQ ID NO: 207632 - DNA, 22 bp, Artificial Sequence
  Synthetic oligonucleotide; TTC chr2 60541545 60541566 60541562 60541567 +
acaacctttctctgtcttattt

SEQ ID NO: 207633 - DNA, 22 bp, Artificial Sequence
  Synthetic oligonucleotide; CTT chr2 60541553 60541574 60541570 60541575 +
tctctgtcttatttacaaatac

SEQ ID NO: 207634 - DNA, 22 bp, Artificial Sequence
  Synthetic oligonucleotide; TTT chr2 60541554 60541575 60541571 60541576 +
ctctgtcttatttacaaataca

SEQ ID NO: 207635 - DNA, 22 bp, Artificial Sequence
  Synthetic oligonucleotide; TTC chr2 60541555 60541576 60541572 60541577 +
tctgtcttatttacaaatacag

SEQ ID NO: 207636 - DNA, 22 bp, Artificial Sequence
  Synthetic oligonucleotide; CTC chr2 60541557 60541578 60541574 60541579 +
tgtcttatttacaaatacagct

SEQ ID NO: 207637 - DNA, 22 bp, Artificial Sequence
  Synthetic oligonucleotide; CTG chr2 60541559 60541580 60541576 60541581 +
tcttatttacaaatacagcttg

SEQ ID NO: 207638 - DNA, 22 bp, Artificial Sequence
  Synthetic oligonucleotide; CTT chr2 60541563 60541584 60541580 60541585 +
atttacaaatacagcttgtata

SEQ ID NO: 207639 - DNA, 22 bp, Artificial Sequence
  Synthetic oligonucleotide; TTA chr2 60541564 60541585 60541581 60541586 +
tttacaaatacagcttgtatat

SEQ ID NO: 207640 - DNA, 22 bp, Artificial Sequence
  Synthetic oligonucleotide; TTT chr2 60541567 60541588 60541584 60541589 +
acaaatacagcttgtatatagg

SEQ ID NO: 207641 - DNA, 22 bp, Artificial Sequence
  Synthetic oligonucleotide; TTA chr2 60541568 60541589 60541585 60541590 +
caaatacagcttgtatatagga

SEQ ID NO: 207642 - DNA, 22 bp, Artificial Sequence
  Synthetic oligonucleotide; CTT chr2 60541580 60541601 60541597 60541602 +
gtatataggactcccagtttca

SEQ ID NO: 207643 - DNA, 22 bp, Artificial Sequence
  Synthetic oligonucleotide; TTG chr2 60541581 60541602 60541598 60541603 +
tatataggactcccagtttcat

SEQ ID NO: 207644 - DNA, 22 bp, Artificial Sequence
  Synthetic oligonucleotide; CTC chr2 60541593 60541614 60541610 60541615 +
ccagtttcatgaacattagtct

SEQ ID NO: 207645 - DNA, 22 bp, Artificial Sequence
  Synthetic oligonucleotide; TTT chr2 60541600 60541621 60541617 60541622 +
catgaacattagtctttggata

SEQ ID NO: 207646 - DNA, 22 bp, Artificial Sequence
  Synthetic oligonucleotide; TTC chr2 60541601 60541622 60541618 60541623 +
atgaacattagtctttggatag

SEQ ID NO: 207647 - DNA, 22 bp, Artificial Sequence
  Synthetic oligonucleotide; TTA chr2 60541611 60541632 60541628 60541633 +
gtctttggatagtggcctcaca

SEQ ID NO: 207648 - DNA, 22 bp, Artificial Sequence
  Synthetic oligonucleotide; CTT chr2 60541616 60541637 60541633 60541638 +
tggatagtggcctcacaaacat

SEQ ID NO: 207649 - DNA, 22 bp, Artificial Sequence
  Synthetic oligonucleotide; TTT chr2 60541617 60541638 60541634 60541639 +
ggatagtggcctcacaaacata

SEQ ID NO: 207650 - DNA, 22 bp, Artificial Sequence
  Synthetic oligonucleotide; TTG chr2 60541618 60541639 60541635 60541640 +
gatagtggcctcacaaacatag

SEQ ID NO: 207651 - DNA, 22 bp, Artificial Sequence
  Synthetic oligonucleotide; CTC chr2 60541630 60541651 60541647 60541652 +
acaaacataggctccctatgaa

SEQ ID NO: 207652 - DNA, 22 bp, Artificial Sequence
  Synthetic oligonucleotide; CTC chr2 60541644 60541665 60541661 60541666 +
cctatgaaaatcctaggtactt

SEQ ID NO: 207653 - DNA, 22 bp, Artificial Sequence
  Synthetic oligonucleotide; CTA chr2 60541648 60541669 60541665 60541670 +
tgaaaatcctaggtacttatta

SEQ ID NO: 207654 - DNA, 22 bp, Artificial Sequence
  Synthetic oligonucleotide; CTA chr2 60541659 60541680 60541676 60541681 +
ggtacttattagaaaacaatat

SEQ ID NO: 207655 - DNA, 22 bp, Artificial Sequence
  Synthetic oligonucleotide; CTT chr2 60541666 60541687 60541683 60541688 +
attagaaaacaatattctctac

SEQ ID NO: 207656 - DNA, 22 bp, Artificial Sequence
  Synthetic oligonucleotide; TTA chr2 60541667 60541688 60541684 60541689 +
ttagaaaacaatattctctact

SEQ ID NO: 207657 - DNA, 22 bp, Artificial Sequence
  Synthetic oligonucleotide; TTA chr2 60541670 60541691 60541687 60541692 +
gaaaacaatattctctactctc

SEQ ID NO: 207658 - DNA, 22 bp, Artificial Sequence
  Synthetic oligonucleotide; TTC chr2 60541683 60541704 60541700 60541705 +
tctactctctggattttgaagg

SEQ ID NO: 207659 - DNA, 22 bp, Artificial Sequence
  Synthetic oligonucleotide; CTC chr2 60541685 60541706 60541702 60541707 +
tactctctggattttgaaggta

SEQ ID NO: 207660 - DNA, 22 bp, Artificial Sequence
  Synthetic oligonucleotide; CTA chr2 60541687 60541708 60541704 60541709 +
ctctctggattttgaaggtaag

SEQ ID NO: 207661 - DNA, 22 bp, Artificial Sequence
  Synthetic oligonucleotide; CTC chr2 60541690 60541711 60541707 60541712 +
tctggattttgaaggtaagtaa

SEQ ID NO: 207662 - DNA, 22 bp, Artificial Sequence
  Synthetic oligonucleotide; CTC chr2 60541692 60541713 60541709 60541714 +
tggattttgaaggtaagtaaaa

SEQ ID NO: 207663 - DNA, 22 bp, Artificial Sequence
  Synthetic oligonucleotide; CTG chr2 60541694 60541715 60541711 60541716 +
gattttgaaggtaagtaaaatg

SEQ ID NO: 207664 - DNA, 22 bp, Artificial Sequence
  Synthetic oligonucleotide; TTT chr2 60541699 60541720 60541716 60541721 +
tgaaggtaagtaaaatgttcac

SEQ ID NO: 207665 - DNA, 22 bp, Artificial Sequence
  Synthetic oligonucleotide; TTT chr2 60541700 60541721 60541717 60541722 +
gaaggtaagtaaaatgttcacc

SEQ ID NO: 207666 - DNA, 22 bp, Artificial Sequence
  Synthetic oligonucleotide; TTG chr2 60541701 60541722 60541718 60541723 +
aaggtaagtaaaatgttcacca

SEQ ID NO: 207667 - DNA, 22 bp, Artificial Sequence
  Synthetic oligonucleotide; TTC chr2 60541719 60541740 60541736 60541741 +
accagtatattgttttttgtgg

SEQ ID NO: 207668 - DNA, 22 bp, Artificial Sequence
  Synthetic oligonucleotide; TTG chr2 60541731 60541752 60541748 60541753 +
ttttttgtggtagtggtgtttt

SEQ ID NO: 207669 - DNA, 22 bp, Artificial Sequence
  Synthetic oligonucleotide; TTT chr2 60541734 60541755 60541751 60541756 +
tttgtggtagtggtgttttttt

SEQ ID NO: 207670 - DNA, 22 bp, Artificial Sequence
  Synthetic oligonucleotide; TTT chr2 60541735 60541756 60541752 60541757 +
ttgtggtagtggtgtttttttg

SEQ ID NO: 207671 - DNA, 22 bp, Artificial Sequence
  Synthetic oligonucleotide; TTT chr2 60541736 60541757 60541753 60541758 +
tgtggtagtggtgtttttttgt

SEQ ID NO: 207672 - DNA, 22 bp, Artificial Sequence
  Synthetic oligonucleotide; TTT chr2 60541737 60541758 60541754 60541759 +
gtggtagtggtgtttttttgtt

SEQ ID NO: 207673 - DNA, 22 bp, Artificial Sequence
  Synthetic oligonucleotide; TTG chr2 60541738 60541759 60541755 60541760 +
tggtagtggtgtttttttgttt

SEQ ID NO: 207674 - DNA, 22 bp, Artificial Sequence
  Synthetic oligonucleotide; TTT chr2 60541752 60541773 60541769 60541774 +
ttttgttttaactgccatgctg

SEQ ID NO: 207675 - DNA, 22 bp, Artificial Sequence
  Synthetic oligonucleotide; TTT chr2 60541753 60541774 60541770 60541775 +
tttgttttaactgccatgctga

SEQ ID NO: 207676 - DNA, 22 bp, Artificial Sequence
  Synthetic oligonucleotide; TTT chr2 60541754 60541775 60541771 60541776 +
ttgttttaactgccatgctgaa

SEQ ID NO: 207677 - DNA, 22 bp, Artificial Sequence
  Synthetic oligonucleotide; TTT chr2 60541755 60541776 60541772 60541777 +
tgttttaactgccatgctgaaa

SEQ ID NO: 207678 - DNA, 22 bp, Artificial Sequence
  Synthetic oligonucleotide; TTT chr2 60541756 60541777 60541773 60541778 +
gttttaactgccatgctgaaaa

SEQ ID NO: 207679 - DNA, 22 bp, Artificial Sequence
  Synthetic oligonucleotide; TTG chr2 60541757 60541778 60541774 60541779 +
ttttaactgccatgctgaaaat

SEQ ID NO: 207680 - DNA, 22 bp, Artificial Sequence
  Synthetic oligonucleotide; TTT chr2 60541760 60541781 60541777 60541782 +
taactgccatgctgaaaattca

SEQ ID NO: 207681 - DNA, 22 bp, Artificial Sequence
  Synthetic oligonucleotide; TTT chr2 60541761 60541782 60541778 60541783 +
aactgccatgctgaaaattcac

SEQ ID NO: 207682 - DNA, 22 bp, Artificial Sequence
  Synthetic oligonucleotide; TTA chr2 60541762 60541783 60541779 60541784 +
actgccatgctgaaaattcact

SEQ ID NO: 207683 - DNA, 22 bp, Artificial Sequence
  Synthetic oligonucleotide; CTG chr2 60541766 60541787 60541783 60541788 +
ccatgctgaaaattcacttcag

SEQ ID NO: 207684 - DNA, 22 bp, Artificial Sequence
  Synthetic oligonucleotide; CTG chr2 60541774 60541795 60541791 60541796 +
aaaattcacttcagaagtcagt

SEQ ID NO: 207685 - DNA, 22 bp, Artificial Sequence
  Synthetic oligonucleotide; TTC chr2 60541781 60541802 60541798 60541803 +
acttcagaagtcagtcgttttt

SEQ ID NO: 207686 - DNA, 22 bp, Artificial Sequence
  Synthetic oligonucleotide; CTT chr2 60541785 60541806 60541802 60541807 +
cagaagtcagtcgtttttattc

SEQ ID NO: 207687 - DNA, 22 bp, Artificial Sequence
  Synthetic oligonucleotide; TTC chr2 60541786 60541807 60541803 60541808 +
agaagtcagtcgtttttattca

SEQ ID NO: 207688 - DNA, 22 bp, Artificial Sequence
  Synthetic oligonucleotide; TTT chr2 60541801 60541822 60541818 60541823 +
ttattcagaatcacataaataa

SEQ ID NO: 207689 - DNA, 22 bp, Artificial Sequence
  Synthetic oligonucleotide; TTT chr2 60541802 60541823 60541819 60541824 +
tattcagaatcacataaataaa

SEQ ID NO: 207690 - DNA, 22 bp, Artificial Sequence
  Synthetic oligonucleotide; TTT chr2 60541803 60541824 60541820 60541825 +
attcagaatcacataaataaag

SEQ ID NO: 207691 - DNA, 22 bp, Artificial Sequence
  Synthetic oligonucleotide; TTA chr2 60541804 60541825 60541821 60541826 +
ttcagaatcacataaataaaga

SEQ ID NO: 207692 - DNA, 22 bp, Artificial Sequence
  Synthetic oligonucleotide; TTC chr2 60541807 60541828 60541824 60541829 +
agaatcacataaataaagagaa

SEQ ID NO: 207693 - DNA, 22 bp, Artificial Sequence
  Synthetic oligonucleotide; CTA chr2 60541860 60541881 60541877 60541882 +
taatttatagtctcatttacaa

SEQ ID NO: 207694 - DNA, 22 bp, Artificial Sequence
  Synthetic oligonucleotide; TTT chr2 60541866 60541887 60541883 60541888 +
atagtctcatttacaattacac

SEQ ID NO: 207695 - DNA, 22 bp, Artificial Sequence
  Synthetic oligonucleotide; TTA chr2 60541867 60541888 60541884 60541889 +
tagtctcatttacaattacacc

SEQ ID NO: 207696 - DNA, 22 bp, Artificial Sequence
  Synthetic oligonucleotide; CTC chr2 60541874 60541895 60541891 60541896 +
atttacaattacaccataaggt

SEQ ID NO: 207697 - DNA, 22 bp, Artificial Sequence
  Synthetic oligonucleotide; TTT chr2 60541878 60541899 60541895 60541900 +
acaattacaccataaggtacac

SEQ ID NO: 207698 - DNA, 22 bp, Artificial Sequence
  Synthetic oligonucleotide; TTA chr2 60541879 60541900 60541896 60541901 +
caattacaccataaggtacaca

SEQ ID NO: 207699 - DNA, 22 bp, Artificial Sequence
  Synthetic oligonucleotide; TTA chr2 60541885 60541906 60541902 60541907 +
caccataaggtacacaaataca

SEQ ID NO: 207700 - DNA, 22 bp, Artificial Sequence
  Synthetic oligonucleotide; CTC chr2 60541912 60541933 60541929 60541934 +
cagttcagtctgagctaggaga

SEQ ID NO: 207701 - DNA, 22 bp, Artificial Sequence
  Synthetic oligonucleotide; TTC chr2 60541918 60541939 60541935 60541940 +
agtctgagctaggagagaatca

SEQ ID NO: 207702 - DNA, 22 bp, Artificial Sequence
  Synthetic oligonucleotide; CTG chr2 60541924 60541945 60541941 60541946 +
agctaggagagaatcagaatgg

SEQ ID NO: 207703 - DNA, 22 bp, Artificial Sequence
  Synthetic oligonucleotide; CTA chr2 60541929 60541950 60541946 60541951 +
ggagagaatcagaatggataca

SEQ ID NO: 207704 - DNA, 22 bp, Artificial Sequence
  Synthetic oligonucleotide; TTC chr2 60541969 60541990 60541986 60541991 +
attttctaaattctgaaaagca

SEQ ID NO: 207705 - DNA, 22 bp, Artificial Sequence
  Synthetic oligonucleotide; TTT chr2 60541973 60541994 60541990 60541995 +
tctaaattctgaaaagcatatt

SEQ ID NO: 207706 - DNA, 22 bp, Artificial Sequence
  Synthetic oligonucleotide; TTT chr2 60541974 60541995 60541991 60541996 +
ctaaattctgaaaagcatattg

SEQ ID NO: 207707 - DNA, 22 bp, Artificial Sequence
  Synthetic oligonucleotide; TTC chr2 60541975 60541996 60541992 60541997 +
taaattctgaaaagcatattgt

SEQ ID NO: 207708 - DNA, 22 bp, Artificial Sequence
  Synthetic oligonucleotide; CTA chr2 60541977 60541998 60541994 60541999 +
aattctgaaaagcatattgtat

SEQ ID NO: 207709 - DNA, 22 bp, Artificial Sequence
  Synthetic oligonucleotide; TTC chr2 60541982 60542003 60541999 60542004 +
tgaaaagcatattgtatttgat

SEQ ID NO: 207710 - DNA, 22 bp, Artificial Sequence
  Synthetic oligonucleotide; CTG chr2 60541984 60542005 60542001 60542006 +
aaaagcatattgtatttgattt

SEQ ID NO: 207711 - DNA, 22 bp, Artificial Sequence
  Synthetic oligonucleotide; TTG chr2 60541996 60542017 60542013 60542018 +
tatttgatttacttttaagagc

SEQ ID NO: 207712 - DNA, 22 bp, Artificial Sequence
  Synthetic oligonucleotide; TTT chr2 60542001 60542022 60542018 60542023 +
gatttacttttaagagcatgct

SEQ ID NO: 207713 - DNA, 22 bp, Artificial Sequence
  Synthetic oligonucleotide; TTG chr2 60542002 60542023 60542019 60542024 +
atttacttttaagagcatgcta

SEQ ID NO: 207714 - DNA, 22 bp, Artificial Sequence
  Synthetic oligonucleotide; TTT chr2 60542006 60542027 60542023 60542028 +
acttttaagagcatgctaatgt

SEQ ID NO: 207715 - DNA, 22 bp, Artificial Sequence
  Synthetic oligonucleotide; TTA chr2 60542007 60542028 60542024 60542029 +
cttttaagagcatgctaatgta

SEQ ID NO: 207716 - DNA, 22 bp, Artificial Sequence
  Synthetic oligonucleotide; CTT chr2 60542010 60542031 60542027 60542032 +
ttaagagcatgctaatgtattt

SEQ ID NO: 207717 - DNA, 22 bp, Artificial Sequence
  Synthetic oligonucleotide; TTT chr2 60542011 60542032 60542028 60542033 +
taagagcatgctaatgtatttc

SEQ ID NO: 207718 - DNA, 22 bp, Artificial Sequence
  Synthetic oligonucleotide; TTT chr2 60542012 60542033 60542029 60542034 +
aagagcatgctaatgtatttcc

SEQ ID NO: 207719 - DNA, 22 bp, Artificial Sequence
  Synthetic oligonucleotide; TTA chr2 60542013 60542034 60542030 60542035 +
agagcatgctaatgtatttcca

SEQ ID NO: 207720 - DNA, 22 bp, Artificial Sequence
  Synthetic oligonucleotide; CTA chr2 60542024 60542045 60542041 60542046 +
atgtatttccattttgaattac

SEQ ID NO: 207721 - DNA, 22 bp, Artificial Sequence
  Synthetic oligonucleotide; TTT chr2 60542032 60542053 60542049 60542054 +
ccattttgaattactatatctc

SEQ ID NO: 207722 - DNA, 22 bp, Artificial Sequence
  Synthetic oligonucleotide; TTC chr2 60542033 60542054 60542050 60542055 +
cattttgaattactatatctcc

SEQ ID NO: 207723 - DNA, 22 bp, Artificial Sequence
  Synthetic oligonucleotide; TTT chr2 60542038 60542059 60542055 60542060 +
tgaattactatatctcccttct

SEQ ID NO: 207724 - DNA, 22 bp, Artificial Sequence
  Synthetic oligonucleotide; TTT chr2 60542039 60542060 60542056 60542061 +
gaattactatatctcccttctt

SEQ ID NO: 207725 - DNA, 22 bp, Artificial Sequence
  Synthetic oligonucleotide; TTG chr2 60542040 60542061 60542057 60542062 +
aattactatatctcccttcttt

SEQ ID NO: 207726 - DNA, 22 bp, Artificial Sequence
  Synthetic oligonucleotide; TTA chr2 60542045 60542066 60542062 60542067 +
ctatatctcccttctttagagt

SEQ ID NO: 207727 - DNA, 22 bp, Artificial Sequence
  Synthetic oligonucleotide; CTA chr2 60542048 60542069 60542065 60542070 +
tatctcccttctttagagtatc

SEQ ID NO: 207728 - DNA, 22 bp, Artificial Sequence
  Synthetic oligonucleotide; CTC chr2 60542054 60542075 60542071 60542076 +
ccttctttagagtatctgtctg

SEQ ID NO: 207729 - DNA, 22 bp, Artificial Sequence
  Synthetic oligonucleotide; CTT chr2 60542058 60542079 60542075 60542080 +
ctttagagtatctgtctgatat

SEQ ID NO: 207730 - DNA, 22 bp, Artificial Sequence
  Synthetic oligonucleotide; TTC chr2 60542059 60542080 60542076 60542081 +
tttagagtatctgtctgatata

SEQ ID NO: 207731 - DNA, 22 bp, Artificial Sequence
  Synthetic oligonucleotide; CTT chr2 60542061 60542082 60542078 60542083 +
tagagtatctgtctgatatatc

SEQ ID NO: 207732 - DNA, 22 bp, Artificial Sequence
  Synthetic oligonucleotide; TTT chr2 60542062 60542083 60542079 60542084 +
agagtatctgtctgatatatca

SEQ ID NO: 207733 - DNA, 22 bp, Artificial Sequence
  Synthetic oligonucleotide; TTA chr2 60542063 60542084 60542080 60542085 +
gagtatctgtctgatatatcat

SEQ ID NO: 207734 - DNA, 22 bp, Artificial Sequence
  Synthetic oligonucleotide; CTG chr2 60542072 60542093 60542089 60542094 +
tctgatatatcattatctaaat

SEQ ID NO: 207735 - DNA, 22 bp, Artificial Sequence
  Synthetic oligonucleotide; CTG chr2 60542076 60542097 60542093 60542098 +
atatatcattatctaaatacca

SEQ ID NO: 207736 - DNA, 22 bp, Artificial Sequence
  Synthetic oligonucleotide; TTA chr2 60542087 60542108 60542104 60542109 +
tctaaataccagctatactgtc

SEQ ID NO: 207737 - DNA, 22 bp, Artificial Sequence
  Synthetic oligonucleotide; CTA chr2 60542091 60542112 60542108 60542113 +
aataccagctatactgtctagg

SEQ ID NO: 207738 - DNA, 22 bp, Artificial Sequence
  Synthetic oligonucleotide; CTA chr2 60542102 60542123 60542119 60542124 +
tactgtctaggcaaataatttt

SEQ ID NO: 207739 - DNA, 22 bp, Artificial Sequence
  Synthetic oligonucleotide; CTG chr2 60542107 60542128 60542124 60542129 +
tctaggcaaataattttaaata

SEQ ID NO: 207740 - DNA, 22 bp, Artificial Sequence
  Synthetic oligonucleotide; CTA chr2 60542111 60542132 60542128 60542133 +
ggcaaataattttaaataccct

SEQ ID NO: 207741 - DNA, 22 bp, Artificial Sequence
  Synthetic oligonucleotide; TTT chr2 60542123 60542144 60542140 60542145 +
taaataccctgatataaatgtc

SEQ ID NO: 207742 - DNA, 22 bp, Artificial Sequence
  Synthetic oligonucleotide; TTT chr2 60542124 60542145 60542141 60542146 +
aaataccctgatataaatgtct

SEQ ID NO: 207743 - DNA, 22 bp, Artificial Sequence
  Synthetic oligonucleotide; TTA chr2 60542125 60542146 60542142 60542147 +
aataccctgatataaatgtcta

SEQ ID NO: 207744 - DNA, 22 bp, Artificial Sequence
  Synthetic oligonucleotide; CTG chr2 60542134 60542155 60542151 60542156 +
atataaatgtctatgttcatga

SEQ ID NO: 207745 - DNA, 22 bp, Artificial Sequence
  Synthetic oligonucleotide; CTA chr2 60542147 60542168 60542164 60542169 +
tgttcatgattttaaagagaaa

SEQ ID NO: 207746 - DNA, 22 bp, Artificial Sequence
  Synthetic oligonucleotide; TTC chr2 60542152 60542173 60542169 60542174 +
atgattttaaagagaaaaaatg

SEQ ID NO: 207747 - DNA, 22 bp, Artificial Sequence
  Synthetic oligonucleotide; TTT chr2 60542159 60542180 60542176 60542181 +
taaagagaaaaaatgttatata

SEQ ID NO: 207748 - DNA, 22 bp, Artificial Sequence
  Synthetic oligonucleotide; TTT chr2 60542160 60542181 60542177 60542182 +
aaagagaaaaaatgttatatat

SEQ ID NO: 207749 - DNA, 22 bp, Artificial Sequence
  Synthetic oligonucleotide; TTA chr2 60542161 60542182 60542178 60542183 +
aagagaaaaaatgttatatatc

SEQ ID NO: 207750 - DNA, 22 bp, Artificial Sequence
  Synthetic oligonucleotide; TTA chr2 60542177 60542198 60542194 60542199 +
tatatcaacaggagcagacttt

SEQ ID NO: 207751 - DNA, 22 bp, Artificial Sequence
  Synthetic oligonucleotide; CTT chr2 60542198 60542219 60542215 60542220 +
tactacattttataggacttgt

SEQ ID NO: 207752 - DNA, 22 bp, Artificial Sequence
  Synthetic oligonucleotide; TTT chr2 60542199 60542220 60542216 60542221 +
actacattttataggacttgtc

SEQ ID NO: 207753 - DNA, 22 bp, Artificial Sequence
  Synthetic oligonucleotide; TTA chr2 60542200 60542221 60542217 60542222 +
ctacattttataggacttgtca

SEQ ID NO: 207754 - DNA, 22 bp, Artificial Sequence
  Synthetic oligonucleotide; CTA chr2 60542203 60542224 60542220 60542225 +
cattttataggacttgtcatat

SEQ ID NO: 207755 - DNA, 22 bp, Artificial Sequence
  Synthetic oligonucleotide; TTT chr2 60542208 60542229 60542225 60542230 +
tataggacttgtcatatttttt

SEQ ID NO: 207756 - DNA, 22 bp, Artificial Sequence
  Synthetic oligonucleotide; TTT chr2 60542209 60542230 60542226 60542231 +
ataggacttgtcatattttttc

SEQ ID NO: 207757 - DNA, 22 bp, Artificial Sequence
  Synthetic oligonucleotide; TTA chr2 60542210 60542231 60542227 60542232 +
taggacttgtcatattttttct

SEQ ID NO: 207758 - DNA, 22 bp, Artificial Sequence
  Synthetic oligonucleotide; CTT chr2 60542218 60542239 60542235 60542240 +
gtcatattttttctctagtctc

SEQ ID NO: 207759 - DNA, 22 bp, Artificial Sequence
  Synthetic oligonucleotide; TTG chr2 60542219 60542240 60542236 60542241 +
tcatattttttctctagtctct

SEQ ID NO: 207760 - DNA, 22 bp, Artificial Sequence
  Synthetic oligonucleotide; TTT chr2 60542227 60542248 60542244 60542249 +
tttctctagtctctcaaaaagc

SEQ ID NO: 207761 - DNA, 22 bp, Artificial Sequence
  Synthetic oligonucleotide; TTT chr2 60542228 60542249 60542245 60542250 +
ttctctagtctctcaaaaagct

SEQ ID NO: 207762 - DNA, 22 bp, Artificial Sequence
  Synthetic oligonucleotide; TTT chr2 60542229 60542250 60542246 60542251 +
tctctagtctctcaaaaagcta

SEQ ID NO: 207763 - DNA, 22 bp, Artificial Sequence
  Synthetic oligonucleotide; TTT chr2 60542230 60542251 60542247 60542252 +
ctctagtctctcaaaaagctaa

SEQ ID NO: 207764 - DNA, 22 bp, Artificial Sequence
  Synthetic oligonucleotide; TTC chr2 60542231 60542252 60542248 60542253 +
tctagtctctcaaaaagctaac

SEQ ID NO: 207765 - DNA, 22 bp, Artificial Sequence
  Synthetic oligonucleotide; CTC chr2 60542233 60542254 60542250 60542255 +
tagtctctcaaaaagctaactt

SEQ ID NO: 207766 - DNA, 22 bp, Artificial Sequence
  Synthetic oligonucleotide; CTA chr2 60542235 60542256 60542252 60542257 +
gtctctcaaaaagctaacttta

SEQ ID NO: 207767 - DNA, 22 bp, Artificial Sequence
  Synthetic oligonucleotide; CTC chr2 60542240 60542261 60542257 60542262 +
tcaaaaagctaactttatgaca

SEQ ID NO: 207768 - DNA, 22 bp, Artificial Sequence
  Synthetic oligonucleotide; CTC chr2 60542242 60542263 60542259 60542264 +
aaaaagctaactttatgacagc

SEQ ID NO: 207769 - DNA, 22 bp, Artificial Sequence
  Synthetic oligonucleotide; CTA chr2 60542251 60542272 60542268 60542273 +
actttatgacagcccaaaccta

SEQ ID NO: 207770 - DNA, 22 bp, Artificial Sequence
  Synthetic oligonucleotide; CTT chr2 60542255 60542276 60542272 60542277 +
tatgacagcccaaacctaattt

SEQ ID NO: 207771 - DNA, 22 bp, Artificial Sequence
  Synthetic oligonucleotide; TTT chr2 60542256 60542277 60542273 60542278 +
atgacagcccaaacctaattta

SEQ ID NO: 207772 - DNA, 22 bp, Artificial Sequence
  Synthetic oligonucleotide; TTA chr2 60542257 60542278 60542274 60542279 +
tgacagcccaaacctaatttaa

SEQ ID NO: 207773 - DNA, 22 bp, Artificial Sequence
  Synthetic oligonucleotide; CTA chr2 60542273 60542294 60542290 60542295 +
atttaaagattcctatgtgcaa

SEQ ID NO: 207774 - DNA, 22 bp, Artificial Sequence
  Synthetic oligonucleotide; TTT chr2 60542277 60542298 60542294 60542299 +
aaagattcctatgtgcaataag

SEQ ID NO: 207775 - DNA, 22 bp, Artificial Sequence
  Synthetic oligonucleotide; TTA chr2 60542278 60542299 60542295 60542300 +
aagattcctatgtgcaataagc

SEQ ID NO: 207776 - DNA, 22 bp, Artificial Sequence
  Synthetic oligonucleotide; TTC chr2 60542285 60542306 60542302 60542307 +
ctatgtgcaataagccaaaacc

SEQ ID NO: 207777 - DNA, 22 bp, Artificial Sequence
  Synthetic oligonucleotide; CTA chr2 60542288 60542309 60542305 60542310 +
tgtgcaataagccaaaacctca

SEQ ID NO: 207778 - DNA, 22 bp, Artificial Sequence
  Synthetic oligonucleotide; CTC chr2 60542309 60542330 60542326 60542331 +
aaatctgacatgatgggataat

SEQ ID NO: 207779 - DNA, 22 bp, Artificial Sequence
  Synthetic oligonucleotide; CTG chr2 60542316 60542337 60542333 60542338 +
acatgatgggataatgtttggg

SEQ ID NO: 207780 - DNA, 22 bp, Artificial Sequence
  Synthetic oligonucleotide; TTT chr2 60542335 60542356 60542352 60542357 +
gggtcttttctataagggaaca

SEQ ID NO: 207781 - DNA, 22 bp, Artificial Sequence
  Synthetic oligonucleotide; TTG chr2 60542336 60542357 60542353 60542358 +
ggtcttttctataagggaacag

SEQ ID NO: 207782 - DNA, 22 bp, Artificial Sequence
  Synthetic oligonucleotide; CTT chr2 60542342 60542363 60542359 60542364 +
ttctataagggaacagcagttt

SEQ ID NO: 207783 - DNA, 22 bp, Artificial Sequence
  Synthetic oligonucleotide; TTT chr2 60542343 60542364 60542360 60542365 +
tctataagggaacagcagtttc

SEQ ID NO: 207784 - DNA, 22 bp, Artificial Sequence
  Synthetic oligonucleotide; TTT chr2 60542344 60542365 60542361 60542366 +
ctataagggaacagcagtttca

SEQ ID NO: 207785 - DNA, 22 bp, Artificial Sequence
  Synthetic oligonucleotide; TTC chr2 60542345 60542366 60542362 60542367 +
tataagggaacagcagtttcac

SEQ ID NO: 207786 - DNA, 22 bp, Artificial Sequence
  Synthetic oligonucleotide; CTA chr2 60542347 60542368 60542364 60542369 +
taagggaacagcagtttcacat

SEQ ID NO: 207787 - DNA, 22 bp, Artificial Sequence
  Synthetic oligonucleotide; TTT chr2 60542364 60542385 60542381 60542386 +
cacattcagtaatcttccatga

SEQ ID NO: 207788 - DNA, 22 bp, Artificial Sequence
  Synthetic oligonucleotide; TTC chr2 60542365 60542386 60542382 60542387 +
acattcagtaatcttccatgaa

SEQ ID NO: 207789 - DNA, 22 bp, Artificial Sequence
  Synthetic oligonucleotide; TTC chr2 60542371 60542392 60542388 60542393 +
agtaatcttccatgaatatttc

SEQ ID NO: 207790 - DNA, 22 bp, Artificial Sequence
  Synthetic oligonucleotide; CTT chr2 60542380 60542401 60542397 60542402 +
ccatgaatatttccccccatca

SEQ ID NO: 207791 - DNA, 22 bp, Artificial Sequence
  Synthetic oligonucleotide; TTC chr2 60542381 60542402 60542398 60542403 +
catgaatatttccccccatcat

SEQ ID NO: 207792 - DNA, 22 bp, Artificial Sequence
  Synthetic oligonucleotide; TTT chr2 60542392 60542413 60542409 60542414 +
ccccccatcataaaatatgaga

SEQ ID NO: 207793 - DNA, 22 bp, Artificial Sequence
  Synthetic oligonucleotide; TTC chr2 60542393 60542414 60542410 60542415 +
cccccatcataaaatatgagac

SEQ ID NO: 207794 - DNA, 22 bp, Artificial Sequence
  Synthetic oligonucleotide; CTA chr2 60542417 60542438 60542434 60542439 +
aaaaaaaagaaaacaaaacaaa

SEQ ID NO: 207795 - DNA, 22 bp, Artificial Sequence
  Synthetic oligonucleotide; CTA chr2 60542451 60542472 60542468 60542473 +
ttgaaagctctgactgcaagtc

SEQ ID NO: 207796 - DNA, 22 bp, Artificial Sequence
  Synthetic oligonucleotide; TTG chr2 60542454 60542475 60542471 60542476 +
aaagctctgactgcaagtcaaa

SEQ ID NO: 207797 - DNA, 22 bp, Artificial Sequence
  Synthetic oligonucleotide; CTC chr2 60542461 60542482 60542478 60542483 +
tgactgcaagtcaaaggctgct

SEQ ID NO: 207798 - DNA, 22 bp, Artificial Sequence
  Synthetic oligonucleotide; CTG chr2 60542463 60542484 60542480 60542485 +
actgcaagtcaaaggctgctga

SEQ ID NO: 207799 - DNA, 22 bp, Artificial Sequence
  Synthetic oligonucleotide; CTG chr2 60542467 60542488 60542484 60542489 +
caagtcaaaggctgctgatatc

SEQ ID NO: 207800 - DNA, 22 bp, Artificial Sequence
  Synthetic oligonucleotide; CTG chr2 60542481 60542502 60542498 60542503 +
ctgatatctgagggtggatatt

SEQ ID NO: 207801 - DNA, 22 bp, Artificial Sequence
  Synthetic oligonucleotide; CTG chr2 60542484 60542505 60542501 60542506 +
atatctgagggtggatatttga

SEQ ID NO: 207802 - DNA, 22 bp, Artificial Sequence
  Synthetic oligonucleotide; CTG chr2 60542491 60542512 60542508 60542513 +
agggtggatatttgacacacat

SEQ ID NO: 207803 - DNA, 22 bp, Artificial Sequence
  Synthetic oligonucleotide; TTT chr2 60542504 60542525 60542521 60542526 +
gacacacatattgatgaactgg

SEQ ID NO: 207804 - DNA, 22 bp, Artificial Sequence
  Synthetic oligonucleotide; TTG chr2 60542505 60542526 60542522 60542527 +
acacacatattgatgaactggg

SEQ ID NO: 207805 - DNA, 22 bp, Artificial Sequence
  Synthetic oligonucleotide; TTG chr2 60542517 60542538 60542534 60542539 +
atgaactgggcccacacaacat

SEQ ID NO: 207806 - DNA, 22 bp, Artificial Sequence
  Synthetic oligonucleotide; CTG chr2 60542525 60542546 60542542 60542547 +
ggcccacacaacataagctgct

SEQ ID NO: 207807 - DNA, 22 bp, Artificial Sequence
  Synthetic oligonucleotide; CTG chr2 60542545 60542566 60542562 60542567 +
ctaattcccagctaaattaata

SEQ ID NO: 207808 - DNA, 22 bp, Artificial Sequence
  Synthetic oligonucleotide; CTA chr2 60542548 60542569 60542565 60542570 +
attcccagctaaattaatacta

SEQ ID NO: 207809 - DNA, 22 bp, Artificial Sequence
  Synthetic oligonucleotide; TTC chr2 60542552 60542573 60542569 60542574 +
ccagctaaattaatactacttc

SEQ ID NO: 207810 - DNA, 22 bp, Artificial Sequence
  Synthetic oligonucleotide; CTA chr2 60542559 60542580 60542576 60542581 +
aattaatactacttcaatgatc

SEQ ID NO: 207811 - DNA, 22 bp, Artificial Sequence
  Synthetic oligonucleotide; TTA chr2 60542564 60542585 60542581 60542586 +
atactacttcaatgatctcaat

SEQ ID NO: 207812 - DNA, 22 bp, Artificial Sequence
  Synthetic oligonucleotide; CTA chr2 60542570 60542591 60542587 60542592 +
cttcaatgatctcaatggatca

SEQ ID NO: 207813 - DNA, 22 bp, Artificial Sequence
  Synthetic oligonucleotide; CTT chr2 60542573 60542594 60542590 60542595 +
caatgatctcaatggatcacaa

SEQ ID NO: 207814 - DNA, 22 bp, Artificial Sequence
  Synthetic oligonucleotide; TTC chr2 60542574 60542595 60542591 60542596 +
aatgatctcaatggatcacaat

SEQ ID NO: 207815 - DNA, 22 bp, Artificial Sequence
  Synthetic oligonucleotide; CTC chr2 60542583 60542604 60542600 60542605 +
aatggatcacaatcacacaata

SEQ ID NO: 207816 - DNA, 22 bp, Artificial Sequence
  Synthetic oligonucleotide; TTT chr2 60542608 60542629 60542625 60542630 +
tgaatatttaaataaaatgaaa

SEQ ID NO: 207817 - DNA, 22 bp, Artificial Sequence
  Synthetic oligonucleotide; TTT chr2 60542609 60542630 60542626 60542631 +
gaatatttaaataaaatgaaaa

SEQ ID NO: 207818 - DNA, 22 bp, Artificial Sequence
  Synthetic oligonucleotide; TTG chr2 60542610 60542631 60542627 60542632 +
aatatttaaataaaatgaaaaa

SEQ ID NO: 207819 - DNA, 22 bp, Artificial Sequence
  Synthetic oligonucleotide; TTT chr2 60542617 60542638 60542634 60542639 +
aaataaaatgaaaaaagcaacc

SEQ ID NO: 207820 - DNA, 22 bp, Artificial Sequence
  Synthetic oligonucleotide; TTA chr2 60542618 60542639 60542635 60542640 +
aataaaatgaaaaaagcaacct

SEQ ID NO: 207821 - DNA, 22 bp, Artificial Sequence
  Synthetic oligonucleotide; CTG chr2 60542641 60542662 60542658 60542663 +
attaacatctatgtgtacagct

SEQ ID NO: 207822 - DNA, 22 bp, Artificial Sequence
  Synthetic oligonucleotide; TTA chr2 60542645 60542666 60542662 60542667 +
acatctatgtgtacagctcata

SEQ ID NO: 207823 - DNA, 22 bp, Artificial Sequence
  Synthetic oligonucleotide; CTA chr2 60542652 60542673 60542669 60542674 +
tgtgtacagctcatatgtgtac

SEQ ID NO: 207824 - DNA, 22 bp, Artificial Sequence
  Synthetic oligonucleotide; CTC chr2 60542664 60542685 60542681 60542686 +
atatgtgtacgtggatgaagtg

SEQ ID NO: 207825 - DNA, 22 bp, Artificial Sequence
  Synthetic oligonucleotide; CTA chr2 60542706 60542727 60542723 60542728 +
ttcaccaggtaaaaagaatcct

SEQ ID NO: 207826 - DNA, 22 bp, Artificial Sequence
  Synthetic oligonucleotide; TTC chr2 60542709 60542730 60542726 60542731 +
accaggtaaaaagaatcctcta

SEQ ID NO: 207827 - DNA, 22 bp, Artificial Sequence
  Synthetic oligonucleotide; CTC chr2 60542729 60542750 60542746 60542751 +
taaaaaatactcagtttgggcc

SEQ ID NO: 207828 - DNA, 22 bp, Artificial Sequence
  Synthetic oligonucleotide; CTA chr2 60542731 60542752 60542748 60542753 +
aaaaatactcagtttgggccag

SEQ ID NO: 207829 - DNA, 22 bp, Artificial Sequence
  Synthetic oligonucleotide; CTC chr2 60542741 60542762 60542758 60542763 +
agtttgggccaggtgcggtcgc

SEQ ID NO: 207830 - DNA, 22 bp, Artificial Sequence
  Synthetic oligonucleotide; TTT chr2 60542746 60542767 60542763 60542768 +
gggccaggtgcggtcgctcaag

SEQ ID NO: 207831 - DNA, 22 bp, Artificial Sequence
  Synthetic oligonucleotide; TTG chr2 60542747 60542768 60542764 60542769 +
ggccaggtgcggtcgctcaagc

SEQ ID NO: 207832 - DNA, 22 bp, Artificial Sequence
  Synthetic oligonucleotide; CTC chr2 60542765 60542786 60542782 60542787 +
aagcctgtaatcccagcacttt

SEQ ID NO: 207833 - DNA, 22 bp, Artificial Sequence
  Synthetic oligonucleotide; CTG chr2 60542772 60542793 60542789 60542794 +
taatcccagcactttgggaggc

SEQ ID NO: 207834 - DNA, 22 bp, Artificial Sequence
  Synthetic oligonucleotide; CTT chr2 60542786 60542807 60542803 60542808 +
tgggaggccaagccaggtggat

SEQ ID NO: 207835 - DNA, 22 bp, Artificial Sequence
  Synthetic oligonucleotide; TTT chr2 60542787 60542808 60542804 60542809 +
gggaggccaagccaggtggatc

SEQ ID NO: 207836 - DNA, 22 bp, Artificial Sequence
  Synthetic oligonucleotide; TTG chr2 60542788 60542809 60542805 60542810 +
ggaggccaagccaggtggatca

SEQ ID NO: 207837 - DNA, 22 bp, Artificial Sequence
  Synthetic oligonucleotide; CTG chr2 60542814 60542835 60542831 60542836 +
aggtcaggagttcaagaccagc

SEQ ID NO: 207838 - DNA, 22 bp, Artificial Sequence
  Synthetic oligonucleotide; TTC chr2 60542827 60542848 60542844 60542849 +
aagaccagcctggccaacatgg

SEQ ID NO: 207839 - DNA, 22 bp, Artificial Sequence
  Synthetic oligonucleotide; CTG chr2 60542839 60542860 60542856 60542861 +
gccaacatggtgaaaccctgcc

SEQ ID NO: 207840 - DNA, 22 bp, Artificial Sequence
  Synthetic oligonucleotide; CTG chr2 60542859 60542880 60542876 60542881 +
cctctactgaaaatacaaaaaa

SEQ ID NO: 207841 - DNA, 22 bp, Artificial Sequence
  Synthetic oligonucleotide; CTC chr2 60542863 60542884 60542880 60542885 +
tactgaaaatacaaaaaactag

SEQ ID NO: 207842 - DNA, 22 bp, Artificial Sequence
  Synthetic oligonucleotide; CTA chr2 60542865 60542886 60542882 60542887 +
ctgaaaatacaaaaaactagct

SEQ ID NO: 207843 - DNA, 22 bp, Artificial Sequence
  Synthetic oligonucleotide; CTG chr2 60542868 60542889 60542885 60542890 +
aaaatacaaaaaactagctggg

SEQ ID NO: 207844 - DNA, 22 bp, Artificial Sequence
  Synthetic oligonucleotide; CTA chr2 60542884 60542905 60542901 60542906 +
gctgggcgtagtggcacacgcc

SEQ ID NO: 207845 - DNA, 22 bp, Artificial Sequence
  Synthetic oligonucleotide; CTG chr2 60542888 60542909 60542905 60542910 +
ggcgtagtggcacacgcctgta

SEQ ID NO: 207846 - DNA, 22 bp, Artificial Sequence
  Synthetic oligonucleotide; CTG chr2 60542908 60542929 60542925 60542930 +
taatcccagctacttgggaggc

SEQ ID NO: 207847 - DNA, 22 bp, Artificial Sequence
  Synthetic oligonucleotide; CTA chr2 60542920 60542941 60542937 60542942 +
cttgggaggctgaggcaggaga

SEQ ID NO: 207848 - DNA, 22 bp, Artificial Sequence
  Synthetic oligonucleotide; CTT chr2 60542923 60542944 60542940 60542945 +
gggaggctgaggcaggagaatc

SEQ ID NO: 207849 - DNA, 22 bp, Artificial Sequence
  Synthetic oligonucleotide; TTG chr2 60542924 60542945 60542941 60542946 +
ggaggctgaggcaggagaatcg

SEQ ID NO: 207850 - DNA, 22 bp, Artificial Sequence
  Synthetic oligonucleotide; CTG chr2 60542932 60542953 60542949 60542954 +
aggcaggagaatcgcttgaacc

SEQ ID NO: 207851 - DNA, 22 bp, Artificial Sequence
  Synthetic oligonucleotide; CTT chr2 60542949 60542970 60542966 60542971 +
gaacctaggaggcagaggttgc

SEQ ID NO: 207852 - DNA, 22 bp, Artificial Sequence
  Synthetic oligonucleotide; TTG chr2 60542950 60542971 60542967 60542972 +
aacctaggaggcagaggttgca

SEQ ID NO: 207853 - DNA, 22 bp, Artificial Sequence
  Synthetic oligonucleotide; CTA chr2 60542956 60542977 60542973 60542978 +
ggaggcagaggttgcagtgagc

SEQ ID NO: 207854 - DNA, 22 bp, Artificial Sequence
  Synthetic oligonucleotide; TTG chr2 60542970 60542991 60542987 60542992 +
cagtgagccaaaatcatgccac

SEQ ID NO: 207855 - DNA, 22 bp, Artificial Sequence
  Synthetic oligonucleotide; CTG chr2 60542994 60543015 60543011 60543016 +
cactccagcctgggcaacaaga

SEQ ID NO: 207856 - DNA, 22 bp, Artificial Sequence
  Synthetic oligonucleotide; CTC chr2 60542999 60543020 60543016 60543021 +
cagcctgggcaacaagagcaaa

SEQ ID NO: 207857 - DNA, 22 bp, Artificial Sequence
  Synthetic oligonucleotide; CTG chr2 60543006 60543027 60543023 60543028 +
ggcaacaagagcaaaactctgt

SEQ ID NO: 207858 - DNA, 22 bp, Artificial Sequence
  Synthetic oligonucleotide; CTC chr2 60543025 60543046 60543042 60543047 +
tgtctaaaaaaaaaaaaaaaaa

SEQ ID NO: 207859 - DNA, 22 bp, Artificial Sequence
  Synthetic oligonucleotide; CTG chr2 60543027 60543048 60543044 60543049 +
tctaaaaaaaaaaaaaaaaaaa

SEQ ID NO: 207860 - DNA, 22 bp, Artificial Sequence
  Synthetic oligonucleotide; CTA chr2 60543031 60543052 60543048 60543053 +
aaaaaaaaaaaaaaaaaaaaaa

SEQ ID NO: 207861 - DNA, 22 bp, Artificial Sequence
  Synthetic oligonucleotide; CTC chr2 60543057 60543078 60543074 60543079 +
agcttggagaggcctgagtaca

SEQ ID NO: 207862 - DNA, 22 bp, Artificial Sequence
  Synthetic oligonucleotide; CTT chr2 60543062 60543083 60543079 60543084 +
ggagaggcctgagtacagtgaa

SEQ ID NO: 207863 - DNA, 22 bp, Artificial Sequence
  Synthetic oligonucleotide; TTG chr2 60543063 60543084 60543080 60543085 +
gagaggcctgagtacagtgaaa

SEQ ID NO: 207864 - DNA, 22 bp, Artificial Sequence
  Synthetic oligonucleotide; CTG chr2 60543073 60543094 60543090 60543095 +
agtacagtgaaaatgcatacca

SEQ ID NO: 207865 - DNA, 22 bp, Artificial Sequence
  Synthetic oligonucleotide; TTT chr2 60543098 60543119 60543115 60543120 +
tactcaagatttaaagaactct

SEQ ID NO: 207866 - DNA, 22 bp, Artificial Sequence
  Synthetic oligonucleotide; TTT chr2 60543099 60543120 60543116 60543121 +
actcaagatttaaagaactctg

SEQ ID NO: 207867 - DNA, 22 bp, Artificial Sequence
  Synthetic oligonucleotide; TTA chr2 60543100 60543121 60543117 60543122 +
ctcaagatttaaagaactctgc

SEQ ID NO: 207868 - DNA, 22 bp, Artificial Sequence
  Synthetic oligonucleotide; CTC chr2 60543103 60543124 60543120 60543125 +
aagatttaaagaactctgcctt

SEQ ID NO: 207869 - DNA, 22 bp, Artificial Sequence
  Synthetic oligonucleotide; TTT chr2 60543110 60543131 60543127 60543132 +
aaagaactctgccttattctcc

SEQ ID NO: 207870 - DNA, 22 bp, Artificial Sequence
  Synthetic oligonucleotide; TTA chr2 60543111 60543132 60543128 60543133 +
aagaactctgccttattctcct

SEQ ID NO: 207871 - DNA, 22 bp, Artificial Sequence
  Synthetic oligonucleotide; CTC chr2 60543119 60543140 60543136 60543141 +
tgccttattctcctatctgaaa

SEQ ID NO: 207872 - DNA, 22 bp, Artificial Sequence
  Synthetic oligonucleotide; CTG chr2 60543121 60543142 60543138 60543143 +
ccttattctcctatctgaaagt

SEQ ID NO: 207873 - DNA, 22 bp, Artificial Sequence
  Synthetic oligonucleotide; CTT chr2 60543125 60543146 60543142 60543147 +
attctcctatctgaaagtcccg

SEQ ID NO: 207874 - DNA, 22 bp, Artificial Sequence
  Synthetic oligonucleotide; TTA chr2 60543126 60543147 60543143 60543148 +
ttctcctatctgaaagtcccga

SEQ ID NO: 207875 - DNA, 22 bp, Artificial Sequence
  Synthetic oligonucleotide; TTC chr2 60543129 60543150 60543146 60543151 +
tcctatctgaaagtcccgaatt

SEQ ID NO: 207876 - DNA, 22 bp, Artificial Sequence
  Synthetic oligonucleotide; CTC chr2 60543131 60543152 60543148 60543153 +
ctatctgaaagtcccgaattct

SEQ ID NO: 207877 - DNA, 22 bp, Artificial Sequence
  Synthetic oligonucleotide; CTA chr2 60543134 60543155 60543151 60543156 +
tctgaaagtcccgaattctaag

SEQ ID NO: 207878 - DNA, 22 bp, Artificial Sequence
  Synthetic oligonucleotide; CTG chr2 60543138 60543159 60543155 60543160 +
aaagtcccgaattctaagcttt

SEQ ID NO: 207879 - DNA, 22 bp, Artificial Sequence
  Synthetic oligonucleotide; TTC chr2 60543152 60543173 60543169 60543174 +
taagctttatttatcttaggaa

SEQ ID NO: 207880 - DNA, 22 bp, Artificial Sequence
  Synthetic oligonucleotide; CTA chr2 60543154 60543175 60543171 60543176 +
agctttatttatcttaggaaga

SEQ ID NO: 207881 - DNA, 22 bp, Artificial Sequence
  Synthetic oligonucleotide; CTT chr2 60543159 60543180 60543176 60543181 +
tatttatcttaggaagaagatc

SEQ ID NO: 207882 - DNA, 22 bp, Artificial Sequence
  Synthetic oligonucleotide; TTT chr2 60543160 60543181 60543177 60543182 +
atttatcttaggaagaagatct

SEQ ID NO: 207883 - DNA, 22 bp, Artificial Sequence
  Synthetic oligonucleotide; TTA chr2 60543161 60543182 60543178 60543183 +
tttatcttaggaagaagatctg

SEQ ID NO: 207884 - DNA, 22 bp, Artificial Sequence
  Synthetic oligonucleotide; TTT chr2 60543164 60543185 60543181 60543186 +
atcttaggaagaagatctgtca

SEQ ID NO: 207885 - DNA, 22 bp, Artificial Sequence
  Synthetic oligonucleotide; TTA chr2 60543165 60543186 60543182 60543187 +
tcttaggaagaagatctgtcac

SEQ ID NO: 207886 - DNA, 22 bp, Artificial Sequence
  Synthetic oligonucleotide; CTT chr2 60543169 60543190 60543186 60543191 +
aggaagaagatctgtcactgtt

SEQ ID NO: 207887 - DNA, 22 bp, Artificial Sequence
  Synthetic oligonucleotide; TTA chr2 60543170 60543191 60543187 60543192 +
ggaagaagatctgtcactgttt

SEQ ID NO: 207888 - DNA, 22 bp, Artificial Sequence
  Synthetic oligonucleotide; CTG chr2 60543183 60543204 60543200 60543205 +
tcactgttttattcttgcttcc

SEQ ID NO: 207889 - DNA, 22 bp, Artificial Sequence
  Synthetic oligonucleotide; CTG chr2 60543189 60543210 60543206 60543211 +
ttttattcttgcttcctgccta

SEQ ID NO: 207890 - DNA, 22 bp, Artificial Sequence
  Synthetic oligonucleotide; TTT chr2 60543192 60543213 60543209 60543214 +
tattcttgcttcctgcctataa

SEQ ID NO: 207891 - DNA, 22 bp, Artificial Sequence
  Synthetic oligonucleotide; TTT chr2 60543193 60543214 60543210 60543215 +
attcttgcttcctgcctataaa

SEQ ID NO: 207892 - DNA, 22 bp, Artificial Sequence
  Synthetic oligonucleotide; TTA chr2 60543194 60543215 60543211 60543216 +
ttcttgcttcctgcctataaaa

SEQ ID NO: 207893 - DNA, 22 bp, Artificial Sequence
  Synthetic oligonucleotide; TTC chr2 60543197 60543218 60543214 60543219 +
ttgcttcctgcctataaaatag

SEQ ID NO: 207894 - DNA, 22 bp, Artificial Sequence
  Synthetic oligonucleotide; CTT chr2 60543199 60543220 60543216 60543221 +
gcttcctgcctataaaatagta

SEQ ID NO: 207895 - DNA, 22 bp, Artificial Sequence
  Synthetic oligonucleotide; TTG chr2 60543200 60543221 60543217 60543222 +
cttcctgcctataaaatagtac

SEQ ID NO: 207896 - DNA, 22 bp, Artificial Sequence
  Synthetic oligonucleotide; CTT chr2 60543203 60543224 60543220 60543225 +
cctgcctataaaatagtacagg

SEQ ID NO: 207897 - DNA, 22 bp, Artificial Sequence
  Synthetic oligonucleotide; TTC chr2 60543204 60543225 60543221 60543226 +
ctgcctataaaatagtacaggc

SEQ ID NO: 207898 - DNA, 22 bp, Artificial Sequence
  Synthetic oligonucleotide; CTG chr2 60543207 60543228 60543224 60543229 +
cctataaaatagtacaggctca

SEQ ID NO: 207899 - DNA, 22 bp, Artificial Sequence
  Synthetic oligonucleotide; CTA chr2 60543211 60543232 60543228 60543233 +
taaaatagtacaggctcacagt

SEQ ID NO: 207900 - DNA, 22 bp, Artificial Sequence
  Synthetic oligonucleotide; CTC chr2 60543228 60543249 60543245 60543250 +
acagtgaactcaaatccaactt

SEQ ID NO: 207901 - DNA, 22 bp, Artificial Sequence
  Synthetic oligonucleotide; CTC chr2 60543239 60543260 60543256 60543261 +
aaatccaacttacatcacttta

SEQ ID NO: 207902 - DNA, 22 bp, Artificial Sequence
  Synthetic oligonucleotide; CTT chr2 60543250 60543271 60543267 60543272 +
acatcactttaataaagccttt

SEQ ID NO: 207903 - DNA, 22 bp, Artificial Sequence
  Synthetic oligonucleotide; TTA chr2 60543251 60543272 60543268 60543273 +
catcactttaataaagcctttc

SEQ ID NO: 207904 - DNA, 22 bp, Artificial Sequence
  Synthetic oligonucleotide; CTT chr2 60543259 60543280 60543276 60543281 +
taataaagcctttcctacccag

SEQ ID NO: 207905 - DNA, 22 bp, Artificial Sequence
  Synthetic oligonucleotide; TTT chr2 60543260 60543281 60543277 60543282 +
aataaagcctttcctacccagc

SEQ ID NO: 207906 - DNA, 22 bp, Artificial Sequence
  Synthetic oligonucleotide; TTA chr2 60543261 60543282 60543278 60543283 +
ataaagcctttcctacccagca

SEQ ID NO: 207907 - DNA, 22 bp, Artificial Sequence
  Synthetic oligonucleotide; CTT chr2 60543271 60543292 60543288 60543293 +
tcctacccagcacgcttaaatg

SEQ ID NO: 207908 - DNA, 22 bp, Artificial Sequence
  Synthetic oligonucleotide; TTT chr2 60543272 60543293 60543289 60543294 +
cctacccagcacgcttaaatga

SEQ ID NO: 207909 - DNA, 22 bp, Artificial Sequence
  Synthetic oligonucleotide; TTC chr2 60543273 60543294 60543290 60543295 +
ctacccagcacgcttaaatgac

SEQ ID NO: 207910 - DNA, 22 bp, Artificial Sequence
  Synthetic oligonucleotide; CTA chr2 60543276 60543297 60543293 60543298 +
cccagcacgcttaaatgactac

SEQ ID NO: 207911 - DNA, 22 bp, Artificial Sequence
  Synthetic oligonucleotide; CTT chr2 60543288 60543309 60543305 60543310 +
aaatgactaccttttatgtggt

SEQ ID NO: 207912 - DNA, 22 bp, Artificial Sequence
  Synthetic oligonucleotide; TTA chr2 60543289 60543310 60543306 60543311 +
aatgactaccttttatgtggtt

SEQ ID NO: 207913 - DNA, 22 bp, Artificial Sequence
  Synthetic oligonucleotide; CTA chr2 60543297 60543318 60543314 60543319 +
ccttttatgtggttgccaaaca

SEQ ID NO: 207914 - DNA, 22 bp, Artificial Sequence
  Synthetic oligonucleotide; CTT chr2 60543301 60543322 60543318 60543323 +
ttatgtggttgccaaacacatt

SEQ ID NO: 207915 - DNA, 22 bp, Artificial Sequence
  Synthetic oligonucleotide; TTT chr2 60543302 60543323 60543319 60543324 +
tatgtggttgccaaacacattc

SEQ ID NO: 207916 - DNA, 22 bp, Artificial Sequence
  Synthetic oligonucleotide; TTT chr2 60543303 60543324 60543320 60543325 +
atgtggttgccaaacacattct

SEQ ID NO: 207917 - DNA, 22 bp, Artificial Sequence
  Synthetic oligonucleotide; TTA chr2 60543304 60543325 60543321 60543326 +
tgtggttgccaaacacattctt

SEQ ID NO: 207918 - DNA, 22 bp, Artificial Sequence
  Synthetic oligonucleotide; TTG chr2 60543312 60543333 60543329 60543334 +
ccaaacacattcttctagagat

SEQ ID NO: 207919 - DNA, 22 bp, Artificial Sequence
  Synthetic oligonucleotide; TTC chr2 60543324 60543345 60543341 60543346 +
ttctagagattcatcaatatat

SEQ ID NO: 207920 - DNA, 22 bp, Artificial Sequence
  Synthetic oligonucleotide; CTT chr2 60543326 60543347 60543343 60543348 +
ctagagattcatcaatatatct

SEQ ID NO: 207921 - DNA, 22 bp, Artificial Sequence
  Synthetic oligonucleotide; TTC chr2 60543327 60543348 60543344 60543349 +
tagagattcatcaatatatctc

SEQ ID NO: 207922 - DNA, 22 bp, Artificial Sequence
  Synthetic oligonucleotide; CTA chr2 60543329 60543350 60543346 60543351 +
gagattcatcaatatatctctt

SEQ ID NO: 207923 - DNA, 22 bp, Artificial Sequence
  Synthetic oligonucleotide; TTC chr2 60543336 60543357 60543353 60543358 +
atcaatatatctctttccttaa

SEQ ID NO: 207924 - DNA, 22 bp, Artificial Sequence
  Synthetic oligonucleotide; CTC chr2 60543349 60543370 60543366 60543371 +
tttccttaatacaaggcattgc

SEQ ID NO: 207925 - DNA, 22 bp, Artificial Sequence
  Synthetic oligonucleotide; CTT chr2 60543351 60543372 60543368 60543373 +
tccttaatacaaggcattgctt

SEQ ID NO: 207926 - DNA, 22 bp, Artificial Sequence
  Synthetic oligonucleotide; TTT chr2 60543352 60543373 60543369 60543374 +
ccttaatacaaggcattgcttc

SEQ ID NO: 207927 - DNA, 22 bp, Artificial Sequence
  Synthetic oligonucleotide; TTC chr2 60543353 60543374 60543370 60543375 +
cttaatacaaggcattgcttct

SEQ ID NO: 207928 - DNA, 22 bp, Artificial Sequence
  Synthetic oligonucleotide; CTT chr2 60543356 60543377 60543373 60543378 +
aatacaaggcattgcttctcct

SEQ ID NO: 207929 - DNA, 22 bp, Artificial Sequence
  Synthetic oligonucleotide; TTA chr2 60543357 60543378 60543374 60543379 +
atacaaggcattgcttctcctt

SEQ ID NO: 207930 - DNA, 22 bp, Artificial Sequence
  Synthetic oligonucleotide; TTG chr2 60543370 60543391 60543387 60543392 +
cttctcctttctttttgtgaca

SEQ ID NO: 207931 - DNA, 22 bp, Artificial Sequence
  Synthetic oligonucleotide; CTT chr2 60543373 60543394 60543390 60543395 +
ctcctttctttttgtgacacaa

SEQ ID NO: 207932 - DNA, 22 bp, Artificial Sequence
  Synthetic oligonucleotide; TTC chr2 60543374 60543395 60543391 60543396 +
tcctttctttttgtgacacaat

SEQ ID NO: 207933 - DNA, 22 bp, Artificial Sequence
  Synthetic oligonucleotide; CTC chr2 60543376 60543397 60543393 60543398 +
ctttctttttgtgacacaattc

SEQ ID NO: 207934 - DNA, 22 bp, Artificial Sequence
  Synthetic oligonucleotide; CTT chr2 60543379 60543400 60543396 60543401 +
tctttttgtgacacaattcaaa

SEQ ID NO: 207935 - DNA, 22 bp, Artificial Sequence
  Synthetic oligonucleotide; TTT chr2 60543380 60543401 60543397 60543402 +
ctttttgtgacacaattcaaat

SEQ ID NO: 207936 - DNA, 22 bp, Artificial Sequence
  Synthetic oligonucleotide; TTC chr2 60543381 60543402 60543398 60543403 +
tttttgtgacacaattcaaata

SEQ ID NO: 207937 - DNA, 22 bp, Artificial Sequence
  Synthetic oligonucleotide; CTT chr2 60543383 60543404 60543400 60543405 +
tttgtgacacaattcaaatatc

SEQ ID NO: 207938 - DNA, 22 bp, Artificial Sequence
  Synthetic oligonucleotide; TTT chr2 60543384 60543405 60543401 60543406 +
ttgtgacacaattcaaatatct

SEQ ID NO: 207939 - DNA, 22 bp, Artificial Sequence
  Synthetic oligonucleotide; TTT chr2 60543385 60543406 60543402 60543407 +
tgtgacacaattcaaatatcta

SEQ ID NO: 207940 - DNA, 22 bp, Artificial Sequence
  Synthetic oligonucleotide; TTT chr2 60543386 60543407 60543403 60543408 +
gtgacacaattcaaatatctac

SEQ ID NO: 207941 - DNA, 22 bp, Artificial Sequence
  Synthetic oligonucleotide; TTG chr2 60543387 60543408 60543404 60543409 +
tgacacaattcaaatatctact

SEQ ID NO: 207942 - DNA, 22 bp, Artificial Sequence
  Synthetic oligonucleotide; TTC chr2 60543398 60543419 60543415 60543420 +
aaatatctactgaatgattact

SEQ ID NO: 207943 - DNA, 22 bp, Artificial Sequence
  Synthetic oligonucleotide; CTA chr2 60543407 60543428 60543424 60543429 +
ctgaatgattactgttattgtt

SEQ ID NO: 207944 - DNA, 22 bp, Artificial Sequence
  Synthetic oligonucleotide; CTG chr2 60543410 60543431 60543427 60543432 +
aatgattactgttattgtttcc

SEQ ID NO: 207945 - DNA, 22 bp, Artificial Sequence
  Synthetic oligonucleotide; TTA chr2 60543418 60543439 60543435 60543440 +
ctgttattgtttccttcctcat

SEQ ID NO: 207946 - DNA, 22 bp, Artificial Sequence
  Synthetic oligonucleotide; CTG chr2 60543421 60543442 60543438 60543443 +
ttattgtttccttcctcatcat

SEQ ID NO: 207947 - DNA, 22 bp, Artificial Sequence
  Synthetic oligonucleotide; TTA chr2 60543424 60543445 60543441 60543446 +
ttgtttccttcctcatcataaa

SEQ ID NO: 207948 - DNA, 22 bp, Artificial Sequence
  Synthetic oligonucleotide; TTG chr2 60543427 60543448 60543444 60543449 +
tttccttcctcatcataaaaag

SEQ ID NO: 207949 - DNA, 22 bp, Artificial Sequence
  Synthetic oligonucleotide; TTT chr2 60543430 60543451 60543447 60543452 +
ccttcctcatcataaaaagaaa

SEQ ID NO: 207950 - DNA, 22 bp, Artificial Sequence
  Synthetic oligonucleotide; TTC chr2 60543431 60543452 60543448 60543453 +
cttcctcatcataaaaagaaaa

SEQ ID NO: 207951 - DNA, 22 bp, Artificial Sequence
  Synthetic oligonucleotide; CTT chr2 60543434 60543455 60543451 60543456 +
cctcatcataaaaagaaaagca

SEQ ID NO: 207952 - DNA, 22 bp, Artificial Sequence
  Synthetic oligonucleotide; TTC chr2 60543435 60543456 60543452 60543457 +
ctcatcataaaaagaaaagcag

SEQ ID NO: 207953 - DNA, 22 bp, Artificial Sequence
  Synthetic oligonucleotide; CTC chr2 60543438 60543459 60543455 60543460 +
atcataaaaagaaaagcagact

SEQ ID NO: 207954 - DNA, 22 bp, Artificial Sequence
  Synthetic oligonucleotide; CTT chr2 60543461 60543482 60543478 60543483 +
ggaattgtgcagacgtgcttta

SEQ ID NO: 207955 - DNA, 22 bp, Artificial Sequence
  Synthetic oligonucleotide; TTG chr2 60543462 60543483 60543479 60543484 +
gaattgtgcagacgtgctttag

SEQ ID NO: 207956 - DNA, 22 bp, Artificial Sequence
  Synthetic oligonucleotide; TTG chr2 60543468 60543489 60543485 60543490 +
tgcagacgtgctttagagaaat

SEQ ID NO: 207957 - DNA, 22 bp, Artificial Sequence
  Synthetic oligonucleotide; CTT chr2 60543481 60543502 60543498 60543503 +
tagagaaatgggctgggggtac

SEQ ID NO: 207958 - DNA, 22 bp, Artificial Sequence
  Synthetic oligonucleotide; TTT chr2 60543482 60543503 60543499 60543504 +
agagaaatgggctgggggtaca

SEQ ID NO: 207959 - DNA, 22 bp, Artificial Sequence
  Synthetic oligonucleotide; TTA chr2 60543483 60543504 60543500 60543505 +
gagaaatgggctgggggtacac

SEQ ID NO: 207960 - DNA, 22 bp, Artificial Sequence
  Synthetic oligonucleotide; CTG chr2 60543496 60543517 60543513 60543518 +
ggggtacacacacagccgtctt

SEQ ID NO: 207961 - DNA, 22 bp, Artificial Sequence
  Synthetic oligonucleotide; CTT chr2 60543518 60543539 60543535 60543540 +
ccagaacttcgcttcaggggca

SEQ ID NO: 207962 - DNA, 22 bp, Artificial Sequence
  Synthetic oligonucleotide; TTC chr2 60543519 60543540 60543536 60543541 +
cagaacttcgcttcaggggcac

SEQ ID NO: 207963 - DNA, 22 bp, Artificial Sequence
  Synthetic oligonucleotide; CTT chr2 60543527 60543548 60543544 60543549 +
cgcttcaggggcacctgagggc

SEQ ID NO: 207964 - DNA, 22 bp, Artificial Sequence
  Synthetic oligonucleotide; TTC chr2 60543528 60543549 60543545 60543550 +
gcttcaggggcacctgagggcc

SEQ ID NO: 207965 - DNA, 22 bp, Artificial Sequence
  Synthetic oligonucleotide; CTT chr2 60543532 60543553 60543549 60543554 +
caggggcacctgagggccagag

SEQ ID NO: 207966 - DNA, 22 bp, Artificial Sequence
  Synthetic oligonucleotide; TTC chr2 60543533 60543554 60543550 60543555 +
aggggcacctgagggccagagc

SEQ ID NO: 207967 - DNA, 22 bp, Artificial Sequence
  Synthetic oligonucleotide; CTG chr2 60543544 60543565 60543561 60543566 +
agggccagagcgtcggaattta

SEQ ID NO: 207968 - DNA, 22 bp, Artificial Sequence
  Synthetic oligonucleotide; TTT chr2 60543565 60543586 60543582 60543587 +
atgtgcaatggtagaatgttaa

SEQ ID NO: 207969 - DNA, 22 bp, Artificial Sequence
  Synthetic oligonucleotide; TTA chr2 60543566 60543587 60543583 60543588 +
tgtgcaatggtagaatgttaac

SEQ ID NO: 207970 - DNA, 22 bp, Artificial Sequence
  Synthetic oligonucleotide; TTA chr2 60543586 60543607 60543603 60543608 +
acttcaccataggaaactctta

SEQ ID NO: 207971 - DNA, 22 bp, Artificial Sequence
  Synthetic oligonucleotide; CTT chr2 60543590 60543611 60543607 60543612 +
caccataggaaactcttaattc

SEQ ID NO: 207972 - DNA, 22 bp, Artificial Sequence
  Synthetic oligonucleotide; TTC chr2 60543591 60543612 60543608 60543613 +
accataggaaactcttaattca

SEQ ID NO: 207973 - DNA, 22 bp, Artificial Sequence
  Synthetic oligonucleotide; CTC chr2 60543605 60543626 60543622 60543627 +
ttaattcattactgtgaattat

SEQ ID NO: 207974 - DNA, 22 bp, Artificial Sequence
  Synthetic oligonucleotide; CTT chr2 60543607 60543628 60543624 60543629 +
aattcattactgtgaattatga

SEQ ID NO: 207975 - DNA, 22 bp, Artificial Sequence
  Synthetic oligonucleotide; TTA chr2 60543608 60543629 60543625 60543630 +
attcattactgtgaattatgag

SEQ ID NO: 207976 - DNA, 22 bp, Artificial Sequence
  Synthetic oligonucleotide; TTC chr2 60543612 60543633 60543629 60543634 +
attactgtgaattatgagaagt

SEQ ID NO: 207977 - DNA, 22 bp, Artificial Sequence
  Synthetic oligonucleotide; TTA chr2 60543616 60543637 60543633 60543638 +
ctgtgaattatgagaagtcgtg

SEQ ID NO: 207978 - DNA, 22 bp, Artificial Sequence
  Synthetic oligonucleotide; CTG chr2 60543619 60543640 60543636 60543641 +
tgaattatgagaagtcgtgatt

SEQ ID NO: 207979 - DNA, 22 bp, Artificial Sequence
  Synthetic oligonucleotide; TTA chr2 60543626 60543647 60543643 60543648 +
tgagaagtcgtgattctagtta

SEQ ID NO: 207980 - DNA, 22 bp, Artificial Sequence
  Synthetic oligonucleotide; TTC chr2 60543642 60543663 60543659 60543664 +
tagttactgacatctcactttg

SEQ ID NO: 207981 - DNA, 22 bp, Artificial Sequence
  Synthetic oligonucleotide; CTA chr2 60543644 60543665 60543661 60543666 +
gttactgacatctcactttgag

SEQ ID NO: 207982 - DNA, 22 bp, Artificial Sequence
  Synthetic oligonucleotide; TTA chr2 60543648 60543669 60543665 60543670 +
ctgacatctcactttgagatgt

SEQ ID NO: 207983 - DNA, 22 bp, Artificial Sequence
  Synthetic oligonucleotide; CTG chr2 60543651 60543672 60543668 60543673 +
acatctcactttgagatgtgac

SEQ ID NO: 207984 - DNA, 22 bp, Artificial Sequence
  Synthetic oligonucleotide; CTC chr2 60543658 60543679 60543675 60543680 +
actttgagatgtgaccacacta

SEQ ID NO: 207985 - DNA, 22 bp, Artificial Sequence
  Synthetic oligonucleotide; CTT chr2 60543662 60543683 60543679 60543684 +
tgagatgtgaccacactattta

SEQ ID NO: 207986 - DNA, 22 bp, Artificial Sequence
  Synthetic oligonucleotide; TTT chr2 60543663 60543684 60543680 60543685 +
gagatgtgaccacactatttat

SEQ ID NO: 207987 - DNA, 22 bp, Artificial Sequence
  Synthetic oligonucleotide; TTG chr2 60543664 60543685 60543681 60543686 +
agatgtgaccacactatttatg

SEQ ID NO: 207988 - DNA, 22 bp, Artificial Sequence
  Synthetic oligonucleotide; CTA chr2 60543680 60543701 60543697 60543702 +
tttatgttcagccagttccagg

SEQ ID NO: 207989 - DNA, 22 bp, Artificial Sequence
  Synthetic oligonucleotide; TTT chr2 60543683 60543704 60543700 60543705 +
atgttcagccagttccagggtg

SEQ ID NO: 207990 - DNA, 22 bp, Artificial Sequence
  Synthetic oligonucleotide; TTA chr2 60543684 60543705 60543701 60543706 +
tgttcagccagttccagggtgg

SEQ ID NO: 207991 - DNA, 22 bp, Artificial Sequence
  Synthetic oligonucleotide; TTC chr2 60543689 60543710 60543706 60543711 +
agccagttccagggtgggaaca

SEQ ID NO: 207992 - DNA, 22 bp, Artificial Sequence
  Synthetic oligonucleotide; TTC chr2 60543698 60543719 60543715 60543720 +
cagggtgggaacaggtgattaa

SEQ ID NO: 207993 - DNA, 22 bp, Artificial Sequence
  Synthetic oligonucleotide; TTA chr2 60543719 60543740 60543736 60543741 +
aacacaatgaaagaaatcaaga

SEQ ID NO: 207994 - DNA, 22 bp, Artificial Sequence
  Synthetic oligonucleotide; CTT chr2 60543744 60543765 60543761 60543766 +
tgtaattattcatgcacgaaag

SEQ ID NO: 207995 - DNA, 22 bp, Artificial Sequence
  Synthetic oligonucleotide; TTT chr2 60543745 60543766 60543762 60543767 +
gtaattattcatgcacgaaagg

SEQ ID NO: 207996 - DNA, 22 bp, Artificial Sequence
  Synthetic oligonucleotide; TTG chr2 60543746 60543767 60543763 60543768 +
taattattcatgcacgaaaggt

SEQ ID NO: 207997 - DNA, 22 bp, Artificial Sequence
  Synthetic oligonucleotide; TTA chr2 60543752 60543773 60543769 60543774 +
ttcatgcacgaaaggtttacct

SEQ ID NO: 207998 - DNA, 22 bp, Artificial Sequence
  Synthetic oligonucleotide; TTC chr2 60543755 60543776 60543772 60543777 +
atgcacgaaaggtttacctcac

SEQ ID NO: 207999 - DNA, 22 bp, Artificial Sequence
  Synthetic oligonucleotide; TTT chr2 60543770 60543791 60543787 60543792 +
acctcacctgggtcacagcact

SEQ ID NO: 208000 - DNA, 22 bp, Artificial Sequence
  Synthetic oligonucleotide; TTA chr2 60543771 60543792 60543788 60543793 +
cctcacctgggtcacagcactt

SEQ ID NO: 208001 - DNA, 22 bp, Artificial Sequence
  Synthetic oligonucleotide; CTC chr2 60543775 60543796 60543792 60543797 +
acctgggtcacagcacttgttg

SEQ ID NO: 208002 - DNA, 22 bp, Artificial Sequence
  Synthetic oligonucleotide; CTG chr2 60543780 60543801 60543797 60543802 +
ggtcacagcacttgttgtgcgc

SEQ ID NO: 208003 - DNA, 22 bp, Artificial Sequence
  Synthetic oligonucleotide; CTT chr2 60543793 60543814 60543810 60543815 +
gttgtgcgcccattgaatatct

SEQ ID NO: 208004 - DNA, 22 bp, Artificial Sequence
  Synthetic oligonucleotide; TTG chr2 60543794 60543815 60543811 60543816 +
ttgtgcgcccattgaatatctt

SEQ ID NO: 208005 - DNA, 22 bp, Artificial Sequence
  Synthetic oligonucleotide; TTG chr2 60543797 60543818 60543814 60543819 +
tgcgcccattgaatatcttaga

SEQ ID NO: 208006 - DNA, 22 bp, Artificial Sequence
  Synthetic oligonucleotide; TTG chr2 60543808 60543829 60543825 60543830 +
aatatcttagacatcttagaga

SEQ ID NO: 208007 - DNA, 22 bp, Artificial Sequence
  Synthetic oligonucleotide; CTT chr2 60543816 60543837 60543833 60543838 +
agacatcttagagagcttttcg

SEQ ID NO: 208008 - DNA, 22 bp, Artificial Sequence
  Synthetic oligonucleotide; TTA chr2 60543817 60543838 60543834 60543839 +
gacatcttagagagcttttcgt

SEQ ID NO: 208009 - DNA, 22 bp, Artificial Sequence
  Synthetic oligonucleotide; CTT chr2 60543825 60543846 60543842 60543847 +
agagagcttttcgtctcagtta

SEQ ID NO: 208010 - DNA, 22 bp, Artificial Sequence
  Synthetic oligonucleotide; TTA chr2 60543826 60543847 60543843 60543848 +
gagagcttttcgtctcagttaa

SEQ ID NO: 208011 - DNA, 22 bp, Artificial Sequence
  Synthetic oligonucleotide; CTT chr2 60543834 60543855 60543851 60543856 +
ttcgtctcagttaaatgattga

SEQ ID NO: 208012 - DNA, 22 bp, Artificial Sequence
  Synthetic oligonucleotide; TTT chr2 60543835 60543856 60543852 60543857 +
tcgtctcagttaaatgattgat

SEQ ID NO: 208013 - DNA, 22 bp, Artificial Sequence
  Synthetic oligonucleotide; TTT chr2 60543836 60543857 60543853 60543858 +
cgtctcagttaaatgattgatt

SEQ ID NO: 208014 - DNA, 22 bp, Artificial Sequence
  Synthetic oligonucleotide; TTC chr2 60543837 60543858 60543854 60543859 +
gtctcagttaaatgattgatta

SEQ ID NO: 208015 - DNA, 22 bp, Artificial Sequence
  Synthetic oligonucleotide; CTC chr2 60543842 60543863 60543859 60543864 +
agttaaatgattgattattagc

SEQ ID NO: 208016 - DNA, 22 bp, Artificial Sequence
  Synthetic oligonucleotide; TTA chr2 60543847 60543868 60543864 60543869 +
aatgattgattattagcgctat

SEQ ID NO: 208017 - DNA, 22 bp, Artificial Sequence
  Synthetic oligonucleotide; TTG chr2 60543855 60543876 60543872 60543877 +
attattagcgctataaaatata

SEQ ID NO: 208018 - DNA, 22 bp, Artificial Sequence
  Synthetic oligonucleotide; TTA chr2 60543859 60543880 60543876 60543881 +
ttagcgctataaaatatatttt

SEQ ID NO: 208019 - DNA, 22 bp, Artificial Sequence
  Synthetic oligonucleotide; TTA chr2 60543862 60543883 60543879 60543884 +
gcgctataaaatatattttaaa

SEQ ID NO: 208020 - DNA, 22 bp, Artificial Sequence
  Synthetic oligonucleotide; CTA chr2 60543868 60543889 60543885 60543890 +
taaaatatattttaaatttgct

SEQ ID NO: 208021 - DNA, 22 bp, Artificial Sequence
  Synthetic oligonucleotide; TTT chr2 60543880 60543901 60543897 60543902 +
taaatttgcttttggttttggc

SEQ ID NO: 208022 - DNA, 22 bp, Artificial Sequence
  Synthetic oligonucleotide; TTT chr2 60543881 60543902 60543898 60543903 +
aaatttgcttttggttttggct

SEQ ID NO: 208023 - DNA, 22 bp, Artificial Sequence
  Synthetic oligonucleotide; TTA chr2 60543882 60543903 60543899 60543904 +
aatttgcttttggttttggctt

SEQ ID NO: 208024 - DNA, 22 bp, Artificial Sequence
  Synthetic oligonucleotide; TTT chr2 60543887 60543908 60543904 60543909 +
gcttttggttttggcttctcta

SEQ ID NO: 208025 - DNA, 22 bp, Artificial Sequence
  Synthetic oligonucleotide; TTG chr2 60543888 60543909 60543905 60543910 +
cttttggttttggcttctctag

SEQ ID NO: 208026 - DNA, 22 bp, Artificial Sequence
  Synthetic oligonucleotide; CTT chr2 60543891 60543912 60543908 60543913 +
ttggttttggcttctctaggct

SEQ ID NO: 208027 - DNA, 22 bp, Artificial Sequence
  Synthetic oligonucleotide; TTT chr2 60543892 60543913 60543909 60543914 +
tggttttggcttctctaggctc

SEQ ID NO: 208028 - DNA, 22 bp, Artificial Sequence
  Synthetic oligonucleotide; TTT chr2 60543893 60543914 60543910 60543915 +
ggttttggcttctctaggctct

SEQ ID NO: 208029 - DNA, 22 bp, Artificial Sequence
  Synthetic oligonucleotide; TTG chr2 60543894 60543915 60543911 60543916 +
gttttggcttctctaggctctg

SEQ ID NO: 208030 - DNA, 22 bp, Artificial Sequence
  Synthetic oligonucleotide; TTT chr2 60543898 60543919 60543915 60543920 +
tggcttctctaggctctgctat

SEQ ID NO: 208031 - DNA, 22 bp, Artificial Sequence
  Synthetic oligonucleotide; TTT chr2 60543899 60543920 60543916 60543921 +
ggcttctctaggctctgctatt

SEQ ID NO: 208032 - DNA, 22 bp, Artificial Sequence
  Synthetic oligonucleotide; TTG chr2 60543900 60543921 60543917 60543922 +
gcttctctaggctctgctatta

SEQ ID NO: 208033 - DNA, 22 bp, Artificial Sequence
  Synthetic oligonucleotide; CTT chr2 60543904 60543925 60543921 60543926 +
ctctaggctctgctattatact

SEQ ID NO: 208034 - DNA, 22 bp, Artificial Sequence
  Synthetic oligonucleotide; TTC chr2 60543905 60543926 60543922 60543927 +
tctaggctctgctattatactt

SEQ ID NO: 208035 - DNA, 22 bp, Artificial Sequence
  Synthetic oligonucleotide; CTC chr2 60543907 60543928 60543924 60543929 +
taggctctgctattatacttgt

SEQ ID NO: 208036 - DNA, 22 bp, Artificial Sequence
  Synthetic oligonucleotide; CTA chr2 60543909 60543930 60543926 60543931 +
ggctctgctattatacttgttc

SEQ ID NO: 208037 - DNA, 22 bp, Artificial Sequence
  Synthetic oligonucleotide; CTC chr2 60543914 60543935 60543931 60543936 +
tgctattatacttgttctttaa

SEQ ID NO: 208038 - DNA, 22 bp, Artificial Sequence
  Synthetic oligonucleotide; CTG chr2 60543916 60543937 60543933 60543938 +
ctattatacttgttctttaaaa

SEQ ID NO: 208039 - DNA, 22 bp, Artificial Sequence
  Synthetic oligonucleotide; CTA chr2 60543919 60543940 60543936 60543941 +
ttatacttgttctttaaaaaaa

SEQ ID NO: 208040 - DNA, 22 bp, Artificial Sequence
  Synthetic oligonucleotide; TTA chr2 60543922 60543943 60543939 60543944 +
tacttgttctttaaaaaaataa

SEQ ID NO: 208041 - DNA, 22 bp, Artificial Sequence
  Synthetic oligonucleotide; CTT chr2 60543927 60543948 60543944 60543949 +
gttctttaaaaaaataataaca

SEQ ID NO: 208042 - DNA, 22 bp, Artificial Sequence
  Synthetic oligonucleotide; TTG chr2 60543928 60543949 60543945 60543950 +
ttctttaaaaaaataataacag

SEQ ID NO: 208043 - DNA, 22 bp, Artificial Sequence
  Synthetic oligonucleotide; TTC chr2 60543931 60543952 60543948 60543953 +
tttaaaaaaataataacagaac

SEQ ID NO: 208044 - DNA, 22 bp, Artificial Sequence
  Synthetic oligonucleotide; CTT chr2 60543933 60543954 60543950 60543955 +
taaaaaaataataacagaacct

SEQ ID NO: 208045 - DNA, 22 bp, Artificial Sequence
  Synthetic oligonucleotide; TTT chr2 60543934 60543955 60543951 60543956 +
aaaaaaataataacagaacctt

SEQ ID NO: 208046 - DNA, 22 bp, Artificial Sequence
  Synthetic oligonucleotide; TTA chr2 60543935 60543956 60543952 60543957 +
aaaaaataataacagaaccttt

SEQ ID NO: 208047 - DNA, 22 bp, Artificial Sequence
  Synthetic oligonucleotide; CTT chr2 60543956 60543977 60543973 60543978 +
tagacaaccagggagttcaagc

SEQ ID NO: 208048 - DNA, 22 bp, Artificial Sequence
  Synthetic oligonucleotide; TTT chr2 60543957 60543978 60543974 60543979 +
agacaaccagggagttcaagca

SEQ ID NO: 208049 - DNA, 22 bp, Artificial Sequence
  Synthetic oligonucleotide; TTA chr2 60543958 60543979 60543975 60543980 +
gacaaccagggagttcaagcaa

SEQ ID NO: 208050 - DNA, 22 bp, Artificial Sequence
  Synthetic oligonucleotide; TTC chr2 60543974 60543995 60543991 60543996 +
aagcaaatatctcttatttccc

SEQ ID NO: 208051 - DNA, 22 bp, Artificial Sequence
  Synthetic oligonucleotide; CTC chr2 60543987 60544008 60544004 60544009 +
ttatttccctacatagattcac

SEQ ID NO: 208052 - DNA, 22 bp, Artificial Sequence
  Synthetic oligonucleotide; CTT chr2 60543989 60544010 60544006 60544011 +
atttccctacatagattcacaa

SEQ ID NO: 208053 - DNA, 22 bp, Artificial Sequence
  Synthetic oligonucleotide; TTA chr2 60543990 60544011 60544007 60544012 +
tttccctacatagattcacaac

SEQ ID NO: 208054 - DNA, 22 bp, Artificial Sequence
  Synthetic oligonucleotide; TTT chr2 60543993 60544014 60544010 60544015 +
ccctacatagattcacaactat

SEQ ID NO: 208055 - DNA, 22 bp, Artificial Sequence
  Synthetic oligonucleotide; TTC chr2 60543994 60544015 60544011 60544016 +
cctacatagattcacaactata

SEQ ID NO: 208056 - DNA, 22 bp, Artificial Sequence
  Synthetic oligonucleotide; CTA chr2 60543998 60544019 60544015 60544020 +
catagattcacaactatagcag

SEQ ID NO: 208057 - DNA, 22 bp, Artificial Sequence
  Synthetic oligonucleotide; TTC chr2 60544007 60544028 60544024 60544029 +
acaactatagcagtaaaagtct

SEQ ID NO: 208058 - DNA, 22 bp, Artificial Sequence
  Synthetic oligonucleotide; CTA chr2 60544014 60544035 60544031 60544036 +
tagcagtaaaagtcttaactat

SEQ ID NO: 208059 - DNA, 22 bp, Artificial Sequence
  Synthetic oligonucleotide; CTT chr2 60544030 60544051 60544047 60544052 +
aactatatgtaaggccttcccc

SEQ ID NO: 208060 - DNA, 22 bp, Artificial Sequence
  Synthetic oligonucleotide; TTA chr2 60544031 60544052 60544048 60544053 +
actatatgtaaggccttccccc

SEQ ID NO: 208061 - DNA, 22 bp, Artificial Sequence
  Synthetic oligonucleotide; CTA chr2 60544035 60544056 60544052 60544057 +
tatgtaaggccttccccccagc

SEQ ID NO: 208062 - DNA, 22 bp, Artificial Sequence
  Synthetic oligonucleotide; CTT chr2 60544048 60544069 60544065 60544070 +
ccccccagcatttagattcctc

SEQ ID NO: 208063 - DNA, 22 bp, Artificial Sequence
  Synthetic oligonucleotide; TTC chr2 60544049 60544070 60544066 60544071 +
cccccagcatttagattcctcc

SEQ ID NO: 208064 - DNA, 22 bp, Artificial Sequence
  Synthetic oligonucleotide; TTT chr2 60544061 60544082 60544078 60544083 +
agattcctcctctaaatacaga

SEQ ID NO: 208065 - DNA, 22 bp, Artificial Sequence
  Synthetic oligonucleotide; TTA chr2 60544062 60544083 60544079 60544084 +
gattcctcctctaaatacagag

SEQ ID NO: 208066 - DNA, 22 bp, Artificial Sequence
  Synthetic oligonucleotide; TTC chr2 60544067 60544088 60544084 60544089 +
ctcctctaaatacagaggcaca

SEQ ID NO: 208067 - DNA, 22 bp, Artificial Sequence
  Synthetic oligonucleotide; CTC chr2 60544070 60544091 60544087 60544092 +
ctctaaatacagaggcacagaa

SEQ ID NO: 208068 - DNA, 22 bp, Artificial Sequence
  Synthetic oligonucleotide; CTC chr2 60544073 60544094 60544090 60544095 +
taaatacagaggcacagaattt

SEQ ID NO: 208069 - DNA, 22 bp, Artificial Sequence
  Synthetic oligonucleotide; CTA chr2 60544075 60544096 60544092 60544097 +
aatacagaggcacagaattttt

SEQ ID NO: 208070 - DNA, 22 bp, Artificial Sequence
  Synthetic oligonucleotide; TTT chr2 60544095 60544116 60544112 60544117 +
ttgagctggttaatctaagact

SEQ ID NO: 208071 - DNA, 22 bp, Artificial Sequence
  Synthetic oligonucleotide; TTT chr2 60544096 60544117 60544113 60544118 +
tgagctggttaatctaagactg

SEQ ID NO: 208072 - DNA, 22 bp, Artificial Sequence
  Synthetic oligonucleotide; TTT chr2 60544097 60544118 60544114 60544119 +
gagctggttaatctaagactga

SEQ ID NO: 208073 - DNA, 22 bp, Artificial Sequence
  Synthetic oligonucleotide; TTG chr2 60544098 60544119 60544115 60544120 +
agctggttaatctaagactgaa

SEQ ID NO: 208074 - DNA, 22 bp, Artificial Sequence
  Synthetic oligonucleotide; CTG chr2 60544103 60544124 60544120 60544125 +
gttaatctaagactgaataacc

SEQ ID NO: 208075 - DNA, 22 bp, Artificial Sequence
  Synthetic oligonucleotide; TTA chr2 60544107 60544128 60544124 60544129 +
atctaagactgaataacctatt

SEQ ID NO: 208076 - DNA, 22 bp, Artificial Sequence
  Synthetic oligonucleotide; CTA chr2 60544112 60544133 60544129 60544134 +
agactgaataacctatttggga

SEQ ID NO: 208077 - DNA, 22 bp, Artificial Sequence
  Synthetic oligonucleotide; CTG chr2 60544118 60544139 60544135 60544140 +
aataacctatttgggacctcag

SEQ ID NO: 208078 - DNA, 22 bp, Artificial Sequence
  Synthetic oligonucleotide; CTA chr2 60544127 60544148 60544144 60544149 +
tttgggacctcagtaagaagtg

SEQ ID NO: 208079 - DNA, 22 bp, Artificial Sequence
  Synthetic oligonucleotide; TTT chr2 60544130 60544151 60544147 60544152 +
gggacctcagtaagaagtgtgg

SEQ ID NO: 208080 - DNA, 22 bp, Artificial Sequence
  Synthetic oligonucleotide; TTG chr2 60544131 60544152 60544148 60544153 +
ggacctcagtaagaagtgtggt

SEQ ID NO: 208081 - DNA, 22 bp, Artificial Sequence
  Synthetic oligonucleotide; CTC chr2 60544138 60544159 60544155 60544160 +
agtaagaagtgtggttttaatt

SEQ ID NO: 208082 - DNA, 22 bp, Artificial Sequence
  Synthetic oligonucleotide; TTT chr2 60544155 60544176 60544172 60544177 +
taattcttgcttgacagacact

SEQ ID NO: 208083 - DNA, 22 bp, Artificial Sequence
  Synthetic oligonucleotide; TTT chr2 60544156 60544177 60544173 60544178 +
aattcttgcttgacagacactg

SEQ ID NO: 208084 - DNA, 22 bp, Artificial Sequence
  Synthetic oligonucleotide; TTA chr2 60544157 60544178 60544174 60544179 +
attcttgcttgacagacactgt

SEQ ID NO: 208085 - DNA, 22 bp, Artificial Sequence
  Synthetic oligonucleotide; TTC chr2 60544161 60544182 60544178 60544183 +
ttgcttgacagacactgtgttt

SEQ ID NO: 208086 - DNA, 22 bp, Artificial Sequence
  Synthetic oligonucleotide; CTT chr2 60544163 60544184 60544180 60544185 +
gcttgacagacactgtgttttg

SEQ ID NO: 208087 - DNA, 22 bp, Artificial Sequence
  Synthetic oligonucleotide; TTG chr2 60544164 60544185 60544181 60544186 +
cttgacagacactgtgttttgt

SEQ ID NO: 208088 - DNA, 22 bp, Artificial Sequence
  Synthetic oligonucleotide; CTT chr2 60544167 60544188 60544184 60544189 +
gacagacactgtgttttgtctt

SEQ ID NO: 208089 - DNA, 22 bp, Artificial Sequence
  Synthetic oligonucleotide; TTG chr2 60544168 60544189 60544185 60544190 +
acagacactgtgttttgtcttt

SEQ ID NO: 208090 - DNA, 22 bp, Artificial Sequence
  Synthetic oligonucleotide; CTG chr2 60544178 60544199 60544195 60544200 +
tgttttgtcttttaaacgagca

SEQ ID NO: 208091 - DNA, 22 bp, Artificial Sequence
  Synthetic oligonucleotide; TTT chr2 60544183 60544204 60544200 60544205 +
tgtcttttaaacgagcagctcg

SEQ ID NO: 208092 - DNA, 22 bp, Artificial Sequence
  Synthetic oligonucleotide; TTT chr2 60544184 60544205 60544201 60544206 +
gtcttttaaacgagcagctcga

SEQ ID NO: 208093 - DNA, 22 bp, Artificial Sequence
  Synthetic oligonucleotide; TTG chr2 60544185 60544206 60544202 60544207 +
tcttttaaacgagcagctcgat

SEQ ID NO: 208094 - DNA, 22 bp, Artificial Sequence
  Synthetic oligonucleotide; CTT chr2 60544189 60544210 60544206 60544211 +
ttaaacgagcagctcgatatgt

SEQ ID NO: 208095 - DNA, 22 bp, Artificial Sequence
  Synthetic oligonucleotide; TTT chr2 60544190 60544211 60544207 60544212 +
taaacgagcagctcgatatgta

SEQ ID NO: 208096 - DNA, 22 bp, Artificial Sequence
  Synthetic oligonucleotide; TTT chr2 60544191 60544212 60544208 60544213 +
aaacgagcagctcgatatgtaa

SEQ ID NO: 208097 - DNA, 22 bp, Artificial Sequence
  Synthetic oligonucleotide; TTA chr2 60544192 60544213 60544209 60544214 +
aacgagcagctcgatatgtaaa

SEQ ID NO: 208098 - DNA, 22 bp, Artificial Sequence
  Synthetic oligonucleotide; CTC chr2 60544204 60544225 60544221 60544226 +
gatatgtaaatacgatgttaca

SEQ ID NO: 208099 - DNA, 22 bp, Artificial Sequence
  Synthetic oligonucleotide; TTA chr2 60544224 60544245 60544241 60544246 +
catcacgcaagtgttactccat

SEQ ID NO: 208100 - DNA, 22 bp, Artificial Sequence
  Synthetic oligonucleotide; TTA chr2 60544240 60544261 60544257 60544262 +
ctccatatttggtgatttagca

SEQ ID NO: 208101 - DNA, 22 bp, Artificial Sequence
  Synthetic oligonucleotide; CTC chr2 60544243 60544264 60544260 60544265 +
catatttggtgatttagcaagg

SEQ ID NO: 208102 - DNA, 22 bp, Artificial Sequence
  Synthetic oligonucleotide; TTT chr2 60544250 60544271 60544267 60544272 +
ggtgatttagcaaggctttgga

SEQ ID NO: 208103 - DNA, 22 bp, Artificial Sequence
  Synthetic oligonucleotide; TTG chr2 60544251 60544272 60544268 60544273 +
gtgatttagcaaggctttggat

SEQ ID NO: 208104 - DNA, 22 bp, Artificial Sequence
  Synthetic oligonucleotide; TTT chr2 60544258 60544279 60544275 60544280 +
agcaaggctttggatctccgaa

SEQ ID NO: 208105 - DNA, 22 bp, Artificial Sequence
  Synthetic oligonucleotide; TTA chr2 60544259 60544280 60544276 60544281 +
gcaaggctttggatctccgaag

SEQ ID NO: 208106 - DNA, 22 bp, Artificial Sequence
  Synthetic oligonucleotide; CTT chr2 60544268 60544289 60544285 60544290 +
tggatctccgaagacgacaaat

SEQ ID NO: 208107 - DNA, 22 bp, Artificial Sequence
  Synthetic oligonucleotide; TTT chr2 60544269 60544290 60544286 60544291 +
ggatctccgaagacgacaaatc

SEQ ID NO: 208108 - DNA, 22 bp, Artificial Sequence
  Synthetic oligonucleotide; TTG chr2 60544270 60544291 60544287 60544292 +
gatctccgaagacgacaaatcc

SEQ ID NO: 208109 - DNA, 22 bp, Artificial Sequence
  Synthetic oligonucleotide; CTC chr2 60544276 60544297 60544293 60544298 +
cgaagacgacaaatccccttcc

SEQ ID NO: 208110 - DNA, 22 bp, Artificial Sequence
  Synthetic oligonucleotide; CTT chr2 60544296 60544317 60544313 60544318 +
ccgcctgctcttgcttcattaa

SEQ ID NO: 208111 - DNA, 22 bp, Artificial Sequence
  Synthetic oligonucleotide; TTC chr2 60544297 60544318 60544314 60544319 +
cgcctgctcttgcttcattaat

SEQ ID NO: 208112 - DNA, 22 bp, Artificial Sequence
  Synthetic oligonucleotide; CTG chr2 60544303 60544324 60544320 60544325 +
ctcttgcttcattaatcatgcc

SEQ ID NO: 208113 - DNA, 22 bp, Artificial Sequence
  Synthetic oligonucleotide; CTC chr2 60544306 60544327 60544323 60544328 +
ttgcttcattaatcatgcctta

SEQ ID NO: 208114 - DNA, 22 bp, Artificial Sequence
  Synthetic oligonucleotide; CTT chr2 60544308 60544329 60544325 60544330 +
gcttcattaatcatgccttaca

SEQ ID NO: 208115 - DNA, 22 bp, Artificial Sequence
  Synthetic oligonucleotide; TTG chr2 60544309 60544330 60544326 60544331 +
cttcattaatcatgccttacac

SEQ ID NO: 208116 - DNA, 22 bp, Artificial Sequence
  Synthetic oligonucleotide; CTT chr2 60544312 60544333 60544329 60544334 +
cattaatcatgccttacacttc

SEQ ID NO: 208117 - DNA, 22 bp, Artificial Sequence
  Synthetic oligonucleotide; TTC chr2 60544313 60544334 60544330 60544335 +
attaatcatgccttacacttct

SEQ ID NO: 208118 - DNA, 22 bp, Artificial Sequence
  Synthetic oligonucleotide; TTA chr2 60544317 60544338 60544334 60544339 +
atcatgccttacacttctgttc

SEQ ID NO: 208119 - DNA, 22 bp, Artificial Sequence
  Synthetic oligonucleotide; CTT chr2 60544327 60544348 60544344 60544349 +
acacttctgttcattttccttc

SEQ ID NO: 208120 - DNA, 22 bp, Artificial Sequence
  Synthetic oligonucleotide; TTA chr2 60544328 60544349 60544345 60544350 +
cacttctgttcattttccttcc

SEQ ID NO: 208121 - DNA, 22 bp, Artificial Sequence
  Synthetic oligonucleotide; CTT chr2 60544333 60544354 60544350 60544355 +
ctgttcattttccttccagtca

SEQ ID NO: 208122 - DNA, 22 bp, Artificial Sequence
  Synthetic oligonucleotide; TTC chr2 60544334 60544355 60544351 60544356 +
tgttcattttccttccagtcac

SEQ ID NO: 208123 - DNA, 22 bp, Artificial Sequence
  Synthetic oligonucleotide; CTG chr2 60544336 60544357 60544353 60544358 +
ttcattttccttccagtcacaa

SEQ ID NO: 208124 - DNA, 22 bp, Artificial Sequence
  Synthetic oligonucleotide; TTC chr2 60544339 60544360 60544356 60544361 +
attttccttccagtcacaagac

SEQ ID NO: 208125 - DNA, 22 bp, Artificial Sequence
  Synthetic oligonucleotide; TTT chr2 60544343 60544364 60544360 60544365 +
tccttccagtcacaagacaaca

SEQ ID NO: 208126 - DNA, 22 bp, Artificial Sequence
  Synthetic oligonucleotide; TTT chr2 60544344 60544365 60544361 60544366 +
ccttccagtcacaagacaacac

SEQ ID NO: 208127 - DNA, 22 bp, Artificial Sequence
  Synthetic oligonucleotide; TTC chr2 60544345 60544366 60544362 60544367 +
cttccagtcacaagacaacaca

SEQ ID NO: 208128 - DNA, 22 bp, Artificial Sequence
  Synthetic oligonucleotide; CTT chr2 60544348 60544369 60544365 60544370 +
ccagtcacaagacaacacatgg

SEQ ID NO: 208129 - DNA, 22 bp, Artificial Sequence
  Synthetic oligonucleotide; TTC chr2 60544349 60544370 60544366 60544371 +
cagtcacaagacaacacatgga

SEQ ID NO: 208130 - DNA, 22 bp, Artificial Sequence
  Synthetic oligonucleotide; TTC chr2 60544382 60544403 60544399 60544404 +
ccacatcctgctggggggtagg

SEQ ID NO: 208131 - DNA, 22 bp, Artificial Sequence
  Synthetic oligonucleotide; CTG chr2 60544392 60544413 60544409 60544414 +
ctggggggtaggggagataaaa

SEQ ID NO: 208132 - DNA, 22 bp, Artificial Sequence
  Synthetic oligonucleotide; CTG chr2 60544395 60544416 60544412 60544417 +
gggggtaggggagataaaatct

SEQ ID NO: 208133 - DNA, 22 bp, Artificial Sequence
  Synthetic oligonucleotide; CTT chr2 60544418 60544439 60544435 60544440 +
cacctacatgtcacataaggta

SEQ ID NO: 208134 - DNA, 22 bp, Artificial Sequence
  Synthetic oligonucleotide; TTC chr2 60544419 60544440 60544436 60544441 +
acctacatgtcacataaggtaa

SEQ ID NO: 208135 - DNA, 22 bp, Artificial Sequence
  Synthetic oligonucleotide; CTA chr2 60544424 60544445 60544441 60544446 +
catgtcacataaggtaaatgtg

SEQ ID NO: 208136 - DNA, 22 bp, Artificial Sequence
  Synthetic oligonucleotide; TTC chr2 60544454 60544475 60544471 60544476 +
aagaaatacactccacaaatgc

SEQ ID NO: 208137 - DNA, 22 bp, Artificial Sequence
  Synthetic oligonucleotide; CTC chr2 60544467 60544488 60544484 60544489 +
cacaaatgcagcttccctagca

SEQ ID NO: 208138 - DNA, 22 bp, Artificial Sequence
  Synthetic oligonucleotide; CTT chr2 60544481 60544502 60544498 60544503 +
ccctagcagcagatttcccatt

SEQ ID NO: 208139 - DNA, 22 bp, Artificial Sequence
  Synthetic oligonucleotide; TTC chr2 60544482 60544503 60544499 60544504 +
cctagcagcagatttcccattt

SEQ ID NO: 208140 - DNA, 22 bp, Artificial Sequence
  Synthetic oligonucleotide; CTA chr2 60544486 60544507 60544503 60544508 +
gcagcagatttcccatttcact

SEQ ID NO: 208141 - DNA, 22 bp, Artificial Sequence
  Synthetic oligonucleotide; TTT chr2 60544497 60544518 60544514 60544519 +
cccatttcactaaagggaaagt

SEQ ID NO: 208142 - DNA, 22 bp, Artificial Sequence
  Synthetic oligonucleotide; TTC chr2 60544498 60544519 60544515 60544520 +
ccatttcactaaagggaaagta

SEQ ID NO: 208143 - DNA, 22 bp, Artificial Sequence
  Synthetic oligonucleotide; TTT chr2 60544504 60544525 60544521 60544526 +
cactaaagggaaagtatctgag

SEQ ID NO: 208144 - DNA, 22 bp, Artificial Sequence
  Synthetic oligonucleotide; TTC chr2 60544505 60544526 60544522 60544527 +
actaaagggaaagtatctgagt

SEQ ID NO: 208145 - DNA, 22 bp, Artificial Sequence
  Synthetic oligonucleotide; CTA chr2 60544509 60544530 60544526 60544531 +
aagggaaagtatctgagtgcta

SEQ ID NO: 208146 - DNA, 22 bp, Artificial Sequence
  Synthetic oligonucleotide; CTG chr2 60544524 60544545 60544541 60544546 +
agtgctatcacagaaagcacta

SEQ ID NO: 208147 - DNA, 22 bp, Artificial Sequence
  Synthetic oligonucleotide; CTA chr2 60544531 60544552 60544548 60544553 +
tcacagaaagcactaaaaaaag

SEQ ID NO: 208148 - DNA, 22 bp, Artificial Sequence
  Synthetic oligonucleotide; CTA chr2 60544546 60544567 60544563 60544568 +
aaaaaagaaagaaaatgccatg

SEQ ID NO: 208149 - DNA, 22 bp, Artificial Sequence
  Synthetic oligonucleotide; TTT chr2 60544571 60544592 60544588 60544593 +
ggttttaatgatcaaattctag

SEQ ID NO: 208150 - DNA, 22 bp, Artificial Sequence
  Synthetic oligonucleotide; TTG chr2 60544572 60544593 60544589 60544594 +
gttttaatgatcaaattctaga

SEQ ID NO: 208151 - DNA, 22 bp, Artificial Sequence
  Synthetic oligonucleotide; TTT chr2 60544576 60544597 60544593 60544598 +
taatgatcaaattctagagggg

SEQ ID NO: 208152 - DNA, 22 bp, Artificial Sequence
  Synthetic oligonucleotide; TTT chr2 60544577 60544598 60544594 60544599 +
aatgatcaaattctagaggggg

SEQ ID NO: 208153 - DNA, 22 bp, Artificial Sequence
  Synthetic oligonucleotide; TTA chr2 60544578 60544599 60544595 60544600 +
atgatcaaattctagaggggga

SEQ ID NO: 208154 - DNA, 22 bp, Artificial Sequence
  Synthetic oligonucleotide; TTC chr2 60544590 60544611 60544607 60544612 +
tagagggggagaggagaaataa

SEQ ID NO: 208155 - DNA, 22 bp, Artificial Sequence
  Synthetic oligonucleotide; CTA chr2 60544592 60544613 60544609 60544614 +
gagggggagaggagaaataata

SEQ ID NO: 208156 - DNA, 22 bp, Artificial Sequence
  Synthetic oligonucleotide; TTT chr2 60544622 60544643 60544639 60544644 +
aatcccctctagaccactgacc

SEQ ID NO: 208157 - DNA, 22 bp, Artificial Sequence
  Synthetic oligonucleotide; TTA chr2 60544623 60544644 60544640 60544645 +
atcccctctagaccactgacct

SEQ ID NO: 208158 - DNA, 22 bp, Artificial Sequence
  Synthetic oligonucleotide; CTC chr2 60544631 60544652 60544648 60544653 +
tagaccactgacctattatggt

SEQ ID NO: 208159 - DNA, 22 bp, Artificial Sequence
  Synthetic oligonucleotide; CTA chr2 60544633 60544654 60544650 60544655 +
gaccactgacctattatggttc

SEQ ID NO: 208160 - DNA, 22 bp, Artificial Sequence
  Synthetic oligonucleotide; CTG chr2 60544641 60544662 60544658 60544663 +
acctattatggttcaactttgt

SEQ ID NO: 208161 - DNA, 22 bp, Artificial Sequence
  Synthetic oligonucleotide; CTA chr2 60544646 60544667 60544663 60544668 +
ttatggttcaactttgtggtca

SEQ ID NO: 208162 - DNA, 22 bp, Artificial Sequence
  Synthetic oligonucleotide; TTA chr2 60544649 60544670 60544666 60544671 +
tggttcaactttgtggtcaaac

SEQ ID NO: 208163 - DNA, 22 bp, Artificial Sequence
  Synthetic oligonucleotide; TTC chr2 60544655 60544676 60544672 60544677 +
aactttgtggtcaaactaggtc

SEQ ID NO: 208164 - DNA, 22 bp, Artificial Sequence
  Synthetic oligonucleotide; CTT chr2 60544660 60544681 60544677 60544682 +
tgtggtcaaactaggtcggaga

SEQ ID NO: 208165 - DNA, 22 bp, Artificial Sequence
  Synthetic oligonucleotide; TTT chr2 60544661 60544682 60544678 60544683 +
gtggtcaaactaggtcggagag

SEQ ID NO: 208166 - DNA, 22 bp, Artificial Sequence
  Synthetic oligonucleotide; TTG chr2 60544662 60544683 60544679 60544684 +
tggtcaaactaggtcggagaga

SEQ ID NO: 208167 - DNA, 22 bp, Artificial Sequence
  Synthetic oligonucleotide; CTA chr2 60544673 60544694 60544690 60544695 +
ggtcggagagacaagttccagt

SEQ ID NO: 208168 - DNA, 22 bp, Artificial Sequence
  Synthetic oligonucleotide; TTC chr2 60544691 60544712 60544708 60544713 +
cagtgaatcaattcatgatatg

SEQ ID NO: 208169 - DNA, 22 bp, Artificial Sequence
  Synthetic oligonucleotide; TTC chr2 60544705 60544726 60544722 60544727 +
atgatatgcactacctttccta

SEQ ID NO: 208170 - DNA, 22 bp, Artificial Sequence
  Synthetic oligonucleotide; CTA chr2 60544718 60544739 60544735 60544740 +
cctttcctaaaactgaacaaac

SEQ ID NO: 208171 - DNA, 22 bp, Artificial Sequence
  Synthetic oligonucleotide; CTT chr2 60544722 60544743 60544739 60544744 +
tcctaaaactgaacaaacctct

SEQ ID NO: 208172 - DNA, 22 bp, Artificial Sequence
  Synthetic oligonucleotide; TTT chr2 60544723 60544744 60544740 60544745 +
cctaaaactgaacaaacctctt

SEQ ID NO: 208173 - DNA, 22 bp, Artificial Sequence
  Synthetic oligonucleotide; TTC chr2 60544724 60544745 60544741 60544746 +
ctaaaactgaacaaacctcttg

SEQ ID NO: 208174 - DNA, 22 bp, Artificial Sequence
  Synthetic oligonucleotide; CTA chr2 60544727 60544748 60544744 60544749 +
aaactgaacaaacctcttgcct

SEQ ID NO: 208175 - DNA, 22 bp, Artificial Sequence
  Synthetic oligonucleotide; CTG chr2 60544733 60544754 60544750 60544755 +
aacaaacctcttgcctttcggg

SEQ ID NO: 208176 - DNA, 22 bp, Artificial Sequence
  Synthetic oligonucleotide; CTC chr2 60544743 60544764 60544760 60544765 +
ttgcctttcgggagctgggtgg

SEQ ID NO: 208177 - DNA, 22 bp, Artificial Sequence
  Synthetic oligonucleotide; CTT chr2 60544745 60544766 60544762 60544767 +
gcctttcgggagctgggtggta

SEQ ID NO: 208178 - DNA, 22 bp, Artificial Sequence
  Synthetic oligonucleotide; TTG chr2 60544746 60544767 60544763 60544768 +
cctttcgggagctgggtggtag

SEQ ID NO: 208179 - DNA, 22 bp, Artificial Sequence
  Synthetic oligonucleotide; CTT chr2 60544750 60544771 60544767 60544772 +
tcgggagctgggtggtaggtag

SEQ ID NO: 208180 - DNA, 22 bp, Artificial Sequence
  Synthetic oligonucleotide; TTT chr2 60544751 60544772 60544768 60544773 +
cgggagctgggtggtaggtaga

SEQ ID NO: 208181 - DNA, 22 bp, Artificial Sequence
  Synthetic oligonucleotide; TTC chr2 60544752 60544773 60544769 60544774 +
gggagctgggtggtaggtagat

SEQ ID NO: 208182 - DNA, 22 bp, Artificial Sequence
  Synthetic oligonucleotide; CTG chr2 60544760 60544781 60544777 60544782 +
ggtggtaggtagatggaagaaa

SEQ ID NO: 208183 - DNA, 22 bp, Artificial Sequence
  Synthetic oligonucleotide; CTG chr2 60544811 60544832 60544828 60544833 +
tcatcacagaatctgcattgac

SEQ ID NO: 208184 - DNA, 22 bp, Artificial Sequence
  Synthetic oligonucleotide; CTG chr2 60544826 60544847 60544843 60544848 +
cattgacttttgtctaacatgc

SEQ ID NO: 208185 - DNA, 22 bp, Artificial Sequence
  Synthetic oligonucleotide; TTG chr2 60544831 60544852 60544848 60544853 +
acttttgtctaacatgctcaag

SEQ ID NO: 208186 - DNA, 22 bp, Artificial Sequence
  Synthetic oligonucleotide; CTT chr2 60544835 60544856 60544852 60544857 +
ttgtctaacatgctcaagcaaa

SEQ ID NO: 208187 - DNA, 22 bp, Artificial Sequence
  Synthetic oligonucleotide; TTT chr2 60544836 60544857 60544853 60544858 +
tgtctaacatgctcaagcaaaa

SEQ ID NO: 208188 - DNA, 22 bp, Artificial Sequence
  Synthetic oligonucleotide; TTT chr2 60544837 60544858 60544854 60544859 +
gtctaacatgctcaagcaaaaa

SEQ ID NO: 208189 - DNA, 22 bp, Artificial Sequence
  Synthetic oligonucleotide; TTG chr2 60544838 60544859 60544855 60544860 +
tctaacatgctcaagcaaaaaa

SEQ ID NO: 208190 - DNA, 22 bp, Artificial Sequence
  Synthetic oligonucleotide; CTA chr2 60544842 60544863 60544859 60544864 +
acatgctcaagcaaaaaatgtt

SEQ ID NO: 208191 - DNA, 22 bp, Artificial Sequence
  Synthetic oligonucleotide; CTC chr2 60544850 60544871 60544867 60544872 +
aagcaaaaaatgttttgagggt

SEQ ID NO: 208192 - DNA, 22 bp, Artificial Sequence
  Synthetic oligonucleotide; TTT chr2 60544865 60544886 60544882 60544887 +
tgagggtcactatatagtgtta

SEQ ID NO: 208193 - DNA, 22 bp, Artificial Sequence
  Synthetic oligonucleotide; TTT chr2 60544866 60544887 60544883 60544888 +
gagggtcactatatagtgttac

SEQ ID NO: 208194 - DNA, 22 bp, Artificial Sequence
  Synthetic oligonucleotide; TTG chr2 60544867 60544888 60544884 60544889 +
agggtcactatatagtgttact

SEQ ID NO: 208195 - DNA, 22 bp, Artificial Sequence
  Synthetic oligonucleotide; CTA chr2 60544877 60544898 60544894 60544899 +
tatagtgttactgtttatcact

SEQ ID NO: 208196 - DNA, 22 bp, Artificial Sequence
  Synthetic oligonucleotide; TTA chr2 60544887 60544908 60544904 60544909 +
ctgtttatcacttagagaaggg

SEQ ID NO: 208197 - DNA, 22 bp, Artificial Sequence
  Synthetic oligonucleotide; CTG chr2 60544890 60544911 60544907 60544912 +
tttatcacttagagaagggaat

SEQ ID NO: 208198 - DNA, 22 bp, Artificial Sequence
  Synthetic oligonucleotide; TTT chr2 60544893 60544914 60544910 60544915 +
atcacttagagaagggaattta

SEQ ID NO: 208199 - DNA, 22 bp, Artificial Sequence
  Synthetic oligonucleotide; TTA chr2 60544894 60544915 60544911 60544916 +
tcacttagagaagggaatttaa

SEQ ID NO: 208200 - DNA, 22 bp, Artificial Sequence
  Synthetic oligonucleotide; CTT chr2 60544900 60544921 60544917 60544922 +
agagaagggaatttaagtccca

SEQ ID NO: 208201 - DNA, 22 bp, Artificial Sequence
  Synthetic oligonucleotide; TTA chr2 60544901 60544922 60544918 60544923 +
gagaagggaatttaagtcccac

SEQ ID NO: 208202 - DNA, 22 bp, Artificial Sequence
  Synthetic oligonucleotide; TTT chr2 60544914 60544935 60544931 60544936 +
aagtcccactgctagcctttaa

SEQ ID NO: 208203 - DNA, 22 bp, Artificial Sequence
  Synthetic oligonucleotide; TTA chr2 60544915 60544936 60544932 60544937 +
agtcccactgctagcctttaat

SEQ ID NO: 208204 - DNA, 22 bp, Artificial Sequence
  Synthetic oligonucleotide; CTG chr2 60544925 60544946 60544942 60544947 +
ctagcctttaattccttttccc

SEQ ID NO: 208205 - DNA, 22 bp, Artificial Sequence
  Synthetic oligonucleotide; CTA chr2 60544928 60544949 60544945 60544950 +
gcctttaattccttttcccttg

SEQ ID NO: 208206 - DNA, 22 bp, Artificial Sequence
  Synthetic oligonucleotide; CTT chr2 60544933 60544954 60544950 60544955 +
taattccttttcccttgagctg

SEQ ID NO: 208207 - DNA, 22 bp, Artificial Sequence
  Synthetic oligonucleotide; TTT chr2 60544934 60544955 60544951 60544956 +
aattccttttcccttgagctgc

SEQ ID NO: 208208 - DNA, 22 bp, Artificial Sequence
  Synthetic oligonucleotide; TTA chr2 60544935 60544956 60544952 60544957 +
attccttttcccttgagctgcc

SEQ ID NO: 208209 - DNA, 22 bp, Artificial Sequence
  Synthetic oligonucleotide; TTC chr2 60544939 60544960 60544956 60544961 +
cttttcccttgagctgccgaga

SEQ ID NO: 208210 - DNA, 22 bp, Artificial Sequence
  Synthetic oligonucleotide; CTT chr2 60544942 60544963 60544959 60544964 +
ttcccttgagctgccgagaaac

SEQ ID NO: 208211 - DNA, 22 bp, Artificial Sequence
  Synthetic oligonucleotide; TTT chr2 60544943 60544964 60544960 60544965 +
tcccttgagctgccgagaaacc

SEQ ID NO: 208212 - DNA, 22 bp, Artificial Sequence
  Synthetic oligonucleotide; TTT chr2 60544944 60544965 60544961 60544966 +
cccttgagctgccgagaaaccc

SEQ ID NO: 208213 - DNA, 22 bp, Artificial Sequence
  Synthetic oligonucleotide; TTC chr2 60544945 60544966 60544962 60544967 +
ccttgagctgccgagaaaccca

SEQ ID NO: 208214 - DNA, 22 bp, Artificial Sequence
  Synthetic oligonucleotide; CTT chr2 60544949 60544970 60544966 60544971 +
gagctgccgagaaacccacaca

SEQ ID NO: 208215 - DNA, 22 bp, Artificial Sequence
  Synthetic oligonucleotide; TTG chr2 60544950 60544971 60544967 60544972 +
agctgccgagaaacccacacac

SEQ ID NO: 208216 - DNA, 22 bp, Artificial Sequence
  Synthetic oligonucleotide; CTG chr2 60544955 60544976 60544972 60544977 +
ccgagaaacccacacacctagc

SEQ ID NO: 208217 - DNA, 22 bp, Artificial Sequence
  Synthetic oligonucleotide; CTA chr2 60544975 60544996 60544992 60544997 +
gctgcctccctgctaaaattaa

SEQ ID NO: 208218 - DNA, 22 bp, Artificial Sequence
  Synthetic oligonucleotide; CTG chr2 60544979 60545000 60544996 60545001 +
cctccctgctaaaattaaccaa

SEQ ID NO: 208219 - DNA, 22 bp, Artificial Sequence
  Synthetic oligonucleotide; CTC chr2 60544983 60545004 60545000 60545005 +
cctgctaaaattaaccaaagga

SEQ ID NO: 208220 - DNA, 22 bp, Artificial Sequence
  Synthetic oligonucleotide; CTG chr2 60544987 60545008 60545004 60545009 +
ctaaaattaaccaaaggaggga

SEQ ID NO: 208221 - DNA, 22 bp, Artificial Sequence
  Synthetic oligonucleotide; CTA chr2 60544990 60545011 60545007 60545012 +
aaattaaccaaaggagggaggg

SEQ ID NO: 208222 - DNA, 22 bp, Artificial Sequence
  Synthetic oligonucleotide; TTA chr2 60544996 60545017 60545013 60545018 +
accaaaggagggagggctgttg

SEQ ID NO: 208223 - DNA, 22 bp, Artificial Sequence
  Synthetic oligonucleotide; CTG chr2 60545015 60545036 60545032 60545037 +
ttgaatacgtgtgtgtattttt

SEQ ID NO: 208224 - DNA, 22 bp, Artificial Sequence
  Synthetic oligonucleotide; TTG chr2 60545018 60545039 60545035 60545040 +
aatacgtgtgtgtatttttcca

SEQ ID NO: 208225 - DNA, 22 bp, Artificial Sequence
  Synthetic oligonucleotide; TTT chr2 60545035 60545056 60545052 60545057 +
ttccaagaaaatttttacattg

SEQ ID NO: 208226 - DNA, 22 bp, Artificial Sequence
  Synthetic oligonucleotide; TTT chr2 60545036 60545057 60545053 60545058 +
tccaagaaaatttttacattgt

SEQ ID NO: 208227 - DNA, 22 bp, Artificial Sequence
  Synthetic oligonucleotide; TTT chr2 60545037 60545058 60545054 60545059 +
ccaagaaaatttttacattgtg

SEQ ID NO: 208228 - DNA, 22 bp, Artificial Sequence
  Synthetic oligonucleotide; TTC chr2 60545038 60545059 60545055 60545060 +
caagaaaatttttacattgtgt

SEQ ID NO: 208229 - DNA, 22 bp, Artificial Sequence
  Synthetic oligonucleotide; TTT chr2 60545049 60545070 60545066 60545071 +
ttacattgtgttatagcagaaa

SEQ ID NO: 208230 - DNA, 22 bp, Artificial Sequence
  Synthetic oligonucleotide; TTT chr2 60545050 60545071 60545067 60545072 +
tacattgtgttatagcagaaac

SEQ ID NO: 208231 - DNA, 22 bp, Artificial Sequence
  Synthetic oligonucleotide; TTT chr2 60545051 60545072 60545068 60545073 +
acattgtgttatagcagaaaca

SEQ ID NO: 208232 - DNA, 22 bp, Artificial Sequence
  Synthetic oligonucleotide; TTA chr2 60545052 60545073 60545069 60545074 +
cattgtgttatagcagaaacag

SEQ ID NO: 208233 - DNA, 22 bp, Artificial Sequence
  Synthetic oligonucleotide; TTG chr2 60545057 60545078 60545074 60545079 +
tgttatagcagaaacagtggag

SEQ ID NO: 208234 - DNA, 22 bp, Artificial Sequence
  Synthetic oligonucleotide; TTA chr2 60545062 60545083 60545079 60545084 +
tagcagaaacagtggagtctgg

SEQ ID NO: 208235 - DNA, 22 bp, Artificial Sequence
  Synthetic oligonucleotide; CTG chr2 60545083 60545104 60545100 60545105 +
gactggacatttgtaagggtga

SEQ ID NO: 208236 - DNA, 22 bp, Artificial Sequence
  Synthetic oligonucleotide; CTG chr2 60545088 60545109 60545105 60545110 +
gacatttgtaagggtgacatgt

SEQ ID NO: 208237 - DNA, 22 bp, Artificial Sequence
  Synthetic oligonucleotide; TTT chr2 60545095 60545116 60545112 60545117 +
gtaagggtgacatgtggctgtg

SEQ ID NO: 208238 - DNA, 22 bp, Artificial Sequence
  Synthetic oligonucleotide; TTG chr2 60545096 60545117 60545113 60545118 +
taagggtgacatgtggctgtgt

SEQ ID NO: 208239 - DNA, 22 bp, Artificial Sequence
  Synthetic oligonucleotide; CTG chr2 60545115 60545136 60545132 60545137 +
tgtaaaccacaaacaaaatcaa

SEQ ID NO: 208240 - DNA, 22 bp, Artificial Sequence
  Synthetic oligonucleotide; CTG chr2 60545147 60545168 60545164 60545169 +
tcaaaaccacatcagagacaag

SEQ ID NO: 208241 - DNA, 22 bp, Artificial Sequence
  Synthetic oligonucleotide; TTT chr2 60545190 60545211 60545207 60545212 +
atcatttagctgaggaggcagg

SEQ ID NO: 208242 - DNA, 22 bp, Artificial Sequence
  Synthetic oligonucleotide; TTA chr2 60545191 60545212 60545208 60545213 +
tcatttagctgaggaggcaggc

SEQ ID NO: 208243 - DNA, 22 bp, Artificial Sequence
  Synthetic oligonucleotide; TTT chr2 60545197 60545218 60545214 60545219 +
agctgaggaggcaggctgcagg

SEQ ID NO: 208244 - DNA, 22 bp, Artificial Sequence
  Synthetic oligonucleotide; TTA chr2 60545198 60545219 60545215 60545220 +
gctgaggaggcaggctgcaggg

SEQ ID NO: 208245 - DNA, 22 bp, Artificial Sequence
  Synthetic oligonucleotide; CTG chr2 60545202 60545223 60545219 60545224 +
aggaggcaggctgcagggagca

SEQ ID NO: 208246 - DNA, 22 bp, Artificial Sequence
  Synthetic oligonucleotide; CTG chr2 60545215 60545236 60545232 60545237 +
cagggagcagccgttcctgtca

SEQ ID NO: 208247 - DNA, 22 bp, Artificial Sequence
  Synthetic oligonucleotide; TTC chr2 60545231 60545252 60545248 60545253 +
ctgtcaaaccaaccttttgaaa

SEQ ID NO: 208248 - DNA, 22 bp, Artificial Sequence
  Synthetic oligonucleotide; CTG chr2 60545234 60545255 60545251 60545256 +
tcaaaccaaccttttgaaattt

SEQ ID NO: 208249 - DNA, 22 bp, Artificial Sequence
  Synthetic oligonucleotide; CTT chr2 60545247 60545268 60545264 60545269 +
ttgaaatttccaacatgccctt

SEQ ID NO: 208250 - DNA, 22 bp, Artificial Sequence
  Synthetic oligonucleotide; TTT chr2 60545248 60545269 60545265 60545270 +
tgaaatttccaacatgccctta

SEQ ID NO: 208251 - DNA, 22 bp, Artificial Sequence
  Synthetic oligonucleotide; TTT chr2 60545249 60545270 60545266 60545271 +
gaaatttccaacatgcccttaa

SEQ ID NO: 208252 - DNA, 22 bp, Artificial Sequence
  Synthetic oligonucleotide; TTG chr2 60545250 60545271 60545267 60545272 +
aaatttccaacatgcccttaaa

SEQ ID NO: 208253 - DNA, 22 bp, Artificial Sequence
  Synthetic oligonucleotide; TTT chr2 60545256 60545277 60545273 60545278 +
ccaacatgcccttaaacttttc

SEQ ID NO: 208254 - DNA, 22 bp, Artificial Sequence
  Synthetic oligonucleotide; TTC chr2 60545257 60545278 60545274 60545279 +
caacatgcccttaaacttttcg

SEQ ID NO: 208255 - DNA, 22 bp, Artificial Sequence
  Synthetic oligonucleotide; CTT chr2 60545269 60545290 60545286 60545291 +
aaacttttcgagtaagcatgtc

SEQ ID NO: 208256 - DNA, 22 bp, Artificial Sequence
  Synthetic oligonucleotide; TTA chr2 60545270 60545291 60545287 60545292 +
aacttttcgagtaagcatgtct

SEQ ID NO: 208257 - DNA, 22 bp, Artificial Sequence
  Synthetic oligonucleotide; CTT chr2 60545275 60545296 60545292 60545297 +
ttcgagtaagcatgtctgtgcg

SEQ ID NO: 208258 - DNA, 22 bp, Artificial Sequence
  Synthetic oligonucleotide; TTT chr2 60545276 60545297 60545293 60545298 +
tcgagtaagcatgtctgtgcgc

SEQ ID NO: 208259 - DNA, 22 bp, Artificial Sequence
  Synthetic oligonucleotide; TTT chr2 60545277 60545298 60545294 60545299 +
cgagtaagcatgtctgtgcgct

SEQ ID NO: 208260 - DNA, 22 bp, Artificial Sequence
  Synthetic oligonucleotide; TTC chr2 60545278 60545299 60545295 60545300 +
gagtaagcatgtctgtgcgctt

SEQ ID NO: 208261 - DNA, 22 bp, Artificial Sequence
  Synthetic oligonucleotide; CTG chr2 60545293 60545314 60545310 60545315 +
tgcgcttcagcaactgccctct

SEQ ID NO: 208262 - DNA, 22 bp, Artificial Sequence
  Synthetic oligonucleotide; CTT chr2 60545300 60545321 60545317 60545322 +
cagcaactgccctctctactct

SEQ ID NO: 208263 - DNA, 22 bp, Artificial Sequence
  Synthetic oligonucleotide; TTC chr2 60545301 60545322 60545318 60545323 +
agcaactgccctctctactctg

SEQ ID NO: 208264 - DNA, 22 bp, Artificial Sequence
  Synthetic oligonucleotide; CTG chr2 60545309 60545330 60545326 60545331 +
ccctctctactctggcctggcc

SEQ ID NO: 208265 - DNA, 22 bp, Artificial Sequence
  Synthetic oligonucleotide; CTC chr2 60545314 60545335 60545331 60545336 +
tctactctggcctggccagtcg

SEQ ID NO: 208266 - DNA, 22 bp, Artificial Sequence
  Synthetic oligonucleotide; CTC chr2 60545316 60545337 60545333 60545338 +
tactctggcctggccagtcgaa

SEQ ID NO: 208267 - DNA, 22 bp, Artificial Sequence
  Synthetic oligonucleotide; CTA chr2 60545318 60545339 60545335 60545340 +
ctctggcctggccagtcgaaaa

SEQ ID NO: 208268 - DNA, 22 bp, Artificial Sequence
  Synthetic oligonucleotide; CTC chr2 60545321 60545342 60545338 60545343 +
tggcctggccagtcgaaaatgg

SEQ ID NO: 208269 - DNA, 22 bp, Artificial Sequence
  Synthetic oligonucleotide; CTG chr2 60545323 60545344 60545340 60545345 +
gcctggccagtcgaaaatggca

SEQ ID NO: 208270 - DNA, 22 bp, Artificial Sequence
  Synthetic oligonucleotide; CTG chr2 60545328 60545349 60545345 60545350 +
gccagtcgaaaatggcatctta

SEQ ID NO: 208271 - DNA, 22 bp, Artificial Sequence
  Synthetic oligonucleotide; CTT chr2 60545349 60545370 60545366 60545371 +
aaagtcaaggtcatggtgtcat

SEQ ID NO: 208272 - DNA, 22 bp, Artificial Sequence
  Synthetic oligonucleotide; TTA chr2 60545350 60545371 60545367 60545372 +
aagtcaaggtcatggtgtcatc

SEQ ID NO: 208273 - DNA, 22 bp, Artificial Sequence
  Synthetic oligonucleotide; CTG chr2 60545386 60545407 60545403 60545408 +
tgtttaattacagccccatccg

SEQ ID NO: 208274 - DNA, 22 bp, Artificial Sequence
  Synthetic oligonucleotide; TTT chr2 60545391 60545412 60545408 60545413 +
aattacagccccatccgggctg

SEQ ID NO: 208275 - DNA, 22 bp, Artificial Sequence
  Synthetic oligonucleotide; TTA chr2 60545392 60545413 60545409 60545414 +
attacagccccatccgggctga

SEQ ID NO: 208276 - DNA, 22 bp, Artificial Sequence
  Synthetic oligonucleotide; TTA chr2 60545396 60545417 60545413 60545418 +
cagccccatccgggctgacagc

SEQ ID NO: 208277 - DNA, 22 bp, Artificial Sequence
  Synthetic oligonucleotide; CTG chr2 60545413 60545434 60545430 60545435 +
acagccaatatggatccaaggc

SEQ ID NO: 208278 - DNA, 22 bp, Artificial Sequence
  Synthetic oligonucleotide; CTA chr2 60545437 60545458 60545454 60545459 +
gccctgaagctcagttaactct

SEQ ID NO: 208279 - DNA, 22 bp, Artificial Sequence
  Synthetic oligonucleotide; CTG chr2 60545443 60545464 60545460 60545465 +
aagctcagttaactctttccac

SEQ ID NO: 208280 - DNA, 22 bp, Artificial Sequence
  Synthetic oligonucleotide; CTC chr2 60545449 60545470 60545466 60545471 +
agttaactctttccaccacctc

SEQ ID NO: 208281 - DNA, 22 bp, Artificial Sequence
  Synthetic oligonucleotide; TTA chr2 60545454 60545475 60545471 60545476 +
actctttccaccacctccaact

SEQ ID NO: 208282 - DNA, 22 bp, Artificial Sequence
  Synthetic oligonucleotide; CTC chr2 60545458 60545479 60545475 60545480 +
tttccaccacctccaactaccc

SEQ ID NO: 208283 - DNA, 22 bp, Artificial Sequence
  Synthetic oligonucleotide; CTT chr2 60545460 60545481 60545477 60545482 +
tccaccacctccaactaccctg

SEQ ID NO: 208284 - DNA, 22 bp, Artificial Sequence
  Synthetic oligonucleotide; TTT chr2 60545461 60545482 60545478 60545483 +
ccaccacctccaactaccctgc

SEQ ID NO: 208285 - DNA, 22 bp, Artificial Sequence
  Synthetic oligonucleotide; TTC chr2 60545462 60545483 60545479 60545484 +
caccacctccaactaccctgcc

SEQ ID NO: 208286 - DNA, 22 bp, Artificial Sequence
  Synthetic oligonucleotide; CTC chr2 60545471 60545492 60545488 60545493 +
caactaccctgccagcccactc

SEQ ID NO: 208287 - DNA, 22 bp, Artificial Sequence
  Synthetic oligonucleotide; CTA chr2 60545477 60545498 60545494 60545499 +
ccctgccagcccactctacttc

SEQ ID NO: 208288 - DNA, 22 bp, Artificial Sequence
  Synthetic oligonucleotide; CTG chr2 60545482 60545503 60545499 60545504 +
ccagcccactctacttcaggga

SEQ ID NO: 208289 - DNA, 22 bp, Artificial Sequence
  Synthetic oligonucleotide; CTC chr2 60545493 60545514 60545510 60545515 +
tacttcagggaagccttgagaa

SEQ ID NO: 208290 - DNA, 22 bp, Artificial Sequence
  Synthetic oligonucleotide; CTA chr2 60545495 60545516 60545512 60545517 +
cttcagggaagccttgagaacg

SEQ ID NO: 208291 - DNA, 22 bp, Artificial Sequence
  Synthetic oligonucleotide; CTT chr2 60545498 60545519 60545515 60545520 +
cagggaagccttgagaacgagc

SEQ ID NO: 208292 - DNA, 22 bp, Artificial Sequence
  Synthetic oligonucleotide; TTC chr2 60545499 60545520 60545516 60545521 +
agggaagccttgagaacgagct

SEQ ID NO: 208293 - DNA, 22 bp, Artificial Sequence
  Synthetic oligonucleotide; CTT chr2 60545510 60545531 60545527 60545532 +
gagaacgagctgaacccctaag

SEQ ID NO: 208294 - DNA, 22 bp, Artificial Sequence
  Synthetic oligonucleotide; TTG chr2 60545511 60545532 60545528 60545533 +
agaacgagctgaacccctaagg

SEQ ID NO: 208295 - DNA, 22 bp, Artificial Sequence
  Synthetic oligonucleotide; CTG chr2 60545522 60545543 60545539 60545544 +
aacccctaaggaggcctggcca

SEQ ID NO: 208296 - DNA, 22 bp, Artificial Sequence
  Synthetic oligonucleotide; CTA chr2 60545530 60545551 60545547 60545552 +
aggaggcctggccagatgttct

SEQ ID NO: 208297 - DNA, 22 bp, Artificial Sequence
  Synthetic oligonucleotide; CTG chr2 60545540 60545561 60545557 60545562 +
gccagatgttctgagtcaaaca

SEQ ID NO: 208298 - DNA, 22 bp, Artificial Sequence
  Synthetic oligonucleotide; TTC chr2 60545551 60545572 60545568 60545573 +
tgagtcaaacaagtcattggct

SEQ ID NO: 208299 - DNA, 22 bp, Artificial Sequence
  Synthetic oligonucleotide; CTG chr2 60545553 60545574 60545570 60545575 +
agtcaaacaagtcattggctga

SEQ ID NO: 208300 - DNA, 22 bp, Artificial Sequence
  Synthetic oligonucleotide; TTG chr2 60545570 60545591 60545587 60545592 +
gctgaactgcaaatgcctatat

SEQ ID NO: 208301 - DNA, 22 bp, Artificial Sequence
  Synthetic oligonucleotide; CTG chr2 60545574 60545595 60545591 60545596 +
aactgcaaatgcctatatggcc

SEQ ID NO: 208302 - DNA, 22 bp, Artificial Sequence
  Synthetic oligonucleotide; CTG chr2 60545579 60545600 60545596 60545601 +
caaatgcctatatggccacttt

SEQ ID NO: 208303 - DNA, 22 bp, Artificial Sequence
  Synthetic oligonucleotide; CTA chr2 60545589 60545610 60545606 60545611 +
tatggccactttgcctctgaca

SEQ ID NO: 208304 - DNA, 22 bp, Artificial Sequence
  Synthetic oligonucleotide; CTT chr2 60545600 60545621 60545617 60545622 +
tgcctctgacacgtcaccaagg

SEQ ID NO: 208305 - DNA, 22 bp, Artificial Sequence
  Synthetic oligonucleotide; TTT chr2 60545601 60545622 60545618 60545623 +
gcctctgacacgtcaccaaggc

SEQ ID NO: 208306 - DNA, 22 bp, Artificial Sequence
  Synthetic oligonucleotide; TTG chr2 60545602 60545623 60545619 60545624 +
cctctgacacgtcaccaaggct

SEQ ID NO: 208307 - DNA, 22 bp, Artificial Sequence
  Synthetic oligonucleotide; CTC chr2 60545606 60545627 60545623 60545628 +
tgacacgtcaccaaggctggaa

SEQ ID NO: 208308 - DNA, 22 bp, Artificial Sequence
  Synthetic oligonucleotide; CTG chr2 60545608 60545629 60545625 60545630 +
acacgtcaccaaggctggaaat

SEQ ID NO: 208309 - DNA, 22 bp, Artificial Sequence
  Synthetic oligonucleotide; CTG chr2 60545625 60545646 60545642 60545647 +
gaaatggacaatggaagctgga

SEQ ID NO: 208310 - DNA, 22 bp, Artificial Sequence
  Synthetic oligonucleotide; CTG chr2 60545645 60545666 60545662 60545667 +
gactaggtgtagtaaagctcaa

SEQ ID NO: 208311 - DNA, 22 bp, Artificial Sequence
  Synthetic oligonucleotide; CTA chr2 60545650 60545671 60545667 60545672 +
ggtgtagtaaagctcaatactt

SEQ ID NO: 208312 - DNA, 22 bp, Artificial Sequence
  Synthetic oligonucleotide; CTC chr2 60545665 60545686 60545682 60545687 +
aatacttcaaaatgagaaggtg

SEQ ID NO: 208313 - DNA, 22 bp, Artificial Sequence
  Synthetic oligonucleotide; CTT chr2 60545672 60545693 60545689 60545694 +
caaaatgagaaggtggggatgg

SEQ ID NO: 208314 - DNA, 22 bp, Artificial Sequence
  Synthetic oligonucleotide; TTC chr2 60545673 60545694 60545690 60545695 +
aaaatgagaaggtggggatggg

SEQ ID NO: 208315 - DNA, 22 bp, Artificial Sequence
  Synthetic oligonucleotide; CTG chr2 60545741 60545762 60545758 60545763 +
atgtgtgtacctatcctgccta

SEQ ID NO: 208316 - DNA, 22 bp, Artificial Sequence
  Synthetic oligonucleotide; CTA chr2 60545754 60545775 60545771 60545776 +
tcctgcctacatctgattcagt

SEQ ID NO: 208317 - DNA, 22 bp, Artificial Sequence
  Synthetic oligonucleotide; CTG chr2 60545759 60545780 60545776 60545781 +
cctacatctgattcagtgaggt

SEQ ID NO: 208318 - DNA, 22 bp, Artificial Sequence
  Synthetic oligonucleotide; CTA chr2 60545763 60545784 60545780 60545785 +
catctgattcagtgaggtggaa

SEQ ID NO: 208319 - DNA, 22 bp, Artificial Sequence
  Synthetic oligonucleotide; CTG chr2 60545769 60545790 60545786 60545791 +
attcagtgaggtggaaaatatt

SEQ ID NO: 208320 - DNA, 22 bp, Artificial Sequence
  Synthetic oligonucleotide; TTC chr2 60545773 60545794 60545790 60545795 +
agtgaggtggaaaatatttatt

SEQ ID NO: 208321 - DNA, 22 bp, Artificial Sequence
  Synthetic oligonucleotide; TTT chr2 60545792 60545813 60545809 60545814 +
atttttctgtgttctggacgta

SEQ ID NO: 208322 - DNA, 22 bp, Artificial Sequence
  Synthetic oligonucleotide; TTA chr2 60545793 60545814 60545810 60545815 +
tttttctgtgttctggacgtaa

SEQ ID NO: 208323 - DNA, 22 bp, Artificial Sequence
  Synthetic oligonucleotide; TTT chr2 60545796 60545817 60545813 60545818 +
ttctgtgttctggacgtaagca

SEQ ID NO: 208324 - DNA, 22 bp, Artificial Sequence
  Synthetic oligonucleotide; TTT chr2 60545797 60545818 60545814 60545819 +
tctgtgttctggacgtaagcaa

SEQ ID NO: 208325 - DNA, 22 bp, Artificial Sequence
  Synthetic oligonucleotide; TTT chr2 60545798 60545819 60545815 60545820 +
ctgtgttctggacgtaagcaac

SEQ ID NO: 208326 - DNA, 22 bp, Artificial Sequence
  Synthetic oligonucleotide; TTC chr2 60545799 60545820 60545816 60545821 +
tgtgttctggacgtaagcaaca

SEQ ID NO: 208327 - DNA, 22 bp, Artificial Sequence
  Synthetic oligonucleotide; CTG chr2 60545801 60545822 60545818 60545823 +
tgttctggacgtaagcaacaga

SEQ ID NO: 208328 - DNA, 22 bp, Artificial Sequence
  Synthetic oligonucleotide; TTC chr2 60545806 60545827 60545823 60545828 +
tggacgtaagcaacagaaatga

SEQ ID NO: 208329 - DNA, 22 bp, Artificial Sequence
  Synthetic oligonucleotide; CTG chr2 60545808 60545829 60545825 60545830 +
gacgtaagcaacagaaatgatt

SEQ ID NO: 208330 - DNA, 22 bp, Artificial Sequence
  Synthetic oligonucleotide; TTA chr2 60545831 60545852 60545848 60545853 +
ttttaacattacagggctgtca

SEQ ID NO: 208331 - DNA, 22 bp, Artificial Sequence
  Synthetic oligonucleotide; TTT chr2 60545834 60545855 60545851 60545856 +
taacattacagggctgtcatgg

SEQ ID NO: 208332 - DNA, 22 bp, Artificial Sequence
  Synthetic oligonucleotide; TTT chr2 60545835 60545856 60545852 60545857 +
aacattacagggctgtcatgga

SEQ ID NO: 208333 - DNA, 22 bp, Artificial Sequence
  Synthetic oligonucleotide; TTA chr2 60545836 60545857 60545853 60545858 +
acattacagggctgtcatggac

SEQ ID NO: 208334 - DNA, 22 bp, Artificial Sequence
  Synthetic oligonucleotide; TTA chr2 60545842 60545863 60545859 60545864 +
cagggctgtcatggacagtcac

SEQ ID NO: 208335 - DNA, 22 bp, Artificial Sequence
  Synthetic oligonucleotide; CTG chr2 60545850 60545871 60545867 60545872 +
tcatggacagtcacatagagta

SEQ ID NO: 208336 - DNA, 22 bp, Artificial Sequence
  Synthetic oligonucleotide; CTT chr2 60545887 60545908 60545904 60545909 +
cacaactccttactgcttggct

SEQ ID NO: 208337 - DNA, 22 bp, Artificial Sequence
  Synthetic oligonucleotide; TTC chr2 60545888 60545909 60545905 60545910 +
acaactccttactgcttggcta

SEQ ID NO: 208338 - DNA, 22 bp, Artificial Sequence
  Synthetic oligonucleotide; CTC chr2 60545895 60545916 60545912 60545917 +
cttactgcttggctacagcacc

SEQ ID NO: 208339 - DNA, 22 bp, Artificial Sequence
  Synthetic oligonucleotide; CTT chr2 60545898 60545919 60545915 60545920 +
actgcttggctacagcacctct

SEQ ID NO: 208340 - DNA, 22 bp, Artificial Sequence
  Synthetic oligonucleotide; TTA chr2 60545899 60545920 60545916 60545921 +
ctgcttggctacagcacctctg

SEQ ID NO: 208341 - DNA, 22 bp, Artificial Sequence
  Synthetic oligonucleotide; CTG chr2 60545902 60545923 60545919 60545924 +
cttggctacagcacctctgaaa

SEQ ID NO: 208342 - DNA, 22 bp, Artificial Sequence
  Synthetic oligonucleotide; CTT chr2 60545905 60545926 60545922 60545927 +
ggctacagcacctctgaaaatg

SEQ ID NO: 208343 - DNA, 22 bp, Artificial Sequence
  Synthetic oligonucleotide; TTG chr2 60545906 60545927 60545923 60545928 +
gctacagcacctctgaaaatga

SEQ ID NO: 208344 - DNA, 22 bp, Artificial Sequence
  Synthetic oligonucleotide; CTA chr2 60545910 60545931 60545927 60545932 +
cagcacctctgaaaatgaaaag

SEQ ID NO: 208345 - DNA, 22 bp, Artificial Sequence
  Synthetic oligonucleotide; CTC chr2 60545919 60545940 60545936 60545941 +
tgaaaatgaaaagaaaacatgc

SEQ ID NO: 208346 - DNA, 22 bp, Artificial Sequence
  Synthetic oligonucleotide; CTG chr2 60545921 60545942 60545938 60545943 +
aaaatgaaaagaaaacatgcaa

SEQ ID NO: 208347 - DNA, 22 bp, Artificial Sequence
  Synthetic oligonucleotide; CTT chr2 60545950 60545971 60545967 60545972 +
ttctccttgcttctcatttacc

SEQ ID NO: 208348 - DNA, 22 bp, Artificial Sequence
  Synthetic oligonucleotide; TTT chr2 60545951 60545972 60545968 60545973 +
tctccttgcttctcatttacct

SEQ ID NO: 208349 - DNA, 22 bp, Artificial Sequence
  Synthetic oligonucleotide; TTT chr2 60545952 60545973 60545969 60545974 +
ctccttgcttctcatttacctg

SEQ ID NO: 208350 - DNA, 22 bp, Artificial Sequence
  Synthetic oligonucleotide; TTC chr2 60545953 60545974 60545970 60545975 +
tccttgcttctcatttacctgc

SEQ ID NO: 208351 - DNA, 22 bp, Artificial Sequence
  Synthetic oligonucleotide; CTC chr2 60545955 60545976 60545972 60545977 +
cttgcttctcatttacctgcta

SEQ ID NO: 208352 - DNA, 22 bp, Artificial Sequence
  Synthetic oligonucleotide; CTT chr2 60545958 60545979 60545975 60545980 +
gcttctcatttacctgctatgt

SEQ ID NO: 208353 - DNA, 22 bp, Artificial Sequence
  Synthetic oligonucleotide; TTG chr2 60545959 60545980 60545976 60545981 +
cttctcatttacctgctatgtg

SEQ ID NO: 208354 - DNA, 22 bp, Artificial Sequence
  Synthetic oligonucleotide; CTT chr2 60545962 60545983 60545979 60545984 +
ctcatttacctgctatgtgttc

SEQ ID NO: 208355 - DNA, 22 bp, Artificial Sequence
  Synthetic oligonucleotide; TTC chr2 60545963 60545984 60545980 60545985 +
tcatttacctgctatgtgttcc

SEQ ID NO: 208356 - DNA, 22 bp, Artificial Sequence
  Synthetic oligonucleotide; CTC chr2 60545965 60545986 60545982 60545987 +
atttacctgctatgtgttcctg

SEQ ID NO: 208357 - DNA, 22 bp, Artificial Sequence
  Synthetic oligonucleotide; TTT chr2 60545969 60545990 60545986 60545991 +
acctgctatgtgttcctgtttg

SEQ ID NO: 208358 - DNA, 22 bp, Artificial Sequence
  Synthetic oligonucleotide; TTA chr2 60545970 60545991 60545987 60545992 +
cctgctatgtgttcctgtttgg

SEQ ID NO: 208359 - DNA, 22 bp, Artificial Sequence
  Synthetic oligonucleotide; CTG chr2 60545974 60545995 60545991 60545996 +
ctatgtgttcctgtttggggca

SEQ ID NO: 208360 - DNA, 22 bp, Artificial Sequence
  Synthetic oligonucleotide; CTA chr2 60545977 60545998 60545994 60545999 +
tgtgttcctgtttggggcaaat

SEQ ID NO: 208361 - DNA, 22 bp, Artificial Sequence
  Synthetic oligonucleotide; TTC chr2 60545984 60546005 60546001 60546006 +
ctgtttggggcaaattcctcta

SEQ ID NO: 208362 - DNA, 22 bp, Artificial Sequence
  Synthetic oligonucleotide; CTG chr2 60545987 60546008 60546004 60546009 +
tttggggcaaattcctctagat

SEQ ID NO: 208363 - DNA, 22 bp, Artificial Sequence
  Synthetic oligonucleotide; TTT chr2 60545990 60546011 60546007 60546012 +
ggggcaaattcctctagatgac

SEQ ID NO: 208364 - DNA, 22 bp, Artificial Sequence
  Synthetic oligonucleotide; TTG chr2 60545991 60546012 60546008 60546013 +
gggcaaattcctctagatgacg

SEQ ID NO: 208365 - DNA, 22 bp, Artificial Sequence
  Synthetic oligonucleotide; TTC chr2 60546001 60546022 60546018 60546023 +
ctctagatgacgttgataaaca

SEQ ID NO: 208366 - DNA, 22 bp, Artificial Sequence
  Synthetic oligonucleotide; CTC chr2 60546004 60546025 60546021 60546026 +
tagatgacgttgataaacaatc

SEQ ID NO: 208367 - DNA, 22 bp, Artificial Sequence
  Synthetic oligonucleotide; CTA chr2 60546006 60546027 60546023 60546028 +
gatgacgttgataaacaatcgt

SEQ ID NO: 208368 - DNA, 22 bp, Artificial Sequence
  Synthetic oligonucleotide; TTG chr2 60546016 60546037 60546033 60546038 +
ataaacaatcgtcatcctctgg

SEQ ID NO: 208369 - DNA, 22 bp, Artificial Sequence
  Synthetic oligonucleotide; CTC chr2 60546035 60546056 60546052 60546057 +
tggcgtgacctggatgccaacc

SEQ ID NO: 208370 - DNA, 22 bp, Artificial Sequence
  Synthetic oligonucleotide; CTG chr2 60546037 60546058 60546054 60546059 +
gcgtgacctggatgccaacctc

SEQ ID NO: 208371 - DNA, 22 bp, Artificial Sequence
  Synthetic oligonucleotide; CTG chr2 60546047 60546068 60546064 60546069 +
gatgccaacctccacgggattg

SEQ ID NO: 208372 - DNA, 22 bp, Artificial Sequence
  Synthetic oligonucleotide; CTC chr2 60546059 60546080 60546076 60546081 +
cacgggattggatgcttttttc

SEQ ID NO: 208373 - DNA, 22 bp, Artificial Sequence
  Synthetic oligonucleotide; TTG chr2 60546069 60546090 60546086 60546091 +
gatgcttttttcatctcgattg

SEQ ID NO: 208374 - DNA, 22 bp, Artificial Sequence
  Synthetic oligonucleotide; CTT chr2 60546076 60546097 60546093 60546098 +
ttttcatctcgattggtgaagg

SEQ ID NO: 208375 - DNA, 22 bp, Artificial Sequence
  Synthetic oligonucleotide; TTT chr2 60546077 60546098 60546094 60546099 +
tttcatctcgattggtgaaggg

SEQ ID NO: 208376 - DNA, 22 bp, Artificial Sequence
  Synthetic oligonucleotide; TTT chr2 60546078 60546099 60546095 60546100 +
ttcatctcgattggtgaagggg

SEQ ID NO: 208377 - DNA, 22 bp, Artificial Sequence
  Synthetic oligonucleotide; TTT chr2 60546079 60546100 60546096 60546101 +
tcatctcgattggtgaagggga

SEQ ID NO: 208378 - DNA, 22 bp, Artificial Sequence
  Synthetic oligonucleotide; TTT chr2 60546080 60546101 60546097 60546102 +
catctcgattggtgaaggggaa

SEQ ID NO: 208379 - DNA, 22 bp, Artificial Sequence
  Synthetic oligonucleotide; TTC chr2 60546081 60546102 60546098 60546103 +
atctcgattggtgaaggggaag

SEQ ID NO: 208380 - DNA, 22 bp, Artificial Sequence
  Synthetic oligonucleotide; CTC chr2 60546086 60546107 60546103 60546108 +
gattggtgaaggggaaggtggc

SEQ ID NO: 208381 - DNA, 22 bp, Artificial Sequence
  Synthetic oligonucleotide; TTG chr2 60546091 60546112 60546108 60546113 +
gtgaaggggaaggtggcttatc

SEQ ID NO: 208382 - DNA, 22 bp, Artificial Sequence
  Synthetic oligonucleotide; CTT chr2 60546110 60546131 60546127 60546132 +
atccacagctttttctaagcag

SEQ ID NO: 208383 - DNA, 22 bp, Artificial Sequence
  Synthetic oligonucleotide; TTA chr2 60546111 60546132 60546128 60546133 +
tccacagctttttctaagcaga

SEQ ID NO: 208384 - DNA, 22 bp, Artificial Sequence
  Synthetic oligonucleotide; CTT chr2 60546121 60546142 60546138 60546143 +
tttctaagcagaggctgccatt

SEQ ID NO: 208385 - DNA, 22 bp, Artificial Sequence
  Synthetic oligonucleotide; TTT chr2 60546122 60546143 60546139 60546144 +
ttctaagcagaggctgccattg

SEQ ID NO: 208386 - DNA, 22 bp, Artificial Sequence
  Synthetic oligonucleotide; TTT chr2 60546123 60546144 60546140 60546145 +
tctaagcagaggctgccattgc

SEQ ID NO: 208387 - DNA, 22 bp, Artificial Sequence
  Synthetic oligonucleotide; TTT chr2 60546124 60546145 60546141 60546146 +
ctaagcagaggctgccattgca

SEQ ID NO: 208388 - DNA, 22 bp, Artificial Sequence
  Synthetic oligonucleotide; TTC chr2 60546125 60546146 60546142 60546147 +
taagcagaggctgccattgcat

SEQ ID NO: 208389 - DNA, 22 bp, Artificial Sequence
  Synthetic oligonucleotide; CTA chr2 60546127 60546148 60546144 60546149 +
agcagaggctgccattgcattg

SEQ ID NO: 208390 - DNA, 22 bp, Artificial Sequence
  Synthetic oligonucleotide; CTG chr2 60546138 60546159 60546155 60546160 +
ccattgcattgtttccgtttgt

SEQ ID NO: 208391 - DNA, 22 bp, Artificial Sequence
  Synthetic oligonucleotide; TTG chr2 60546144 60546165 60546161 60546166 +
cattgtttccgtttgtgctcga

SEQ ID NO: 208392 - DNA, 22 bp, Artificial Sequence
  Synthetic oligonucleotide; TTG chr2 60546149 60546170 60546166 60546171 +
tttccgtttgtgctcgataaaa

SEQ ID NO: 208393 - DNA, 22 bp, Artificial Sequence
  Synthetic oligonucleotide; TTT chr2 60546152 60546173 60546169 60546174 +
ccgtttgtgctcgataaaaata

SEQ ID NO: 208394 - DNA, 22 bp, Artificial Sequence
  Synthetic oligonucleotide; TTC chr2 60546153 60546174 60546170 60546175 +
cgtttgtgctcgataaaaataa

SEQ ID NO: 208395 - DNA, 22 bp, Artificial Sequence
  Synthetic oligonucleotide; TTT chr2 60546158 60546179 60546175 60546180 +
gtgctcgataaaaataagaatg

SEQ ID NO: 208396 - DNA, 22 bp, Artificial Sequence
  Synthetic oligonucleotide; TTG chr2 60546159 60546180 60546176 60546181 +
tgctcgataaaaataagaatgt

SEQ ID NO: 208397 - DNA, 22 bp, Artificial Sequence
  Synthetic oligonucleotide; CTC chr2 60546164 60546185 60546181 60546186 +
gataaaaataagaatgtccccc

SEQ ID NO: 208398 - DNA, 22 bp, Artificial Sequence
  Synthetic oligonucleotide; TTC chr2 60546198 60546219 60546215 60546220 +
atctggcactgcccacaggtga

SEQ ID NO: 208399 - DNA, 22 bp, Artificial Sequence
  Synthetic oligonucleotide; CTG chr2 60546203 60546224 60546220 60546225 +
gcactgcccacaggtgaggagg

SEQ ID NO: 208400 - DNA, 22 bp, Artificial Sequence
  Synthetic oligonucleotide; CTG chr2 60546209 60546230 60546226 60546231 +
cccacaggtgaggaggtcatga

SEQ ID NO: 208401 - DNA, 22 bp, Artificial Sequence
  Synthetic oligonucleotide; CTT chr2 60546238 60546259 60546255 60546260 +
ctggagctcccaacgggccgtg

SEQ ID NO: 208402 - DNA, 22 bp, Artificial Sequence
  Synthetic oligonucleotide; TTC chr2 60546239 60546260 60546256 60546261 +
tggagctcccaacgggccgtgg

SEQ ID NO: 208403 - DNA, 22 bp, Artificial Sequence
  Synthetic oligonucleotide; CTG chr2 60546241 60546262 60546258 60546263 +
gagctcccaacgggccgtggtc

SEQ ID NO: 208404 - DNA, 22 bp, Artificial Sequence
  Synthetic oligonucleotide; CTC chr2 60546247 60546268 60546264 60546269 +
ccaacgggccgtggtctggttc

SEQ ID NO: 208405 - DNA, 22 bp, Artificial Sequence
  Synthetic oligonucleotide; CTG chr2 60546265 60546286 60546282 60546287 +
gttcatcatctgtaagaatggc

SEQ ID NO: 208406 - DNA, 22 bp, Artificial Sequence
  Synthetic oligonucleotide; TTC chr2 60546269 60546290 60546286 60546291 +
atcatctgtaagaatggcttca

SEQ ID NO: 208407 - DNA, 22 bp, Artificial Sequence
  Synthetic oligonucleotide; CTG chr2 60546277 60546298 60546294 60546299 +
taagaatggcttcaagaggctc

SEQ ID NO: 208408 - DNA, 22 bp, Artificial Sequence
  Synthetic oligonucleotide; CTT chr2 60546289 60546310 60546306 60546311 +
caagaggctcggctgtggttgg

SEQ ID NO: 208409 - DNA, 22 bp, Artificial Sequence
  Synthetic oligonucleotide; TTC chr2 60546290 60546311 60546307 60546312 +
aagaggctcggctgtggttgga

SEQ ID NO: 208410 - DNA, 22 bp, Artificial Sequence
  Synthetic oligonucleotide; CTC chr2 60546299 60546320 60546316 60546321 +
ggctgtggttggagaaacaaaa

SEQ ID NO: 208411 - DNA, 22 bp, Artificial Sequence
  Synthetic oligonucleotide; CTG chr2 60546304 60546325 60546321 60546326 +
tggttggagaaacaaaagcaca

SEQ ID NO: 208412 - DNA, 22 bp, Artificial Sequence
  Synthetic oligonucleotide; TTG chr2 60546310 60546331 60546327 60546332 +
gagaaacaaaagcacaattatt

SEQ ID NO: 208413 - DNA, 22 bp, Artificial Sequence
  Synthetic oligonucleotide; TTA chr2 60546330 60546351 60546347 60546352 +
ttagagtgccagagaggacaga

SEQ ID NO: 208414 - DNA, 22 bp, Artificial Sequence
  Synthetic oligonucleotide; TTA chr2 60546333 60546354 60546350 60546355 +
gagtgccagagaggacagaaag

SEQ ID NO: 208415 - DNA, 22 bp, Artificial Sequence
  Synthetic oligonucleotide; CTC chr2 60546371 60546392 60546388 60546393 +
aaccccatgccatcccaccaca

SEQ ID NO: 208416 - DNA, 22 bp, Artificial Sequence
  Synthetic oligonucleotide; TTT chr2 60546408 60546429 60546425 60546430 +
ctaggcttctctatataatacc

SEQ ID NO: 208417 - DNA, 22 bp, Artificial Sequence
  Synthetic oligonucleotide; TTC chr2 60546409 60546430 60546426 60546431 +
taggcttctctatataataccc

SEQ ID NO: 208418 - DNA, 22 bp, Artificial Sequence
  Synthetic oligonucleotide; CTA chr2 60546411 60546432 60546428 60546433 +
ggcttctctatataatacccag

SEQ ID NO: 208419 - DNA, 22 bp, Artificial Sequence
  Synthetic oligonucleotide; CTT chr2 60546416 60546437 60546433 60546438 +
ctctatataatacccagaaaat

SEQ ID NO: 208420 - DNA, 22 bp, Artificial Sequence
  Synthetic oligonucleotide; TTC chr2 60546417 60546438 60546434 60546439 +
tctatataatacccagaaaatg

SEQ ID NO: 208421 - DNA, 22 bp, Artificial Sequence
  Synthetic oligonucleotide; CTC chr2 60546419 60546440 60546436 60546441 +
tatataatacccagaaaatgtg

SEQ ID NO: 208422 - DNA, 22 bp, Artificial Sequence
  Synthetic oligonucleotide; CTA chr2 60546421 60546442 60546438 60546443 +
tataatacccagaaaatgtgag

SEQ ID NO: 208423 - DNA, 22 bp, Artificial Sequence
  Synthetic oligonucleotide; TTA chr2 60546473 60546494 60546490 60546495 +
tcaaccagagagcaaatttgtc

SEQ ID NO: 208424 - DNA, 22 bp, Artificial Sequence
  Synthetic oligonucleotide; TTT chr2 60546492 60546513 60546509 60546514 +
gtcaatgaggcaaatcatcaca

SEQ ID NO: 208425 - DNA, 22 bp, Artificial Sequence
  Synthetic oligonucleotide; TTG chr2 60546493 60546514 60546510 60546515 +
tcaatgaggcaaatcatcacat

SEQ ID NO: 208426 - DNA, 22 bp, Artificial Sequence
  Synthetic oligonucleotide; CTT chr2 60546534 60546555 60546551 60546556 +
ccttgcataactccagagaaca

SEQ ID NO: 208427 - DNA, 22 bp, Artificial Sequence
  Synthetic oligonucleotide; TTC chr2 60546535 60546556 60546552 60546557 +
cttgcataactccagagaacac

SEQ ID NO: 208428 - DNA, 22 bp, Artificial Sequence
  Synthetic oligonucleotide; CTT chr2 60546538 60546559 60546555 60546560 +
gcataactccagagaacacaca

SEQ ID NO: 208429 - DNA, 22 bp, Artificial Sequence
  Synthetic oligonucleotide; TTG chr2 60546539 60546560 60546556 60546561 +
cataactccagagaacacacac

SEQ ID NO: 208430 - DNA, 22 bp, Artificial Sequence
  Synthetic oligonucleotide; CTC chr2 60546547 60546568 60546564 60546569 +
cagagaacacacacacacacat

SEQ ID NO: 208431 - DNA, 22 bp, Artificial Sequence
  Synthetic oligonucleotide; CTG chr2 60546606 60546627 60546623 60546628 +
gtttgtaagtttagaaagaatg

SEQ ID NO: 208432 - DNA, 22 bp, Artificial Sequence
  Synthetic oligonucleotide; TTT chr2 60546610 60546631 60546627 60546632 +
gtaagtttagaaagaatgctac

SEQ ID NO: 208433 - DNA, 22 bp, Artificial Sequence
  Synthetic oligonucleotide; TTG chr2 60546611 60546632 60546628 60546633 +
taagtttagaaagaatgctact

SEQ ID NO: 208434 - DNA, 22 bp, Artificial Sequence
  Synthetic oligonucleotide; TTT chr2 60546618 60546639 60546635 60546640 +
agaaagaatgctacttaaatag

SEQ ID NO: 208435 - DNA, 22 bp, Artificial Sequence
  Synthetic oligonucleotide; TTA chr2 60546619 60546640 60546636 60546641 +
gaaagaatgctacttaaatagt

SEQ ID NO: 208436 - DNA, 22 bp, Artificial Sequence
  Synthetic oligonucleotide; CTA chr2 60546631 60546652 60546648 60546653 +
cttaaatagttaacacagggaa

SEQ ID NO: 208437 - DNA, 22 bp, Artificial Sequence
  Synthetic oligonucleotide; CTT chr2 60546634 60546655 60546651 60546656 +
aaatagttaacacagggaacat

SEQ ID NO: 208438 - DNA, 22 bp, Artificial Sequence
  Synthetic oligonucleotide; TTA chr2 60546635 60546656 60546652 60546657 +
aatagttaacacagggaacata

SEQ ID NO: 208439 - DNA, 22 bp, Artificial Sequence
  Synthetic oligonucleotide; TTA chr2 60546643 60546664 60546660 60546665 +
acacagggaacataaagaaagc

SEQ ID NO: 208440 - DNA, 22 bp, Artificial Sequence
  Synthetic oligonucleotide; CTT chr2 60546667 60546688 60546684 60546689 +
aaataataactacaagaaaaac

SEQ ID NO: 208441 - DNA, 22 bp, Artificial Sequence
  Synthetic oligonucleotide; TTA chr2 60546668 60546689 60546685 60546690 +
aataataactacaagaaaaact

SEQ ID NO: 208442 - DNA, 22 bp, Artificial Sequence
  Synthetic oligonucleotide; CTA chr2 60546679 60546700 60546696 60546701 +
caagaaaaactggttaaaaaaa

SEQ ID NO: 208443 - DNA, 22 bp, Artificial Sequence
  Synthetic oligonucleotide; CTG chr2 60546691 60546712 60546708 60546713 +
gttaaaaaaaaaagtggataga

SEQ ID NO: 208444 - DNA, 22 bp, Artificial Sequence
  Synthetic oligonucleotide; TTA chr2 60546695 60546716 60546712 60546717 +
aaaaaaaaagtggatagaaacc

SEQ ID NO: 208445 - DNA, 22 bp, Artificial Sequence
  Synthetic oligonucleotide; TTT chr2 60546723 60546744 60546740 60546745 +
gtttcttttttcctatacacca

SEQ ID NO: 208446 - DNA, 22 bp, Artificial Sequence
  Synthetic oligonucleotide; TTG chr2 60546724 60546745 60546741 60546746 +
tttcttttttcctatacaccaa

SEQ ID NO: 208447 - DNA, 22 bp, Artificial Sequence
  Synthetic oligonucleotide; TTT chr2 60546727 60546748 60546744 60546749 +
cttttttcctatacaccaagtt

SEQ ID NO: 208448 - DNA, 22 bp, Artificial Sequence
  Synthetic oligonucleotide; TTC chr2 60546728 60546749 60546745 60546750 +
ttttttcctatacaccaagttg

SEQ ID NO: 208449 - DNA, 22 bp, Artificial Sequence
  Synthetic oligonucleotide; CTT chr2 60546730 60546751 60546747 60546752 +
ttttcctatacaccaagttgtc

SEQ ID NO: 208450 - DNA, 22 bp, Artificial Sequence
  Synthetic oligonucleotide; TTT chr2 60546731 60546752 60546748 60546753 +
tttcctatacaccaagttgtcc

SEQ ID NO: 208451 - DNA, 22 bp, Artificial Sequence
  Synthetic oligonucleotide; TTT chr2 60546732 60546753 60546749 60546754 +
ttcctatacaccaagttgtcca

SEQ ID NO: 208452 - DNA, 22 bp, Artificial Sequence
  Synthetic oligonucleotide; TTT chr2 60546733 60546754 60546750 60546755 +
tcctatacaccaagttgtccat

SEQ ID NO: 208453 - DNA, 22 bp, Artificial Sequence
  Synthetic oligonucleotide; TTT chr2 60546734 60546755 60546751 60546756 +
cctatacaccaagttgtccatt

SEQ ID NO: 208454 - DNA, 22 bp, Artificial Sequence
  Synthetic oligonucleotide; TTC chr2 60546735 60546756 60546752 60546757 +
ctatacaccaagttgtccattg

SEQ ID NO: 208455 - DNA, 22 bp, Artificial Sequence
  Synthetic oligonucleotide; CTA chr2 60546738 60546759 60546755 60546760 +
tacaccaagttgtccattgtgc

SEQ ID NO: 208456 - DNA, 22 bp, Artificial Sequence
  Synthetic oligonucleotide; TTG chr2 60546750 60546771 60546767 60546772 +
tccattgtgccaaagaatgaaa

SEQ ID NO: 208457 - DNA, 22 bp, Artificial Sequence
  Synthetic oligonucleotide; TTG chr2 60546757 60546778 60546774 60546779 +
tgccaaagaatgaaaggagagg

SEQ ID NO: 208458 - DNA, 22 bp, Artificial Sequence
  Synthetic oligonucleotide; CTT chr2 60546800 60546821 60546817 60546822 +
tgtgtgtgaatgtatatactcc

SEQ ID NO: 208459 - DNA, 22 bp, Artificial Sequence
  Synthetic oligonucleotide; TTT chr2 60546801 60546822 60546818 60546823 +
gtgtgtgaatgtatatactcct

SEQ ID NO: 208460 - DNA, 22 bp, Artificial Sequence
  Synthetic oligonucleotide; TTG chr2 60546802 60546823 60546819 60546824 +
tgtgtgaatgtatatactccta

SEQ ID NO: 208461 - DNA, 22 bp, Artificial Sequence
  Synthetic oligonucleotide; CTC chr2 60546821 60546842 60546838 60546843 +
ctaagtaaacagacatggcttc

SEQ ID NO: 208462 - DNA, 22 bp, Artificial Sequence
  Synthetic oligonucleotide; CTA chr2 60546824 60546845 60546841 60546846 +
agtaaacagacatggcttcata

SEQ ID NO: 208463 - DNA, 22 bp, Artificial Sequence
  Synthetic oligonucleotide; CTT chr2 60546842 60546863 60546859 60546864 +
cataaattagaaagctactatg

SEQ ID NO: 208464 - DNA, 22 bp, Artificial Sequence
  Synthetic oligonucleotide; TTC chr2 60546843 60546864 60546860 60546865 +
ataaattagaaagctactatgt

SEQ ID NO: 208465 - DNA, 22 bp, Artificial Sequence
  Synthetic oligonucleotide; TTA chr2 60546851 60546872 60546868 60546873 +
gaaagctactatgtcacatgaa

SEQ ID NO: 208466 - DNA, 22 bp, Artificial Sequence
  Synthetic oligonucleotide; CTA chr2 60546859 60546880 60546876 60546881 +
ctatgtcacatgaaaaatgtgc

SEQ ID NO: 208467 - DNA, 22 bp, Artificial Sequence
  Synthetic oligonucleotide; CTA chr2 60546862 60546883 60546879 60546884 +
tgtcacatgaaaaatgtgccac

SEQ ID NO: 208468 - DNA, 22 bp, Artificial Sequence
  Synthetic oligonucleotide; TTT chr2 60546888 60546909 60546905 60546910 +
acactgctgtaataagaaaacg

SEQ ID NO: 208469 - DNA, 22 bp, Artificial Sequence
  Synthetic oligonucleotide; TTA chr2 60546889 60546910 60546906 60546911 +
cactgctgtaataagaaaacga

SEQ ID NO: 208470 - DNA, 22 bp, Artificial Sequence
  Synthetic oligonucleotide; CTG chr2 60546894 60546915 60546911 60546916 +
ctgtaataagaaaacgactgca

SEQ ID NO: 208471 - DNA, 22 bp, Artificial Sequence
  Synthetic oligonucleotide; CTG chr2 60546897 60546918 60546914 60546919 +
taataagaaaacgactgcatgc

SEQ ID NO: 208472 - DNA, 22 bp, Artificial Sequence
  Synthetic oligonucleotide; CTG chr2 60546914 60546935 60546931 60546936 +
catgcacctatgaaacggatct

SEQ ID NO: 208473 - DNA, 22 bp, Artificial Sequence
  Synthetic oligonucleotide; CTA chr2 60546924 60546945 60546941 60546946 +
tgaaacggatctaaataataat

SEQ ID NO: 208474 - DNA, 22 bp, Artificial Sequence
  Synthetic oligonucleotide; CTA chr2 60546937 60546958 60546954 60546959 +
aataataatcatgtcgcagcat

SEQ ID NO: 208475 - DNA, 22 bp, Artificial Sequence
  Synthetic oligonucleotide; TTC chr2 60546964 60546985 60546981 60546986 +
acactgccaaaaacctttctgc

SEQ ID NO: 208476 - DNA, 22 bp, Artificial Sequence
  Synthetic oligonucleotide; CTG chr2 60546970 60546991 60546987 60546992 +
ccaaaaacctttctgctctcac

SEQ ID NO: 208477 - DNA, 22 bp, Artificial Sequence
  Synthetic oligonucleotide; CTT chr2 60546981 60547002 60546998 60547003 +
tctgctctcactctcagcagtg

SEQ ID NO: 208478 - DNA, 22 bp, Artificial Sequence
  Synthetic oligonucleotide; TTT chr2 60546982 60547003 60546999 60547004 +
ctgctctcactctcagcagtgc

SEQ ID NO: 208479 - DNA, 22 bp, Artificial Sequence
  Synthetic oligonucleotide; TTC chr2 60546983 60547004 60547000 60547005 +
tgctctcactctcagcagtgcc

SEQ ID NO: 208480 - DNA, 22 bp, Artificial Sequence
  Synthetic oligonucleotide; CTG chr2 60546985 60547006 60547002 60547007 +
ctctcactctcagcagtgccac

SEQ ID NO: 208481 - DNA, 22 bp, Artificial Sequence
  Synthetic oligonucleotide; CTC chr2 60546988 60547009 60547005 60547010 +
tcactctcagcagtgccacaaa

SEQ ID NO: 208482 - DNA, 22 bp, Artificial Sequence
  Synthetic oligonucleotide; CTC chr2 60546990 60547011 60547007 60547012 +
actctcagcagtgccacaaaat

SEQ ID NO: 208483 - DNA, 22 bp, Artificial Sequence
  Synthetic oligonucleotide; CTC chr2 60546994 60547015 60547011 60547016 +
tcagcagtgccacaaaatcaaa

SEQ ID NO: 208484 - DNA, 22 bp, Artificial Sequence
  Synthetic oligonucleotide; CTC chr2 60546996 60547017 60547013 60547018 +
agcagtgccacaaaatcaaaga

SEQ ID NO: 208485 - DNA, 22 bp, Artificial Sequence
  Synthetic oligonucleotide; TTT chr2 60547043 60547064 60547060 60547065 +
ctcagacacattagctaaatgg

SEQ ID NO: 208486 - DNA, 22 bp, Artificial Sequence
  Synthetic oligonucleotide; TTC chr2 60547044 60547065 60547061 60547066 +
tcagacacattagctaaatggg

SEQ ID NO: 208487 - DNA, 22 bp, Artificial Sequence
  Synthetic oligonucleotide; CTC chr2 60547046 60547067 60547063 60547068 +
agacacattagctaaatgggat

SEQ ID NO: 208488 - DNA, 22 bp, Artificial Sequence
  Synthetic oligonucleotide; TTA chr2 60547056 60547077 60547073 60547078 +
gctaaatgggatacttttgagt

SEQ ID NO: 208489 - DNA, 22 bp, Artificial Sequence
  Synthetic oligonucleotide; CTA chr2 60547060 60547081 60547077 60547082 +
aatgggatacttttgagtactt

SEQ ID NO: 208490 - DNA, 22 bp, Artificial Sequence
  Synthetic oligonucleotide; CTT chr2 60547072 60547093 60547089 60547094 +
ttgagtacttaagaaaataagc

SEQ ID NO: 208491 - DNA, 22 bp, Artificial Sequence
  Synthetic oligonucleotide; TTT chr2 60547073 60547094 60547090 60547095 +
tgagtacttaagaaaataagcc

SEQ ID NO: 208492 - DNA, 22 bp, Artificial Sequence
  Synthetic oligonucleotide; TTT chr2 60547074 60547095 60547091 60547096 +
gagtacttaagaaaataagcca

SEQ ID NO: 208493 - DNA, 22 bp, Artificial Sequence
  Synthetic oligonucleotide; TTG chr2 60547075 60547096 60547092 60547097 +
agtacttaagaaaataagccaa

SEQ ID NO: 208494 - DNA, 22 bp, Artificial Sequence
  Synthetic oligonucleotide; CTT chr2 60547082 60547103 60547099 60547104 +
aagaaaataagccaattagtca

SEQ ID NO: 208495 - DNA, 22 bp, Artificial Sequence
  Synthetic oligonucleotide; TTA chr2 60547083 60547104 60547100 60547105 +
agaaaataagccaattagtcat

SEQ ID NO: 208496 - DNA, 22 bp, Artificial Sequence
  Synthetic oligonucleotide; TTA chr2 60547100 60547121 60547117 60547122 +
gtcattttttttttattctgag

SEQ ID NO: 208497 - DNA, 22 bp, Artificial Sequence
  Synthetic oligonucleotide; TTT chr2 60547107 60547128 60547124 60547129 +
tttttttattctgagaaatgga

SEQ ID NO: 208498 - DNA, 22 bp, Artificial Sequence
  Synthetic oligonucleotide; TTT chr2 60547108 60547129 60547125 60547130 +
ttttttattctgagaaatggaa

SEQ ID NO: 208499 - DNA, 22 bp, Artificial Sequence
  Synthetic oligonucleotide; TTT chr2 60547109 60547130 60547126 60547131 +
tttttattctgagaaatggaat

SEQ ID NO: 208500 - DNA, 22 bp, Artificial Sequence
  Synthetic oligonucleotide; TTT chr2 60547110 60547131 60547127 60547132 +
ttttattctgagaaatggaatg

SEQ ID NO: 208501 - DNA, 22 bp, Artificial Sequence
  Synthetic oligonucleotide; TTT chr2 60547111 60547132 60547128 60547133 +
tttattctgagaaatggaatgc

SEQ ID NO: 208502 - DNA, 22 bp, Artificial Sequence
  Synthetic oligonucleotide; TTT chr2 60547112 60547133 60547129 60547134 +
ttattctgagaaatggaatgcc

SEQ ID NO: 208503 - DNA, 22 bp, Artificial Sequence
  Synthetic oligonucleotide; TTT chr2 60547113 60547134 60547130 60547135 +
tattctgagaaatggaatgcct

SEQ ID NO: 208504 - DNA, 22 bp, Artificial Sequence
  Synthetic oligonucleotide; TTT chr2 60547114 60547135 60547131 60547136 +
attctgagaaatggaatgccta

SEQ ID NO: 208505 - DNA, 22 bp, Artificial Sequence
  Synthetic oligonucleotide; TTA chr2 60547115 60547136 60547132 60547137 +
ttctgagaaatggaatgcctat

SEQ ID NO: 208506 - DNA, 22 bp, Artificial Sequence
  Synthetic oligonucleotide; TTC chr2 60547118 60547139 60547135 60547140 +
tgagaaatggaatgcctataat

SEQ ID NO: 208507 - DNA, 22 bp, Artificial Sequence
  Synthetic oligonucleotide; CTG chr2 60547120 60547141 60547137 60547142 +
agaaatggaatgcctataatat

SEQ ID NO: 208508 - DNA, 22 bp, Artificial Sequence
  Synthetic oligonucleotide; CTA chr2 60547136 60547157 60547153 60547158 +
taatattctaaacatgtttgca

SEQ ID NO: 208509 - DNA, 22 bp, Artificial Sequence
  Synthetic oligonucleotide; TTC chr2 60547144 60547165 60547161 60547166 +
taaacatgtttgcacttggtgg

SEQ ID NO: 208510 - DNA, 22 bp, Artificial Sequence
  Synthetic oligonucleotide; CTA chr2 60547146 60547167 60547163 60547168 +
aacatgtttgcacttggtggca

SEQ ID NO: 208511 - DNA, 22 bp, Artificial Sequence
  Synthetic oligonucleotide; TTT chr2 60547155 60547176 60547172 60547177 +
gcacttggtggcatctatgata

SEQ ID NO: 208512 - DNA, 22 bp, Artificial Sequence
  Synthetic oligonucleotide; TTG chr2 60547156 60547177 60547173 60547178 +
cacttggtggcatctatgatat

SEQ ID NO: 208513 - DNA, 22 bp, Artificial Sequence
  Synthetic oligonucleotide; CTT chr2 60547161 60547182 60547178 60547183 +
ggtggcatctatgatataaaaa

SEQ ID NO: 208514 - DNA, 22 bp, Artificial Sequence
  Synthetic oligonucleotide; TTG chr2 60547162 60547183 60547179 60547184 +
gtggcatctatgatataaaaat

SEQ ID NO: 208515 - DNA, 22 bp, Artificial Sequence
  Synthetic oligonucleotide; CTA chr2 60547172 60547193 60547189 60547194 +
tgatataaaaatcagaatggtc

SEQ ID NO: 208516 - DNA, 22 bp, Artificial Sequence
  Synthetic oligonucleotide; TTT chr2 60547211 60547232 60547228 60547233 +
cagagcaaggctgagaagtcct

SEQ ID NO: 208517 - DNA, 22 bp, Artificial Sequence
  Synthetic oligonucleotide; TTC chr2 60547212 60547233 60547229 60547234 +
agagcaaggctgagaagtcctt

SEQ ID NO: 208518 - DNA, 22 bp, Artificial Sequence
  Synthetic oligonucleotide; CTG chr2 60547224 60547245 60547241 60547246 +
agaagtcctttctttagacttg

SEQ ID NO: 208519 - DNA, 22 bp, Artificial Sequence
  Synthetic oligonucleotide; CTT chr2 60547234 60547255 60547251 60547256 +
tctttagacttgaaatacttcg

SEQ ID NO: 208520 - DNA, 22 bp, Artificial Sequence
  Synthetic oligonucleotide; TTT chr2 60547235 60547256 60547252 60547257 +
ctttagacttgaaatacttcgc

SEQ ID NO: 208521 - DNA, 22 bp, Artificial Sequence
  Synthetic oligonucleotide; TTC chr2 60547236 60547257 60547253 60547258 +
tttagacttgaaatacttcgcc

SEQ ID NO: 208522 - DNA, 22 bp, Artificial Sequence
  Synthetic oligonucleotide; CTT chr2 60547238 60547259 60547255 60547260 +
tagacttgaaatacttcgccta

SEQ ID NO: 208523 - DNA, 22 bp, Artificial Sequence
  Synthetic oligonucleotide; TTT chr2 60547239 60547260 60547256 60547261 +
agacttgaaatacttcgcctaa

SEQ ID NO: 208524 - DNA, 22 bp, Artificial Sequence
  Synthetic oligonucleotide; TTA chr2 60547240 60547261 60547257 60547262 +
gacttgaaatacttcgcctaat

SEQ ID NO: 208525 - DNA, 22 bp, Artificial Sequence
  Synthetic oligonucleotide; CTT chr2 60547245 60547266 60547262 60547267 +
gaaatacttcgcctaatgttgt

SEQ ID NO: 208526 - DNA, 22 bp, Artificial Sequence
  Synthetic oligonucleotide; TTG chr2 60547246 60547267 60547263 60547268 +
aaatacttcgcctaatgttgtc

SEQ ID NO: 208527 - DNA, 22 bp, Artificial Sequence
  Synthetic oligonucleotide; CTT chr2 60547254 60547275 60547271 60547276 +
cgcctaatgttgtcaaagtgga

SEQ ID NO: 208528 - DNA, 22 bp, Artificial Sequence
  Synthetic oligonucleotide; TTC chr2 60547255 60547276 60547272 60547277 +
gcctaatgttgtcaaagtggac

SEQ ID NO: 208529 - DNA, 22 bp, Artificial Sequence
  Synthetic oligonucleotide; CTA chr2 60547260 60547281 60547277 60547282 +
atgttgtcaaagtggactaatt

SEQ ID NO: 208530 - DNA, 22 bp, Artificial Sequence
  Synthetic oligonucleotide; TTG chr2 60547266 60547287 60547283 60547288 +
tcaaagtggactaattttctga

SEQ ID NO: 208531 - DNA, 22 bp, Artificial Sequence
  Synthetic oligonucleotide; CTA chr2 60547279 60547300 60547296 60547301 +
attttctgaatgagctccaaaa

SEQ ID NO: 208532 - DNA, 22 bp, Artificial Sequence
  Synthetic oligonucleotide; TTT chr2 60547283 60547304 60547300 60547305 +
tctgaatgagctccaaaatgct

SEQ ID NO: 208533 - DNA, 22 bp, Artificial Sequence
  Synthetic oligonucleotide; TTT chr2 60547284 60547305 60547301 60547306 +
ctgaatgagctccaaaatgctt

SEQ ID NO: 208534 - DNA, 22 bp, Artificial Sequence
  Synthetic oligonucleotide; TTC chr2 60547285 60547306 60547302 60547307 +
tgaatgagctccaaaatgcttc

SEQ ID NO: 208535 - DNA, 22 bp, Artificial Sequence
  Synthetic oligonucleotide; CTG chr2 60547287 60547308 60547304 60547309 +
aatgagctccaaaatgcttcat

SEQ ID NO: 208536 - DNA, 22 bp, Artificial Sequence
  Synthetic oligonucleotide; CTC chr2 60547296 60547317 60547313 60547318 +
caaaatgcttcattatgagact

SEQ ID NO: 208537 - DNA, 22 bp, Artificial Sequence
  Synthetic oligonucleotide; CTT chr2 60547306 60547327 60547323 60547328 +
cattatgagactatttctgcac

SEQ ID NO: 208538 - DNA, 22 bp, Artificial Sequence
  Synthetic oligonucleotide; TTC chr2 60547307 60547328 60547324 60547329 +
attatgagactatttctgcaca

SEQ ID NO: 208539 - DNA, 22 bp, Artificial Sequence
  Synthetic oligonucleotide; TTA chr2 60547311 60547332 60547328 60547333 +
tgagactatttctgcacacata

SEQ ID NO: 208540 - DNA, 22 bp, Artificial Sequence
  Synthetic oligonucleotide; CTA chr2 60547319 60547340 60547336 60547341 +
tttctgcacacataatcaccag

SEQ ID NO: 208541 - DNA, 22 bp, Artificial Sequence
  Synthetic oligonucleotide; TTT chr2 60547322 60547343 60547339 60547344 +
ctgcacacataatcaccagcgg

SEQ ID NO: 208542 - DNA, 22 bp, Artificial Sequence
  Synthetic oligonucleotide; TTC chr2 60547323 60547344 60547340 60547345 +
tgcacacataatcaccagcgga

SEQ ID NO: 208543 - DNA, 22 bp, Artificial Sequence
  Synthetic oligonucleotide; CTG chr2 60547325 60547346 60547342 60547347 +
cacacataatcaccagcggatg

SEQ ID NO: 208544 - DNA, 22 bp, Artificial Sequence
  Synthetic oligonucleotide; CTT chr2 60547370 60547391 60547387 60547392 +
tctttcctgtttgctttttttt

SEQ ID NO: 208545 - DNA, 22 bp, Artificial Sequence
  Synthetic oligonucleotide; TTT chr2 60547371 60547392 60547388 60547393 +
ctttcctgtttgcttttttttt

SEQ ID NO: 208546 - DNA, 22 bp, Artificial Sequence
  Synthetic oligonucleotide; TTC chr2 60547372 60547393 60547389 60547394 +
tttcctgtttgctttttttttt

SEQ ID NO: 208547 - DNA, 22 bp, Artificial Sequence
  Synthetic oligonucleotide; CTT chr2 60547374 60547395 60547391 60547396 +
tcctgtttgcttttttttttaa

SEQ ID NO: 208548 - DNA, 22 bp, Artificial Sequence
  Synthetic oligonucleotide; TTT chr2 60547375 60547396 60547392 60547397 +
cctgtttgcttttttttttaac

SEQ ID NO: 208549 - DNA, 22 bp, Artificial Sequence
  Synthetic oligonucleotide; TTC chr2 60547376 60547397 60547393 60547398 +
ctgtttgcttttttttttaact

SEQ ID NO: 208550 - DNA, 22 bp, Artificial Sequence
  Synthetic oligonucleotide; CTG chr2 60547379 60547400 60547396 60547401 +
tttgcttttttttttaactttg

SEQ ID NO: 208551 - DNA, 22 bp, Artificial Sequence
  Synthetic oligonucleotide; TTT chr2 60547382 60547403 60547399 60547404 +
gcttttttttttaactttgtac

SEQ ID NO: 208552 - DNA, 22 bp, Artificial Sequence
  Synthetic oligonucleotide; TTG chr2 60547383 60547404 60547400 60547405 +
cttttttttttaactttgtact

SEQ ID NO: 208553 - DNA, 22 bp, Artificial Sequence
  Synthetic oligonucleotide; CTT chr2 60547386 60547407 60547403 60547408 +
ttttttttaactttgtactaaa

SEQ ID NO: 208554 - DNA, 22 bp, Artificial Sequence
  Synthetic oligonucleotide; TTT chr2 60547387 60547408 60547404 60547409 +
tttttttaactttgtactaaaa

SEQ ID NO: 208555 - DNA, 22 bp, Artificial Sequence
  Synthetic oligonucleotide; TTT chr2 60547388 60547409 60547405 60547410 +
ttttttaactttgtactaaaat

SEQ ID NO: 208556 - DNA, 22 bp, Artificial Sequence
  Synthetic oligonucleotide; TTT chr2 60547389 60547410 60547406 60547411 +
tttttaactttgtactaaaata

SEQ ID NO: 208557 - DNA, 22 bp, Artificial Sequence
  Synthetic oligonucleotide; TTT chr2 60547390 60547411 60547407 60547412 +
ttttaactttgtactaaaatac

SEQ ID NO: 208558 - DNA, 22 bp, Artificial Sequence
  Synthetic oligonucleotide; TTT chr2 60547391 60547412 60547408 60547413 +
tttaactttgtactaaaatact

SEQ ID NO: 208559 - DNA, 22 bp, Artificial Sequence
  Synthetic oligonucleotide; TTT chr2 60547392 60547413 60547409 60547414 +
ttaactttgtactaaaatactc

SEQ ID NO: 208560 - DNA, 22 bp, Artificial Sequence
  Synthetic oligonucleotide; TTT chr2 60547393 60547414 60547410 60547415 +
taactttgtactaaaatactcc

SEQ ID NO: 208561 - DNA, 22 bp, Artificial Sequence
  Synthetic oligonucleotide; TTT chr2 60547394 60547415 60547411 60547416 +
aactttgtactaaaatactcca

SEQ ID NO: 208562 - DNA, 22 bp, Artificial Sequence
  Synthetic oligonucleotide; TTA chr2 60547395 60547416 60547412 60547417 +
actttgtactaaaatactccag

SEQ ID NO: 208563 - DNA, 22 bp, Artificial Sequence
  Synthetic oligonucleotide; CTT chr2 60547399 60547420 60547416 60547421 +
tgtactaaaatactccagcatc

SEQ ID NO: 208564 - DNA, 22 bp, Artificial Sequence
  Synthetic oligonucleotide; TTT chr2 60547400 60547421 60547417 60547422 +
gtactaaaatactccagcatct

SEQ ID NO: 208565 - DNA, 22 bp, Artificial Sequence
  Synthetic oligonucleotide; TTG chr2 60547401 60547422 60547418 60547423 +
tactaaaatactccagcatcta

SEQ ID NO: 208566 - DNA, 22 bp, Artificial Sequence
  Synthetic oligonucleotide; CTA chr2 60547406 60547427 60547423 60547428 +
aaatactccagcatctacttta

SEQ ID NO: 208567 - DNA, 22 bp, Artificial Sequence
  Synthetic oligonucleotide; CTC chr2 60547414 60547435 60547431 60547436 +
cagcatctactttaccagcttc

SEQ ID NO: 208568 - DNA, 22 bp, Artificial Sequence
  Synthetic oligonucleotide; CTA chr2 60547423 60547444 60547440 60547445 +
ctttaccagcttctatcatttt

SEQ ID NO: 208569 - DNA, 22 bp, Artificial Sequence
  Synthetic oligonucleotide; CTT chr2 60547426 60547447 60547443 60547448 +
taccagcttctatcatttttta

SEQ ID NO: 208570 - DNA, 22 bp, Artificial Sequence
  Synthetic oligonucleotide; TTT chr2 60547427 60547448 60547444 60547449 +
accagcttctatcattttttaa

SEQ ID NO: 208571 - DNA, 22 bp, Artificial Sequence
  Synthetic oligonucleotide; TTA chr2 60547428 60547449 60547445 60547450 +
ccagcttctatcattttttaag

SEQ ID NO: 208572 - DNA, 22 bp, Artificial Sequence
  Synthetic oligonucleotide; CTT chr2 60547435 60547456 60547452 60547457 +
ctatcattttttaagcttccaa

SEQ ID NO: 208573 - DNA, 22 bp, Artificial Sequence
  Synthetic oligonucleotide; TTC chr2 60547436 60547457 60547453 60547458 +
tatcattttttaagcttccaaa

SEQ ID NO: 208574 - DNA, 22 bp, Artificial Sequence
  Synthetic oligonucleotide; CTA chr2 60547438 60547459 60547455 60547460 +
tcattttttaagcttccaaagg

SEQ ID NO: 208575 - DNA, 22 bp, Artificial Sequence
  Synthetic oligonucleotide; TTT chr2 60547444 60547465 60547461 60547466 +
tttaagcttccaaaggggaaaa

SEQ ID NO: 208576 - DNA, 22 bp, Artificial Sequence
  Synthetic oligonucleotide; TTT chr2 60547445 60547466 60547462 60547467 +
ttaagcttccaaaggggaaaag

SEQ ID NO: 208577 - DNA, 22 bp, Artificial Sequence
  Synthetic oligonucleotide; TTT chr2 60547446 60547467 60547463 60547468 +
taagcttccaaaggggaaaaga

SEQ ID NO: 208578 - DNA, 22 bp, Artificial Sequence
  Synthetic oligonucleotide; TTT chr2 60547447 60547468 60547464 60547469 +
aagcttccaaaggggaaaagag

SEQ ID NO: 208579 - DNA, 22 bp, Artificial Sequence
  Synthetic oligonucleotide; TTA chr2 60547448 60547469 60547465 60547470 +
agcttccaaaggggaaaagaga

SEQ ID NO: 208580 - DNA, 22 bp, Artificial Sequence
  Synthetic oligonucleotide; CTT chr2 60547453 60547474 60547470 60547475 +
ccaaaggggaaaagagagttgg

SEQ ID NO: 208581 - DNA, 22 bp, Artificial Sequence
  Synthetic oligonucleotide; TTC chr2 60547454 60547475 60547471 60547476 +
caaaggggaaaagagagttggt

SEQ ID NO: 208582 - DNA, 22 bp, Artificial Sequence
  Synthetic oligonucleotide; TTG chr2 60547474 60547495 60547491 60547496 +
gtaagtctctgcttgtgaaatc

SEQ ID NO: 208583 - DNA, 22 bp, Artificial Sequence
  Synthetic oligonucleotide; CTC chr2 60547483 60547504 60547500 60547505 +
tgcttgtgaaatcttatgcttg

SEQ ID NO: 208584 - DNA, 22 bp, Artificial Sequence
  Synthetic oligonucleotide; CTG chr2 60547485 60547506 60547502 60547507 +
cttgtgaaatcttatgcttgct

SEQ ID NO: 208585 - DNA, 22 bp, Artificial Sequence
  Synthetic oligonucleotide; CTT chr2 60547488 60547509 60547505 60547510 +
gtgaaatcttatgcttgctcta

SEQ ID NO: 208586 - DNA, 22 bp, Artificial Sequence
  Synthetic oligonucleotide; TTG chr2 60547489 60547510 60547506 60547511 +
tgaaatcttatgcttgctctat

SEQ ID NO: 208587 - DNA, 22 bp, Artificial Sequence
  Synthetic oligonucleotide; CTT chr2 60547498 60547519 60547515 60547520 +
atgcttgctctatcaaaaaaaa

SEQ ID NO: 208588 - DNA, 22 bp, Artificial Sequence
  Synthetic oligonucleotide; TTA chr2 60547499 60547520 60547516 60547521 +
tgcttgctctatcaaaaaaaaa

SEQ ID NO: 208589 - DNA, 22 bp, Artificial Sequence
  Synthetic oligonucleotide; CTT chr2 60547504 60547525 60547521 60547526 +
gctctatcaaaaaaaaaaaaaa

SEQ ID NO: 208590 - DNA, 22 bp, Artificial Sequence
  Synthetic oligonucleotide; TTG chr2 60547505 60547526 60547522 60547527 +
ctctatcaaaaaaaaaaaaaaa

SEQ ID NO: 208591 - DNA, 22 bp, Artificial Sequence
  Synthetic oligonucleotide; CTC chr2 60547508 60547529 60547525 60547530 +
tatcaaaaaaaaaaaaaaaatc

SEQ ID NO: 208592 - DNA, 22 bp, Artificial Sequence
  Synthetic oligonucleotide; CTA chr2 60547510 60547531 60547527 60547532 +
tcaaaaaaaaaaaaaaaatcac

SEQ ID NO: 208593 - DNA, 22 bp, Artificial Sequence
  Synthetic oligonucleotide; CTG chr2 60547557 60547578 60547574 60547579 +
ccagttaataaaactgaagcag

SEQ ID NO: 208594 - DNA, 22 bp, Artificial Sequence
  Synthetic oligonucleotide; TTA chr2 60547564 60547585 60547581 60547586 +
ataaaactgaagcagaaaatgt

SEQ ID NO: 208595 - DNA, 22 bp, Artificial Sequence
  Synthetic oligonucleotide; CTG chr2 60547573 60547594 60547590 60547595 +
aagcagaaaatgtacaagtctt

SEQ ID NO: 208596 - DNA, 22 bp, Artificial Sequence
  Synthetic oligonucleotide; CTT chr2 60547595 60547616 60547612 60547617 +
aaacagttaatcagtctgacct

SEQ ID NO: 208597 - DNA, 22 bp, Artificial Sequence
  Synthetic oligonucleotide; TTA chr2 60547596 60547617 60547613 60547618 +
aacagttaatcagtctgacctt

SEQ ID NO: 208598 - DNA, 22 bp, Artificial Sequence
  Synthetic oligonucleotide; TTA chr2 60547604 60547625 60547621 60547626 +
atcagtctgaccttctttagca

SEQ ID NO: 208599 - DNA, 22 bp, Artificial Sequence
  Synthetic oligonucleotide; CTG chr2 60547613 60547634 60547630 60547635 +
accttctttagcaagctgccaa

SEQ ID NO: 208600 - DNA, 22 bp, Artificial Sequence
  Synthetic oligonucleotide; CTT chr2 60547618 60547639 60547635 60547640 +
ctttagcaagctgccaatttta

SEQ ID NO: 208601 - DNA, 22 bp, Artificial Sequence
  Synthetic oligonucleotide; TTC chr2 60547619 60547640 60547636 60547641 +
tttagcaagctgccaattttac

SEQ ID NO: 208602 - DNA, 22 bp, Artificial Sequence
  Synthetic oligonucleotide; CTT chr2 60547621 60547642 60547638 60547643 +
tagcaagctgccaattttacat

SEQ ID NO: 208603 - DNA, 22 bp, Artificial Sequence
  Synthetic oligonucleotide; TTT chr2 60547622 60547643 60547639 60547644 +
agcaagctgccaattttacatt

SEQ ID NO: 208604 - DNA, 22 bp, Artificial Sequence
  Synthetic oligonucleotide; TTA chr2 60547623 60547644 60547640 60547645 +
gcaagctgccaattttacattt

SEQ ID NO: 208605 - DNA, 22 bp, Artificial Sequence
  Synthetic oligonucleotide; CTG chr2 60547631 60547652 60547648 60547653 +
ccaattttacatttaatgaact

SEQ ID NO: 208606 - DNA, 22 bp, Artificial Sequence
  Synthetic oligonucleotide; TTT chr2 60547638 60547659 60547655 60547660 +
tacatttaatgaacttaaagcc

SEQ ID NO: 208607 - DNA, 22 bp, Artificial Sequence
  Synthetic oligonucleotide; TTT chr2 60547639 60547660 60547656 60547661 +
acatttaatgaacttaaagcca

SEQ ID NO: 208608 - DNA, 22 bp, Artificial Sequence
  Synthetic oligonucleotide; TTA chr2 60547640 60547661 60547657 60547662 +
catttaatgaacttaaagccac

SEQ ID NO: 208609 - DNA, 22 bp, Artificial Sequence
  Synthetic oligonucleotide; TTT chr2 60547645 60547666 60547662 60547667 +
aatgaacttaaagccacagaga

SEQ ID NO: 208610 - DNA, 22 bp, Artificial Sequence
  Synthetic oligonucleotide; TTA chr2 60547646 60547667 60547663 60547668 +
atgaacttaaagccacagagaa

SEQ ID NO: 208611 - DNA, 22 bp, Artificial Sequence
  Synthetic oligonucleotide; CTT chr2 60547654 60547675 60547671 60547676 +
aaagccacagagaatcaaaaaa

SEQ ID NO: 208612 - DNA, 22 bp, Artificial Sequence
  Synthetic oligonucleotide; TTA chr2 60547655 60547676 60547672 60547677 +
aagccacagagaatcaaaaaat

SEQ ID NO: 208613 - DNA, 22 bp, Artificial Sequence
  Synthetic oligonucleotide; TTT chr2 60547683 60547704 60547700 60547705 +
taatttgagtgtagaatattgg

SEQ ID NO: 208614 - DNA, 22 bp, Artificial Sequence
  Synthetic oligonucleotide; TTT chr2 60547684 60547705 60547701 60547706 +
aatttgagtgtagaatattgga

SEQ ID NO: 208615 - DNA, 22 bp, Artificial Sequence
  Synthetic oligonucleotide; TTA chr2 60547685 60547706 60547702 60547707 +
atttgagtgtagaatattggaa

SEQ ID NO: 208616 - DNA, 22 bp, Artificial Sequence
  Synthetic oligonucleotide; TTT chr2 60547689 60547710 60547706 60547711 +
gagtgtagaatattggaacaga

SEQ ID NO: 208617 - DNA, 22 bp, Artificial Sequence
  Synthetic oligonucleotide; TTG chr2 60547690 60547711 60547707 60547712 +
agtgtagaatattggaacagat

SEQ ID NO: 208618 - DNA, 22 bp, Artificial Sequence
  Synthetic oligonucleotide; TTG chr2 60547704 60547725 60547721 60547726 +
gaacagattttgataaagtgca

SEQ ID NO: 208619 - DNA, 22 bp, Artificial Sequence
  Synthetic oligonucleotide; TTT chr2 60547714 60547735 60547731 60547736 +
tgataaagtgcaaaaatccagt

SEQ ID NO: 208620 - DNA, 22 bp, Artificial Sequence
  Synthetic oligonucleotide; TTT chr2 60547715 60547736 60547732 60547737 +
gataaagtgcaaaaatccagtg

SEQ ID NO: 208621 - DNA, 22 bp, Artificial Sequence
  Synthetic oligonucleotide; TTG chr2 60547716 60547737 60547733 60547738 +
ataaagtgcaaaaatccagtga

SEQ ID NO: 208622 - DNA, 22 bp, Artificial Sequence
  Synthetic oligonucleotide; CTC chr2 60547742 60547763 60547759 60547764 +
aggttaaatttatttcaaccct

SEQ ID NO: 208623 - DNA, 22 bp, Artificial Sequence
  Synthetic oligonucleotide; TTA chr2 60547748 60547769 60547765 60547770 +
aatttatttcaaccctacccag

SEQ ID NO: 208624 - DNA, 22 bp, Artificial Sequence
  Synthetic oligonucleotide; TTT chr2 60547753 60547774 60547770 60547775 +
atttcaaccctacccaggctga

SEQ ID NO: 208625 - DNA, 22 bp, Artificial Sequence
  Synthetic oligonucleotide; TTA chr2 60547754 60547775 60547771 60547776 +
tttcaaccctacccaggctgaa

SEQ ID NO: 208626 - DNA, 22 bp, Artificial Sequence
  Synthetic oligonucleotide; TTT chr2 60547757 60547778 60547774 60547779 +
caaccctacccaggctgaatat

SEQ ID NO: 208627 - DNA, 22 bp, Artificial Sequence
  Synthetic oligonucleotide; TTC chr2 60547758 60547779 60547775 60547780 +
aaccctacccaggctgaatatt

SEQ ID NO: 208628 - DNA, 22 bp, Artificial Sequence
  Synthetic oligonucleotide; CTA chr2 60547765 60547786 60547782 60547787 +
cccaggctgaatattgaggggg

SEQ ID NO: 208629 - DNA, 22 bp, Artificial Sequence
  Synthetic oligonucleotide; CTG chr2 60547774 60547795 60547791 60547796 +
aatattgagggggaagatctgg

SEQ ID NO: 208630 - DNA, 22 bp, Artificial Sequence
  Synthetic oligonucleotide; TTG chr2 60547781 60547802 60547798 60547803 +
agggggaagatctggagtaact

SEQ ID NO: 208631 - DNA, 22 bp, Artificial Sequence
  Synthetic oligonucleotide; CTG chr2 60547795 60547816 60547812 60547817 +
gagtaactcccagatgtgctag

SEQ ID NO: 208632 - DNA, 22 bp, Artificial Sequence
  Synthetic oligonucleotide; CTC chr2 60547804 60547825 60547821 60547826 +
ccagatgtgctaggtgaaataa

SEQ ID NO: 208633 - DNA, 22 bp, Artificial Sequence
  Synthetic oligonucleotide; CTA chr2 60547816 60547837 60547833 60547838 +
ggtgaaataatattgagagagc

SEQ ID NO: 208634 - DNA, 22 bp, Artificial Sequence
  Synthetic oligonucleotide; TTG chr2 60547831 60547852 60547848 60547853 +
agagagccctgcctagctgcac

SEQ ID NO: 208635 - DNA, 22 bp, Artificial Sequence
  Synthetic oligonucleotide; CTG chr2 60547842 60547863 60547859 60547864 +
cctagctgcacctgtgctcaag

SEQ ID NO: 208636 - DNA, 22 bp, Artificial Sequence
  Synthetic oligonucleotide; CTA chr2 60547846 60547867 60547863 60547868 +
gctgcacctgtgctcaagtagg

SEQ ID NO: 208637 - DNA, 22 bp, Artificial Sequence
  Synthetic oligonucleotide; CTG chr2 60547850 60547871 60547867 60547872 +
cacctgtgctcaagtaggacat

SEQ ID NO: 208638 - DNA, 22 bp, Artificial Sequence
  Synthetic oligonucleotide; CTG chr2 60547856 60547877 60547873 60547878 +
tgctcaagtaggacatctcata

SEQ ID NO: 208639 - DNA, 22 bp, Artificial Sequence
  Synthetic oligonucleotide; CTC chr2 60547861 60547882 60547878 60547883 +
aagtaggacatctcataatttc

SEQ ID NO: 208640 - DNA, 22 bp, Artificial Sequence
  Synthetic oligonucleotide; CTC chr2 60547875 60547896 60547892 60547897 +
ataatttctagcctctggtact

SEQ ID NO: 208641 - DNA, 22 bp, Artificial Sequence
  Synthetic oligonucleotide; TTT chr2 60547882 60547903 60547899 60547904 +
ctagcctctggtactcctccta

SEQ ID NO: 208642 - DNA, 22 bp, Artificial Sequence
  Synthetic oligonucleotide; TTC chr2 60547883 60547904 60547900 60547905 +
tagcctctggtactcctcctaa

SEQ ID NO: 208643 - DNA, 22 bp, Artificial Sequence
  Synthetic oligonucleotide; CTA chr2 60547885 60547906 60547902 60547907 +
gcctctggtactcctcctaatt

SEQ ID NO: 208644 - DNA, 22 bp, Artificial Sequence
  Synthetic oligonucleotide; CTC chr2 60547890 60547911 60547907 60547912 +
tggtactcctcctaatttaaca

SEQ ID NO: 208645 - DNA, 22 bp, Artificial Sequence
  Synthetic oligonucleotide; CTG chr2 60547892 60547913 60547909 60547914 +
gtactcctcctaatttaacata

SEQ ID NO: 208646 - DNA, 22 bp, Artificial Sequence
  Synthetic oligonucleotide; CTC chr2 60547898 60547919 60547915 60547920 +
ctcctaatttaacataaggtca

SEQ ID NO: 208647 - DNA, 22 bp, Artificial Sequence
  Synthetic oligonucleotide; CTC chr2 60547901 60547922 60547918 60547923 +
ctaatttaacataaggtcacca

SEQ ID NO: 208648 - DNA, 22 bp, Artificial Sequence
  Synthetic oligonucleotide; CTA chr2 60547904 60547925 60547921 60547926 +
atttaacataaggtcaccacag

SEQ ID NO: 208649 - DNA, 22 bp, Artificial Sequence
  Synthetic oligonucleotide; TTT chr2 60547908 60547929 60547925 60547930 +
aacataaggtcaccacaggaat

SEQ ID NO: 208650 - DNA, 22 bp, Artificial Sequence
  Synthetic oligonucleotide; TTA chr2 60547909 60547930 60547926 60547931 +
acataaggtcaccacaggaata

SEQ ID NO: 208651 - DNA, 22 bp, Artificial Sequence
  Synthetic oligonucleotide; TTA chr2 60547940 60547961 60547957 60547962 +
tattcctactaataaagacagt

SEQ ID NO: 208652 - DNA, 22 bp, Artificial Sequence
  Synthetic oligonucleotide; TTC chr2 60547945 60547966 60547962 60547967 +
ctactaataaagacagtaaagt

SEQ ID NO: 208653 - DNA, 22 bp, Artificial Sequence
  Synthetic oligonucleotide; CTA chr2 60547948 60547969 60547965 60547970 +
ctaataaagacagtaaagtaag

SEQ ID NO: 208654 - DNA, 22 bp, Artificial Sequence
  Synthetic oligonucleotide; CTA chr2 60547951 60547972 60547968 60547973 +
ataaagacagtaaagtaagcac

SEQ ID NO: 208655 - DNA, 22 bp, Artificial Sequence
  Synthetic oligonucleotide; CTT chr2 60547975 60547996 60547992 60547997 +
atgtttctttgcccaacatact

SEQ ID NO: 208656 - DNA, 22 bp, Artificial Sequence
  Synthetic oligonucleotide; TTA chr2 60547976 60547997 60547993 60547998 +
tgtttctttgcccaacatactg

SEQ ID NO: 208657 - DNA, 22 bp, Artificial Sequence
  Synthetic oligonucleotide; TTT chr2 60547981 60548002 60547998 60548003 +
ctttgcccaacatactggccaa

SEQ ID NO: 208658 - DNA, 22 bp, Artificial Sequence
  Synthetic oligonucleotide; TTC chr2 60547982 60548003 60547999 60548004 +
tttgcccaacatactggccaaa

SEQ ID NO: 208659 - DNA, 22 bp, Artificial Sequence
  Synthetic oligonucleotide; CTT chr2 60547984 60548005 60548001 60548006 +
tgcccaacatactggccaaaag

SEQ ID NO: 208660 - DNA, 22 bp, Artificial Sequence
  Synthetic oligonucleotide; TTT chr2 60547985 60548006 60548002 60548007 +
gcccaacatactggccaaaaga

SEQ ID NO: 208661 - DNA, 22 bp, Artificial Sequence
  Synthetic oligonucleotide; TTG chr2 60547986 60548007 60548003 60548008 +
cccaacatactggccaaaagat

SEQ ID NO: 208662 - DNA, 22 bp, Artificial Sequence
  Synthetic oligonucleotide; CTG chr2 60547998 60548019 60548015 60548020 +
gccaaaagataaatacagaata

SEQ ID NO: 208663 - DNA, 22 bp, Artificial Sequence
  Synthetic oligonucleotide; CTT chr2 60548033 60548054 60548050 60548055 +
ttcaaataaaagaagacaaaca

SEQ ID NO: 208664 - DNA, 22 bp, Artificial Sequence
  Synthetic oligonucleotide; TTT chr2 60548034 60548055 60548051 60548056 +
tcaaataaaagaagacaaacag

SEQ ID NO: 208665 - DNA, 22 bp, Artificial Sequence
  Synthetic oligonucleotide; TTT chr2 60548035 60548056 60548052 60548057 +
caaataaaagaagacaaacaga

SEQ ID NO: 208666 - DNA, 22 bp, Artificial Sequence
  Synthetic oligonucleotide; TTC chr2 60548036 60548057 60548053 60548058 +
aaataaaagaagacaaacagaa

SEQ ID NO: 208667 - DNA, 22 bp, Artificial Sequence
  Synthetic oligonucleotide; CTC chr2 60548065 60548086 60548082 60548087 +
tgcattgtgccttaatgtcatt

SEQ ID NO: 208668 - DNA, 22 bp, Artificial Sequence
  Synthetic oligonucleotide; CTG chr2 60548067 60548088 60548084 60548089 +
cattgtgccttaatgtcattct

SEQ ID NO: 208669 - DNA, 22 bp, Artificial Sequence
  Synthetic oligonucleotide; TTG chr2 60548072 60548093 60548089 60548094 +
tgccttaatgtcattcttctct

SEQ ID NO: 208670 - DNA, 22 bp, Artificial Sequence
  Synthetic oligonucleotide; CTT chr2 60548078 60548099 60548095 60548100 +
aatgtcattcttctcttacatt

SEQ ID NO: 208671 - DNA, 22 bp, Artificial Sequence
  Synthetic oligonucleotide; TTA chr2 60548079 60548100 60548096 60548101 +
atgtcattcttctcttacattt

SEQ ID NO: 208672 - DNA, 22 bp, Artificial Sequence
  Synthetic oligonucleotide; TTC chr2 60548088 60548109 60548105 60548110 +
ttctcttacatttgcttccatt

SEQ ID NO: 208673 - DNA, 22 bp, Artificial Sequence
  Synthetic oligonucleotide; CTT chr2 60548090 60548111 60548107 60548112 +
ctcttacatttgcttccatttt

SEQ ID NO: 208674 - DNA, 22 bp, Artificial Sequence
  Synthetic oligonucleotide; TTC chr2 60548091 60548112 60548108 60548113 +
tcttacatttgcttccattttg

SEQ ID NO: 208675 - DNA, 22 bp, Artificial Sequence
  Synthetic oligonucleotide; CTC chr2 60548093 60548114 60548110 60548115 +
ttacatttgcttccattttgac

SEQ ID NO: 208676 - DNA, 22 bp, Artificial Sequence
  Synthetic oligonucleotide; CTT chr2 60548095 60548116 60548112 60548117 +
acatttgcttccattttgacca

SEQ ID NO: 208677 - DNA, 22 bp, Artificial Sequence
  Synthetic oligonucleotide; TTA chr2 60548096 60548117 60548113 60548118 +
catttgcttccattttgaccaa

SEQ ID NO: 208678 - DNA, 22 bp, Artificial Sequence
  Synthetic oligonucleotide; TTT chr2 60548101 60548122 60548118 60548123 +
gcttccattttgaccaagtgag

SEQ ID NO: 208679 - DNA, 22 bp, Artificial Sequence
  Synthetic oligonucleotide; TTG chr2 60548102 60548123 60548119 60548124 +
cttccattttgaccaagtgagg

SEQ ID NO: 208680 - DNA, 22 bp, Artificial Sequence
  Synthetic oligonucleotide; CTT chr2 60548105 60548126 60548122 60548127 +
ccattttgaccaagtgaggaat

SEQ ID NO: 208681 - DNA, 22 bp, Artificial Sequence
  Synthetic oligonucleotide; TTC chr2 60548106 60548127 60548123 60548128 +
cattttgaccaagtgaggaata

SEQ ID NO: 208682 - DNA, 22 bp, Artificial Sequence
  Synthetic oligonucleotide; TTT chr2 60548111 60548132 60548128 60548133 +
tgaccaagtgaggaatagggaa

SEQ ID NO: 208683 - DNA, 22 bp, Artificial Sequence
  Synthetic oligonucleotide; TTT chr2 60548112 60548133 60548129 60548134 +
gaccaagtgaggaatagggaac

SEQ ID NO: 208684 - DNA, 22 bp, Artificial Sequence
  Synthetic oligonucleotide; TTG chr2 60548113 60548134 60548130 60548135 +
accaagtgaggaatagggaact

SEQ ID NO: 208685 - DNA, 22 bp, Artificial Sequence
  Synthetic oligonucleotide; CTC chr2 60548136 60548157 60548153 60548158 +
attctcaaaatattcctgttgt

SEQ ID NO: 208686 - DNA, 22 bp, Artificial Sequence
  Synthetic oligonucleotide; TTC chr2 60548140 60548161 60548157 60548162 +
tcaaaatattcctgttgtctga

SEQ ID NO: 208687 - DNA, 22 bp, Artificial Sequence
  Synthetic oligonucleotide; CTC chr2 60548142 60548163 60548159 60548164 +
aaaatattcctgttgtctgaat

SEQ ID NO: 208688 - DNA, 22 bp, Artificial Sequence
  Synthetic oligonucleotide; TTC chr2 60548151 60548172 60548168 60548173 +
ctgttgtctgaattaaggattt

SEQ ID NO: 208689 - DNA, 22 bp, Artificial Sequence
  Synthetic oligonucleotide; CTG chr2 60548154 60548175 60548171 60548176 +
ttgtctgaattaaggattttaa

SEQ ID NO: 208690 - DNA, 22 bp, Artificial Sequence
  Synthetic oligonucleotide; TTG chr2 60548157 60548178 60548174 60548179 +
tctgaattaaggattttaagta

SEQ ID NO: 208691 - DNA, 22 bp, Artificial Sequence
  Synthetic oligonucleotide; CTG chr2 60548161 60548182 60548178 60548183 +
aattaaggattttaagtacaca

SEQ ID NO: 208692 - DNA, 22 bp, Artificial Sequence
  Synthetic oligonucleotide; TTA chr2 60548166 60548187 60548183 60548188 +
aggattttaagtacacattgat

SEQ ID NO: 208693 - DNA, 22 bp, Artificial Sequence
  Synthetic oligonucleotide; TTT chr2 60548173 60548194 60548190 60548195 +
taagtacacattgataaatgtg

SEQ ID NO: 208694 - DNA, 22 bp, Artificial Sequence
  Synthetic oligonucleotide; TTT chr2 60548174 60548195 60548191 60548196 +
aagtacacattgataaatgtgg

SEQ ID NO: 208695 - DNA, 22 bp, Artificial Sequence
  Synthetic oligonucleotide; TTA chr2 60548175 60548196 60548192 60548197 +
agtacacattgataaatgtggc

SEQ ID NO: 208696 - DNA, 22 bp, Artificial Sequence
  Synthetic oligonucleotide; TTG chr2 60548186 60548207 60548203 60548208 +
ataaatgtggcttttttgttta

SEQ ID NO: 208697 - DNA, 22 bp, Artificial Sequence
  Synthetic oligonucleotide; CTT chr2 60548199 60548220 60548216 60548221 +
ttttgtttagcattagctacaa

SEQ ID NO: 208698 - DNA, 22 bp, Artificial Sequence
  Synthetic oligonucleotide; TTT chr2 60548200 60548221 60548217 60548222 +
tttgtttagcattagctacaag

SEQ ID NO: 208699 - DNA, 22 bp, Artificial Sequence
  Synthetic oligonucleotide; TTT chr2 60548201 60548222 60548218 60548223 +
ttgtttagcattagctacaagt

SEQ ID NO: 208700 - DNA, 22 bp, Artificial Sequence
  Synthetic oligonucleotide; TTT chr2 60548202 60548223 60548219 60548224 +
tgtttagcattagctacaagtt

SEQ ID NO: 208701 - DNA, 22 bp, Artificial Sequence
  Synthetic oligonucleotide; TTT chr2 60548203 60548224 60548220 60548225 +
gtttagcattagctacaagttc

SEQ ID NO: 208702 - DNA, 22 bp, Artificial Sequence
  Synthetic oligonucleotide; TTG chr2 60548204 60548225 60548221 60548226 +
tttagcattagctacaagttct

SEQ ID NO: 208703 - DNA, 22 bp, Artificial Sequence
  Synthetic oligonucleotide; TTT chr2 60548207 60548228 60548224 60548229 +
agcattagctacaagttctgag

SEQ ID NO: 208704 - DNA, 22 bp, Artificial Sequence
  Synthetic oligonucleotide; TTA chr2 60548208 60548229 60548225 60548230 +
gcattagctacaagttctgagg

SEQ ID NO: 208705 - DNA, 22 bp, Artificial Sequence
  Synthetic oligonucleotide; TTA chr2 60548214 60548235 60548231 60548236 +
gctacaagttctgaggtttaca

SEQ ID NO: 208706 - DNA, 22 bp, Artificial Sequence
  Synthetic oligonucleotide; CTA chr2 60548218 60548239 60548235 60548240 +
caagttctgaggtttacagact

SEQ ID NO: 208707 - DNA, 22 bp, Artificial Sequence
  Synthetic oligonucleotide; TTC chr2 60548225 60548246 60548242 60548247 +
tgaggtttacagactgaaggaa

SEQ ID NO: 208708 - DNA, 22 bp, Artificial Sequence
  Synthetic oligonucleotide; CTG chr2 60548227 60548248 60548244 60548249 +
aggtttacagactgaaggaaga

SEQ ID NO: 208709 - DNA, 22 bp, Artificial Sequence
  Synthetic oligonucleotide; TTT chr2 60548233 60548254 60548250 60548255 +
acagactgaaggaagacttagg

SEQ ID NO: 208710 - DNA, 22 bp, Artificial Sequence
  Synthetic oligonucleotide; TTA chr2 60548234 60548255 60548251 60548256 +
cagactgaaggaagacttagga

SEQ ID NO: 208711 - DNA, 22 bp, Artificial Sequence
  Synthetic oligonucleotide; CTG chr2 60548241 60548262 60548258 60548263 +
aaggaagacttaggaaaatatt

SEQ ID NO: 208712 - DNA, 22 bp, Artificial Sequence
  Synthetic oligonucleotide; CTT chr2 60548252 60548273 60548269 60548274 +
aggaaaatattttatcaaactt

SEQ ID NO: 208713 - DNA, 22 bp, Artificial Sequence
  Synthetic oligonucleotide; TTA chr2 60548253 60548274 60548270 60548275 +
ggaaaatattttatcaaactta

SEQ ID NO: 208714 - DNA, 22 bp, Artificial Sequence
  Synthetic oligonucleotide; TTT chr2 60548264 60548285 60548281 60548286 +
tatcaaacttactagtacatag

SEQ ID NO: 208715 - DNA, 22 bp, Artificial Sequence
  Synthetic oligonucleotide; TTT chr2 60548265 60548286 60548282 60548287 +
atcaaacttactagtacataga

SEQ ID NO: 208716 - DNA, 22 bp, Artificial Sequence
  Synthetic oligonucleotide; TTA chr2 60548266 60548287 60548283 60548288 +
tcaaacttactagtacatagaa

SEQ ID NO: 208717 - DNA, 22 bp, Artificial Sequence
  Synthetic oligonucleotide; CTT chr2 60548274 60548295 60548291 60548296 +
actagtacatagaacctttgca

SEQ ID NO: 208718 - DNA, 22 bp, Artificial Sequence
  Synthetic oligonucleotide; TTA chr2 60548275 60548296 60548292 60548297 +
ctagtacatagaacctttgcaa

SEQ ID NO: 208719 - DNA, 22 bp, Artificial Sequence
  Synthetic oligonucleotide; CTA chr2 60548278 60548299 60548295 60548300 +
gtacatagaacctttgcaaaaa

SEQ ID NO: 208720 - DNA, 22 bp, Artificial Sequence
  Synthetic oligonucleotide; CTT chr2 60548292 60548313 60548309 60548314 +
tgcaaaaaaaaaaattttttat

SEQ ID NO: 208721 - DNA, 22 bp, Artificial Sequence
  Synthetic oligonucleotide; TTT chr2 60548293 60548314 60548310 60548315 +
gcaaaaaaaaaaattttttatt

SEQ ID NO: 208722 - DNA, 22 bp, Artificial Sequence
  Synthetic oligonucleotide; TTG chr2 60548294 60548315 60548311 60548316 +
caaaaaaaaaaattttttattt

SEQ ID NO: 208723 - DNA, 22 bp, Artificial Sequence
  Synthetic oligonucleotide; TTT chr2 60548309 60548330 60548326 60548331 +
tttatttccaccgttaagattc

SEQ ID NO: 208724 - DNA, 22 bp, Artificial Sequence
  Synthetic oligonucleotide; TTT chr2 60548310 60548331 60548327 60548332 +
ttatttccaccgttaagattct

SEQ ID NO: 208725 - DNA, 22 bp, Artificial Sequence
  Synthetic oligonucleotide; TTT chr2 60548311 60548332 60548328 60548333 +
tatttccaccgttaagattctt

SEQ ID NO: 208726 - DNA, 22 bp, Artificial Sequence
  Synthetic oligonucleotide; TTT chr2 60548312 60548333 60548329 60548334 +
atttccaccgttaagattcttt

SEQ ID NO: 208727 - DNA, 22 bp, Artificial Sequence
  Synthetic oligonucleotide; TTA chr2 60548313 60548334 60548330 60548335 +
tttccaccgttaagattctttt

SEQ ID NO: 208728 - DNA, 22 bp, Artificial Sequence
  Synthetic oligonucleotide; TTT chr2 60548316 60548337 60548333 60548338 +
ccaccgttaagattcttttttt

SEQ ID NO: 208729 - DNA, 22 bp, Artificial Sequence
  Synthetic oligonucleotide; TTC chr2 60548317 60548338 60548334 60548339 +
caccgttaagattctttttttt

SEQ ID NO: 208730 - DNA, 22 bp, Artificial Sequence
  Synthetic oligonucleotide; TTA chr2 60548325 60548346 60548342 60548347 +
agattctttttttttttttttt

SEQ ID NO: 208731 - DNA, 22 bp, Artificial Sequence
  Synthetic oligonucleotide; TTC chr2 60548331 60548352 60548348 60548353 +
ttttttttttttttttgttccc

SEQ ID NO: 208732 - DNA, 22 bp, Artificial Sequence
  Synthetic oligonucleotide; CTT chr2 60548333 60548354 60548350 60548355 +
ttttttttttttttgttcccaa

SEQ ID NO: 208733 - DNA, 22 bp, Artificial Sequence
  Synthetic oligonucleotide; TTT chr2 60548334 60548355 60548351 60548356 +
tttttttttttttgttcccaag

SEQ ID NO: 208734 - DNA, 22 bp, Artificial Sequence
  Synthetic oligonucleotide; TTT chr2 60548335 60548356 60548352 60548357 +
ttttttttttttgttcccaagg

SEQ ID NO: 208735 - DNA, 22 bp, Artificial Sequence
  Synthetic oligonucleotide; TTT chr2 60548336 60548357 60548353 60548358 +
tttttttttttgttcccaaggt

SEQ ID NO: 208736 - DNA, 22 bp, Artificial Sequence
  Synthetic oligonucleotide; TTT chr2 60548337 60548358 60548354 60548359 +
ttttttttttgttcccaaggtc

SEQ ID NO: 208737 - DNA, 22 bp, Artificial Sequence
  Synthetic oligonucleotide; TTT chr2 60548338 60548359 60548355 60548360 +
tttttttttgttcccaaggtct

SEQ ID NO: 208738 - DNA, 22 bp, Artificial Sequence
  Synthetic oligonucleotide; TTT chr2 60548339 60548360 60548356 60548361 +
ttttttttgttcccaaggtctg

SEQ ID NO: 208739 - DNA, 22 bp, Artificial Sequence
  Synthetic oligonucleotide; TTT chr2 60548340 60548361 60548357 60548362 +
tttttttgttcccaaggtctga

SEQ ID NO: 208740 - DNA, 22 bp, Artificial Sequence
  Synthetic oligonucleotide; TTT chr2 60548341 60548362 60548358 60548363 +
ttttttgttcccaaggtctgac

SEQ ID NO: 208741 - DNA, 22 bp, Artificial Sequence
  Synthetic oligonucleotide; TTT chr2 60548342 60548363 60548359 60548364 +
tttttgttcccaaggtctgaca

SEQ ID NO: 208742 - DNA, 22 bp, Artificial Sequence
  Synthetic oligonucleotide; TTT chr2 60548343 60548364 60548360 60548365 +
ttttgttcccaaggtctgacac

SEQ ID NO: 208743 - DNA, 22 bp, Artificial Sequence
  Synthetic oligonucleotide; TTT chr2 60548344 60548365 60548361 60548366 +
tttgttcccaaggtctgacaca

SEQ ID NO: 208744 - DNA, 22 bp, Artificial Sequence
  Synthetic oligonucleotide; TTT chr2 60548345 60548366 60548362 60548367 +
ttgttcccaaggtctgacacat

SEQ ID NO: 208745 - DNA, 22 bp, Artificial Sequence
  Synthetic oligonucleotide; TTT chr2 60548346 60548367 60548363 60548368 +
tgttcccaaggtctgacacatt

SEQ ID NO: 208746 - DNA, 22 bp, Artificial Sequence
  Synthetic oligonucleotide; TTT chr2 60548347 60548368 60548364 60548369 +
gttcccaaggtctgacacattt

SEQ ID NO: 208747 - DNA, 22 bp, Artificial Sequence
  Synthetic oligonucleotide; TTG chr2 60548348 60548369 60548365 60548370 +
ttcccaaggtctgacacatttc

SEQ ID NO: 208748 - DNA, 22 bp, Artificial Sequence
  Synthetic oligonucleotide; TTC chr2 60548351 60548372 60548368 60548373 +
ccaaggtctgacacatttctaa

SEQ ID NO: 208749 - DNA, 22 bp, Artificial Sequence
  Synthetic oligonucleotide; CTG chr2 60548361 60548382 60548378 60548383 +
acacatttctaaaagtgggaat

SEQ ID NO: 208750 - DNA, 22 bp, Artificial Sequence
  Synthetic oligonucleotide; TTT chr2 60548369 60548390 60548386 60548391 +
ctaaaagtgggaatattattta

SEQ ID NO: 208751 - DNA, 22 bp, Artificial Sequence
  Synthetic oligonucleotide; TTC chr2 60548370 60548391 60548387 60548392 +
taaaagtgggaatattatttag

SEQ ID NO: 208752 - DNA, 22 bp, Artificial Sequence
  Synthetic oligonucleotide; CTA chr2 60548372 60548393 60548389 60548394 +
aaagtgggaatattatttaggt

SEQ ID NO: 208753 - DNA, 22 bp, Artificial Sequence
  Synthetic oligonucleotide; TTA chr2 60548387 60548408 60548404 60548409 +
tttaggtgcaaaaggaaatatt

SEQ ID NO: 208754 - DNA, 22 bp, Artificial Sequence
  Synthetic oligonucleotide; TTT chr2 60548390 60548411 60548407 60548412 +
aggtgcaaaaggaaatattctc

SEQ ID NO: 208755 - DNA, 22 bp, Artificial Sequence
  Synthetic oligonucleotide; TTA chr2 60548391 60548412 60548408 60548413 +
ggtgcaaaaggaaatattctcc

SEQ ID NO: 208756 - DNA, 22 bp, Artificial Sequence
  Synthetic oligonucleotide; TTC chr2 60548410 60548431 60548427 60548432 +
tcctaggtatcaaatagttaaa

SEQ ID NO: 208757 - DNA, 22 bp, Artificial Sequence
  Synthetic oligonucleotide; CTC chr2 60548412 60548433 60548429 60548434 +
ctaggtatcaaatagttaaagg

SEQ ID NO: 208758 - DNA, 22 bp, Artificial Sequence
  Synthetic oligonucleotide; CTA chr2 60548415 60548436 60548432 60548437 +
ggtatcaaatagttaaaggtaa

SEQ ID NO: 208759 - DNA, 22 bp, Artificial Sequence
  Synthetic oligonucleotide; TTA chr2 60548430 60548451 60548447 60548452 +
aaggtaatgtggttcaaaacag

SEQ ID NO: 208760 - DNA, 22 bp, Artificial Sequence
  Synthetic oligonucleotide; TTC chr2 60548445 60548466 60548462 60548467 +
aaaacagacttggttaaagtct

SEQ ID NO: 208761 - DNA, 22 bp, Artificial Sequence
  Synthetic oligonucleotide; CTT chr2 60548456 60548477 60548473 60548478 +
ggttaaagtcttctaaatgtag

SEQ ID NO: 208762 - DNA, 22 bp, Artificial Sequence
  Synthetic oligonucleotide; TTG chr2 60548457 60548478 60548474 60548479 +
gttaaagtcttctaaatgtagt

SEQ ID NO: 208763 - DNA, 22 bp, Artificial Sequence
  Synthetic oligonucleotide; TTA chr2 60548461 60548482 60548478 60548483 +
aagtcttctaaatgtagtgact

SEQ ID NO: 208764 - DNA, 22 bp, Artificial Sequence
  Synthetic oligonucleotide; CTT chr2 60548468 60548489 60548485 60548490 +
ctaaatgtagtgactgaactga

SEQ ID NO: 208765 - DNA, 22 bp, Artificial Sequence
  Synthetic oligonucleotide; TTC chr2 60548469 60548490 60548486 60548491 +
taaatgtagtgactgaactgat

SEQ ID NO: 208766 - DNA, 22 bp, Artificial Sequence
  Synthetic oligonucleotide; CTA chr2 60548471 60548492 60548488 60548493 +
aatgtagtgactgaactgattt

SEQ ID NO: 208767 - DNA, 22 bp, Artificial Sequence
  Synthetic oligonucleotide; CTG chr2 60548484 60548505 60548501 60548506 +
aactgatttacaatcaaaaccg

SEQ ID NO: 208768 - DNA, 22 bp, Artificial Sequence
  Synthetic oligonucleotide; CTG chr2 60548489 60548510 60548506 60548511 +
atttacaatcaaaaccgggaaa

SEQ ID NO: 208769 - DNA, 22 bp, Artificial Sequence
  Synthetic oligonucleotide; TTT chr2 60548493 60548514 60548510 60548515 +
acaatcaaaaccgggaaatgaa

SEQ ID NO: 208770 - DNA, 22 bp, Artificial Sequence
  Synthetic oligonucleotide; TTA chr2 60548494 60548515 60548511 60548516 +
caatcaaaaccgggaaatgaag

SEQ ID NO: 208771 - DNA, 22 bp, Artificial Sequence
  Synthetic oligonucleotide; TTC chr2 60548525 60548546 60548542 60548547 +
agaggttgctgattacacctcc

SEQ ID NO: 208772 - DNA, 22 bp, Artificial Sequence
  Synthetic oligonucleotide; TTG chr2 60548533 60548554 60548550 60548555 +
ctgattacacctccacatttca

SEQ ID NO: 208773 - DNA, 22 bp, Artificial Sequence
  Synthetic oligonucleotide; CTG chr2 60548536 60548557 60548553 60548558 +
attacacctccacatttcacct

SEQ ID NO: 208774 - DNA, 22 bp, Artificial Sequence
  Synthetic oligonucleotide; TTA chr2 60548540 60548561 60548557 60548562 +
cacctccacatttcacctaatt

SEQ ID NO: 208775 - DNA, 22 bp, Artificial Sequence
  Synthetic oligonucleotide; CTC chr2 60548546 60548567 60548563 60548568 +
cacatttcacctaattaatttt

SEQ ID NO: 208776 - DNA, 22 bp, Artificial Sequence
  Synthetic oligonucleotide; TTT chr2 60548553 60548574 60548570 60548575 +
cacctaattaattttataggag

SEQ ID NO: 208777 - DNA, 22 bp, Artificial Sequence
  Synthetic oligonucleotide; TTC chr2 60548554 60548575 60548571 60548576 +
acctaattaattttataggagg

SEQ ID NO: 208778 - DNA, 22 bp, Artificial Sequence
  Synthetic oligonucleotide; CTA chr2 60548559 60548580 60548576 60548581 +
attaattttataggaggcaaag

SEQ ID NO: 208779 - DNA, 22 bp, Artificial Sequence
  Synthetic oligonucleotide; TTA chr2 60548563 60548584 60548580 60548585 +
attttataggaggcaaagttct

SEQ ID NO: 208780 - DNA, 22 bp, Artificial Sequence
  Synthetic oligonucleotide; TTT chr2 60548567 60548588 60548584 60548589 +
tataggaggcaaagttcttgaa

SEQ ID NO: 208781 - DNA, 22 bp, Artificial Sequence
  Synthetic oligonucleotide; TTT chr2 60548568 60548589 60548585 60548590 +
ataggaggcaaagttcttgaaa

SEQ ID NO: 208782 - DNA, 22 bp, Artificial Sequence
  Synthetic oligonucleotide; TTA chr2 60548569 60548590 60548586 60548591 +
taggaggcaaagttcttgaaaa

SEQ ID NO: 208783 - DNA, 22 bp, Artificial Sequence
  Synthetic oligonucleotide; TTC chr2 60548584 60548605 60548601 60548606 +
ttgaaaataacaagatgatcaa

SEQ ID NO: 208784 - DNA, 22 bp, Artificial Sequence
  Synthetic oligonucleotide; CTT chr2 60548586 60548607 60548603 60548608 +
gaaaataacaagatgatcaaat

SEQ ID NO: 208785 - DNA, 22 bp, Artificial Sequence
  Synthetic oligonucleotide; TTG chr2 60548587 60548608 60548604 60548609 +
aaaataacaagatgatcaaatg

SEQ ID NO: 208786 - DNA, 22 bp, Artificial Sequence
  Synthetic oligonucleotide; CTG chr2 60548626 60548647 60548643 60548648 +
taacctcaacattttctatgct

SEQ ID NO: 208787 - DNA, 22 bp, Artificial Sequence
  Synthetic oligonucleotide; CTC chr2 60548633 60548654 60548650 60548655 +
aacattttctatgctcttaacg

SEQ ID NO: 208788 - DNA, 22 bp, Artificial Sequence
  Synthetic oligonucleotide; TTT chr2 60548640 60548661 60548657 60548662 +
tctatgctcttaacgtaaatta

SEQ ID NO: 208789 - DNA, 22 bp, Artificial Sequence
  Synthetic oligonucleotide; TTT chr2 60548641 60548662 60548658 60548663 +
ctatgctcttaacgtaaattat

SEQ ID NO: 208790 - DNA, 22 bp, Artificial Sequence
  Synthetic oligonucleotide; TTC chr2 60548642 60548663 60548659 60548664 +
tatgctcttaacgtaaattatt

SEQ ID NO: 208791 - DNA, 22 bp, Artificial Sequence
  Synthetic oligonucleotide; CTA chr2 60548644 60548665 60548661 60548666 +
tgctcttaacgtaaattattgc

SEQ ID NO: 208792 - DNA, 22 bp, Artificial Sequence
  Synthetic oligonucleotide; CTC chr2 60548649 60548670 60548666 60548671 +
ttaacgtaaattattgctaatt

SEQ ID NO: 208793 - DNA, 22 bp, Artificial Sequence
  Synthetic oligonucleotide; CTT chr2 60548651 60548672 60548668 60548673 +
aacgtaaattattgctaattaa

SEQ ID NO: 208794 - DNA, 22 bp, Artificial Sequence
  Synthetic oligonucleotide; TTA chr2 60548652 60548673 60548669 60548674 +
acgtaaattattgctaattaac

SEQ ID NO: 208795 - DNA, 22 bp, Artificial Sequence
  Synthetic oligonucleotide; TTA chr2 60548662 60548683 60548679 60548684 +
ttgctaattaacaagaattata

SEQ ID NO: 208796 - DNA, 22 bp, Artificial Sequence
  Synthetic oligonucleotide; TTG chr2 60548665 60548686 60548682 60548687 +
ctaattaacaagaattatattc

SEQ ID NO: 208797 - DNA, 22 bp, Artificial Sequence
  Synthetic oligonucleotide; CTA chr2 60548668 60548689 60548685 60548690 +
attaacaagaattatattctaa

SEQ ID NO: 208798 - DNA, 22 bp, Artificial Sequence
  Synthetic oligonucleotide; TTA chr2 60548672 60548693 60548689 60548694 +
acaagaattatattctaatgta

SEQ ID NO: 208799 - DNA, 22 bp, Artificial Sequence
  Synthetic oligonucleotide; TTA chr2 60548682 60548703 60548699 60548704 +
tattctaatgtatgaaatacgt

SEQ ID NO: 208800 - DNA, 22 bp, Artificial Sequence
  Synthetic oligonucleotide; TTC chr2 60548687 60548708 60548704 60548709 +
taatgtatgaaatacgtttaac

SEQ ID NO: 208801 - DNA, 22 bp, Artificial Sequence
  Synthetic oligonucleotide; CTA chr2 60548689 60548710 60548706 60548711 +
atgtatgaaatacgtttaacat

SEQ ID NO: 208802 - DNA, 22 bp, Artificial Sequence
  Synthetic oligonucleotide; TTT chr2 60548706 60548727 60548723 60548728 +
aacatcggtctccttgcaaaac

SEQ ID NO: 208803 - DNA, 22 bp, Artificial Sequence
  Synthetic oligonucleotide; TTA chr2 60548707 60548728 60548724 60548729 +
acatcggtctccttgcaaaaca

SEQ ID NO: 208804 - DNA, 22 bp, Artificial Sequence
  Synthetic oligonucleotide; CTC chr2 60548718 60548739 60548735 60548740 +
cttgcaaaacatttggctagtg

SEQ ID NO: 208805 - DNA, 22 bp, Artificial Sequence
  Synthetic oligonucleotide; CTT chr2 60548721 60548742 60548738 60548743 +
gcaaaacatttggctagtggtg

SEQ ID NO: 208806 - DNA, 22 bp, Artificial Sequence
  Synthetic oligonucleotide; TTG chr2 60548722 60548743 60548739 60548744 +
caaaacatttggctagtggtgt

SEQ ID NO: 208807 - DNA, 22 bp, Artificial Sequence
  Synthetic oligonucleotide; TTT chr2 60548732 60548753 60548749 60548754 +
ggctagtggtgttcagagaaat

SEQ ID NO: 208808 - DNA, 22 bp, Artificial Sequence
  Synthetic oligonucleotide; TTG chr2 60548733 60548754 60548750 60548755 +
gctagtggtgttcagagaaata

SEQ ID NO: 208809 - DNA, 22 bp, Artificial Sequence
  Synthetic oligonucleotide; CTA chr2 60548737 60548758 60548754 60548759 +
gtggtgttcagagaaataccaa

SEQ ID NO: 208810 - DNA, 22 bp, Artificial Sequence
  Synthetic oligonucleotide; TTC chr2 60548746 60548767 60548763 60548768 +
agagaaataccaaaacgtgttt

SEQ ID NO: 208811 - DNA, 22 bp, Artificial Sequence
  Synthetic oligonucleotide; TTT chr2 60548768 60548789 60548785 60548790 +
ttatcattgctggtatattatt

SEQ ID NO: 208812 - DNA, 22 bp, Artificial Sequence
  Synthetic oligonucleotide; TTT chr2 60548769 60548790 60548786 60548791 +
tatcattgctggtatattatta

SEQ ID NO: 208813 - DNA, 22 bp, Artificial Sequence
  Synthetic oligonucleotide; TTT chr2 60548770 60548791 60548787 60548792 +
atcattgctggtatattattaa

SEQ ID NO: 208814 - DNA, 22 bp, Artificial Sequence
  Synthetic oligonucleotide; TTA chr2 60548771 60548792 60548788 60548793 +
tcattgctggtatattattaaa

SEQ ID NO: 208815 - DNA, 22 bp, Artificial Sequence
  Synthetic oligonucleotide; TTG chr2 60548777 60548798 60548794 60548799 +
ctggtatattattaaaaatcag

SEQ ID NO: 208816 - DNA, 22 bp, Artificial Sequence
  Synthetic oligonucleotide; CTG chr2 60548780 60548801 60548797 60548802 +
gtatattattaaaaatcagaca

SEQ ID NO: 208817 - DNA, 22 bp, Artificial Sequence
  Synthetic oligonucleotide; TTA chr2 60548788 60548809 60548805 60548810 +
ttaaaaatcagacaaagtggga

SEQ ID NO: 208818 - DNA, 22 bp, Artificial Sequence
  Synthetic oligonucleotide; TTA chr2 60548791 60548812 60548808 60548813 +
aaaatcagacaaagtgggacac

SEQ ID NO: 208819 - DNA, 22 bp, Artificial Sequence
  Synthetic oligonucleotide; TTC chr2 60548837 60548858 60548854 60548859 +
tcatggtgtagtctactgattt

SEQ ID NO: 208820 - DNA, 22 bp, Artificial Sequence
  Synthetic oligonucleotide; CTC chr2 60548839 60548860 60548856 60548861 +
atggtgtagtctactgatttgc

SEQ ID NO: 208821 - DNA, 22 bp, Artificial Sequence
  Synthetic oligonucleotide; CTA chr2 60548852 60548873 60548869 60548874 +
ctgatttgcattgacatctttt

SEQ ID NO: 208822 - DNA, 22 bp, Artificial Sequence
  Synthetic oligonucleotide; CTG chr2 60548855 60548876 60548872 60548877 +
atttgcattgacatcttttctc

SEQ ID NO: 208823 - DNA, 22 bp, Artificial Sequence
  Synthetic oligonucleotide; TTT chr2 60548859 60548880 60548876 60548881 +
gcattgacatcttttctcagtg

SEQ ID NO: 208824 - DNA, 22 bp, Artificial Sequence
  Synthetic oligonucleotide; TTG chr2 60548860 60548881 60548877 60548882 +
cattgacatcttttctcagtgg

SEQ ID NO: 208825 - DNA, 22 bp, Artificial Sequence
  Synthetic oligonucleotide; TTG chr2 60548865 60548886 60548882 60548887 +
acatcttttctcagtggcaatc

SEQ ID NO: 208826 - DNA, 22 bp, Artificial Sequence
  Synthetic oligonucleotide; CTT chr2 60548872 60548893 60548889 60548894 +
ttctcagtggcaatcaacattt

SEQ ID NO: 208827 - DNA, 22 bp, Artificial Sequence
  Synthetic oligonucleotide; TTT chr2 60548873 60548894 60548890 60548895 +
tctcagtggcaatcaacatttc

SEQ ID NO: 208828 - DNA, 22 bp, Artificial Sequence
  Synthetic oligonucleotide; TTT chr2 60548874 60548895 60548891 60548896 +
ctcagtggcaatcaacatttcc

SEQ ID NO: 208829 - DNA, 22 bp, Artificial Sequence
  Synthetic oligonucleotide; TTC chr2 60548875 60548896 60548892 60548897 +
tcagtggcaatcaacatttcct

SEQ ID NO: 208830 - DNA, 22 bp, Artificial Sequence
  Synthetic oligonucleotide; CTC chr2 60548877 60548898 60548894 60548899 +
agtggcaatcaacatttccttt

SEQ ID NO: 208831 - DNA, 22 bp, Artificial Sequence
  Synthetic oligonucleotide; TTT chr2 60548894 60548915 60548911 60548916 +
cctttctgggcatctgataatt

SEQ ID NO: 208832 - DNA, 22 bp, Artificial Sequence
  Synthetic oligonucleotide; TTC chr2 60548895 60548916 60548912 60548917 +
ctttctgggcatctgataattt

SEQ ID NO: 208833 - DNA, 22 bp, Artificial Sequence
  Synthetic oligonucleotide; CTT chr2 60548898 60548919 60548915 60548920 +
tctgggcatctgataatttctc

SEQ ID NO: 208834 - DNA, 22 bp, Artificial Sequence
  Synthetic oligonucleotide; TTT chr2 60548899 60548920 60548916 60548921 +
ctgggcatctgataatttctct

SEQ ID NO: 208835 - DNA, 22 bp, Artificial Sequence
  Synthetic oligonucleotide; TTC chr2 60548900 60548921 60548917 60548922 +
tgggcatctgataatttctctg

SEQ ID NO: 208836 - DNA, 22 bp, Artificial Sequence
  Synthetic oligonucleotide; CTG chr2 60548902 60548923 60548919 60548924 +
ggcatctgataatttctctgca

SEQ ID NO: 208837 - DNA, 22 bp, Artificial Sequence
  Synthetic oligonucleotide; CTG chr2 60548910 60548931 60548927 60548932 +
ataatttctctgcattttaatg

SEQ ID NO: 208838 - DNA, 22 bp, Artificial Sequence
  Synthetic oligonucleotide; TTT chr2 60548917 60548938 60548934 60548939 +
ctctgcattttaatgcaaattc

SEQ ID NO: 208839 - DNA, 22 bp, Artificial Sequence
  Synthetic oligonucleotide; TTC chr2 60548918 60548939 60548935 60548940 +
tctgcattttaatgcaaattcc

SEQ ID NO: 208840 - DNA, 22 bp, Artificial Sequence
  Synthetic oligonucleotide; CTC chr2 60548920 60548941 60548937 60548942 +
tgcattttaatgcaaattcccc

SEQ ID NO: 208841 - DNA, 22 bp, Artificial Sequence
  Synthetic oligonucleotide; CTG chr2 60548922 60548943 60548939 60548944 +
cattttaatgcaaattcccctt

SEQ ID NO: 208842 - DNA, 22 bp, Artificial Sequence
  Synthetic oligonucleotide; TTT chr2 60548927 60548948 60548944 60548949 +
taatgcaaattcccctttccct

SEQ ID NO: 208843 - DNA, 22 bp, Artificial Sequence
  Synthetic oligonucleotide; TTT chr2 60548928 60548949 60548945 60548950 +
aatgcaaattcccctttcccta

SEQ ID NO: 208844 - DNA, 22 bp, Artificial Sequence
  Synthetic oligonucleotide; TTA chr2 60548929 60548950 60548946 60548951 +
atgcaaattcccctttccctaa

SEQ ID NO: 208845 - DNA, 22 bp, Artificial Sequence
  Synthetic oligonucleotide; TTC chr2 60548939 60548960 60548956 60548961 +
ccctttccctaaaaaccttcct

SEQ ID NO: 208846 - DNA, 22 bp, Artificial Sequence
  Synthetic oligonucleotide; CTT chr2 60548944 60548965 60548961 60548966 +
tccctaaaaaccttcctaaccc

SEQ ID NO: 208847 - DNA, 22 bp, Artificial Sequence
  Synthetic oligonucleotide; TTT chr2 60548945 60548966 60548962 60548967 +
ccctaaaaaccttcctaaccct

SEQ ID NO: 208848 - DNA, 22 bp, Artificial Sequence
  Synthetic oligonucleotide; TTC chr2 60548946 60548967 60548963 60548968 +
cctaaaaaccttcctaaccctc

SEQ ID NO: 208849 - DNA, 22 bp, Artificial Sequence
  Synthetic oligonucleotide; CTA chr2 60548950 60548971 60548967 60548972 +
aaaaccttcctaaccctcagcc

SEQ ID NO: 208850 - DNA, 22 bp, Artificial Sequence
  Synthetic oligonucleotide; CTT chr2 60548958 60548979 60548975 60548980 +
cctaaccctcagccatttaccc

SEQ ID NO: 208851 - DNA, 22 bp, Artificial Sequence
  Synthetic oligonucleotide; TTC chr2 60548959 60548980 60548976 60548981 +
ctaaccctcagccatttacccc

SEQ ID NO: 208852 - DNA, 22 bp, Artificial Sequence
  Synthetic oligonucleotide; CTA chr2 60548962 60548983 60548979 60548984 +
accctcagccatttaccccctc

SEQ ID NO: 208853 - DNA, 22 bp, Artificial Sequence
  Synthetic oligonucleotide; CTC chr2 60548968 60548989 60548985 60548990 +
agccatttaccccctccctcaa

SEQ ID NO: 208854 - DNA, 22 bp, Artificial Sequence
  Synthetic oligonucleotide; TTT chr2 60548976 60548997 60548993 60548998 +
accccctccctcaattcaactc

SEQ ID NO: 208855 - DNA, 22 bp, Artificial Sequence
  Synthetic oligonucleotide; TTA chr2 60548977 60548998 60548994 60548999 +
ccccctccctcaattcaactcc

SEQ ID NO: 208856 - DNA, 22 bp, Artificial Sequence
  Synthetic oligonucleotide; CTC chr2 60548984 60549005 60549001 60549006 +
cctcaattcaactccatcctcc

SEQ ID NO: 208857 - DNA, 22 bp, Artificial Sequence
  Synthetic oligonucleotide; CTC chr2 60548988 60549009 60549005 60549010 +
aattcaactccatcctccttcg

SEQ ID NO: 208858 - DNA, 22 bp, Artificial Sequence
  Synthetic oligonucleotide; TTC chr2 60548993 60549014 60549010 60549015 +
aactccatcctccttcgcccca

SEQ ID NO: 208859 - DNA, 22 bp, Artificial Sequence
  Synthetic oligonucleotide; CTC chr2 60548998 60549019 60549015 60549020 +
catcctccttcgccccaacaat

SEQ ID NO: 208860 - DNA, 22 bp, Artificial Sequence
  Synthetic oligonucleotide; CTC chr2 60549005 60549026 60549022 60549027 +
cttcgccccaacaataccaaca

SEQ ID NO: 208861 - DNA, 22 bp, Artificial Sequence
  Synthetic oligonucleotide; CTT chr2 60549008 60549029 60549025 60549030 +
cgccccaacaataccaacattt

SEQ ID NO: 208862 - DNA, 22 bp, Artificial Sequence
  Synthetic oligonucleotide; TTC chr2 60549009 60549030 60549026 60549031 +
gccccaacaataccaacatttc

SEQ ID NO: 208863 - DNA, 22 bp, Artificial Sequence
  Synthetic oligonucleotide; TTT chr2 60549030 60549051 60549047 60549052 +
ctaagctccggcctaaactccg

SEQ ID NO: 208864 - DNA, 22 bp, Artificial Sequence
  Synthetic oligonucleotide; TTC chr2 60549031 60549052 60549048 60549053 +
taagctccggcctaaactccgg

SEQ ID NO: 208865 - DNA, 22 bp, Artificial Sequence
  Synthetic oligonucleotide; CTA chr2 60549033 60549054 60549050 60549055 +
agctccggcctaaactccggct

SEQ ID NO: 208866 - DNA, 22 bp, Artificial Sequence
  Synthetic oligonucleotide; CTC chr2 60549038 60549059 60549055 60549060 +
cggcctaaactccggctacaaa

SEQ ID NO: 208867 - DNA, 22 bp, Artificial Sequence
  Synthetic oligonucleotide; CTA chr2 60549045 60549066 60549062 60549067 +
aactccggctacaaagcaggga

SEQ ID NO: 208868 - DNA, 22 bp, Artificial Sequence
  Synthetic oligonucleotide; CTC chr2 60549050 60549071 60549067 60549072 +
cggctacaaagcagggagtcct

SEQ ID NO: 208869 - DNA, 22 bp, Artificial Sequence
  Synthetic oligonucleotide; CTA chr2 60549056 60549077 60549073 60549078 +
caaagcagggagtcctcgattg

SEQ ID NO: 208870 - DNA, 22 bp, Artificial Sequence
  Synthetic oligonucleotide; CTC chr2 60549073 60549094 60549090 60549095 +
gattgaagtggaagggagtggg

SEQ ID NO: 208871 - DNA, 22 bp, Artificial Sequence
  Synthetic oligonucleotide; TTG chr2 60549078 60549099 60549095 60549100 +
aagtggaagggagtgggcaaat

SEQ ID NO: 208872 - DNA, 22 bp, Artificial Sequence
  Synthetic oligonucleotide; TTA chr2 60549114 60549135 60549131 60549136 +
gccgcgaattctctctacgagg

SEQ ID NO: 208873 - DNA, 22 bp, Artificial Sequence
  Synthetic oligonucleotide; TTC chr2 60549125 60549146 60549142 60549147 +
tctctacgaggggaggaagaaa

SEQ ID NO: 208874 - DNA, 22 bp, Artificial Sequence
  Synthetic oligonucleotide; CTC chr2 60549127 60549148 60549144 60549149 +
tctacgaggggaggaagaaata

SEQ ID NO: 208875 - DNA, 22 bp, Artificial Sequence
  Synthetic oligonucleotide; CTC chr2 60549129 60549150 60549146 60549151 +
tacgaggggaggaagaaataga

SEQ ID NO: 208876 - DNA, 22 bp, Artificial Sequence
  Synthetic oligonucleotide; CTA chr2 60549131 60549152 60549148 60549153 +
cgaggggaggaagaaatagaaa

SEQ ID NO: 208877 - DNA, 22 bp, Artificial Sequence
  Synthetic oligonucleotide; CTT chr2 60549164 60549185 60549181 60549186 +
ctacgttcaaacagcaagacag

SEQ ID NO: 208878 - DNA, 22 bp, Artificial Sequence
  Synthetic oligonucleotide; TTC chr2 60549165 60549186 60549182 60549187 +
tacgttcaaacagcaagacagc

SEQ ID NO: 208879 - DNA, 22 bp, Artificial Sequence
  Synthetic oligonucleotide; CTA chr2 60549167 60549188 60549184 60549189 +
cgttcaaacagcaagacagcct

SEQ ID NO: 208880 - DNA, 22 bp, Artificial Sequence
  Synthetic oligonucleotide; TTC chr2 60549172 60549193 60549189 60549194 +
aaacagcaagacagcctggaac

SEQ ID NO: 208881 - DNA, 22 bp, Artificial Sequence
  Synthetic oligonucleotide; CTG chr2 60549190 60549211 60549207 60549212 +
gaacgtctcaatgtctcagtga

SEQ ID NO: 208882 - DNA, 22 bp, Artificial Sequence
  Synthetic oligonucleotide; CTC chr2 60549199 60549220 60549216 60549221 +
aatgtctcagtgacagactgag

SEQ ID NO: 208883 - DNA, 22 bp, Artificial Sequence
  Synthetic oligonucleotide; CTC chr2 60549207 60549228 60549224 60549229 +
agtgacagactgagatctcttt

SEQ ID NO: 208884 - DNA, 22 bp, Artificial Sequence
  Synthetic oligonucleotide; CTG chr2 60549219 60549240 60549236 60549241 +
agatctctttcctctctgtgta

SEQ ID NO: 208885 - DNA, 22 bp, Artificial Sequence
  Synthetic oligonucleotide; CTC chr2 60549226 60549247 60549243 60549248 +
tttcctctctgtgtagttgcaa

SEQ ID NO: 208886 - DNA, 22 bp, Artificial Sequence
  Synthetic oligonucleotide; CTT chr2 60549228 60549249 60549245 60549250 +
tcctctctgtgtagttgcaaaa

SEQ ID NO: 208887 - DNA, 22 bp, Artificial Sequence
  Synthetic oligonucleotide; TTT chr2 60549229 60549250 60549246 60549251 +
cctctctgtgtagttgcaaaag

SEQ ID NO: 208888 - DNA, 22 bp, Artificial Sequence
  Synthetic oligonucleotide; TTC chr2 60549230 60549251 60549247 60549252 +
ctctctgtgtagttgcaaaaga

SEQ ID NO: 208889 - DNA, 22 bp, Artificial Sequence
  Synthetic oligonucleotide; CTC chr2 60549233 60549254 60549250 60549255 +
tctgtgtagttgcaaaagaata

SEQ ID NO: 208890 - DNA, 22 bp, Artificial Sequence
  Synthetic oligonucleotide; CTC chr2 60549235 60549256 60549252 60549257 +
tgtgtagttgcaaaagaataaa

SEQ ID NO: 208891 - DNA, 22 bp, Artificial Sequence
  Synthetic oligonucleotide; CTG chr2 60549237 60549258 60549254 60549259 +
tgtagttgcaaaagaataaatt

SEQ ID NO: 208892 - DNA, 22 bp, Artificial Sequence
  Synthetic oligonucleotide; TTG chr2 60549245 60549266 60549262 60549267 +
caaaagaataaatttaagggaa

SEQ ID NO: 208893 - DNA, 22 bp, Artificial Sequence
  Synthetic oligonucleotide; TTT chr2 60549260 60549281 60549277 60549282 +
aagggaaaaaaataatccttat

SEQ ID NO: 208894 - DNA, 22 bp, Artificial Sequence
  Synthetic oligonucleotide; TTA chr2 60549261 60549282 60549278 60549283 +
agggaaaaaaataatccttata

SEQ ID NO: 208895 - DNA, 22 bp, Artificial Sequence
  Synthetic oligonucleotide; CTT chr2 60549280 60549301 60549297 60549302 +
ataggaaatgttggtaaggagc

SEQ ID NO: 208896 - DNA, 22 bp, Artificial Sequence
  Synthetic oligonucleotide; TTA chr2 60549281 60549302 60549298 60549303 +
taggaaatgttggtaaggagcg

SEQ ID NO: 208897 - DNA, 22 bp, Artificial Sequence
  Synthetic oligonucleotide; TTG chr2 60549293 60549314 60549310 60549315 +
gtaaggagcgagcaaaacgaga

SEQ ID NO: 208898 - DNA, 22 bp, Artificial Sequence
  Synthetic oligonucleotide; CTG chr2 60549319 60549340 60549336 60549341 +
ccggggagcggagggggagggg

SEQ ID NO: 208899 - DNA, 22 bp, Artificial Sequence
  Synthetic oligonucleotide; CTT chr2 60549359 60549380 60549376 60549381 +
caagtttgctttccaagtcctt

SEQ ID NO: 208900 - DNA, 22 bp, Artificial Sequence
  Synthetic oligonucleotide; TTC chr2 60549360 60549381 60549377 60549382 +
aagtttgctttccaagtccttc

SEQ ID NO: 208901 - DNA, 22 bp, Artificial Sequence
  Synthetic oligonucleotide; TTT chr2 60549366 60549387 60549383 60549388 +
gctttccaagtccttctccttg

SEQ ID NO: 208902 - DNA, 22 bp, Artificial Sequence
  Synthetic oligonucleotide; TTG chr2 60549367 60549388 60549384 60549389 +
ctttccaagtccttctccttga

SEQ ID NO: 208903 - DNA, 22 bp, Artificial Sequence
  Synthetic oligonucleotide; CTT chr2 60549370 60549391 60549387 60549392 +
tccaagtccttctccttgattg

SEQ ID NO: 208904 - DNA, 22 bp, Artificial Sequence
  Synthetic oligonucleotide; TTT chr2 60549371 60549392 60549388 60549393 +
ccaagtccttctccttgattgt

SEQ ID NO: 208905 - DNA, 22 bp, Artificial Sequence
  Synthetic oligonucleotide; TTC chr2 60549372 60549393 60549389 60549394 +
caagtccttctccttgattgtc

SEQ ID NO: 208906 - DNA, 22 bp, Artificial Sequence
  Synthetic oligonucleotide; CTT chr2 60549381 60549402 60549398 60549403 +
ctccttgattgtcttaacaggg

SEQ ID NO: 208907 - DNA, 22 bp, Artificial Sequence
  Synthetic oligonucleotide; TTC chr2 60549382 60549403 60549399 60549404 +
tccttgattgtcttaacagggt

SEQ ID NO: 208908 - DNA, 22 bp, Artificial Sequence
  Synthetic oligonucleotide; CTC chr2 60549384 60549405 60549401 60549406 +
cttgattgtcttaacagggtaa

SEQ ID NO: 208909 - DNA, 22 bp, Artificial Sequence
  Synthetic oligonucleotide; CTT chr2 60549387 60549408 60549404 60549409 +
gattgtcttaacagggtaaaga

SEQ ID NO: 208910 - DNA, 22 bp, Artificial Sequence
  Synthetic oligonucleotide; TTG chr2 60549388 60549409 60549405 60549410 +
attgtcttaacagggtaaagaa

SEQ ID NO: 208911 - DNA, 22 bp, Artificial Sequence
  Synthetic oligonucleotide; TTG chr2 60549392 60549413 60549409 60549414 +
tcttaacagggtaaagaagcaa

SEQ ID NO: 208912 - DNA, 22 bp, Artificial Sequence
  Synthetic oligonucleotide; CTT chr2 60549396 60549417 60549413 60549418 +
aacagggtaaagaagcaaacgg

SEQ ID NO: 208913 - DNA, 22 bp, Artificial Sequence
  Synthetic oligonucleotide; TTA chr2 60549397 60549418 60549414 60549419 +
acagggtaaagaagcaaacgga

SEQ ID NO: 208914 - DNA, 22 bp, Artificial Sequence
  Synthetic oligonucleotide; CTG chr2 60549424 60549445 60549441 60549446 +
aaattcagagaggaaaagcaaa

SEQ ID NO: 208915 - DNA, 22 bp, Artificial Sequence
  Synthetic oligonucleotide; TTC chr2 60549430 60549451 60549447 60549452 +
agagaggaaaagcaaagaaaca

SEQ ID NO: 208916 - DNA, 22 bp, Artificial Sequence
  Synthetic oligonucleotide; CTA chr2 60549471 60549492 60549488 60549493 +
caggcccggggcaggggccccg

SEQ ID NO: 208917 - DNA, 22 bp, Artificial Sequence
  Synthetic oligonucleotide; TTG chr2 60549524 60549545 60549541 60549546 +
ggcgcggggactctgaggcaca

SEQ ID NO: 208918 - DNA, 22 bp, Artificial Sequence
  Synthetic oligonucleotide; CTC chr2 60549537 60549558 60549554 60549559 +
tgaggcacaaagcgagcagcgt

SEQ ID NO: 208919 - DNA, 22 bp, Artificial Sequence
  Synthetic oligonucleotide; CTG chr2 60549539 60549560 60549556 60549561 +
aggcacaaagcgagcagcgtgc

SEQ ID NO: 208920 - DNA, 22 bp, Artificial Sequence
  Synthetic oligonucleotide; CTG chr2 60549563 60549584 60549580 60549585 +
gctgcaggctcccgccgcgctt

SEQ ID NO: 208921 - DNA, 22 bp, Artificial Sequence
  Synthetic oligonucleotide; CTG chr2 60549567 60549588 60549584 60549589 +
caggctcccgccgcgcttgctg

SEQ ID NO: 208922 - DNA, 22 bp, Artificial Sequence
  Synthetic oligonucleotide; CTC chr2 60549574 60549595 60549591 60549596 +
ccgccgcgcttgctgcgaacac

SEQ ID NO: 208923 - DNA, 22 bp, Artificial Sequence
  Synthetic oligonucleotide; CTT chr2 60549585 60549606 60549602 60549607 +
gctgcgaacacgtgcagcagcg

SEQ ID NO: 208924 - DNA, 22 bp, Artificial Sequence
  Synthetic oligonucleotide; TTG chr2 60549586 60549607 60549603 60549608 +
ctgcgaacacgtgcagcagcgg

SEQ ID NO: 208925 - DNA, 22 bp, Artificial Sequence
  Synthetic oligonucleotide; CTG chr2 60549589 60549610 60549606 60549611 +
cgaacacgtgcagcagcggccg

SEQ ID NO: 208926 - DNA, 22 bp, Artificial Sequence
  Synthetic oligonucleotide; CTT chr2 60549620 60549641 60549637 60549642 +
ggggcccgggggcccggagacg

SEQ ID NO: 208927 - DNA, 22 bp, Artificial Sequence
  Synthetic oligonucleotide; TTG chr2 60549621 60549642 60549638 60549643 +
gggcccgggggcccggagacgg

SEQ ID NO: 208928 - DNA, 22 bp, Artificial Sequence
  Synthetic oligonucleotide; CTG chr2 60549662 60549683 60549679 60549684 +
actgctgcctccatgcccgtcc

SEQ ID NO: 208929 - DNA, 22 bp, Artificial Sequence
  Synthetic oligonucleotide; CTG chr2 60549666 60549687 60549683 60549688 +
ctgcctccatgcccgtccagct

SEQ ID NO: 208930 - DNA, 22 bp, Artificial Sequence
  Synthetic oligonucleotide; CTG chr2 60549669 60549690 60549686 60549691 +
cctccatgcccgtccagctcgg

SEQ ID NO: 208931 - DNA, 22 bp, Artificial Sequence
  Synthetic oligonucleotide; CTC chr2 60549673 60549694 60549690 60549695 +
catgcccgtccagctcggccag

SEQ ID NO: 208932 - DNA, 22 bp, Artificial Sequence
  Synthetic oligonucleotide; CTC chr2 60549689 60549710 60549706 60549711 +
ggccagctcggccgcggggtga

SEQ ID NO: 208933 - DNA, 22 bp, Artificial Sequence
  Synthetic oligonucleotide; CTC chr2 60549698 60549719 60549715 60549720 +
ggccgcggggtgacggttccct

SEQ ID NO: 208934 - DNA, 22 bp, Artificial Sequence
  Synthetic oligonucleotide; TTC chr2 60549717 60549738 60549734 60549739 +
cctgggcctgccagttggtgaa

SEQ ID NO: 208935 - DNA, 22 bp, Artificial Sequence
  Synthetic oligonucleotide; CTG chr2 60549721 60549742 60549738 60549743 +
ggcctgccagttggtgaaaaag

SEQ ID NO: 208936 - DNA, 22 bp, Artificial Sequence
  Synthetic oligonucleotide; CTG chr2 60549727 60549748 60549744 60549749 +
ccagttggtgaaaaaggaagtg

SEQ ID NO: 208937 - DNA, 22 bp, Artificial Sequence
  Synthetic oligonucleotide; TTG chr2 60549734 60549755 60549751 60549756 +
gtgaaaaaggaagtgaggtttg

SEQ ID NO: 208938 - DNA, 22 bp, Artificial Sequence
  Synthetic oligonucleotide; TTT chr2 60549755 60549776 60549772 60549777 +
ggaaaacccggctggttaacct

SEQ ID NO: 208939 - DNA, 22 bp, Artificial Sequence
  Synthetic oligonucleotide; TTG chr2 60549756 60549777 60549773 60549778 +
gaaaacccggctggttaacctg

SEQ ID NO: 208940 - DNA, 22 bp, Artificial Sequence
  Synthetic oligonucleotide; CTG chr2 60549769 60549790 60549786 60549791 +
gttaacctggtgcagtctcagt

SEQ ID NO: 208941 - DNA, 22 bp, Artificial Sequence
  Synthetic oligonucleotide; TTA chr2 60549773 60549794 60549790 60549795 +
acctggtgcagtctcagtatct

SEQ ID NO: 208942 - DNA, 22 bp, Artificial Sequence
  Synthetic oligonucleotide; CTG chr2 60549778 60549799 60549795 60549800 +
gtgcagtctcagtatctccgca

SEQ ID NO: 208943 - DNA, 22 bp, Artificial Sequence
  Synthetic oligonucleotide; CTC chr2 60549788 60549809 60549805 60549810 +
agtatctccgcacacacctcaa

SEQ ID NO: 208944 - DNA, 22 bp, Artificial Sequence
  Synthetic oligonucleotide; CTC chr2 60549796 60549817 60549813 60549818 +
cgcacacacctcaagcgcgggt

SEQ ID NO: 208945 - DNA, 22 bp, Artificial Sequence
  Synthetic oligonucleotide; CTC chr2 60549808 60549829 60549825 60549830 +
aagcgcgggtcctgagattcat

SEQ ID NO: 208946 - DNA, 22 bp, Artificial Sequence
  Synthetic oligonucleotide; CTG chr2 60549822 60549843 60549839 60549844 +
agattcattctgtgtccacaag

SEQ ID NO: 208947 - DNA, 22 bp, Artificial Sequence
  Synthetic oligonucleotide; TTC chr2 60549828 60549849 60549845 60549850 +
attctgtgtccacaagcttaca

SEQ ID NO: 208948 - DNA, 22 bp, Artificial Sequence
  Synthetic oligonucleotide; TTC chr2 60549832 60549853 60549849 60549854 +
tgtgtccacaagcttacacttt

SEQ ID NO: 208949 - DNA, 22 bp, Artificial Sequence
  Synthetic oligonucleotide; CTG chr2 60549834 60549855 60549851 60549856 +
tgtccacaagcttacacttttt

SEQ ID NO: 208950 - DNA, 22 bp, Artificial Sequence
  Synthetic oligonucleotide; CTT chr2 60549847 60549868 60549864 60549869 +
acactttttactttgggggatc

SEQ ID NO: 208951 - DNA, 22 bp, Artificial Sequence
  Synthetic oligonucleotide; TTA chr2 60549848 60549869 60549865 60549870 +
cactttttactttgggggatct

SEQ ID NO: 208952 - DNA, 22 bp, Artificial Sequence
  Synthetic oligonucleotide; CTT chr2 60549853 60549874 60549870 60549875 +
tttactttgggggatctctgca

SEQ ID NO: 208953 - DNA, 22 bp, Artificial Sequence
  Synthetic oligonucleotide; TTT chr2 60549854 60549875 60549871 60549876 +
ttactttgggggatctctgcaa

SEQ ID NO: 208954 - DNA, 22 bp, Artificial Sequence
  Synthetic oligonucleotide; TTT chr2 60549855 60549876 60549872 60549877 +
tactttgggggatctctgcaaa

SEQ ID NO: 208955 - DNA, 22 bp, Artificial Sequence
  Synthetic oligonucleotide; TTT chr2 60549856 60549877 60549873 60549878 +
actttgggggatctctgcaaat

SEQ ID NO: 208956 - DNA, 22 bp, Artificial Sequence
  Synthetic oligonucleotide; TTA chr2 60549857 60549878 60549874 60549879 +
ctttgggggatctctgcaaatg

SEQ ID NO: 208957 - DNA, 22 bp, Artificial Sequence
  Synthetic oligonucleotide; CTT chr2 60549860 60549881 60549877 60549882 +
tgggggatctctgcaaatgcat

SEQ ID NO: 208958 - DNA, 22 bp, Artificial Sequence
  Synthetic oligonucleotide; TTT chr2 60549861 60549882 60549878 60549883 +
gggggatctctgcaaatgcatt

SEQ ID NO: 208959 - DNA, 22 bp, Artificial Sequence
  Synthetic oligonucleotide; TTG chr2 60549862 60549883 60549879 60549884 +
ggggatctctgcaaatgcattt

SEQ ID NO: 208960 - DNA, 22 bp, Artificial Sequence
  Synthetic oligonucleotide; CTC chr2 60549871 60549892 60549888 60549893 +
tgcaaatgcatttcccccgcaa

SEQ ID NO: 208961 - DNA, 22 bp, Artificial Sequence
  Synthetic oligonucleotide; CTG chr2 60549873 60549894 60549890 60549895 +
caaatgcatttcccccgcaatt

SEQ ID NO: 208962 - DNA, 22 bp, Artificial Sequence
  Synthetic oligonucleotide; TTT chr2 60549884 60549905 60549901 60549906 +
cccccgcaattctgggcactgg

SEQ ID NO: 208963 - DNA, 22 bp, Artificial Sequence
  Synthetic oligonucleotide; TTC chr2 60549885 60549906 60549902 60549907 +
ccccgcaattctgggcactggg

SEQ ID NO: 208964 - DNA, 22 bp, Artificial Sequence
  Synthetic oligonucleotide; TTC chr2 60549896 60549917 60549913 60549918 +
tgggcactgggtgtgcgcggcg

SEQ ID NO: 208965 - DNA, 22 bp, Artificial Sequence
  Synthetic oligonucleotide; CTG chr2 60549898 60549919 60549915 60549920 +
ggcactgggtgtgcgcggcggc

SEQ ID NO: 208966 - DNA, 22 bp, Artificial Sequence
  Synthetic oligonucleotide; CTG chr2 60549905 60549926 60549922 60549927 +
ggtgtgcgcggcggcggctgcg

SEQ ID NO: 208967 - DNA, 22 bp, Artificial Sequence
  Synthetic oligonucleotide; CTG chr2 60549925 60549946 60549942 60549947 +
cggttattcattattaatgacg

SEQ ID NO: 208968 - DNA, 22 bp, Artificial Sequence
  Synthetic oligonucleotide; TTA chr2 60549931 60549952 60549948 60549953 +
ttcattattaatgacgctgcct

SEQ ID NO: 208969 - DNA, 22 bp, Artificial Sequence
  Synthetic oligonucleotide; TTC chr2 60549934 60549955 60549951 60549956 +
attattaatgacgctgcctgcc

SEQ ID NO: 208970 - DNA, 22 bp, Artificial Sequence
  Synthetic oligonucleotide; TTA chr2 60549938 60549959 60549955 60549960 +
ttaatgacgctgcctgcccgca

SEQ ID NO: 208971 - DNA, 22 bp, Artificial Sequence
  Synthetic oligonucleotide; TTA chr2 60549941 60549962 60549958 60549963 +
atgacgctgcctgcccgcatca

SEQ ID NO: 208972 - DNA, 22 bp, Artificial Sequence
  Synthetic oligonucleotide; CTG chr2 60549950 60549971 60549967 60549972 +
cctgcccgcatcattatgatga

SEQ ID NO: 208973 - DNA, 22 bp, Artificial Sequence
  Synthetic oligonucleotide; CTG chr2 60549954 60549975 60549971 60549976 +
cccgcatcattatgatgataac

SEQ ID NO: 208974 - DNA, 22 bp, Artificial Sequence
  Synthetic oligonucleotide; TTA chr2 60549966 60549987 60549983 60549988 +
tgatgataactattactattgt

SEQ ID NO: 208975 - DNA, 22 bp, Artificial Sequence
  Synthetic oligonucleotide; CTA chr2 60549978 60549999 60549995 60550000 +
ttactattgttgtgattccgag

SEQ ID NO: 208976 - DNA, 22 bp, Artificial Sequence
  Synthetic oligonucleotide; TTA chr2 60549981 60550002 60549998 60550003 +
ctattgttgtgattccgagctc

SEQ ID NO: 208977 - DNA, 22 bp, Artificial Sequence
  Synthetic oligonucleotide; CTA chr2 60549984 60550005 60550001 60550006 +
ttgttgtgattccgagctccga

SEQ ID NO: 208978 - DNA, 22 bp, Artificial Sequence
  Synthetic oligonucleotide; TTG chr2 60549987 60550008 60550004 60550009 +
ttgtgattccgagctccgaggc

SEQ ID NO: 208979 - DNA, 22 bp, Artificial Sequence
  Synthetic oligonucleotide; TTG chr2 60549990 60550011 60550007 60550012 +
tgattccgagctccgaggcgag

SEQ ID NO: 208980 - DNA, 22 bp, Artificial Sequence
  Synthetic oligonucleotide; TTC chr2 60549996 60550017 60550013 60550018 +
cgagctccgaggcgagaggggg

SEQ ID NO: 208981 - DNA, 22 bp, Artificial Sequence
  Synthetic oligonucleotide; CTC chr2 60550003 60550024 60550020 60550025 +
cgaggcgagagggggggtgtcg

SEQ ID NO: 208982 - DNA, 22 bp, Artificial Sequence
  Synthetic oligonucleotide; CTG chr2 60550030 60550051 60550047 60550052 +
cagagccgcccagcaagccagc

SEQ ID NO: 208983 - DNA, 22 bp, Artificial Sequence
  Synthetic oligonucleotide; CTG chr2 60550070 60550091 60550087 60550092 +
tgctttgcatgggggtgagggg

SEQ ID NO: 208984 - DNA, 22 bp, Artificial Sequence
  Synthetic oligonucleotide; CTT chr2 60550075 60550096 60550092 60550097 +
tgcatgggggtgagggggtgga

SEQ ID NO: 208985 - DNA, 22 bp, Artificial Sequence
  Synthetic oligonucleotide; TTT chr2 60550076 60550097 60550093 60550098 +
gcatgggggtgagggggtggaa

SEQ ID NO: 208986 - DNA, 22 bp, Artificial Sequence
  Synthetic oligonucleotide; TTG chr2 60550077 60550098 60550094 60550099 +
catgggggtgagggggtggaag

SEQ ID NO: 208987 - DNA, 22 bp, Artificial Sequence
  Synthetic oligonucleotide; CTG chr2 60550110 60550131 60550127 60550132 +
gagaccaagtgcaaacttgcca

SEQ ID NO: 208988 - DNA, 22 bp, Artificial Sequence
  Synthetic oligonucleotide; CTT chr2 60550128 60550149 60550145 60550150 +
gccatatccccctcttcggcca

SEQ ID NO: 208989 - DNA, 22 bp, Artificial Sequence
  Synthetic oligonucleotide; TTG chr2 60550129 60550150 60550146 60550151 +
ccatatccccctcttcggccat

SEQ ID NO: 208990 - DNA, 22 bp, Artificial Sequence
  Synthetic oligonucleotide; CTC chr2 60550142 60550163 60550159 60550164 +
ttcggccatgccccgaagccct

SEQ ID NO: 208991 - DNA, 22 bp, Artificial Sequence
  Synthetic oligonucleotide; CTT chr2 60550144 60550165 60550161 60550166 +
cggccatgccccgaagccctag

SEQ ID NO: 208992 - DNA, 22 bp, Artificial Sequence
  Synthetic oligonucleotide; TTC chr2 60550145 60550166 60550162 60550167 +
ggccatgccccgaagccctaga

SEQ ID NO: 208993 - DNA, 22 bp, Artificial Sequence
  Synthetic oligonucleotide; CTA chr2 60550165 60550186 60550182 60550187 +
gagcgcgcactcccggttcctc

SEQ ID NO: 208994 - DNA, 22 bp, Artificial Sequence
  Synthetic oligonucleotide; CTC chr2 60550177 60550198 60550194 60550199 +
ccggttcctccctaccaaaaat

SEQ ID NO: 208995 - DNA, 22 bp, Artificial Sequence
  Synthetic oligonucleotide; TTC chr2 60550184 60550205 60550201 60550206 +
ctccctaccaaaaatgccggcc

SEQ ID NO: 208996 - DNA, 22 bp, Artificial Sequence
  Synthetic oligonucleotide; CTC chr2 60550187 60550208 60550204 60550209 +
cctaccaaaaatgccggccccg

SEQ ID NO: 208997 - DNA, 22 bp, Artificial Sequence
  Synthetic oligonucleotide; CTA chr2 60550191 60550212 60550208 60550213 +
ccaaaaatgccggccccgaaag

SEQ ID NO: 208998 - DNA, 22 bp, Artificial Sequence
  Synthetic oligonucleotide; CTG chr2 60550226 60550247 60550243 60550248 +
caccgtgctccgagcccggcgc

SEQ ID NO: 208999 - DNA, 22 bp, Artificial Sequence
  Synthetic oligonucleotide; CTC chr2 60550236 60550257 60550253 60550258 +
cgagcccggcgcgcgctggtct

SEQ ID NO: 209000 - DNA, 22 bp, Artificial Sequence
  Synthetic oligonucleotide; CTG chr2 60550254 60550275 60550271 60550276 +
gtctcagctcgcgcacgggggt

SEQ ID NO: 209001 - DNA, 22 bp, Artificial Sequence
  Synthetic oligonucleotide; CTC chr2 60550259 60550280 60550276 60550281 +
agctcgcgcacgggggtgtcgg

SEQ ID NO: 209002 - DNA, 22 bp, Artificial Sequence
  Synthetic oligonucleotide; CTC chr2 60550264 60550285 60550281 60550286 +
gcgcacgggggtgtcggccgcg

SEQ ID NO: 209003 - DNA, 22 bp, Artificial Sequence
  Synthetic oligonucleotide; CTT chr2 60550299 60550320 60550316 60550321 +
ctccgcggccccggccagaagc

SEQ ID NO: 209004 - DNA, 22 bp, Artificial Sequence
  Synthetic oligonucleotide; TTC chr2 60550300 60550321 60550317 60550322 +
tccgcggccccggccagaagca

SEQ ID NO: 209005 - DNA, 22 bp, Artificial Sequence
  Synthetic oligonucleotide; CTC chr2 60550302 60550323 60550319 60550324 +
cgcggccccggccagaagcatt

SEQ ID NO: 209006 - DNA, 22 bp, Artificial Sequence
  Synthetic oligonucleotide; TTT chr2 60550325 60550346 60550342 60550347 +
ttaaagtcaaaatgaagaacaa

SEQ ID NO: 209007 - DNA, 22 bp, Artificial Sequence
  Synthetic oligonucleotide; TTT chr2 60550326 60550347 60550343 60550348 +
taaagtcaaaatgaagaacaaa

SEQ ID NO: 209008 - DNA, 22 bp, Artificial Sequence
  Synthetic oligonucleotide; TTT chr2 60550327 60550348 60550344 60550349 +
aaagtcaaaatgaagaacaaag

SEQ ID NO: 209009 - DNA, 22 bp, Artificial Sequence
  Synthetic oligonucleotide; TTA chr2 60550328 60550349 60550345 60550350 +
aagtcaaaatgaagaacaaaga

SEQ ID NO: 209010 - DNA, 22 bp, Artificial Sequence
  Synthetic oligonucleotide; TTC chr2 60550383 60550404 60550400 60550405 +
tgcctaaccgttctttcccccc

SEQ ID NO: 209011 - DNA, 22 bp, Artificial Sequence
  Synthetic oligonucleotide; CTG chr2 60550385 60550406 60550402 60550407 +
cctaaccgttctttccccccac

SEQ ID NO: 209012 - DNA, 22 bp, Artificial Sequence
  Synthetic oligonucleotide; CTA chr2 60550389 60550410 60550406 60550411 +
accgttctttccccccaccccc

SEQ ID NO: 209013 - DNA, 22 bp, Artificial Sequence
  Synthetic oligonucleotide; TTC chr2 60550396 60550417 60550413 60550418 +
tttccccccacccccaccctcg

SEQ ID NO: 209014 - DNA, 22 bp, Artificial Sequence
  Synthetic oligonucleotide; CTT chr2 60550398 60550419 60550415 60550420 +
tccccccacccccaccctcgca

SEQ ID NO: 209015 - DNA, 22 bp, Artificial Sequence
  Synthetic oligonucleotide; TTT chr2 60550399 60550420 60550416 60550421 +
ccccccacccccaccctcgcaa

SEQ ID NO: 209016 - DNA, 22 bp, Artificial Sequence
  Synthetic oligonucleotide; TTC chr2 60550400 60550421 60550417 60550422 +
cccccacccccaccctcgcaaa

SEQ ID NO: 209017 - DNA, 22 bp, Artificial Sequence
  Synthetic oligonucleotide; CTC chr2 60550417 60550438 60550434 60550439 +
gcaaagctcgttcctccccgga

SEQ ID NO: 209018 - DNA, 22 bp, Artificial Sequence
  Synthetic oligonucleotide; CTC chr2 60550426 60550447 60550443 60550448 +
gttcctccccggacgagaatcg

SEQ ID NO: 209019 - DNA, 22 bp, Artificial Sequence
  Synthetic oligonucleotide; TTC chr2 60550430 60550451 60550447 60550452 +
ctccccggacgagaatcgccgg

SEQ ID NO: 209020 - DNA, 22 bp, Artificial Sequence
  Synthetic oligonucleotide; CTC chr2 60550433 60550454 60550450 60550455 +
cccggacgagaatcgccgggca

SEQ ID NO: 209021 - DNA, 22 bp, Artificial Sequence
  Synthetic oligonucleotide; CTC chr2 60550472 60550493 60550489 60550494 +
tggtacaggttcaagttcgctg

SEQ ID NO: 209022 - DNA, 22 bp, Artificial Sequence
  Synthetic oligonucleotide; CTG chr2 60550474 60550495 60550491 60550496 +
gtacaggttcaagttcgctgag

SEQ ID NO: 209023 - DNA, 22 bp, Artificial Sequence
  Synthetic oligonucleotide; TTC chr2 60550484 60550505 60550501 60550506 +
aagttcgctgagctttcttgat

SEQ ID NO: 209024 - DNA, 22 bp, Artificial Sequence
  Synthetic oligonucleotide; TTC chr2 60550490 60550511 60550507 60550512 +
gctgagctttcttgatcttgtt

SEQ ID NO: 209025 - DNA, 22 bp, Artificial Sequence
  Synthetic oligonucleotide; CTG chr2 60550494 60550515 60550511 60550516 +
agctttcttgatcttgttctgc

SEQ ID NO: 209026 - DNA, 22 bp, Artificial Sequence
  Synthetic oligonucleotide; CTT chr2 60550499 60550520 60550516 60550521 +
tcttgatcttgttctgcctcct

SEQ ID NO: 209027 - DNA, 22 bp, Artificial Sequence
  Synthetic oligonucleotide; TTT chr2 60550500 60550521 60550517 60550522 +
cttgatcttgttctgcctccta

SEQ ID NO: 209028 - DNA, 22 bp, Artificial Sequence
  Synthetic oligonucleotide; TTC chr2 60550501 60550522 60550518 60550523 +
ttgatcttgttctgcctcctag

SEQ ID NO: 209029 - DNA, 22 bp, Artificial Sequence
  Synthetic oligonucleotide; CTT chr2 60550503 60550524 60550520 60550525 +
gatcttgttctgcctcctagcg

SEQ ID NO: 209030 - DNA, 22 bp, Artificial Sequence
  Synthetic oligonucleotide; TTG chr2 60550504 60550525 60550521 60550526 +
atcttgttctgcctcctagcga

SEQ ID NO: 209031 - DNA, 22 bp, Artificial Sequence
  Synthetic oligonucleotide; CTT chr2 60550509 60550530 60550526 60550531 +
gttctgcctcctagcgaccgaa

SEQ ID NO: 209032 - DNA, 22 bp, Artificial Sequence
  Synthetic oligonucleotide; TTG chr2 60550510 60550531 60550527 60550532 +
ttctgcctcctagcgaccgaat

SEQ ID NO: 209033 - DNA, 22 bp, Artificial Sequence
  Synthetic oligonucleotide; TTC chr2 60550513 60550534 60550530 60550535 +
tgcctcctagcgaccgaatggc

SEQ ID NO: 209034 - DNA, 22 bp, Artificial Sequence
  Synthetic oligonucleotide; CTG chr2 60550515 60550536 60550532 60550537 +
cctcctagcgaccgaatggctc

SEQ ID NO: 209035 - DNA, 22 bp, Artificial Sequence
  Synthetic oligonucleotide; CTC chr2 60550519 60550540 60550536 60550541 +
ctagcgaccgaatggctcattc

SEQ ID NO: 209036 - DNA, 22 bp, Artificial Sequence
  Synthetic oligonucleotide; CTA chr2 60550522 60550543 60550539 60550544 +
gcgaccgaatggctcattcagc

SEQ ID NO: 209037 - DNA, 22 bp, Artificial Sequence
  Synthetic oligonucleotide; CTC chr2 60550537 60550558 60550554 60550559 +
attcagcccacatagcagaggc

SEQ ID NO: 209038 - DNA, 22 bp, Artificial Sequence
  Synthetic oligonucleotide; TTC chr2 60550541 60550562 60550558 60550563 +
agcccacatagcagaggcgggg

SEQ ID NO: 209039 - DNA, 22 bp, Artificial Sequence
  Synthetic oligonucleotide; CTG chr2 60550581 60550602 60550598 60550603 +
aggaccgggatggctcctgccc

SEQ ID NO: 209040 - DNA, 22 bp, Artificial Sequence
  Synthetic oligonucleotide; CTC chr2 60550597 60550618 60550614 60550619 +
ctgccccctctgagcacccaga

SEQ ID NO: 209041 - DNA, 22 bp, Artificial Sequence
  Synthetic oligonucleotide; CTG chr2 60550600 60550621 60550617 60550622 +
ccccctctgagcacccagaaaa

SEQ ID NO: 209042 - DNA, 22 bp, Artificial Sequence
  Synthetic oligonucleotide; CTC chr2 60550607 60550628 60550624 60550629 +
tgagcacccagaaaatgaggac

SEQ ID NO: 209043 - DNA, 22 bp, Artificial Sequence
  Synthetic oligonucleotide; CTG chr2 60550609 60550630 60550626 60550631 +
agcacccagaaaatgaggacag

SEQ ID NO: 209044 - DNA, 22 bp, Artificial Sequence
  Synthetic oligonucleotide; CTC chr2 60550648 60550669 60550665 60550670 +
accccctcccaaactggccctt

SEQ ID NO: 209045 - DNA, 22 bp, Artificial Sequence
  Synthetic oligonucleotide; CTC chr2 60550656 60550677 60550673 60550678 +
ccaaactggccctttaaccccg

SEQ ID NO: 209046 - DNA, 22 bp, Artificial Sequence
  Synthetic oligonucleotide; CTG chr2 60550664 60550685 60550681 60550686 +
gccctttaaccccgggacagga

SEQ ID NO: 209047 - DNA, 22 bp, Artificial Sequence
  Synthetic oligonucleotide; CTT chr2 60550670 60550691 60550687 60550692 +
taaccccgggacaggaggaggg

SEQ ID NO: 209048 - DNA, 22 bp, Artificial Sequence
  Synthetic oligonucleotide; TTT chr2 60550671 60550692 60550688 60550693 +
aaccccgggacaggaggagggg

SEQ ID NO: 209049 - DNA, 22 bp, Artificial Sequence
  Synthetic oligonucleotide; TTA chr2 60550672 60550693 60550689 60550694 +
accccgggacaggaggaggggg

SEQ ID NO: 209050 - DNA, 22 bp, Artificial Sequence
  Synthetic oligonucleotide; CTA chr2 60550699 60550720 60550716 60550721 +
accctcccagcctagagtgtcc

SEQ ID NO: 209051 - DNA, 22 bp, Artificial Sequence
  Synthetic oligonucleotide; CTC chr2 60550705 60550726 60550722 60550727 +
ccagcctagagtgtcccaagat

SEQ ID NO: 209052 - DNA, 22 bp, Artificial Sequence
  Synthetic oligonucleotide; CTA chr2 60550713 60550734 60550730 60550735 +
gagtgtcccaagatggacccag

SEQ ID NO: 209053 - DNA, 22 bp, Artificial Sequence
  Synthetic oligonucleotide; CTG chr2 60550764 60550785 60550781 60550786 +
gactgcgcgccccggtctgtcc

SEQ ID NO: 209054 - DNA, 22 bp, Artificial Sequence
  Synthetic oligonucleotide; CTG chr2 60550769 60550790 60550786 60550791 +
cgcgccccggtctgtcctttga

SEQ ID NO: 209055 - DNA, 22 bp, Artificial Sequence
  Synthetic oligonucleotide; CTG chr2 60550783 60550804 60550800 60550805 +
tcctttgagcccccactgcatc

SEQ ID NO: 209056 - DNA, 22 bp, Artificial Sequence
  Synthetic oligonucleotide; CTT chr2 60550788 60550809 60550805 60550810 +
tgagcccccactgcatccttcc

SEQ ID NO: 209057 - DNA, 22 bp, Artificial Sequence
  Synthetic oligonucleotide; TTT chr2 60550789 60550810 60550806 60550811 +
gagcccccactgcatccttccg

SEQ ID NO: 209058 - DNA, 22 bp, Artificial Sequence
  Synthetic oligonucleotide; TTG chr2 60550790 60550811 60550807 60550812 +
agcccccactgcatccttccga

SEQ ID NO: 209059 - DNA, 22 bp, Artificial Sequence
  Synthetic oligonucleotide; CTG chr2 60550801 60550822 60550818 60550823 +
catccttccgaagaagggcctg

SEQ ID NO: 209060 - DNA, 22 bp, Artificial Sequence
  Synthetic oligonucleotide; CTT chr2 60550808 60550829 60550825 60550830 +
ccgaagaagggcctgactttcc

SEQ ID NO: 209061 - DNA, 22 bp, Artificial Sequence
  Synthetic oligonucleotide; TTC chr2 60550809 60550830 60550826 60550831 +
cgaagaagggcctgactttccc

SEQ ID NO: 209062 - DNA, 22 bp, Artificial Sequence
  Synthetic oligonucleotide; CTG chr2 60550823 60550844 60550840 60550845 +
actttcccgagtcctgcgaaca

SEQ ID NO: 209063 - DNA, 22 bp, Artificial Sequence
  Synthetic oligonucleotide; CTT chr2 60550827 60550848 60550844 60550849 +
tcccgagtcctgcgaacactgc

SEQ ID NO: 209064 - DNA, 22 bp, Artificial Sequence
  Synthetic oligonucleotide; TTT chr2 60550828 60550849 60550845 60550850 +
cccgagtcctgcgaacactgcc

SEQ ID NO: 209065 - DNA, 22 bp, Artificial Sequence
  Synthetic oligonucleotide; TTC chr2 60550829 60550850 60550846 60550851 +
ccgagtcctgcgaacactgccc

SEQ ID NO: 209066 - DNA, 22 bp, Artificial Sequence
  Synthetic oligonucleotide; CTG chr2 60550839 60550860 60550856 60550861 +
cgaacactgcccttccttcccg

SEQ ID NO: 209067 - DNA, 22 bp, Artificial Sequence
  Synthetic oligonucleotide; CTG chr2 60550848 60550869 60550865 60550870 +
cccttccttcccgccggtacct

SEQ ID NO: 209068 - DNA, 22 bp, Artificial Sequence
  Synthetic oligonucleotide; CTT chr2 60550853 60550874 60550870 60550875 +
ccttcccgccggtacctggccg

SEQ ID NO: 209069 - DNA, 22 bp, Artificial Sequence
  Synthetic oligonucleotide; TTC chr2 60550854 60550875 60550871 60550876 +
cttcccgccggtacctggccgg

SEQ ID NO: 209070 - DNA, 22 bp, Artificial Sequence
  Synthetic oligonucleotide; CTT chr2 60550857 60550878 60550874 60550879 +
cccgccggtacctggccgggct

SEQ ID NO: 209071 - DNA, 22 bp, Artificial Sequence
  Synthetic oligonucleotide; TTC chr2 60550858 60550879 60550875 60550880 +
ccgccggtacctggccgggctg

SEQ ID NO: 209072 - DNA, 22 bp, Artificial Sequence
  Synthetic oligonucleotide; CTG chr2 60550871 60550892 60550888 60550893 +
gccgggctgtaacttcacaccg

SEQ ID NO: 209073 - DNA, 22 bp, Artificial Sequence
  Synthetic oligonucleotide; CTG chr2 60550880 60550901 60550897 60550902 +
taacttcacaccgccgcgcgcc

SEQ ID NO: 209074 - DNA, 22 bp, Artificial Sequence
  Synthetic oligonucleotide; CTT chr2 60550886 60550907 60550903 60550908 +
cacaccgccgcgcgccgcgtct

SEQ ID NO: 209075 - DNA, 22 bp, Artificial Sequence
  Synthetic oligonucleotide; TTC chr2 60550887 60550908 60550904 60550909 +
acaccgccgcgcgccgcgtctg

SEQ ID NO: 209076 - DNA, 22 bp, Artificial Sequence
  Synthetic oligonucleotide; CTG chr2 60550909 60550930 60550926 60550931 +
atccgcatccggcgcggccggg

SEQ ID NO: 209077 - DNA, 22 bp, Artificial Sequence
  Synthetic oligonucleotide; TTG chr2 60550938 60550959 60550955 60550960 +
ggggcgggggagagcggcgagg

SEQ ID NO: 209078 - DNA, 22 bp, Artificial Sequence
  Synthetic oligonucleotide; CTT chr2 60551020 60551041 60551037 60551042 +
ccgaagtgtgtgacaagttcca

SEQ ID NO: 209079 - DNA, 22 bp, Artificial Sequence
  Synthetic oligonucleotide; TTC chr2 60551021 60551042 60551038 60551043 +
cgaagtgtgtgacaagttccag

SEQ ID NO: 209080 - DNA, 22 bp, Artificial Sequence
  Synthetic oligonucleotide; TTC chr2 60551040 60551061 60551057 60551062 +
cagggcccagtgaaaaattaaa

SEQ ID NO: 209081 - DNA, 22 bp, Artificial Sequence
  Synthetic oligonucleotide; TTA chr2 60551060 60551081 60551077 60551082 +
aattccctgtgcgcacccccca

SEQ ID NO: 209082 - DNA, 22 bp, Artificial Sequence
  Synthetic oligonucleotide; TTC chr2 60551065 60551086 60551082 60551087 +
cctgtgcgcaccccccaccacc

SEQ ID NO: 209083 - DNA, 22 bp, Artificial Sequence
  Synthetic oligonucleotide; CTG chr2 60551069 60551090 60551086 60551091 +
tgcgcaccccccaccaccaccc

SEQ ID NO: 209084 - DNA, 22 bp, Artificial Sequence
  Synthetic oligonucleotide; CTT chr2 60551094 60551115 60551111 60551116 +
taaaaaaacacagaaccaagta

SEQ ID NO: 209085 - DNA, 22 bp, Artificial Sequence
  Synthetic oligonucleotide; TTT chr2 60551095 60551116 60551112 60551117 +
aaaaaaacacagaaccaagtat

SEQ ID NO: 209086 - DNA, 22 bp, Artificial Sequence
  Synthetic oligonucleotide; TTA chr2 60551096 60551117 60551113 60551118 +
aaaaaacacagaaccaagtata

SEQ ID NO: 209087 - DNA, 22 bp, Artificial Sequence
  Synthetic oligonucleotide; CTT chr2 60551128 60551149 60551145 60551150 +
taaaactgcatcaaaaatttaa

SEQ ID NO: 209088 - DNA, 22 bp, Artificial Sequence
  Synthetic oligonucleotide; TTT chr2 60551129 60551150 60551146 60551151 +
aaaactgcatcaaaaatttaaa

SEQ ID NO: 209089 - DNA, 22 bp, Artificial Sequence
  Synthetic oligonucleotide; TTA chr2 60551130 60551151 60551147 60551152 +
aaactgcatcaaaaatttaaag

SEQ ID NO: 209090 - DNA, 22 bp, Artificial Sequence
  Synthetic oligonucleotide; CTG chr2 60551136 60551157 60551153 60551158 +
catcaaaaatttaaagtaagaa

SEQ ID NO: 209091 - DNA, 22 bp, Artificial Sequence
  Synthetic oligonucleotide; TTT chr2 60551148 60551169 60551165 60551170 +
aaagtaagaatcataaattgag

SEQ ID NO: 209092 - DNA, 22 bp, Artificial Sequence
  Synthetic oligonucleotide; TTA chr2 60551149 60551170 60551166 60551171 +
aagtaagaatcataaattgagt

SEQ ID NO: 209093 - DNA, 22 bp, Artificial Sequence
  Synthetic oligonucleotide; TTG chr2 60551168 60551189 60551185 60551190 +
agtagggggggaatgtgggccc

SEQ ID NO: 209094 - DNA, 22 bp, Artificial Sequence
  Synthetic oligonucleotide; CTC chr2 60551192 60551213 60551209 60551214 +
acgcctttctttcccttgctgc

SEQ ID NO: 209095 - DNA, 22 bp, Artificial Sequence
  Synthetic oligonucleotide; CTT chr2 60551199 60551220 60551216 60551221 +
tctttcccttgctgccaaactt

SEQ ID NO: 209096 - DNA, 22 bp, Artificial Sequence
  Synthetic oligonucleotide; TTT chr2 60551200 60551221 60551217 60551222 +
ctttcccttgctgccaaacttt

SEQ ID NO: 209097 - DNA, 22 bp, Artificial Sequence
  Synthetic oligonucleotide; TTC chr2 60551201 60551222 60551218 60551223 +
tttcccttgctgccaaactttc

SEQ ID NO: 209098 - DNA, 22 bp, Artificial Sequence
  Synthetic oligonucleotide; CTT chr2 60551203 60551224 60551220 60551225 +
tcccttgctgccaaactttcct

SEQ ID NO: 209099 - DNA, 22 bp, Artificial Sequence
  Synthetic oligonucleotide; TTT chr2 60551204 60551225 60551221 60551226 +
cccttgctgccaaactttccta

SEQ ID NO: 209100 - DNA, 22 bp, Artificial Sequence
  Synthetic oligonucleotide; TTC chr2 60551205 60551226 60551222 60551227 +
ccttgctgccaaactttcctaa

SEQ ID NO: 209101 - DNA, 22 bp, Artificial Sequence
  Synthetic oligonucleotide; CTT chr2 60551209 60551230 60551226 60551231 +
gctgccaaactttcctaagtgc

SEQ ID NO: 209102 - DNA, 22 bp, Artificial Sequence
  Synthetic oligonucleotide; TTG chr2 60551210 60551231 60551227 60551232 +
ctgccaaactttcctaagtgcc

SEQ ID NO: 209103 - DNA, 22 bp, Artificial Sequence
  Synthetic oligonucleotide; CTG chr2 60551213 60551234 60551230 60551235 +
ccaaactttcctaagtgcccac

SEQ ID NO: 209104 - DNA, 22 bp, Artificial Sequence
  Synthetic oligonucleotide; CTT chr2 60551221 60551242 60551238 60551243 +
tcctaagtgcccaccgcccgcc

SEQ ID NO: 209105 - DNA, 22 bp, Artificial Sequence
  Synthetic oligonucleotide; TTT chr2 60551222 60551243 60551239 60551244 +
cctaagtgcccaccgcccgcct

SEQ ID NO: 209106 - DNA, 22 bp, Artificial Sequence
  Synthetic oligonucleotide; TTC chr2 60551223 60551244 60551240 60551245 +
ctaagtgcccaccgcccgcctt

SEQ ID NO: 209107 - DNA, 22 bp, Artificial Sequence
  Synthetic oligonucleotide; CTA chr2 60551226 60551247 60551243 60551248 +
agtgcccaccgcccgcctttcc

SEQ ID NO: 209108 - DNA, 22 bp, Artificial Sequence
  Synthetic oligonucleotide; CTT chr2 60551245 60551266 60551262 60551267 +
tccaggcgcagtcagcgggaga

SEQ ID NO: 209109 - DNA, 22 bp, Artificial Sequence
  Synthetic oligonucleotide; TTT chr2 60551246 60551267 60551263 60551268 +
ccaggcgcagtcagcgggagac

SEQ ID NO: 209110 - DNA, 22 bp, Artificial Sequence
  Synthetic oligonucleotide; TTC chr2 60551247 60551268 60551264 60551269 +
caggcgcagtcagcgggagaca

SEQ ID NO: 209111 - DNA, 22 bp, Artificial Sequence
  Synthetic oligonucleotide; CTC chr2 60551286 60551307 60551303 60551308 +
ttatacagactcacaagaacct

SEQ ID NO: 209112 - DNA, 22 bp, Artificial Sequence
  Synthetic oligonucleotide; CTT chr2 60551288 60551309 60551305 60551310 +
atacagactcacaagaacctca

SEQ ID NO: 209113 - DNA, 22 bp, Artificial Sequence
  Synthetic oligonucleotide; TTA chr2 60551289 60551310 60551306 60551311 +
tacagactcacaagaacctcag

SEQ ID NO: 209114 - DNA, 22 bp, Artificial Sequence
  Synthetic oligonucleotide; CTC chr2 60551298 60551319 60551315 60551320 +
acaagaacctcagaccaagcca

SEQ ID NO: 209115 - DNA, 22 bp, Artificial Sequence
  Synthetic oligonucleotide; CTC chr2 60551309 60551330 60551326 60551331 +
agaccaagccaggcctggggaa

SEQ ID NO: 209116 - DNA, 22 bp, Artificial Sequence
  Synthetic oligonucleotide; CTG chr2 60551326 60551347 60551343 60551348 +
gggaagagggcaagacccaaag

SEQ ID NO: 209117 - DNA, 22 bp, Artificial Sequence
  Synthetic oligonucleotide; CTC chr2 60551360 60551381 60551377 60551382 +
ggggtcccaggatccagcgccc

SEQ ID NO: 209118 - DNA, 22 bp, Artificial Sequence
  Synthetic oligonucleotide; CTT chr2 60551384 60551405 60551401 60551406 +
aaaatgcacactcaaacacact

SEQ ID NO: 209119 - DNA, 22 bp, Artificial Sequence
  Synthetic oligonucleotide; TTA chr2 60551385 60551406 60551402 60551407 +
aaatgcacactcaaacacactt

SEQ ID NO: 209120 - DNA, 22 bp, Artificial Sequence
  Synthetic oligonucleotide; CTC chr2 60551397 60551418 60551414 60551419 +
aaacacacttctcccctgccct

SEQ ID NO: 209121 - DNA, 22 bp, Artificial Sequence
  Synthetic oligonucleotide; CTT chr2 60551407 60551428 60551424 60551429 +
ctcccctgcccttccccggcaa

SEQ ID NO: 209122 - DNA, 22 bp, Artificial Sequence
  Synthetic oligonucleotide; TTC chr2 60551408 60551429 60551425 60551430 +
tcccctgcccttccccggcaac

SEQ ID NO: 209123 - DNA, 22 bp, Artificial Sequence
  Synthetic oligonucleotide; CTC chr2 60551410 60551431 60551427 60551432 +
ccctgcccttccccggcaaccc

SEQ ID NO: 209124 - DNA, 22 bp, Artificial Sequence
  Synthetic oligonucleotide; CTG chr2 60551415 60551436 60551432 60551437 +
cccttccccggcaaccccgcca

SEQ ID NO: 209125 - DNA, 22 bp, Artificial Sequence
  Synthetic oligonucleotide; CTT chr2 60551420 60551441 60551437 60551442 +
ccccggcaaccccgccacctgg

SEQ ID NO: 209126 - DNA, 22 bp, Artificial Sequence
  Synthetic oligonucleotide; TTC chr2 60551421 60551442 60551438 60551443 +
cccggcaaccccgccacctggc

SEQ ID NO: 209127 - DNA, 22 bp, Artificial Sequence
  Synthetic oligonucleotide; CTG chr2 60551441 60551462 60551458 60551463 +
gcctagtcgtgctcggggcgca

SEQ ID NO: 209128 - DNA, 22 bp, Artificial Sequence
  Synthetic oligonucleotide; CTA chr2 60551446 60551467 60551463 60551468 +
gtcgtgctcggggcgcaggggg

SEQ ID NO: 209129 - DNA, 22 bp, Artificial Sequence
  Synthetic oligonucleotide; CTC chr2 60551455 60551476 60551472 60551477 +
ggggcgcagggggactggtgac

SEQ ID NO: 209130 - DNA, 22 bp, Artificial Sequence
  Synthetic oligonucleotide; CTG chr2 60551472 60551493 60551489 60551494 +
gtgaccagaccgggcggggtgg

SEQ ID NO: 209131 - DNA, 22 bp, Artificial Sequence
  Synthetic oligonucleotide; CTC chr2 60551525 60551546 60551542 60551547 +
ctcgcggtcccgagctgtggac

SEQ ID NO: 209132 - DNA, 22 bp, Artificial Sequence
  Synthetic oligonucleotide; CTC chr2 60551528 60551549 60551545 60551550 +
gcggtcccgagctgtggacaag

SEQ ID NO: 209133 - DNA, 22 bp, Artificial Sequence
  Synthetic oligonucleotide; CTG chr2 60551542 60551563 60551559 60551564 +
tggacaagagacgtctgagaaa

SEQ ID NO: 209134 - DNA, 22 bp, Artificial Sequence
  Synthetic oligonucleotide; CTG chr2 60551559 60551580 60551576 60551581 +
agaaagtacccagggcggaggg

SEQ ID NO: 209135 - DNA, 22 bp, Artificial Sequence
  Synthetic oligonucleotide; CTT chr2 60551604 60551625 60551621 60551626 +
ttacagttgccctgcaaaataa

SEQ ID NO: 209136 - DNA, 22 bp, Artificial Sequence
  Synthetic oligonucleotide; TTT chr2 60551605 60551626 60551622 60551627 +
tacagttgccctgcaaaataaa

SEQ ID NO: 209137 - DNA, 22 bp, Artificial Sequence
  Synthetic oligonucleotide; TTT chr2 60551606 60551627 60551623 60551628 +
acagttgccctgcaaaataaaa

SEQ ID NO: 209138 - DNA, 22 bp, Artificial Sequence
  Synthetic oligonucleotide; TTA chr2 60551607 60551628 60551624 60551629 +
cagttgccctgcaaaataaaaa

SEQ ID NO: 209139 - DNA, 22 bp, Artificial Sequence
  Synthetic oligonucleotide; TTG chr2 60551613 60551634 60551630 60551635 +
ccctgcaaaataaaaatgcttt

SEQ ID NO: 209140 - DNA, 22 bp, Artificial Sequence
  Synthetic oligonucleotide; CTG chr2 60551618 60551639 60551635 60551640 +
caaaataaaaatgctttgcaaa

SEQ ID NO: 209141 - DNA, 22 bp, Artificial Sequence
  Synthetic oligonucleotide; CTT chr2 60551634 60551655 60551651 60551656 +
tgcaaagccgagtttcacccag

SEQ ID NO: 209142 - DNA, 22 bp, Artificial Sequence
  Synthetic oligonucleotide; TTT chr2 60551635 60551656 60551652 60551657 +
gcaaagccgagtttcacccagc

SEQ ID NO: 209143 - DNA, 22 bp, Artificial Sequence
  Synthetic oligonucleotide; TTG chr2 60551636 60551657 60551653 60551658 +
caaagccgagtttcacccagcc

SEQ ID NO: 209144 - DNA, 22 bp, Artificial Sequence
  Synthetic oligonucleotide; TTT chr2 60551649 60551670 60551666 60551671 +
cacccagccgatttcgcagtct

SEQ ID NO: 209145 - DNA, 22 bp, Artificial Sequence
  Synthetic oligonucleotide; TTC chr2 60551650 60551671 60551667 60551672 +
acccagccgatttcgcagtctg

SEQ ID NO: 209146 - DNA, 22 bp, Artificial Sequence
  Synthetic oligonucleotide; TTT chr2 60551663 60551684 60551680 60551685 +
cgcagtctgggaggtcgagaag

SEQ ID NO: 209147 - DNA, 22 bp, Artificial Sequence
  Synthetic oligonucleotide; TTC chr2 60551664 60551685 60551681 60551686 +
gcagtctgggaggtcgagaaga

SEQ ID NO: 209148 - DNA, 22 bp, Artificial Sequence
  Synthetic oligonucleotide; CTG chr2 60551672 60551693 60551689 60551694 +
ggaggtcgagaagaggtctcgg

SEQ ID NO: 209149 - DNA, 22 bp, Artificial Sequence
  Synthetic oligonucleotide; CTC chr2 60551692 60551713 60551709 60551714 +
ggcattgtgctgggggcggacc

SEQ ID NO: 209150 - DNA, 22 bp, Artificial Sequence
  Synthetic oligonucleotide; TTG chr2 60551699 60551720 60551716 60551721 +
tgctgggggcggaccaggacca

SEQ ID NO: 209151 - DNA, 22 bp, Artificial Sequence
  Synthetic oligonucleotide; CTG chr2 60551704 60551725 60551721 60551726 +
ggggcggaccaggaccacgggc

SEQ ID NO: 209152 - DNA, 22 bp, Artificial Sequence
  Synthetic oligonucleotide; CTG chr2 60551733 60551754 60551750 60551755 +
gcgcggagacactgcgtggcct

SEQ ID NO: 209153 - DNA, 22 bp, Artificial Sequence
  Synthetic oligonucleotide; CTG chr2 60551747 60551768 60551764 60551769 +
cgtggcctgccgccgtgcctgg

SEQ ID NO: 209154 - DNA, 22 bp, Artificial Sequence
  Synthetic oligonucleotide; CTG chr2 60551756 60551777 60551773 60551778 +
ccgccgtgcctggcgggtgggc

SEQ ID NO: 209155 - DNA, 22 bp, Artificial Sequence
  Synthetic oligonucleotide; CTG chr2 60551768 60551789 60551785 60551790 +
gcgggtgggcgccgggcgccgg

SEQ ID NO: 209156 - DNA, 22 bp, Artificial Sequence
  Synthetic oligonucleotide; CTG chr2 60551808 60551829 60551825 60551830 +
ggctggggcgcggcgaggtcgg

SEQ ID NO: 209157 - DNA, 22 bp, Artificial Sequence
  Synthetic oligonucleotide; CTG chr2 60551813 60551834 60551830 60551835 +
gggcgcggcgaggtcgggcaag

SEQ ID NO: 209158 - DNA, 22 bp, Artificial Sequence
  Synthetic oligonucleotide; CTG chr2 60551868 60551889 60551885 60551890 +
ctccggggctgccgcgccgcgc

SEQ ID NO: 209159 - DNA, 22 bp, Artificial Sequence
  Synthetic oligonucleotide; CTC chr2 60551871 60551892 60551888 60551893 +
cggggctgccgcgccgcgctcg

SEQ ID NO: 209160 - DNA, 22 bp, Artificial Sequence
  Synthetic oligonucleotide; CTG chr2 60551879 60551900 60551896 60551901 +
ccgcgccgcgctcggtcctctg

SEQ ID NO: 209161 - DNA, 22 bp, Artificial Sequence
  Synthetic oligonucleotide; CTC chr2 60551892 60551913 60551909 60551914 +
ggtcctctgtctgtttgttggc

SEQ ID NO: 209162 - DNA, 22 bp, Artificial Sequence
  Synthetic oligonucleotide; CTC chr2 60551899 60551920 60551916 60551921 +
tgtctgtttgttggcaggaggc

SEQ ID NO: 209163 - DNA, 22 bp, Artificial Sequence
  Synthetic oligonucleotide; CTG chr2 60551901 60551922 60551918 60551923 +
tctgtttgttggcaggaggctc

SEQ ID NO: 209164 - DNA, 22 bp, Artificial Sequence
  Synthetic oligonucleotide; CTG chr2 60551905 60551926 60551922 60551927 +
tttgttggcaggaggctcccgc

SEQ ID NO: 209165 - DNA, 22 bp, Artificial Sequence
  Synthetic oligonucleotide; TTT chr2 60551908 60551929 60551925 60551930 +
gttggcaggaggctcccgcaca

SEQ ID NO: 209166 - DNA, 22 bp, Artificial Sequence
  Synthetic oligonucleotide; TTG chr2 60551909 60551930 60551926 60551931 +
ttggcaggaggctcccgcacac

SEQ ID NO: 209167 - DNA, 22 bp, Artificial Sequence
  Synthetic oligonucleotide; TTG chr2 60551912 60551933 60551929 60551934 +
gcaggaggctcccgcacacgcg

SEQ ID NO: 209168 - DNA, 22 bp, Artificial Sequence
  Synthetic oligonucleotide; CTC chr2 60551923 60551944 60551940 60551945 +
ccgcacacgcggtgcttgtaaa

SEQ ID NO: 209169 - DNA, 22 bp, Artificial Sequence
  Synthetic oligonucleotide; CTT chr2 60551940 60551961 60551957 60551962 +
gtaaacattcagacacgagatt

SEQ ID NO: 209170 - DNA, 22 bp, Artificial Sequence
  Synthetic oligonucleotide; TTG chr2 60551941 60551962 60551958 60551963 +
taaacattcagacacgagattt

SEQ ID NO: 209171 - DNA, 22 bp, Artificial Sequence
  Synthetic oligonucleotide; TTC chr2 60551950 60551971 60551967 60551972 +
agacacgagatttttcccaatc

SEQ ID NO: 209172 - DNA, 22 bp, Artificial Sequence
  Synthetic oligonucleotide; TTT chr2 60551963 60551984 60551980 60551985 +
ttcccaatcaaaatccacttcc

SEQ ID NO: 209173 - DNA, 22 bp, Artificial Sequence
  Synthetic oligonucleotide; TTT chr2 60551964 60551985 60551981 60551986 +
tcccaatcaaaatccacttcca

SEQ ID NO: 209174 - DNA, 22 bp, Artificial Sequence
  Synthetic oligonucleotide; TTT chr2 60551965 60551986 60551982 60551987 +
cccaatcaaaatccacttccac

SEQ ID NO: 209175 - DNA, 22 bp, Artificial Sequence
  Synthetic oligonucleotide; TTC chr2 60551966 60551987 60551983 60551988 +
ccaatcaaaatccacttccact

SEQ ID NO: 209176 - DNA, 22 bp, Artificial Sequence
  Synthetic oligonucleotide; CTT chr2 60551983 60552004 60552000 60552005 +
ccactttttttgaaaatcttcc

SEQ ID NO: 209177 - DNA, 22 bp, Artificial Sequence
  Synthetic oligonucleotide; TTC chr2 60551984 60552005 60552001 60552006 +
cactttttttgaaaatcttcca

SEQ ID NO: 209178 - DNA, 22 bp, Artificial Sequence
  Synthetic oligonucleotide; CTT chr2 60551989 60552010 60552006 60552011 +
tttttgaaaatcttccaaaaaa

SEQ ID NO: 209179 - DNA, 22 bp, Artificial Sequence
  Synthetic oligonucleotide; TTT chr2 60551990 60552011 60552007 60552012 +
ttttgaaaatcttccaaaaaat

SEQ ID NO: 209180 - DNA, 22 bp, Artificial Sequence
  Synthetic oligonucleotide; TTT chr2 60551991 60552012 60552008 60552013 +
tttgaaaatcttccaaaaaata

SEQ ID NO: 209181 - DNA, 22 bp, Artificial Sequence
  Synthetic oligonucleotide; TTT chr2 60551992 60552013 60552009 60552014 +
ttgaaaatcttccaaaaaatag

SEQ ID NO: 209182 - DNA, 22 bp, Artificial Sequence
  Synthetic oligonucleotide; TTT chr2 60551993 60552014 60552010 60552015 +
tgaaaatcttccaaaaaatagt

SEQ ID NO: 209183 - DNA, 22 bp, Artificial Sequence
  Synthetic oligonucleotide; TTT chr2 60551994 60552015 60552011 60552016 +
gaaaatcttccaaaaaatagta

SEQ ID NO: 209184 - DNA, 22 bp, Artificial Sequence
  Synthetic oligonucleotide; TTG chr2 60551995 60552016 60552012 60552017 +
aaaatcttccaaaaaatagtaa

SEQ ID NO: 209185 - DNA, 22 bp, Artificial Sequence
  Synthetic oligonucleotide; CTT chr2 60552003 60552024 60552020 60552025 +
ccaaaaaatagtaagaggaggg

SEQ ID NO: 209186 - DNA, 22 bp, Artificial Sequence
  Synthetic oligonucleotide; TTC chr2 60552004 60552025 60552021 60552026 +
caaaaaatagtaagaggaggga

SEQ ID NO: 209187 - DNA, 22 bp, Artificial Sequence
  Synthetic oligonucleotide; TTC chr2 60552030 60552051 60552047 60552052 +
ctctctccctctccgtgccgtc

SEQ ID NO: 209188 - DNA, 22 bp, Artificial Sequence
  Synthetic oligonucleotide; CTC chr2 60552033 60552054 60552050 60552055 +
tctccctctccgtgccgtcggc

SEQ ID NO: 209189 - DNA, 22 bp, Artificial Sequence
  Synthetic oligonucleotide; CTC chr2 60552035 60552056 60552052 60552057 +
tccctctccgtgccgtcggcgc

SEQ ID NO: 209190 - DNA, 22 bp, Artificial Sequence
  Synthetic oligonucleotide; CTC chr2 60552037 60552058 60552054 60552059 +
cctctccgtgccgtcggcgccc

SEQ ID NO: 209191 - DNA, 22 bp, Artificial Sequence
  Synthetic oligonucleotide; CTC chr2 60552041 60552062 60552058 60552063 +
tccgtgccgtcggcgccctaag

SEQ ID NO: 209192 - DNA, 22 bp, Artificial Sequence
  Synthetic oligonucleotide; CTC chr2 60552043 60552064 60552060 60552065 +
cgtgccgtcggcgccctaagtt

SEQ ID NO: 209193 - DNA, 22 bp, Artificial Sequence
  Synthetic oligonucleotide; CTA chr2 60552061 60552082 60552078 60552083 +
agtttgcaactgaaggggtttg

SEQ ID NO: 209194 - DNA, 22 bp, Artificial Sequence
  Synthetic oligonucleotide; TTT chr2 60552066 60552087 60552083 60552088 +
gcaactgaaggggtttggggga

SEQ ID NO: 209195 - DNA, 22 bp, Artificial Sequence
  Synthetic oligonucleotide; TTG chr2 60552067 60552088 60552084 60552089 +
caactgaaggggtttgggggaa

SEQ ID NO: 209196 - DNA, 22 bp, Artificial Sequence
  Synthetic oligonucleotide; CTG chr2 60552073 60552094 60552090 60552095 +
aaggggtttgggggaagagggt

SEQ ID NO: 209197 - DNA, 22 bp, Artificial Sequence
  Synthetic oligonucleotide; TTT chr2 60552082 60552103 60552099 60552104 +
gggggaagagggtgattgtaaa

SEQ ID NO: 209198 - DNA, 22 bp, Artificial Sequence
  Synthetic oligonucleotide; TTG chr2 60552083 60552104 60552100 60552105 +
ggggaagagggtgattgtaaat

SEQ ID NO: 209199 - DNA, 22 bp, Artificial Sequence
  Synthetic oligonucleotide; TTG chr2 60552100 60552121 60552117 60552122 +
taaatttttttctagatgagag

SEQ ID NO: 209200 - DNA, 22 bp, Artificial Sequence
  Synthetic oligonucleotide; TTT chr2 60552107 60552128 60552124 60552129 +
ttttctagatgagagattgtga

SEQ ID NO: 209201 - DNA, 22 bp, Artificial Sequence
  Synthetic oligonucleotide; TTT chr2 60552108 60552129 60552125 60552130 +
tttctagatgagagattgtgag

SEQ ID NO: 209202 - DNA, 22 bp, Artificial Sequence
  Synthetic oligonucleotide; TTT chr2 60552109 60552130 60552126 60552131 +
ttctagatgagagattgtgaga

SEQ ID NO: 209203 - DNA, 22 bp, Artificial Sequence
  Synthetic oligonucleotide; TTT chr2 60552110 60552131 60552127 60552132 +
tctagatgagagattgtgagat

SEQ ID NO: 209204 - DNA, 22 bp, Artificial Sequence
  Synthetic oligonucleotide; TTT chr2 60552111 60552132 60552128 60552133 +
ctagatgagagattgtgagatt

SEQ ID NO: 209205 - DNA, 22 bp, Artificial Sequence
  Synthetic oligonucleotide; TTC chr2 60552112 60552133 60552129 60552134 +
tagatgagagattgtgagattt

SEQ ID NO: 209206 - DNA, 22 bp, Artificial Sequence
  Synthetic oligonucleotide; CTA chr2 60552114 60552135 60552131 60552136 +
gatgagagattgtgagattttt

SEQ ID NO: 209207 - DNA, 22 bp, Artificial Sequence
  Synthetic oligonucleotide; TTG chr2 60552126 60552147 60552143 60552148 +
tgagatttttgcaggggggctg

SEQ ID NO: 209208 - DNA, 22 bp, Artificial Sequence
  Synthetic oligonucleotide; TTT chr2 60552134 60552155 60552151 60552156 +
ttgcaggggggctggtggggga

SEQ ID NO: 209209 - DNA, 22 bp, Artificial Sequence
  Synthetic oligonucleotide; TTT chr2 60552135 60552156 60552152 60552157 +
tgcaggggggctggtgggggag

SEQ ID NO: 209210 - DNA, 22 bp, Artificial Sequence
  Synthetic oligonucleotide; TTT chr2 60552136 60552157 60552153 60552158 +
gcaggggggctggtgggggagt

SEQ ID NO: 209211 - DNA, 22 bp, Artificial Sequence
  Synthetic oligonucleotide; TTG chr2 60552137 60552158 60552154 60552159 +
caggggggctggtgggggagtc

SEQ ID NO: 209212 - DNA, 22 bp, Artificial Sequence
  Synthetic oligonucleotide; CTG chr2 60552148 60552169 60552165 60552170 +
gtgggggagtcaaagagaaggc

SEQ ID NO: 209213 - DNA, 22 bp, Artificial Sequence
  Synthetic oligonucleotide; TTG chr2 60552188 60552209 60552205 60552210 +
gcagagcgtttggcttcggttt

SEQ ID NO: 209214 - DNA, 22 bp, Artificial Sequence
  Synthetic oligonucleotide; TTT chr2 60552199 60552220 60552216 60552221 +
ggcttcggtttgggggcaagaa

SEQ ID NO: 209215 - DNA, 22 bp, Artificial Sequence
  Synthetic oligonucleotide; TTG chr2 60552200 60552221 60552217 60552222 +
gcttcggtttgggggcaagaaa

SEQ ID NO: 209216 - DNA, 22 bp, Artificial Sequence
  Synthetic oligonucleotide; CTT chr2 60552204 60552225 60552221 60552226 +
cggtttgggggcaagaaattgt

SEQ ID NO: 209217 - DNA, 22 bp, Artificial Sequence
  Synthetic oligonucleotide; TTC chr2 60552205 60552226 60552222 60552227 +
ggtttgggggcaagaaattgta

SEQ ID NO: 209218 - DNA, 22 bp, Artificial Sequence
  Synthetic oligonucleotide; TTT chr2 60552210 60552231 60552227 60552232 +
gggggcaagaaattgtacattc

SEQ ID NO: 209219 - DNA, 22 bp, Artificial Sequence
  Synthetic oligonucleotide; TTG chr2 60552211 60552232 60552228 60552233 +
ggggcaagaaattgtacattct

SEQ ID NO: 209220 - DNA, 22 bp, Artificial Sequence
  Synthetic oligonucleotide; TTG chr2 60552225 60552246 60552242 60552247 +
tacattctcttgccttgtttta

SEQ ID NO: 209221 - DNA, 22 bp, Artificial Sequence
  Synthetic oligonucleotide; TTC chr2 60552232 60552253 60552249 60552254 +
tcttgccttgttttatttattt

SEQ ID NO: 209222 - DNA, 22 bp, Artificial Sequence
  Synthetic oligonucleotide; CTC chr2 60552234 60552255 60552251 60552256 +
ttgccttgttttatttatttta

SEQ ID NO: 209223 - DNA, 22 bp, Artificial Sequence
  Synthetic oligonucleotide; CTT chr2 60552236 60552257 60552253 60552258 +
gccttgttttatttattttatt

SEQ ID NO: 209224 - DNA, 22 bp, Artificial Sequence
  Synthetic oligonucleotide; TTG chr2 60552237 60552258 60552254 60552259 +
ccttgttttatttattttattt

SEQ ID NO: 209225 - DNA, 22 bp, Artificial Sequence
  Synthetic oligonucleotide; CTT chr2 60552241 60552262 60552258 60552263 +
gttttatttattttatttttat

SEQ ID NO: 209226 - DNA, 22 bp, Artificial Sequence
  Synthetic oligonucleotide; TTG chr2 60552242 60552263 60552259 60552264 +
ttttatttattttatttttatg

SEQ ID NO: 209227 - DNA, 22 bp, Artificial Sequence
  Synthetic oligonucleotide; TTT chr2 60552245 60552266 60552262 60552267 +
tatttattttatttttatgtat

SEQ ID NO: 209228 - DNA, 22 bp, Artificial Sequence
  Synthetic oligonucleotide; TTT chr2 60552246 60552267 60552263 60552268 +
atttattttatttttatgtatt

SEQ ID NO: 209229 - DNA, 22 bp, Artificial Sequence
  Synthetic oligonucleotide; TTA chr2 60552247 60552268 60552264 60552269 +
tttattttatttttatgtattt

SEQ ID NO: 209230 - DNA, 22 bp, Artificial Sequence
  Synthetic oligonucleotide; TTT chr2 60552250 60552271 60552267 60552272 +
attttatttttatgtatttatt

SEQ ID NO: 209231 - DNA, 22 bp, Artificial Sequence
  Synthetic oligonucleotide; TTA chr2 60552251 60552272 60552268 60552273 +
ttttatttttatgtatttattt

SEQ ID NO: 209232 - DNA, 22 bp, Artificial Sequence
  Synthetic oligonucleotide; TTT chr2 60552254 60552275 60552271 60552276 +
tatttttatgtatttatttatt

SEQ ID NO: 209233 - DNA, 22 bp, Artificial Sequence
  Synthetic oligonucleotide; TTT chr2 60552255 60552276 60552272 60552277 +
atttttatgtatttatttattt

SEQ ID NO: 209234 - DNA, 22 bp, Artificial Sequence
  Synthetic oligonucleotide; TTA chr2 60552256 60552277 60552273 60552278 +
tttttatgtatttatttattta

SEQ ID NO: 209235 - DNA, 22 bp, Artificial Sequence
  Synthetic oligonucleotide; TTT chr2 60552259 60552280 60552276 60552281 +
ttatgtatttatttatttatgt

SEQ ID NO: 209236 - DNA, 22 bp, Artificial Sequence
  Synthetic oligonucleotide; TTT chr2 60552260 60552281 60552277 60552282 +
tatgtatttatttatttatgtg

SEQ ID NO: 209237 - DNA, 22 bp, Artificial Sequence
  Synthetic oligonucleotide; TTT chr2 60552261 60552282 60552278 60552283 +
atgtatttatttatttatgtgc

SEQ ID NO: 209238 - DNA, 22 bp, Artificial Sequence
  Synthetic oligonucleotide; TTA chr2 60552262 60552283 60552279 60552284 +
tgtatttatttatttatgtgcc

SEQ ID NO: 209239 - DNA, 22 bp, Artificial Sequence
  Synthetic oligonucleotide; TTT chr2 60552269 60552290 60552286 60552291 +
atttatttatgtgccagtcttc

SEQ ID NO: 209240 - DNA, 22 bp, Artificial Sequence
  Synthetic oligonucleotide; TTA chr2 60552270 60552291 60552287 60552292 +
tttatttatgtgccagtcttct

SEQ ID NO: 209241 - DNA, 22 bp, Artificial Sequence
  Synthetic oligonucleotide; TTT chr2 60552273 60552294 60552290 60552295 +
atttatgtgccagtcttctcct

SEQ ID NO: 209242 - DNA, 22 bp, Artificial Sequence
  Synthetic oligonucleotide; TTA chr2 60552274 60552295 60552291 60552296 +
tttatgtgccagtcttctcctt

SEQ ID NO: 209243 - DNA, 22 bp, Artificial Sequence
  Synthetic oligonucleotide; TTT chr2 60552277 60552298 60552294 60552299 +
atgtgccagtcttctccttgct

SEQ ID NO: 209244 - DNA, 22 bp, Artificial Sequence
  Synthetic oligonucleotide; TTA chr2 60552278 60552299 60552295 60552300 +
tgtgccagtcttctccttgctg

SEQ ID NO: 209245 - DNA, 22 bp, Artificial Sequence
  Synthetic oligonucleotide; CTT chr2 60552290 60552311 60552307 60552312 +
ctccttgctgcctctgaggttc

SEQ ID NO: 209246 - DNA, 22 bp, Artificial Sequence
  Synthetic oligonucleotide; TTC chr2 60552291 60552312 60552308 60552313 +
tccttgctgcctctgaggttcg

SEQ ID NO: 209247 - DNA, 22 bp, Artificial Sequence
  Synthetic oligonucleotide; CTC chr2 60552293 60552314 60552310 60552315 +
cttgctgcctctgaggttcggt

SEQ ID NO: 209248 - DNA, 22 bp, Artificial Sequence
  Synthetic oligonucleotide; CTT chr2 60552296 60552317 60552313 60552318 +
gctgcctctgaggttcggtcgg

SEQ ID NO: 209249 - DNA, 22 bp, Artificial Sequence
  Synthetic oligonucleotide; TTG chr2 60552297 60552318 60552314 60552319 +
ctgcctctgaggttcggtcggg

SEQ ID NO: 209250 - DNA, 22 bp, Artificial Sequence
  Synthetic oligonucleotide; CTG chr2 60552300 60552321 60552317 60552322 +
cctctgaggttcggtcgggagg

SEQ ID NO: 209251 - DNA, 22 bp, Artificial Sequence
  Synthetic oligonucleotide; CTC chr2 60552304 60552325 60552321 60552326 +
tgaggttcggtcgggaggggag

SEQ ID NO: 209252 - DNA, 22 bp, Artificial Sequence
  Synthetic oligonucleotide; CTG chr2 60552306 60552327 60552323 60552328 +
aggttcggtcgggaggggaggg

SEQ ID NO: 209253 - DNA, 22 bp, Artificial Sequence
  Synthetic oligonucleotide; TTC chr2 60552312 60552333 60552329 60552334 +
ggtcgggaggggagggcagcgg

SEQ ID NO: 209254 - DNA, 22 bp, Artificial Sequence
  Synthetic oligonucleotide; CTC chr2 60552361 60552382 60552378 60552383 +
cctccctccctctcccgcgtgc

SEQ ID NO: 209255 - DNA, 22 bp, Artificial Sequence
  Synthetic oligonucleotide; CTC chr2 60552365 60552386 60552382 60552387 +
cctccctctcccgcgtgccccc

SEQ ID NO: 209256 - DNA, 22 bp, Artificial Sequence
  Synthetic oligonucleotide; CTC chr2 60552369 60552390 60552386 60552391 +
cctctcccgcgtgcccccggcc

SEQ ID NO: 209257 - DNA, 22 bp, Artificial Sequence
  Synthetic oligonucleotide; CTC chr2 60552373 60552394 60552390 60552395 +
tcccgcgtgcccccggccgcct

SEQ ID NO: 209258 - DNA, 22 bp, Artificial Sequence
  Synthetic oligonucleotide; CTC chr2 60552375 60552396 60552392 60552397 +
ccgcgtgcccccggccgcctcc

SEQ ID NO: 209259 - DNA, 22 bp, Artificial Sequence
  Synthetic oligonucleotide; CTC chr2 60552396 60552417 60552413 60552418 +
ctcccccggccctagctcctgc

SEQ ID NO: 209260 - DNA, 22 bp, Artificial Sequence
  Synthetic oligonucleotide; CTC chr2 60552399 60552420 60552416 60552421 +
ccccggccctagctcctgccct

SEQ ID NO: 209261 - DNA, 22 bp, Artificial Sequence
  Synthetic oligonucleotide; CTA chr2 60552410 60552431 60552427 60552432 +
gctcctgcccttcggcggcggc

SEQ ID NO: 209262 - DNA, 22 bp, Artificial Sequence
  Synthetic oligonucleotide; CTC chr2 60552414 60552435 60552431 60552436 +
ctgcccttcggcggcggcggcg

SEQ ID NO: 209263 - DNA, 22 bp, Artificial Sequence
  Synthetic oligonucleotide; CTG chr2 60552417 60552438 60552434 60552439 +
cccttcggcggcggcggcggcg

SEQ ID NO: 209264 - DNA, 22 bp, Artificial Sequence
  Synthetic oligonucleotide; CTT chr2 60552422 60552443 60552439 60552444 +
cggcggcggcggcggcggcggc

SEQ ID NO: 209265 - DNA, 22 bp, Artificial Sequence
  Synthetic oligonucleotide; TTC chr2 60552423 60552444 60552440 60552445 +
ggcggcggcggcggcggcggcg

SEQ ID NO: 209266 - DNA, 22 bp, Artificial Sequence
  Synthetic oligonucleotide; CTC chr2 60552501 60552522 60552518 60552523 +
tggccggaacaaaaggcggcag

SEQ ID NO: 209267 - DNA, 22 bp, Artificial Sequence
  Synthetic oligonucleotide; CTG chr2 60552503 60552524 60552520 60552525 +
gccggaacaaaaggcggcagtg

SEQ ID NO: 209268 - DNA, 22 bp, Artificial Sequence
  Synthetic oligonucleotide; CTC chr2 60552538 60552559 60552555 60552560 +
ccgtccttcccggtcccacggc

SEQ ID NO: 209269 - DNA, 22 bp, Artificial Sequence
  Synthetic oligonucleotide; CTT chr2 60552546 60552567 60552563 60552568 +
cccggtcccacggctctccccg

SEQ ID NO: 209270 - DNA, 22 bp, Artificial Sequence
  Synthetic oligonucleotide; TTC chr2 60552547 60552568 60552564 60552569 +
ccggtcccacggctctccccgt

SEQ ID NO: 209271 - DNA, 22 bp, Artificial Sequence
  Synthetic oligonucleotide; CTC chr2 60552562 60552583 60552579 60552584 +
tccccgtcgccgcggcccctct

SEQ ID NO: 209272 - DNA, 22 bp, Artificial Sequence
  Synthetic oligonucleotide; CTC chr2 60552564 60552585 60552581 60552586 +
cccgtcgccgcggcccctctcc

SEQ ID NO: 209273 - DNA, 22 bp, Artificial Sequence
  Synthetic oligonucleotide; CTC chr2 60552583 60552604 60552600 60552605 +
tcccgactccgcggactcagga

SEQ ID NO: 209274 - DNA, 22 bp, Artificial Sequence
  Synthetic oligonucleotide; CTC chr2 60552585 60552606 60552602 60552607 +
ccgactccgcggactcaggagc

SEQ ID NO: 209275 - DNA, 22 bp, Artificial Sequence
  Synthetic oligonucleotide; CTC chr2 60552592 60552613 60552609 60552614 +
cgcggactcaggagcgccgggg

SEQ ID NO: 209276 - DNA, 22 bp, Artificial Sequence
  Synthetic oligonucleotide; CTC chr2 60552601 60552622 60552618 60552623 +
aggagcgccgggggcccctttc

SEQ ID NO: 209277 - DNA, 22 bp, Artificial Sequence
  Synthetic oligonucleotide; CTT chr2 60552621 60552642 60552638 60552643 +
tccacagtgccactttctcact

SEQ ID NO: 209278 - DNA, 22 bp, Artificial Sequence
  Synthetic oligonucleotide; TTT chr2 60552622 60552643 60552639 60552644 +
ccacagtgccactttctcacta

SEQ ID NO: 209279 - DNA, 22 bp, Artificial Sequence
  Synthetic oligonucleotide; TTC chr2 60552623 60552644 60552640 60552645 +
cacagtgccactttctcactat

SEQ ID NO: 209280 - DNA, 22 bp, Artificial Sequence
  Synthetic oligonucleotide; CTT chr2 60552636 60552657 60552653 60552658 +
tctcactattgtggggatgact

SEQ ID NO: 209281 - DNA, 22 bp, Artificial Sequence
  Synthetic oligonucleotide; TTT chr2 60552637 60552658 60552654 60552659 +
ctcactattgtggggatgacta

SEQ ID NO: 209282 - DNA, 22 bp, Artificial Sequence
  Synthetic oligonucleotide; TTC chr2 60552638 60552659 60552655 60552660 +
tcactattgtggggatgactac

SEQ ID NO: 209283 - DNA, 22 bp, Artificial Sequence
  Synthetic oligonucleotide; CTC chr2 60552640 60552661 60552657 60552662 +
actattgtggggatgactactt

SEQ ID NO: 209284 - DNA, 22 bp, Artificial Sequence
  Synthetic oligonucleotide; CTA chr2 60552644 60552665 60552661 60552666 +
ttgtggggatgactactttcct

SEQ ID NO: 209285 - DNA, 22 bp, Artificial Sequence
  Synthetic oligonucleotide; TTG chr2 60552647 60552668 60552664 60552669 +
tggggatgactactttcctccc

SEQ ID NO: 209286 - DNA, 22 bp, Artificial Sequence
  Synthetic oligonucleotide; CTA chr2 60552659 60552680 60552676 60552681 +
ctttcctcccgctgcacacttg

SEQ ID NO: 209287 - DNA, 22 bp, Artificial Sequence
  Synthetic oligonucleotide; CTT chr2 60552662 60552683 60552679 60552684 +
tcctcccgctgcacacttgacc

SEQ ID NO: 209288 - DNA, 22 bp, Artificial Sequence
  Synthetic oligonucleotide; TTT chr2 60552663 60552684 60552680 60552685 +
cctcccgctgcacacttgaccg

SEQ ID NO: 209289 - DNA, 22 bp, Artificial Sequence
  Synthetic oligonucleotide; TTC chr2 60552664 60552685 60552681 60552686 +
ctcccgctgcacacttgaccgt

SEQ ID NO: 209290 - DNA, 22 bp, Artificial Sequence
  Synthetic oligonucleotide; CTC chr2 60552667 60552688 60552684 60552689 +
ccgctgcacacttgaccgtgag

SEQ ID NO: 209291 - DNA, 22 bp, Artificial Sequence
  Synthetic oligonucleotide; CTG chr2 60552673 60552694 60552690 60552695 +
cacacttgaccgtgagcgcgct

SEQ ID NO: 209292 - DNA, 22 bp, Artificial Sequence
  Synthetic oligonucleotide; CTT chr2 60552680 60552701 60552697 60552702 +
gaccgtgagcgcgctggtgtcc

SEQ ID NO: 209293 - DNA, 22 bp, Artificial Sequence
  Synthetic oligonucleotide; TTG chr2 60552681 60552702 60552698 60552703 +
accgtgagcgcgctggtgtcca

SEQ ID NO: 209294 - DNA, 22 bp, Artificial Sequence
  Synthetic oligonucleotide; CTG chr2 60552696 60552717 60552713 60552718 +
gtgtccaaaagccagtctcacc

SEQ ID NO: 209295 - DNA, 22 bp, Artificial Sequence
  Synthetic oligonucleotide; CTC chr2 60552715 60552736 60552732 60552737 +
acctcttttctccccgggaatc

SEQ ID NO: 209296 - DNA, 22 bp, Artificial Sequence
  Synthetic oligonucleotide; CTC chr2 60552720 60552741 60552737 60552742 +
ttttctccccgggaatcgtttt

SEQ ID NO: 209297 - DNA, 22 bp, Artificial Sequence
  Synthetic oligonucleotide; CTT chr2 60552722 60552743 60552739 60552744 +
ttctccccgggaatcgtttttt

SEQ ID NO: 209298 - DNA, 22 bp, Artificial Sequence
  Synthetic oligonucleotide; TTT chr2 60552723 60552744 60552740 60552745 +
tctccccgggaatcgtttttta

SEQ ID NO: 209299 - DNA, 22 bp, Artificial Sequence
  Synthetic oligonucleotide; TTT chr2 60552724 60552745 60552741 60552746 +
ctccccgggaatcgttttttag

SEQ ID NO: 209300 - DNA, 22 bp, Artificial Sequence
  Synthetic oligonucleotide; TTC chr2 60552725 60552746 60552742 60552747 +
tccccgggaatcgttttttaga

SEQ ID NO: 209301 - DNA, 22 bp, Artificial Sequence
  Synthetic oligonucleotide; CTC chr2 60552727 60552748 60552744 60552749 +
cccgggaatcgttttttagact

SEQ ID NO: 209302 - DNA, 22 bp, Artificial Sequence
  Synthetic oligonucleotide; TTT chr2 60552741 60552762 60552758 60552763 +
tttagacttgtactcactccct

SEQ ID NO: 209303 - DNA, 22 bp, Artificial Sequence
  Synthetic oligonucleotide; TTT chr2 60552742 60552763 60552759 60552764 +
ttagacttgtactcactccctc

SEQ ID NO: 209304 - DNA, 22 bp, Artificial Sequence
  Synthetic oligonucleotide; TTT chr2 60552743 60552764 60552760 60552765 +
tagacttgtactcactccctcc

SEQ ID NO: 209305 - DNA, 22 bp, Artificial Sequence
  Synthetic oligonucleotide; TTT chr2 60552744 60552765 60552761 60552766 +
agacttgtactcactccctccc

SEQ ID NO: 209306 - DNA, 22 bp, Artificial Sequence
  Synthetic oligonucleotide; TTA chr2 60552745 60552766 60552762 60552767 +
gacttgtactcactccctccct

SEQ ID NO: 209307 - DNA, 22 bp, Artificial Sequence
  Synthetic oligonucleotide; CTT chr2 60552750 60552771 60552767 60552772 +
gtactcactccctccctacccc

SEQ ID NO: 209308 - DNA, 22 bp, Artificial Sequence
  Synthetic oligonucleotide; TTG chr2 60552751 60552772 60552768 60552773 +
tactcactccctccctaccccc

SEQ ID NO: 209309 - DNA, 22 bp, Artificial Sequence
  Synthetic oligonucleotide; CTC chr2 60552756 60552777 60552773 60552778 +
actccctccctacccccccatt

SEQ ID NO: 209310 - DNA, 22 bp, Artificial Sequence
  Synthetic oligonucleotide; CTC chr2 60552760 60552781 60552777 60552782 +
cctccctacccccccattttct

SEQ ID NO: 209311 - DNA, 22 bp, Artificial Sequence
  Synthetic oligonucleotide; CTC chr2 60552764 60552785 60552781 60552786 +
cctacccccccattttcttacg

SEQ ID NO: 209312 - DNA, 22 bp, Artificial Sequence
  Synthetic oligonucleotide; CTA chr2 60552768 60552789 60552785 60552790 +
cccccccattttcttacggtga

SEQ ID NO: 209313 - DNA, 22 bp, Artificial Sequence
  Synthetic oligonucleotide; TTT chr2 60552779 60552800 60552796 60552801 +
tcttacggtgagtgggaagcaa

SEQ ID NO: 209314 - DNA, 22 bp, Artificial Sequence
  Synthetic oligonucleotide; TTT chr2 60552780 60552801 60552797 60552802 +
cttacggtgagtgggaagcaac

SEQ ID NO: 209315 - DNA, 22 bp, Artificial Sequence
  Synthetic oligonucleotide; TTC chr2 60552781 60552802 60552798 60552803 +
ttacggtgagtgggaagcaacc

SEQ ID NO: 209316 - DNA, 22 bp, Artificial Sequence
  Synthetic oligonucleotide; CTT chr2 60552783 60552804 60552800 60552805 +
acggtgagtgggaagcaacctc

SEQ ID NO: 209317 - DNA, 22 bp, Artificial Sequence
  Synthetic oligonucleotide; TTA chr2 60552784 60552805 60552801 60552806 +
cggtgagtgggaagcaacctcc

SEQ ID NO: 209318 - DNA, 22 bp, Artificial Sequence
  Synthetic oligonucleotide; CTC chr2 60552805 60552826 60552822 60552827 +
cctttccccaccagctcccacc

SEQ ID NO: 209319 - DNA, 22 bp, Artificial Sequence
  Synthetic oligonucleotide; CTT chr2 60552809 60552830 60552826 60552831 +
tccccaccagctcccaccccca

SEQ ID NO: 209320 - DNA, 22 bp, Artificial Sequence
  Synthetic oligonucleotide; TTT chr2 60552810 60552831 60552827 60552832 +
ccccaccagctcccacccccag

SEQ ID NO: 209321 - DNA, 22 bp, Artificial Sequence
  Synthetic oligonucleotide; TTC chr2 60552811 60552832 60552828 60552833 +
cccaccagctcccacccccagg

SEQ ID NO: 209322 - DNA, 22 bp, Artificial Sequence
  Synthetic oligonucleotide; CTC chr2 60552822 60552843 60552839 60552844 +
ccacccccaggtttgcatgtga

SEQ ID NO: 209323 - DNA, 22 bp, Artificial Sequence
  Synthetic oligonucleotide; TTT chr2 60552836 60552857 60552853 60552858 +
gcatgtgagttgttcgcaacct

SEQ ID NO: 209324 - DNA, 22 bp, Artificial Sequence
  Synthetic oligonucleotide; TTG chr2 60552837 60552858 60552854 60552859 +
catgtgagttgttcgcaacctt

SEQ ID NO: 209325 - DNA, 22 bp, Artificial Sequence
  Synthetic oligonucleotide; TTG chr2 60552848 60552869 60552865 60552870 +
ttcgcaaccttagcattgttca

SEQ ID NO: 209326 - DNA, 22 bp, Artificial Sequence
  Synthetic oligonucleotide; TTC chr2 60552851 60552872 60552868 60552873 +
gcaaccttagcattgttcatta

SEQ ID NO: 209327 - DNA, 22 bp, Artificial Sequence
  Synthetic oligonucleotide; CTT chr2 60552859 60552880 60552876 60552881 +
agcattgttcattattttgcaa

SEQ ID NO: 209328 - DNA, 22 bp, Artificial Sequence
  Synthetic oligonucleotide; TTA chr2 60552860 60552881 60552877 60552882 +
gcattgttcattattttgcaaa

SEQ ID NO: 209329 - DNA, 22 bp, Artificial Sequence
  Synthetic oligonucleotide; TTG chr2 60552866 60552887 60552883 60552888 +
ttcattattttgcaaaactggc

SEQ ID NO: 209330 - DNA, 22 bp, Artificial Sequence
  Synthetic oligonucleotide; TTC chr2 60552869 60552890 60552886 60552891 +
attattttgcaaaactggcggg

SEQ ID NO: 209331 - DNA, 22 bp, Artificial Sequence
  Synthetic oligonucleotide; TTA chr2 60552873 60552894 60552890 60552895 +
ttttgcaaaactggcggggcgg

SEQ ID NO: 209332 - DNA, 22 bp, Artificial Sequence
  Synthetic oligonucleotide; TTT chr2 60552876 60552897 60552893 60552898 +
tgcaaaactggcggggcggggg

SEQ ID NO: 209333 - DNA, 22 bp, Artificial Sequence
  Synthetic oligonucleotide; TTT chr2 60552877 60552898 60552894 60552899 +
gcaaaactggcggggcgggggg

SEQ ID NO: 209334 - DNA, 22 bp, Artificial Sequence
  Synthetic oligonucleotide; TTG chr2 60552878 60552899 60552895 60552900 +
caaaactggcggggcggggggg

SEQ ID NO: 209335 - DNA, 22 bp, Artificial Sequence
  Synthetic oligonucleotide; CTG chr2 60552886 60552907 60552903 60552908 +
gcggggcggggggggagtggaa

SEQ ID NO: 209336 - DNA, 22 bp, Artificial Sequence
  Synthetic oligonucleotide; TTG chr2 60552914 60552935 60552931 60552936 +
cattccttttcgaaaagagaaa

SEQ ID NO: 209337 - DNA, 22 bp, Artificial Sequence
  Synthetic oligonucleotide; TTC chr2 60552919 60552940 60552936 60552941 +
cttttcgaaaagagaaataaag

SEQ ID NO: 209338 - DNA, 22 bp, Artificial Sequence
  Synthetic oligonucleotide; CTT chr2 60552922 60552943 60552939 60552944 +
ttcgaaaagagaaataaagcgg

SEQ ID NO: 209339 - DNA, 22 bp, Artificial Sequence
  Synthetic oligonucleotide; TTT chr2 60552923 60552944 60552940 60552945 +
tcgaaaagagaaataaagcggc

SEQ ID NO: 209340 - DNA, 22 bp, Artificial Sequence
  Synthetic oligonucleotide; TTT chr2 60552924 60552945 60552941 60552946 +
cgaaaagagaaataaagcggcg

SEQ ID NO: 209341 - DNA, 22 bp, Artificial Sequence
  Synthetic oligonucleotide; TTC chr2 60552925 60552946 60552942 60552947 +
gaaaagagaaataaagcggcgg

SEQ ID NO: 209342 - DNA, 22 bp, Artificial Sequence
  Synthetic oligonucleotide; TTT chr2 60552975 60552996 60552992 60552997 +
ttgtaaaattaaataaaattaa

SEQ ID NO: 209343 - DNA, 22 bp, Artificial Sequence
  Synthetic oligonucleotide; TTT chr2 60552976 60552997 60552993 60552998 +
tgtaaaattaaataaaattaaa

SEQ ID NO: 209344 - DNA, 22 bp, Artificial Sequence
  Synthetic oligonucleotide; TTT chr2 60552977 60552998 60552994 60552999 +
gtaaaattaaataaaattaaaa

SEQ ID NO: 209345 - DNA, 22 bp, Artificial Sequence
  Synthetic oligonucleotide; TTG chr2 60552978 60552999 60552995 60553000 +
taaaattaaataaaattaaaag

SEQ ID NO: 209346 - DNA, 22 bp, Artificial Sequence
  Synthetic oligonucleotide; TTA chr2 60552986 60553007 60553003 60553008 +
aataaaattaaaaggtgcgtgc

SEQ ID NO: 209347 - DNA, 22 bp, Artificial Sequence
  Synthetic oligonucleotide; TTA chr2 60552996 60553017 60553013 60553018 +
aaaggtgcgtgctgtctcaaaa

SEQ ID NO: 209348 - DNA, 22 bp, Artificial Sequence
  Synthetic oligonucleotide; CTG chr2 60553010 60553031 60553027 60553032 +
tctcaaaagtgcatacacggca

SEQ ID NO: 209349 - DNA, 22 bp, Artificial Sequence
  Synthetic oligonucleotide; CTC chr2 60553014 60553035 60553031 60553036 +
aaaagtgcatacacggcaatgg

SEQ ID NO: 209350 - DNA, 22 bp, Artificial Sequence
  Synthetic oligonucleotide; TTC chr2 60553039 60553060 60553056 60553061 +
cagatgggatgagggttttttc

SEQ ID NO: 209351 - DNA, 22 bp, Artificial Sequence
  Synthetic oligonucleotide; TTT chr2 60553057 60553078 60553074 60553079 +
tttccccctttatctcttttac

SEQ ID NO: 209352 - DNA, 22 bp, Artificial Sequence
  Synthetic oligonucleotide; TTT chr2 60553058 60553079 60553075 60553080 +
ttccccctttatctcttttacc

SEQ ID NO: 209353 - DNA, 22 bp, Artificial Sequence
  Synthetic oligonucleotide; TTT chr2 60553059 60553080 60553076 60553081 +
tccccctttatctcttttacct

SEQ ID NO: 209354 - DNA, 22 bp, Artificial Sequence
  Synthetic oligonucleotide; TTT chr2 60553060 60553081 60553077 60553082 +
ccccctttatctcttttacctc

SEQ ID NO: 209355 - DNA, 22 bp, Artificial Sequence
  Synthetic oligonucleotide; TTC chr2 60553061 60553082 60553078 60553083 +
cccctttatctcttttacctcg

SEQ ID NO: 209356 - DNA, 22 bp, Artificial Sequence
  Synthetic oligonucleotide; CTT chr2 60553067 60553088 60553084 60553089 +
tatctcttttacctcgactctc

SEQ ID NO: 209357 - DNA, 22 bp, Artificial Sequence
  Synthetic oligonucleotide; TTT chr2 60553068 60553089 60553085 60553090 +
atctcttttacctcgactctcg

SEQ ID NO: 209358 - DNA, 22 bp, Artificial Sequence
  Synthetic oligonucleotide; TTA chr2 60553069 60553090 60553086 60553091 +
tctcttttacctcgactctcgg

SEQ ID NO: 209359 - DNA, 22 bp, Artificial Sequence
  Synthetic oligonucleotide; CTC chr2 60553073 60553094 60553090 60553095 +
ttttacctcgactctcggaggt

SEQ ID NO: 209360 - DNA, 22 bp, Artificial Sequence
  Synthetic oligonucleotide; CTT chr2 60553075 60553096 60553092 60553097 +
ttacctcgactctcggaggttt

SEQ ID NO: 209361 - DNA, 22 bp, Artificial Sequence
  Synthetic oligonucleotide; TTT chr2 60553076 60553097 60553093 60553098 +
tacctcgactctcggaggtttt

SEQ ID NO: 209362 - DNA, 22 bp, Artificial Sequence
  Synthetic oligonucleotide; TTT chr2 60553077 60553098 60553094 60553099 +
acctcgactctcggaggttttt

SEQ ID NO: 209363 - DNA, 22 bp, Artificial Sequence
  Synthetic oligonucleotide; TTA chr2 60553078 60553099 60553095 60553100 +
cctcgactctcggaggtttttc

SEQ ID NO: 209364 - DNA, 22 bp, Artificial Sequence
  Synthetic oligonucleotide; CTC chr2 60553082 60553103 60553099 60553104 +
gactctcggaggtttttctcgt

SEQ ID NO: 209365 - DNA, 22 bp, Artificial Sequence
  Synthetic oligonucleotide; CTC chr2 60553087 60553108 60553104 60553109 +
tcggaggtttttctcgtgaaaa

SEQ ID NO: 209366 - DNA, 22 bp, Artificial Sequence
  Synthetic oligonucleotide; CTC chr2 60553089 60553110 60553106 60553111 +
ggaggtttttctcgtgaaaaat

SEQ ID NO: 209367 - DNA, 22 bp, Artificial Sequence
  Synthetic oligonucleotide; TTT chr2 60553097 60553118 60553114 60553119 +
ttctcgtgaaaaatttaaaaat

SEQ ID NO: 209368 - DNA, 22 bp, Artificial Sequence
  Synthetic oligonucleotide; TTT chr2 60553098 60553119 60553115 60553120 +
tctcgtgaaaaatttaaaaatg

SEQ ID NO: 209369 - DNA, 22 bp, Artificial Sequence
  Synthetic oligonucleotide; TTT chr2 60553099 60553120 60553116 60553121 +
ctcgtgaaaaatttaaaaatgc

SEQ ID NO: 209370 - DNA, 22 bp, Artificial Sequence
  Synthetic oligonucleotide; TTC chr2 60553100 60553121 60553117 60553122 +
tcgtgaaaaatttaaaaatgca

SEQ ID NO: 209371 - DNA, 22 bp, Artificial Sequence
  Synthetic oligonucleotide; CTC chr2 60553102 60553123 60553119 60553124 +
gtgaaaaatttaaaaatgcatg

SEQ ID NO: 209372 - DNA, 22 bp, Artificial Sequence
  Synthetic oligonucleotide; TTT chr2 60553113 60553134 60553130 60553135 +
aaaaatgcatgcacacacccct

SEQ ID NO: 209373 - DNA, 22 bp, Artificial Sequence
  Synthetic oligonucleotide; TTA chr2 60553114 60553135 60553131 60553136 +
aaaatgcatgcacacacccctc

SEQ ID NO: 209374 - DNA, 22 bp, Artificial Sequence
  Synthetic oligonucleotide; CTC chr2 60553136 60553157 60553153 60553158 +
tctccccctcgcttttgcttct

SEQ ID NO: 209375 - DNA, 22 bp, Artificial Sequence
  Synthetic oligonucleotide; CTC chr2 60553138 60553159 60553155 60553160 +
tccccctcgcttttgcttctag

SEQ ID NO: 209376 - DNA, 22 bp, Artificial Sequence
  Synthetic oligonucleotide; CTC chr2 60553140 60553161 60553157 60553162 +
cccctcgcttttgcttctagtc

SEQ ID NO: 209377 - DNA, 22 bp, Artificial Sequence
  Synthetic oligonucleotide; CTC chr2 60553146 60553167 60553163 60553168 +
gcttttgcttctagtcctgcgc

SEQ ID NO: 209378 - DNA, 22 bp, Artificial Sequence
  Synthetic oligonucleotide; CTT chr2 60553150 60553171 60553167 60553172 +
ttgcttctagtcctgcgcgctc

SEQ ID NO: 209379 - DNA, 22 bp, Artificial Sequence
  Synthetic oligonucleotide; TTT chr2 60553151 60553172 60553168 60553173 +
tgcttctagtcctgcgcgctct

SEQ ID NO: 209380 - DNA, 22 bp, Artificial Sequence
  Synthetic oligonucleotide; TTT chr2 60553152 60553173 60553169 60553174 +
gcttctagtcctgcgcgctctc

SEQ ID NO: 209381 - DNA, 22 bp, Artificial Sequence
  Synthetic oligonucleotide; TTG chr2 60553153 60553174 60553170 60553175 +
cttctagtcctgcgcgctctcg

SEQ ID NO: 209382 - DNA, 22 bp, Artificial Sequence
  Synthetic oligonucleotide; CTT chr2 60553156 60553177 60553173 60553178 +
ctagtcctgcgcgctctcgtga

SEQ ID NO: 209383 - DNA, 22 bp, Artificial Sequence
  Synthetic oligonucleotide; TTC chr2 60553157 60553178 60553174 60553179 +
tagtcctgcgcgctctcgtgat

SEQ ID NO: 209384 - DNA, 22 bp, Artificial Sequence
  Synthetic oligonucleotide; CTA chr2 60553159 60553180 60553176 60553181 +
gtcctgcgcgctctcgtgatta

SEQ ID NO: 209385 - DNA, 22 bp, Artificial Sequence
  Synthetic oligonucleotide; CTG chr2 60553165 60553186 60553182 60553187 +
cgcgctctcgtgattattaata

SEQ ID NO: 209386 - DNA, 22 bp, Artificial Sequence
  Synthetic oligonucleotide; CTC chr2 60553172 60553193 60553189 60553194 +
tcgtgattattaataattatta

SEQ ID NO: 209387 - DNA, 22 bp, Artificial Sequence
  Synthetic oligonucleotide; CTC chr2 60553174 60553195 60553191 60553196 +
gtgattattaataattattatt

SEQ ID NO: 209388 - DNA, 22 bp, Artificial Sequence
  Synthetic oligonucleotide; TTA chr2 60553181 60553202 60553198 60553203 +
ttaataattattattactatta

SEQ ID NO: 209389 - DNA, 22 bp, Artificial Sequence
  Synthetic oligonucleotide; TTA chr2 60553184 60553205 60553201 60553206 +
ataattattattactattattg

SEQ ID NO: 209390 - DNA, 22 bp, Artificial Sequence
  Synthetic oligonucleotide; TTA chr2 60553191 60553212 60553208 60553213 +
ttattactattattgggttact

SEQ ID NO: 209391 - DNA, 22 bp, Artificial Sequence
  Synthetic oligonucleotide; TTA chr2 60553194 60553215 60553211 60553216 +
ttactattattgggttacttac

SEQ ID NO: 209392 - DNA, 22 bp, Artificial Sequence
  Synthetic oligonucleotide; TTA chr2 60553197 60553218 60553214 60553219 +
ctattattgggttacttacgcg

SEQ ID NO: 209393 - DNA, 22 bp, Artificial Sequence
  Synthetic oligonucleotide; CTA chr2 60553200 60553221 60553217 60553222 +
ttattgggttacttacgcgaga

SEQ ID NO: 209394 - DNA, 22 bp, Artificial Sequence
  Synthetic oligonucleotide; TTA chr2 60553203 60553224 60553220 60553225 +
ttgggttacttacgcgagaatt

SEQ ID NO: 209395 - DNA, 22 bp, Artificial Sequence
  Synthetic oligonucleotide; TTG chr2 60553206 60553227 60553223 60553228 +
ggttacttacgcgagaattccc

SEQ ID NO: 209396 - DNA, 22 bp, Artificial Sequence
  Synthetic oligonucleotide; TTA chr2 60553211 60553232 60553228 60553233 +
cttacgcgagaattcccgtttg

SEQ ID NO: 209397 - DNA, 22 bp, Artificial Sequence
  Synthetic oligonucleotide; CTT chr2 60553214 60553235 60553231 60553236 +
acgcgagaattcccgtttgctt

SEQ ID NO: 209398 - DNA, 22 bp, Artificial Sequence
  Synthetic oligonucleotide; TTA chr2 60553215 60553236 60553232 60553237 +
cgcgagaattcccgtttgctta

SEQ ID NO: 209399 - DNA, 22 bp, Artificial Sequence
  Synthetic oligonucleotide; TTC chr2 60553226 60553247 60553243 60553248 +
ccgtttgcttaagtgctggggt

SEQ ID NO: 209400 - DNA, 22 bp, Artificial Sequence
  Synthetic oligonucleotide; TTT chr2 60553232 60553253 60553249 60553254 +
gcttaagtgctggggtttgcct

SEQ ID NO: 209401 - DNA, 22 bp, Artificial Sequence
  Synthetic oligonucleotide; TTG chr2 60553233 60553254 60553250 60553255 +
cttaagtgctggggtttgcctt

SEQ ID NO: 209402 - DNA, 22 bp, Artificial Sequence
  Synthetic oligonucleotide; CTT chr2 60553236 60553257 60553253 60553258 +
aagtgctggggtttgccttgct

SEQ ID NO: 209403 - DNA, 22 bp, Artificial Sequence
  Synthetic oligonucleotide; TTA chr2 60553237 60553258 60553254 60553259 +
agtgctggggtttgccttgctt

SEQ ID NO: 209404 - DNA, 22 bp, Artificial Sequence
  Synthetic oligonucleotide; CTG chr2 60553244 60553265 60553261 60553266 +
gggtttgccttgcttgcggcga

SEQ ID NO: 209405 - DNA, 22 bp, Artificial Sequence
  Synthetic oligonucleotide; TTT chr2 60553250 60553271 60553267 60553272 +
gccttgcttgcggcgagacatg

SEQ ID NO: 209406 - DNA, 22 bp, Artificial Sequence
  Synthetic oligonucleotide; TTG chr2 60553251 60553272 60553268 60553273 +
ccttgcttgcggcgagacatgg

SEQ ID NO: 209407 - DNA, 22 bp, Artificial Sequence
  Synthetic oligonucleotide; CTT chr2 60553255 60553276 60553272 60553277 +
gcttgcggcgagacatggtggg

SEQ ID NO: 209408 - DNA, 22 bp, Artificial Sequence
  Synthetic oligonucleotide; TTG chr2 60553256 60553277 60553273 60553278 +
cttgcggcgagacatggtgggc

SEQ ID NO: 209409 - DNA, 22 bp, Artificial Sequence
  Synthetic oligonucleotide; CTT chr2 60553259 60553280 60553276 60553281 +
gcggcgagacatggtgggctgc

SEQ ID NO: 209410 - DNA, 22 bp, Artificial Sequence
  Synthetic oligonucleotide; TTG chr2 60553260 60553281 60553277 60553282 +
cggcgagacatggtgggctgcg

SEQ ID NO: 209411 - DNA, 22 bp, Artificial Sequence
  Synthetic oligonucleotide; CTG chr2 60553280 60553301 60553297 60553302 +
cggggcgggcggcggcggcggc

SEQ ID NO: 209412 - DNA, 22 bp, Artificial Sequence
  Synthetic oligonucleotide; CTC chr2 60553330 60553351 60553347 60553352 +
ggttcacatcgggagagccggg

SEQ ID NO: 209413 - DNA, 22 bp, Artificial Sequence
  Synthetic oligonucleotide; TTC chr2 60553335 60553356 60553352 60553357 +
acatcgggagagccgggttaga

SEQ ID NO: 209414 - DNA, 22 bp, Artificial Sequence
  Synthetic oligonucleotide; TTA chr2 60553355 60553376 60553372 60553377 +
gaaagaaggagactccagagaa

SEQ ID NO: 209415 - DNA, 22 bp, Artificial Sequence
  Synthetic oligonucleotide; CTC chr2 60553370 60553391 60553387 60553392 +
cagagaaaatatcttcatcagt

SEQ ID NO: 209416 - DNA, 22 bp, Artificial Sequence
  Synthetic oligonucleotide; CTT chr2 60553385 60553406 60553402 60553407 +
catcagtgccttttgacatcca

SEQ ID NO: 209417 - DNA, 22 bp, Artificial Sequence
  Synthetic oligonucleotide; TTC chr2 60553386 60553407 60553403 60553408 +
atcagtgccttttgacatccaa

SEQ ID NO: 209418 - DNA, 22 bp, Artificial Sequence
  Synthetic oligonucleotide; CTT chr2 60553397 60553418 60553414 60553419 +
ttgacatccaaaataaattaga

SEQ ID NO: 209419 - DNA, 22 bp, Artificial Sequence
  Synthetic oligonucleotide; TTT chr2 60553398 60553419 60553415 60553420 +
tgacatccaaaataaattagaa

SEQ ID NO: 209420 - DNA, 22 bp, Artificial Sequence
  Synthetic oligonucleotide; TTT chr2 60553399 60553420 60553416 60553421 +
gacatccaaaataaattagaaa

SEQ ID NO: 209421 - DNA, 22 bp, Artificial Sequence
  Synthetic oligonucleotide; TTG chr2 60553400 60553421 60553417 60553422 +
acatccaaaataaattagaaat

SEQ ID NO: 209422 - DNA, 22 bp, Artificial Sequence
  Synthetic oligonucleotide; TTA chr2 60553417 60553438 60553434 60553439 +
gaaataatacaaagatggcgca

SEQ ID NO: 209423 - DNA, 22 bp, Artificial Sequence
  Synthetic oligonucleotide; TTG chr2 60553453 60553474 60553470 60553475 +
tgggagagccgtcatggctttt

SEQ ID NO: 209424 - DNA, 22 bp, Artificial Sequence
  Synthetic oligonucleotide; CTT chr2 60553473 60553494 60553490 60553495 +
ttttttaagcaaaaaaaaaaaa

SEQ ID NO: 209425 - DNA, 22 bp, Artificial Sequence
  Synthetic oligonucleotide; TTT chr2 60553474 60553495 60553491 60553496 +
tttttaagcaaaaaaaaaaaaa

SEQ ID NO: 209426 - DNA, 22 bp, Artificial Sequence
  Synthetic oligonucleotide; TTT chr2 60553475 60553496 60553492 60553497 +
ttttaagcaaaaaaaaaaaaaa

SEQ ID NO: 209427 - DNA, 22 bp, Artificial Sequence
  Synthetic oligonucleotide; TTT chr2 60553476 60553497 60553493 60553498 +
tttaagcaaaaaaaaaaaaaaa

SEQ ID NO: 209428 - DNA, 22 bp, Artificial Sequence
  Synthetic oligonucleotide; TTT chr2 60553477 60553498 60553494 60553499 +
ttaagcaaaaaaaaaaaaaaaa

SEQ ID NO: 209429 - DNA, 22 bp, Artificial Sequence
  Synthetic oligonucleotide; TTT chr2 60553478 60553499 60553495 60553500 +
taagcaaaaaaaaaaaaaaaaa

SEQ ID NO: 209430 - DNA, 22 bp, Artificial Sequence
  Synthetic oligonucleotide; TTT chr2 60553479 60553500 60553496 60553501 +
aagcaaaaaaaaaaaaaaaaaa

SEQ ID NO: 209431 - DNA, 22 bp, Artificial Sequence
  Synthetic oligonucleotide; TTA chr2 60553480 60553501 60553497 60553502 +
agcaaaaaaaaaaaaaaaaaaa

SEQ ID NO: 209432 - DNA, 22 bp, Artificial Sequence
  Synthetic oligonucleotide; CTG chr2 60553585 60553606 60553602 60553607 +
agctgcaagttcaagtgcggac

SEQ ID NO: 209433 - DNA, 22 bp, Artificial Sequence
  Synthetic oligonucleotide; CTG chr2 60553590 60553611 60553607 60553612 +
caagttcaagtgcggacgtgac

SEQ ID NO: 209434 - DNA, 22 bp, Artificial Sequence
  Synthetic oligonucleotide; TTC chr2 60553597 60553618 60553614 60553619 +
aagtgcggacgtgacgtccctg

SEQ ID NO: 209435 - DNA, 22 bp, Artificial Sequence
  Synthetic oligonucleotide; CTG chr2 60553619 60553640 60553636 60553641 +
cgaacttgaacgtcaggagtct

SEQ ID NO: 209436 - DNA, 22 bp, Artificial Sequence
  Synthetic oligonucleotide; CTT chr2 60553626 60553647 60553643 60553648 +
gaacgtcaggagtctggatgga

SEQ ID NO: 209437 - DNA, 22 bp, Artificial Sequence
  Synthetic oligonucleotide; TTG chr2 60553627 60553648 60553644 60553649 +
aacgtcaggagtctggatggac

SEQ ID NO: 209438 - DNA, 22 bp, Artificial Sequence
  Synthetic oligonucleotide; CTG chr2 60553642 60553663 60553659 60553664 +
gatggacagagacacacaaaac

SEQ ID NO: 209439 - DNA, 22 bp, Artificial Sequence
  Synthetic oligonucleotide; CTC chr2 60553711 60553732 60553728 60553733 +
acaccaatggacacacatcagg

SEQ ID NO: 209440 - DNA, 22 bp, Artificial Sequence
  Synthetic oligonucleotide; CTG chr2 60553738 60553759 60553755 60553760 +
gacatgaaaaagagaccaggac

SEQ ID NO: 209441 - DNA, 22 bp, Artificial Sequence
  Synthetic oligonucleotide; CTC chr2 60553807 60553828 60553824 60553829 +
cgcggacgccagacgcggcccc

SEQ ID NO: 209442 - DNA, 22 bp, Artificial Sequence
  Synthetic oligonucleotide; CTG chr2 60553863 60553884 60553880 60553885 +
gggccgcgggctcaccagtggc

SEQ ID NO: 209443 - DNA, 22 bp, Artificial Sequence
  Synthetic oligonucleotide; CTC chr2 60553876 60553897 60553893 60553898 +
accagtggccgcagcgagcgcc

SEQ ID NO: 209444 - DNA, 22 bp, Artificial Sequence
  Synthetic oligonucleotide; CTG chr2 60553980 60554001 60553997 60554002 +
ctcccccccacacacgcggact

SEQ ID NO: 209445 - DNA, 22 bp, Artificial Sequence
  Synthetic oligonucleotide; CTC chr2 60553983 60554004 60554000 60554005 +
ccccccacacacgcggactcta

SEQ ID NO: 209446 - DNA, 22 bp, Artificial Sequence
  Synthetic oligonucleotide; CTC chr2 60554003 60554024 60554020 60554025 +
taaaatgaaagattattcaaaa

SEQ ID NO: 209447 - DNA, 22 bp, Artificial Sequence
  Synthetic oligonucleotide; CTA chr2 60554005 60554026 60554022 60554027 +
aaatgaaagattattcaaaaaa

SEQ ID NO: 209448 - DNA, 22 bp, Artificial Sequence
  Synthetic oligonucleotide; TTA chr2 60554018 60554039 60554035 60554040 +
ttcaaaaaagaaaaaaatagag

SEQ ID NO: 209449 - DNA, 22 bp, Artificial Sequence
  Synthetic oligonucleotide; TTC chr2 60554021 60554042 60554038 60554043 +
aaaaaagaaaaaaatagagcga

SEQ ID NO: 209450 - DNA, 22 bp, Artificial Sequence
  Synthetic oligonucleotide; CTG chr2 60554061 60554082 60554078 60554083 +
cagccccgggctggggaagcgc

SEQ ID NO: 209451 - DNA, 22 bp, Artificial Sequence
  Synthetic oligonucleotide; CTG chr2 60554074 60554095 60554091 60554096 +
gggaagcgcgggcggagggaag

SEQ ID NO: 209452 - DNA, 22 bp, Artificial Sequence
  Synthetic oligonucleotide; TTG chr2 60554109 60554130 60554126 60554131 +
ctcccggacaccctcctccgta

SEQ ID NO: 209453 - DNA, 22 bp, Artificial Sequence
  Synthetic oligonucleotide; CTC chr2 60554112 60554133 60554129 60554134 +
ccggacaccctcctccgtacgc

SEQ ID NO: 209454 - DNA, 22 bp, Artificial Sequence
  Synthetic oligonucleotide; CTC chr2 60554124 60554145 60554141 60554146 +
ctccgtacgcacacccacttcc

SEQ ID NO: 209455 - DNA, 22 bp, Artificial Sequence
  Synthetic oligonucleotide; CTC chr2 60554127 60554148 60554144 60554149 +
cgtacgcacacccacttcccct

SEQ ID NO: 209456 - DNA, 22 bp, Artificial Sequence
  Synthetic oligonucleotide; CTT chr2 60554144 60554165 60554161 60554166 +
cccctccccgccgccgccgcgc

SEQ ID NO: 209457 - DNA, 22 bp, Artificial Sequence
  Synthetic oligonucleotide; TTC chr2 60554145 60554166 60554162 60554167 +
ccctccccgccgccgccgcgct

SEQ ID NO: 209458 - DNA, 22 bp, Artificial Sequence
  Synthetic oligonucleotide; CTC chr2 60554150 60554171 60554167 60554172 +
cccgccgccgccgcgctcgctc

SEQ ID NO: 209459 - DNA, 22 bp, Artificial Sequence
  Synthetic oligonucleotide; CTC chr2 60554168 60554189 60554185 60554190 +
gctccccgcgtgtggacgccag

SEQ ID NO: 209460 - DNA, 22 bp, Artificial Sequence
  Synthetic oligonucleotide; CTC chr2 60554172 60554193 60554189 60554194 +
cccgcgtgtggacgccaggggc

SEQ ID NO: 209461 - DNA, 22 bp, Artificial Sequence
  Synthetic oligonucleotide; CTG chr2 60554222 60554243 60554239 60554244 +
cgctcgggaaactttgcccgag

SEQ ID NO: 209462 - DNA, 22 bp, Artificial Sequence
  Synthetic oligonucleotide; CTC chr2 60554227 60554248 60554244 60554249 +
gggaaactttgcccgaggagag

SEQ ID NO: 209463 - DNA, 22 bp, Artificial Sequence
  Synthetic oligonucleotide; CTT chr2 60554236 60554257 60554253 60554258 +
tgcccgaggagaggacagcaaa

SEQ ID NO: 209464 - DNA, 22 bp, Artificial Sequence
  Synthetic oligonucleotide; TTT chr2 60554237 60554258 60554254 60554259 +
gcccgaggagaggacagcaaag

SEQ ID NO: 209465 - DNA, 22 bp, Artificial Sequence
  Synthetic oligonucleotide; TTG chr2 60554238 60554259 60554255 60554260 +
cccgaggagaggacagcaaaga

SEQ ID NO: 209466 - DNA, 22 bp, Artificial Sequence
  Synthetic oligonucleotide; TTG chr2 60554277 60554298 60554294 60554299 +
agagctgagcctccaagttaca

SEQ ID NO: 209467 - DNA, 22 bp, Artificial Sequence
  Synthetic oligonucleotide; CTG chr2 60554284 60554305 60554301 60554306 +
agcctccaagttacagctccgc

SEQ ID NO: 209468 - DNA, 22 bp, Artificial Sequence
  Synthetic oligonucleotide; CTC chr2 60554290 60554311 60554307 60554312 +
caagttacagctccgcagcggg

SEQ ID NO: 209469 - DNA, 22 bp, Artificial Sequence
  Synthetic oligonucleotide; TTA chr2 60554297 60554318 60554314 60554319 +
cagctccgcagcgggcgagggg

SEQ ID NO: 209470 - DNA, 22 bp, Artificial Sequence
  Synthetic oligonucleotide; CTC chr2 60554303 60554324 60554320 60554325 +
cgcagcgggcgaggggaggtgg

SEQ ID NO: 209471 - DNA, 22 bp, Artificial Sequence
  Synthetic oligonucleotide; CTA chr2 60554358 60554379 60554375 60554380 +
agtttggagggctgcgggtccg

SEQ ID NO: 209472 - DNA, 22 bp, Artificial Sequence
  Synthetic oligonucleotide; TTT chr2 60554363 60554384 60554380 60554385 +
ggagggctgcgggtccggaagg

SEQ ID NO: 209473 - DNA, 22 bp, Artificial Sequence
  Synthetic oligonucleotide; TTG chr2 60554364 60554385 60554381 60554386 +
gagggctgcgggtccggaaggg

SEQ ID NO: 209474 - DNA, 22 bp, Artificial Sequence
  Synthetic oligonucleotide; CTG chr2 60554372 60554393 60554389 60554394 +
cgggtccggaagggcagcgccc

SEQ ID NO: 209475 - DNA, 22 bp, Artificial Sequence
  Synthetic oligonucleotide; CTC chr2 60554401 60554422 60554418 60554423 +
caggagcccgcgcggcctggaa

SEQ ID NO: 209476 - DNA, 22 bp, Artificial Sequence
  Synthetic oligonucleotide; CTG chr2 60554420 60554441 60554437 60554442 +
gaaagaggggaccggggagagg

SEQ ID NO: 209477 - DNA, 22 bp, Artificial Sequence
  Synthetic oligonucleotide; CTG chr2 60554503 60554524 60554520 60554525 +
agcgccccgccaagcgactggg

SEQ ID NO: 209478 - DNA, 22 bp, Artificial Sequence
  Synthetic oligonucleotide; CTG chr2 60554523 60554544 60554540 60554545 +
ggtctgaatgcaactgaaagcg

SEQ ID NO: 209479 - DNA, 22 bp, Artificial Sequence
  Synthetic oligonucleotide; CTG chr2 60554529 60554550 60554546 60554551 +
aatgcaactgaaagcgccgagt

SEQ ID NO: 209480 - DNA, 22 bp, Artificial Sequence
  Synthetic oligonucleotide; CTG chr2 60554539 60554560 60554556 60554561 +
aaagcgccgagtccccggctcc

SEQ ID NO: 209481 - DNA, 22 bp, Artificial Sequence
  Synthetic oligonucleotide; CTC chr2 60554560 60554581 60554577 60554582 +
ctaagggtcgcagaaagagagc

SEQ ID NO: 209482 - DNA, 22 bp, Artificial Sequence
  Synthetic oligonucleotide; CTA chr2 60554563 60554584 60554580 60554585 +
agggtcgcagaaagagagcccg

SEQ ID NO: 209483 - DNA, 22 bp, Artificial Sequence
  Synthetic oligonucleotide; CTG chr2 60554614 60554635 60554631 60554636 +
gcccccggaggggagcgccggg

SEQ ID NO: 209484 - DNA, 22 bp, Artificial Sequence
  Synthetic oligonucleotide; CTG chr2 60554642 60554663 60554659 60554664 +
ggcaagagaggcaccgaggcgt

SEQ ID NO: 209485 - DNA, 22 bp, Artificial Sequence
  Synthetic oligonucleotide; CTC chr2 60554671 60554692 60554688 60554693 +
tctgagaggccgaggacaaagc

SEQ ID NO: 209486 - DNA, 22 bp, Artificial Sequence
  Synthetic oligonucleotide; CTC chr2 60554673 60554694 60554690 60554695 +
tgagaggccgaggacaaagcgc

SEQ ID NO: 209487 - DNA, 22 bp, Artificial Sequence
  Synthetic oligonucleotide; CTG chr2 60554675 60554696 60554692 60554697 +
agaggccgaggacaaagcgcgg

SEQ ID NO: 209488 - DNA, 22 bp, Artificial Sequence
  Synthetic oligonucleotide; CTG chr2 60554722 60554743 60554739 60554744 +
ggaatgtgctcacggcgccgcg

SEQ ID NO: 209489 - DNA, 22 bp, Artificial Sequence
  Synthetic oligonucleotide; CTC chr2 60554733 60554754 60554750 60554755 +
acggcgccgcgggaggtccccg

SEQ ID NO: 209490 - DNA, 22 bp, Artificial Sequence
  Synthetic oligonucleotide; CTG chr2 60554768 60554789 60554785 60554790 +
ggagggacacaccccctcccac

SEQ ID NO: 209491 - DNA, 22 bp, Artificial Sequence
  Synthetic oligonucleotide; CTC chr2 60554786 60554807 60554803 60554808 +
ccactccagagcaactgcaaaa

SEQ ID NO: 209492 - DNA, 22 bp, Artificial Sequence
  Synthetic oligonucleotide; CTC chr2 60554792 60554813 60554809 60554814 +
cagagcaactgcaaaagcacag

SEQ ID NO: 209493 - DNA, 22 bp, Artificial Sequence
  Synthetic oligonucleotide; CTG chr2 60554803 60554824 60554820 60554825 +
caaaagcacagagggatgggaa

SEQ ID NO: 209494 - DNA, 22 bp, Artificial Sequence
  Synthetic oligonucleotide; TTT chr2 60554835 60554856 60554852 60554857 +
cttacgggcagagcacaactgt

SEQ ID NO: 209495 - DNA, 22 bp, Artificial Sequence
  Synthetic oligonucleotide; TTC chr2 60554836 60554857 60554853 60554858 +
ttacgggcagagcacaactgtt

SEQ ID NO: 209496 - DNA, 22 bp, Artificial Sequence
  Synthetic oligonucleotide; CTT chr2 60554838 60554859 60554855 60554860 +
acgggcagagcacaactgttcc

SEQ ID NO: 209497 - DNA, 22 bp, Artificial Sequence
  Synthetic oligonucleotide; TTA chr2 60554839 60554860 60554856 60554861 +
cgggcagagcacaactgttcct

SEQ ID NO: 209498 - DNA, 22 bp, Artificial Sequence
  Synthetic oligonucleotide; CTG chr2 60554856 60554877 60554873 60554878 +
ttcctgtgctgttacccaggga

SEQ ID NO: 209499 - DNA, 22 bp, Artificial Sequence
  Synthetic oligonucleotide; TTC chr2 60554859 60554880 60554876 60554881 +
ctgtgctgttacccagggaaag

SEQ ID NO: 209500 - DNA, 22 bp, Artificial Sequence
  Synthetic oligonucleotide; CTG chr2 60554862 60554883 60554879 60554884 +
tgctgttacccagggaaagaga

SEQ ID NO: 209501 - DNA, 22 bp, Artificial Sequence
  Synthetic oligonucleotide; CTG chr2 60554867 60554888 60554884 60554889 +
ttacccagggaaagagaaaatg

SEQ ID NO: 209502 - DNA, 22 bp, Artificial Sequence
  Synthetic oligonucleotide; TTA chr2 60554870 60554891 60554887 60554892 +
cccagggaaagagaaaatggga

SEQ ID NO: 209503 - DNA, 22 bp, Artificial Sequence
  Synthetic oligonucleotide; CTC chr2 60554914 60554935 60554931 60554936 +
gcaggagcagcggggagaccac

SEQ ID NO: 209504 - DNA, 22 bp, Artificial Sequence
  Synthetic oligonucleotide; CTC chr2 60554956 60554977 60554973 60554978 +
gggtcaccgccgcgctccccag

SEQ ID NO: 209505 - DNA, 22 bp, Artificial Sequence
  Synthetic oligonucleotide; CTC chr2 60554973 60554994 60554990 60554995 +
cccaggcgccgccggccaaggc

SEQ ID NO: 209506 - DNA, 22 bp, Artificial Sequence
  Synthetic oligonucleotide; CTC chr2 60555022 60555043 60555039 60555044 +
tcgcctttctgcagacgttccc

SEQ ID NO: 209507 - DNA, 22 bp, Artificial Sequence
  Synthetic oligonucleotide; CTC chr2 60555024 60555045 60555041 60555046 +
gcctttctgcagacgttccctg

SEQ ID NO: 209508 - DNA, 22 bp, Artificial Sequence
  Synthetic oligonucleotide; CTT chr2 60555029 60555050 60555046 60555051 +
tctgcagacgttccctggaaat

SEQ ID NO: 209509 - DNA, 22 bp, Artificial Sequence
  Synthetic oligonucleotide; TTT chr2 60555030 60555051 60555047 60555052 +
ctgcagacgttccctggaaatt

SEQ ID NO: 209510 - DNA, 22 bp, Artificial Sequence
  Synthetic oligonucleotide; TTC chr2 60555031 60555052 60555048 60555053 +
tgcagacgttccctggaaatta

SEQ ID NO: 209511 - DNA, 22 bp, Artificial Sequence
  Synthetic oligonucleotide; CTG chr2 60555033 60555054 60555050 60555055 +
cagacgttccctggaaattagg

SEQ ID NO: 209512 - DNA, 22 bp, Artificial Sequence
  Synthetic oligonucleotide; TTC chr2 60555042 60555063 60555059 60555064 +
cctggaaattagggaagacctg

SEQ ID NO: 209513 - DNA, 22 bp, Artificial Sequence
  Synthetic oligonucleotide; CTG chr2 60555046 60555067 60555063 60555068 +
gaaattagggaagacctgttgg

SEQ ID NO: 209514 - DNA, 22 bp, Artificial Sequence
  Synthetic oligonucleotide; TTA chr2 60555053 60555074 60555070 60555075 +
gggaagacctgttggaaataaa

SEQ ID NO: 209515 - DNA, 22 bp, Artificial Sequence
  Synthetic oligonucleotide; CTG chr2 60555064 60555085 60555081 60555086 +
ttggaaataaaaccctgtctct

SEQ ID NO: 209516 - DNA, 22 bp, Artificial Sequence
  Synthetic oligonucleotide; TTG chr2 60555067 60555088 60555084 60555089 +
gaaataaaaccctgtctcttta

SEQ ID NO: 209517 - DNA, 22 bp, Artificial Sequence
  Synthetic oligonucleotide; CTG chr2 60555081 60555102 60555098 60555103 +
tctctttaatgcacacacgcac

SEQ ID NO: 209518 - DNA, 22 bp, Artificial Sequence
  Synthetic oligonucleotide; CTC chr2 60555085 60555106 60555102 60555107 +
tttaatgcacacacgcacacac

SEQ ID NO: 209519 - DNA, 22 bp, Artificial Sequence
  Synthetic oligonucleotide; CTT chr2 60555087 60555108 60555104 60555109 +
taatgcacacacgcacacacac

SEQ ID NO: 209520 - DNA, 22 bp, Artificial Sequence
  Synthetic oligonucleotide; TTT chr2 60555088 60555109 60555105 60555110 +
aatgcacacacgcacacacacg

SEQ ID NO: 209521 - DNA, 22 bp, Artificial Sequence
  Synthetic oligonucleotide; TTA chr2 60555089 60555110 60555106 60555111 +
atgcacacacgcacacacacgc

SEQ ID NO: 209522 - DNA, 22 bp, Artificial Sequence
  Synthetic oligonucleotide; CTG chr2 60555119 60555140 60555136 60555141 +
ccgctgtcaaaaagcgggcttc

SEQ ID NO: 209523 - DNA, 22 bp, Artificial Sequence
  Synthetic oligonucleotide; CTG chr2 60555125 60555146 60555142 60555147 +
tcaaaaagcgggcttcactctg

SEQ ID NO: 209524 - DNA, 22 bp, Artificial Sequence
  Synthetic oligonucleotide; CTT chr2 60555140 60555161 60555157 60555162 +
cactctggcgtgggatactttc

SEQ ID NO: 209525 - DNA, 22 bp, Artificial Sequence
  Synthetic oligonucleotide; TTC chr2 60555141 60555162 60555158 60555163 +
actctggcgtgggatactttca

SEQ ID NO: 209526 - DNA, 22 bp, Artificial Sequence
  Synthetic oligonucleotide; CTC chr2 60555145 60555166 60555162 60555167 +
tggcgtgggatactttcagttt

SEQ ID NO: 209527 - DNA, 22 bp, Artificial Sequence
  Synthetic oligonucleotide; CTG chr2 60555147 60555168 60555164 60555169 +
gcgtgggatactttcagtttta

SEQ ID NO: 209528 - DNA, 22 bp, Artificial Sequence
  Synthetic oligonucleotide; CTT chr2 60555160 60555181 60555177 60555182 +
tcagttttacgtaaaatgtaca

SEQ ID NO: 209529 - DNA, 22 bp, Artificial Sequence
  Synthetic oligonucleotide; TTT chr2 60555161 60555182 60555178 60555183 +
cagttttacgtaaaatgtacag

SEQ ID NO: 209530 - DNA, 22 bp, Artificial Sequence
  Synthetic oligonucleotide; TTC chr2 60555162 60555183 60555179 60555184 +
agttttacgtaaaatgtacagc

SEQ ID NO: 209531 - DNA, 22 bp, Artificial Sequence
  Synthetic oligonucleotide; TTT chr2 60555167 60555188 60555184 60555189 +
tacgtaaaatgtacagcaacag

SEQ ID NO: 209532 - DNA, 22 bp, Artificial Sequence
  Synthetic oligonucleotide; TTT chr2 60555168 60555189 60555185 60555190 +
acgtaaaatgtacagcaacagc

SEQ ID NO: 209533 - DNA, 22 bp, Artificial Sequence
  Synthetic oligonucleotide; TTA chr2 60555169 60555190 60555186 60555191 +
cgtaaaatgtacagcaacagca

SEQ ID NO: 209534 - DNA, 22 bp, Artificial Sequence
  Synthetic oligonucleotide; CTG chr2 60555198 60555219 60555215 60555220 +
cgattggaaagtttattcagaa

SEQ ID NO: 209535 - DNA, 22 bp, Artificial Sequence
  Synthetic oligonucleotide; TTG chr2 60555204 60555225 60555221 60555226 +
gaaagtttattcagaaacgtgc

SEQ ID NO: 209536 - DNA, 22 bp, Artificial Sequence
  Synthetic oligonucleotide; TTT chr2 60555212 60555233 60555229 60555234 +
attcagaaacgtgcctgtaaag

SEQ ID NO: 209537 - DNA, 22 bp, Artificial Sequence
  Synthetic oligonucleotide; TTA chr2 60555213 60555234 60555230 60555235 +
ttcagaaacgtgcctgtaaagt

SEQ ID NO: 209538 - DNA, 22 bp, Artificial Sequence
  Synthetic oligonucleotide; TTC chr2 60555216 60555237 60555233 60555238 +
agaaacgtgcctgtaaagtccc

SEQ ID NO: 209539 - DNA, 22 bp, Artificial Sequence
  Synthetic oligonucleotide; CTG chr2 60555229 60555250 60555246 60555251 +
taaagtcccctggcgcctcccg

SEQ ID NO: 209540 - DNA, 22 bp, Artificial Sequence
  Synthetic oligonucleotide; CTG chr2 60555241 60555262 60555258 60555263 +
gcgcctcccgcctcccagcctc

SEQ ID NO: 209541 - DNA, 22 bp, Artificial Sequence
  Synthetic oligonucleotide; CTC chr2 60555248 60555269 60555265 60555270 +
ccgcctcccagcctccctgcct

SEQ ID NO: 209542 - DNA, 22 bp, Artificial Sequence
  Synthetic oligonucleotide; CTC chr2 60555255 60555276 60555272 60555277 +
ccagcctccctgcctgccagca

SEQ ID NO: 209543 - DNA, 22 bp, Artificial Sequence
  Synthetic oligonucleotide; CTC chr2 60555263 60555284 60555280 60555285 +
cctgcctgccagcaccactctg

SEQ ID NO: 209544 - DNA, 22 bp, Artificial Sequence
  Synthetic oligonucleotide; CTG chr2 60555267 60555288 60555284 60555289 +
cctgccagcaccactctgcagc

SEQ ID NO: 209545 - DNA, 22 bp, Artificial Sequence
  Synthetic oligonucleotide; CTG chr2 60555271 60555292 60555288 60555293 +
ccagcaccactctgcagccgcc

SEQ ID NO: 209546 - DNA, 22 bp, Artificial Sequence
  Synthetic oligonucleotide; CTC chr2 60555283 60555304 60555300 60555305 +
tgcagccgccgccgccgccgcc

SEQ ID NO: 209547 - DNA, 22 bp, Artificial Sequence
  Synthetic oligonucleotide; CTG chr2 60555285 60555306 60555302 60555307 +
cagccgccgccgccgccgccgg

SEQ ID NO: 209548 - DNA, 22 bp, Artificial Sequence
  Synthetic oligonucleotide; TTC chr2 60555326 60555347 60555343 60555348 +
caaatctggaaggagttggggg

SEQ ID NO: 209549 - DNA, 22 bp, Artificial Sequence
  Synthetic oligonucleotide; CTG chr2 60555334 60555355 60555351 60555356 +
gaaggagttggggggagaggag

SEQ ID NO: 209550 - DNA, 22 bp, Artificial Sequence
  Synthetic oligonucleotide; TTG chr2 60555344 60555365 60555361 60555366 +
gggggagaggagaatggactca

SEQ ID NO: 209551 - DNA, 22 bp, Artificial Sequence
  Synthetic oligonucleotide; CTC chr2 60555365 60555386 60555382 60555387 +
aggtccaagggaggtgcggagg

SEQ ID NO: 209552 - DNA, 22 bp, Artificial Sequence
  Synthetic oligonucleotide; CTG chr2 60555428 60555449 60555445 60555450 +
agctgcaggtggatatgtgtga

SEQ ID NO: 209553 - DNA, 22 bp, Artificial Sequence
  Synthetic oligonucleotide; CTG chr2 60555433 60555454 60555450 60555455 +
caggtggatatgtgtgagtgtg

SEQ ID NO: 209554 - DNA, 22 bp, Artificial Sequence
  Synthetic oligonucleotide; CTG chr2 60555459 60555480 60555476 60555481 +
cagagcgaggagccctccttcc

SEQ ID NO: 209555 - DNA, 22 bp, Artificial Sequence
  Synthetic oligonucleotide; CTC chr2 60555476 60555497 60555493 60555498 +
cttccctctcctcggagcggtt

SEQ ID NO: 209556 - DNA, 22 bp, Artificial Sequence
  Synthetic oligonucleotide; CTT chr2 60555479 60555500 60555496 60555501 +
ccctctcctcggagcggttcca

SEQ ID NO: 209557 - DNA, 22 bp, Artificial Sequence
  Synthetic oligonucleotide; TTC chr2 60555480 60555501 60555497 60555502 +
cctctcctcggagcggttccac

SEQ ID NO: 209558 - DNA, 22 bp, Artificial Sequence
  Synthetic oligonucleotide; CTC chr2 60555484 60555505 60555501 60555506 +
tcctcggagcggttccacaacc

SEQ ID NO: 209559 - DNA, 22 bp, Artificial Sequence
  Synthetic oligonucleotide; CTC chr2 60555486 60555507 60555503 60555508 +
ctcggagcggttccacaacccc

SEQ ID NO: 209560 - DNA, 22 bp, Artificial Sequence
  Synthetic oligonucleotide; CTC chr2 60555489 60555510 60555506 60555511 +
ggagcggttccacaacccccgt

SEQ ID NO: 209561 - DNA, 22 bp, Artificial Sequence
  Synthetic oligonucleotide; TTC chr2 60555499 60555520 60555516 60555521 +
cacaacccccgtcttctcatcc

SEQ ID NO: 209562 - DNA, 22 bp, Artificial Sequence
  Synthetic oligonucleotide; CTT chr2 60555514 60555535 60555531 60555536 +
ctcatccccctcttcagtctaa

SEQ ID NO: 209563 - DNA, 22 bp, Artificial Sequence
  Synthetic oligonucleotide; TTC chr2 60555515 60555536 60555532 60555537 +
tcatccccctcttcagtctaaa

SEQ ID NO: 209564 - DNA, 22 bp, Artificial Sequence
  Synthetic oligonucleotide; CTC chr2 60555517 60555538 60555534 60555539 +
atccccctcttcagtctaaagg

SEQ ID NO: 209565 - DNA, 22 bp, Artificial Sequence
  Synthetic oligonucleotide; CTC chr2 60555526 60555547 60555543 60555548 +
ttcagtctaaagggtgtcgctt

SEQ ID NO: 209566 - DNA, 22 bp, Artificial Sequence
  Synthetic oligonucleotide; CTT chr2 60555528 60555549 60555545 60555550 +
cagtctaaagggtgtcgcttcc

SEQ ID NO: 209567 - DNA, 22 bp, Artificial Sequence
  Synthetic oligonucleotide; TTC chr2 60555529 60555550 60555546 60555551 +
agtctaaagggtgtcgcttccg

SEQ ID NO: 209568 - DNA, 22 bp, Artificial Sequence
  Synthetic oligonucleotide; CTA chr2 60555535 60555556 60555552 60555557 +
aagggtgtcgcttccgtaaact

SEQ ID NO: 209569 - DNA, 22 bp, Artificial Sequence
  Synthetic oligonucleotide; CTT chr2 60555548 60555569 60555565 60555570 +
ccgtaaactcacccacccggtg

SEQ ID NO: 209570 - DNA, 22 bp, Artificial Sequence
  Synthetic oligonucleotide; TTC chr2 60555549 60555570 60555566 60555571 +
cgtaaactcacccacccggtgg

SEQ ID NO: 209571 - DNA, 22 bp, Artificial Sequence
  Synthetic oligonucleotide; CTC chr2 60555558 60555579 60555575 60555580 +
acccacccggtgggggggcttt

SEQ ID NO: 209572 - DNA, 22 bp, Artificial Sequence
  Synthetic oligonucleotide; CTT chr2 60555579 60555600 60555596 60555601 +
tattgttttaagcgagggcccc

SEQ ID NO: 209573 - DNA, 22 bp, Artificial Sequence
  Synthetic oligonucleotide; TTT chr2 60555580 60555601 60555597 60555602 +
attgttttaagcgagggccccg

SEQ ID NO: 209574 - DNA, 22 bp, Artificial Sequence
  Synthetic oligonucleotide; TTA chr2 60555581 60555602 60555598 60555603 +
ttgttttaagcgagggccccgg

SEQ ID NO: 209575 - DNA, 22 bp, Artificial Sequence
  Synthetic oligonucleotide; TTG chr2 60555584 60555605 60555601 60555606 +
ttttaagcgagggccccgggct

SEQ ID NO: 209576 - DNA, 22 bp, Artificial Sequence
  Synthetic oligonucleotide; TTT chr2 60555587 60555608 60555604 60555609 +
taagcgagggccccgggcttgc

SEQ ID NO: 209577 - DNA, 22 bp, Artificial Sequence
  Synthetic oligonucleotide; TTT chr2 60555588 60555609 60555605 60555610 +
aagcgagggccccgggcttgca

SEQ ID NO: 209578 - DNA, 22 bp, Artificial Sequence
  Synthetic oligonucleotide; TTA chr2 60555589 60555610 60555606 60555611 +
agcgagggccccgggcttgcac

SEQ ID NO: 209579 - DNA, 22 bp, Artificial Sequence
  Synthetic oligonucleotide; CTT chr2 60555607 60555628 60555624 60555629 +
gcacgcgctcacccatcccgca

SEQ ID NO: 209580 - DNA, 22 bp, Artificial Sequence
  Synthetic oligonucleotide; TTG chr2 60555608 60555629 60555625 60555630 +
cacgcgctcacccatcccgcag

SEQ ID NO: 209581 - DNA, 22 bp, Artificial Sequence
  Synthetic oligonucleotide; CTC chr2 60555617 60555638 60555634 60555639 +
acccatcccgcagccctgccgg

SEQ ID NO: 209582 - DNA, 22 bp, Artificial Sequence
  Synthetic oligonucleotide; CTG chr2 60555635 60555656 60555652 60555657 +
ccggcaagcggctgtttattcc

SEQ ID NO: 209583 - DNA, 22 bp, Artificial Sequence
  Synthetic oligonucleotide; CTG chr2 60555649 60555670 60555666 60555671 +
tttattcctgtttcgtcttagt

SEQ ID NO: 209584 - DNA, 22 bp, Artificial Sequence
  Synthetic oligonucleotide; TTT chr2 60555652 60555673 60555669 60555674 +
attcctgtttcgtcttagtaaa

SEQ ID NO: 209585 - DNA, 22 bp, Artificial Sequence
  Synthetic oligonucleotide; TTA chr2 60555653 60555674 60555670 60555675 +
ttcctgtttcgtcttagtaaag

SEQ ID NO: 209586 - DNA, 22 bp, Artificial Sequence
  Synthetic oligonucleotide; TTC chr2 60555656 60555677 60555673 60555678 +
ctgtttcgtcttagtaaagttt

SEQ ID NO: 209587 - DNA, 22 bp, Artificial Sequence
  Synthetic oligonucleotide; CTG chr2 60555659 60555680 60555676 60555681 +
tttcgtcttagtaaagtttcaa

SEQ ID NO: 209588 - DNA, 22 bp, Artificial Sequence
  Synthetic oligonucleotide; TTT chr2 60555662 60555683 60555679 60555684 +
cgtcttagtaaagtttcaagtc

SEQ ID NO: 209589 - DNA, 22 bp, Artificial Sequence
  Synthetic oligonucleotide; TTC chr2 60555663 60555684 60555680 60555685 +
gtcttagtaaagtttcaagtct

SEQ ID NO: 209590 - DNA, 22 bp, Artificial Sequence
  Synthetic oligonucleotide; CTT chr2 60555668 60555689 60555685 60555690 +
agtaaagtttcaagtctactgt

SEQ ID NO: 209591 - DNA, 22 bp, Artificial Sequence
  Synthetic oligonucleotide; TTA chr2 60555669 60555690 60555686 60555691 +
gtaaagtttcaagtctactgtg

SEQ ID NO: 209592 - DNA, 22 bp, Artificial Sequence
  Synthetic oligonucleotide; TTT chr2 60555678 60555699 60555695 60555700 +
caagtctactgtgttagaaaat

SEQ ID NO: 209593 - DNA, 22 bp, Artificial Sequence
  Synthetic oligonucleotide; TTC chr2 60555679 60555700 60555696 60555701 +
aagtctactgtgttagaaaatg

SEQ ID NO: 209594 - DNA, 22 bp, Artificial Sequence
  Synthetic oligonucleotide; CTA chr2 60555686 60555707 60555703 60555708 +
ctgtgttagaaaatgactggct

SEQ ID NO: 209595 - DNA, 22 bp, Artificial Sequence
  Synthetic oligonucleotide; CTG chr2 60555689 60555710 60555706 60555711 +
tgttagaaaatgactggcttgc

SEQ ID NO: 209596 - DNA, 22 bp, Artificial Sequence
  Synthetic oligonucleotide; TTA chr2 60555694 60555715 60555711 60555716 +
gaaaatgactggcttgcctagc

SEQ ID NO: 209597 - DNA, 22 bp, Artificial Sequence
  Synthetic oligonucleotide; CTG chr2 60555705 60555726 60555722 60555727 +
gcttgcctagctcggcggagct

SEQ ID NO: 209598 - DNA, 22 bp, Artificial Sequence
  Synthetic oligonucleotide; CTT chr2 60555709 60555730 60555726 60555731 +
gcctagctcggcggagcttcgg

SEQ ID NO: 209599 - DNA, 22 bp, Artificial Sequence
  Synthetic oligonucleotide; TTG chr2 60555710 60555731 60555727 60555732 +
cctagctcggcggagcttcgga

SEQ ID NO: 209600 - DNA, 22 bp, Artificial Sequence
  Synthetic oligonucleotide; CTA chr2 60555714 60555735 60555731 60555736 +
gctcggcggagcttcggacccc

SEQ ID NO: 209601 - DNA, 22 bp, Artificial Sequence
  Synthetic oligonucleotide; CTC chr2 60555718 60555739 60555735 60555740 +
ggcggagcttcggacccctcta

SEQ ID NO: 209602 - DNA, 22 bp, Artificial Sequence
  Synthetic oligonucleotide; CTT chr2 60555728 60555749 60555745 60555750 +
cggacccctctaaggaagaaaa

SEQ ID NO: 209603 - DNA, 22 bp, Artificial Sequence
  Synthetic oligonucleotide; TTC chr2 60555729 60555750 60555746 60555751 +
ggacccctctaaggaagaaaag

SEQ ID NO: 209604 - DNA, 22 bp, Artificial Sequence
  Synthetic oligonucleotide; CTC chr2 60555738 60555759 60555755 60555760 +
taaggaagaaaaggaggttttg

SEQ ID NO: 209605 - DNA, 22 bp, Artificial Sequence
  Synthetic oligonucleotide; CTA chr2 60555740 60555761 60555757 60555762 +
aggaagaaaaggaggttttgat

SEQ ID NO: 209606 - DNA, 22 bp, Artificial Sequence
  Synthetic oligonucleotide; TTT chr2 60555758 60555779 60555775 60555780 +
tgatgctcaacattgagagaga

SEQ ID NO: 209607 - DNA, 22 bp, Artificial Sequence
  Synthetic oligonucleotide; TTT chr2 60555759 60555780 60555776 60555781 +
gatgctcaacattgagagagat

SEQ ID NO: 209608 - DNA, 22 bp, Artificial Sequence
  Synthetic oligonucleotide; TTG chr2 60555760 60555781 60555777 60555782 +
atgctcaacattgagagagatg

SEQ ID NO: 209609 - DNA, 22 bp, Artificial Sequence
  Synthetic oligonucleotide; CTC chr2 60555766 60555787 60555783 60555788 +
aacattgagagagatgtgggct

SEQ ID NO: 209610 - DNA, 22 bp, Artificial Sequence
  Synthetic oligonucleotide; TTG chr2 60555773 60555794 60555790 60555795 +
agagagatgtgggctgtactgg

SEQ ID NO: 209611 - DNA, 22 bp, Artificial Sequence
  Synthetic oligonucleotide; CTG chr2 60555789 60555810 60555806 60555811 +
tactgggattgtgtcaatgtgg

SEQ ID NO: 209612 - DNA, 22 bp, Artificial Sequence
  Synthetic oligonucleotide; CTG chr2 60555794 60555815 60555811 60555816 +
ggattgtgtcaatgtggtttgt

SEQ ID NO: 209613 - DNA, 22 bp, Artificial Sequence
  Synthetic oligonucleotide; TTG chr2 60555800 60555821 60555817 60555822 +
tgtcaatgtggtttgttgtttg

SEQ ID NO: 209614 - DNA, 22 bp, Artificial Sequence
  Synthetic oligonucleotide; TTT chr2 60555814 60555835 60555831 60555836 +
gttgtttgttgttgtttccctc

SEQ ID NO: 209615 - DNA, 22 bp, Artificial Sequence
  Synthetic oligonucleotide; TTG chr2 60555815 60555836 60555832 60555837 +
ttgtttgttgttgtttccctcc

SEQ ID NO: 209616 - DNA, 22 bp, Artificial Sequence
  Synthetic oligonucleotide; TTG chr2 60555818 60555839 60555835 60555840 +
tttgttgttgtttccctccagt

SEQ ID NO: 209617 - DNA, 22 bp, Artificial Sequence
  Synthetic oligonucleotide; TTT chr2 60555821 60555842 60555838 60555843 +
gttgttgtttccctccagtttg

SEQ ID NO: 209618 - DNA, 22 bp, Artificial Sequence
  Synthetic oligonucleotide; TTG chr2 60555822 60555843 60555839 60555844 +
ttgttgtttccctccagtttgt

SEQ ID NO: 209619 - DNA, 22 bp, Artificial Sequence
  Synthetic oligonucleotide; TTG chr2 60555825 60555846 60555842 60555847 +
ttgtttccctccagtttgtggg

SEQ ID NO: 209620 - DNA, 22 bp, Artificial Sequence
  Synthetic oligonucleotide; TTG chr2 60555828 60555849 60555845 60555850 +
tttccctccagtttgtgggagg

SEQ ID NO: 209621 - DNA, 22 bp, Artificial Sequence
  Synthetic oligonucleotide; TTT chr2 60555831 60555852 60555848 60555853 +
ccctccagtttgtgggagggag

SEQ ID NO: 209622 - DNA, 22 bp, Artificial Sequence
  Synthetic oligonucleotide; TTC chr2 60555832 60555853 60555849 60555854 +
cctccagtttgtgggagggaga

SEQ ID NO: 209623 - DNA, 22 bp, Artificial Sequence
  Synthetic oligonucleotide; CTC chr2 60555836 60555857 60555853 60555858 +
cagtttgtgggagggagacctc

SEQ ID NO: 209624 - DNA, 22 bp, Artificial Sequence
  Synthetic oligonucleotide; TTT chr2 60555842 60555863 60555859 60555864 +
gtgggagggagacctcaaattc

SEQ ID NO: 209625 - DNA, 22 bp, Artificial Sequence
  Synthetic oligonucleotide; TTG chr2 60555843 60555864 60555860 60555865 +
tgggagggagacctcaaattct

SEQ ID NO: 209626 - DNA, 22 bp, Artificial Sequence
  Synthetic oligonucleotide; CTC chr2 60555858 60555879 60555875 60555880 +
aaattctgtttaagaagcggga

SEQ ID NO: 209627 - DNA, 22 bp, Artificial Sequence
  Synthetic oligonucleotide; TTC chr2 60555864 60555885 60555881 60555886 +
tgtttaagaagcgggaggattc

SEQ ID NO: 209628 - DNA, 22 bp, Artificial Sequence
  Synthetic oligonucleotide; CTG chr2 60555866 60555887 60555883 60555888 +
tttaagaagcgggaggattcac

SEQ ID NO: 209629 - DNA, 22 bp, Artificial Sequence
  Synthetic oligonucleotide; TTT chr2 60555869 60555890 60555886 60555891 +
aagaagcgggaggattcactag

SEQ ID NO: 209630 - DNA, 22 bp, Artificial Sequence
  Synthetic oligonucleotide; TTA chr2 60555870 60555891 60555887 60555892 +
agaagcgggaggattcactaga

SEQ ID NO: 209631 - DNA, 22 bp, Artificial Sequence
  Synthetic oligonucleotide; TTC chr2 60555886 60555907 60555903 60555908 +
actagaagttaagctctgtagc

SEQ ID NO: 209632 - DNA, 22 bp, Artificial Sequence
  Synthetic oligonucleotide; CTA chr2 60555890 60555911 60555907 60555912 +
gaagttaagctctgtagcttgt

SEQ ID NO: 209633 - DNA, 22 bp, Artificial Sequence
  Synthetic oligonucleotide; TTA chr2 60555897 60555918 60555914 60555919 +
agctctgtagcttgtgtgtgac

SEQ ID NO: 209634 - DNA, 22 bp, Artificial Sequence
  Synthetic oligonucleotide; CTC chr2 60555902 60555923 60555919 60555924 +
tgtagcttgtgtgtgacaccat

SEQ ID NO: 209635 - DNA, 22 bp, Artificial Sequence
  Synthetic oligonucleotide; CTG chr2 60555904 60555925 60555921 60555926 +
tagcttgtgtgtgacaccattt

SEQ ID NO: 209636 - DNA, 22 bp, Artificial Sequence
  Synthetic oligonucleotide; CTT chr2 60555910 60555931 60555927 60555932 +
gtgtgtgacaccatttcccctt

SEQ ID NO: 209637 - DNA, 22 bp, Artificial Sequence
  Synthetic oligonucleotide; TTG chr2 60555911 60555932 60555928 60555933 +
tgtgtgacaccatttccccttt

SEQ ID NO: 209638 - DNA, 22 bp, Artificial Sequence
  Synthetic oligonucleotide; TTT chr2 60555926 60555947 60555943 60555948 +
ccccttttcactgagttcttca

SEQ ID NO: 209639 - DNA, 22 bp, Artificial Sequence
  Synthetic oligonucleotide; TTC chr2 60555927 60555948 60555944 60555949 +
cccttttcactgagttcttcag

SEQ ID NO: 209640 - DNA, 22 bp, Artificial Sequence
  Synthetic oligonucleotide; CTT chr2 60555932 60555953 60555949 60555954 +
ttcactgagttcttcagagcag

SEQ ID NO: 209641 - DNA, 22 bp, Artificial Sequence
  Synthetic oligonucleotide; TTT chr2 60555933 60555954 60555950 60555955 +
tcactgagttcttcagagcagg

SEQ ID NO: 209642 - DNA, 22 bp, Artificial Sequence
  Synthetic oligonucleotide; TTT chr2 60555934 60555955 60555951 60555956 +
cactgagttcttcagagcaggt

SEQ ID NO: 209643 - DNA, 22 bp, Artificial Sequence
  Synthetic oligonucleotide; TTC chr2 60555935 60555956 60555952 60555957 +
actgagttcttcagagcaggtc

SEQ ID NO: 209644 - DNA, 22 bp, Artificial Sequence
  Synthetic oligonucleotide; CTG chr2 60555939 60555960 60555956 60555961 +
agttcttcagagcaggtcagca

SEQ ID NO: 209645 - DNA, 22 bp, Artificial Sequence
  Synthetic oligonucleotide; TTC chr2 60555944 60555965 60555961 60555966 +
ttcagagcaggtcagcatctct

SEQ ID NO: 209646 - DNA, 22 bp, Artificial Sequence
  Synthetic oligonucleotide; CTT chr2 60555946 60555967 60555963 60555968 +
cagagcaggtcagcatctctat

SEQ ID NO: 209647 - DNA, 22 bp, Artificial Sequence
  Synthetic oligonucleotide; TTC chr2 60555947 60555968 60555964 60555969 +
agagcaggtcagcatctctatt

SEQ ID NO: 209648 - DNA, 22 bp, Artificial Sequence
  Synthetic oligonucleotide; CTC chr2 60555965 60555986 60555982 60555987 +
tattccaccacagtctgctttt

SEQ ID NO: 209649 - DNA, 22 bp, Artificial Sequence
  Synthetic oligonucleotide; CTA chr2 60555967 60555988 60555984 60555989 +
ttccaccacagtctgctttttg

SEQ ID NO: 209650 - DNA, 22 bp, Artificial Sequence
  Synthetic oligonucleotide; TTC chr2 60555970 60555991 60555987 60555992 +
caccacagtctgctttttgtct

SEQ ID NO: 209651 - DNA, 22 bp, Artificial Sequence
  Synthetic oligonucleotide; CTG chr2 60555982 60556003 60555999 60556004 +
ctttttgtcttgttaaaccagc

SEQ ID NO: 209652 - DNA, 22 bp, Artificial Sequence
  Synthetic oligonucleotide; CTT chr2 60555985 60556006 60556002 60556007 +
tttgtcttgttaaaccagcctt

SEQ ID NO: 209653 - DNA, 22 bp, Artificial Sequence
  Synthetic oligonucleotide; TTT chr2 60555986 60556007 60556003 60556008 +
ttgtcttgttaaaccagccttg

SEQ ID NO: 209654 - DNA, 22 bp, Artificial Sequence
  Synthetic oligonucleotide; TTT chr2 60555987 60556008 60556004 60556009 +
tgtcttgttaaaccagccttgg

SEQ ID NO: 209655 - DNA, 22 bp, Artificial Sequence
  Synthetic oligonucleotide; TTT chr2 60555988 60556009 60556005 60556010 +
gtcttgttaaaccagccttgga

SEQ ID NO: 209656 - DNA, 22 bp, Artificial Sequence
  Synthetic oligonucleotide; TTG chr2 60555989 60556010 60556006 60556011 +
tcttgttaaaccagccttggag

SEQ ID NO: 209657 - DNA, 22 bp, Artificial Sequence
  Synthetic oligonucleotide; CTT chr2 60555993 60556014 60556010 60556015 +
gttaaaccagccttggagtcac

SEQ ID NO: 209658 - DNA, 22 bp, Artificial Sequence
  Synthetic oligonucleotide; TTG chr2 60555994 60556015 60556011 60556016 +
ttaaaccagccttggagtcacc

SEQ ID NO: 209659 - DNA, 22 bp, Artificial Sequence
  Synthetic oligonucleotide; TTA chr2 60555997 60556018 60556014 60556019 +
aaccagccttggagtcaccaaa

SEQ ID NO: 209660 - DNA, 22 bp, Artificial Sequence
  Synthetic oligonucleotide; CTT chr2 60556007 60556028 60556024 60556029 +
ggagtcaccaaaagaatgtctt

SEQ ID NO: 209661 - DNA, 22 bp, Artificial Sequence
  Synthetic oligonucleotide; TTG chr2 60556008 60556029 60556025 60556030 +
gagtcaccaaaagaatgtcttc

SEQ ID NO: 209662 - DNA, 22 bp, Artificial Sequence
  Synthetic oligonucleotide; CTT chr2 60556029 60556050 60556046 60556051 +
cttggggggtggcgggggagga

SEQ ID NO: 209663 - DNA, 22 bp, Artificial Sequence
  Synthetic oligonucleotide; TTC chr2 60556030 60556051 60556047 60556052 +
ttggggggtggcgggggaggac

SEQ ID NO: 209664 - DNA, 22 bp, Artificial Sequence
  Synthetic oligonucleotide; CTT chr2 60556032 60556053 60556049 60556054 +
ggggggtggcgggggaggacga

SEQ ID NO: 209665 - DNA, 22 bp, Artificial Sequence
  Synthetic oligonucleotide; TTG chr2 60556033 60556054 60556050 60556055 +
gggggtggcgggggaggacgac

SEQ ID NO: 209666 - DNA, 22 bp, Artificial Sequence
  Synthetic oligonucleotide; TTG chr2 60556069 60556090 60556086 60556091 +
gagggaaggtgaagagagggaa

SEQ ID NO: 209667 - DNA, 22 bp, Artificial Sequence
  Synthetic oligonucleotide; CTG chr2 60556107 60556128 60556124 60556129 +
ggaggcctttgaaaaataaata

SEQ ID NO: 209668 - DNA, 22 bp, Artificial Sequence
  Synthetic oligonucleotide; CTT chr2 60556116 60556137 60556133 60556138 +
tgaaaaataaataaataaaaga

SEQ ID NO: 209669 - DNA, 22 bp, Artificial Sequence
  Synthetic oligonucleotide; TTT chr2 60556117 60556138 60556134 60556139 +
gaaaaataaataaataaaagaa

SEQ ID NO: 209670 - DNA, 22 bp, Artificial Sequence
  Synthetic oligonucleotide; TTG chr2 60556118 60556139 60556135 60556140 +
aaaaataaataaataaaagaaa

SEQ ID NO: 209671 - DNA, 22 bp, Artificial Sequence
  Synthetic oligonucleotide; CTT chr2 60556148 60556169 60556165 60556170 +
caggtaacaatagtgagccaga

SEQ ID NO: 209672 - DNA, 22 bp, Artificial Sequence
  Synthetic oligonucleotide; TTC chr2 60556149 60556170 60556166 60556171 +
aggtaacaatagtgagccagat

SEQ ID NO: 209673 - DNA, 22 bp, Artificial Sequence
  Synthetic oligonucleotide; TTC chr2 60556173 60556194 60556190 60556195 +
tttcagaaccaagcttttcaga

SEQ ID NO: 209674 - DNA, 22 bp, Artificial Sequence
  Synthetic oligonucleotide; CTT chr2 60556175 60556196 60556192 60556197 +
tcagaaccaagcttttcagatt

SEQ ID NO: 209675 - DNA, 22 bp, Artificial Sequence
  Synthetic oligonucleotide; TTT chr2 60556176 60556197 60556193 60556198 +
cagaaccaagcttttcagattt

SEQ ID NO: 209676 - DNA, 22 bp, Artificial Sequence
  Synthetic oligonucleotide; TTC chr2 60556177 60556198 60556194 60556199 +
agaaccaagcttttcagatttg

SEQ ID NO: 209677 - DNA, 22 bp, Artificial Sequence
  Synthetic oligonucleotide; CTT chr2 60556189 60556210 60556206 60556211 +
ttcagatttgaatattgttccc

SEQ ID NO: 209678 - DNA, 22 bp, Artificial Sequence
  Synthetic oligonucleotide; TTT chr2 60556190 60556211 60556207 60556212 +
tcagatttgaatattgttccca

SEQ ID NO: 209679 - DNA, 22 bp, Artificial Sequence
  Synthetic oligonucleotide; TTT chr2 60556191 60556212 60556208 60556213 +
cagatttgaatattgttcccac

SEQ ID NO: 209680 - DNA, 22 bp, Artificial Sequence
  Synthetic oligonucleotide; TTC chr2 60556192 60556213 60556209 60556214 +
agatttgaatattgttcccacc

SEQ ID NO: 209681 - DNA, 22 bp, Artificial Sequence
  Synthetic oligonucleotide; TTT chr2 60556198 60556219 60556215 60556220 +
gaatattgttcccacccgtcca

SEQ ID NO: 209682 - DNA, 22 bp, Artificial Sequence
  Synthetic oligonucleotide; TTG chr2 60556199 60556220 60556216 60556221 +
aatattgttcccacccgtccat

SEQ ID NO: 209683 - DNA, 22 bp, Artificial Sequence
  Synthetic oligonucleotide; TTG chr2 60556206 60556227 60556223 60556228 +
ttcccacccgtccataaaagtc

SEQ ID NO: 209684 - DNA, 22 bp, Artificial Sequence
  Synthetic oligonucleotide; TTC chr2 60556209 60556230 60556226 60556231 +
ccacccgtccataaaagtccat

SEQ ID NO: 209685 - DNA, 22 bp, Artificial Sequence
  Synthetic oligonucleotide; CTA chr2 60556234 60556255 60556251 60556256 +
tagagaagatatataaatgagc

SEQ ID NO: 209686 - DNA, 22 bp, Artificial Sequence
  Synthetic oligonucleotide; TTG chr2 60556268 60556289 60556285 60556290 +
tggaaatatatatatatgtatg

SEQ ID NO: 209687 - DNA, 22 bp, Artificial Sequence
  Synthetic oligonucleotide; TTT chr2 60556294 60556315 60556311 60556316 +
atatataatggtgtgtataaag

SEQ ID NO: 209688 - DNA, 22 bp, Artificial Sequence
  Synthetic oligonucleotide; TTA chr2 60556295 60556316 60556312 60556317 +
tatataatggtgtgtataaagc

SEQ ID NO: 209689 - DNA, 22 bp, Artificial Sequence
  Synthetic oligonucleotide; CTT chr2 60556319 60556340 60556336 60556341 +
ttcggggttggctgtagtgtaa

SEQ ID NO: 209690 - DNA, 22 bp, Artificial Sequence
  Synthetic oligonucleotide; TTT chr2 60556320 60556341 60556337 60556342 +
tcggggttggctgtagtgtaaa

SEQ ID NO: 209691 - DNA, 22 bp, Artificial Sequence
  Synthetic oligonucleotide; TTT chr2 60556321 60556342 60556338 60556343 +
cggggttggctgtagtgtaaaa

SEQ ID NO: 209692 - DNA, 22 bp, Artificial Sequence
  Synthetic oligonucleotide; TTC chr2 60556322 60556343 60556339 60556344 +
ggggttggctgtagtgtaaaaa

SEQ ID NO: 209693 - DNA, 22 bp, Artificial Sequence
  Synthetic oligonucleotide; TTG chr2 60556329 60556350 60556346 60556351 +
gctgtagtgtaaaaagtaatga

SEQ ID NO: 209694 - DNA, 22 bp, Artificial Sequence
  Synthetic oligonucleotide; CTG chr2 60556333 60556354 60556350 60556355 +
tagtgtaaaaagtaatgacttt

SEQ ID NO: 209695 - DNA, 22 bp, Artificial Sequence
  Synthetic oligonucleotide; CTT chr2 60556354 60556375 60556371 60556376 +
tattacctctgaaaggttctgt

SEQ ID NO: 209696 - DNA, 22 bp, Artificial Sequence
  Synthetic oligonucleotide; TTT chr2 60556355 60556376 60556372 60556377 +
attacctctgaaaggttctgtg

SEQ ID NO: 209697 - DNA, 22 bp, Artificial Sequence
  Synthetic oligonucleotide; TTA chr2 60556356 60556377 60556373 60556378 +
ttacctctgaaaggttctgtgg

SEQ ID NO: 209698 - DNA, 22 bp, Artificial Sequence
  Synthetic oligonucleotide; TTA chr2 60556359 60556380 60556376 60556381 +
cctctgaaaggttctgtggttc

SEQ ID NO: 209699 - DNA, 22 bp, Artificial Sequence
  Synthetic oligonucleotide; CTC chr2 60556363 60556384 60556380 60556385 +
tgaaaggttctgtggttcacat

SEQ ID NO: 209700 - DNA, 22 bp, Artificial Sequence
  Synthetic oligonucleotide; CTG chr2 60556365 60556386 60556382 60556387 +
aaaggttctgtggttcacattt

SEQ ID NO: 209701 - DNA, 22 bp, Artificial Sequence
  Synthetic oligonucleotide; TTC chr2 60556373 60556394 60556390 60556395 +
tgtggttcacatttaacagtct

SEQ ID NO: 209702 - DNA, 22 bp, Artificial Sequence
  Synthetic oligonucleotide; CTG chr2 60556375 60556396 60556392 60556397 +
tggttcacatttaacagtcttc

SEQ ID NO: 209703 - DNA, 22 bp, Artificial Sequence
  Synthetic oligonucleotide; TTC chr2 60556381 60556402 60556398 60556403 +
acatttaacagtcttctgaatt

SEQ ID NO: 209704 - DNA, 22 bp, Artificial Sequence
  Synthetic oligonucleotide; TTT chr2 60556387 60556408 60556404 60556409 +
aacagtcttctgaattacaatt

SEQ ID NO: 209705 - DNA, 22 bp, Artificial Sequence
  Synthetic oligonucleotide; TTA chr2 60556388 60556409 60556405 60556410 +
acagtcttctgaattacaattc

SEQ ID NO: 209706 - DNA, 22 bp, Artificial Sequence
  Synthetic oligonucleotide; CTT chr2 60556396 60556417 60556413 60556418 +
ctgaattacaattcattacaca

SEQ ID NO: 209707 - DNA, 22 bp, Artificial Sequence
  Synthetic oligonucleotide; TTC chr2 60556397 60556418 60556414 60556419 +
tgaattacaattcattacacaa

SEQ ID NO: 209708 - DNA, 22 bp, Artificial Sequence
  Synthetic oligonucleotide; CTG chr2 60556399 60556420 60556416 60556421 +
aattacaattcattacacaatt

SEQ ID NO: 209709 - DNA, 22 bp, Artificial Sequence
  Synthetic oligonucleotide; TTA chr2 60556404 60556425 60556421 60556426 +
caattcattacacaattgtgtg

SEQ ID NO: 209710 - DNA, 22 bp, Artificial Sequence
  Synthetic oligonucleotide; TTC chr2 60556410 60556431 60556427 60556432 +
attacacaattgtgtgcgctct

SEQ ID NO: 209711 - DNA, 22 bp, Artificial Sequence
  Synthetic oligonucleotide; TTA chr2 60556414 60556435 60556431 60556436 +
cacaattgtgtgcgctctgacg

SEQ ID NO: 209712 - DNA, 22 bp, Artificial Sequence
  Synthetic oligonucleotide; TTG chr2 60556422 60556443 60556439 60556444 +
tgtgcgctctgacgatggcacc

SEQ ID NO: 209713 - DNA, 22 bp, Artificial Sequence
  Synthetic oligonucleotide; CTC chr2 60556431 60556452 60556448 60556453 +
tgacgatggcaccctatcaggg

SEQ ID NO: 209714 - DNA, 22 bp, Artificial Sequence
  Synthetic oligonucleotide; CTG chr2 60556433 60556454 60556450 60556455 +
acgatggcaccctatcagggct

SEQ ID NO: 209715 - DNA, 22 bp, Artificial Sequence
  Synthetic oligonucleotide; CTA chr2 60556447 60556468 60556464 60556469 +
tcagggctgctatctgtggcta

SEQ ID NO: 209716 - DNA, 22 bp, Artificial Sequence
  Synthetic oligonucleotide; CTG chr2 60556456 60556477 60556473 60556478 +
ctatctgtggctatttccaata

SEQ ID NO: 209717 - DNA, 22 bp, Artificial Sequence
  Synthetic oligonucleotide; CTA chr2 60556459 60556480 60556476 60556481 +
tctgtggctatttccaataaat

SEQ ID NO: 209718 - DNA, 22 bp, Artificial Sequence
  Synthetic oligonucleotide; CTG chr2 60556463 60556484 60556480 60556485 +
tggctatttccaataaataact

SEQ ID NO: 209719 - DNA, 22 bp, Artificial Sequence
  Synthetic oligonucleotide; CTA chr2 60556469 60556490 60556486 60556491 +
tttccaataaataactggcaac

SEQ ID NO: 209720 - DNA, 22 bp, Artificial Sequence
  Synthetic oligonucleotide; TTT chr2 60556472 60556493 60556489 60556494 +
ccaataaataactggcaacatt

SEQ ID NO: 209721 - DNA, 22 bp, Artificial Sequence
  Synthetic oligonucleotide; TTC chr2 60556473 60556494 60556490 60556495 +
caataaataactggcaacattt

SEQ ID NO: 209722 - DNA, 22 bp, Artificial Sequence
  Synthetic oligonucleotide; CTG chr2 60556486 60556507 60556503 60556508 +
gcaacattttattgattttcct

SEQ ID NO: 209723 - DNA, 22 bp, Artificial Sequence
  Synthetic oligonucleotide; TTT chr2 60556495 60556516 60556512 60556517 +
tattgattttcctttttaaaaa

SEQ ID NO: 209724 - DNA, 22 bp, Artificial Sequence
  Synthetic oligonucleotide; TTT chr2 60556496 60556517 60556513 60556518 +
attgattttcctttttaaaaaa

SEQ ID NO: 209725 - DNA, 22 bp, Artificial Sequence
  Synthetic oligonucleotide; TTA chr2 60556497 60556518 60556514 60556519 +
ttgattttcctttttaaaaaaa

SEQ ID NO: 209726 - DNA, 22 bp, Artificial Sequence
  Synthetic oligonucleotide; TTG chr2 60556500 60556521 60556517 60556522 +
attttcctttttaaaaaaaaac

SEQ ID NO: 209727 - DNA, 22 bp, Artificial Sequence
  Synthetic oligonucleotide; TTT chr2 60556504 60556525 60556521 60556526 +
tcctttttaaaaaaaaacatag

SEQ ID NO: 209728 - DNA, 22 bp, Artificial Sequence
  Synthetic oligonucleotide; TTT chr2 60556505 60556526 60556522 60556527 +
cctttttaaaaaaaaacatagg

SEQ ID NO: 209729 - DNA, 22 bp, Artificial Sequence
  Synthetic oligonucleotide; TTC chr2 60556506 60556527 60556523 60556528 +
ctttttaaaaaaaaacatagga

SEQ ID NO: 209730 - DNA, 22 bp, Artificial Sequence
  Synthetic oligonucleotide; CTT chr2 60556509 60556530 60556526 60556531 +
tttaaaaaaaaacataggaaat

SEQ ID NO: 209731 - DNA, 22 bp, Artificial Sequence
  Synthetic oligonucleotide; TTT chr2 60556510 60556531 60556527 60556532 +
ttaaaaaaaaacataggaaatt

SEQ ID NO: 209732 - DNA, 22 bp, Artificial Sequence
  Synthetic oligonucleotide; TTT chr2 60556511 60556532 60556528 60556533 +
taaaaaaaaacataggaaatta

SEQ ID NO: 209733 - DNA, 22 bp, Artificial Sequence
  Synthetic oligonucleotide; TTT chr2 60556512 60556533 60556529 60556534 +
aaaaaaaaacataggaaattaa

SEQ ID NO: 209734 - DNA, 22 bp, Artificial Sequence
  Synthetic oligonucleotide; TTA chr2 60556513 60556534 60556530 60556535 +
aaaaaaaacataggaaattaag

SEQ ID NO: 209735 - DNA, 22 bp, Artificial Sequence
  Synthetic oligonucleotide; TTA chr2 60556533 60556554 60556550 60556555 +
agcacttagttacaagtaggtc

SEQ ID NO: 209736 - DNA, 22 bp, Artificial Sequence
  Synthetic oligonucleotide; CTT chr2 60556540 60556561 60556557 60556562 +
agttacaagtaggtctgctatg

SEQ ID NO: 209737 - DNA, 22 bp, Artificial Sequence
  Synthetic oligonucleotide; TTA chr2 60556541 60556562 60556558 60556563 +
gttacaagtaggtctgctatgt

SEQ ID NO: 209738 - DNA, 22 bp, Artificial Sequence
  Synthetic oligonucleotide; TTA chr2 60556545 60556566 60556562 60556567 +
caagtaggtctgctatgttatt

SEQ ID NO: 209739 - DNA, 22 bp, Artificial Sequence
  Synthetic oligonucleotide; CTA chr2 60556527 60556548 60556532 60556527 -
cttgtaactaagtgcttaattt

SEQ ID NO: 209740 - DNA, 22 bp, Artificial Sequence
  Synthetic oligonucleotide; CTT chr2 60556524 60556545 60556529 60556524 -
gtaactaagtgcttaatttcct

SEQ ID NO: 209741 - DNA, 22 bp, Artificial Sequence
  Synthetic oligonucleotide; TTG chr2 60556523 60556544 60556528 60556523 -
taactaagtgcttaatttccta

SEQ ID NO: 209742 - DNA, 22 bp, Artificial Sequence
  Synthetic oligonucleotide; CTA chr2 60556517 60556538 60556522 60556517 -
agtgcttaatttcctatgtttt

SEQ ID NO: 209743 - DNA, 22 bp, Artificial Sequence
  Synthetic oligonucleotide; CTT chr2 60556510 60556531 60556515 60556510 -
aatttcctatgtttttttttaa

SEQ ID NO: 209744 - DNA, 22 bp, Artificial Sequence
  Synthetic oligonucleotide; TTA chr2 60556509 60556530 60556514 60556509 -
atttcctatgtttttttttaaa

SEQ ID NO: 209745 - DNA, 22 bp, Artificial Sequence
  Synthetic oligonucleotide; TTT chr2 60556505 60556526 60556510 60556505 -
cctatgtttttttttaaaaagg

SEQ ID NO: 209746 - DNA, 22 bp, Artificial Sequence
  Synthetic oligonucleotide; TTC chr2 60556504 60556525 60556509 60556504 -
ctatgtttttttttaaaaagga

SEQ ID NO: 209747 - DNA, 22 bp, Artificial Sequence
  Synthetic oligonucleotide; CTA chr2 60556501 60556522 60556506 60556501 -
tgtttttttttaaaaaggaaaa

SEQ ID NO: 209748 - DNA, 22 bp, Artificial Sequence
  Synthetic oligonucleotide; TTT chr2 60556496 60556517 60556501 60556496 -
ttttttaaaaaggaaaatcaat

SEQ ID NO: 209749 - DNA, 22 bp, Artificial Sequence
  Synthetic oligonucleotide; TTT chr2 60556495 60556516 60556500 60556495 -
tttttaaaaaggaaaatcaata

SEQ ID NO: 209750 - DNA, 22 bp, Artificial Sequence
  Synthetic oligonucleotide; TTT chr2 60556494 60556515 60556499 60556494 -
ttttaaaaaggaaaatcaataa

SEQ ID NO: 209751 - DNA, 22 bp, Artificial Sequence
  Synthetic oligonucleotide; TTT chr2 60556493 60556514 60556498 60556493 -
tttaaaaaggaaaatcaataaa

SEQ ID NO: 209752 - DNA, 22 bp, Artificial Sequence
  Synthetic oligonucleotide; TTT chr2 60556492 60556513 60556497 60556492 -
ttaaaaaggaaaatcaataaaa

SEQ ID NO: 209753 - DNA, 22 bp, Artificial Sequence
  Synthetic oligonucleotide; TTT chr2 60556491 60556512 60556496 60556491 -
taaaaaggaaaatcaataaaat

SEQ ID NO: 209754 - DNA, 22 bp, Artificial Sequence
  Synthetic oligonucleotide; TTT chr2 60556490 60556511 60556495 60556490 -
aaaaaggaaaatcaataaaatg

SEQ ID NO: 209755 - DNA, 22 bp, Artificial Sequence
  Synthetic oligonucleotide; TTA chr2 60556489 60556510 60556494 60556489 -
aaaaggaaaatcaataaaatgt

SEQ ID NO: 209756 - DNA, 22 bp, Artificial Sequence
  Synthetic oligonucleotide; TTG chr2 60556465 60556486 60556470 60556465 -
ccagttatttattggaaatagc

SEQ ID NO: 209757 - DNA, 22 bp, Artificial Sequence
  Synthetic oligonucleotide; TTA chr2 60556458 60556479 60556463 60556458 -
tttattggaaatagccacagat

SEQ ID NO: 209758 - DNA, 22 bp, Artificial Sequence
  Synthetic oligonucleotide; TTT chr2 60556455 60556476 60556460 60556455 -
attggaaatagccacagatagc

SEQ ID NO: 209759 - DNA, 22 bp, Artificial Sequence
  Synthetic oligonucleotide; TTA chr2 60556454 60556475 60556459 60556454 -
ttggaaatagccacagatagca

SEQ ID NO: 209760 - DNA, 22 bp, Artificial Sequence
  Synthetic oligonucleotide; TTG chr2 60556451 60556472 60556456 60556451 -
gaaatagccacagatagcagcc

SEQ ID NO: 209761 - DNA, 22 bp, Artificial Sequence
  Synthetic oligonucleotide; CTG chr2 60556426 60556447 60556431 60556426 -
atagggtgccatcgtcagagcg

SEQ ID NO: 209762 - DNA, 22 bp, Artificial Sequence
  Synthetic oligonucleotide; TTG chr2 60556394 60556415 60556399 60556394 -
tgtaatgaattgtaattcagaa

SEQ ID NO: 209763 - DNA, 22 bp, Artificial Sequence
  Synthetic oligonucleotide; TTG chr2 60556382 60556403 60556387 60556382 -
taattcagaagactgttaaatg

SEQ ID NO: 209764 - DNA, 22 bp, Artificial Sequence
  Synthetic oligonucleotide; TTC chr2 60556376 60556397 60556381 60556376 -
agaagactgttaaatgtgaacc

SEQ ID NO: 209765 - DNA, 22 bp, Artificial Sequence
  Synthetic oligonucleotide; CTG chr2 60556367 60556388 60556372 60556367 -
ttaaatgtgaaccacagaacct

SEQ ID NO: 209766 - DNA, 22 bp, Artificial Sequence
  Synthetic oligonucleotide; TTA chr2 60556364 60556385 60556369 60556364 -
aatgtgaaccacagaacctttc

SEQ ID NO: 209767 - DNA, 22 bp, Artificial Sequence
  Synthetic oligonucleotide; CTT chr2 60556344 60556365 60556349 60556344 -
tcagaggtaataaagtcattac

SEQ ID NO: 209768 - DNA, 22 bp, Artificial Sequence
  Synthetic oligonucleotide; TTT chr2 60556343 60556364 60556348 60556343 -
cagaggtaataaagtcattact

SEQ ID NO: 209769 - DNA, 22 bp, Artificial Sequence
  Synthetic oligonucleotide; TTC chr2 60556342 60556363 60556347 60556342 -
agaggtaataaagtcattactt

SEQ ID NO: 209770 - DNA, 22 bp, Artificial Sequence
  Synthetic oligonucleotide; TTA chr2 60556323 60556344 60556328 60556323 -
ctttttacactacagccaaccc

SEQ ID NO: 209771 - DNA, 22 bp, Artificial Sequence
  Synthetic oligonucleotide; CTT chr2 60556320 60556341 60556325 60556320 -
tttacactacagccaaccccga

SEQ ID NO: 209772 - DNA, 22 bp, Artificial Sequence
  Synthetic oligonucleotide; TTT chr2 60556319 60556340 60556324 60556319 -
ttacactacagccaaccccgaa

SEQ ID NO: 209773 - DNA, 22 bp, Artificial Sequence
  Synthetic oligonucleotide; TTT chr2 60556318 60556339 60556323 60556318 -
tacactacagccaaccccgaaa

SEQ ID NO: 209774 - DNA, 22 bp, Artificial Sequence
  Synthetic oligonucleotide; TTT chr2 60556317 60556338 60556322 60556317 -
acactacagccaaccccgaaaa

SEQ ID NO: 209775 - DNA, 22 bp, Artificial Sequence
  Synthetic oligonucleotide; TTA chr2 60556316 60556337 60556321 60556316 -
cactacagccaaccccgaaaag

SEQ ID NO: 209776 - DNA, 22 bp, Artificial Sequence
  Synthetic oligonucleotide; CTA chr2 60556311 60556332 60556316 60556311 -
cagccaaccccgaaaagcttta

SEQ ID NO: 209777 - DNA, 22 bp, Artificial Sequence
  Synthetic oligonucleotide; CTT chr2 60556291 60556312 60556296 60556291 -
tatacacaccattatatataaa

SEQ ID NO: 209778 - DNA, 22 bp, Artificial Sequence
  Synthetic oligonucleotide; TTT chr2 60556290 60556311 60556295 60556290 -
atacacaccattatatataaat

SEQ ID NO: 209779 - DNA, 22 bp, Artificial Sequence
  Synthetic oligonucleotide; TTA chr2 60556289 60556310 60556294 60556289 -
tacacaccattatatataaatc

SEQ ID NO: 209780 - DNA, 22 bp, Artificial Sequence
  Synthetic oligonucleotide; TTA chr2 60556277 60556298 60556282 60556277 -
tatataaatcatacatatatat

SEQ ID NO: 209781 - DNA, 22 bp, Artificial Sequence
  Synthetic oligonucleotide; TTT chr2 60556249 60556270 60556254 60556249 -
ccacaacactcactcgctcatt

SEQ ID NO: 209782 - DNA, 22 bp, Artificial Sequence
  Synthetic oligonucleotide; TTC chr2 60556248 60556269 60556253 60556248 -
cacaacactcactcgctcattt

SEQ ID NO: 209783 - DNA, 22 bp, Artificial Sequence
  Synthetic oligonucleotide; CTC chr2 60556238 60556259 60556243 60556238 -
actcgctcatttatatatcttc

SEQ ID NO: 209784 - DNA, 22 bp, Artificial Sequence
  Synthetic oligonucleotide; CTC chr2 60556234 60556255 60556239 60556234 -
gctcatttatatatcttctcta

SEQ ID NO: 209785 - DNA, 22 bp, Artificial Sequence
  Synthetic oligonucleotide; CTC chr2 60556230 60556251 60556235 60556230 -
atttatatatcttctctataga

SEQ ID NO: 209786 - DNA, 22 bp, Artificial Sequence
  Synthetic oligonucleotide; TTT chr2 60556226 60556247 60556231 60556226 -
atatatcttctctatagatgga

SEQ ID NO: 209787 - DNA, 22 bp, Artificial Sequence
  Synthetic oligonucleotide; TTA chr2 60556225 60556246 60556230 60556225 -
tatatcttctctatagatggac

SEQ ID NO: 209788 - DNA, 22 bp, Artificial Sequence
  Synthetic oligonucleotide; CTT chr2 60556217 60556238 60556222 60556217 -
ctctatagatggacttttatgg

SEQ ID NO: 209789 - DNA, 22 bp, Artificial Sequence
  Synthetic oligonucleotide; TTC chr2 60556216 60556237 60556221 60556216 -
tctatagatggacttttatgga

SEQ ID NO: 209790 - DNA, 22 bp, Artificial Sequence
  Synthetic oligonucleotide; CTC chr2 60556214 60556235 60556219 60556214 -
tatagatggacttttatggacg

SEQ ID NO: 209791 - DNA, 22 bp, Artificial Sequence
  Synthetic oligonucleotide; CTA chr2 60556212 60556233 60556217 60556212 -
tagatggacttttatggacggg

SEQ ID NO: 209792 - DNA, 22 bp, Artificial Sequence
  Synthetic oligonucleotide; CTT chr2 60556201 60556222 60556206 60556201 -
ttatggacgggtgggaacaata

SEQ ID NO: 209793 - DNA, 22 bp, Artificial Sequence
  Synthetic oligonucleotide; TTT chr2 60556200 60556221 60556205 60556200 -
tatggacgggtgggaacaatat

SEQ ID NO: 209794 - DNA, 22 bp, Artificial Sequence
  Synthetic oligonucleotide; TTT chr2 60556199 60556220 60556204 60556199 -
atggacgggtgggaacaatatt

SEQ ID NO: 209795 - DNA, 22 bp, Artificial Sequence
  Synthetic oligonucleotide; TTA chr2 60556198 60556219 60556203 60556198 -
tggacgggtgggaacaatattc

SEQ ID NO: 209796 - DNA, 22 bp, Artificial Sequence
  Synthetic oligonucleotide; TTC chr2 60556176 60556197 60556181 60556176 -
aaatctgaaaagcttggttctg

SEQ ID NO: 209797 - DNA, 22 bp, Artificial Sequence
  Synthetic oligonucleotide; CTG chr2 60556169 60556190 60556174 60556169 -
aaaagcttggttctgaaagaat

SEQ ID NO: 209798 - DNA, 22 bp, Artificial Sequence
  Synthetic oligonucleotide; CTT chr2 60556161 60556182 60556166 60556161 -
ggttctgaaagaatctggctca

SEQ ID NO: 209799 - DNA, 22 bp, Artificial Sequence
  Synthetic oligonucleotide; TTG chr2 60556160 60556181 60556165 60556160 -
gttctgaaagaatctggctcac

SEQ ID NO: 209800 - DNA, 22 bp, Artificial Sequence
  Synthetic oligonucleotide; TTC chr2 60556156 60556177 60556161 60556156 -
tgaaagaatctggctcactatt

SEQ ID NO: 209801 - DNA, 22 bp, Artificial Sequence
  Synthetic oligonucleotide; CTG chr2 60556154 60556175 60556159 60556154 -
aaagaatctggctcactattgt

SEQ ID NO: 209802 - DNA, 22 bp, Artificial Sequence
  Synthetic oligonucleotide; CTG chr2 60556144 60556165 60556149 60556144 -
gctcactattgttacctgaagg

SEQ ID NO: 209803 - DNA, 22 bp, Artificial Sequence
  Synthetic oligonucleotide; CTC chr2 60556140 60556161 60556145 60556140 -
actattgttacctgaaggggct

SEQ ID NO: 209804 - DNA, 22 bp, Artificial Sequence
  Synthetic oligonucleotide; CTA chr2 60556136 60556157 60556141 60556136 -
ttgttacctgaaggggcttttc

SEQ ID NO: 209805 - DNA, 22 bp, Artificial Sequence
  Synthetic oligonucleotide; TTG chr2 60556133 60556154 60556138 60556133 -
ttacctgaaggggcttttcttt

SEQ ID NO: 209806 - DNA, 22 bp, Artificial Sequence
  Synthetic oligonucleotide; TTA chr2 60556130 60556151 60556135 60556130 -
cctgaaggggcttttcttttat

SEQ ID NO: 209807 - DNA, 22 bp, Artificial Sequence
  Synthetic oligonucleotide; CTG chr2 60556126 60556147 60556131 60556126 -
aaggggcttttcttttatttat

SEQ ID NO: 209808 - DNA, 22 bp, Artificial Sequence
  Synthetic oligonucleotide; CTT chr2 60556117 60556138 60556122 60556117 -
ttcttttatttatttatttttc

SEQ ID NO: 209809 - DNA, 22 bp, Artificial Sequence
  Synthetic oligonucleotide; TTT chr2 60556116 60556137 60556121 60556116 -
tcttttatttatttatttttca

SEQ ID NO: 209810 - DNA, 22 bp, Artificial Sequence
  Synthetic oligonucleotide; TTT chr2 60556115 60556136 60556120 60556115 -
cttttatttatttatttttcaa

SEQ ID NO: 209811 - DNA, 22 bp, Artificial Sequence
  Synthetic oligonucleotide; TTC chr2 60556114 60556135 60556119 60556114 -
ttttatttatttatttttcaaa

SEQ ID NO: 209812 - DNA, 22 bp, Artificial Sequence
  Synthetic oligonucleotide; CTT chr2 60556112 60556133 60556117 60556112 -
ttatttatttatttttcaaagg

SEQ ID NO: 209813 - DNA, 22 bp, Artificial Sequence
  Synthetic oligonucleotide; TTT chr2 60556111 60556132 60556116 60556111 -
tatttatttatttttcaaaggc

SEQ ID NO: 209814 - DNA, 22 bp, Artificial Sequence
  Synthetic oligonucleotide; TTT chr2 60556110 60556131 60556115 60556110 -
atttatttatttttcaaaggcc

SEQ ID NO: 209815 - DNA, 22 bp, Artificial Sequence
  Synthetic oligonucleotide; TTA chr2 60556109 60556130 60556114 60556109 -
tttatttatttttcaaaggcct

SEQ ID NO: 209816 - DNA, 22 bp, Artificial Sequence
  Synthetic oligonucleotide; TTT chr2 60556106 60556127 60556111 60556106 -
atttatttttcaaaggcctccc

SEQ ID NO: 209817 - DNA, 22 bp, Artificial Sequence
  Synthetic oligonucleotide; TTA chr2 60556105 60556126 60556110 60556105 -
tttatttttcaaaggcctccca

SEQ ID NO: 209818 - DNA, 22 bp, Artificial Sequence
  Synthetic oligonucleotide; TTT chr2 60556102 60556123 60556107 60556102 -
atttttcaaaggcctcccagtt

SEQ ID NO: 209819 - DNA, 22 bp, Artificial Sequence
  Synthetic oligonucleotide; TTA chr2 60556101 60556122 60556106 60556101 -
tttttcaaaggcctcccagttg

SEQ ID NO: 209820 - DNA, 22 bp, Artificial Sequence
  Synthetic oligonucleotide; TTT chr2 60556098 60556119 60556103 60556098 -
ttcaaaggcctcccagttgcac

SEQ ID NO: 209821 - DNA, 22 bp, Artificial Sequence
  Synthetic oligonucleotide; TTT chr2 60556097 60556118 60556102 60556097 -
tcaaaggcctcccagttgcact

SEQ ID NO: 209822 - DNA, 22 bp, Artificial Sequence
  Synthetic oligonucleotide; TTT chr2 60556096 60556117 60556101 60556096 -
caaaggcctcccagttgcactt

SEQ ID NO: 209823 - DNA, 22 bp, Artificial Sequence
  Synthetic oligonucleotide; TTC chr2 60556095 60556116 60556100 60556095 -
aaaggcctcccagttgcacttt

SEQ ID NO: 209824 - DNA, 22 bp, Artificial Sequence
  Synthetic oligonucleotide; CTC chr2 60556086 60556107 60556091 60556086 -
ccagttgcactttcttcttccc

SEQ ID NO: 209825 - DNA, 22 bp, Artificial Sequence
  Synthetic oligonucleotide; TTG chr2 60556079 60556100 60556084 60556079 -
cactttcttcttccctctcttc

SEQ ID NO: 209826 - DNA, 22 bp, Artificial Sequence
  Synthetic oligonucleotide; CTT chr2 60556074 60556095 60556079 60556074 -
tcttcttccctctcttcacctt

SEQ ID NO: 209827 - DNA, 22 bp, Artificial Sequence
  Synthetic oligonucleotide; TTT chr2 60556073 60556094 60556078 60556073 -
cttcttccctctcttcaccttc

SEQ ID NO: 209828 - DNA, 22 bp, Artificial Sequence
  Synthetic oligonucleotide; TTC chr2 60556072 60556093 60556077 60556072 -
ttcttccctctcttcaccttcc

SEQ ID NO: 209829 - DNA, 22 bp, Artificial Sequence
  Synthetic oligonucleotide; CTT chr2 60556070 60556091 60556075 60556070 -
cttccctctcttcaccttccct

SEQ ID NO: 209830 - DNA, 22 bp, Artificial Sequence
  Synthetic oligonucleotide; TTC chr2 60556069 60556090 60556074 60556069 -
ttccctctcttcaccttccctc

SEQ ID NO: 209831 - DNA, 22 bp, Artificial Sequence
  Synthetic oligonucleotide; CTT chr2 60556067 60556088 60556072 60556067 -
ccctctcttcaccttccctcca

SEQ ID NO: 209832 - DNA, 22 bp, Artificial Sequence
  Synthetic oligonucleotide; TTC chr2 60556066 60556087 60556071 60556066 -
cctctcttcaccttccctccaa

SEQ ID NO: 209833 - DNA, 22 bp, Artificial Sequence
  Synthetic oligonucleotide; CTC chr2 60556062 60556083 60556067 60556062 -
tcttcaccttccctccaaccgt

SEQ ID NO: 209834 - DNA, 22 bp, Artificial Sequence
  Synthetic oligonucleotide; CTC chr2 60556060 60556081 60556065 60556060 -
ttcaccttccctccaaccgtcc

SEQ ID NO: 209835 - DNA, 22 bp, Artificial Sequence
  Synthetic oligonucleotide; CTT chr2 60556058 60556079 60556063 60556058 -
caccttccctccaaccgtcccc

SEQ ID NO: 209836 - DNA, 22 bp, Artificial Sequence
  Synthetic oligonucleotide; TTC chr2 60556057 60556078 60556062 60556057 -
accttccctccaaccgtccccc

SEQ ID NO: 209837 - DNA, 22 bp, Artificial Sequence
  Synthetic oligonucleotide; CTT chr2 60556052 60556073 60556057 60556052 -
ccctccaaccgtcccccacgtc

SEQ ID NO: 209838 - DNA, 22 bp, Artificial Sequence
  Synthetic oligonucleotide; TTC chr2 60556051 60556072 60556056 60556051 -
cctccaaccgtcccccacgtcg

SEQ ID NO: 209839 - DNA, 22 bp, Artificial Sequence
  Synthetic oligonucleotide; CTC chr2 60556047 60556068 60556052 60556047 -
caaccgtcccccacgtcgtcct

SEQ ID NO: 209840 - DNA, 22 bp, Artificial Sequence
  Synthetic oligonucleotide; CTC chr2 60556024 60556045 60556029 60556024 -
ccccgccaccccccaagaagac

SEQ ID NO: 209841 - DNA, 22 bp, Artificial Sequence
  Synthetic oligonucleotide; TTC chr2 60555998 60556019 60556003 60555998 -
ttttggtgactccaaggctggt

SEQ ID NO: 209842 - DNA, 22 bp, Artificial Sequence
  Synthetic oligonucleotide; CTT chr2 60555996 60556017 60556001 60555996 -
ttggtgactccaaggctggttt

SEQ ID NO: 209843 - DNA, 22 bp, Artificial Sequence
  Synthetic oligonucleotide; TTT chr2 60555995 60556016 60556000 60555995 -
tggtgactccaaggctggttta

SEQ ID NO: 209844 - DNA, 22 bp, Artificial Sequence
  Synthetic oligonucleotide; TTT chr2 60555994 60556015 60555999 60555994 -
ggtgactccaaggctggtttaa

SEQ ID NO: 209845 - DNA, 22 bp, Artificial Sequence
  Synthetic oligonucleotide; TTG chr2 60555993 60556014 60555998 60555993 -
gtgactccaaggctggtttaac

SEQ ID NO: 209846 - DNA, 22 bp, Artificial Sequence
  Synthetic oligonucleotide; CTC chr2 60555986 60556007 60555991 60555986 -
caaggctggtttaacaagacaa

SEQ ID NO: 209847 - DNA, 22 bp, Artificial Sequence
  Synthetic oligonucleotide; CTG chr2 60555978 60555999 60555983 60555978 -
gtttaacaagacaaaaagcaga

SEQ ID NO: 209848 - DNA, 22 bp, Artificial Sequence
  Synthetic oligonucleotide; TTT chr2 60555974 60555995 60555979 60555974 -
aacaagacaaaaagcagactgt

SEQ ID NO: 209849 - DNA, 22 bp, Artificial Sequence
  Synthetic oligonucleotide; TTA chr2 60555973 60555994 60555978 60555973 -
acaagacaaaaagcagactgtg

SEQ ID NO: 209850 - DNA, 22 bp, Artificial Sequence
  Synthetic oligonucleotide; CTG chr2 60555953 60555974 60555958 60555953 -
tggtggaatagagatgctgacc

SEQ ID NO: 209851 - DNA, 22 bp, Artificial Sequence
  Synthetic oligonucleotide; CTG chr2 60555934 60555955 60555939 60555934 -
acctgctctgaagaactcagtg

SEQ ID NO: 209852 - DNA, 22 bp, Artificial Sequence
  Synthetic oligonucleotide; CTG chr2 60555929 60555950 60555934 60555929 -
ctctgaagaactcagtgaaaag

SEQ ID NO: 209853 - DNA, 22 bp, Artificial Sequence
  Synthetic oligonucleotide; CTC chr2 60555926 60555947 60555931 60555926 -
tgaagaactcagtgaaaagggg

SEQ ID NO: 209854 - DNA, 22 bp, Artificial Sequence
  Synthetic oligonucleotide; CTG chr2 60555924 60555945 60555929 60555924 -
aagaactcagtgaaaaggggaa

SEQ ID NO: 209855 - DNA, 22 bp, Artificial Sequence
  Synthetic oligonucleotide; CTC chr2 60555916 60555937 60555921 60555916 -
agtgaaaaggggaaatggtgtc

SEQ ID NO: 209856 - DNA, 22 bp, Artificial Sequence
  Synthetic oligonucleotide; CTA chr2 60555882 60555903 60555887 60555882 -
cagagcttaacttctagtgaat

SEQ ID NO: 209857 - DNA, 22 bp, Artificial Sequence
  Synthetic oligonucleotide; CTT chr2 60555874 60555895 60555879 60555874 -
aacttctagtgaatcctcccgc

SEQ ID NO: 209858 - DNA, 22 bp, Artificial Sequence
  Synthetic oligonucleotide; TTA chr2 60555873 60555894 60555878 60555873 -
acttctagtgaatcctcccgct

SEQ ID NO: 209859 - DNA, 22 bp, Artificial Sequence
  Synthetic oligonucleotide; CTT chr2 60555869 60555890 60555874 60555869 -
ctagtgaatcctcccgcttctt

SEQ ID NO: 209860 - DNA, 22 bp, Artificial Sequence
  Synthetic oligonucleotide; TTC chr2 60555868 60555889 60555873 60555868 -
tagtgaatcctcccgcttctta

SEQ ID NO: 209861 - DNA, 22 bp, Artificial Sequence
  Synthetic oligonucleotide; CTA chr2 60555866 60555887 60555871 60555866 -
gtgaatcctcccgcttcttaaa

SEQ ID NO: 209862 - DNA, 22 bp, Artificial Sequence
  Synthetic oligonucleotide; CTC chr2 60555856 60555877 60555861 60555856 -
ccgcttcttaaacagaatttga

SEQ ID NO: 209863 - DNA, 22 bp, Artificial Sequence
  Synthetic oligonucleotide; CTT chr2 60555850 60555871 60555855 60555850 -
cttaaacagaatttgaggtctc

SEQ ID NO: 209864 - DNA, 22 bp, Artificial Sequence
  Synthetic oligonucleotide; TTC chr2 60555849 60555870 60555854 60555849 -
ttaaacagaatttgaggtctcc

SEQ ID NO: 209865 - DNA, 22 bp, Artificial Sequence
  Synthetic oligonucleotide; CTT chr2 60555847 60555868 60555852 60555847 -
aaacagaatttgaggtctccct

SEQ ID NO: 209866 - DNA, 22 bp, Artificial Sequence
  Synthetic oligonucleotide; TTA chr2 60555846 60555867 60555851 60555846 -
aacagaatttgaggtctccctc

SEQ ID NO: 209867 - DNA, 22 bp, Artificial Sequence
  Synthetic oligonucleotide; TTT chr2 60555836 60555857 60555841 60555836 -
gaggtctccctcccacaaactg

SEQ ID NO: 209868 - DNA, 22 bp, Artificial Sequence
  Synthetic oligonucleotide; TTG chr2 60555835 60555856 60555840 60555835 -
aggtctccctcccacaaactgg

SEQ ID NO: 209869 - DNA, 22 bp, Artificial Sequence
  Synthetic oligonucleotide; CTC chr2 60555828 60555849 60555833 60555828 -
cctcccacaaactggagggaaa

SEQ ID NO: 209870 - DNA, 22 bp, Artificial Sequence
  Synthetic oligonucleotide; CTC chr2 60555824 60555845 60555829 60555824 -
ccacaaactggagggaaacaac

SEQ ID NO: 209871 - DNA, 22 bp, Artificial Sequence
  Synthetic oligonucleotide; CTG chr2 60555814 60555835 60555819 60555814 -
gagggaaacaacaacaaacaac

SEQ ID NO: 209872 - DNA, 22 bp, Artificial Sequence
  Synthetic oligonucleotide; TTG chr2 60555781 60555802 60555786 60555781 -
acacaatcccagtacagcccac

SEQ ID NO: 209873 - DNA, 22 bp, Artificial Sequence
  Synthetic oligonucleotide; CTC chr2 60555754 60555775 60555759 60555754 -
tctcaatgttgagcatcaaaac

SEQ ID NO: 209874 - DNA, 22 bp, Artificial Sequence
  Synthetic oligonucleotide; CTC chr2 60555752 60555773 60555757 60555752 -
tcaatgttgagcatcaaaacct

SEQ ID NO: 209875 - DNA, 22 bp, Artificial Sequence
  Synthetic oligonucleotide; CTC chr2 60555750 60555771 60555755 60555750 -
aatgttgagcatcaaaacctcc

SEQ ID NO: 209876 - DNA, 22 bp, Artificial Sequence
  Synthetic oligonucleotide; TTG chr2 60555743 60555764 60555748 60555743 -
agcatcaaaacctccttttctt

SEQ ID NO: 209877 - DNA, 22 bp, Artificial Sequence
  Synthetic oligonucleotide; CTC chr2 60555729 60555750 60555734 60555729 -
cttttcttccttagaggggtcc

SEQ ID NO: 209878 - DNA, 22 bp, Artificial Sequence
  Synthetic oligonucleotide; CTT chr2 60555726 60555747 60555731 60555726 -
ttcttccttagaggggtccgaa

SEQ ID NO: 209879 - DNA, 22 bp, Artificial Sequence
  Synthetic oligonucleotide; TTT chr2 60555725 60555746 60555730 60555725 -
tcttccttagaggggtccgaag

SEQ ID NO: 209880 - DNA, 22 bp, Artificial Sequence
  Synthetic oligonucleotide; TTT chr2 60555724 60555745 60555729 60555724 -
cttccttagaggggtccgaagc

SEQ ID NO: 209881 - DNA, 22 bp, Artificial Sequence
  Synthetic oligonucleotide; TTC chr2 60555723 60555744 60555728 60555723 -
ttccttagaggggtccgaagct

SEQ ID NO: 209882 - DNA, 22 bp, Artificial Sequence
  Synthetic oligonucleotide; CTT chr2 60555721 60555742 60555726 60555721 -
ccttagaggggtccgaagctcc

SEQ ID NO: 209883 - DNA, 22 bp, Artificial Sequence
  Synthetic oligonucleotide; TTC chr2 60555720 60555741 60555725 60555720 -
cttagaggggtccgaagctccg

SEQ ID NO: 209884 - DNA, 22 bp, Artificial Sequence
  Synthetic oligonucleotide; CTT chr2 60555717 60555738 60555722 60555717 -
agaggggtccgaagctccgccg

SEQ ID NO: 209885 - DNA, 22 bp, Artificial Sequence
  Synthetic oligonucleotide; TTA chr2 60555716 60555737 60555721 60555716 -
gaggggtccgaagctccgccga

SEQ ID NO: 209886 - DNA, 22 bp, Artificial Sequence
  Synthetic oligonucleotide; CTC chr2 60555700 60555721 60555705 60555700 -
cgccgagctaggcaagccagtc

SEQ ID NO: 209887 - DNA, 22 bp, Artificial Sequence
  Synthetic oligonucleotide; CTA chr2 60555690 60555711 60555695 60555690 -
ggcaagccagtcattttctaac

SEQ ID NO: 209888 - DNA, 22 bp, Artificial Sequence
  Synthetic oligonucleotide; TTT chr2 60555674 60555695 60555679 60555674 -
tctaacacagtagacttgaaac

SEQ ID NO: 209889 - DNA, 22 bp, Artificial Sequence
  Synthetic oligonucleotide; TTT chr2 60555673 60555694 60555678 60555673 -
ctaacacagtagacttgaaact

SEQ ID NO: 209890 - DNA, 22 bp, Artificial Sequence
  Synthetic oligonucleotide; TTC chr2 60555672 60555693 60555677 60555672 -
taacacagtagacttgaaactt

SEQ ID NO: 209891 - DNA, 22 bp, Artificial Sequence
  Synthetic oligonucleotide; CTA chr2 60555670 60555691 60555675 60555670 -
acacagtagacttgaaacttta

SEQ ID NO: 209892 - DNA, 22 bp, Artificial Sequence
  Synthetic oligonucleotide; CTT chr2 60555657 60555678 60555662 60555657 -
gaaactttactaagacgaaaca

SEQ ID NO: 209893 - DNA, 22 bp, Artificial Sequence
  Synthetic oligonucleotide; TTG chr2 60555656 60555677 60555661 60555656 -
aaactttactaagacgaaacag

SEQ ID NO: 209894 - DNA, 22 bp, Artificial Sequence
  Synthetic oligonucleotide; CTT chr2 60555650 60555671 60555655 60555650 -
tactaagacgaaacaggaataa

SEQ ID NO: 209895 - DNA, 22 bp, Artificial Sequence
  Synthetic oligonucleotide; TTT chr2 60555649 60555670 60555654 60555649 -
actaagacgaaacaggaataaa

SEQ ID NO: 209896 - DNA, 22 bp, Artificial Sequence
  Synthetic oligonucleotide; TTA chr2 60555648 60555669 60555653 60555648 -
ctaagacgaaacaggaataaac

SEQ ID NO: 209897 - DNA, 22 bp, Artificial Sequence
  Synthetic oligonucleotide; CTA chr2 60555645 60555666 60555650 60555645 -
agacgaaacaggaataaacagc

SEQ ID NO: 209898 - DNA, 22 bp, Artificial Sequence
  Synthetic oligonucleotide; CTT chr2 60555618 60555639 60555623 60555618 -
gccggcagggctgcgggatggg

SEQ ID NO: 209899 - DNA, 22 bp, Artificial Sequence
  Synthetic oligonucleotide; TTG chr2 60555617 60555638 60555622 60555617 -
ccggcagggctgcgggatgggt

SEQ ID NO: 209900 - DNA, 22 bp, Artificial Sequence
  Synthetic oligonucleotide; CTG chr2 60555605 60555626 60555610 60555605 -
cgggatgggtgagcgcgtgcaa

SEQ ID NO: 209901 - DNA, 22 bp, Artificial Sequence
  Synthetic oligonucleotide; CTC chr2 60555570 60555591 60555575 60555570 -
gcttaaaacaataaagcccccc

SEQ ID NO: 209902 - DNA, 22 bp, Artificial Sequence
  Synthetic oligonucleotide; CTT chr2 60555566 60555587 60555571 60555566 -
aaaacaataaagcccccccacc

SEQ ID NO: 209903 - DNA, 22 bp, Artificial Sequence
  Synthetic oligonucleotide; TTA chr2 60555565 60555586 60555570 60555565 -
aaacaataaagcccccccaccg

SEQ ID NO: 209904 - DNA, 22 bp, Artificial Sequence
  Synthetic oligonucleotide; TTT chr2 60555530 60555551 60555535 60555530 -
acggaagcgacaccctttagac

SEQ ID NO: 209905 - DNA, 22 bp, Artificial Sequence
  Synthetic oligonucleotide; TTA chr2 60555529 60555550 60555534 60555529 -
cggaagcgacaccctttagact

SEQ ID NO: 209906 - DNA, 22 bp, Artificial Sequence
  Synthetic oligonucleotide; CTT chr2 60555513 60555534 60555518 60555513 -
tagactgaagagggggatgaga

SEQ ID NO: 209907 - DNA, 22 bp, Artificial Sequence
  Synthetic oligonucleotide; TTT chr2 60555512 60555533 60555517 60555512 -
agactgaagagggggatgagaa

SEQ ID NO: 209908 - DNA, 22 bp, Artificial Sequence
  Synthetic oligonucleotide; TTA chr2 60555511 60555532 60555516 60555511 -
gactgaagagggggatgagaag

SEQ ID NO: 209909 - DNA, 22 bp, Artificial Sequence
  Synthetic oligonucleotide; CTG chr2 60555506 60555527 60555511 60555506 -
aagagggggatgagaagacggg

SEQ ID NO: 209910 - DNA, 22 bp, Artificial Sequence
  Synthetic oligonucleotide; TTG chr2 60555479 60555500 60555484 60555479 -
tggaaccgctccgaggagaggg

SEQ ID NO: 209911 - DNA, 22 bp, Artificial Sequence
  Synthetic oligonucleotide; CTC chr2 60555468 60555489 60555473 60555468 -
cgaggagagggaaggagggctc

SEQ ID NO: 209912 - DNA, 22 bp, Artificial Sequence
  Synthetic oligonucleotide; CTC chr2 60555446 60555467 60555451 60555446 -
ctcgctctgcagacacactcac

SEQ ID NO: 209913 - DNA, 22 bp, Artificial Sequence
  Synthetic oligonucleotide; CTC chr2 60555443 60555464 60555448 60555443 -
gctctgcagacacactcacaca

SEQ ID NO: 209914 - DNA, 22 bp, Artificial Sequence
  Synthetic oligonucleotide; CTC chr2 60555439 60555460 60555444 60555439 -
tgcagacacactcacacatatc

SEQ ID NO: 209915 - DNA, 22 bp, Artificial Sequence
  Synthetic oligonucleotide; CTG chr2 60555437 60555458 60555442 60555437 -
cagacacactcacacatatcca

SEQ ID NO: 209916 - DNA, 22 bp, Artificial Sequence
  Synthetic oligonucleotide; CTC chr2 60555426 60555447 60555431 60555426 -
acacatatccacctgcagctca

SEQ ID NO: 209917 - DNA, 22 bp, Artificial Sequence
  Synthetic oligonucleotide; CTG chr2 60555411 60555432 60555416 60555411 -
cagctcagggtctcgcgggcca

SEQ ID NO: 209918 - DNA, 22 bp, Artificial Sequence
  Synthetic oligonucleotide; CTC chr2 60555405 60555426 60555410 60555405 -
agggtctcgcgggccatggcga

SEQ ID NO: 209919 - DNA, 22 bp, Artificial Sequence
  Synthetic oligonucleotide; CTC chr2 60555397 60555418 60555402 60555397 -
gcgggccatggcgacccgtctc

SEQ ID NO: 209920 - DNA, 22 bp, Artificial Sequence
  Synthetic oligonucleotide; CTC chr2 60555375 60555396 60555380 60555375 -
caccctgcaccctccgcacctc

SEQ ID NO: 209921 - DNA, 22 bp, Artificial Sequence
  Synthetic oligonucleotide; CTG chr2 60555368 60555389 60555373 60555368 -
caccctccgcacctcccttgga

SEQ ID NO: 209922 - DNA, 22 bp, Artificial Sequence
  Synthetic oligonucleotide; CTC chr2 60555361 60555382 60555366 60555361 -
cgcacctcccttggacctgagt

SEQ ID NO: 209923 - DNA, 22 bp, Artificial Sequence
  Synthetic oligonucleotide; CTC chr2 60555353 60555374 60555358 60555353 -
ccttggacctgagtccattctc

SEQ ID NO: 209924 - DNA, 22 bp, Artificial Sequence
  Synthetic oligonucleotide; CTT chr2 60555349 60555370 60555354 60555349 -
ggacctgagtccattctcctct

SEQ ID NO: 209925 - DNA, 22 bp, Artificial Sequence
  Synthetic oligonucleotide; TTG chr2 60555348 60555369 60555353 60555348 -
gacctgagtccattctcctctc

SEQ ID NO: 209926 - DNA, 22 bp, Artificial Sequence
  Synthetic oligonucleotide; CTG chr2 60555342 60555363 60555347 60555342 -
agtccattctcctctcccccca

SEQ ID NO: 209927 - DNA, 22 bp, Artificial Sequence
  Synthetic oligonucleotide; TTC chr2 60555333 60555354 60555338 60555333 -
tcctctccccccaactccttcc

SEQ ID NO: 209928 - DNA, 22 bp, Artificial Sequence
  Synthetic oligonucleotide; CTC chr2 60555331 60555352 60555336 60555331 -
ctctccccccaactccttccag

SEQ ID NO: 209929 - DNA, 22 bp, Artificial Sequence
  Synthetic oligonucleotide; CTC chr2 60555328 60555349 60555333 60555328 -
tccccccaactccttccagatt

SEQ ID NO: 209930 - DNA, 22 bp, Artificial Sequence
  Synthetic oligonucleotide; CTC chr2 60555326 60555347 60555331 60555326 -
cccccaactccttccagatttg

SEQ ID NO: 209931 - DNA, 22 bp, Artificial Sequence
  Synthetic oligonucleotide; CTC chr2 60555316 60555337 60555321 60555316 -
cttccagatttggaatcggact

SEQ ID NO: 209932 - DNA, 22 bp, Artificial Sequence
  Synthetic oligonucleotide; CTT chr2 60555313 60555334 60555318 60555313 -
ccagatttggaatcggactgcg

SEQ ID NO: 209933 - DNA, 22 bp, Artificial Sequence
  Synthetic oligonucleotide; TTC chr2 60555312 60555333 60555317 60555312 -
cagatttggaatcggactgcga

SEQ ID NO: 209934 - DNA, 22 bp, Artificial Sequence
  Synthetic oligonucleotide; TTT chr2 60555305 60555326 60555310 60555305 -
ggaatcggactgcgatctcccc

SEQ ID NO: 209935 - DNA, 22 bp, Artificial Sequence
  Synthetic oligonucleotide; TTG chr2 60555304 60555325 60555309 60555304 -
gaatcggactgcgatctccccg

SEQ ID NO: 209936 - DNA, 22 bp, Artificial Sequence
  Synthetic oligonucleotide; CTG chr2 60555293 60555314 60555298 60555293 -
cgatctccccggcggcggcggc

SEQ ID NO: 209937 - DNA, 22 bp, Artificial Sequence
  Synthetic oligonucleotide; CTC chr2 60555286 60555307 60555291 60555286 -
cccggcggcggcggcggcggct

SEQ ID NO: 209938 - DNA, 22 bp, Artificial Sequence
  Synthetic oligonucleotide; CTG chr2 60555263 60555284 60555268 60555263 -
cagagtggtgctggcaggcagg

SEQ ID NO: 209939 - DNA, 22 bp, Artificial Sequence
  Synthetic oligonucleotide; CTG chr2 60555250 60555271 60555255 60555250 -
gcaggcagggaggctgggaggc

SEQ ID NO: 209940 - DNA, 22 bp, Artificial Sequence
  Synthetic oligonucleotide; CTG chr2 60555234 60555255 60555239 60555234 -
ggaggcgggaggcgccagggga

SEQ ID NO: 209941 - DNA, 22 bp, Artificial Sequence
  Synthetic oligonucleotide; CTT chr2 60555209 60555230 60555214 60555209 -
tacaggcacgtttctgaataaa

SEQ ID NO: 209942 - DNA, 22 bp, Artificial Sequence
  Synthetic oligonucleotide; TTT chr2 60555208 60555229 60555213 60555208 -
acaggcacgtttctgaataaac

SEQ ID NO: 209943 - DNA, 22 bp, Artificial Sequence
  Synthetic oligonucleotide; TTA chr2 60555207 60555228 60555212 60555207 -
caggcacgtttctgaataaact

SEQ ID NO: 209944 - DNA, 22 bp, Artificial Sequence
  Synthetic oligonucleotide; TTT chr2 60555196 60555217 60555201 60555196 -
ctgaataaactttccaatcgca

SEQ ID NO: 209945 - DNA, 22 bp, Artificial Sequence
  Synthetic oligonucleotide; TTC chr2 60555195 60555216 60555200 60555195 -
tgaataaactttccaatcgcag

SEQ ID NO: 209946 - DNA, 22 bp, Artificial Sequence
  Synthetic oligonucleotide; CTG chr2 60555193 60555214 60555198 60555193 -
aataaactttccaatcgcaggg

SEQ ID NO: 209947 - DNA, 22 bp, Artificial Sequence
  Synthetic oligonucleotide; CTT chr2 60555184 60555205 60555189 60555184 -
tccaatcgcagggggtgctgtt

SEQ ID NO: 209948 - DNA, 22 bp, Artificial Sequence
  Synthetic oligonucleotide; TTT chr2 60555183 60555204 60555188 60555183 -
ccaatcgcagggggtgctgttg

SEQ ID NO: 209949 - DNA, 22 bp, Artificial Sequence
  Synthetic oligonucleotide; TTC chr2 60555182 60555203 60555187 60555182 -
caatcgcagggggtgctgttgc

SEQ ID NO: 209950 - DNA, 22 bp, Artificial Sequence
  Synthetic oligonucleotide; CTG chr2 60555164 60555185 60555169 60555164 -
ttgctgtacattttacgtaaaa

SEQ ID NO: 209951 - DNA, 22 bp, Artificial Sequence
  Synthetic oligonucleotide; TTG chr2 60555161 60555182 60555166 60555161 -
ctgtacattttacgtaaaactg

SEQ ID NO: 209952 - DNA, 22 bp, Artificial Sequence
  Synthetic oligonucleotide; CTG chr2 60555158 60555179 60555163 60555158 -
tacattttacgtaaaactgaaa

SEQ ID NO: 209953 - DNA, 22 bp, Artificial Sequence
  Synthetic oligonucleotide; TTT chr2 60555151 60555172 60555156 60555151 -
tacgtaaaactgaaagtatccc

SEQ ID NO: 209954 - DNA, 22 bp, Artificial Sequence
  Synthetic oligonucleotide; TTT chr2 60555150 60555171 60555155 60555150 -
acgtaaaactgaaagtatccca

SEQ ID NO: 209955 - DNA, 22 bp, Artificial Sequence
  Synthetic oligonucleotide; TTA chr2 60555149 60555170 60555154 60555149 -
cgtaaaactgaaagtatcccac

SEQ ID NO: 209956 - DNA, 22 bp, Artificial Sequence
  Synthetic oligonucleotide; CTG chr2 60555139 60555160 60555144 60555139 -
aaagtatcccacgccagagtga

SEQ ID NO: 209957 - DNA, 22 bp, Artificial Sequence
  Synthetic oligonucleotide; CTT chr2 60555108 60555129 60555113 60555108 -
tttgacagcggcagcacgcgcg

SEQ ID NO: 209958 - DNA, 22 bp, Artificial Sequence
  Synthetic oligonucleotide; TTT chr2 60555107 60555128 60555112 60555107 -
ttgacagcggcagcacgcgcgt

SEQ ID NO: 209959 - DNA, 22 bp, Artificial Sequence
  Synthetic oligonucleotide; TTT chr2 60555106 60555127 60555111 60555106 -
tgacagcggcagcacgcgcgtg

SEQ ID NO: 209960 - DNA, 22 bp, Artificial Sequence
  Synthetic oligonucleotide; TTT chr2 60555105 60555126 60555110 60555105 -
gacagcggcagcacgcgcgtgt

SEQ ID NO: 209961 - DNA, 22 bp, Artificial Sequence
  Synthetic oligonucleotide; TTG chr2 60555104 60555125 60555109 60555104 -
acagcggcagcacgcgcgtgtg

SEQ ID NO: 209962 - DNA, 22 bp, Artificial Sequence
  Synthetic oligonucleotide; TTA chr2 60555065 60555086 60555070 60555065 -
aagagacagggttttatttcca

SEQ ID NO: 209963 - DNA, 22 bp, Artificial Sequence
  Synthetic oligonucleotide; TTT chr2 60555051 60555072 60555056 60555051 -
tatttccaacaggtcttcccta

SEQ ID NO: 209964 - DNA, 22 bp, Artificial Sequence
  Synthetic oligonucleotide; TTT chr2 60555050 60555071 60555055 60555050 -
atttccaacaggtcttccctaa

SEQ ID NO: 209965 - DNA, 22 bp, Artificial Sequence
  Synthetic oligonucleotide; TTA chr2 60555049 60555070 60555054 60555049 -
tttccaacaggtcttccctaat

SEQ ID NO: 209966 - DNA, 22 bp, Artificial Sequence
  Synthetic oligonucleotide; TTT chr2 60555046 60555067 60555051 60555046 -
ccaacaggtcttccctaatttc

SEQ ID NO: 209967 - DNA, 22 bp, Artificial Sequence
  Synthetic oligonucleotide; TTC chr2 60555045 60555066 60555050 60555045 -
caacaggtcttccctaatttcc

SEQ ID NO: 209968 - DNA, 22 bp, Artificial Sequence
  Synthetic oligonucleotide; CTT chr2 60555034 60555055 60555039 60555034 -
ccctaatttccagggaacgtct

SEQ ID NO: 209969 - DNA, 22 bp, Artificial Sequence
  Synthetic oligonucleotide; TTC chr2 60555033 60555054 60555038 60555033 -
cctaatttccagggaacgtctg

SEQ ID NO: 209970 - DNA, 22 bp, Artificial Sequence
  Synthetic oligonucleotide; CTA chr2 60555029 60555050 60555034 60555029 -
atttccagggaacgtctgcaga

SEQ ID NO: 209971 - DNA, 22 bp, Artificial Sequence
  Synthetic oligonucleotide; TTT chr2 60555025 60555046 60555030 60555025 -
ccagggaacgtctgcagaaagg

SEQ ID NO: 209972 - DNA, 22 bp, Artificial Sequence
  Synthetic oligonucleotide; TTC chr2 60555024 60555045 60555029 60555024 -
cagggaacgtctgcagaaaggc

SEQ ID NO: 209973 - DNA, 22 bp, Artificial Sequence
  Synthetic oligonucleotide; CTG chr2 60555011 60555032 60555016 60555011 -
cagaaaggcgagagggggctgc

SEQ ID NO: 209974 - DNA, 22 bp, Artificial Sequence
  Synthetic oligonucleotide; CTG chr2 60554990 60555011 60554995 60554990 -
ctggctcctgggtgtgcgcctt

SEQ ID NO: 209975 - DNA, 22 bp, Artificial Sequence
  Synthetic oligonucleotide; CTG chr2 60554987 60555008 60554992 60554987 -
gctcctgggtgtgcgccttggc

SEQ ID NO: 209976 - DNA, 22 bp, Artificial Sequence
  Synthetic oligonucleotide; CTC chr2 60554983 60555004 60554988 60554983 -
ctgggtgtgcgccttggccggc

SEQ ID NO: 209977 - DNA, 22 bp, Artificial Sequence
  Synthetic oligonucleotide; CTG chr2 60554980 60555001 60554985 60554980 -
ggtgtgcgccttggccggcggc

SEQ ID NO: 209978 - DNA, 22 bp, Artificial Sequence
  Synthetic oligonucleotide; CTT chr2 60554968 60554989 60554973 60554968 -
ggccggcggcgcctggggagcg

SEQ ID NO: 209979 - DNA, 22 bp, Artificial Sequence
  Synthetic oligonucleotide; TTG chr2 60554967 60554988 60554972 60554967 -
gccggcggcgcctggggagcgc

SEQ ID NO: 209980 - DNA, 22 bp, Artificial Sequence
  Synthetic oligonucleotide; CTG chr2 60554953 60554974 60554958 60554953 -
gggagcgcggcggtgacccgag

SEQ ID NO: 209981 - DNA, 22 bp, Artificial Sequence
  Synthetic oligonucleotide; CTC chr2 60554920 60554941 60554925 60554920 -
accaccgtggtctccccgctgc

SEQ ID NO: 209982 - DNA, 22 bp, Artificial Sequence
  Synthetic oligonucleotide; CTC chr2 60554906 60554927 60554911 60554906 -
cccgctgctcctgcgagcctgt

SEQ ID NO: 209983 - DNA, 22 bp, Artificial Sequence
  Synthetic oligonucleotide; CTG chr2 60554899 60554920 60554904 60554899 -
ctcctgcgagcctgtcgctctc

SEQ ID NO: 209984 - DNA, 22 bp, Artificial Sequence
  Synthetic oligonucleotide; CTC chr2 60554896 60554917 60554901 60554896 -
ctgcgagcctgtcgctctctct

SEQ ID NO: 209985 - DNA, 22 bp, Artificial Sequence
  Synthetic oligonucleotide; CTG chr2 60554893 60554914 60554898 60554893 -
cgagcctgtcgctctctctcca

SEQ ID NO: 209986 - DNA, 22 bp, Artificial Sequence
  Synthetic oligonucleotide; CTG chr2 60554885 60554906 60554890 60554885 -
tcgctctctctccattcccatt

SEQ ID NO: 209987 - DNA, 22 bp, Artificial Sequence
  Synthetic oligonucleotide; CTC chr2 60554879 60554900 60554884 60554879 -
tctctccattcccattttctct

SEQ ID NO: 209988 - DNA, 22 bp, Artificial Sequence
  Synthetic oligonucleotide; CTC chr2 60554877 60554898 60554882 60554877 -
tctccattcccattttctcttt

SEQ ID NO: 209989 - DNA, 22 bp, Artificial Sequence
  Synthetic oligonucleotide; CTC chr2 60554875 60554896 60554880 60554875 -
tccattcccattttctctttcc

SEQ ID NO: 209990 - DNA, 22 bp, Artificial Sequence
  Synthetic oligonucleotide; CTC chr2 60554873 60554894 60554878 60554873 -
cattcccattttctctttccct

SEQ ID NO: 209991 - DNA, 22 bp, Artificial Sequence
  Synthetic oligonucleotide; TTC chr2 60554868 60554889 60554873 60554868 -
ccattttctctttccctgggta

SEQ ID NO: 209992 - DNA, 22 bp, Artificial Sequence
  Synthetic oligonucleotide; TTT chr2 60554862 60554883 60554867 60554862 -
tctctttccctgggtaacagca

SEQ ID NO: 209993 - DNA, 22 bp, Artificial Sequence
  Synthetic oligonucleotide; TTT chr2 60554861 60554882 60554866 60554861 -
ctctttccctgggtaacagcac

SEQ ID NO: 209994 - DNA, 22 bp, Artificial Sequence
  Synthetic oligonucleotide; TTC chr2 60554860 60554881 60554865 60554860 -
tctttccctgggtaacagcaca

SEQ ID NO: 209995 - DNA, 22 bp, Artificial Sequence
  Synthetic oligonucleotide; CTC chr2 60554858 60554879 60554863 60554858 -
tttccctgggtaacagcacagg

SEQ ID NO: 209996 - DNA, 22 bp, Artificial Sequence
  Synthetic oligonucleotide; CTT chr2 60554856 60554877 60554861 60554856 -
tccctgggtaacagcacaggaa

SEQ ID NO: 209997 - DNA, 22 bp, Artificial Sequence
  Synthetic oligonucleotide; TTT chr2 60554855 60554876 60554860 60554855 -
ccctgggtaacagcacaggaac

SEQ ID NO: 209998 - DNA, 22 bp, Artificial Sequence
  Synthetic oligonucleotide; TTC chr2 60554854 60554875 60554859 60554854 -
cctgggtaacagcacaggaaca

SEQ ID NO: 209999 - DNA, 22 bp, Artificial Sequence
  Synthetic oligonucleotide; CTG chr2 60554850 60554871 60554855 60554850 -
ggtaacagcacaggaacagttg

SEQ ID NO: 210000 - DNA, 22 bp, Artificial Sequence
  Synthetic oligonucleotide; TTG chr2 60554828 60554849 60554833 60554828 -
tgctctgcccgtaagaaacatt

SEQ ID NO: 210001 - DNA, 22 bp, Artificial Sequence
  Synthetic oligonucleotide; CTC chr2 60554823 60554844 60554828 60554823 -
tgcccgtaagaaacattttctt

SEQ ID NO: 210002 - DNA, 22 bp, Artificial Sequence
  Synthetic oligonucleotide; CTG chr2 60554821 60554842 60554826 60554821 -
cccgtaagaaacattttcttcc

SEQ ID NO: 210003 - DNA, 22 bp, Artificial Sequence
  Synthetic oligonucleotide; TTT chr2 60554805 60554826 60554810 60554805 -
tcttcccatccctctgtgcttt

SEQ ID NO: 210004 - DNA, 22 bp, Artificial Sequence
  Synthetic oligonucleotide; TTT chr2 60554804 60554825 60554809 60554804 -
cttcccatccctctgtgctttt

SEQ ID NO: 210005 - DNA, 22 bp, Artificial Sequence
  Synthetic oligonucleotide; TTC chr2 60554803 60554824 60554808 60554803 -
ttcccatccctctgtgcttttg

SEQ ID NO: 210006 - DNA, 22 bp, Artificial Sequence
  Synthetic oligonucleotide; CTT chr2 60554801 60554822 60554806 60554801 -
cccatccctctgtgcttttgca

SEQ ID NO: 210007 - DNA, 22 bp, Artificial Sequence
  Synthetic oligonucleotide; TTC chr2 60554800 60554821 60554805 60554800 -
ccatccctctgtgcttttgcag

SEQ ID NO: 210008 - DNA, 22 bp, Artificial Sequence
  Synthetic oligonucleotide; CTC chr2 60554791 60554812 60554796 60554791 -
tgtgcttttgcagttgctctgg

SEQ ID NO: 210009 - DNA, 22 bp, Artificial Sequence
  Synthetic oligonucleotide; CTG chr2 60554789 60554810 60554794 60554789 -
tgcttttgcagttgctctggag

SEQ ID NO: 210010 - DNA, 22 bp, Artificial Sequence
  Synthetic oligonucleotide; CTT chr2 60554784 60554805 60554789 60554784 -
ttgcagttgctctggagtggga

SEQ ID NO: 210011 - DNA, 22 bp, Artificial Sequence
  Synthetic oligonucleotide; TTT chr2 60554783 60554804 60554788 60554783 -
tgcagttgctctggagtgggag

SEQ ID NO: 210012 - DNA, 22 bp, Artificial Sequence
  Synthetic oligonucleotide; TTT chr2 60554782 60554803 60554787 60554782 -
gcagttgctctggagtgggagg

SEQ ID NO: 210013 - DNA, 22 bp, Artificial Sequence
  Synthetic oligonucleotide; TTG chr2 60554781 60554802 60554786 60554781 -
cagttgctctggagtgggaggg

SEQ ID NO: 210014 - DNA, 22 bp, Artificial Sequence
  Synthetic oligonucleotide; TTG chr2 60554775 60554796 60554780 60554775 -
ctctggagtgggagggggtgtg

SEQ ID NO: 210015 - DNA, 22 bp, Artificial Sequence
  Synthetic oligonucleotide; CTC chr2 60554772 60554793 60554777 60554772 -
tggagtgggagggggtgtgtcc

SEQ ID NO: 210016 - DNA, 22 bp, Artificial Sequence
  Synthetic oligonucleotide; CTG chr2 60554770 60554791 60554775 60554770 -
gagtgggagggggtgtgtccct

SEQ ID NO: 210017 - DNA, 22 bp, Artificial Sequence
  Synthetic oligonucleotide; CTC chr2 60554747 60554768 60554752 60554747 -
ccagggacccggctcggggacc

SEQ ID NO: 210018 - DNA, 22 bp, Artificial Sequence
  Synthetic oligonucleotide; CTC chr2 60554732 60554753 60554737 60554732 -
ggggacctcccgcggcgccgtg

SEQ ID NO: 210019 - DNA, 22 bp, Artificial Sequence
  Synthetic oligonucleotide; CTC chr2 60554723 60554744 60554728 60554723 -
ccgcggcgccgtgagcacattc

SEQ ID NO: 210020 - DNA, 22 bp, Artificial Sequence
  Synthetic oligonucleotide; TTC chr2 60554701 60554722 60554706 60554701 -
ccagggactgggactcccggga

SEQ ID NO: 210021 - DNA, 22 bp, Artificial Sequence
  Synthetic oligonucleotide; CTG chr2 60554691 60554712 60554696 60554691 -
ggactcccgggactgcccgcgc

SEQ ID NO: 210022 - DNA, 22 bp, Artificial Sequence
  Synthetic oligonucleotide; CTC chr2 60554685 60554706 60554690 60554685 -
ccgggactgcccgcgctttgtc

SEQ ID NO: 210023 - DNA, 22 bp, Artificial Sequence
  Synthetic oligonucleotide; CTG chr2 60554676 60554697 60554681 60554676 -
cccgcgctttgtcctcggcctc

SEQ ID NO: 210024 - DNA, 22 bp, Artificial Sequence
  Synthetic oligonucleotide; CTT chr2 60554667 60554688 60554672 60554667 -
tgtcctcggcctctcagagagg

SEQ ID NO: 210025 - DNA, 22 bp, Artificial Sequence
  Synthetic oligonucleotide; TTT chr2 60554666 60554687 60554671 60554666 -
gtcctcggcctctcagagaggt

SEQ ID NO: 210026 - DNA, 22 bp, Artificial Sequence
  Synthetic oligonucleotide; TTG chr2 60554665 60554686 60554670 60554665 -
tcctcggcctctcagagaggtg

SEQ ID NO: 210027 - DNA, 22 bp, Artificial Sequence
  Synthetic oligonucleotide; CTC chr2 60554660 60554681 60554665 60554660 -
ggcctctcagagaggtggacgc

SEQ ID NO: 210028 - DNA, 22 bp, Artificial Sequence
  Synthetic oligonucleotide; CTC chr2 60554654 60554675 60554659 60554654 -
tcagagaggtggacgcctcggt

SEQ ID NO: 210029 - DNA, 22 bp, Artificial Sequence
  Synthetic oligonucleotide; CTC chr2 60554652 60554673 60554657 60554652 -
agagaggtggacgcctcggtgc

SEQ ID NO: 210030 - DNA, 22 bp, Artificial Sequence
  Synthetic oligonucleotide; CTC chr2 60554635 60554656 60554640 60554635 -
ggtgcctctcttgcccaggccc

SEQ ID NO: 210031 - DNA, 22 bp, Artificial Sequence
  Synthetic oligonucleotide; CTC chr2 60554627 60554648 60554632 60554627 -
tcttgcccaggcccccggcgct

SEQ ID NO: 210032 - DNA, 22 bp, Artificial Sequence
  Synthetic oligonucleotide; CTC chr2 60554625 60554646 60554630 60554625 -
ttgcccaggcccccggcgctcc

SEQ ID NO: 210033 - DNA, 22 bp, Artificial Sequence
  Synthetic oligonucleotide; CTT chr2 60554623 60554644 60554628 60554623 -
gcccaggcccccggcgctcccc

SEQ ID NO: 210034 - DNA, 22 bp, Artificial Sequence
  Synthetic oligonucleotide; TTG chr2 60554622 60554643 60554627 60554622 -
cccaggcccccggcgctcccct

SEQ ID NO: 210035 - DNA, 22 bp, Artificial Sequence
  Synthetic oligonucleotide; CTC chr2 60554604 60554625 60554609 60554604 -
ccctccgggggccagactctgg

SEQ ID NO: 210036 - DNA, 22 bp, Artificial Sequence
  Synthetic oligonucleotide; CTC chr2 60554599 60554620 60554604 60554599 -
cgggggccagactctggctcct

SEQ ID NO: 210037 - DNA, 22 bp, Artificial Sequence
  Synthetic oligonucleotide; CTC chr2 60554585 60554606 60554590 60554585 -
tggctcctcgttctttattcct

SEQ ID NO: 210038 - DNA, 22 bp, Artificial Sequence
  Synthetic oligonucleotide; CTG chr2 60554583 60554604 60554588 60554583 -
gctcctcgttctttattcctcg

SEQ ID NO: 210039 - DNA, 22 bp, Artificial Sequence
  Synthetic oligonucleotide; CTC chr2 60554579 60554600 60554584 60554579 -
ctcgttctttattcctcgggct

SEQ ID NO: 210040 - DNA, 22 bp, Artificial Sequence
  Synthetic oligonucleotide; CTC chr2 60554576 60554597 60554581 60554576 -
gttctttattcctcgggctctc

SEQ ID NO: 210041 - DNA, 22 bp, Artificial Sequence
  Synthetic oligonucleotide; TTC chr2 60554572 60554593 60554577 60554572 -
tttattcctcgggctctctttc

SEQ ID NO: 210042 - DNA, 22 bp, Artificial Sequence
  Synthetic oligonucleotide; CTT chr2 60554570 60554591 60554575 60554570 -
tattcctcgggctctctttctg

SEQ ID NO: 210043 - DNA, 22 bp, Artificial Sequence
  Synthetic oligonucleotide; TTT chr2 60554569 60554590 60554574 60554569 -
attcctcgggctctctttctgc

SEQ ID NO: 210044 - DNA, 22 bp, Artificial Sequence
  Synthetic oligonucleotide; TTA chr2 60554568 60554589 60554573 60554568 -
ttcctcgggctctctttctgcg

SEQ ID NO: 210045 - DNA, 22 bp, Artificial Sequence
  Synthetic oligonucleotide; TTC chr2 60554565 60554586 60554570 60554565 -
ctcgggctctctttctgcgacc

SEQ ID NO: 210046 - DNA, 22 bp, Artificial Sequence
  Synthetic oligonucleotide; CTC chr2 60554562 60554583 60554567 60554562 -
gggctctctttctgcgaccctt

SEQ ID NO: 210047 - DNA, 22 bp, Artificial Sequence
  Synthetic oligonucleotide; CTC chr2 60554556 60554577 60554561 60554556 -
tctttctgcgacccttaggagc

SEQ ID NO: 210048 - DNA, 22 bp, Artificial Sequence
  Synthetic oligonucleotide; CTC chr2 60554554 60554575 60554559 60554554 -
tttctgcgacccttaggagccg

SEQ ID NO: 210049 - DNA, 22 bp, Artificial Sequence
  Synthetic oligonucleotide; CTT chr2 60554552 60554573 60554557 60554552 -
tctgcgacccttaggagccggg

SEQ ID NO: 210050 - DNA, 22 bp, Artificial Sequence
  Synthetic oligonucleotide; TTT chr2 60554551 60554572 60554556 60554551 -
ctgcgacccttaggagccgggg

SEQ ID NO: 210051 - DNA, 22 bp, Artificial Sequence
  Synthetic oligonucleotide; TTC chr2 60554550 60554571 60554555 60554550 -
tgcgacccttaggagccgggga

SEQ ID NO: 210052 - DNA, 22 bp, Artificial Sequence
  Synthetic oligonucleotide; CTG chr2 60554548 60554569 60554553 60554548 -
cgacccttaggagccggggact

SEQ ID NO: 210053 - DNA, 22 bp, Artificial Sequence
  Synthetic oligonucleotide; CTT chr2 60554540 60554561 60554545 60554540 -
aggagccggggactcggcgctt

SEQ ID NO: 210054 - DNA, 22 bp, Artificial Sequence
  Synthetic oligonucleotide; TTA chr2 60554539 60554560 60554544 60554539 -
ggagccggggactcggcgcttt

SEQ ID NO: 210055 - DNA, 22 bp, Artificial Sequence
  Synthetic oligonucleotide; CTC chr2 60554525 60554546 60554530 60554525 -
ggcgctttcagttgcattcaga

SEQ ID NO: 210056 - DNA, 22 bp, Artificial Sequence
  Synthetic oligonucleotide; CTT chr2 60554518 60554539 60554523 60554518 -
tcagttgcattcagacccagtc

SEQ ID NO: 210057 - DNA, 22 bp, Artificial Sequence
  Synthetic oligonucleotide; TTT chr2 60554517 60554538 60554522 60554517 -
cagttgcattcagacccagtcg

SEQ ID NO: 210058 - DNA, 22 bp, Artificial Sequence
  Synthetic oligonucleotide; TTC chr2 60554516 60554537 60554521 60554516 -
agttgcattcagacccagtcgc

SEQ ID NO: 210059 - DNA, 22 bp, Artificial Sequence
  Synthetic oligonucleotide; TTG chr2 60554511 60554532 60554516 60554511 -
cattcagacccagtcgcttggc

SEQ ID NO: 210060 - DNA, 22 bp, Artificial Sequence
  Synthetic oligonucleotide; TTC chr2 60554506 60554527 60554511 60554506 -
agacccagtcgcttggcggggc

SEQ ID NO: 210061 - DNA, 22 bp, Artificial Sequence
  Synthetic oligonucleotide; CTT chr2 60554492 60554513 60554497 60554492 -
ggcggggcgctcagattcccgg

SEQ ID NO: 210062 - DNA, 22 bp, Artificial Sequence
  Synthetic oligonucleotide; TTG chr2 60554491 60554512 60554496 60554491 -
gcggggcgctcagattcccggt

SEQ ID NO: 210063 - DNA, 22 bp, Artificial Sequence
  Synthetic oligonucleotide; CTC chr2 60554480 60554501 60554485 60554480 -
agattcccggtccctggctcgg

SEQ ID NO: 210064 - DNA, 22 bp, Artificial Sequence
  Synthetic oligonucleotide; TTC chr2 60554474 60554495 60554479 60554474 -
ccggtccctggctcggccttgg

SEQ ID NO: 210065 - DNA, 22 bp, Artificial Sequence
  Synthetic oligonucleotide; CTG chr2 60554464 60554485 60554469 60554464 -
gctcggccttgggggcgccctc

SEQ ID NO: 210066 - DNA, 22 bp, Artificial Sequence
  Synthetic oligonucleotide; CTC chr2 60554460 60554481 60554465 60554460 -
ggccttgggggcgccctcgggc

SEQ ID NO: 210067 - DNA, 22 bp, Artificial Sequence
  Synthetic oligonucleotide; CTT chr2 60554454 60554475 60554459 60554454 -
gggggcgccctcgggccccggc

SEQ ID NO: 210068 - DNA, 22 bp, Artificial Sequence
  Synthetic oligonucleotide; TTG chr2 60554453 60554474 60554458 60554453 -
ggggcgccctcgggccccggcc

SEQ ID NO: 210069 - DNA, 22 bp, Artificial Sequence
  Synthetic oligonucleotide; CTC chr2 60554442 60554463 60554447 60554442 -
gggccccggcctgcgccgcctg

SEQ ID NO: 210070 - DNA, 22 bp, Artificial Sequence
  Synthetic oligonucleotide; CTG chr2 60554429 60554450 60554434 60554429 -
cgccgcctgcctctccccggtc

SEQ ID NO: 210071 - DNA, 22 bp, Artificial Sequence
  Synthetic oligonucleotide; CTG chr2 60554420 60554441 60554425 60554420 -
cctctccccggtcccctctttc

SEQ ID NO: 210072 - DNA, 22 bp, Artificial Sequence
  Synthetic oligonucleotide; CTC chr2 60554416 60554437 60554421 60554416 -
tccccggtcccctctttccagg

SEQ ID NO: 210073 - DNA, 22 bp, Artificial Sequence
  Synthetic oligonucleotide; CTC chr2 60554414 60554435 60554419 60554414 -
cccggtcccctctttccaggcc

SEQ ID NO: 210074 - DNA, 22 bp, Artificial Sequence
  Synthetic oligonucleotide; CTC chr2 60554402 60554423 60554407 60554402 -
tttccaggccgcgcgggctcct

SEQ ID NO: 210075 - DNA, 22 bp, Artificial Sequence
  Synthetic oligonucleotide; CTT chr2 60554400 60554421 60554405 60554400 -
tccaggccgcgcgggctcctgg

SEQ ID NO: 210076 - DNA, 22 bp, Artificial Sequence
  Synthetic oligonucleotide; TTT chr2 60554399 60554420 60554404 60554399 -
ccaggccgcgcgggctcctgga

SEQ ID NO: 210077 - DNA, 22 bp, Artificial Sequence
  Synthetic oligonucleotide; TTC chr2 60554398 60554419 60554403 60554398 -
caggccgcgcgggctcctggag

SEQ ID NO: 210078 - DNA, 22 bp, Artificial Sequence
  Synthetic oligonucleotide; CTC chr2 60554382 60554403 60554387 60554382 -
ctggagacttgggcgctgccct

SEQ ID NO: 210079 - DNA, 22 bp, Artificial Sequence
  Synthetic oligonucleotide; CTG chr2 60554379 60554400 60554384 60554379 -
gagacttgggcgctgcccttcc

SEQ ID NO: 210080 - DNA, 22 bp, Artificial Sequence
  Synthetic oligonucleotide; CTT chr2 60554372 60554393 60554377 60554372 -
gggcgctgcccttccggacccg

SEQ ID NO: 210081 - DNA, 22 bp, Artificial Sequence
  Synthetic oligonucleotide; TTG chr2 60554371 60554392 60554376 60554371 -
ggcgctgcccttccggacccgc

SEQ ID NO: 210082 - DNA, 22 bp, Artificial Sequence
  Synthetic oligonucleotide; CTG chr2 60554364 60554385 60554369 60554364 -
cccttccggacccgcagccctc

SEQ ID NO: 210083 - DNA, 22 bp, Artificial Sequence
  Synthetic oligonucleotide; CTT chr2 60554359 60554380 60554364 60554359 -
ccggacccgcagccctccaaac

SEQ ID NO: 210084 - DNA, 22 bp, Artificial Sequence
  Synthetic oligonucleotide; TTC chr2 60554358 60554379 60554363 60554358 -
cggacccgcagccctccaaact

SEQ ID NO: 210085 - DNA, 22 bp, Artificial Sequence
  Synthetic oligonucleotide; CTC chr2 60554342 60554363 60554347 60554342 -
caaacttaggctggattccgcg

SEQ ID NO: 210086 - DNA, 22 bp, Artificial Sequence
  Synthetic oligonucleotide; CTT chr2 60554335 60554356 60554340 60554335 -
aggctggattccgcgttgccgt

SEQ ID NO: 210087 - DNA, 22 bp, Artificial Sequence
  Synthetic oligonucleotide; TTA chr2 60554334 60554355 60554339 60554334 -
ggctggattccgcgttgccgtg

SEQ ID NO: 210088 - DNA, 22 bp, Artificial Sequence
  Synthetic oligonucleotide; CTG chr2 60554329 60554350 60554334 60554329 -
gattccgcgttgccgtgcgctc

SEQ ID NO: 210089 - DNA, 22 bp, Artificial Sequence
  Synthetic oligonucleotide; TTC chr2 60554324 60554345 60554329 60554324 -
cgcgttgccgtgcgctccctcc

SEQ ID NO: 210090 - DNA, 22 bp, Artificial Sequence
  Synthetic oligonucleotide; TTG chr2 60554317 60554338 60554322 60554317 -
ccgtgcgctccctcccacctcc

SEQ ID NO: 210091 - DNA, 22 bp, Artificial Sequence
  Synthetic oligonucleotide; CTC chr2 60554307 60554328 60554312 60554307 -
cctcccacctcccctcgcccgc

SEQ ID NO: 210092 - DNA, 22 bp, Artificial Sequence
  Synthetic oligonucleotide; CTC chr2 60554303 60554324 60554308 60554303 -
ccacctcccctcgcccgctgcg

SEQ ID NO: 210093 - DNA, 22 bp, Artificial Sequence
  Synthetic oligonucleotide; CTC chr2 60554296 60554317 60554301 60554296 -
ccctcgcccgctgcggagctgt

SEQ ID NO: 210094 - DNA, 22 bp, Artificial Sequence
  Synthetic oligonucleotide; CTC chr2 60554291 60554312 60554296 60554291 -
gcccgctgcggagctgtaactt

SEQ ID NO: 210095 - DNA, 22 bp, Artificial Sequence
  Synthetic oligonucleotide; CTG chr2 60554283 60554304 60554288 60554283 -
cggagctgtaacttggaggctc

SEQ ID NO: 210096 - DNA, 22 bp, Artificial Sequence
  Synthetic oligonucleotide; CTG chr2 60554275 60554296 60554280 60554275 -
taacttggaggctcagctctca

SEQ ID NO: 210097 - DNA, 22 bp, Artificial Sequence
  Synthetic oligonucleotide; CTT chr2 60554269 60554290 60554274 60554269 -
ggaggctcagctctcaacttcg

SEQ ID NO: 210098 - DNA, 22 bp, Artificial Sequence
  Synthetic oligonucleotide; TTG chr2 60554268 60554289 60554273 60554268 -
gaggctcagctctcaacttcgg

SEQ ID NO: 210099 - DNA, 22 bp, Artificial Sequence
  Synthetic oligonucleotide; CTC chr2 60554261 60554282 60554266 60554261 -
agctctcaacttcgggtgattt

SEQ ID NO: 210100 - DNA, 22 bp, Artificial Sequence
  Synthetic oligonucleotide; CTC chr2 60554256 60554277 60554261 60554256 -
tcaacttcgggtgatttttctt

SEQ ID NO: 210101 - DNA, 22 bp, Artificial Sequence
  Synthetic oligonucleotide; CTC chr2 60554254 60554275 60554259 60554254 -
aacttcgggtgatttttctttg

SEQ ID NO: 210102 - DNA, 22 bp, Artificial Sequence
  Synthetic oligonucleotide; CTT chr2 60554249 60554270 60554254 60554249 -
cgggtgatttttctttgctgtc

SEQ ID NO: 210103 - DNA, 22 bp, Artificial Sequence
  Synthetic oligonucleotide; TTC chr2 60554248 60554269 60554253 60554248 -
gggtgatttttctttgctgtcc

SEQ ID NO: 210104 - DNA, 22 bp, Artificial Sequence
  Synthetic oligonucleotide; TTT chr2 60554239 60554260 60554244 60554239 -
ttctttgctgtcctctcctcgg

SEQ ID NO: 210105 - DNA, 22 bp, Artificial Sequence
  Synthetic oligonucleotide; TTT chr2 60554238 60554259 60554243 60554238 -
tctttgctgtcctctcctcggg

SEQ ID NO: 210106 - DNA, 22 bp, Artificial Sequence
  Synthetic oligonucleotide; TTT chr2 60554237 60554258 60554242 60554237 -
ctttgctgtcctctcctcgggc

SEQ ID NO: 210107 - DNA, 22 bp, Artificial Sequence
  Synthetic oligonucleotide; TTC chr2 60554236 60554257 60554241 60554236 -
tttgctgtcctctcctcgggca

SEQ ID NO: 210108 - DNA, 22 bp, Artificial Sequence
  Synthetic oligonucleotide; CTT chr2 60554234 60554255 60554239 60554234 -
tgctgtcctctcctcgggcaaa

SEQ ID NO: 210109 - DNA, 22 bp, Artificial Sequence
  Synthetic oligonucleotide; TTT chr2 60554233 60554254 60554238 60554233 -
gctgtcctctcctcgggcaaag

SEQ ID NO: 210110 - DNA, 22 bp, Artificial Sequence
  Synthetic oligonucleotide; TTG chr2 60554232 60554253 60554237 60554232 -
ctgtcctctcctcgggcaaagt

SEQ ID NO: 210111 - DNA, 22 bp, Artificial Sequence
  Synthetic oligonucleotide; CTG chr2 60554229 60554250 60554234 60554229 -
tcctctcctcgggcaaagtttc

SEQ ID NO: 210112 - DNA, 22 bp, Artificial Sequence
  Synthetic oligonucleotide; CTC chr2 60554224 60554245 60554229 60554224 -
tcctcgggcaaagtttcccgag

SEQ ID NO: 210113 - DNA, 22 bp, Artificial Sequence
  Synthetic oligonucleotide; CTC chr2 60554222 60554243 60554227 60554222 -
ctcgggcaaagtttcccgagcg

SEQ ID NO: 210114 - DNA, 22 bp, Artificial Sequence
  Synthetic oligonucleotide; CTC chr2 60554219 60554240 60554224 60554219 -
gggcaaagtttcccgagcgcag

SEQ ID NO: 210115 - DNA, 22 bp, Artificial Sequence
  Synthetic oligonucleotide; TTT chr2 60554208 60554229 60554213 60554208 -
cccgagcgcagccgcgggctcg

SEQ ID NO: 210116 - DNA, 22 bp, Artificial Sequence
  Synthetic oligonucleotide; TTC chr2 60554207 60554228 60554212 60554207 -
ccgagcgcagccgcgggctcgg

SEQ ID NO: 210117 - DNA, 22 bp, Artificial Sequence
  Synthetic oligonucleotide; CTC chr2 60554187 60554208 60554192 60554187 -
ggggcttttacttcggcccctg

SEQ ID NO: 210118 - DNA, 22 bp, Artificial Sequence
  Synthetic oligonucleotide; CTT chr2 60554180 60554201 60554185 60554180 -
ttacttcggcccctggcgtcca

SEQ ID NO: 210119 - DNA, 22 bp, Artificial Sequence
  Synthetic oligonucleotide; TTT chr2 60554179 60554200 60554184 60554179 -
tacttcggcccctggcgtccac

SEQ ID NO: 210120 - DNA, 22 bp, Artificial Sequence
  Synthetic oligonucleotide; TTT chr2 60554178 60554199 60554183 60554178 -
acttcggcccctggcgtccaca

SEQ ID NO: 210121 - DNA, 22 bp, Artificial Sequence
  Synthetic oligonucleotide; TTA chr2 60554177 60554198 60554182 60554177 -
cttcggcccctggcgtccacac

SEQ ID NO: 210122 - DNA, 22 bp, Artificial Sequence
  Synthetic oligonucleotide; CTT chr2 60554174 60554195 60554179 60554174 -
cggcccctggcgtccacacgcg

SEQ ID NO: 210123 - DNA, 22 bp, Artificial Sequence
  Synthetic oligonucleotide; TTC chr2 60554173 60554194 60554178 60554173 -
ggcccctggcgtccacacgcgg

SEQ ID NO: 210124 - DNA, 22 bp, Artificial Sequence
  Synthetic oligonucleotide; CTG chr2 60554165 60554186 60554170 60554165 -
gcgtccacacgcggggagcgag

SEQ ID NO: 210125 - DNA, 22 bp, Artificial Sequence
  Synthetic oligonucleotide; CTC chr2 60554081 60554102 60554086 60554081 -
tacctggcttccctccgcccgc

SEQ ID NO: 210126 - DNA, 22 bp, Artificial Sequence
  Synthetic oligonucleotide; CTA chr2 60554079 60554100 60554084 60554079 -
cctggcttccctccgcccgcgc

SEQ ID NO: 210127 - DNA, 22 bp, Artificial Sequence
  Synthetic oligonucleotide; CTG chr2 60554075 60554096 60554080 60554075 -
gcttccctccgcccgcgcttcc

SEQ ID NO: 210128 - DNA, 22 bp, Artificial Sequence
  Synthetic oligonucleotide; CTT chr2 60554071 60554092 60554076 60554071 -
ccctccgcccgcgcttccccag

SEQ ID NO: 210129 - DNA, 22 bp, Artificial Sequence
  Synthetic oligonucleotide; TTC chr2 60554070 60554091 60554075 60554070 -
cctccgcccgcgcttccccagc

SEQ ID NO: 210130 - DNA, 22 bp, Artificial Sequence
  Synthetic oligonucleotide; CTC chr2 60554066 60554087 60554071 60554066 -
cgcccgcgcttccccagcccgg

SEQ ID NO: 210131 - DNA, 22 bp, Artificial Sequence
  Synthetic oligonucleotide; CTT chr2 60554055 60554076 60554060 60554055 -
ccccagcccggggctgcagcct

SEQ ID NO: 210132 - DNA, 22 bp, Artificial Sequence
  Synthetic oligonucleotide; TTC chr2 60554054 60554075 60554059 60554054 -
cccagcccggggctgcagcctc

SEQ ID NO: 210133 - DNA, 22 bp, Artificial Sequence
  Synthetic oligonucleotide; CTG chr2 60554039 60554060 60554044 60554039 -
cagcctcccggtgcactctcgc

SEQ ID NO: 210134 - DNA, 22 bp, Artificial Sequence
  Synthetic oligonucleotide; CTC chr2 60554032 60554053 60554037 60554032 -
ccggtgcactctcgctctattt

SEQ ID NO: 210135 - DNA, 22 bp, Artificial Sequence
  Synthetic oligonucleotide; CTC chr2 60554021 60554042 60554026 60554021 -
tcgctctatttttttctttttt

SEQ ID NO: 210136 - DNA, 22 bp, Artificial Sequence
  Synthetic oligonucleotide; CTC chr2 60554019 60554040 60554024 60554019 -
gctctatttttttcttttttga

SEQ ID NO: 210137 - DNA, 22 bp, Artificial Sequence
  Synthetic oligonucleotide; CTC chr2 60554015 60554036 60554020 60554015 -
tatttttttcttttttgaataa

SEQ ID NO: 210138 - DNA, 22 bp, Artificial Sequence
  Synthetic oligonucleotide; CTA chr2 60554013 60554034 60554018 60554013 -
tttttttcttttttgaataatc

SEQ ID NO: 210139 - DNA, 22 bp, Artificial Sequence
  Synthetic oligonucleotide; TTT chr2 60554010 60554031 60554015 60554010 -
ttttcttttttgaataatcttt

SEQ ID NO: 210140 - DNA, 22 bp, Artificial Sequence
  Synthetic oligonucleotide; TTT chr2 60554009 60554030 60554014 60554009 -
tttcttttttgaataatctttc

SEQ ID NO: 210141 - DNA, 22 bp, Artificial Sequence
  Synthetic oligonucleotide; TTT chr2 60554008 60554029 60554013 60554008 -
ttcttttttgaataatctttca

SEQ ID NO: 210142 - DNA, 22 bp, Artificial Sequence
  Synthetic oligonucleotide; TTT chr2 60554007 60554028 60554012 60554007 -
tcttttttgaataatctttcat

SEQ ID NO: 210143 - DNA, 22 bp, Artificial Sequence
  Synthetic oligonucleotide; TTT chr2 60554006 60554027 60554011 60554006 -
cttttttgaataatctttcatt

SEQ ID NO: 210144 - DNA, 22 bp, Artificial Sequence
  Synthetic oligonucleotide; TTC chr2 60554005 60554026 60554010 60554005 -
ttttttgaataatctttcattt

SEQ ID NO: 210145 - DNA, 22 bp, Artificial Sequence
  Synthetic oligonucleotide; CTT chr2 60554003 60554024 60554008 60554003 -
ttttgaataatctttcatttta

SEQ ID NO: 210146 - DNA, 22 bp, Artificial Sequence
  Synthetic oligonucleotide; TTT chr2 60554002 60554023 60554007 60554002 -
tttgaataatctttcattttag

SEQ ID NO: 210147 - DNA, 22 bp, Artificial Sequence
  Synthetic oligonucleotide; TTT chr2 60554001 60554022 60554006 60554001 -
ttgaataatctttcattttaga

SEQ ID NO: 210148 - DNA, 22 bp, Artificial Sequence
  Synthetic oligonucleotide; TTT chr2 60554000 60554021 60554005 60554000 -
tgaataatctttcattttagag

SEQ ID NO: 210149 - DNA, 22 bp, Artificial Sequence
  Synthetic oligonucleotide; TTT chr2 60553999 60554020 60554004 60553999 -
gaataatctttcattttagagt

SEQ ID NO: 210150 - DNA, 22 bp, Artificial Sequence
  Synthetic oligonucleotide; TTG chr2 60553998 60554019 60554003 60553998 -
aataatctttcattttagagtc

SEQ ID NO: 210151 - DNA, 22 bp, Artificial Sequence
  Synthetic oligonucleotide; CTT chr2 60553989 60554010 60553994 60553989 -
tcattttagagtccgcgtgtgt

SEQ ID NO: 210152 - DNA, 22 bp, Artificial Sequence
  Synthetic oligonucleotide; TTT chr2 60553988 60554009 60553993 60553988 -
cattttagagtccgcgtgtgtg

SEQ ID NO: 210153 - DNA, 22 bp, Artificial Sequence
  Synthetic oligonucleotide; TTC chr2 60553987 60554008 60553992 60553987 -
attttagagtccgcgtgtgtgg

SEQ ID NO: 210154 - DNA, 22 bp, Artificial Sequence
  Synthetic oligonucleotide; TTT chr2 60553983 60554004 60553988 60553983 -
tagagtccgcgtgtgtgggggg

SEQ ID NO: 210155 - DNA, 22 bp, Artificial Sequence
  Synthetic oligonucleotide; TTT chr2 60553982 60554003 60553987 60553982 -
agagtccgcgtgtgtggggggg

SEQ ID NO: 210156 - DNA, 22 bp, Artificial Sequence
  Synthetic oligonucleotide; TTA chr2 60553981 60554002 60553986 60553981 -
gagtccgcgtgtgtggggggga

SEQ ID NO: 210157 - DNA, 22 bp, Artificial Sequence
  Synthetic oligonucleotide; CTT chr2 60553943 60553964 60553948 60553943 -
gctcccccccaccctttcctcc

SEQ ID NO: 210158 - DNA, 22 bp, Artificial Sequence
  Synthetic oligonucleotide; TTG chr2 60553942 60553963 60553947 60553942 -
ctcccccccaccctttcctccc

SEQ ID NO: 210159 - DNA, 22 bp, Artificial Sequence
  Synthetic oligonucleotide; CTC chr2 60553939 60553960 60553944 60553939 -
ccccccaccctttcctcccacc

SEQ ID NO: 210160 - DNA, 22 bp, Artificial Sequence
  Synthetic oligonucleotide; CTT chr2 60553927 60553948 60553932 60553927 -
tcctcccacccctgccacccct

SEQ ID NO: 210161 - DNA, 22 bp, Artificial Sequence
  Synthetic oligonucleotide; TTT chr2 60553926 60553947 60553931 60553926 -
cctcccacccctgccacccctt

SEQ ID NO: 210162 - DNA, 22 bp, Artificial Sequence
  Synthetic oligonucleotide; TTC chr2 60553925 60553946 60553930 60553925 -
ctcccacccctgccaccccttt

SEQ ID NO: 210163 - DNA, 22 bp, Artificial Sequence
  Synthetic oligonucleotide; CTC chr2 60553922 60553943 60553927 60553922 -
ccacccctgccacccctttctt

SEQ ID NO: 210164 - DNA, 22 bp, Artificial Sequence
  Synthetic oligonucleotide; CTG chr2 60553913 60553934 60553918 60553913 -
ccacccctttcttctctcccgg

SEQ ID NO: 210165 - DNA, 22 bp, Artificial Sequence
  Synthetic oligonucleotide; CTT chr2 60553904 60553925 60553909 60553904 -
tcttctctcccggccacgccac

SEQ ID NO: 210166 - DNA, 22 bp, Artificial Sequence
  Synthetic oligonucleotide; TTT chr2 60553903 60553924 60553908 60553903 -
cttctctcccggccacgccacc

SEQ ID NO: 210167 - DNA, 22 bp, Artificial Sequence
  Synthetic oligonucleotide; TTC chr2 60553902 60553923 60553907 60553902 -
ttctctcccggccacgccaccg

SEQ ID NO: 210168 - DNA, 22 bp, Artificial Sequence
  Synthetic oligonucleotide; CTT chr2 60553900 60553921 60553905 60553900 -
ctctcccggccacgccaccgcc

SEQ ID NO: 210169 - DNA, 22 bp, Artificial Sequence
  Synthetic oligonucleotide; TTC chr2 60553899 60553920 60553904 60553899 -
tctcccggccacgccaccgccg

SEQ ID NO: 210170 - DNA, 22 bp, Artificial Sequence
  Synthetic oligonucleotide; CTC chr2 60553897 60553918 60553902 60553897 -
tcccggccacgccaccgccgcg

SEQ ID NO: 210171 - DNA, 22 bp, Artificial Sequence
  Synthetic oligonucleotide; CTC chr2 60553895 60553916 60553900 60553895 -
ccggccacgccaccgccgcggc

SEQ ID NO: 210172 - DNA, 22 bp, Artificial Sequence
  Synthetic oligonucleotide; CTC chr2 60553869 60553890 60553874 60553869 -
gctgcggccactggtgagcccg

SEQ ID NO: 210173 - DNA, 22 bp, Artificial Sequence
  Synthetic oligonucleotide; CTG chr2 60553865 60553886 60553870 60553865 -
cggccactggtgagcccgcggc

SEQ ID NO: 210174 - DNA, 22 bp, Artificial Sequence
  Synthetic oligonucleotide; CTG chr2 60553856 60553877 60553861 60553856 -
gtgagcccgcggccccagcgcc

SEQ ID NO: 210175 - DNA, 22 bp, Artificial Sequence
  Synthetic oligonucleotide; CTC chr2 60553829 60553850 60553834 60553829 -
ccctcggcccgcccctcccccg

SEQ ID NO: 210176 - DNA, 22 bp, Artificial Sequence
  Synthetic oligonucleotide; CTC chr2 60553824 60553845 60553829 60553824 -
ggcccgcccctcccccgggggc

SEQ ID NO: 210177 - DNA, 22 bp, Artificial Sequence
  Synthetic oligonucleotide; CTC chr2 60553812 60553833 60553817 60553812 -
ccccgggggccgcgtctggcgt

SEQ ID NO: 210178 - DNA, 22 bp, Artificial Sequence
  Synthetic oligonucleotide; CTG chr2 60553794 60553815 60553799 60553794 -
gcgtccgcggagccccccgccc

SEQ ID NO: 210179 - DNA, 22 bp, Artificial Sequence
  Synthetic oligonucleotide; CTC chr2 60553764 60553785 60553769 60553764 -
cccctccccgcactggccattg

SEQ ID NO: 210180 - DNA, 22 bp, Artificial Sequence
  Synthetic oligonucleotide; CTC chr2 60553758 60553779 60553763 60553758 -
cccgcactggccattggcttgt

SEQ ID NO: 210181 - DNA, 22 bp, Artificial Sequence
  Synthetic oligonucleotide; CTG chr2 60553749 60553770 60553754 60553749 -
gccattggcttgtcctggtctc

SEQ ID NO: 210182 - DNA, 22 bp, Artificial Sequence
  Synthetic oligonucleotide; TTG chr2 60553742 60553763 60553747 60553742 -
gcttgtcctggtctctttttca

SEQ ID NO: 210183 - DNA, 22 bp, Artificial Sequence
  Synthetic oligonucleotide; CTT chr2 60553738 60553759 60553743 60553738 -
gtcctggtctctttttcatgtc

SEQ ID NO: 210184 - DNA, 22 bp, Artificial Sequence
  Synthetic oligonucleotide; TTG chr2 60553737 60553758 60553742 60553737 -
tcctggtctctttttcatgtcc

SEQ ID NO: 210185 - DNA, 22 bp, Artificial Sequence
  Synthetic oligonucleotide; CTG chr2 60553732 60553753 60553737 60553732 -
gtctctttttcatgtccagccc

SEQ ID NO: 210186 - DNA, 22 bp, Artificial Sequence
  Synthetic oligonucleotide; CTC chr2 60553727 60553748 60553732 60553727 -
tttttcatgtccagcccctgat

SEQ ID NO: 210187 - DNA, 22 bp, Artificial Sequence
  Synthetic oligonucleotide; CTT chr2 60553725 60553746 60553730 60553725 -
tttcatgtccagcccctgatgt

SEQ ID NO: 210188 - DNA, 22 bp, Artificial Sequence
  Synthetic oligonucleotide; TTT chr2 60553724 60553745 60553729 60553724 -
ttcatgtccagcccctgatgtg

SEQ ID NO: 210189 - DNA, 22 bp, Artificial Sequence
  Synthetic oligonucleotide; TTT chr2 60553723 60553744 60553728 60553723 -
tcatgtccagcccctgatgtgt

SEQ ID NO: 210190 - DNA, 22 bp, Artificial Sequence
  Synthetic oligonucleotide; TTT chr2 60553722 60553743 60553727 60553722 -
catgtccagcccctgatgtgtg

SEQ ID NO: 210191 - DNA, 22 bp, Artificial Sequence
  Synthetic oligonucleotide; TTC chr2 60553721 60553742 60553726 60553721 -
atgtccagcccctgatgtgtgt

SEQ ID NO: 210192 - DNA, 22 bp, Artificial Sequence
  Synthetic oligonucleotide; CTG chr2 60553707 60553728 60553712 60553707 -
atgtgtgtccattggtgtgagc

SEQ ID NO: 210193 - DNA, 22 bp, Artificial Sequence
  Synthetic oligonucleotide; TTG chr2 60553693 60553714 60553698 60553693 -
gtgtgagcttccccttccctcc

SEQ ID NO: 210194 - DNA, 22 bp, Artificial Sequence
  Synthetic oligonucleotide; CTT chr2 60553683 60553704 60553688 60553683 -
ccccttccctcctccccttctc

SEQ ID NO: 210195 - DNA, 22 bp, Artificial Sequence
  Synthetic oligonucleotide; TTC chr2 60553682 60553703 60553687 60553682 -
cccttccctcctccccttctct

SEQ ID NO: 210196 - DNA, 22 bp, Artificial Sequence
  Synthetic oligonucleotide; CTT chr2 60553677 60553698 60553682 60553677 -
ccctcctccccttctctcctgc

SEQ ID NO: 210197 - DNA, 22 bp, Artificial Sequence
  Synthetic oligonucleotide; TTC chr2 60553676 60553697 60553681 60553676 -
cctcctccccttctctcctgct

SEQ ID NO: 210198 - DNA, 22 bp, Artificial Sequence
  Synthetic oligonucleotide; CTC chr2 60553672 60553693 60553677 60553672 -
ctccccttctctcctgctcgcc

SEQ ID NO: 210199 - DNA, 22 bp, Artificial Sequence
  Synthetic oligonucleotide; CTC chr2 60553669 60553690 60553674 60553669 -
cccttctctcctgctcgccctg

SEQ ID NO: 210200 - DNA, 22 bp, Artificial Sequence
  Synthetic oligonucleotide; CTT chr2 60553664 60553685 60553669 60553664 -
ctctcctgctcgccctgcccat

SEQ ID NO: 210201 - DNA, 22 bp, Artificial Sequence
  Synthetic oligonucleotide; TTC chr2 60553663 60553684 60553668 60553663 -
tctcctgctcgccctgcccatg

SEQ ID NO: 210202 - DNA, 22 bp, Artificial Sequence
  Synthetic oligonucleotide; CTC chr2 60553661 60553682 60553666 60553661 -
tcctgctcgccctgcccatgtt

SEQ ID NO: 210203 - DNA, 22 bp, Artificial Sequence
  Synthetic oligonucleotide; CTC chr2 60553659 60553680 60553664 60553659 -
ctgctcgccctgcccatgtttt

SEQ ID NO: 210204 - DNA, 22 bp, Artificial Sequence
  Synthetic oligonucleotide; CTG chr2 60553656 60553677 60553661 60553656 -
ctcgccctgcccatgttttgtg

SEQ ID NO: 210205 - DNA, 22 bp, Artificial Sequence
  Synthetic oligonucleotide; CTC chr2 60553653 60553674 60553658 60553653 -
gccctgcccatgttttgtgtgt

SEQ ID NO: 210206 - DNA, 22 bp, Artificial Sequence
  Synthetic oligonucleotide; CTG chr2 60553647 60553668 60553652 60553647 -
cccatgttttgtgtgtctctgt

SEQ ID NO: 210207 - DNA, 22 bp, Artificial Sequence
  Synthetic oligonucleotide; TTT chr2 60553638 60553659 60553643 60553638 -
tgtgtgtctctgtccatccaga

SEQ ID NO: 210208 - DNA, 22 bp, Artificial Sequence
  Synthetic oligonucleotide; TTT chr2 60553637 60553658 60553642 60553637 -
gtgtgtctctgtccatccagac

SEQ ID NO: 210209 - DNA, 22 bp, Artificial Sequence
  Synthetic oligonucleotide; TTG chr2 60553636 60553657 60553641 60553636 -
tgtgtctctgtccatccagact

SEQ ID NO: 210210 - DNA, 22 bp, Artificial Sequence
  Synthetic oligonucleotide; CTC chr2 60553628 60553649 60553633 60553628 -
tgtccatccagactcctgacgt

SEQ ID NO: 210211 - DNA, 22 bp, Artificial Sequence
  Synthetic oligonucleotide; CTG chr2 60553626 60553647 60553631 60553626 -
tccatccagactcctgacgttc

SEQ ID NO: 210212 - DNA, 22 bp, Artificial Sequence
  Synthetic oligonucleotide; CTC chr2 60553613 60553634 60553618 60553613 -
ctgacgttcaagttcgcaggga

SEQ ID NO: 210213 - DNA, 22 bp, Artificial Sequence
  Synthetic oligonucleotide; CTG chr2 60553610 60553631 60553615 60553610 -
acgttcaagttcgcagggacgt

SEQ ID NO: 210214 - DNA, 22 bp, Artificial Sequence
  Synthetic oligonucleotide; TTC chr2 60553604 60553625 60553609 60553604 -
aagttcgcagggacgtcacgtc

SEQ ID NO: 210215 - DNA, 22 bp, Artificial Sequence
  Synthetic oligonucleotide; TTC chr2 60553598 60553619 60553603 60553598 -
gcagggacgtcacgtccgcact

SEQ ID NO: 210216 - DNA, 22 bp, Artificial Sequence
  Synthetic oligonucleotide; CTT chr2 60553575 60553596 60553580 60553575 -
gaacttgcagctcaggggggct

SEQ ID NO: 210217 - DNA, 22 bp, Artificial Sequence
  Synthetic oligonucleotide; TTG chr2 60553574 60553595 60553579 60553574 -
aacttgcagctcaggggggctt

SEQ ID NO: 210218 - DNA, 22 bp, Artificial Sequence
  Synthetic oligonucleotide; CTT chr2 60553569 60553590 60553574 60553569 -
gcagctcaggggggcttttgcc

SEQ ID NO: 210219 - DNA, 22 bp, Artificial Sequence
  Synthetic oligonucleotide; TTG chr2 60553568 60553589 60553573 60553568 -
cagctcaggggggcttttgcca

SEQ ID NO: 210220 - DNA, 22 bp, Artificial Sequence
  Synthetic oligonucleotide; CTC chr2 60553562 60553583 60553567 60553562 -
aggggggcttttgccatttttt

SEQ ID NO: 210221 - DNA, 22 bp, Artificial Sequence
  Synthetic oligonucleotide; CTT chr2 60553552 60553573 60553557 60553552 -
ttgccatttttttcatctctct

SEQ ID NO: 210222 - DNA, 22 bp, Artificial Sequence
  Synthetic oligonucleotide; TTT chr2 60553551 60553572 60553556 60553551 -
tgccatttttttcatctctctc

SEQ ID NO: 210223 - DNA, 22 bp, Artificial Sequence
  Synthetic oligonucleotide; TTT chr2 60553550 60553571 60553555 60553550 -
gccatttttttcatctctctct

SEQ ID NO: 210224 - DNA, 22 bp, Artificial Sequence
  Synthetic oligonucleotide; TTG chr2 60553549 60553570 60553554 60553549 -
ccatttttttcatctctctctc

SEQ ID NO: 210225 - DNA, 22 bp, Artificial Sequence
  Synthetic oligonucleotide; TTT chr2 60553543 60553564 60553548 60553543 -
ttttcatctctctctctctctc

SEQ ID NO: 210226 - DNA, 22 bp, Artificial Sequence
  Synthetic oligonucleotide; TTT chr2 60553542 60553563 60553547 60553542 -
tttcatctctctctctctctct

SEQ ID NO: 210227 - DNA, 22 bp, Artificial Sequence
  Synthetic oligonucleotide; TTT chr2 60553541 60553562 60553546 60553541 -
ttcatctctctctctctctctc

SEQ ID NO: 210228 - DNA, 22 bp, Artificial Sequence
  Synthetic oligonucleotide; TTT chr2 60553540 60553561 60553545 60553540 -
tcatctctctctctctctctcc

SEQ ID NO: 210229 - DNA, 22 bp, Artificial Sequence
  Synthetic oligonucleotide; TTT chr2 60553539 60553560 60553544 60553539 -
catctctctctctctctctccc

SEQ ID NO: 210230 - DNA, 22 bp, Artificial Sequence
  Synthetic oligonucleotide; TTC chr2 60553538 60553559 60553543 60553538 -
atctctctctctctctctccct

SEQ ID NO: 210231 - DNA, 22 bp, Artificial Sequence
  Synthetic oligonucleotide; CTC chr2 60553533 60553554 60553538 60553533 -
tctctctctctctccctctatc

SEQ ID NO: 210232 - DNA, 22 bp, Artificial Sequence
  Synthetic oligonucleotide; CTC chr2 60553531 60553552 60553536 60553531 -
tctctctctctccctctatctc

SEQ ID NO: 210233 - DNA, 22 bp, Artificial Sequence
  Synthetic oligonucleotide; CTC chr2 60553529 60553550 60553534 60553529 -
tctctctctccctctatctctc

SEQ ID NO: 210234 - DNA, 22 bp, Artificial Sequence
  Synthetic oligonucleotide; CTC chr2 60553527 60553548 60553532 60553527 -
tctctctccctctatctctctt

SEQ ID NO: 210235 - DNA, 22 bp, Artificial Sequence
  Synthetic oligonucleotide; CTC chr2 60553525 60553546 60553530 60553525 -
tctctccctctatctctcttct

SEQ ID NO: 210236 - DNA, 22 bp, Artificial Sequence
  Synthetic oligonucleotide; CTC chr2 60553523 60553544 60553528 60553523 -
tctccctctatctctcttctct

SEQ ID NO: 210237 - DNA, 22 bp, Artificial Sequence
  Synthetic oligonucleotide; CTC chr2 60553521 60553542 60553526 60553521 -
tccctctatctctcttctctct

SEQ ID NO: 210238 - DNA, 22 bp, Artificial Sequence
  Synthetic oligonucleotide; CTC chr2 60553519 60553540 60553524 60553519 -
cctctatctctcttctctctct

SEQ ID NO: 210239 - DNA, 22 bp, Artificial Sequence
  Synthetic oligonucleotide; CTC chr2 60553515 60553536 60553520 60553515 -
tatctctcttctctctctctcc

SEQ ID NO: 210240 - DNA, 22 bp, Artificial Sequence
  Synthetic oligonucleotide; CTA chr2 60553513 60553534 60553518 60553513 -
tctctcttctctctctctccct

SEQ ID NO: 210241 - DNA, 22 bp, Artificial Sequence
  Synthetic oligonucleotide; CTC chr2 60553509 60553530 60553514 60553509 -
tcttctctctctctccctcttt

SEQ ID NO: 210242 - DNA, 22 bp, Artificial Sequence
  Synthetic oligonucleotide; CTC chr2 60553507 60553528 60553512 60553507 -
ttctctctctctccctcttttt

SEQ ID NO: 210243 - DNA, 22 bp, Artificial Sequence
  Synthetic oligonucleotide; CTT chr2 60553505 60553526 60553510 60553505 -
ctctctctctccctcttttttt

SEQ ID NO: 210244 - DNA, 22 bp, Artificial Sequence
  Synthetic oligonucleotide; TTC chr2 60553504 60553525 60553509 60553504 -
tctctctctccctctttttttt

SEQ ID NO: 210245 - DNA, 22 bp, Artificial Sequence
  Synthetic oligonucleotide; CTC chr2 60553502 60553523 60553507 60553502 -
tctctctccctctttttttttt

SEQ ID NO: 210246 - DNA, 22 bp, Artificial Sequence
  Synthetic oligonucleotide; CTC chr2 60553500 60553521 60553505 60553500 -
tctctccctctttttttttttt

SEQ ID NO: 210247 - DNA, 22 bp, Artificial Sequence
  Synthetic oligonucleotide; CTC chr2 60553498 60553519 60553503 60553498 -
tctccctctttttttttttttt

SEQ ID NO: 210248 - DNA, 22 bp, Artificial Sequence
  Synthetic oligonucleotide; CTC chr2 60553496 60553517 60553501 60553496 -
tccctctttttttttttttttt

SEQ ID NO: 210249 - DNA, 22 bp, Artificial Sequence
  Synthetic oligonucleotide; CTC chr2 60553494 60553515 60553499 60553494 -
cctctttttttttttttttttt

SEQ ID NO: 210250 - DNA, 22 bp, Artificial Sequence
  Synthetic oligonucleotide; CTC chr2 60553490 60553511 60553495 60553490 -
tttttttttttttttttttttt

SEQ ID NO: 210251 - DNA, 22 bp, Artificial Sequence
  Synthetic oligonucleotide; CTT chr2 60553488 60553509 60553493 60553488 -
tttttttttttttttttttttt

SEQ ID NO: 210252 - DNA, 22 bp, Artificial Sequence
  Synthetic oligonucleotide; TTT chr2 60553487 60553508 60553492 60553487 -
tttttttttttttttttttttt

SEQ ID NO: 210253 - DNA, 22 bp, Artificial Sequence
  Synthetic oligonucleotide; TTT chr2 60553486 60553507 60553491 60553486 -
tttttttttttttttttttttt

SEQ ID NO: 210254 - DNA, 22 bp, Artificial Sequence
  Synthetic oligonucleotide; TTT chr2 60553485 60553506 60553490 60553485 -
tttttttttttttttttttttt

SEQ ID NO: 210255 - DNA, 22 bp, Artificial Sequence
  Synthetic oligonucleotide; TTT chr2 60553484 60553505 60553489 60553484 -
tttttttttttttttttttttt

SEQ ID NO: 210256 - DNA, 22 bp, Artificial Sequence
  Synthetic oligonucleotide; TTT chr2 60553483 60553504 60553488 60553483 -
tttttttttttttttttttttt

SEQ ID NO: 210257 - DNA, 22 bp, Artificial Sequence
  Synthetic oligonucleotide; TTT chr2 60553482 60553503 60553487 60553482 -
tttttttttttttttttttttg

SEQ ID NO: 210258 - DNA, 22 bp, Artificial Sequence
  Synthetic oligonucleotide; TTT chr2 60553481 60553502 60553486 60553481 -
ttttttttttttttttttttgc

SEQ ID NO: 210259 - DNA, 22 bp, Artificial Sequence
  Synthetic oligonucleotide; TTT chr2 60553480 60553501 60553485 60553480 -
tttttttttttttttttttgct

SEQ ID NO: 210260 - DNA, 22 bp, Artificial Sequence
  Synthetic oligonucleotide; TTT chr2 60553479 60553500 60553484 60553479 -
ttttttttttttttttttgctt

SEQ ID NO: 210261 - DNA, 22 bp, Artificial Sequence
  Synthetic oligonucleotide; TTT chr2 60553478 60553499 60553483 60553478 -
tttttttttttttttttgctta

SEQ ID NO: 210262 - DNA, 22 bp, Artificial Sequence
  Synthetic oligonucleotide; TTT chr2 60553477 60553498 60553482 60553477 -
ttttttttttttttttgcttaa

SEQ ID NO: 210263 - DNA, 22 bp, Artificial Sequence
  Synthetic oligonucleotide; TTT chr2 60553476 60553497 60553481 60553476 -
tttttttttttttttgcttaaa

SEQ ID NO: 210264 - DNA, 22 bp, Artificial Sequence
  Synthetic oligonucleotide; TTT chr2 60553475 60553496 60553480 60553475 -
ttttttttttttttgcttaaaa

SEQ ID NO: 210265 - DNA, 22 bp, Artificial Sequence
  Synthetic oligonucleotide; TTT chr2 60553474 60553495 60553479 60553474 -
tttttttttttttgcttaaaaa

SEQ ID NO: 210266 - DNA, 22 bp, Artificial Sequence
  Synthetic oligonucleotide; TTT chr2 60553473 60553494 60553478 60553473 -
ttttttttttttgcttaaaaaa

SEQ ID NO: 210267 - DNA, 22 bp, Artificial Sequence
  Synthetic oligonucleotide; TTT chr2 60553472 60553493 60553477 60553472 -
tttttttttttgcttaaaaaaa

SEQ ID NO: 210268 - DNA, 22 bp, Artificial Sequence
  Synthetic oligonucleotide; TTT chr2 60553471 60553492 60553476 60553471 -
ttttttttttgcttaaaaaaaa

SEQ ID NO: 210269 - DNA, 22 bp, Artificial Sequence
  Synthetic oligonucleotide; TTT chr2 60553470 60553491 60553475 60553470 -
tttttttttgcttaaaaaaaag

SEQ ID NO: 210270 - DNA, 22 bp, Artificial Sequence
  Synthetic oligonucleotide; TTT chr2 60553469 60553490 60553474 60553469 -
ttttttttgcttaaaaaaaagc

SEQ ID NO: 210271 - DNA, 22 bp, Artificial Sequence
  Synthetic oligonucleotide; TTT chr2 60553468 60553489 60553473 60553468 -
tttttttgcttaaaaaaaagcc

SEQ ID NO: 210272 - DNA, 22 bp, Artificial Sequence
  Synthetic oligonucleotide; TTT chr2 60553467 60553488 60553472 60553467 -
ttttttgcttaaaaaaaagcca

SEQ ID NO: 210273 - DNA, 22 bp, Artificial Sequence
  Synthetic oligonucleotide; TTT chr2 60553466 60553487 60553471 60553466 -
tttttgcttaaaaaaaagccat

SEQ ID NO: 210274 - DNA, 22 bp, Artificial Sequence
  Synthetic oligonucleotide; TTT chr2 60553465 60553486 60553470 60553465 -
ttttgcttaaaaaaaagccatg

SEQ ID NO: 210275 - DNA, 22 bp, Artificial Sequence
  Synthetic oligonucleotide; TTT chr2 60553464 60553485 60553469 60553464 -
tttgcttaaaaaaaagccatga

SEQ ID NO: 210276 - DNA, 22 bp, Artificial Sequence
  Synthetic oligonucleotide; TTT chr2 60553463 60553484 60553468 60553463 -
ttgcttaaaaaaaagccatgac

SEQ ID NO: 210277 - DNA, 22 bp, Artificial Sequence
  Synthetic oligonucleotide; TTT chr2 60553462 60553483 60553467 60553462 -
tgcttaaaaaaaagccatgacg

SEQ ID NO: 210278 - DNA, 22 bp, Artificial Sequence
  Synthetic oligonucleotide; TTT chr2 60553461 60553482 60553466 60553461 -
gcttaaaaaaaagccatgacgg

SEQ ID NO: 210279 - DNA, 22 bp, Artificial Sequence
  Synthetic oligonucleotide; TTG chr2 60553460 60553481 60553465 60553460 -
cttaaaaaaaagccatgacggc

SEQ ID NO: 210280 - DNA, 22 bp, Artificial Sequence
  Synthetic oligonucleotide; CTT chr2 60553457 60553478 60553462 60553457 -
aaaaaaaagccatgacggctct

SEQ ID NO: 210281 - DNA, 22 bp, Artificial Sequence
  Synthetic oligonucleotide; TTA chr2 60553456 60553477 60553461 60553456 -
aaaaaaagccatgacggctctc

SEQ ID NO: 210282 - DNA, 22 bp, Artificial Sequence
  Synthetic oligonucleotide; CTC chr2 60553436 60553457 60553441 60553436 -
tcccacaattcatcttccctgc

SEQ ID NO: 210283 - DNA, 22 bp, Artificial Sequence
  Synthetic oligonucleotide; CTC chr2 60553434 60553455 60553439 60553434 -
ccacaattcatcttccctgcgc

SEQ ID NO: 210284 - DNA, 22 bp, Artificial Sequence
  Synthetic oligonucleotide; TTC chr2 60553425 60553446 60553430 60553425 -
atcttccctgcgccatctttgt

SEQ ID NO: 210285 - DNA, 22 bp, Artificial Sequence
  Synthetic oligonucleotide; CTT chr2 60553420 60553441 60553425 60553420 -
ccctgcgccatctttgtattat

SEQ ID NO: 210286 - DNA, 22 bp, Artificial Sequence
  Synthetic oligonucleotide; TTC chr2 60553419 60553440 60553424 60553419 -
cctgcgccatctttgtattatt

SEQ ID NO: 210287 - DNA, 22 bp, Artificial Sequence
  Synthetic oligonucleotide; CTG chr2 60553415 60553436 60553420 60553415 -
cgccatctttgtattatttcta

SEQ ID NO: 210288 - DNA, 22 bp, Artificial Sequence
  Synthetic oligonucleotide; CTT chr2 60553406 60553427 60553411 60553406 -
tgtattatttctaatttatttt

SEQ ID NO: 210289 - DNA, 22 bp, Artificial Sequence
  Synthetic oligonucleotide; TTT chr2 60553405 60553426 60553410 60553405 -
gtattatttctaatttattttg

SEQ ID NO: 210290 - DNA, 22 bp, Artificial Sequence
  Synthetic oligonucleotide; TTG chr2 60553404 60553425 60553409 60553404 -
tattatttctaatttattttgg

SEQ ID NO: 210291 - DNA, 22 bp, Artificial Sequence
  Synthetic oligonucleotide; TTA chr2 60553399 60553420 60553404 60553399 -
tttctaatttattttggatgtc

SEQ ID NO: 210292 - DNA, 22 bp, Artificial Sequence
  Synthetic oligonucleotide; TTT chr2 60553396 60553417 60553401 60553396 -
ctaatttattttggatgtcaaa

SEQ ID NO: 210293 - DNA, 22 bp, Artificial Sequence
  Synthetic oligonucleotide; TTC chr2 60553395 60553416 60553400 60553395 -
taatttattttggatgtcaaaa

SEQ ID NO: 210294 - DNA, 22 bp, Artificial Sequence
  Synthetic oligonucleotide; CTA chr2 60553393 60553414 60553398 60553393 -
atttattttggatgtcaaaagg

SEQ ID NO: 210295 - DNA, 22 bp, Artificial Sequence
  Synthetic oligonucleotide; TTT chr2 60553389 60553410 60553394 60553389 -
attttggatgtcaaaaggcact

SEQ ID NO: 210296 - DNA, 22 bp, Artificial Sequence
  Synthetic oligonucleotide; TTA chr2 60553388 60553409 60553393 60553388 -
ttttggatgtcaaaaggcactg

SEQ ID NO: 210297 - DNA, 22 bp, Artificial Sequence
  Synthetic oligonucleotide; TTT chr2 60553385 60553406 60553390 60553385 -
tggatgtcaaaaggcactgatg

SEQ ID NO: 210298 - DNA, 22 bp, Artificial Sequence
  Synthetic oligonucleotide; TTT chr2 60553384 60553405 60553389 60553384 -
ggatgtcaaaaggcactgatga

SEQ ID NO: 210299 - DNA, 22 bp, Artificial Sequence
  Synthetic oligonucleotide; TTG chr2 60553383 60553404 60553388 60553383 -
gatgtcaaaaggcactgatgaa

SEQ ID NO: 210300 - DNA, 22 bp, Artificial Sequence
  Synthetic oligonucleotide; CTG chr2 60553366 60553387 60553371 60553366 -
atgaagatattttctctggagt

SEQ ID NO: 210301 - DNA, 22 bp, Artificial Sequence
  Synthetic oligonucleotide; TTT chr2 60553354 60553375 60553359 60553354 -
tctctggagtctccttctttct

SEQ ID NO: 210302 - DNA, 22 bp, Artificial Sequence
  Synthetic oligonucleotide; TTT chr2 60553353 60553374 60553358 60553353 -
ctctggagtctccttctttcta

SEQ ID NO: 210303 - DNA, 22 bp, Artificial Sequence
  Synthetic oligonucleotide; TTC chr2 60553352 60553373 60553357 60553352 -
tctggagtctccttctttctaa

SEQ ID NO: 210304 - DNA, 22 bp, Artificial Sequence
  Synthetic oligonucleotide; CTC chr2 60553350 60553371 60553355 60553350 -
tggagtctccttctttctaacc

SEQ ID NO: 210305 - DNA, 22 bp, Artificial Sequence
  Synthetic oligonucleotide; CTG chr2 60553348 60553369 60553353 60553348 -
gagtctccttctttctaacccg

SEQ ID NO: 210306 - DNA, 22 bp, Artificial Sequence
  Synthetic oligonucleotide; CTC chr2 60553341 60553362 60553346 60553341 -
cttctttctaacccggctctcc

SEQ ID NO: 210307 - DNA, 22 bp, Artificial Sequence
  Synthetic oligonucleotide; CTT chr2 60553338 60553359 60553343 60553338 -
ctttctaacccggctctcccga

SEQ ID NO: 210308 - DNA, 22 bp, Artificial Sequence
  Synthetic oligonucleotide; TTC chr2 60553337 60553358 60553342 60553337 -
tttctaacccggctctcccgat

SEQ ID NO: 210309 - DNA, 22 bp, Artificial Sequence
  Synthetic oligonucleotide; CTT chr2 60553335 60553356 60553340 60553335 -
tctaacccggctctcccgatgt

SEQ ID NO: 210310 - DNA, 22 bp, Artificial Sequence
  Synthetic oligonucleotide; TTT chr2 60553334 60553355 60553339 60553334 -
ctaacccggctctcccgatgtg

SEQ ID NO: 210311 - DNA, 22 bp, Artificial Sequence
  Synthetic oligonucleotide; TTC chr2 60553333 60553354 60553338 60553333 -
taacccggctctcccgatgtga

SEQ ID NO: 210312 - DNA, 22 bp, Artificial Sequence
  Synthetic oligonucleotide; CTA chr2 60553331 60553352 60553336 60553331 -
acccggctctcccgatgtgaac

SEQ ID NO: 210313 - DNA, 22 bp, Artificial Sequence
  Synthetic oligonucleotide; CTC chr2 60553322 60553343 60553327 60553322 -
tcccgatgtgaaccgagccgtc

SEQ ID NO: 210314 - DNA, 22 bp, Artificial Sequence
  Synthetic oligonucleotide; CTC chr2 60553320 60553341 60553325 60553320 -
ccgatgtgaaccgagccgtcgt

SEQ ID NO: 210315 - DNA, 22 bp, Artificial Sequence
  Synthetic oligonucleotide; CTC chr2 60553242 60553263 60553247 60553242 -
gccgcaagcaaggcaaacccca

SEQ ID NO: 210316 - DNA, 22 bp, Artificial Sequence
  Synthetic oligonucleotide; CTT chr2 60553214 60553235 60553219 60553214 -
aagcaaacgggaattctcgcgt

SEQ ID NO: 210317 - DNA, 22 bp, Artificial Sequence
  Synthetic oligonucleotide; TTA chr2 60553213 60553234 60553218 60553213 -
agcaaacgggaattctcgcgta

SEQ ID NO: 210318 - DNA, 22 bp, Artificial Sequence
  Synthetic oligonucleotide; TTC chr2 60553198 60553219 60553203 60553198 -
tcgcgtaagtaacccaataata

SEQ ID NO: 210319 - DNA, 22 bp, Artificial Sequence
  Synthetic oligonucleotide; CTC chr2 60553196 60553217 60553201 60553196 -
gcgtaagtaacccaataatagt

SEQ ID NO: 210320 - DNA, 22 bp, Artificial Sequence
  Synthetic oligonucleotide; TTA chr2 60553163 60553184 60553168 60553163 -
ttaataatcacgagagcgcgca

SEQ ID NO: 210321 - DNA, 22 bp, Artificial Sequence
  Synthetic oligonucleotide; TTA chr2 60553160 60553181 60553165 60553160 -
ataatcacgagagcgcgcagga

SEQ ID NO: 210322 - DNA, 22 bp, Artificial Sequence
  Synthetic oligonucleotide; CTA chr2 60553135 60553156 60553140 60553135 -
gaagcaaaagcgagggggagag

SEQ ID NO: 210323 - DNA, 22 bp, Artificial Sequence
  Synthetic oligonucleotide; TTT chr2 60553093 60553114 60553098 60553093 -
ttaaatttttcacgagaaaaac

SEQ ID NO: 210324 - DNA, 22 bp, Artificial Sequence
  Synthetic oligonucleotide; TTT chr2 60553092 60553113 60553097 60553092 -
taaatttttcacgagaaaaacc

SEQ ID NO: 210325 - DNA, 22 bp, Artificial Sequence
  Synthetic oligonucleotide; TTT chr2 60553091 60553112 60553096 60553091 -
aaatttttcacgagaaaaacct

SEQ ID NO: 210326 - DNA, 22 bp, Artificial Sequence
  Synthetic oligonucleotide; TTA chr2 60553090 60553111 60553095 60553090 -
aatttttcacgagaaaaacctc

SEQ ID NO: 210327 - DNA, 22 bp, Artificial Sequence
  Synthetic oligonucleotide; TTT chr2 60553085 60553106 60553090 60553085 -
ttcacgagaaaaacctccgaga

SEQ ID NO: 210328 - DNA, 22 bp, Artificial Sequence
  Synthetic oligonucleotide; TTT chr2 60553084 60553105 60553089 60553084 -
tcacgagaaaaacctccgagag

SEQ ID NO: 210329 - DNA, 22 bp, Artificial Sequence
  Synthetic oligonucleotide; TTT chr2 60553083 60553104 60553088 60553083 -
cacgagaaaaacctccgagagt

SEQ ID NO: 210330 - DNA, 22 bp, Artificial Sequence
  Synthetic oligonucleotide; TTC chr2 60553082 60553103 60553087 60553082 -
acgagaaaaacctccgagagtc

SEQ ID NO: 210331 - DNA, 22 bp, Artificial Sequence
  Synthetic oligonucleotide; CTC chr2 60553068 60553089 60553073 60553068 -
cgagagtcgaggtaaaagagat

SEQ ID NO: 210332 - DNA, 22 bp, Artificial Sequence
  Synthetic oligonucleotide; CTC chr2 60553027 60553048 60553032 60553027 -
atcccatctggaaccattgccg

SEQ ID NO: 210333 - DNA, 22 bp, Artificial Sequence
  Synthetic oligonucleotide; CTG chr2 60553017 60553038 60553022 60553017 -
gaaccattgccgtgtatgcact

SEQ ID NO: 210334 - DNA, 22 bp, Artificial Sequence
  Synthetic oligonucleotide; TTG chr2 60553008 60553029 60553013 60553008 -
ccgtgtatgcacttttgagaca

SEQ ID NO: 210335 - DNA, 22 bp, Artificial Sequence
  Synthetic oligonucleotide; CTT chr2 60552994 60553015 60552999 60552994 -
ttgagacagcacgcacctttta

SEQ ID NO: 210336 - DNA, 22 bp, Artificial Sequence
  Synthetic oligonucleotide; TTT chr2 60552993 60553014 60552998 60552993 -
tgagacagcacgcaccttttaa

SEQ ID NO: 210337 - DNA, 22 bp, Artificial Sequence
  Synthetic oligonucleotide; TTT chr2 60552992 60553013 60552997 60552992 -
gagacagcacgcaccttttaat

SEQ ID NO: 210338 - DNA, 22 bp, Artificial Sequence
  Synthetic oligonucleotide; TTG chr2 60552991 60553012 60552996 60552991 -
agacagcacgcaccttttaatt

SEQ ID NO: 210339 - DNA, 22 bp, Artificial Sequence
  Synthetic oligonucleotide; CTT chr2 60552975 60552996 60552980 60552975 -
ttaattttatttaattttacaa

SEQ ID NO: 210340 - DNA, 22 bp, Artificial Sequence
  Synthetic oligonucleotide; TTT chr2 60552974 60552995 60552979 60552974 -
taattttatttaattttacaaa

SEQ ID NO: 210341 - DNA, 22 bp, Artificial Sequence
  Synthetic oligonucleotide; TTT chr2 60552973 60552994 60552978 60552973 -
aattttatttaattttacaaaa

SEQ ID NO: 210342 - DNA, 22 bp, Artificial Sequence
  Synthetic oligonucleotide; TTA chr2 60552972 60552993 60552977 60552972 -
attttatttaattttacaaaaa

SEQ ID NO: 210343 - DNA, 22 bp, Artificial Sequence
  Synthetic oligonucleotide; TTT chr2 60552968 60552989 60552973 60552968 -
tatttaattttacaaaaatttg

SEQ ID NO: 210344 - DNA, 22 bp, Artificial Sequence
  Synthetic oligonucleotide; TTT chr2 60552967 60552988 60552972 60552967 -
atttaattttacaaaaatttga

SEQ ID NO: 210345 - DNA, 22 bp, Artificial Sequence
  Synthetic oligonucleotide; TTA chr2 60552966 60552987 60552971 60552966 -
tttaattttacaaaaatttgac

SEQ ID NO: 210346 - DNA, 22 bp, Artificial Sequence
  Synthetic oligonucleotide; TTT chr2 60552963 60552984 60552968 60552963 -
aattttacaaaaatttgactcc

SEQ ID NO: 210347 - DNA, 22 bp, Artificial Sequence
  Synthetic oligonucleotide; TTA chr2 60552962 60552983 60552967 60552962 -
attttacaaaaatttgactcct

SEQ ID NO: 210348 - DNA, 22 bp, Artificial Sequence
  Synthetic oligonucleotide; TTT chr2 60552958 60552979 60552963 60552958 -
tacaaaaatttgactcctcctc

SEQ ID NO: 210349 - DNA, 22 bp, Artificial Sequence
  Synthetic oligonucleotide; TTT chr2 60552957 60552978 60552962 60552957 -
acaaaaatttgactcctcctct

SEQ ID NO: 210350 - DNA, 22 bp, Artificial Sequence
  Synthetic oligonucleotide; TTA chr2 60552956 60552977 60552961 60552956 -
caaaaatttgactcctcctctt

SEQ ID NO: 210351 - DNA, 22 bp, Artificial Sequence
  Synthetic oligonucleotide; TTT chr2 60552947 60552968 60552952 60552947 -
gactcctcctctttcctccttt

SEQ ID NO: 210352 - DNA, 22 bp, Artificial Sequence
  Synthetic oligonucleotide; TTG chr2 60552946 60552967 60552951 60552946 -
actcctcctctttcctcctttc

SEQ ID NO: 210353 - DNA, 22 bp, Artificial Sequence
  Synthetic oligonucleotide; CTC chr2 60552942 60552963 60552947 60552942 -
ctcctctttcctcctttccgcc

SEQ ID NO: 210354 - DNA, 22 bp, Artificial Sequence
  Synthetic oligonucleotide; CTC chr2 60552939 60552960 60552944 60552939 -
ctctttcctcctttccgccgct

SEQ ID NO: 210355 - DNA, 22 bp, Artificial Sequence
  Synthetic oligonucleotide; CTC chr2 60552936 60552957 60552941 60552936 -
tttcctcctttccgccgcttta

SEQ ID NO: 210356 - DNA, 22 bp, Artificial Sequence
  Synthetic oligonucleotide; CTT chr2 60552934 60552955 60552939 60552934 -
tcctcctttccgccgctttatt

SEQ ID NO: 210357 - DNA, 22 bp, Artificial Sequence
  Synthetic oligonucleotide; TTT chr2 60552933 60552954 60552938 60552933 -
cctcctttccgccgctttattt

SEQ ID NO: 210358 - DNA, 22 bp, Artificial Sequence
  Synthetic oligonucleotide; TTC chr2 60552932 60552953 60552937 60552932 -
ctcctttccgccgctttatttc

SEQ ID NO: 210359 - DNA, 22 bp, Artificial Sequence
  Synthetic oligonucleotide; CTC chr2 60552929 60552950 60552934 60552929 -
ctttccgccgctttatttctct

SEQ ID NO: 210360 - DNA, 22 bp, Artificial Sequence
  Synthetic oligonucleotide; CTT chr2 60552926 60552947 60552931 60552926 -
tccgccgctttatttctctttt

SEQ ID NO: 210361 - DNA, 22 bp, Artificial Sequence
  Synthetic oligonucleotide; TTT chr2 60552925 60552946 60552930 60552925 -
ccgccgctttatttctcttttc

SEQ ID NO: 210362 - DNA, 22 bp, Artificial Sequence
  Synthetic oligonucleotide; TTC chr2 60552924 60552945 60552929 60552924 -
cgccgctttatttctcttttcg

SEQ ID NO: 210363 - DNA, 22 bp, Artificial Sequence
  Synthetic oligonucleotide; CTT chr2 60552916 60552937 60552921 60552916 -
tatttctcttttcgaaaaggaa

SEQ ID NO: 210364 - DNA, 22 bp, Artificial Sequence
  Synthetic oligonucleotide; TTT chr2 60552915 60552936 60552920 60552915 -
atttctcttttcgaaaaggaat

SEQ ID NO: 210365 - DNA, 22 bp, Artificial Sequence
  Synthetic oligonucleotide; TTA chr2 60552914 60552935 60552919 60552914 -
tttctcttttcgaaaaggaatg

SEQ ID NO: 210366 - DNA, 22 bp, Artificial Sequence
  Synthetic oligonucleotide; TTT chr2 60552911 60552932 60552916 60552911 -
ctcttttcgaaaaggaatgcaa

SEQ ID NO: 210367 - DNA, 22 bp, Artificial Sequence
  Synthetic oligonucleotide; TTC chr2 60552910 60552931 60552915 60552910 -
tcttttcgaaaaggaatgcaat

SEQ ID NO: 210368 - DNA, 22 bp, Artificial Sequence
  Synthetic oligonucleotide; CTC chr2 60552908 60552929 60552913 60552908 -
ttttcgaaaaggaatgcaatga

SEQ ID NO: 210369 - DNA, 22 bp, Artificial Sequence
  Synthetic oligonucleotide; CTT chr2 60552906 60552927 60552911 60552906 -
ttcgaaaaggaatgcaatgatt

SEQ ID NO: 210370 - DNA, 22 bp, Artificial Sequence
  Synthetic oligonucleotide; TTT chr2 60552905 60552926 60552910 60552905 -
tcgaaaaggaatgcaatgattc

SEQ ID NO: 210371 - DNA, 22 bp, Artificial Sequence
  Synthetic oligonucleotide; TTT chr2 60552904 60552925 60552909 60552904 -
cgaaaaggaatgcaatgattcc

SEQ ID NO: 210372 - DNA, 22 bp, Artificial Sequence
  Synthetic oligonucleotide; TTC chr2 60552903 60552924 60552908 60552903 -
gaaaaggaatgcaatgattcca

SEQ ID NO: 210373 - DNA, 22 bp, Artificial Sequence
  Synthetic oligonucleotide; TTC chr2 60552883 60552904 60552888 60552883 -
cactccccccccgccccgccag

SEQ ID NO: 210374 - DNA, 22 bp, Artificial Sequence
  Synthetic oligonucleotide; CTC chr2 60552878 60552899 60552883 60552878 -
cccccccgccccgccagttttg

SEQ ID NO: 210375 - DNA, 22 bp, Artificial Sequence
  Synthetic oligonucleotide; TTT chr2 60552858 60552879 60552863 60552858 -
tgcaaaataatgaacaatgcta

SEQ ID NO: 210376 - DNA, 22 bp, Artificial Sequence
  Synthetic oligonucleotide; TTT chr2 60552857 60552878 60552862 60552857 -
gcaaaataatgaacaatgctaa

SEQ ID NO: 210377 - DNA, 22 bp, Artificial Sequence
  Synthetic oligonucleotide; TTG chr2 60552856 60552877 60552861 60552856 -
caaaataatgaacaatgctaag

SEQ ID NO: 210378 - DNA, 22 bp, Artificial Sequence
  Synthetic oligonucleotide; CTA chr2 60552836 60552857 60552841 60552836 -
aggttgcgaacaactcacatgc

SEQ ID NO: 210379 - DNA, 22 bp, Artificial Sequence
  Synthetic oligonucleotide; TTG chr2 60552830 60552851 60552835 60552830 -
cgaacaactcacatgcaaacct

SEQ ID NO: 210380 - DNA, 22 bp, Artificial Sequence
  Synthetic oligonucleotide; CTC chr2 60552820 60552841 60552825 60552820 -
acatgcaaacctgggggtggga

SEQ ID NO: 210381 - DNA, 22 bp, Artificial Sequence
  Synthetic oligonucleotide; CTG chr2 60552807 60552828 60552812 60552807 -
ggggtgggagctggtggggaaa

SEQ ID NO: 210382 - DNA, 22 bp, Artificial Sequence
  Synthetic oligonucleotide; CTG chr2 60552794 60552815 60552799 60552794 -
gtggggaaagggaggttgcttc

SEQ ID NO: 210383 - DNA, 22 bp, Artificial Sequence
  Synthetic oligonucleotide; TTG chr2 60552776 60552797 60552781 60552776 -
cttcccactcaccgtaagaaaa

SEQ ID NO: 210384 - DNA, 22 bp, Artificial Sequence
  Synthetic oligonucleotide; CTT chr2 60552773 60552794 60552778 60552773 -
cccactcaccgtaagaaaatgg

SEQ ID NO: 210385 - DNA, 22 bp, Artificial Sequence
  Synthetic oligonucleotide; TTC chr2 60552772 60552793 60552777 60552772 -
ccactcaccgtaagaaaatggg

SEQ ID NO: 210386 - DNA, 22 bp, Artificial Sequence
  Synthetic oligonucleotide; CTC chr2 60552766 60552787 60552771 60552766 -
accgtaagaaaatgggggggta

SEQ ID NO: 210387 - DNA, 22 bp, Artificial Sequence
  Synthetic oligonucleotide; CTA chr2 60552721 60552742 60552726 60552721 -
aaaaacgattcccggggagaaa

SEQ ID NO: 210388 - DNA, 22 bp, Artificial Sequence
  Synthetic oligonucleotide; TTC chr2 60552710 60552731 60552715 60552710 -
ccggggagaaaagaggtgagac

SEQ ID NO: 210389 - DNA, 22 bp, Artificial Sequence
  Synthetic oligonucleotide; CTG chr2 60552686 60552707 60552691 60552686 -
gcttttggacaccagcgcgctc

SEQ ID NO: 210390 - DNA, 22 bp, Artificial Sequence
  Synthetic oligonucleotide; CTT chr2 60552682 60552703 60552687 60552682 -
ttggacaccagcgcgctcacgg

SEQ ID NO: 210391 - DNA, 22 bp, Artificial Sequence
  Synthetic oligonucleotide; TTT chr2 60552681 60552702 60552686 60552681 -
tggacaccagcgcgctcacggt

SEQ ID NO: 210392 - DNA, 22 bp, Artificial Sequence
  Synthetic oligonucleotide; TTT chr2 60552680 60552701 60552685 60552680 -
ggacaccagcgcgctcacggtc

SEQ ID NO: 210393 - DNA, 22 bp, Artificial Sequence
  Synthetic oligonucleotide; TTG chr2 60552679 60552700 60552684 60552679 -
gacaccagcgcgctcacggtca

SEQ ID NO: 210394 - DNA, 22 bp, Artificial Sequence
  Synthetic oligonucleotide; CTC chr2 60552664 60552685 60552669 60552664 -
acggtcaagtgtgcagcgggag

SEQ ID NO: 210395 - DNA, 22 bp, Artificial Sequence
  Synthetic oligonucleotide; CTG chr2 60552603 60552624 60552608 60552603 -
tggaaaggggcccccggcgctc

SEQ ID NO: 210396 - DNA, 22 bp, Artificial Sequence
  Synthetic oligonucleotide; CTC chr2 60552581 60552602 60552586 60552581 -
ctgagtccgcggagtcgggaga

SEQ ID NO: 210397 - DNA, 22 bp, Artificial Sequence
  Synthetic oligonucleotide; CTG chr2 60552578 60552599 60552583 60552578 -
agtccgcggagtcgggagaggg

SEQ ID NO: 210398 - DNA, 22 bp, Artificial Sequence
  Synthetic oligonucleotide; CTG chr2 60552498 60552519 60552503 60552498 -
ccgccttttgttccggccagag

SEQ ID NO: 210399 - DNA, 22 bp, Artificial Sequence
  Synthetic oligonucleotide; CTT chr2 60552491 60552512 60552496 60552491 -
ttgttccggccagaggtgggtg

SEQ ID NO: 210400 - DNA, 22 bp, Artificial Sequence
  Synthetic oligonucleotide; TTT chr2 60552490 60552511 60552495 60552490 -
tgttccggccagaggtgggtgt

SEQ ID NO: 210401 - DNA, 22 bp, Artificial Sequence
  Synthetic oligonucleotide; TTT chr2 60552489 60552510 60552494 60552489 -
gttccggccagaggtgggtgtt

SEQ ID NO: 210402 - DNA, 22 bp, Artificial Sequence
  Synthetic oligonucleotide; TTG chr2 60552488 60552509 60552493 60552488 -
ttccggccagaggtgggtgttt

SEQ ID NO: 210403 - DNA, 22 bp, Artificial Sequence
  Synthetic oligonucleotide; TTC chr2 60552485 60552506 60552490 60552485 -
cggccagaggtgggtgtttgtc

SEQ ID NO: 210404 - DNA, 22 bp, Artificial Sequence
  Synthetic oligonucleotide; TTT chr2 60552466 60552487 60552471 60552466 -
gtcccgctgccttttgtgccgg

SEQ ID NO: 210405 - DNA, 22 bp, Artificial Sequence
  Synthetic oligonucleotide; TTG chr2 60552465 60552486 60552470 60552465 -
tcccgctgccttttgtgccggc

SEQ ID NO: 210406 - DNA, 22 bp, Artificial Sequence
  Synthetic oligonucleotide; CTG chr2 60552457 60552478 60552462 60552457 -
ccttttgtgccggctcctcgcg

SEQ ID NO: 210407 - DNA, 22 bp, Artificial Sequence
  Synthetic oligonucleotide; CTT chr2 60552453 60552474 60552458 60552453 -
ttgtgccggctcctcgcgcttg

SEQ ID NO: 210408 - DNA, 22 bp, Artificial Sequence
  Synthetic oligonucleotide; TTT chr2 60552452 60552473 60552457 60552452 -
tgtgccggctcctcgcgcttgc

SEQ ID NO: 210409 - DNA, 22 bp, Artificial Sequence
  Synthetic oligonucleotide; TTT chr2 60552451 60552472 60552456 60552451 -
gtgccggctcctcgcgcttgcc

SEQ ID NO: 210410 - DNA, 22 bp, Artificial Sequence
  Synthetic oligonucleotide; TTG chr2 60552450 60552471 60552455 60552450 -
tgccggctcctcgcgcttgccc

SEQ ID NO: 210411 - DNA, 22 bp, Artificial Sequence
  Synthetic oligonucleotide; CTC chr2 60552441 60552462 60552446 60552441 -
ctcgcgcttgccctcccgcgcc

SEQ ID NO: 210412 - DNA, 22 bp, Artificial Sequence
  Synthetic oligonucleotide; CTC chr2 60552438 60552459 60552443 60552438 -
gcgcttgccctcccgcgccgcc

SEQ ID NO: 210413 - DNA, 22 bp, Artificial Sequence
  Synthetic oligonucleotide; CTT chr2 60552432 60552453 60552437 60552432 -
gccctcccgcgccgccgccgcc

SEQ ID NO: 210414 - DNA, 22 bp, Artificial Sequence
  Synthetic oligonucleotide; TTG chr2 60552431 60552452 60552436 60552431 -
ccctcccgcgccgccgccgccg

SEQ ID NO: 210415 - DNA, 22 bp, Artificial Sequence
  Synthetic oligonucleotide; CTC chr2 60552426 60552447 60552431 60552426 -
ccgcgccgccgccgccgccgcc

SEQ ID NO: 210416 - DNA, 22 bp, Artificial Sequence
  Synthetic oligonucleotide; CTA chr2 60552386 60552407 60552391 60552386 -
gggccgggggaggaggcggccg

SEQ ID NO: 210417 - DNA, 22 bp, Artificial Sequence
  Synthetic oligonucleotide; CTG chr2 60552327 60552348 60552332 60552327 -
ctgcctcctgggttgccgctgc

SEQ ID NO: 210418 - DNA, 22 bp, Artificial Sequence
  Synthetic oligonucleotide; CTG chr2 60552324 60552345 60552329 60552324 -
cctcctgggttgccgctgccct

SEQ ID NO: 210419 - DNA, 22 bp, Artificial Sequence
  Synthetic oligonucleotide; CTC chr2 60552320 60552341 60552325 60552320 -
ctgggttgccgctgccctcccc

SEQ ID NO: 210420 - DNA, 22 bp, Artificial Sequence
  Synthetic oligonucleotide; CTG chr2 60552317 60552338 60552322 60552317 -
ggttgccgctgccctcccctcc

SEQ ID NO: 210421 - DNA, 22 bp, Artificial Sequence
  Synthetic oligonucleotide; TTG chr2 60552312 60552333 60552317 60552312 -
ccgctgccctcccctcccgacc

SEQ ID NO: 210422 - DNA, 22 bp, Artificial Sequence
  Synthetic oligonucleotide; CTG chr2 60552306 60552327 60552311 60552306 -
ccctcccctcccgaccgaacct

SEQ ID NO: 210423 - DNA, 22 bp, Artificial Sequence
  Synthetic oligonucleotide; CTC chr2 60552301 60552322 60552306 60552301 -
ccctcccgaccgaacctcagag

SEQ ID NO: 210424 - DNA, 22 bp, Artificial Sequence
  Synthetic oligonucleotide; CTC chr2 60552296 60552317 60552301 60552296 -
ccgaccgaacctcagaggcagc

SEQ ID NO: 210425 - DNA, 22 bp, Artificial Sequence
  Synthetic oligonucleotide; CTC chr2 60552283 60552304 60552288 60552283 -
agaggcagcaaggagaagactg

SEQ ID NO: 210426 - DNA, 22 bp, Artificial Sequence
  Synthetic oligonucleotide; CTG chr2 60552261 60552282 60552266 60552261 -
gcacataaataaataaatacat

SEQ ID NO: 210427 - DNA, 22 bp, Artificial Sequence
  Synthetic oligonucleotide; TTT chr2 60552197 60552218 60552202 60552197 -
cttgcccccaaaccgaagccaa

SEQ ID NO: 210428 - DNA, 22 bp, Artificial Sequence
  Synthetic oligonucleotide; TTC chr2 60552196 60552217 60552201 60552196 -
ttgcccccaaaccgaagccaaa

SEQ ID NO: 210429 - DNA, 22 bp, Artificial Sequence
  Synthetic oligonucleotide; CTT chr2 60552194 60552215 60552199 60552194 -
gcccccaaaccgaagccaaacg

SEQ ID NO: 210430 - DNA, 22 bp, Artificial Sequence
  Synthetic oligonucleotide; TTG chr2 60552193 60552214 60552198 60552193 -
cccccaaaccgaagccaaacgc

SEQ ID NO: 210431 - DNA, 22 bp, Artificial Sequence
  Synthetic oligonucleotide; CTC chr2 60552169 60552190 60552174 60552169 -
tgccaacccttttctgtgacgg

SEQ ID NO: 210432 - DNA, 22 bp, Artificial Sequence
  Synthetic oligonucleotide; CTG chr2 60552167 60552188 60552172 60552167 -
ccaacccttttctgtgacggcc

SEQ ID NO: 210433 - DNA, 22 bp, Artificial Sequence
  Synthetic oligonucleotide; CTT chr2 60552158 60552179 60552163 60552158 -
ttctgtgacggccttctctttg

SEQ ID NO: 210434 - DNA, 22 bp, Artificial Sequence
  Synthetic oligonucleotide; TTT chr2 60552157 60552178 60552162 60552157 -
tctgtgacggccttctctttga

SEQ ID NO: 210435 - DNA, 22 bp, Artificial Sequence
  Synthetic oligonucleotide; TTT chr2 60552156 60552177 60552161 60552156 -
ctgtgacggccttctctttgac

SEQ ID NO: 210436 - DNA, 22 bp, Artificial Sequence
  Synthetic oligonucleotide; TTC chr2 60552155 60552176 60552160 60552155 -
tgtgacggccttctctttgact

SEQ ID NO: 210437 - DNA, 22 bp, Artificial Sequence
  Synthetic oligonucleotide; CTG chr2 60552153 60552174 60552158 60552153 -
tgacggccttctctttgactcc

SEQ ID NO: 210438 - DNA, 22 bp, Artificial Sequence
  Synthetic oligonucleotide; CTT chr2 60552143 60552164 60552148 60552143 -
ctctttgactcccccaccagcc

SEQ ID NO: 210439 - DNA, 22 bp, Artificial Sequence
  Synthetic oligonucleotide; TTC chr2 60552142 60552163 60552147 60552142 -
tctttgactcccccaccagccc

SEQ ID NO: 210440 - DNA, 22 bp, Artificial Sequence
  Synthetic oligonucleotide; CTC chr2 60552140 60552161 60552145 60552140 -
tttgactcccccaccagccccc

SEQ ID NO: 210441 - DNA, 22 bp, Artificial Sequence
  Synthetic oligonucleotide; CTT chr2 60552138 60552159 60552143 60552138 -
tgactcccccaccagcccccct

SEQ ID NO: 210442 - DNA, 22 bp, Artificial Sequence
  Synthetic oligonucleotide; TTT chr2 60552137 60552158 60552142 60552137 -
gactcccccaccagcccccctg

SEQ ID NO: 210443 - DNA, 22 bp, Artificial Sequence
  Synthetic oligonucleotide; TTG chr2 60552136 60552157 60552141 60552136 -
actcccccaccagcccccctgc

SEQ ID NO: 210444 - DNA, 22 bp, Artificial Sequence
  Synthetic oligonucleotide; CTC chr2 60552132 60552153 60552137 60552132 -
ccccaccagcccccctgcaaaa

SEQ ID NO: 210445 - DNA, 22 bp, Artificial Sequence
  Synthetic oligonucleotide; CTG chr2 60552115 60552136 60552120 60552115 -
caaaaatctcacaatctctcat

SEQ ID NO: 210446 - DNA, 22 bp, Artificial Sequence
  Synthetic oligonucleotide; CTC chr2 60552105 60552126 60552110 60552105 -
acaatctctcatctagaaaaaa

SEQ ID NO: 210447 - DNA, 22 bp, Artificial Sequence
  Synthetic oligonucleotide; CTC chr2 60552097 60552118 60552102 60552097 -
tcatctagaaaaaaatttacaa

SEQ ID NO: 210448 - DNA, 22 bp, Artificial Sequence
  Synthetic oligonucleotide; CTC chr2 60552095 60552116 60552100 60552095 -
atctagaaaaaaatttacaatc

SEQ ID NO: 210449 - DNA, 22 bp, Artificial Sequence
  Synthetic oligonucleotide; CTA chr2 60552090 60552111 60552095 60552090 -
gaaaaaaatttacaatcaccct

SEQ ID NO: 210450 - DNA, 22 bp, Artificial Sequence
  Synthetic oligonucleotide; TTT chr2 60552079 60552100 60552084 60552079 -
acaatcaccctcttcccccaaa

SEQ ID NO: 210451 - DNA, 22 bp, Artificial Sequence
  Synthetic oligonucleotide; TTA chr2 60552078 60552099 60552083 60552078 -
caatcaccctcttcccccaaac

SEQ ID NO: 210452 - DNA, 22 bp, Artificial Sequence
  Synthetic oligonucleotide; CTC chr2 60552067 60552088 60552072 60552067 -
ttcccccaaaccccttcagttg

SEQ ID NO: 210453 - DNA, 22 bp, Artificial Sequence
  Synthetic oligonucleotide; CTT chr2 60552065 60552086 60552070 60552065 -
cccccaaaccccttcagttgca

SEQ ID NO: 210454 - DNA, 22 bp, Artificial Sequence
  Synthetic oligonucleotide; TTC chr2 60552064 60552085 60552069 60552064 -
ccccaaaccccttcagttgcaa

SEQ ID NO: 210455 - DNA, 22 bp, Artificial Sequence
  Synthetic oligonucleotide; CTT chr2 60552051 60552072 60552056 60552051 -
cagttgcaaacttagggcgccg

SEQ ID NO: 210456 - DNA, 22 bp, Artificial Sequence
  Synthetic oligonucleotide; TTC chr2 60552050 60552071 60552055 60552050 -
agttgcaaacttagggcgccga

SEQ ID NO: 210457 - DNA, 22 bp, Artificial Sequence
  Synthetic oligonucleotide; TTG chr2 60552045 60552066 60552050 60552045 -
caaacttagggcgccgacggca

SEQ ID NO: 210458 - DNA, 22 bp, Artificial Sequence
  Synthetic oligonucleotide; CTT chr2 60552038 60552059 60552043 60552038 -
agggcgccgacggcacggagag

SEQ ID NO: 210459 - DNA, 22 bp, Artificial Sequence
  Synthetic oligonucleotide; TTA chr2 60552037 60552058 60552042 60552037 -
gggcgccgacggcacggagagg

SEQ ID NO: 210460 - DNA, 22 bp, Artificial Sequence
  Synthetic oligonucleotide; CTC chr2 60552002 60552023 60552007 60552002 -
cctcctcttactattttttgga

SEQ ID NO: 210461 - DNA, 22 bp, Artificial Sequence
  Synthetic oligonucleotide; CTC chr2 60551998 60552019 60552003 60551998 -
ctcttactattttttggaagat

SEQ ID NO: 210462 - DNA, 22 bp, Artificial Sequence
  Synthetic oligonucleotide; CTC chr2 60551995 60552016 60552000 60551995 -
ttactattttttggaagatttt

SEQ ID NO: 210463 - DNA, 22 bp, Artificial Sequence
  Synthetic oligonucleotide; CTT chr2 60551993 60552014 60551998 60551993 -
actattttttggaagattttca

SEQ ID NO: 210464 - DNA, 22 bp, Artificial Sequence
  Synthetic oligonucleotide; TTA chr2 60551992 60552013 60551997 60551992 -
ctattttttggaagattttcaa

SEQ ID NO: 210465 - DNA, 22 bp, Artificial Sequence
  Synthetic oligonucleotide; CTA chr2 60551989 60552010 60551994 60551989 -
ttttttggaagattttcaaaaa

SEQ ID NO: 210466 - DNA, 22 bp, Artificial Sequence
  Synthetic oligonucleotide; TTT chr2 60551986 60552007 60551991 60551986 -
tttggaagattttcaaaaaaag

SEQ ID NO: 210467 - DNA, 22 bp, Artificial Sequence
  Synthetic oligonucleotide; TTT chr2 60551985 60552006 60551990 60551985 -
ttggaagattttcaaaaaaagt

SEQ ID NO: 210468 - DNA, 22 bp, Artificial Sequence
  Synthetic oligonucleotide; TTT chr2 60551984 60552005 60551989 60551984 -
tggaagattttcaaaaaaagtg

SEQ ID NO: 210469 - DNA, 22 bp, Artificial Sequence
  Synthetic oligonucleotide; TTT chr2 60551983 60552004 60551988 60551983 -
ggaagattttcaaaaaaagtgg

SEQ ID NO: 210470 - DNA, 22 bp, Artificial Sequence
  Synthetic oligonucleotide; TTG chr2 60551982 60552003 60551987 60551982 -
gaagattttcaaaaaaagtgga

SEQ ID NO: 210471 - DNA, 22 bp, Artificial Sequence
  Synthetic oligonucleotide; TTT chr2 60551974 60551995 60551979 60551974 -
tcaaaaaaagtggaagtggatt

SEQ ID NO: 210472 - DNA, 22 bp, Artificial Sequence
  Synthetic oligonucleotide; TTT chr2 60551973 60551994 60551978 60551973 -
caaaaaaagtggaagtggattt

SEQ ID NO: 210473 - DNA, 22 bp, Artificial Sequence
  Synthetic oligonucleotide; TTC chr2 60551972 60551993 60551977 60551972 -
aaaaaaagtggaagtggatttt

SEQ ID NO: 210474 - DNA, 22 bp, Artificial Sequence
  Synthetic oligonucleotide; TTT chr2 60551951 60551972 60551956 60551951 -
tgattgggaaaaatctcgtgtc

SEQ ID NO: 210475 - DNA, 22 bp, Artificial Sequence
  Synthetic oligonucleotide; TTT chr2 60551950 60551971 60551955 60551950 -
gattgggaaaaatctcgtgtct

SEQ ID NO: 210476 - DNA, 22 bp, Artificial Sequence
  Synthetic oligonucleotide; TTG chr2 60551949 60551970 60551954 60551949 -
attgggaaaaatctcgtgtctg

SEQ ID NO: 210477 - DNA, 22 bp, Artificial Sequence
  Synthetic oligonucleotide; TTG chr2 60551945 60551966 60551950 60551945 -
ggaaaaatctcgtgtctgaatg

SEQ ID NO: 210478 - DNA, 22 bp, Artificial Sequence
  Synthetic oligonucleotide; CTC chr2 60551934 60551955 60551939 60551934 -
gtgtctgaatgtttacaagcac

SEQ ID NO: 210479 - DNA, 22 bp, Artificial Sequence
  Synthetic oligonucleotide; CTG chr2 60551927 60551948 60551932 60551927 -
aatgtttacaagcaccgcgtgt

SEQ ID NO: 210480 - DNA, 22 bp, Artificial Sequence
  Synthetic oligonucleotide; TTT chr2 60551920 60551941 60551925 60551920 -
acaagcaccgcgtgtgcgggag

SEQ ID NO: 210481 - DNA, 22 bp, Artificial Sequence
  Synthetic oligonucleotide; TTA chr2 60551919 60551940 60551924 60551919 -
caagcaccgcgtgtgcgggagc

SEQ ID NO: 210482 - DNA, 22 bp, Artificial Sequence
  Synthetic oligonucleotide; CTC chr2 60551894 60551915 60551899 60551894 -
ctgccaacaaacagacagagga

SEQ ID NO: 210483 - DNA, 22 bp, Artificial Sequence
  Synthetic oligonucleotide; CTG chr2 60551891 60551912 60551896 60551891 -
ccaacaaacagacagaggaccg

SEQ ID NO: 210484 - DNA, 22 bp, Artificial Sequence
  Synthetic oligonucleotide; CTG chr2 60551826 60551847 60551831 60551826 -
gcctcgcccgggccttgcccga

SEQ ID NO: 210485 - DNA, 22 bp, Artificial Sequence
  Synthetic oligonucleotide; CTC chr2 60551821 60551842 60551826 60551821 -
gcccgggccttgcccgacctcg

SEQ ID NO: 210486 - DNA, 22 bp, Artificial Sequence
  Synthetic oligonucleotide; CTT chr2 60551810 60551831 60551815 60551810 -
gcccgacctcgccgcgccccag

SEQ ID NO: 210487 - DNA, 22 bp, Artificial Sequence
  Synthetic oligonucleotide; TTG chr2 60551809 60551830 60551814 60551809 -
cccgacctcgccgcgccccagc

SEQ ID NO: 210488 - DNA, 22 bp, Artificial Sequence
  Synthetic oligonucleotide; CTC chr2 60551800 60551821 60551805 60551800 -
gccgcgccccagcccagccccg

SEQ ID NO: 210489 - DNA, 22 bp, Artificial Sequence
  Synthetic oligonucleotide; CTC chr2 60551716 60551737 60551721 60551716 -
cgcgccagcctggcccgtggtc

SEQ ID NO: 210490 - DNA, 22 bp, Artificial Sequence
  Synthetic oligonucleotide; CTG chr2 60551704 60551725 60551709 60551704 -
gcccgtggtcctggtccgcccc

SEQ ID NO: 210491 - DNA, 22 bp, Artificial Sequence
  Synthetic oligonucleotide; CTG chr2 60551691 60551712 60551696 60551691 -
gtccgcccccagcacaatgccg

SEQ ID NO: 210492 - DNA, 22 bp, Artificial Sequence
  Synthetic oligonucleotide; CTC chr2 60551662 60551683 60551667 60551662 -
ttctcgacctcccagactgcga

SEQ ID NO: 210493 - DNA, 22 bp, Artificial Sequence
  Synthetic oligonucleotide; CTT chr2 60551660 60551681 60551665 60551660 -
ctcgacctcccagactgcgaaa

SEQ ID NO: 210494 - DNA, 22 bp, Artificial Sequence
  Synthetic oligonucleotide; TTC chr2 60551659 60551680 60551664 60551659 -
tcgacctcccagactgcgaaat

SEQ ID NO: 210495 - DNA, 22 bp, Artificial Sequence
  Synthetic oligonucleotide; CTC chr2 60551657 60551678 60551662 60551657 -
gacctcccagactgcgaaatcg

SEQ ID NO: 210496 - DNA, 22 bp, Artificial Sequence
  Synthetic oligonucleotide; CTC chr2 60551651 60551672 60551656 60551651 -
ccagactgcgaaatcggctggg

SEQ ID NO: 210497 - DNA, 22 bp, Artificial Sequence
  Synthetic oligonucleotide; CTG chr2 60551643 60551664 60551648 60551643 -
cgaaatcggctgggtgaaactc

SEQ ID NO: 210498 - DNA, 22 bp, Artificial Sequence
  Synthetic oligonucleotide; CTG chr2 60551631 60551652 60551636 60551631 -
ggtgaaactcggctttgcaaag

SEQ ID NO: 210499 - DNA, 22 bp, Artificial Sequence
  Synthetic oligonucleotide; CTC chr2 60551621 60551642 60551626 60551621 -
ggctttgcaaagcatttttatt

SEQ ID NO: 210500 - DNA, 22 bp, Artificial Sequence
  Synthetic oligonucleotide; CTT chr2 60551616 60551637 60551621 60551616 -
tgcaaagcatttttattttgca

SEQ ID NO: 210501 - DNA, 22 bp, Artificial Sequence
  Synthetic oligonucleotide; TTT chr2 60551615 60551636 60551620 60551615 -
gcaaagcatttttattttgcag

SEQ ID NO: 210502 - DNA, 22 bp, Artificial Sequence
  Synthetic oligonucleotide; TTG chr2 60551614 60551635 60551619 60551614 -
caaagcatttttattttgcagg

SEQ ID NO: 210503 - DNA, 22 bp, Artificial Sequence
  Synthetic oligonucleotide; TTT chr2 60551604 60551625 60551609 60551604 -
ttattttgcagggcaactgtaa

SEQ ID NO: 210504 - DNA, 22 bp, Artificial Sequence
  Synthetic oligonucleotide; TTT chr2 60551603 60551624 60551608 60551603 -
tattttgcagggcaactgtaaa

SEQ ID NO: 210505 - DNA, 22 bp, Artificial Sequence
  Synthetic oligonucleotide; TTT chr2 60551602 60551623 60551607 60551602 -
attttgcagggcaactgtaaaa

SEQ ID NO: 210506 - DNA, 22 bp, Artificial Sequence
  Synthetic oligonucleotide; TTA chr2 60551601 60551622 60551606 60551601 -
ttttgcagggcaactgtaaaag

SEQ ID NO: 210507 - DNA, 22 bp, Artificial Sequence
  Synthetic oligonucleotide; TTT chr2 60551598 60551619 60551603 60551598 -
tgcagggcaactgtaaaagcgc

SEQ ID NO: 210508 - DNA, 22 bp, Artificial Sequence
  Synthetic oligonucleotide; TTT chr2 60551597 60551618 60551602 60551597 -
gcagggcaactgtaaaagcgcg

SEQ ID NO: 210509 - DNA, 22 bp, Artificial Sequence
  Synthetic oligonucleotide; TTG chr2 60551596 60551617 60551601 60551596 -
cagggcaactgtaaaagcgcgt

SEQ ID NO: 210510 - DNA, 22 bp, Artificial Sequence
  Synthetic oligonucleotide; CTG chr2 60551585 60551606 60551590 60551585 -
taaaagcgcgttctgcgcctcc

SEQ ID NO: 210511 - DNA, 22 bp, Artificial Sequence
  Synthetic oligonucleotide; TTC chr2 60551572 60551593 60551577 60551572 -
tgcgcctcccctcccctccgcc

SEQ ID NO: 210512 - DNA, 22 bp, Artificial Sequence
  Synthetic oligonucleotide; CTG chr2 60551570 60551591 60551575 60551570 -
cgcctcccctcccctccgccct

SEQ ID NO: 210513 - DNA, 22 bp, Artificial Sequence
  Synthetic oligonucleotide; CTC chr2 60551564 60551585 60551569 60551564 -
ccctcccctccgccctgggtac

SEQ ID NO: 210514 - DNA, 22 bp, Artificial Sequence
  Synthetic oligonucleotide; CTC chr2 60551559 60551580 60551564 60551559 -
ccctccgccctgggtactttct

SEQ ID NO: 210515 - DNA, 22 bp, Artificial Sequence
  Synthetic oligonucleotide; CTC chr2 60551554 60551575 60551559 60551554 -
cgccctgggtactttctcagac

SEQ ID NO: 210516 - DNA, 22 bp, Artificial Sequence
  Synthetic oligonucleotide; CTG chr2 60551547 60551568 60551552 60551547 -
ggtactttctcagacgtctctt

SEQ ID NO: 210517 - DNA, 22 bp, Artificial Sequence
  Synthetic oligonucleotide; CTT chr2 60551540 60551561 60551545 60551540 -
tctcagacgtctcttgtccaca

SEQ ID NO: 210518 - DNA, 22 bp, Artificial Sequence
  Synthetic oligonucleotide; TTT chr2 60551539 60551560 60551544 60551539 -
ctcagacgtctcttgtccacag

SEQ ID NO: 210519 - DNA, 22 bp, Artificial Sequence
  Synthetic oligonucleotide; TTC chr2 60551538 60551559 60551543 60551538 -
tcagacgtctcttgtccacagc

SEQ ID NO: 210520 - DNA, 22 bp, Artificial Sequence
  Synthetic oligonucleotide; CTC chr2 60551536 60551557 60551541 60551536 -
agacgtctcttgtccacagctc

SEQ ID NO: 210521 - DNA, 22 bp, Artificial Sequence
  Synthetic oligonucleotide; CTC chr2 60551527 60551548 60551532 60551527 -
ttgtccacagctcgggaccgcg

SEQ ID NO: 210522 - DNA, 22 bp, Artificial Sequence
  Synthetic oligonucleotide; CTT chr2 60551525 60551546 60551530 60551525 -
gtccacagctcgggaccgcgag

SEQ ID NO: 210523 - DNA, 22 bp, Artificial Sequence
  Synthetic oligonucleotide; TTG chr2 60551524 60551545 60551529 60551524 -
tccacagctcgggaccgcgagg

SEQ ID NO: 210524 - DNA, 22 bp, Artificial Sequence
  Synthetic oligonucleotide; CTC chr2 60551514 60551535 60551519 60551514 -
gggaccgcgaggaggtcaccac

SEQ ID NO: 210525 - DNA, 22 bp, Artificial Sequence
  Synthetic oligonucleotide; CTT chr2 60551486 60551507 60551491 60551486 -
tccctgcccaccccccaccccg

SEQ ID NO: 210526 - DNA, 22 bp, Artificial Sequence
  Synthetic oligonucleotide; TTT chr2 60551485 60551506 60551490 60551485 -
ccctgcccaccccccaccccgc

SEQ ID NO: 210527 - DNA, 22 bp, Artificial Sequence
  Synthetic oligonucleotide; TTC chr2 60551484 60551505 60551489 60551484 -
cctgcccaccccccaccccgcc

SEQ ID NO: 210528 - DNA, 22 bp, Artificial Sequence
  Synthetic oligonucleotide; CTG chr2 60551480 60551501 60551485 60551480 -
cccaccccccaccccgcccggt

SEQ ID NO: 210529 - DNA, 22 bp, Artificial Sequence
  Synthetic oligonucleotide; CTG chr2 60551455 60551476 60551460 60551455 -
gtcaccagtccccctgcgcccc

SEQ ID NO: 210530 - DNA, 22 bp, Artificial Sequence
  Synthetic oligonucleotide; CTG chr2 60551439 60551460 60551444 60551439 -
cgccccgagcacgactaggcca

SEQ ID NO: 210531 - DNA, 22 bp, Artificial Sequence
  Synthetic oligonucleotide; CTA chr2 60551422 60551443 60551427 60551422 -
ggccaggtggcggggttgccgg

SEQ ID NO: 210532 - DNA, 22 bp, Artificial Sequence
  Synthetic oligonucleotide; TTG chr2 60551404 60551425 60551409 60551404 -
ccggggaagggcaggggagaag

SEQ ID NO: 210533 - DNA, 22 bp, Artificial Sequence
  Synthetic oligonucleotide; TTT chr2 60551375 60551396 60551380 60551375 -
gagtgtgcattttaagggcgct

SEQ ID NO: 210534 - DNA, 22 bp, Artificial Sequence
  Synthetic oligonucleotide; TTG chr2 60551374 60551395 60551379 60551374 -
agtgtgcattttaagggcgctg

SEQ ID NO: 210535 - DNA, 22 bp, Artificial Sequence
  Synthetic oligonucleotide; TTT chr2 60551363 60551384 60551368 60551363 -
taagggcgctggatcctgggac

SEQ ID NO: 210536 - DNA, 22 bp, Artificial Sequence
  Synthetic oligonucleotide; TTT chr2 60551362 60551383 60551367 60551362 -
aagggcgctggatcctgggacc

SEQ ID NO: 210537 - DNA, 22 bp, Artificial Sequence
  Synthetic oligonucleotide; TTA chr2 60551361 60551382 60551366 60551361 -
agggcgctggatcctgggaccc

SEQ ID NO: 210538 - DNA, 22 bp, Artificial Sequence
  Synthetic oligonucleotide; CTG chr2 60551352 60551373 60551357 60551352 -
gatcctgggaccccgagcactt

SEQ ID NO: 210539 - DNA, 22 bp, Artificial Sequence
  Synthetic oligonucleotide; CTG chr2 60551345 60551366 60551350 60551345 -
ggaccccgagcacttcaccctt

SEQ ID NO: 210540 - DNA, 22 bp, Artificial Sequence
  Synthetic oligonucleotide; CTT chr2 60551330 60551351 60551335 60551330 -
caccctttgggtcttgccctct

SEQ ID NO: 210541 - DNA, 22 bp, Artificial Sequence
  Synthetic oligonucleotide; TTC chr2 60551329 60551350 60551334 60551329 -
accctttgggtcttgccctctt

SEQ ID NO: 210542 - DNA, 22 bp, Artificial Sequence
  Synthetic oligonucleotide; CTT chr2 60551323 60551344 60551328 60551323 -
tgggtcttgccctcttccccag

SEQ ID NO: 210543 - DNA, 22 bp, Artificial Sequence
  Synthetic oligonucleotide; TTT chr2 60551322 60551343 60551327 60551322 -
gggtcttgccctcttccccagg

SEQ ID NO: 210544 - DNA, 22 bp, Artificial Sequence
  Synthetic oligonucleotide; TTG chr2 60551321 60551342 60551326 60551321 -
ggtcttgccctcttccccaggc

SEQ ID NO: 210545 - DNA, 22 bp, Artificial Sequence
  Synthetic oligonucleotide; CTT chr2 60551315 60551336 60551320 60551315 -
gccctcttccccaggcctggct

SEQ ID NO: 210546 - DNA, 22 bp, Artificial Sequence
  Synthetic oligonucleotide; TTG chr2 60551314 60551335 60551319 60551314 -
ccctcttccccaggcctggctt

SEQ ID NO: 210547 - DNA, 22 bp, Artificial Sequence
  Synthetic oligonucleotide; CTC chr2 60551309 60551330 60551314 60551309 -
ttccccaggcctggcttggtct

SEQ ID NO: 210548 - DNA, 22 bp, Artificial Sequence
  Synthetic oligonucleotide; CTT chr2 60551307 60551328 60551312 60551307 -
ccccaggcctggcttggtctga

SEQ ID NO: 210549 - DNA, 22 bp, Artificial Sequence
  Synthetic oligonucleotide; TTC chr2 60551306 60551327 60551311 60551306 -
cccaggcctggcttggtctgag

SEQ ID NO: 210550 - DNA, 22 bp, Artificial Sequence
  Synthetic oligonucleotide; CTG chr2 60551296 60551317 60551301 60551296 -
gcttggtctgaggttcttgtga

SEQ ID NO: 210551 - DNA, 22 bp, Artificial Sequence
  Synthetic oligonucleotide; CTT chr2 60551292 60551313 60551297 60551292 -
ggtctgaggttcttgtgagtct

SEQ ID NO: 210552 - DNA, 22 bp, Artificial Sequence
  Synthetic oligonucleotide; TTG chr2 60551291 60551312 60551296 60551291 -
gtctgaggttcttgtgagtctg

SEQ ID NO: 210553 - DNA, 22 bp, Artificial Sequence
  Synthetic oligonucleotide; CTG chr2 60551286 60551307 60551291 60551286 -
aggttcttgtgagtctgtataa

SEQ ID NO: 210554 - DNA, 22 bp, Artificial Sequence
  Synthetic oligonucleotide; TTC chr2 60551280 60551301 60551285 60551280 -
ttgtgagtctgtataagagctg

SEQ ID NO: 210555 - DNA, 22 bp, Artificial Sequence
  Synthetic oligonucleotide; CTT chr2 60551278 60551299 60551283 60551278 -
gtgagtctgtataagagctggt

SEQ ID NO: 210556 - DNA, 22 bp, Artificial Sequence
  Synthetic oligonucleotide; TTG chr2 60551277 60551298 60551282 60551277 -
tgagtctgtataagagctggtg

SEQ ID NO: 210557 - DNA, 22 bp, Artificial Sequence
  Synthetic oligonucleotide; CTG chr2 60551269 60551290 60551274 60551269 -
tataagagctggtggtggtggc

SEQ ID NO: 210558 - DNA, 22 bp, Artificial Sequence
  Synthetic oligonucleotide; CTG chr2 60551258 60551279 60551263 60551258 -
gtggtggtggctgtctcccgct

SEQ ID NO: 210559 - DNA, 22 bp, Artificial Sequence
  Synthetic oligonucleotide; CTG chr2 60551245 60551266 60551250 60551245 -
tctcccgctgactgcgcctgga

SEQ ID NO: 210560 - DNA, 22 bp, Artificial Sequence
  Synthetic oligonucleotide; CTC chr2 60551241 60551262 60551246 60551241 -
ccgctgactgcgcctggaaagg

SEQ ID NO: 210561 - DNA, 22 bp, Artificial Sequence
  Synthetic oligonucleotide; CTG chr2 60551235 60551256 60551240 60551235 -
actgcgcctggaaaggcgggcg

SEQ ID NO: 210562 - DNA, 22 bp, Artificial Sequence
  Synthetic oligonucleotide; CTG chr2 60551231 60551252 60551236 60551231 -
cgcctggaaaggcgggcggtgg

SEQ ID NO: 210563 - DNA, 22 bp, Artificial Sequence
  Synthetic oligonucleotide; CTG chr2 60551225 60551246 60551230 60551225 -
gaaaggcgggcggtgggcactt

SEQ ID NO: 210564 - DNA, 22 bp, Artificial Sequence
  Synthetic oligonucleotide; CTT chr2 60551203 60551224 60551208 60551203 -
aggaaagtttggcagcaaggga

SEQ ID NO: 210565 - DNA, 22 bp, Artificial Sequence
  Synthetic oligonucleotide; TTA chr2 60551202 60551223 60551207 60551202 -
ggaaagtttggcagcaagggaa

SEQ ID NO: 210566 - DNA, 22 bp, Artificial Sequence
  Synthetic oligonucleotide; TTT chr2 60551193 60551214 60551198 60551193 -
ggcagcaagggaaagaaaggcg

SEQ ID NO: 210567 - DNA, 22 bp, Artificial Sequence
  Synthetic oligonucleotide; TTG chr2 60551192 60551213 60551197 60551192 -
gcagcaagggaaagaaaggcgt

SEQ ID NO: 210568 - DNA, 22 bp, Artificial Sequence
  Synthetic oligonucleotide; TTC chr2 60551156 60551177 60551161 60551156 -
cccccctactcaatttatgatt

SEQ ID NO: 210569 - DNA, 22 bp, Artificial Sequence
  Synthetic oligonucleotide; CTA chr2 60551148 60551169 60551153 60551148 -
ctcaatttatgattcttacttt

SEQ ID NO: 210570 - DNA, 22 bp, Artificial Sequence
  Synthetic oligonucleotide; CTC chr2 60551145 60551166 60551150 60551145 -
aatttatgattcttactttaaa

SEQ ID NO: 210571 - DNA, 22 bp, Artificial Sequence
  Synthetic oligonucleotide; TTT chr2 60551140 60551161 60551145 60551140 -
atgattcttactttaaattttt

SEQ ID NO: 210572 - DNA, 22 bp, Artificial Sequence
  Synthetic oligonucleotide; TTA chr2 60551139 60551160 60551144 60551139 -
tgattcttactttaaatttttg

SEQ ID NO: 210573 - DNA, 22 bp, Artificial Sequence
  Synthetic oligonucleotide; TTC chr2 60551133 60551154 60551138 60551133 -
ttactttaaatttttgatgcag

SEQ ID NO: 210574 - DNA, 22 bp, Artificial Sequence
  Synthetic oligonucleotide; CTT chr2 60551131 60551152 60551136 60551131 -
actttaaatttttgatgcagtt

SEQ ID NO: 210575 - DNA, 22 bp, Artificial Sequence
  Synthetic oligonucleotide; TTA chr2 60551130 60551151 60551135 60551130 -
ctttaaatttttgatgcagttt

SEQ ID NO: 210576 - DNA, 22 bp, Artificial Sequence
  Synthetic oligonucleotide; CTT chr2 60551127 60551148 60551132 60551127 -
taaatttttgatgcagttttaa

SEQ ID NO: 210577 - DNA, 22 bp, Artificial Sequence
  Synthetic oligonucleotide; TTT chr2 60551126 60551147 60551131 60551126 -
aaatttttgatgcagttttaaa

SEQ ID NO: 210578 - DNA, 22 bp, Artificial Sequence
  Synthetic oligonucleotide; TTA chr2 60551125 60551146 60551130 60551125 -
aatttttgatgcagttttaaag

SEQ ID NO: 210579 - DNA, 22 bp, Artificial Sequence
  Synthetic oligonucleotide; TTT chr2 60551120 60551141 60551125 60551120 -
ttgatgcagttttaaaggacca

SEQ ID NO: 210580 - DNA, 22 bp, Artificial Sequence
  Synthetic oligonucleotide; TTT chr2 60551119 60551140 60551124 60551119 -
tgatgcagttttaaaggaccac

SEQ ID NO: 210581 - DNA, 22 bp, Artificial Sequence
  Synthetic oligonucleotide; TTT chr2 60551118 60551139 60551123 60551118 -
gatgcagttttaaaggaccacc

SEQ ID NO: 210582 - DNA, 22 bp, Artificial Sequence
  Synthetic oligonucleotide; TTG chr2 60551117 60551138 60551122 60551117 -
atgcagttttaaaggaccacct

SEQ ID NO: 210583 - DNA, 22 bp, Artificial Sequence
  Synthetic oligonucleotide; TTT chr2 60551108 60551129 60551113 60551108 -
taaaggaccacctatacttggt

SEQ ID NO: 210584 - DNA, 22 bp, Artificial Sequence
  Synthetic oligonucleotide; TTT chr2 60551107 60551128 60551112 60551107 -
aaaggaccacctatacttggtt

SEQ ID NO: 210585 - DNA, 22 bp, Artificial Sequence
  Synthetic oligonucleotide; TTA chr2 60551106 60551127 60551111 60551106 -
aaggaccacctatacttggttc

SEQ ID NO: 210586 - DNA, 22 bp, Artificial Sequence
  Synthetic oligonucleotide; CTA chr2 60551094 60551115 60551099 60551094 -
tacttggttctgtgttttttta

SEQ ID NO: 210587 - DNA, 22 bp, Artificial Sequence
  Synthetic oligonucleotide; CTT chr2 60551089 60551110 60551094 60551089 -
ggttctgtgtttttttaaaggg

SEQ ID NO: 210588 - DNA, 22 bp, Artificial Sequence
  Synthetic oligonucleotide; TTG chr2 60551088 60551109 60551093 60551088 -
gttctgtgtttttttaaagggg

SEQ ID NO: 210589 - DNA, 22 bp, Artificial Sequence
  Synthetic oligonucleotide; TTC chr2 60551084 60551105 60551089 60551084 -
tgtgtttttttaaaggggtggt

SEQ ID NO: 210590 - DNA, 22 bp, Artificial Sequence
  Synthetic oligonucleotide; CTG chr2 60551082 60551103 60551087 60551082 -
tgtttttttaaaggggtggtgg

SEQ ID NO: 210591 - DNA, 22 bp, Artificial Sequence
  Synthetic oligonucleotide; TTT chr2 60551077 60551098 60551082 60551077 -
ttttaaaggggtggtggtgggg

SEQ ID NO: 210592 - DNA, 22 bp, Artificial Sequence
  Synthetic oligonucleotide; TTT chr2 60551076 60551097 60551081 60551076 -
tttaaaggggtggtggtggggg

SEQ ID NO: 210593 - DNA, 22 bp, Artificial Sequence
  Synthetic oligonucleotide; TTT chr2 60551075 60551096 60551080 60551075 -
ttaaaggggtggtggtgggggg

SEQ ID NO: 210594 - DNA, 22 bp, Artificial Sequence
  Synthetic oligonucleotide; TTT chr2 60551074 60551095 60551079 60551074 -
taaaggggtggtggtggggggt

SEQ ID NO: 210595 - DNA, 22 bp, Artificial Sequence
  Synthetic oligonucleotide; TTT chr2 60551073 60551094 60551078 60551073 -
aaaggggtggtggtggggggtg

SEQ ID NO: 210596 - DNA, 22 bp, Artificial Sequence
  Synthetic oligonucleotide; TTA chr2 60551072 60551093 60551077 60551072 -
aaggggtggtggtggggggtgc

SEQ ID NO: 210597 - DNA, 22 bp, Artificial Sequence
  Synthetic oligonucleotide; TTT chr2 60551037 60551058 60551042 60551037 -
aatttttcactgggccctggaa

SEQ ID NO: 210598 - DNA, 22 bp, Artificial Sequence
  Synthetic oligonucleotide; TTA chr2 60551036 60551057 60551041 60551036 -
atttttcactgggccctggaac

SEQ ID NO: 210599 - DNA, 22 bp, Artificial Sequence
  Synthetic oligonucleotide; TTT chr2 60551032 60551053 60551037 60551032 -
ttcactgggccctggaacttgt

SEQ ID NO: 210600 - DNA, 22 bp, Artificial Sequence
  Synthetic oligonucleotide; TTT chr2 60551031 60551052 60551036 60551031 -
tcactgggccctggaacttgtc

SEQ ID NO: 210601 - DNA, 22 bp, Artificial Sequence
  Synthetic oligonucleotide; TTT chr2 60551030 60551051 60551035 60551030 -
cactgggccctggaacttgtca

SEQ ID NO: 210602 - DNA, 22 bp, Artificial Sequence
  Synthetic oligonucleotide; TTC chr2 60551029 60551050 60551034 60551029 -
actgggccctggaacttgtcac

SEQ ID NO: 210603 - DNA, 22 bp, Artificial Sequence
  Synthetic oligonucleotide; CTG chr2 60551025 60551046 60551030 60551025 -
ggccctggaacttgtcacacac

SEQ ID NO: 210604 - DNA, 22 bp, Artificial Sequence
  Synthetic oligonucleotide; CTG chr2 60551018 60551039 60551023 60551018 -
gaacttgtcacacacttcggaa

SEQ ID NO: 210605 - DNA, 22 bp, Artificial Sequence
  Synthetic oligonucleotide; CTT chr2 60551012 60551033 60551017 60551012 -
gtcacacacttcggaagctccc

SEQ ID NO: 210606 - DNA, 22 bp, Artificial Sequence
  Synthetic oligonucleotide; TTG chr2 60551011 60551032 60551016 60551011 -
tcacacacttcggaagctcccc

SEQ ID NO: 210607 - DNA, 22 bp, Artificial Sequence
  Synthetic oligonucleotide; CTT chr2 60551001 60551022 60551006 60551001 -
cggaagctcccccaccccggca

SEQ ID NO: 210608 - DNA, 22 bp, Artificial Sequence
  Synthetic oligonucleotide; TTC chr2 60551000 60551021 60551005 60551000 -
ggaagctcccccaccccggcac

SEQ ID NO: 210609 - DNA, 22 bp, Artificial Sequence
  Synthetic oligonucleotide; CTC chr2 60550992 60551013 60550997 60550992 -
ccccaccccggcacgttgcgcg

SEQ ID NO: 210610 - DNA, 22 bp, Artificial Sequence
  Synthetic oligonucleotide; TTG chr2 60550974 60550995 60550979 60550974 -
cgcggccctccctctccccacc

SEQ ID NO: 210611 - DNA, 22 bp, Artificial Sequence
  Synthetic oligonucleotide; CTC chr2 60550964 60550985 60550969 60550964 -
cctctccccaccccctcgcatc

SEQ ID NO: 210612 - DNA, 22 bp, Artificial Sequence
  Synthetic oligonucleotide; CTC chr2 60550960 60550981 60550965 60550960 -
tccccaccccctcgcatccctc

SEQ ID NO: 210613 - DNA, 22 bp, Artificial Sequence
  Synthetic oligonucleotide; CTC chr2 60550958 60550979 60550963 60550958 -
cccaccccctcgcatccctccc

SEQ ID NO: 210614 - DNA, 22 bp, Artificial Sequence
  Synthetic oligonucleotide; CTC chr2 60550947 60550968 60550952 60550947 -
gcatccctccctcgccgctctc

SEQ ID NO: 210615 - DNA, 22 bp, Artificial Sequence
  Synthetic oligonucleotide; CTC chr2 60550938 60550959 60550943 60550938 -
cctcgccgctctcccccgcccc

SEQ ID NO: 210616 - DNA, 22 bp, Artificial Sequence
  Synthetic oligonucleotide; CTC chr2 60550934 60550955 60550939 60550934 -
gccgctctcccccgcccccaac

SEQ ID NO: 210617 - DNA, 22 bp, Artificial Sequence
  Synthetic oligonucleotide; CTC chr2 60550927 60550948 60550932 60550927 -
tcccccgcccccaactcccccg

SEQ ID NO: 210618 - DNA, 22 bp, Artificial Sequence
  Synthetic oligonucleotide; CTC chr2 60550925 60550946 60550930 60550925 -
ccccgcccccaactcccccggc

SEQ ID NO: 210619 - DNA, 22 bp, Artificial Sequence
  Synthetic oligonucleotide; CTC chr2 60550910 60550931 60550915 60550910 -
ccccggccgcgccggatgcgga

SEQ ID NO: 210620 - DNA, 22 bp, Artificial Sequence
  Synthetic oligonucleotide; TTA chr2 60550858 60550879 60550863 60550858 -
cagcccggccaggtaccggcgg

SEQ ID NO: 210621 - DNA, 22 bp, Artificial Sequence
  Synthetic oligonucleotide; TTC chr2 60550818 60550839 60550823 60550818 -
gcaggactcgggaaagtcaggc

SEQ ID NO: 210622 - DNA, 22 bp, Artificial Sequence
  Synthetic oligonucleotide; CTC chr2 60550809 60550830 60550814 60550809 -
gggaaagtcaggcccttcttcg

SEQ ID NO: 210623 - DNA, 22 bp, Artificial Sequence
  Synthetic oligonucleotide; CTT chr2 60550792 60550813 60550797 60550792 -
cttcggaaggatgcagtggggg

SEQ ID NO: 210624 - DNA, 22 bp, Artificial Sequence
  Synthetic oligonucleotide; TTC chr2 60550791 60550812 60550796 60550791 -
ttcggaaggatgcagtgggggc

SEQ ID NO: 210625 - DNA, 22 bp, Artificial Sequence
  Synthetic oligonucleotide; CTT chr2 60550789 60550810 60550794 60550789 -
cggaaggatgcagtgggggctc

SEQ ID NO: 210626 - DNA, 22 bp, Artificial Sequence
  Synthetic oligonucleotide; TTC chr2 60550788 60550809 60550793 60550788 -
ggaaggatgcagtgggggctca

SEQ ID NO: 210627 - DNA, 22 bp, Artificial Sequence
  Synthetic oligonucleotide; CTC chr2 60550767 60550788 60550772 60550767 -
aaaggacagaccggggcgcgca

SEQ ID NO: 210628 - DNA, 22 bp, Artificial Sequence
  Synthetic oligonucleotide; CTG chr2 60550735 60550756 60550740 60550735 -
ctccctcgtacccctctccctc

SEQ ID NO: 210629 - DNA, 22 bp, Artificial Sequence
  Synthetic oligonucleotide; CTC chr2 60550732 60550753 60550737 60550732 -
cctcgtacccctctccctcctg

SEQ ID NO: 210630 - DNA, 22 bp, Artificial Sequence
  Synthetic oligonucleotide; CTC chr2 60550728 60550749 60550733 60550728 -
gtacccctctccctcctgggtc

SEQ ID NO: 210631 - DNA, 22 bp, Artificial Sequence
  Synthetic oligonucleotide; CTC chr2 60550719 60550740 60550724 60550719 -
tccctcctgggtccatcttggg

SEQ ID NO: 210632 - DNA, 22 bp, Artificial Sequence
  Synthetic oligonucleotide; CTC chr2 60550717 60550738 60550722 60550717 -
cctcctgggtccatcttgggac

SEQ ID NO: 210633 - DNA, 22 bp, Artificial Sequence
  Synthetic oligonucleotide; CTC chr2 60550713 60550734 60550718 60550713 -
ctgggtccatcttgggacactc

SEQ ID NO: 210634 - DNA, 22 bp, Artificial Sequence
  Synthetic oligonucleotide; CTG chr2 60550710 60550731 60550715 60550710 -
ggtccatcttgggacactctag

SEQ ID NO: 210635 - DNA, 22 bp, Artificial Sequence
  Synthetic oligonucleotide; CTT chr2 60550700 60550721 60550705 60550700 -
gggacactctaggctgggaggg

SEQ ID NO: 210636 - DNA, 22 bp, Artificial Sequence
  Synthetic oligonucleotide; TTG chr2 60550699 60550720 60550704 60550699 -
ggacactctaggctgggagggt

SEQ ID NO: 210637 - DNA, 22 bp, Artificial Sequence
  Synthetic oligonucleotide; CTC chr2 60550691 60550712 60550696 60550691 -
taggctgggagggttagtaccc

SEQ ID NO: 210638 - DNA, 22 bp, Artificial Sequence
  Synthetic oligonucleotide; CTA chr2 60550689 60550710 60550694 60550689 -
ggctgggagggttagtaccccc

SEQ ID NO: 210639 - DNA, 22 bp, Artificial Sequence
  Synthetic oligonucleotide; CTG chr2 60550684 60550705 60550689 60550684 -
ggagggttagtaccccctcctc

SEQ ID NO: 210640 - DNA, 22 bp, Artificial Sequence
  Synthetic oligonucleotide; TTA chr2 60550675 60550696 60550680 60550675 -
gtaccccctcctcctgtcccgg

SEQ ID NO: 210641 - DNA, 22 bp, Artificial Sequence
  Synthetic oligonucleotide; CTC chr2 60550665 60550686 60550670 60550665 -
ctcctgtcccggggttaaaggg

SEQ ID NO: 210642 - DNA, 22 bp, Artificial Sequence
  Synthetic oligonucleotide; CTC chr2 60550662 60550683 60550667 60550662 -
ctgtcccggggttaaagggcca

SEQ ID NO: 210643 - DNA, 22 bp, Artificial Sequence
  Synthetic oligonucleotide; CTG chr2 60550659 60550680 60550664 60550659 -
tcccggggttaaagggccagtt

SEQ ID NO: 210644 - DNA, 22 bp, Artificial Sequence
  Synthetic oligonucleotide; TTA chr2 60550648 60550669 60550653 60550648 -
aagggccagtttgggagggggt

SEQ ID NO: 210645 - DNA, 22 bp, Artificial Sequence
  Synthetic oligonucleotide; TTT chr2 60550636 60550657 60550641 60550636 -
gggagggggtgagggggccact

SEQ ID NO: 210646 - DNA, 22 bp, Artificial Sequence
  Synthetic oligonucleotide; TTG chr2 60550635 60550656 60550640 60550635 -
ggagggggtgagggggccactt

SEQ ID NO: 210647 - DNA, 22 bp, Artificial Sequence
  Synthetic oligonucleotide; CTT chr2 60550613 60550634 60550618 60550613 -
ctttctgtcctcattttctggg

SEQ ID NO: 210648 - DNA, 22 bp, Artificial Sequence
  Synthetic oligonucleotide; TTC chr2 60550612 60550633 60550617 60550612 -
tttctgtcctcattttctgggt

SEQ ID NO: 210649 - DNA, 22 bp, Artificial Sequence
  Synthetic oligonucleotide; CTT chr2 60550610 60550631 60550615 60550610 -
tctgtcctcattttctgggtgc

SEQ ID NO: 210650 - DNA, 22 bp, Artificial Sequence
  Synthetic oligonucleotide; TTT chr2 60550609 60550630 60550614 60550609 -
ctgtcctcattttctgggtgct

SEQ ID NO: 210651 - DNA, 22 bp, Artificial Sequence
  Synthetic oligonucleotide; TTC chr2 60550608 60550629 60550613 60550608 -
tgtcctcattttctgggtgctc

SEQ ID NO: 210652 - DNA, 22 bp, Artificial Sequence
  Synthetic oligonucleotide; CTG chr2 60550606 60550627 60550611 60550606 -
tcctcattttctgggtgctcag

SEQ ID NO: 210653 - DNA, 22 bp, Artificial Sequence
  Synthetic oligonucleotide; CTC chr2 60550601 60550622 60550606 60550601 -
attttctgggtgctcagagggg

SEQ ID NO: 210654 - DNA, 22 bp, Artificial Sequence
  Synthetic oligonucleotide; TTT chr2 60550597 60550618 60550602 60550597 -
tctgggtgctcagagggggcag

SEQ ID NO: 210655 - DNA, 22 bp, Artificial Sequence
  Synthetic oligonucleotide; TTT chr2 60550596 60550617 60550601 60550596 -
ctgggtgctcagagggggcagg

SEQ ID NO: 210656 - DNA, 22 bp, Artificial Sequence
  Synthetic oligonucleotide; TTC chr2 60550595 60550616 60550600 60550595 -
tgggtgctcagagggggcagga

SEQ ID NO: 210657 - DNA, 22 bp, Artificial Sequence
  Synthetic oligonucleotide; CTG chr2 60550593 60550614 60550598 60550593 -
ggtgctcagagggggcaggagc

SEQ ID NO: 210658 - DNA, 22 bp, Artificial Sequence
  Synthetic oligonucleotide; CTC chr2 60550586 60550607 60550591 60550586 -
agagggggcaggagccatcccg

SEQ ID NO: 210659 - DNA, 22 bp, Artificial Sequence
  Synthetic oligonucleotide; CTC chr2 60550558 60550579 60550563 60550558 -
agtaccacccccccgccccccg

SEQ ID NO: 210660 - DNA, 22 bp, Artificial Sequence
  Synthetic oligonucleotide; CTC chr2 60550532 60550553 60550537 60550532 -
tgctatgtgggctgaatgagcc

SEQ ID NO: 210661 - DNA, 22 bp, Artificial Sequence
  Synthetic oligonucleotide; CTG chr2 60550530 60550551 60550535 60550530 -
ctatgtgggctgaatgagccat

SEQ ID NO: 210662 - DNA, 22 bp, Artificial Sequence
  Synthetic oligonucleotide; CTA chr2 60550527 60550548 60550532 60550527 -
tgtgggctgaatgagccattcg

SEQ ID NO: 210663 - DNA, 22 bp, Artificial Sequence
  Synthetic oligonucleotide; CTG chr2 60550518 60550539 60550523 60550518 -
aatgagccattcggtcgctagg

SEQ ID NO: 210664 - DNA, 22 bp, Artificial Sequence
  Synthetic oligonucleotide; TTC chr2 60550506 60550527 60550511 60550506 -
ggtcgctaggaggcagaacaag

SEQ ID NO: 210665 - DNA, 22 bp, Artificial Sequence
  Synthetic oligonucleotide; CTA chr2 60550498 60550519 60550503 60550498 -
ggaggcagaacaagatcaagaa

SEQ ID NO: 210666 - DNA, 22 bp, Artificial Sequence
  Synthetic oligonucleotide; CTC chr2 60550471 60550492 60550476 60550471 -
agcgaacttgaacctgtaccag

SEQ ID NO: 210667 - DNA, 22 bp, Artificial Sequence
  Synthetic oligonucleotide; CTT chr2 60550462 60550483 60550467 60550462 -
gaacctgtaccagagcctcccc

SEQ ID NO: 210668 - DNA, 22 bp, Artificial Sequence
  Synthetic oligonucleotide; TTG chr2 60550461 60550482 60550466 60550461 -
aacctgtaccagagcctccccc

SEQ ID NO: 210669 - DNA, 22 bp, Artificial Sequence
  Synthetic oligonucleotide; CTG chr2 60550455 60550476 60550460 60550455 -
taccagagcctcccccacctcc

SEQ ID NO: 210670 - DNA, 22 bp, Artificial Sequence
  Synthetic oligonucleotide; CTC chr2 60550443 60550464 60550448 60550443 -
ccccacctcctgcccggcgatt

SEQ ID NO: 210671 - DNA, 22 bp, Artificial Sequence
  Synthetic oligonucleotide; CTC chr2 60550434 60550455 60550439 60550434 -
ctgcccggcgattctcgtccgg

SEQ ID NO: 210672 - DNA, 22 bp, Artificial Sequence
  Synthetic oligonucleotide; CTG chr2 60550431 60550452 60550436 60550431 -
cccggcgattctcgtccgggga

SEQ ID NO: 210673 - DNA, 22 bp, Artificial Sequence
  Synthetic oligonucleotide; TTC chr2 60550420 60550441 60550425 60550420 -
tcgtccggggaggaacgagctt

SEQ ID NO: 210674 - DNA, 22 bp, Artificial Sequence
  Synthetic oligonucleotide; CTC chr2 60550418 60550439 60550423 60550418 -
gtccggggaggaacgagctttg

SEQ ID NO: 210675 - DNA, 22 bp, Artificial Sequence
  Synthetic oligonucleotide; CTT chr2 60550398 60550419 60550403 60550398 -
tgcgagggtgggggtgggggga

SEQ ID NO: 210676 - DNA, 22 bp, Artificial Sequence
  Synthetic oligonucleotide; TTT chr2 60550397 60550418 60550402 60550397 -
gcgagggtgggggtggggggaa

SEQ ID NO: 210677 - DNA, 22 bp, Artificial Sequence
  Synthetic oligonucleotide; TTG chr2 60550396 60550417 60550401 60550396 -
cgagggtgggggtggggggaaa

SEQ ID NO: 210678 - DNA, 22 bp, Artificial Sequence
  Synthetic oligonucleotide; TTA chr2 60550365 60550386 60550370 60550365 -
ggcagaattccctttctctccc

SEQ ID NO: 210679 - DNA, 22 bp, Artificial Sequence
  Synthetic oligonucleotide; TTC chr2 60550355 60550376 60550360 60550355 -
cctttctctcccccatcacccc

SEQ ID NO: 210680 - DNA, 22 bp, Artificial Sequence
  Synthetic oligonucleotide; CTT chr2 60550351 60550372 60550356 60550351 -
tctctcccccatcaccccgtat

SEQ ID NO: 210681 - DNA, 22 bp, Artificial Sequence
  Synthetic oligonucleotide; TTT chr2 60550350 60550371 60550355 60550350 -
ctctcccccatcaccccgtatg

SEQ ID NO: 210682 - DNA, 22 bp, Artificial Sequence
  Synthetic oligonucleotide; TTC chr2 60550349 60550370 60550354 60550349 -
tctcccccatcaccccgtatgt

SEQ ID NO: 210683 - DNA, 22 bp, Artificial Sequence
  Synthetic oligonucleotide; CTC chr2 60550347 60550368 60550352 60550347 -
tcccccatcaccccgtatgtct

SEQ ID NO: 210684 - DNA, 22 bp, Artificial Sequence
  Synthetic oligonucleotide; CTC chr2 60550345 60550366 60550350 60550345 -
ccccatcaccccgtatgtcttt

SEQ ID NO: 210685 - DNA, 22 bp, Artificial Sequence
  Synthetic oligonucleotide; CTT chr2 60550324 60550345 60550329 60550324 -
tgttcttcattttgactttaaa

SEQ ID NO: 210686 - DNA, 22 bp, Artificial Sequence
  Synthetic oligonucleotide; TTT chr2 60550323 60550344 60550328 60550323 -
gttcttcattttgactttaaaa

SEQ ID NO: 210687 - DNA, 22 bp, Artificial Sequence
  Synthetic oligonucleotide; TTG chr2 60550322 60550343 60550327 60550322 -
ttcttcattttgactttaaaaa

SEQ ID NO: 210688 - DNA, 22 bp, Artificial Sequence
  Synthetic oligonucleotide; TTC chr2 60550319 60550340 60550324 60550319 -
ttcattttgactttaaaaatgc

SEQ ID NO: 210689 - DNA, 22 bp, Artificial Sequence
  Synthetic oligonucleotide; CTT chr2 60550317 60550338 60550322 60550317 -
cattttgactttaaaaatgctt

SEQ ID NO: 210690 - DNA, 22 bp, Artificial Sequence
  Synthetic oligonucleotide; TTC chr2 60550316 60550337 60550321 60550316 -
attttgactttaaaaatgcttc

SEQ ID NO: 210691 - DNA, 22 bp, Artificial Sequence
  Synthetic oligonucleotide; TTT chr2 60550312 60550333 60550317 60550312 -
tgactttaaaaatgcttctggc

SEQ ID NO: 210692 - DNA, 22 bp, Artificial Sequence
  Synthetic oligonucleotide; TTT chr2 60550311 60550332 60550316 60550311 -
gactttaaaaatgcttctggcc

SEQ ID NO: 210693 - DNA, 22 bp, Artificial Sequence
  Synthetic oligonucleotide; TTG chr2 60550310 60550331 60550315 60550310 -
actttaaaaatgcttctggccg

SEQ ID NO: 210694 - DNA, 22 bp, Artificial Sequence
  Synthetic oligonucleotide; CTT chr2 60550306 60550327 60550311 60550306 -
taaaaatgcttctggccggggc

SEQ ID NO: 210695 - DNA, 22 bp, Artificial Sequence
  Synthetic oligonucleotide; TTT chr2 60550305 60550326 60550310 60550305 -
aaaaatgcttctggccggggcc

SEQ ID NO: 210696 - DNA, 22 bp, Artificial Sequence
  Synthetic oligonucleotide; TTA chr2 60550304 60550325 60550309 60550304 -
aaaatgcttctggccggggccg

SEQ ID NO: 210697 - DNA, 22 bp, Artificial Sequence
  Synthetic oligonucleotide; CTT chr2 60550295 60550316 60550300 60550295 -
ctggccggggccgcggagaagc

SEQ ID NO: 210698 - DNA, 22 bp, Artificial Sequence
  Synthetic oligonucleotide; TTC chr2 60550294 60550315 60550299 60550294 -
tggccggggccgcggagaagcg

SEQ ID NO: 210699 - DNA, 22 bp, Artificial Sequence
  Synthetic oligonucleotide; CTG chr2 60550292 60550313 60550297 60550292 -
gccggggccgcggagaagcgac

SEQ ID NO: 210700 - DNA, 22 bp, Artificial Sequence
  Synthetic oligonucleotide; CTG chr2 60550236 60550257 60550241 60550236 -
agaccagcgcgcgccgggctcg

SEQ ID NO: 210701 - DNA, 22 bp, Artificial Sequence
  Synthetic oligonucleotide; CTC chr2 60550215 60550236 60550220 60550215 -
ggagcacggtgcagttttcgct

SEQ ID NO: 210702 - DNA, 22 bp, Artificial Sequence
  Synthetic oligonucleotide; TTT chr2 60550198 60550219 60550203 60550198 -
tcgctttctttcggggccggca

SEQ ID NO: 210703 - DNA, 22 bp, Artificial Sequence
  Synthetic oligonucleotide; TTT chr2 60550197 60550218 60550202 60550197 -
cgctttctttcggggccggcat

SEQ ID NO: 210704 - DNA, 22 bp, Artificial Sequence
  Synthetic oligonucleotide; TTC chr2 60550196 60550217 60550201 60550196 -
gctttctttcggggccggcatt

SEQ ID NO: 210705 - DNA, 22 bp, Artificial Sequence
  Synthetic oligonucleotide; CTT chr2 60550192 60550213 60550197 60550192 -
tctttcggggccggcatttttg

SEQ ID NO: 210706 - DNA, 22 bp, Artificial Sequence
  Synthetic oligonucleotide; TTT chr2 60550191 60550212 60550196 60550191 -
ctttcggggccggcatttttgg

SEQ ID NO: 210707 - DNA, 22 bp, Artificial Sequence
  Synthetic oligonucleotide; TTC chr2 60550190 60550211 60550195 60550190 -
tttcggggccggcatttttggt

SEQ ID NO: 210708 - DNA, 22 bp, Artificial Sequence
  Synthetic oligonucleotide; CTT chr2 60550188 60550209 60550193 60550188 -
tcggggccggcatttttggtag

SEQ ID NO: 210709 - DNA, 22 bp, Artificial Sequence
  Synthetic oligonucleotide; TTT chr2 60550187 60550208 60550192 60550187 -
cggggccggcatttttggtagg

SEQ ID NO: 210710 - DNA, 22 bp, Artificial Sequence
  Synthetic oligonucleotide; TTC chr2 60550186 60550207 60550191 60550186 -
ggggccggcatttttggtaggg

SEQ ID NO: 210711 - DNA, 22 bp, Artificial Sequence
  Synthetic oligonucleotide; TTT chr2 60550173 60550194 60550178 60550173 -
ttggtagggaggaaccgggagt

SEQ ID NO: 210712 - DNA, 22 bp, Artificial Sequence
  Synthetic oligonucleotide; TTT chr2 60550172 60550193 60550177 60550172 -
tggtagggaggaaccgggagtg

SEQ ID NO: 210713 - DNA, 22 bp, Artificial Sequence
  Synthetic oligonucleotide; TTT chr2 60550171 60550192 60550176 60550171 -
ggtagggaggaaccgggagtgc

SEQ ID NO: 210714 - DNA, 22 bp, Artificial Sequence
  Synthetic oligonucleotide; TTG chr2 60550170 60550191 60550175 60550170 -
gtagggaggaaccgggagtgcg

SEQ ID NO: 210715 - DNA, 22 bp, Artificial Sequence
  Synthetic oligonucleotide; CTC chr2 60550143 60550164 60550148 60550143 -
tagggcttcggggcatggccga

SEQ ID NO: 210716 - DNA, 22 bp, Artificial Sequence
  Synthetic oligonucleotide; CTA chr2 60550141 60550162 60550146 60550141 -
gggcttcggggcatggccgaag

SEQ ID NO: 210717 - DNA, 22 bp, Artificial Sequence
  Synthetic oligonucleotide; CTT chr2 60550135 60550156 60550140 60550135 -
cggggcatggccgaagaggggg

SEQ ID NO: 210718 - DNA, 22 bp, Artificial Sequence
  Synthetic oligonucleotide; TTC chr2 60550134 60550155 60550139 60550134 -
ggggcatggccgaagaggggga

SEQ ID NO: 210719 - DNA, 22 bp, Artificial Sequence
  Synthetic oligonucleotide; TTT chr2 60550100 60550121 60550105 60550100 -
gcacttggtctccagcctcact

SEQ ID NO: 210720 - DNA, 22 bp, Artificial Sequence
  Synthetic oligonucleotide; TTG chr2 60550099 60550120 60550104 60550099 -
cacttggtctccagcctcactt

SEQ ID NO: 210721 - DNA, 22 bp, Artificial Sequence
  Synthetic oligonucleotide; CTT chr2 60550094 60550115 60550099 60550094 -
ggtctccagcctcacttcttcc

SEQ ID NO: 210722 - DNA, 22 bp, Artificial Sequence
  Synthetic oligonucleotide; TTG chr2 60550093 60550114 60550098 60550093 -
gtctccagcctcacttcttcca

SEQ ID NO: 210723 - DNA, 22 bp, Artificial Sequence
  Synthetic oligonucleotide; CTC chr2 60550088 60550109 60550093 60550088 -
cagcctcacttcttccaccccc

SEQ ID NO: 210724 - DNA, 22 bp, Artificial Sequence
  Synthetic oligonucleotide; CTC chr2 60550081 60550102 60550086 60550081 -
acttcttccaccccctcacccc

SEQ ID NO: 210725 - DNA, 22 bp, Artificial Sequence
  Synthetic oligonucleotide; CTT chr2 60550077 60550098 60550082 60550077 -
cttccaccccctcacccccatg

SEQ ID NO: 210726 - DNA, 22 bp, Artificial Sequence
  Synthetic oligonucleotide; TTC chr2 60550076 60550097 60550081 60550076 -
ttccaccccctcacccccatgc

SEQ ID NO: 210727 - DNA, 22 bp, Artificial Sequence
  Synthetic oligonucleotide; CTT chr2 60550074 60550095 60550079 60550074 -
ccaccccctcacccccatgcaa

SEQ ID NO: 210728 - DNA, 22 bp, Artificial Sequence
  Synthetic oligonucleotide; TTC chr2 60550073 60550094 60550078 60550073 -
caccccctcacccccatgcaaa

SEQ ID NO: 210729 - DNA, 22 bp, Artificial Sequence
  Synthetic oligonucleotide; CTC chr2 60550064 60550085 60550069 60550064 -
acccccatgcaaagcacagacc

SEQ ID NO: 210730 - DNA, 22 bp, Artificial Sequence
  Synthetic oligonucleotide; CTC chr2 60550040 60550061 60550045 60550040 -
ggtggcctcggctggcttgctg

SEQ ID NO: 210731 - DNA, 22 bp, Artificial Sequence
  Synthetic oligonucleotide; CTC chr2 60550031 60550052 60550036 60550031 -
ggctggcttgctgggcggctct

SEQ ID NO: 210732 - DNA, 22 bp, Artificial Sequence
  Synthetic oligonucleotide; CTG chr2 60550026 60550047 60550031 60550026 -
gcttgctgggcggctctgcagc

SEQ ID NO: 210733 - DNA, 22 bp, Artificial Sequence
  Synthetic oligonucleotide; CTT chr2 60550022 60550043 60550027 60550022 -
gctgggcggctctgcagcccga

SEQ ID NO: 210734 - DNA, 22 bp, Artificial Sequence
  Synthetic oligonucleotide; TTG chr2 60550021 60550042 60550026 60550021 -
ctgggcggctctgcagcccgac

SEQ ID NO: 210735 - DNA, 22 bp, Artificial Sequence
  Synthetic oligonucleotide; CTG chr2 60550018 60550039 60550023 60550018 -
ggcggctctgcagcccgacacc

SEQ ID NO: 210736 - DNA, 22 bp, Artificial Sequence
  Synthetic oligonucleotide; CTC chr2 60550010 60550031 60550015 60550010 -
tgcagcccgacaccccccctct

SEQ ID NO: 210737 - DNA, 22 bp, Artificial Sequence
  Synthetic oligonucleotide; CTG chr2 60550008 60550029 60550013 60550008 -
cagcccgacaccccccctctcg

SEQ ID NO: 210738 - DNA, 22 bp, Artificial Sequence
  Synthetic oligonucleotide; CTC chr2 60549989 60550010 60549994 60549989 -
tcgcctcggagctcggaatcac

SEQ ID NO: 210739 - DNA, 22 bp, Artificial Sequence
  Synthetic oligonucleotide; CTC chr2 60549987 60550008 60549992 60549987 -
gcctcggagctcggaatcacaa

SEQ ID NO: 210740 - DNA, 22 bp, Artificial Sequence
  Synthetic oligonucleotide; CTC chr2 60549982 60550003 60549987 60549982 -
ggagctcggaatcacaacaata

SEQ ID NO: 210741 - DNA, 22 bp, Artificial Sequence
  Synthetic oligonucleotide; CTC chr2 60549975 60549996 60549980 60549975 -
ggaatcacaacaatagtaatag

SEQ ID NO: 210742 - DNA, 22 bp, Artificial Sequence
  Synthetic oligonucleotide; TTA chr2 60549950 60549971 60549955 60549950 -
tcatcataatgatgcgggcagg

SEQ ID NO: 210743 - DNA, 22 bp, Artificial Sequence
  Synthetic oligonucleotide; TTA chr2 60549917 60549938 60549922 60549917 -
ataatgaataaccgcagccgcc

SEQ ID NO: 210744 - DNA, 22 bp, Artificial Sequence
  Synthetic oligonucleotide; TTG chr2 60549868 60549889 60549873 60549868 -
cgggggaaatgcatttgcagag

SEQ ID NO: 210745 - DNA, 22 bp, Artificial Sequence
  Synthetic oligonucleotide; TTT chr2 60549852 60549873 60549857 60549852 -
gcagagatcccccaaagtaaaa

SEQ ID NO: 210746 - DNA, 22 bp, Artificial Sequence
  Synthetic oligonucleotide; TTG chr2 60549851 60549872 60549856 60549851 -
cagagatcccccaaagtaaaaa

SEQ ID NO: 210747 - DNA, 22 bp, Artificial Sequence
  Synthetic oligonucleotide; CTT chr2 60549819 60549840 60549824 60549819 -
gtggacacagaatgaatctcag

SEQ ID NO: 210748 - DNA, 22 bp, Artificial Sequence
  Synthetic oligonucleotide; TTG chr2 60549818 60549839 60549823 60549818 -
tggacacagaatgaatctcagg

SEQ ID NO: 210749 - DNA, 22 bp, Artificial Sequence
  Synthetic oligonucleotide; CTC chr2 60549799 60549820 60549804 60549799 -
aggacccgcgcttgaggtgtgt

SEQ ID NO: 210750 - DNA, 22 bp, Artificial Sequence
  Synthetic oligonucleotide; CTT chr2 60549786 60549807 60549791 60549786 -
gaggtgtgtgcggagatactga

SEQ ID NO: 210751 - DNA, 22 bp, Artificial Sequence
  Synthetic oligonucleotide; TTG chr2 60549785 60549806 60549790 60549785 -
aggtgtgtgcggagatactgag

SEQ ID NO: 210752 - DNA, 22 bp, Artificial Sequence
  Synthetic oligonucleotide; CTG chr2 60549765 60549786 60549770 60549765 -
agactgcaccaggttaaccagc

SEQ ID NO: 210753 - DNA, 22 bp, Artificial Sequence
  Synthetic oligonucleotide; CTG chr2 60549759 60549780 60549764 60549759 -
caccaggttaaccagccgggtt

SEQ ID NO: 210754 - DNA, 22 bp, Artificial Sequence
  Synthetic oligonucleotide; TTA chr2 60549749 60549770 60549754 60549749 -
accagccgggttttccaaacct

SEQ ID NO: 210755 - DNA, 22 bp, Artificial Sequence
  Synthetic oligonucleotide; TTT chr2 60549736 60549757 60549741 60549736 -
tccaaacctcacttcctttttc

SEQ ID NO: 210756 - DNA, 22 bp, Artificial Sequence
  Synthetic oligonucleotide; TTT chr2 60549735 60549756 60549740 60549735 -
ccaaacctcacttcctttttca

SEQ ID NO: 210757 - DNA, 22 bp, Artificial Sequence
  Synthetic oligonucleotide; TTC chr2 60549734 60549755 60549739 60549734 -
caaacctcacttcctttttcac

SEQ ID NO: 210758 - DNA, 22 bp, Artificial Sequence
  Synthetic oligonucleotide; CTC chr2 60549726 60549747 60549731 60549726 -
acttcctttttcaccaactggc

SEQ ID NO: 210759 - DNA, 22 bp, Artificial Sequence
  Synthetic oligonucleotide; CTT chr2 60549722 60549743 60549727 60549722 -
cctttttcaccaactggcaggc

SEQ ID NO: 210760 - DNA, 22 bp, Artificial Sequence
  Synthetic oligonucleotide; TTC chr2 60549721 60549742 60549726 60549721 -
ctttttcaccaactggcaggcc

SEQ ID NO: 210761 - DNA, 22 bp, Artificial Sequence
  Synthetic oligonucleotide; CTT chr2 60549718 60549739 60549723 60549718 -
tttcaccaactggcaggcccag

SEQ ID NO: 210762 - DNA, 22 bp, Artificial Sequence
  Synthetic oligonucleotide; TTT chr2 60549717 60549738 60549722 60549717 -
ttcaccaactggcaggcccagg

SEQ ID NO: 210763 - DNA, 22 bp, Artificial Sequence
  Synthetic oligonucleotide; TTT chr2 60549716 60549737 60549721 60549716 -
tcaccaactggcaggcccaggg

SEQ ID NO: 210764 - DNA, 22 bp, Artificial Sequence
  Synthetic oligonucleotide; TTT chr2 60549715 60549736 60549720 60549715 -
caccaactggcaggcccaggga

SEQ ID NO: 210765 - DNA, 22 bp, Artificial Sequence
  Synthetic oligonucleotide; TTC chr2 60549714 60549735 60549719 60549714 -
accaactggcaggcccagggaa

SEQ ID NO: 210766 - DNA, 22 bp, Artificial Sequence
  Synthetic oligonucleotide; CTG chr2 60549706 60549727 60549711 60549706 -
gcaggcccagggaaccgtcacc

SEQ ID NO: 210767 - DNA, 22 bp, Artificial Sequence
  Synthetic oligonucleotide; CTG chr2 60549670 60549691 60549675 60549670 -
gccgagctggacgggcatggag

SEQ ID NO: 210768 - DNA, 22 bp, Artificial Sequence
  Synthetic oligonucleotide; CTG chr2 60549661 60549682 60549666 60549661 -
gacgggcatggaggcagcagtc

SEQ ID NO: 210769 - DNA, 22 bp, Artificial Sequence
  Synthetic oligonucleotide; CTG chr2 60549629 60549650 60549634 60549629 -
gctgccctccgtctccgggccc

SEQ ID NO: 210770 - DNA, 22 bp, Artificial Sequence
  Synthetic oligonucleotide; CTG chr2 60549625 60549646 60549630 60549625 -
ccctccgtctccgggcccccgg

SEQ ID NO: 210771 - DNA, 22 bp, Artificial Sequence
  Synthetic oligonucleotide; CTC chr2 60549620 60549641 60549625 60549620 -
cgtctccgggcccccgggcccc

SEQ ID NO: 210772 - DNA, 22 bp, Artificial Sequence
  Synthetic oligonucleotide; CTC chr2 60549614 60549635 60549619 60549614 -
cgggcccccgggccccaaggcc

SEQ ID NO: 210773 - DNA, 22 bp, Artificial Sequence
  Synthetic oligonucleotide; CTG chr2 60549580 60549601 60549585 60549580 -
ctgcacgtgttcgcagcaagcg

SEQ ID NO: 210774 - DNA, 22 bp, Artificial Sequence
  Synthetic oligonucleotide; CTG chr2 60549577 60549598 60549582 60549577 -
cacgtgttcgcagcaagcgcgg

SEQ ID NO: 210775 - DNA, 22 bp, Artificial Sequence
  Synthetic oligonucleotide; TTC chr2 60549568 60549589 60549573 60549568 -
gcagcaagcgcggcgggagcct

SEQ ID NO: 210776 - DNA, 22 bp, Artificial Sequence
  Synthetic oligonucleotide; CTG chr2 60549545 60549566 60549550 60549545 -
cagccagcacgctgctcgcttt

SEQ ID NO: 210777 - DNA, 22 bp, Artificial Sequence
  Synthetic oligonucleotide; CTG chr2 60549531 60549552 60549536 60549531 -
ctcgctttgtgcctcagagtcc

SEQ ID NO: 210778 - DNA, 22 bp, Artificial Sequence
  Synthetic oligonucleotide; CTC chr2 60549528 60549549 60549533 60549528 -
gctttgtgcctcagagtccccg

SEQ ID NO: 210779 - DNA, 22 bp, Artificial Sequence
  Synthetic oligonucleotide; CTT chr2 60549524 60549545 60549529 60549524 -
tgtgcctcagagtccccgcgcc

SEQ ID NO: 210780 - DNA, 22 bp, Artificial Sequence
  Synthetic oligonucleotide; TTT chr2 60549523 60549544 60549528 60549523 -
gtgcctcagagtccccgcgccc

SEQ ID NO: 210781 - DNA, 22 bp, Artificial Sequence
  Synthetic oligonucleotide; TTG chr2 60549522 60549543 60549527 60549522 -
tgcctcagagtccccgcgccca

SEQ ID NO: 210782 - DNA, 22 bp, Artificial Sequence
  Synthetic oligonucleotide; CTC chr2 60549516 60549537 60549521 60549516 -
agagtccccgcgcccaacttca

SEQ ID NO: 210783 - DNA, 22 bp, Artificial Sequence
  Synthetic oligonucleotide; CTT chr2 60549496 60549517 60549501 60549496 -
cactttctgcacggtccaccct

SEQ ID NO: 210784 - DNA, 22 bp, Artificial Sequence
  Synthetic oligonucleotide; TTC chr2 60549495 60549516 60549500 60549495 -
actttctgcacggtccaccctt

SEQ ID NO: 210785 - DNA, 22 bp, Artificial Sequence
  Synthetic oligonucleotide; CTT chr2 60549491 60549512 60549496 60549491 -
tctgcacggtccacccttgccg

SEQ ID NO: 210786 - DNA, 22 bp, Artificial Sequence
  Synthetic oligonucleotide; TTT chr2 60549490 60549511 60549495 60549490 -
ctgcacggtccacccttgccgg

SEQ ID NO: 210787 - DNA, 22 bp, Artificial Sequence
  Synthetic oligonucleotide; TTC chr2 60549489 60549510 60549494 60549489 -
tgcacggtccacccttgccggg

SEQ ID NO: 210788 - DNA, 22 bp, Artificial Sequence
  Synthetic oligonucleotide; CTG chr2 60549487 60549508 60549492 60549487 -
cacggtccacccttgccggggc

SEQ ID NO: 210789 - DNA, 22 bp, Artificial Sequence
  Synthetic oligonucleotide; CTT chr2 60549473 60549494 60549478 60549473 -
gccggggcccctgccccgggcc

SEQ ID NO: 210790 - DNA, 22 bp, Artificial Sequence
  Synthetic oligonucleotide; TTG chr2 60549472 60549493 60549477 60549472 -
ccggggcccctgccccgggcct

SEQ ID NO: 210791 - DNA, 22 bp, Artificial Sequence
  Synthetic oligonucleotide; CTG chr2 60549460 60549481 60549465 60549460 -
ccccgggcctgtagcccccggc

SEQ ID NO: 210792 - DNA, 22 bp, Artificial Sequence
  Synthetic oligonucleotide; CTG chr2 60549449 60549470 60549454 60549449 -
tagcccccggctttgcttttgt

SEQ ID NO: 210793 - DNA, 22 bp, Artificial Sequence
  Synthetic oligonucleotide; CTT chr2 60549436 60549457 60549441 60549436 -
tgcttttgtttctttgcttttc

SEQ ID NO: 210794 - DNA, 22 bp, Artificial Sequence
  Synthetic oligonucleotide; TTT chr2 60549435 60549456 60549440 60549435 -
gcttttgtttctttgcttttcc

SEQ ID NO: 210795 - DNA, 22 bp, Artificial Sequence
  Synthetic oligonucleotide; TTG chr2 60549434 60549455 60549439 60549434 -
cttttgtttctttgcttttcct

SEQ ID NO: 210796 - DNA, 22 bp, Artificial Sequence
  Synthetic oligonucleotide; CTT chr2 60549431 60549452 60549436 60549431 -
ttgtttctttgcttttcctctc

SEQ ID NO: 210797 - DNA, 22 bp, Artificial Sequence
  Synthetic oligonucleotide; TTT chr2 60549430 60549451 60549435 60549430 -
tgtttctttgcttttcctctct

SEQ ID NO: 210798 - DNA, 22 bp, Artificial Sequence
  Synthetic oligonucleotide; TTT chr2 60549429 60549450 60549434 60549429 -
gtttctttgcttttcctctctg

SEQ ID NO: 210799 - DNA, 22 bp, Artificial Sequence
  Synthetic oligonucleotide; TTG chr2 60549428 60549449 60549433 60549428 -
tttctttgcttttcctctctga

SEQ ID NO: 210800 - DNA, 22 bp, Artificial Sequence
  Synthetic oligonucleotide; TTT chr2 60549425 60549446 60549430 60549425 -
ctttgcttttcctctctgaatt

SEQ ID NO: 210801 - DNA, 22 bp, Artificial Sequence
  Synthetic oligonucleotide; TTC chr2 60549424 60549445 60549429 60549424 -
tttgcttttcctctctgaattt

SEQ ID NO: 210802 - DNA, 22 bp, Artificial Sequence
  Synthetic oligonucleotide; CTT chr2 60549422 60549443 60549427 60549422 -
tgcttttcctctctgaatttca

SEQ ID NO: 210803 - DNA, 22 bp, Artificial Sequence
  Synthetic oligonucleotide; TTT chr2 60549421 60549442 60549426 60549421 -
gcttttcctctctgaatttcag

SEQ ID NO: 210804 - DNA, 22 bp, Artificial Sequence
  Synthetic oligonucleotide; TTG chr2 60549420 60549441 60549425 60549420 -
cttttcctctctgaatttcagc

SEQ ID NO: 210805 - DNA, 22 bp, Artificial Sequence
  Synthetic oligonucleotide; CTT chr2 60549417 60549438 60549422 60549417 -
ttcctctctgaatttcagcctc

SEQ ID NO: 210806 - DNA, 22 bp, Artificial Sequence
  Synthetic oligonucleotide; TTT chr2 60549416 60549437 60549421 60549416 -
tcctctctgaatttcagcctcc

SEQ ID NO: 210807 - DNA, 22 bp, Artificial Sequence
  Synthetic oligonucleotide; TTT chr2 60549415 60549436 60549420 60549415 -
cctctctgaatttcagcctccg

SEQ ID NO: 210808 - DNA, 22 bp, Artificial Sequence
  Synthetic oligonucleotide; TTC chr2 60549414 60549435 60549419 60549414 -
ctctctgaatttcagcctccgt

SEQ ID NO: 210809 - DNA, 22 bp, Artificial Sequence
  Synthetic oligonucleotide; CTC chr2 60549411 60549432 60549416 60549411 -
tctgaatttcagcctccgtttg

SEQ ID NO: 210810 - DNA, 22 bp, Artificial Sequence
  Synthetic oligonucleotide; CTC chr2 60549409 60549430 60549414 60549409 -
tgaatttcagcctccgtttgct

SEQ ID NO: 210811 - DNA, 22 bp, Artificial Sequence
  Synthetic oligonucleotide; CTG chr2 60549407 60549428 60549412 60549407 -
aatttcagcctccgtttgcttc

SEQ ID NO: 210812 - DNA, 22 bp, Artificial Sequence
  Synthetic oligonucleotide; TTT chr2 60549402 60549423 60549407 60549402 -
cagcctccgtttgcttctttac

SEQ ID NO: 210813 - DNA, 22 bp, Artificial Sequence
  Synthetic oligonucleotide; TTC chr2 60549401 60549422 60549406 60549401 -
agcctccgtttgcttctttacc

SEQ ID NO: 210814 - DNA, 22 bp, Artificial Sequence
  Synthetic oligonucleotide; CTC chr2 60549395 60549416 60549400 60549395 -
cgtttgcttctttaccctgtta

SEQ ID NO: 210815 - DNA, 22 bp, Artificial Sequence
  Synthetic oligonucleotide; TTT chr2 60549390 60549411 60549395 60549390 -
gcttctttaccctgttaagaca

SEQ ID NO: 210816 - DNA, 22 bp, Artificial Sequence
  Synthetic oligonucleotide; TTG chr2 60549389 60549410 60549394 60549389 -
cttctttaccctgttaagacaa

SEQ ID NO: 210817 - DNA, 22 bp, Artificial Sequence
  Synthetic oligonucleotide; CTT chr2 60549386 60549407 60549391 60549386 -
ctttaccctgttaagacaatca

SEQ ID NO: 210818 - DNA, 22 bp, Artificial Sequence
  Synthetic oligonucleotide; TTC chr2 60549385 60549406 60549390 60549385 -
tttaccctgttaagacaatcaa

SEQ ID NO: 210819 - DNA, 22 bp, Artificial Sequence
  Synthetic oligonucleotide; CTT chr2 60549383 60549404 60549388 60549383 -
taccctgttaagacaatcaagg

SEQ ID NO: 210820 - DNA, 22 bp, Artificial Sequence
  Synthetic oligonucleotide; TTT chr2 60549382 60549403 60549387 60549382 -
accctgttaagacaatcaagga

SEQ ID NO: 210821 - DNA, 22 bp, Artificial Sequence
  Synthetic oligonucleotide; TTA chr2 60549381 60549402 60549386 60549381 -
ccctgttaagacaatcaaggag

SEQ ID NO: 210822 - DNA, 22 bp, Artificial Sequence
  Synthetic oligonucleotide; CTG chr2 60549376 60549397 60549381 60549376 -
ttaagacaatcaaggagaagga

SEQ ID NO: 210823 - DNA, 22 bp, Artificial Sequence
  Synthetic oligonucleotide; TTA chr2 60549373 60549394 60549378 60549373 -
agacaatcaaggagaaggactt

SEQ ID NO: 210824 - DNA, 22 bp, Artificial Sequence
  Synthetic oligonucleotide; CTT chr2 60549351 60549372 60549356 60549351 -
ggaaagcaaacttgaagacaca

SEQ ID NO: 210825 - DNA, 22 bp, Artificial Sequence
  Synthetic oligonucleotide; TTG chr2 60549350 60549371 60549355 60549350 -
gaaagcaaacttgaagacacat

SEQ ID NO: 210826 - DNA, 22 bp, Artificial Sequence
  Synthetic oligonucleotide; CTT chr2 60549338 60549359 60549343 60549338 -
gaagacacatctccctttcccc

SEQ ID NO: 210827 - DNA, 22 bp, Artificial Sequence
  Synthetic oligonucleotide; TTG chr2 60549337 60549358 60549342 60549337 -
aagacacatctccctttccccc

SEQ ID NO: 210828 - DNA, 22 bp, Artificial Sequence
  Synthetic oligonucleotide; CTC chr2 60549325 60549346 60549330 60549325 -
cctttccccctccccctccgct

SEQ ID NO: 210829 - DNA, 22 bp, Artificial Sequence
  Synthetic oligonucleotide; CTT chr2 60549321 60549342 60549326 60549321 -
tccccctccccctccgctcccc

SEQ ID NO: 210830 - DNA, 22 bp, Artificial Sequence
  Synthetic oligonucleotide; TTT chr2 60549320 60549341 60549325 60549320 -
ccccctccccctccgctccccg

SEQ ID NO: 210831 - DNA, 22 bp, Artificial Sequence
  Synthetic oligonucleotide; TTC chr2 60549319 60549340 60549324 60549319 -
cccctccccctccgctccccgg

SEQ ID NO: 210832 - DNA, 22 bp, Artificial Sequence
  Synthetic oligonucleotide; CTC chr2 60549313 60549334 60549318 60549313 -
cccctccgctccccggcagctc

SEQ ID NO: 210833 - DNA, 22 bp, Artificial Sequence
  Synthetic oligonucleotide; CTC chr2 60549307 60549328 60549312 60549307 -
cgctccccggcagctctcgttt

SEQ ID NO: 210834 - DNA, 22 bp, Artificial Sequence
  Synthetic oligonucleotide; CTC chr2 60549302 60549323 60549307 60549302 -
cccggcagctctcgttttgctc

SEQ ID NO: 210835 - DNA, 22 bp, Artificial Sequence
  Synthetic oligonucleotide; CTC chr2 60549291 60549312 60549296 60549291 -
tcgttttgctcgctccttacca

SEQ ID NO: 210836 - DNA, 22 bp, Artificial Sequence
  Synthetic oligonucleotide; CTC chr2 60549289 60549310 60549294 60549289 -
gttttgctcgctccttaccaac

SEQ ID NO: 210837 - DNA, 22 bp, Artificial Sequence
  Synthetic oligonucleotide; TTT chr2 60549285 60549306 60549290 60549285 -
tgctcgctccttaccaacattt

SEQ ID NO: 210838 - DNA, 22 bp, Artificial Sequence
  Synthetic oligonucleotide; TTT chr2 60549284 60549305 60549289 60549284 -
gctcgctccttaccaacatttc

SEQ ID NO: 210839 - DNA, 22 bp, Artificial Sequence
  Synthetic oligonucleotide; TTG chr2 60549283 60549304 60549288 60549283 -
ctcgctccttaccaacatttcc

SEQ ID NO: 210840 - DNA, 22 bp, Artificial Sequence
  Synthetic oligonucleotide; CTC chr2 60549280 60549301 60549285 60549280 -
gctccttaccaacatttcctat

SEQ ID NO: 210841 - DNA, 22 bp, Artificial Sequence
  Synthetic oligonucleotide; CTC chr2 60549276 60549297 60549281 60549276 -
cttaccaacatttcctataagg

SEQ ID NO: 210842 - DNA, 22 bp, Artificial Sequence
  Synthetic oligonucleotide; CTT chr2 60549273 60549294 60549278 60549273 -
accaacatttcctataaggatt

SEQ ID NO: 210843 - DNA, 22 bp, Artificial Sequence
  Synthetic oligonucleotide; TTA chr2 60549272 60549293 60549277 60549272 -
ccaacatttcctataaggatta

SEQ ID NO: 210844 - DNA, 22 bp, Artificial Sequence
  Synthetic oligonucleotide; TTT chr2 60549263 60549284 60549268 60549263 -
cctataaggattatttttttcc

SEQ ID NO: 210845 - DNA, 22 bp, Artificial Sequence
  Synthetic oligonucleotide; TTC chr2 60549262 60549283 60549267 60549262 -
ctataaggattatttttttccc

SEQ ID NO: 210846 - DNA, 22 bp, Artificial Sequence
  Synthetic oligonucleotide; CTA chr2 60549259 60549280 60549264 60549259 -
taaggattatttttttccctta

SEQ ID NO: 210847 - DNA, 22 bp, Artificial Sequence
  Synthetic oligonucleotide; TTA chr2 60549250 60549271 60549255 60549250 -
tttttttcccttaaatttattc

SEQ ID NO: 210848 - DNA, 22 bp, Artificial Sequence
  Synthetic oligonucleotide; TTT chr2 60549247 60549268 60549252 60549247 -
ttttcccttaaatttattcttt

SEQ ID NO: 210849 - DNA, 22 bp, Artificial Sequence
  Synthetic oligonucleotide; TTT chr2 60549246 60549267 60549251 60549246 -
tttcccttaaatttattctttt

SEQ ID NO: 210850 - DNA, 22 bp, Artificial Sequence
  Synthetic oligonucleotide; TTT chr2 60549245 60549266 60549250 60549245 -
ttcccttaaatttattcttttg

SEQ ID NO: 210851 - DNA, 22 bp, Artificial Sequence
  Synthetic oligonucleotide; TTT chr2 60549244 60549265 60549249 60549244 -
tcccttaaatttattcttttgc

SEQ ID NO: 210852 - DNA, 22 bp, Artificial Sequence
  Synthetic oligonucleotide; TTT chr2 60549243 60549264 60549248 60549243 -
cccttaaatttattcttttgca

SEQ ID NO: 210853 - DNA, 22 bp, Artificial Sequence
  Synthetic oligonucleotide; TTC chr2 60549242 60549263 60549247 60549242 -
ccttaaatttattcttttgcaa

SEQ ID NO: 210854 - DNA, 22 bp, Artificial Sequence
  Synthetic oligonucleotide; CTT chr2 60549238 60549259 60549243 60549238 -
aaatttattcttttgcaactac

SEQ ID NO: 210855 - DNA, 22 bp, Artificial Sequence
  Synthetic oligonucleotide; TTA chr2 60549237 60549258 60549242 60549237 -
aatttattcttttgcaactaca

SEQ ID NO: 210856 - DNA, 22 bp, Artificial Sequence
  Synthetic oligonucleotide; TTT chr2 60549232 60549253 60549237 60549232 -
attcttttgcaactacacagag

SEQ ID NO: 210857 - DNA, 22 bp, Artificial Sequence
  Synthetic oligonucleotide; TTA chr2 60549231 60549252 60549236 60549231 -
ttcttttgcaactacacagaga

SEQ ID NO: 210858 - DNA, 22 bp, Artificial Sequence
  Synthetic oligonucleotide; TTC chr2 60549228 60549249 60549233 60549228 -
ttttgcaactacacagagagga

SEQ ID NO: 210859 - DNA, 22 bp, Artificial Sequence
  Synthetic oligonucleotide; CTT chr2 60549226 60549247 60549231 60549226 -
ttgcaactacacagagaggaaa

SEQ ID NO: 210860 - DNA, 22 bp, Artificial Sequence
  Synthetic oligonucleotide; TTT chr2 60549225 60549246 60549230 60549225 -
tgcaactacacagagaggaaag

SEQ ID NO: 210861 - DNA, 22 bp, Artificial Sequence
  Synthetic oligonucleotide; TTT chr2 60549224 60549245 60549229 60549224 -
gcaactacacagagaggaaaga

SEQ ID NO: 210862 - DNA, 22 bp, Artificial Sequence
  Synthetic oligonucleotide; TTG chr2 60549223 60549244 60549228 60549223 -
caactacacagagaggaaagag

SEQ ID NO: 210863 - DNA, 22 bp, Artificial Sequence
  Synthetic oligonucleotide; CTA chr2 60549217 60549238 60549222 60549217 -
cacagagaggaaagagatctca

SEQ ID NO: 210864 - DNA, 22 bp, Artificial Sequence
  Synthetic oligonucleotide; CTC chr2 60549196 60549217 60549201 60549196 -
agtctgtcactgagacattgag

SEQ ID NO: 210865 - DNA, 22 bp, Artificial Sequence
  Synthetic oligonucleotide; CTG chr2 60549190 60549211 60549195 60549190 -
tcactgagacattgagacgttc

SEQ ID NO: 210866 - DNA, 22 bp, Artificial Sequence
  Synthetic oligonucleotide; CTG chr2 60549184 60549205 60549189 60549184 -
agacattgagacgttccaggct

SEQ ID NO: 210867 - DNA, 22 bp, Artificial Sequence
  Synthetic oligonucleotide; TTG chr2 60549176 60549197 60549181 60549176 -
agacgttccaggctgtcttgct

SEQ ID NO: 210868 - DNA, 22 bp, Artificial Sequence
  Synthetic oligonucleotide; TTC chr2 60549168 60549189 60549173 60549168 -
caggctgtcttgctgtttgaac

SEQ ID NO: 210869 - DNA, 22 bp, Artificial Sequence
  Synthetic oligonucleotide; CTG chr2 60549161 60549182 60549166 60549161 -
tcttgctgtttgaacgtagaag

SEQ ID NO: 210870 - DNA, 22 bp, Artificial Sequence
  Synthetic oligonucleotide; CTT chr2 60549157 60549178 60549162 60549157 -
gctgtttgaacgtagaagcatt

SEQ ID NO: 210871 - DNA, 22 bp, Artificial Sequence
  Synthetic oligonucleotide; TTG chr2 60549156 60549177 60549161 60549156 -
ctgtttgaacgtagaagcattt

SEQ ID NO: 210872 - DNA, 22 bp, Artificial Sequence
  Synthetic oligonucleotide; CTG chr2 60549153 60549174 60549158 60549153 -
tttgaacgtagaagcattttat

SEQ ID NO: 210873 - DNA, 22 bp, Artificial Sequence
  Synthetic oligonucleotide; TTT chr2 60549150 60549171 60549155 60549150 -
gaacgtagaagcattttatttt

SEQ ID NO: 210874 - DNA, 22 bp, Artificial Sequence
  Synthetic oligonucleotide; TTG chr2 60549149 60549170 60549154 60549149 -
aacgtagaagcattttattttc

SEQ ID NO: 210875 - DNA, 22 bp, Artificial Sequence
  Synthetic oligonucleotide; TTT chr2 60549134 60549155 60549139 60549134 -
tattttctatttcttcctcccc

SEQ ID NO: 210876 - DNA, 22 bp, Artificial Sequence
  Synthetic oligonucleotide; TTT chr2 60549133 60549154 60549138 60549133 -
attttctatttcttcctcccct

SEQ ID NO: 210877 - DNA, 22 bp, Artificial Sequence
  Synthetic oligonucleotide; TTA chr2 60549132 60549153 60549137 60549132 -
ttttctatttcttcctcccctc

SEQ ID NO: 210878 - DNA, 22 bp, Artificial Sequence
  Synthetic oligonucleotide; TTT chr2 60549129 60549150 60549134 60549129 -
tctatttcttcctcccctcgta

SEQ ID NO: 210879 - DNA, 22 bp, Artificial Sequence
  Synthetic oligonucleotide; TTT chr2 60549128 60549149 60549133 60549128 -
ctatttcttcctcccctcgtag

SEQ ID NO: 210880 - DNA, 22 bp, Artificial Sequence
  Synthetic oligonucleotide; TTC chr2 60549127 60549148 60549132 60549127 -
tatttcttcctcccctcgtaga

SEQ ID NO: 210881 - DNA, 22 bp, Artificial Sequence
  Synthetic oligonucleotide; CTA chr2 60549125 60549146 60549130 60549125 -
tttcttcctcccctcgtagaga

SEQ ID NO: 210882 - DNA, 22 bp, Artificial Sequence
  Synthetic oligonucleotide; TTT chr2 60549122 60549143 60549127 60549122 -
cttcctcccctcgtagagagaa

SEQ ID NO: 210883 - DNA, 22 bp, Artificial Sequence
  Synthetic oligonucleotide; TTC chr2 60549121 60549142 60549126 60549121 -
ttcctcccctcgtagagagaat

SEQ ID NO: 210884 - DNA, 22 bp, Artificial Sequence
  Synthetic oligonucleotide; CTT chr2 60549119 60549140 60549124 60549119 -
cctcccctcgtagagagaattc

SEQ ID NO: 210885 - DNA, 22 bp, Artificial Sequence
  Synthetic oligonucleotide; TTC chr2 60549118 60549139 60549123 60549118 -
ctcccctcgtagagagaattcg

SEQ ID NO: 210886 - DNA, 22 bp, Artificial Sequence
  Synthetic oligonucleotide; CTC chr2 60549115 60549136 60549120 60549115 -
ccctcgtagagagaattcgcgg

SEQ ID NO: 210887 - DNA, 22 bp, Artificial Sequence
  Synthetic oligonucleotide; CTC chr2 60549110 60549131 60549115 60549110 -
gtagagagaattcgcggctaat

SEQ ID NO: 210888 - DNA, 22 bp, Artificial Sequence
  Synthetic oligonucleotide; TTC chr2 60549097 60549118 60549102 60549097 -
gcggctaattattatgattatt

SEQ ID NO: 210889 - DNA, 22 bp, Artificial Sequence
  Synthetic oligonucleotide; CTA chr2 60549090 60549111 60549095 60549090 -
attattatgattatttgcccac

SEQ ID NO: 210890 - DNA, 22 bp, Artificial Sequence
  Synthetic oligonucleotide; TTA chr2 60549086 60549107 60549091 60549086 -
ttatgattatttgcccactccc

SEQ ID NO: 210891 - DNA, 22 bp, Artificial Sequence
  Synthetic oligonucleotide; TTA chr2 60549083 60549104 60549088 60549083 -
tgattatttgcccactcccttc

SEQ ID NO: 210892 - DNA, 22 bp, Artificial Sequence
  Synthetic oligonucleotide; TTA chr2 60549077 60549098 60549082 60549077 -
tttgcccactcccttccacttc

SEQ ID NO: 210893 - DNA, 22 bp, Artificial Sequence
  Synthetic oligonucleotide; TTT chr2 60549074 60549095 60549079 60549074 -
gcccactcccttccacttcaat

SEQ ID NO: 210894 - DNA, 22 bp, Artificial Sequence
  Synthetic oligonucleotide; TTG chr2 60549073 60549094 60549078 60549073 -
cccactcccttccacttcaatc

SEQ ID NO: 210895 - DNA, 22 bp, Artificial Sequence
  Synthetic oligonucleotide; CTC chr2 60549066 60549087 60549071 60549066 -
ccttccacttcaatcgaggact

SEQ ID NO: 210896 - DNA, 22 bp, Artificial Sequence
  Synthetic oligonucleotide; CTT chr2 60549062 60549083 60549067 60549062 -
ccacttcaatcgaggactccct

SEQ ID NO: 210897 - DNA, 22 bp, Artificial Sequence
  Synthetic oligonucleotide; TTC chr2 60549061 60549082 60549066 60549061 -
cacttcaatcgaggactccctg

SEQ ID NO: 210898 - DNA, 22 bp, Artificial Sequence
  Synthetic oligonucleotide; CTT chr2 60549056 60549077 60549061 60549056 -
caatcgaggactccctgctttg

SEQ ID NO: 210899 - DNA, 22 bp, Artificial Sequence
  Synthetic oligonucleotide; TTC chr2 60549055 60549076 60549060 60549055 -
aatcgaggactccctgctttgt

SEQ ID NO: 210900 - DNA, 22 bp, Artificial Sequence
  Synthetic oligonucleotide; CTC chr2 60549043 60549064 60549048 60549043 -
cctgctttgtagccggagttta

SEQ ID NO: 210901 - DNA, 22 bp, Artificial Sequence
  Synthetic oligonucleotide; CTG chr2 60549039 60549060 60549044 60549039 -
ctttgtagccggagtttaggcc

SEQ ID NO: 210902 - DNA, 22 bp, Artificial Sequence
  Synthetic oligonucleotide; CTT chr2 60549036 60549057 60549041 60549036 -
tgtagccggagtttaggccgga

SEQ ID NO: 210903 - DNA, 22 bp, Artificial Sequence
  Synthetic oligonucleotide; TTT chr2 60549035 60549056 60549040 60549035 -
gtagccggagtttaggccggag

SEQ ID NO: 210904 - DNA, 22 bp, Artificial Sequence
  Synthetic oligonucleotide; TTG chr2 60549034 60549055 60549039 60549034 -
tagccggagtttaggccggagc

SEQ ID NO: 210905 - DNA, 22 bp, Artificial Sequence
  Synthetic oligonucleotide; TTT chr2 60549022 60549043 60549027 60549022 -
aggccggagcttagaaatgttg

SEQ ID NO: 210906 - DNA, 22 bp, Artificial Sequence
  Synthetic oligonucleotide; TTA chr2 60549021 60549042 60549026 60549021 -
ggccggagcttagaaatgttgg

SEQ ID NO: 210907 - DNA, 22 bp, Artificial Sequence
  Synthetic oligonucleotide; CTT chr2 60549010 60549031 60549015 60549010 -
agaaatgttggtattgttgggg

SEQ ID NO: 210908 - DNA, 22 bp, Artificial Sequence
  Synthetic oligonucleotide; TTA chr2 60549009 60549030 60549014 60549009 -
gaaatgttggtattgttggggc

SEQ ID NO: 210909 - DNA, 22 bp, Artificial Sequence
  Synthetic oligonucleotide; TTG chr2 60549000 60549021 60549005 60549000 -
gtattgttggggcgaaggagga

SEQ ID NO: 210910 - DNA, 22 bp, Artificial Sequence
  Synthetic oligonucleotide; TTG chr2 60548994 60549015 60548999 60548994 -
ttggggcgaaggaggatggagt

SEQ ID NO: 210911 - DNA, 22 bp, Artificial Sequence
  Synthetic oligonucleotide; TTG chr2 60548991 60549012 60548996 60548991 -
gggcgaaggaggatggagttga

SEQ ID NO: 210912 - DNA, 22 bp, Artificial Sequence
  Synthetic oligonucleotide; TTG chr2 60548970 60548991 60548975 60548970 -
aattgagggagggggtaaatgg

SEQ ID NO: 210913 - DNA, 22 bp, Artificial Sequence
  Synthetic oligonucleotide; TTG chr2 60548965 60548986 60548970 60548965 -
agggagggggtaaatggctgag

SEQ ID NO: 210914 - DNA, 22 bp, Artificial Sequence
  Synthetic oligonucleotide; CTG chr2 60548945 60548966 60548950 60548945 -
agggttaggaaggtttttaggg

SEQ ID NO: 210915 - DNA, 22 bp, Artificial Sequence
  Synthetic oligonucleotide; TTA chr2 60548938 60548959 60548943 60548938 -
ggaaggtttttagggaaagggg

SEQ ID NO: 210916 - DNA, 22 bp, Artificial Sequence
  Synthetic oligonucleotide; TTT chr2 60548929 60548950 60548934 60548929 -
ttagggaaaggggaatttgcat

SEQ ID NO: 210917 - DNA, 22 bp, Artificial Sequence
  Synthetic oligonucleotide; TTT chr2 60548928 60548949 60548933 60548928 -
tagggaaaggggaatttgcatt

SEQ ID NO: 210918 - DNA, 22 bp, Artificial Sequence
  Synthetic oligonucleotide; TTT chr2 60548927 60548948 60548932 60548927 -
agggaaaggggaatttgcatta

SEQ ID NO: 210919 - DNA, 22 bp, Artificial Sequence
  Synthetic oligonucleotide; TTA chr2 60548926 60548947 60548931 60548926 -
gggaaaggggaatttgcattaa

SEQ ID NO: 210920 - DNA, 22 bp, Artificial Sequence
  Synthetic oligonucleotide; TTT chr2 60548911 60548932 60548916 60548911 -
gcattaaaatgcagagaaatta

SEQ ID NO: 210921 - DNA, 22 bp, Artificial Sequence
  Synthetic oligonucleotide; TTG chr2 60548910 60548931 60548915 60548910 -
cattaaaatgcagagaaattat

SEQ ID NO: 210922 - DNA, 22 bp, Artificial Sequence
  Synthetic oligonucleotide; TTA chr2 60548905 60548926 60548910 60548905 -
aaatgcagagaaattatcagat

SEQ ID NO: 210923 - DNA, 22 bp, Artificial Sequence
  Synthetic oligonucleotide; TTA chr2 60548889 60548910 60548894 60548889 -
tcagatgcccagaaaggaaatg

SEQ ID NO: 210924 - DNA, 22 bp, Artificial Sequence
  Synthetic oligonucleotide; TTG chr2 60548864 60548885 60548869 60548864 -
attgccactgagaaaagatgtc

SEQ ID NO: 210925 - DNA, 22 bp, Artificial Sequence
  Synthetic oligonucleotide; TTG chr2 60548860 60548881 60548865 60548860 -
ccactgagaaaagatgtcaatg

SEQ ID NO: 210926 - DNA, 22 bp, Artificial Sequence
  Synthetic oligonucleotide; CTG chr2 60548854 60548875 60548859 60548854 -
agaaaagatgtcaatgcaaatc

SEQ ID NO: 210927 - DNA, 22 bp, Artificial Sequence
  Synthetic oligonucleotide; CTA chr2 60548823 60548844 60548828 60548823 -
caccatgagaattgtattttca

SEQ ID NO: 210928 - DNA, 22 bp, Artificial Sequence
  Synthetic oligonucleotide; TTG chr2 60548809 60548830 60548814 60548809 -
tattttcatattttctttgtgt

SEQ ID NO: 210929 - DNA, 22 bp, Artificial Sequence
  Synthetic oligonucleotide; TTT chr2 60548804 60548825 60548809 60548804 -
tcatattttctttgtgtcccac

SEQ ID NO: 210930 - DNA, 22 bp, Artificial Sequence
  Synthetic oligonucleotide; TTT chr2 60548803 60548824 60548808 60548803 -
catattttctttgtgtcccact

SEQ ID NO: 210931 - DNA, 22 bp, Artificial Sequence
  Synthetic oligonucleotide; TTC chr2 60548802 60548823 60548807 60548802 -
atattttctttgtgtcccactt

SEQ ID NO: 210932 - DNA, 22 bp, Artificial Sequence
  Synthetic oligonucleotide; TTT chr2 60548796 60548817 60548801 60548796 -
tctttgtgtcccactttgtctg

SEQ ID NO: 210933 - DNA, 22 bp, Artificial Sequence
  Synthetic oligonucleotide; TTT chr2 60548795 60548816 60548800 60548795 -
ctttgtgtcccactttgtctga

SEQ ID NO: 210934 - DNA, 22 bp, Artificial Sequence
  Synthetic oligonucleotide; TTC chr2 60548794 60548815 60548799 60548794 -
tttgtgtcccactttgtctgat

SEQ ID NO: 210935 - DNA, 22 bp, Artificial Sequence
  Synthetic oligonucleotide; CTT chr2 60548792 60548813 60548797 60548792 -
tgtgtcccactttgtctgattt

SEQ ID NO: 210936 - DNA, 22 bp, Artificial Sequence
  Synthetic oligonucleotide; TTT chr2 60548791 60548812 60548796 60548791 -
gtgtcccactttgtctgatttt

SEQ ID NO: 210937 - DNA, 22 bp, Artificial Sequence
  Synthetic oligonucleotide; TTG chr2 60548790 60548811 60548795 60548790 -
tgtcccactttgtctgattttt

SEQ ID NO: 210938 - DNA, 22 bp, Artificial Sequence
  Synthetic oligonucleotide; CTT chr2 60548780 60548801 60548785 60548780 -
tgtctgatttttaataatatac

SEQ ID NO: 210939 - DNA, 22 bp, Artificial Sequence
  Synthetic oligonucleotide; TTT chr2 60548779 60548800 60548784 60548779 -
gtctgatttttaataatatacc

SEQ ID NO: 210940 - DNA, 22 bp, Artificial Sequence
  Synthetic oligonucleotide; TTG chr2 60548778 60548799 60548783 60548778 -
tctgatttttaataatatacca

SEQ ID NO: 210941 - DNA, 22 bp, Artificial Sequence
  Synthetic oligonucleotide; CTG chr2 60548774 60548795 60548779 60548774 -
atttttaataatataccagcaa

SEQ ID NO: 210942 - DNA, 22 bp, Artificial Sequence
  Synthetic oligonucleotide; TTT chr2 60548770 60548791 60548775 60548770 -
ttaataatataccagcaatgat

SEQ ID NO: 210943 - DNA, 22 bp, Artificial Sequence
  Synthetic oligonucleotide; TTT chr2 60548769 60548790 60548774 60548769 -
taataatataccagcaatgata

SEQ ID NO: 210944 - DNA, 22 bp, Artificial Sequence
  Synthetic oligonucleotide; TTT chr2 60548768 60548789 60548773 60548768 -
aataatataccagcaatgataa

SEQ ID NO: 210945 - DNA, 22 bp, Artificial Sequence
  Synthetic oligonucleotide; TTA chr2 60548767 60548788 60548772 60548767 -
ataatataccagcaatgataaa

SEQ ID NO: 210946 - DNA, 22 bp, Artificial Sequence
  Synthetic oligonucleotide; TTT chr2 60548736 60548757 60548741 60548736 -
tggtatttctctgaacaccact

SEQ ID NO: 210947 - DNA, 22 bp, Artificial Sequence
  Synthetic oligonucleotide; TTT chr2 60548735 60548756 60548740 60548735 -
ggtatttctctgaacaccacta

SEQ ID NO: 210948 - DNA, 22 bp, Artificial Sequence
  Synthetic oligonucleotide; TTG chr2 60548734 60548755 60548739 60548734 -
gtatttctctgaacaccactag

SEQ ID NO: 210949 - DNA, 22 bp, Artificial Sequence
  Synthetic oligonucleotide; TTT chr2 60548728 60548749 60548733 60548728 -
ctctgaacaccactagccaaat

SEQ ID NO: 210950 - DNA, 22 bp, Artificial Sequence
  Synthetic oligonucleotide; TTC chr2 60548727 60548748 60548732 60548727 -
tctgaacaccactagccaaatg

SEQ ID NO: 210951 - DNA, 22 bp, Artificial Sequence
  Synthetic oligonucleotide; CTC chr2 60548725 60548746 60548730 60548725 -
tgaacaccactagccaaatgtt

SEQ ID NO: 210952 - DNA, 22 bp, Artificial Sequence
  Synthetic oligonucleotide; CTG chr2 60548723 60548744 60548728 60548723 -
aacaccactagccaaatgtttt

SEQ ID NO: 210953 - DNA, 22 bp, Artificial Sequence
  Synthetic oligonucleotide; CTA chr2 60548713 60548734 60548718 60548713 -
gccaaatgttttgcaaggagac

SEQ ID NO: 210954 - DNA, 22 bp, Artificial Sequence
  Synthetic oligonucleotide; TTT chr2 60548702 60548723 60548707 60548702 -
tgcaaggagaccgatgttaaac

SEQ ID NO: 210955 - DNA, 22 bp, Artificial Sequence
  Synthetic oligonucleotide; TTT chr2 60548701 60548722 60548706 60548701 -
gcaaggagaccgatgttaaacg

SEQ ID NO: 210956 - DNA, 22 bp, Artificial Sequence
  Synthetic oligonucleotide; TTG chr2 60548700 60548721 60548705 60548700 -
caaggagaccgatgttaaacgt

SEQ ID NO: 210957 - DNA, 22 bp, Artificial Sequence
  Synthetic oligonucleotide; TTA chr2 60548683 60548704 60548688 60548683 -
aacgtatttcatacattagaat

SEQ ID NO: 210958 - DNA, 22 bp, Artificial Sequence
  Synthetic oligonucleotide; TTT chr2 60548674 60548695 60548679 60548674 -
catacattagaatataattctt

SEQ ID NO: 210959 - DNA, 22 bp, Artificial Sequence
  Synthetic oligonucleotide; TTC chr2 60548673 60548694 60548678 60548673 -
atacattagaatataattcttg

SEQ ID NO: 210960 - DNA, 22 bp, Artificial Sequence
  Synthetic oligonucleotide; TTA chr2 60548665 60548686 60548670 60548665 -
gaatataattcttgttaattag

SEQ ID NO: 210961 - DNA, 22 bp, Artificial Sequence
  Synthetic oligonucleotide; TTC chr2 60548654 60548675 60548659 60548654 -
ttgttaattagcaataatttac

SEQ ID NO: 210962 - DNA, 22 bp, Artificial Sequence
  Synthetic oligonucleotide; CTT chr2 60548652 60548673 60548657 60548652 -
gttaattagcaataatttacgt

SEQ ID NO: 210963 - DNA, 22 bp, Artificial Sequence
  Synthetic oligonucleotide; TTG chr2 60548651 60548672 60548656 60548651 -
ttaattagcaataatttacgtt

SEQ ID NO: 210964 - DNA, 22 bp, Artificial Sequence
  Synthetic oligonucleotide; TTA chr2 60548648 60548669 60548653 60548648 -
attagcaataatttacgttaag

SEQ ID NO: 210965 - DNA, 22 bp, Artificial Sequence
  Synthetic oligonucleotide; TTA chr2 60548644 60548665 60548649 60548644 -
gcaataatttacgttaagagca

SEQ ID NO: 210966 - DNA, 22 bp, Artificial Sequence
  Synthetic oligonucleotide; TTT chr2 60548634 60548655 60548639 60548634 -
acgttaagagcatagaaaatgt

SEQ ID NO: 210967 - DNA, 22 bp, Artificial Sequence
  Synthetic oligonucleotide; TTA chr2 60548633 60548654 60548638 60548633 -
cgttaagagcatagaaaatgtt

SEQ ID NO: 210968 - DNA, 22 bp, Artificial Sequence
  Synthetic oligonucleotide; TTA chr2 60548628 60548649 60548633 60548628 -
agagcatagaaaatgttgaggt

SEQ ID NO: 210969 - DNA, 22 bp, Artificial Sequence
  Synthetic oligonucleotide; TTG chr2 60548610 60548631 60548615 60548610 -
aggttacaggttttatatctgt

SEQ ID NO: 210970 - DNA, 22 bp, Artificial Sequence
  Synthetic oligonucleotide; TTA chr2 60548604 60548625 60548609 60548604 -
caggttttatatctgtacattt

SEQ ID NO: 210971 - DNA, 22 bp, Artificial Sequence
  Synthetic oligonucleotide; TTT chr2 60548597 60548618 60548602 60548597 -
tatatctgtacatttgatcatc

SEQ ID NO: 210972 - DNA, 22 bp, Artificial Sequence
  Synthetic oligonucleotide; TTT chr2 60548596 60548617 60548601 60548596 -
atatctgtacatttgatcatct

SEQ ID NO: 210973 - DNA, 22 bp, Artificial Sequence
  Synthetic oligonucleotide; TTA chr2 60548595 60548616 60548600 60548595 -
tatctgtacatttgatcatctt

SEQ ID NO: 210974 - DNA, 22 bp, Artificial Sequence
  Synthetic oligonucleotide; CTG chr2 60548589 60548610 60548594 60548589 -
tacatttgatcatcttgttatt

SEQ ID NO: 210975 - DNA, 22 bp, Artificial Sequence
  Synthetic oligonucleotide; TTT chr2 60548582 60548603 60548587 60548582 -
gatcatcttgttattttcaaga

SEQ ID NO: 210976 - DNA, 22 bp, Artificial Sequence
  Synthetic oligonucleotide; TTG chr2 60548581 60548602 60548586 60548581 -
atcatcttgttattttcaagaa

SEQ ID NO: 210977 - DNA, 22 bp, Artificial Sequence
  Synthetic oligonucleotide; CTT chr2 60548573 60548594 60548578 60548573 -
gttattttcaagaactttgcct

SEQ ID NO: 210978 - DNA, 22 bp, Artificial Sequence
  Synthetic oligonucleotide; TTG chr2 60548572 60548593 60548577 60548572 -
ttattttcaagaactttgcctc

SEQ ID NO: 210979 - DNA, 22 bp, Artificial Sequence
  Synthetic oligonucleotide; TTA chr2 60548569 60548590 60548574 60548569 -
ttttcaagaactttgcctccta

SEQ ID NO: 210980 - DNA, 22 bp, Artificial Sequence
  Synthetic oligonucleotide; TTT chr2 60548566 60548587 60548571 60548566 -
tcaagaactttgcctcctataa

SEQ ID NO: 210981 - DNA, 22 bp, Artificial Sequence
  Synthetic oligonucleotide; TTT chr2 60548565 60548586 60548570 60548565 -
caagaactttgcctcctataaa

SEQ ID NO: 210982 - DNA, 22 bp, Artificial Sequence
  Synthetic oligonucleotide; TTC chr2 60548564 60548585 60548569 60548564 -
aagaactttgcctcctataaaa

SEQ ID NO: 210983 - DNA, 22 bp, Artificial Sequence
  Synthetic oligonucleotide; CTT chr2 60548556 60548577 60548561 60548556 -
tgcctcctataaaattaattag

SEQ ID NO: 210984 - DNA, 22 bp, Artificial Sequence
  Synthetic oligonucleotide; TTT chr2 60548555 60548576 60548560 60548555 -
gcctcctataaaattaattagg

SEQ ID NO: 210985 - DNA, 22 bp, Artificial Sequence
  Synthetic oligonucleotide; TTG chr2 60548554 60548575 60548559 60548554 -
cctcctataaaattaattaggt

SEQ ID NO: 210986 - DNA, 22 bp, Artificial Sequence
  Synthetic oligonucleotide; CTC chr2 60548550 60548571 60548555 60548550 -
ctataaaattaattaggtgaaa

SEQ ID NO: 210987 - DNA, 22 bp, Artificial Sequence
  Synthetic oligonucleotide; CTA chr2 60548547 60548568 60548552 60548547 -
taaaattaattaggtgaaatgt

SEQ ID NO: 210988 - DNA, 22 bp, Artificial Sequence
  Synthetic oligonucleotide; TTA chr2 60548539 60548560 60548544 60548539 -
attaggtgaaatgtggaggtgt

SEQ ID NO: 210989 - DNA, 22 bp, Artificial Sequence
  Synthetic oligonucleotide; TTA chr2 60548535 60548556 60548540 60548535 -
ggtgaaatgtggaggtgtaatc

SEQ ID NO: 210990 - DNA, 22 bp, Artificial Sequence
  Synthetic oligonucleotide; CTC chr2 60548504 60548525 60548509 60548504 -
tgaattaccacttcatttcccg

SEQ ID NO: 210991 - DNA, 22 bp, Artificial Sequence
  Synthetic oligonucleotide; CTG chr2 60548502 60548523 60548507 60548502 -
aattaccacttcatttcccggt

SEQ ID NO: 210992 - DNA, 22 bp, Artificial Sequence
  Synthetic oligonucleotide; TTA chr2 60548497 60548518 60548502 60548497 -
ccacttcatttcccggttttga

SEQ ID NO: 210993 - DNA, 22 bp, Artificial Sequence
  Synthetic oligonucleotide; CTT chr2 60548491 60548512 60548496 60548491 -
catttcccggttttgattgtaa

SEQ ID NO: 210994 - DNA, 22 bp, Artificial Sequence
  Synthetic oligonucleotide; TTC chr2 60548490 60548511 60548495 60548490 -
atttcccggttttgattgtaaa

SEQ ID NO: 210995 - DNA, 22 bp, Artificial Sequence
  Synthetic oligonucleotide; TTT chr2 60548486 60548507 60548491 60548486 -
cccggttttgattgtaaatcag

SEQ ID NO: 210996 - DNA, 22 bp, Artificial Sequence
  Synthetic oligonucleotide; TTC chr2 60548485 60548506 60548490 60548485 -
ccggttttgattgtaaatcagt

SEQ ID NO: 210997 - DNA, 22 bp, Artificial Sequence
  Synthetic oligonucleotide; TTT chr2 60548478 60548499 60548483 60548478 -
tgattgtaaatcagttcagtca

SEQ ID NO: 210998 - DNA, 22 bp, Artificial Sequence
  Synthetic oligonucleotide; TTT chr2 60548477 60548498 60548482 60548477 -
gattgtaaatcagttcagtcac

SEQ ID NO: 210999 - DNA, 22 bp, Artificial Sequence
  Synthetic oligonucleotide; TTG chr2 60548476 60548497 60548481 60548476 -
attgtaaatcagttcagtcact

SEQ ID NO: 211000 - DNA, 22 bp, Artificial Sequence
  Synthetic oligonucleotide; TTG chr2 60548472 60548493 60548477 60548472 -
taaatcagttcagtcactacat

SEQ ID NO: 211001 - DNA, 22 bp, Artificial Sequence
  Synthetic oligonucleotide; TTC chr2 60548461 60548482 60548466 60548461 -
agtcactacatttagaagactt

SEQ ID NO: 211002 - DNA, 22 bp, Artificial Sequence
  Synthetic oligonucleotide; CTA chr2 60548453 60548474 60548458 60548453 -
catttagaagactttaaccaag

SEQ ID NO: 211003 - DNA, 22 bp, Artificial Sequence
  Synthetic oligonucleotide; TTT chr2 60548448 60548469 60548453 60548448 -
agaagactttaaccaagtctgt

SEQ ID NO: 211004 - DNA, 22 bp, Artificial Sequence
  Synthetic oligonucleotide; TTA chr2 60548447 60548468 60548452 60548447 -
gaagactttaaccaagtctgtt

SEQ ID NO: 211005 - DNA, 22 bp, Artificial Sequence
  Synthetic oligonucleotide; CTT chr2 60548439 60548460 60548444 60548439 -
taaccaagtctgttttgaacca

SEQ ID NO: 211006 - DNA, 22 bp, Artificial Sequence
  Synthetic oligonucleotide; TTT chr2 60548438 60548459 60548443 60548438 -
aaccaagtctgttttgaaccac

SEQ ID NO: 211007 - DNA, 22 bp, Artificial Sequence
  Synthetic oligonucleotide; TTA chr2 60548437 60548458 60548442 60548437 -
accaagtctgttttgaaccaca

SEQ ID NO: 211008 - DNA, 22 bp, Artificial Sequence
  Synthetic oligonucleotide; CTG chr2 60548427 60548448 60548432 60548427 -
ttttgaaccacattacctttaa

SEQ ID NO: 211009 - DNA, 22 bp, Artificial Sequence
  Synthetic oligonucleotide; TTT chr2 60548424 60548445 60548429 60548424 -
tgaaccacattacctttaacta

SEQ ID NO: 211010 - DNA, 22 bp, Artificial Sequence
  Synthetic oligonucleotide; TTT chr2 60548423 60548444 60548428 60548423 -
gaaccacattacctttaactat

SEQ ID NO: 211011 - DNA, 22 bp, Artificial Sequence
  Synthetic oligonucleotide; TTG chr2 60548422 60548443 60548427 60548422 -
aaccacattacctttaactatt

SEQ ID NO: 211012 - DNA, 22 bp, Artificial Sequence
  Synthetic oligonucleotide; TTA chr2 60548412 60548433 60548417 60548412 -
cctttaactatttgatacctag

SEQ ID NO: 211013 - DNA, 22 bp, Artificial Sequence
  Synthetic oligonucleotide; CTT chr2 60548408 60548429 60548413 60548408 -
taactatttgatacctaggaga

SEQ ID NO: 211014 - DNA, 22 bp, Artificial Sequence
  Synthetic oligonucleotide; TTT chr2 60548407 60548428 60548412 60548407 -
aactatttgatacctaggagaa

SEQ ID NO: 211015 - DNA, 22 bp, Artificial Sequence
  Synthetic oligonucleotide; TTA chr2 60548406 60548427 60548411 60548406 -
actatttgatacctaggagaat

SEQ ID NO: 211016 - DNA, 22 bp, Artificial Sequence
  Synthetic oligonucleotide; CTA chr2 60548402 60548423 60548407 60548402 -
tttgatacctaggagaatattt

SEQ ID NO: 211017 - DNA, 22 bp, Artificial Sequence
  Synthetic oligonucleotide; TTT chr2 60548399 60548420 60548404 60548399 -
gatacctaggagaatatttcct

SEQ ID NO: 211018 - DNA, 22 bp, Artificial Sequence
  Synthetic oligonucleotide; TTG chr2 60548398 60548419 60548403 60548398 -
atacctaggagaatatttcctt

SEQ ID NO: 211019 - DNA, 22 bp, Artificial Sequence
  Synthetic oligonucleotide; CTA chr2 60548391 60548412 60548396 60548391 -
ggagaatatttccttttgcacc

SEQ ID NO: 211020 - DNA, 22 bp, Artificial Sequence
  Synthetic oligonucleotide; TTT chr2 60548380 60548401 60548385 60548380 -
ccttttgcacctaaataatatt

SEQ ID NO: 211021 - DNA, 22 bp, Artificial Sequence
  Synthetic oligonucleotide; TTC chr2 60548379 60548400 60548384 60548379 -
cttttgcacctaaataatattc

SEQ ID NO: 211022 - DNA, 22 bp, Artificial Sequence
  Synthetic oligonucleotide; CTT chr2 60548376 60548397 60548381 60548376 -
ttgcacctaaataatattccca

SEQ ID NO: 211023 - DNA, 22 bp, Artificial Sequence
  Synthetic oligonucleotide; TTT chr2 60548375 60548396 60548380 60548375 -
tgcacctaaataatattcccac

SEQ ID NO: 211024 - DNA, 22 bp, Artificial Sequence
  Synthetic oligonucleotide; TTT chr2 60548374 60548395 60548379 60548374 -
gcacctaaataatattcccact

SEQ ID NO: 211025 - DNA, 22 bp, Artificial Sequence
  Synthetic oligonucleotide; TTG chr2 60548373 60548394 60548378 60548373 -
cacctaaataatattcccactt

SEQ ID NO: 211026 - DNA, 22 bp, Artificial Sequence
  Synthetic oligonucleotide; CTA chr2 60548367 60548388 60548372 60548367 -
aataatattcccacttttagaa

SEQ ID NO: 211027 - DNA, 22 bp, Artificial Sequence
  Synthetic oligonucleotide; TTC chr2 60548357 60548378 60548362 60548357 -
ccacttttagaaatgtgtcaga

SEQ ID NO: 211028 - DNA, 22 bp, Artificial Sequence
  Synthetic oligonucleotide; CTT chr2 60548351 60548372 60548356 60548351 -
ttagaaatgtgtcagaccttgg

SEQ ID NO: 211029 - DNA, 22 bp, Artificial Sequence
  Synthetic oligonucleotide; TTT chr2 60548350 60548371 60548355 60548350 -
tagaaatgtgtcagaccttggg

SEQ ID NO: 211030 - DNA, 22 bp, Artificial Sequence
  Synthetic oligonucleotide; TTT chr2 60548349 60548370 60548354 60548349 -
agaaatgtgtcagaccttggga

SEQ ID NO: 211031 - DNA, 22 bp, Artificial Sequence
  Synthetic oligonucleotide; TTA chr2 60548348 60548369 60548353 60548348 -
gaaatgtgtcagaccttgggaa

SEQ ID NO: 211032 - DNA, 22 bp, Artificial Sequence
  Synthetic oligonucleotide; CTT chr2 60548331 60548352 60548336 60548331 -
gggaacaaaaaaaaaaaaaaaa

SEQ ID NO: 211033 - DNA, 22 bp, Artificial Sequence
  Synthetic oligonucleotide; TTG chr2 60548330 60548351 60548335 60548330 -
ggaacaaaaaaaaaaaaaaaag

SEQ ID NO: 211034 - DNA, 22 bp, Artificial Sequence
  Synthetic oligonucleotide; CTT chr2 60548302 60548323 60548307 60548302 -
aacggtggaaataaaaaatttt

SEQ ID NO: 211035 - DNA, 22 bp, Artificial Sequence
  Synthetic oligonucleotide; TTA chr2 60548301 60548322 60548306 60548301 -
acggtggaaataaaaaattttt

SEQ ID NO: 211036 - DNA, 22 bp, Artificial Sequence
  Synthetic oligonucleotide; TTT chr2 60548281 60548302 60548286 60548281 -
ttttttttgcaaaggttctatg

SEQ ID NO: 211037 - DNA, 22 bp, Artificial Sequence
  Synthetic oligonucleotide; TTT chr2 60548280 60548301 60548285 60548280 -
tttttttgcaaaggttctatgt

SEQ ID NO: 211038 - DNA, 22 bp, Artificial Sequence
  Synthetic oligonucleotide; TTT chr2 60548279 60548300 60548284 60548279 -
ttttttgcaaaggttctatgta

SEQ ID NO: 211039 - DNA, 22 bp, Artificial Sequence
  Synthetic oligonucleotide; TTT chr2 60548278 60548299 60548283 60548278 -
tttttgcaaaggttctatgtac

SEQ ID NO: 211040 - DNA, 22 bp, Artificial Sequence
  Synthetic oligonucleotide; TTT chr2 60548277 60548298 60548282 60548277 -
ttttgcaaaggttctatgtact

SEQ ID NO: 211041 - DNA, 22 bp, Artificial Sequence
  Synthetic oligonucleotide; TTT chr2 60548276 60548297 60548281 60548276 -
tttgcaaaggttctatgtacta

SEQ ID NO: 211042 - DNA, 22 bp, Artificial Sequence
  Synthetic oligonucleotide; TTT chr2 60548275 60548296 60548280 60548275 -
ttgcaaaggttctatgtactag

SEQ ID NO: 211043 - DNA, 22 bp, Artificial Sequence
  Synthetic oligonucleotide; TTT chr2 60548274 60548295 60548279 60548274 -
tgcaaaggttctatgtactagt

SEQ ID NO: 211044 - DNA, 22 bp, Artificial Sequence
  Synthetic oligonucleotide; TTT chr2 60548273 60548294 60548278 60548273 -
gcaaaggttctatgtactagta

SEQ ID NO: 211045 - DNA, 22 bp, Artificial Sequence
  Synthetic oligonucleotide; TTG chr2 60548272 60548293 60548277 60548272 -
caaaggttctatgtactagtaa

SEQ ID NO: 211046 - DNA, 22 bp, Artificial Sequence
  Synthetic oligonucleotide; TTC chr2 60548263 60548284 60548268 60548263 -
tatgtactagtaagtttgataa

SEQ ID NO: 211047 - DNA, 22 bp, Artificial Sequence
  Synthetic oligonucleotide; CTA chr2 60548261 60548282 60548266 60548261 -
tgtactagtaagtttgataaaa

SEQ ID NO: 211048 - DNA, 22 bp, Artificial Sequence
  Synthetic oligonucleotide; CTA chr2 60548254 60548275 60548259 60548254 -
gtaagtttgataaaatattttc

SEQ ID NO: 211049 - DNA, 22 bp, Artificial Sequence
  Synthetic oligonucleotide; TTT chr2 60548246 60548267 60548251 60548246 -
gataaaatattttcctaagtct

SEQ ID NO: 211050 - DNA, 22 bp, Artificial Sequence
  Synthetic oligonucleotide; TTG chr2 60548245 60548266 60548250 60548245 -
ataaaatattttcctaagtctt

SEQ ID NO: 211051 - DNA, 22 bp, Artificial Sequence
  Synthetic oligonucleotide; TTT chr2 60548234 60548255 60548239 60548234 -
tcctaagtcttccttcagtctg

SEQ ID NO: 211052 - DNA, 22 bp, Artificial Sequence
  Synthetic oligonucleotide; TTT chr2 60548233 60548254 60548238 60548233 -
cctaagtcttccttcagtctgt

SEQ ID NO: 211053 - DNA, 22 bp, Artificial Sequence
  Synthetic oligonucleotide; TTC chr2 60548232 60548253 60548237 60548232 -
ctaagtcttccttcagtctgta

SEQ ID NO: 211054 - DNA, 22 bp, Artificial Sequence
  Synthetic oligonucleotide; CTA chr2 60548229 60548250 60548234 60548229 -
agtcttccttcagtctgtaaac

SEQ ID NO: 211055 - DNA, 22 bp, Artificial Sequence
  Synthetic oligonucleotide; CTT chr2 60548223 60548244 60548228 60548223 -
ccttcagtctgtaaacctcaga

SEQ ID NO: 211056 - DNA, 22 bp, Artificial Sequence
  Synthetic oligonucleotide; TTC chr2 60548222 60548243 60548227 60548222 -
cttcagtctgtaaacctcagaa

SEQ ID NO: 211057 - DNA, 22 bp, Artificial Sequence
  Synthetic oligonucleotide; CTT chr2 60548219 60548240 60548224 60548219 -
cagtctgtaaacctcagaactt

SEQ ID NO: 211058 - DNA, 22 bp, Artificial Sequence
  Synthetic oligonucleotide; TTC chr2 60548218 60548239 60548223 60548218 -
agtctgtaaacctcagaacttg

SEQ ID NO: 211059 - DNA, 22 bp, Artificial Sequence
  Synthetic oligonucleotide; CTG chr2 60548212 60548233 60548217 60548212 -
taaacctcagaacttgtagcta

SEQ ID NO: 211060 - DNA, 22 bp, Artificial Sequence
  Synthetic oligonucleotide; CTC chr2 60548204 60548225 60548209 60548204 -
agaacttgtagctaatgctaaa

SEQ ID NO: 211061 - DNA, 22 bp, Artificial Sequence
  Synthetic oligonucleotide; CTT chr2 60548197 60548218 60548202 60548197 -
gtagctaatgctaaacaaaaaa

SEQ ID NO: 211062 - DNA, 22 bp, Artificial Sequence
  Synthetic oligonucleotide; TTG chr2 60548196 60548217 60548201 60548196 -
tagctaatgctaaacaaaaaag

SEQ ID NO: 211063 - DNA, 22 bp, Artificial Sequence
  Synthetic oligonucleotide; CTA chr2 60548190 60548211 60548195 60548190 -
atgctaaacaaaaaagccacat

SEQ ID NO: 211064 - DNA, 22 bp, Artificial Sequence
  Synthetic oligonucleotide; CTA chr2 60548184 60548205 60548189 60548184 -
aacaaaaaagccacatttatca

SEQ ID NO: 211065 - DNA, 22 bp, Artificial Sequence
  Synthetic oligonucleotide; TTT chr2 60548166 60548187 60548171 60548166 -
atcaatgtgtacttaaaatcct

SEQ ID NO: 211066 - DNA, 22 bp, Artificial Sequence
  Synthetic oligonucleotide; TTA chr2 60548165 60548186 60548170 60548165 -
tcaatgtgtacttaaaatcctt

SEQ ID NO: 211067 - DNA, 22 bp, Artificial Sequence
  Synthetic oligonucleotide; CTT chr2 60548152 60548173 60548157 60548152 -
aaaatccttaattcagacaaca

SEQ ID NO: 211068 - DNA, 22 bp, Artificial Sequence
  Synthetic oligonucleotide; TTA chr2 60548151 60548172 60548156 60548151 -
aaatccttaattcagacaacag

SEQ ID NO: 211069 - DNA, 22 bp, Artificial Sequence
  Synthetic oligonucleotide; CTT chr2 60548143 60548164 60548148 60548143 -
aattcagacaacaggaatattt

SEQ ID NO: 211070 - DNA, 22 bp, Artificial Sequence
  Synthetic oligonucleotide; TTA chr2 60548142 60548163 60548147 60548142 -
attcagacaacaggaatatttt

SEQ ID NO: 211071 - DNA, 22 bp, Artificial Sequence
  Synthetic oligonucleotide; TTC chr2 60548138 60548159 60548143 60548138 -
agacaacaggaatattttgaga

SEQ ID NO: 211072 - DNA, 22 bp, Artificial Sequence
  Synthetic oligonucleotide; TTT chr2 60548121 60548142 60548126 60548121 -
tgagaatgagttccctattcct

SEQ ID NO: 211073 - DNA, 22 bp, Artificial Sequence
  Synthetic oligonucleotide; TTT chr2 60548120 60548141 60548125 60548120 -
gagaatgagttccctattcctc

SEQ ID NO: 211074 - DNA, 22 bp, Artificial Sequence
  Synthetic oligonucleotide; TTG chr2 60548119 60548140 60548124 60548119 -
agaatgagttccctattcctca

SEQ ID NO: 211075 - DNA, 22 bp, Artificial Sequence
  Synthetic oligonucleotide; TTC chr2 60548108 60548129 60548113 60548108 -
cctattcctcacttggtcaaaa

SEQ ID NO: 211076 - DNA, 22 bp, Artificial Sequence
  Synthetic oligonucleotide; CTA chr2 60548104 60548125 60548109 60548104 -
ttcctcacttggtcaaaatgga

SEQ ID NO: 211077 - DNA, 22 bp, Artificial Sequence
  Synthetic oligonucleotide; TTC chr2 60548101 60548122 60548106 60548101 -
ctcacttggtcaaaatggaagc

SEQ ID NO: 211078 - DNA, 22 bp, Artificial Sequence
  Synthetic oligonucleotide; CTC chr2 60548098 60548119 60548103 60548098 -
acttggtcaaaatggaagcaaa

SEQ ID NO: 211079 - DNA, 22 bp, Artificial Sequence
  Synthetic oligonucleotide; CTT chr2 60548094 60548115 60548099 60548094 -
ggtcaaaatggaagcaaatgta

SEQ ID NO: 211080 - DNA, 22 bp, Artificial Sequence
  Synthetic oligonucleotide; TTG chr2 60548093 60548114 60548098 60548093 -
gtcaaaatggaagcaaatgtaa

SEQ ID NO: 211081 - DNA, 22 bp, Artificial Sequence
  Synthetic oligonucleotide; TTA chr2 60548055 60548076 60548060 60548055 -
aggcacaatgcagaggcacttc

SEQ ID NO: 211082 - DNA, 22 bp, Artificial Sequence
  Synthetic oligonucleotide; CTT chr2 60548034 60548055 60548039 60548034 -
ctgtttgtcttcttttatttga

SEQ ID NO: 211083 - DNA, 22 bp, Artificial Sequence
  Synthetic oligonucleotide; TTC chr2 60548033 60548054 60548038 60548033 -
tgtttgtcttcttttatttgaa

SEQ ID NO: 211084 - DNA, 22 bp, Artificial Sequence
  Synthetic oligonucleotide; CTG chr2 60548031 60548052 60548036 60548031 -
tttgtcttcttttatttgaaaa

SEQ ID NO: 211085 - DNA, 22 bp, Artificial Sequence
  Synthetic oligonucleotide; TTT chr2 60548028 60548049 60548033 60548028 -
gtcttcttttatttgaaaagta

SEQ ID NO: 211086 - DNA, 22 bp, Artificial Sequence
  Synthetic oligonucleotide; TTG chr2 60548027 60548048 60548032 60548027 -
tcttcttttatttgaaaagtat

SEQ ID NO: 211087 - DNA, 22 bp, Artificial Sequence
  Synthetic oligonucleotide; CTT chr2 60548023 60548044 60548028 60548023 -
cttttatttgaaaagtatgcat

SEQ ID NO: 211088 - DNA, 22 bp, Artificial Sequence
  Synthetic oligonucleotide; TTC chr2 60548022 60548043 60548027 60548022 -
ttttatttgaaaagtatgcata

SEQ ID NO: 211089 - DNA, 22 bp, Artificial Sequence
  Synthetic oligonucleotide; CTT chr2 60548020 60548041 60548025 60548020 -
ttatttgaaaagtatgcatatg

SEQ ID NO: 211090 - DNA, 22 bp, Artificial Sequence
  Synthetic oligonucleotide; TTT chr2 60548019 60548040 60548024 60548019 -
tatttgaaaagtatgcatatgt

SEQ ID NO: 211091 - DNA, 22 bp, Artificial Sequence
  Synthetic oligonucleotide; TTT chr2 60548018 60548039 60548023 60548018 -
atttgaaaagtatgcatatgta

SEQ ID NO: 211092 - DNA, 22 bp, Artificial Sequence
  Synthetic oligonucleotide; TTA chr2 60548017 60548038 60548022 60548017 -
tttgaaaagtatgcatatgtat

SEQ ID NO: 211093 - DNA, 22 bp, Artificial Sequence
  Synthetic oligonucleotide; TTT chr2 60548014 60548035 60548019 60548014 -
gaaaagtatgcatatgtattct

SEQ ID NO: 211094 - DNA, 22 bp, Artificial Sequence
  Synthetic oligonucleotide; TTG chr2 60548013 60548034 60548018 60548013 -
aaaagtatgcatatgtattctg

SEQ ID NO: 211095 - DNA, 22 bp, Artificial Sequence
  Synthetic oligonucleotide; TTC chr2 60547993 60548014 60547998 60547993 -
tgtatttatcttttggccagta

SEQ ID NO: 211096 - DNA, 22 bp, Artificial Sequence
  Synthetic oligonucleotide; CTG chr2 60547991 60548012 60547996 60547991 -
tatttatcttttggccagtatg

SEQ ID NO: 211097 - DNA, 22 bp, Artificial Sequence
  Synthetic oligonucleotide; TTT chr2 60547986 60548007 60547991 60547986 -
atcttttggccagtatgttggg

SEQ ID NO: 211098 - DNA, 22 bp, Artificial Sequence
  Synthetic oligonucleotide; TTA chr2 60547985 60548006 60547990 60547985 -
tcttttggccagtatgttgggc

SEQ ID NO: 211099 - DNA, 22 bp, Artificial Sequence
  Synthetic oligonucleotide; CTT chr2 60547981 60548002 60547986 60547981 -
ttggccagtatgttgggcaaag

SEQ ID NO: 211100 - DNA, 22 bp, Artificial Sequence
  Synthetic oligonucleotide; TTT chr2 60547980 60548001 60547985 60547980 -
tggccagtatgttgggcaaaga

SEQ ID NO: 211101 - DNA, 22 bp, Artificial Sequence
  Synthetic oligonucleotide; TTT chr2 60547979 60548000 60547984 60547979 -
ggccagtatgttgggcaaagaa

SEQ ID NO: 211102 - DNA, 22 bp, Artificial Sequence
  Synthetic oligonucleotide; TTG chr2 60547978 60547999 60547983 60547978 -
gccagtatgttgggcaaagaaa

SEQ ID NO: 211103 - DNA, 22 bp, Artificial Sequence
  Synthetic oligonucleotide; TTG chr2 60547966 60547987 60547971 60547966 -
ggcaaagaaacataagtgctta

SEQ ID NO: 211104 - DNA, 22 bp, Artificial Sequence
  Synthetic oligonucleotide; CTT chr2 60547945 60547966 60547950 60547945 -
actttactgtctttattagtag

SEQ ID NO: 211105 - DNA, 22 bp, Artificial Sequence
  Synthetic oligonucleotide; TTA chr2 60547944 60547965 60547949 60547944 -
ctttactgtctttattagtagg

SEQ ID NO: 211106 - DNA, 22 bp, Artificial Sequence
  Synthetic oligonucleotide; CTT chr2 60547941 60547962 60547946 60547941 -
tactgtctttattagtaggaat

SEQ ID NO: 211107 - DNA, 22 bp, Artificial Sequence
  Synthetic oligonucleotide; TTT chr2 60547940 60547961 60547945 60547940 -
actgtctttattagtaggaata

SEQ ID NO: 211108 - DNA, 22 bp, Artificial Sequence
  Synthetic oligonucleotide; TTA chr2 60547939 60547960 60547944 60547939 -
ctgtctttattagtaggaatat

SEQ ID NO: 211109 - DNA, 22 bp, Artificial Sequence
  Synthetic oligonucleotide; CTG chr2 60547936 60547957 60547941 60547936 -
tctttattagtaggaatataac

SEQ ID NO: 211110 - DNA, 22 bp, Artificial Sequence
  Synthetic oligonucleotide; CTT chr2 60547932 60547953 60547937 60547932 -
tattagtaggaatataaccttc

SEQ ID NO: 211111 - DNA, 22 bp, Artificial Sequence
  Synthetic oligonucleotide; TTT chr2 60547931 60547952 60547936 60547931 -
attagtaggaatataaccttca

SEQ ID NO: 211112 - DNA, 22 bp, Artificial Sequence
  Synthetic oligonucleotide; TTA chr2 60547930 60547951 60547935 60547930 -
ttagtaggaatataaccttcat

SEQ ID NO: 211113 - DNA, 22 bp, Artificial Sequence
  Synthetic oligonucleotide; TTA chr2 60547927 60547948 60547932 60547927 -
gtaggaatataaccttcatatt

SEQ ID NO: 211114 - DNA, 22 bp, Artificial Sequence
  Synthetic oligonucleotide; CTT chr2 60547911 60547932 60547916 60547911 -
catattcctgtggtgaccttat

SEQ ID NO: 211115 - DNA, 22 bp, Artificial Sequence
  Synthetic oligonucleotide; TTC chr2 60547910 60547931 60547915 60547910 -
atattcctgtggtgaccttatg

SEQ ID NO: 211116 - DNA, 22 bp, Artificial Sequence
  Synthetic oligonucleotide; TTC chr2 60547904 60547925 60547909 60547904 -
ctgtggtgaccttatgttaaat

SEQ ID NO: 211117 - DNA, 22 bp, Artificial Sequence
  Synthetic oligonucleotide; CTG chr2 60547901 60547922 60547906 60547901 -
tggtgaccttatgttaaattag

SEQ ID NO: 211118 - DNA, 22 bp, Artificial Sequence
  Synthetic oligonucleotide; CTT chr2 60547891 60547912 60547896 60547891 -
atgttaaattaggaggagtacc

SEQ ID NO: 211119 - DNA, 22 bp, Artificial Sequence
  Synthetic oligonucleotide; TTA chr2 60547890 60547911 60547895 60547890 -
tgttaaattaggaggagtacca

SEQ ID NO: 211120 - DNA, 22 bp, Artificial Sequence
  Synthetic oligonucleotide; TTA chr2 60547885 60547906 60547890 60547885 -
aattaggaggagtaccagaggc

SEQ ID NO: 211121 - DNA, 22 bp, Artificial Sequence
  Synthetic oligonucleotide; TTA chr2 60547880 60547901 60547885 60547880 -
ggaggagtaccagaggctagaa

SEQ ID NO: 211122 - DNA, 22 bp, Artificial Sequence
  Synthetic oligonucleotide; CTA chr2 60547861 60547882 60547866 60547861 -
gaaattatgagatgtcctactt

SEQ ID NO: 211123 - DNA, 22 bp, Artificial Sequence
  Synthetic oligonucleotide; TTA chr2 60547854 60547875 60547859 60547854 -
tgagatgtcctacttgagcaca

SEQ ID NO: 211124 - DNA, 22 bp, Artificial Sequence
  Synthetic oligonucleotide; CTA chr2 60547842 60547863 60547847 60547842 -
cttgagcacaggtgcagctagg

SEQ ID NO: 211125 - DNA, 22 bp, Artificial Sequence
  Synthetic oligonucleotide; CTT chr2 60547839 60547860 60547844 60547839 -
gagcacaggtgcagctaggcag

SEQ ID NO: 211126 - DNA, 22 bp, Artificial Sequence
  Synthetic oligonucleotide; TTG chr2 60547838 60547859 60547843 60547838 -
agcacaggtgcagctaggcagg

SEQ ID NO: 211127 - DNA, 22 bp, Artificial Sequence
  Synthetic oligonucleotide; CTA chr2 60547822 60547843 60547827 60547822 -
ggcagggctctctcaatattat

SEQ ID NO: 211128 - DNA, 22 bp, Artificial Sequence
  Synthetic oligonucleotide; CTC chr2 60547812 60547833 60547817 60547812 -
tctcaatattatttcacctagc

SEQ ID NO: 211129 - DNA, 22 bp, Artificial Sequence
  Synthetic oligonucleotide; CTC chr2 60547810 60547831 60547815 60547810 -
tcaatattatttcacctagcac

SEQ ID NO: 211130 - DNA, 22 bp, Artificial Sequence
  Synthetic oligonucleotide; CTC chr2 60547808 60547829 60547813 60547808 -
aatattatttcacctagcacat

SEQ ID NO: 211131 - DNA, 22 bp, Artificial Sequence
  Synthetic oligonucleotide; TTA chr2 60547801 60547822 60547806 60547801 -
tttcacctagcacatctgggag

SEQ ID NO: 211132 - DNA, 22 bp, Artificial Sequence
  Synthetic oligonucleotide; TTT chr2 60547798 60547819 60547803 60547798 -
cacctagcacatctgggagtta

SEQ ID NO: 211133 - DNA, 22 bp, Artificial Sequence
  Synthetic oligonucleotide; TTC chr2 60547797 60547818 60547802 60547797 -
acctagcacatctgggagttac

SEQ ID NO: 211134 - DNA, 22 bp, Artificial Sequence
  Synthetic oligonucleotide; CTA chr2 60547792 60547813 60547797 60547792 -
gcacatctgggagttactccag

SEQ ID NO: 211135 - DNA, 22 bp, Artificial Sequence
  Synthetic oligonucleotide; CTG chr2 60547783 60547804 60547788 60547783 -
ggagttactccagatcttcccc

SEQ ID NO: 211136 - DNA, 22 bp, Artificial Sequence
  Synthetic oligonucleotide; TTA chr2 60547776 60547797 60547781 60547776 -
ctccagatcttccccctcaata

SEQ ID NO: 211137 - DNA, 22 bp, Artificial Sequence
  Synthetic oligonucleotide; CTC chr2 60547773 60547794 60547778 60547773 -
cagatcttccccctcaatattc

SEQ ID NO: 211138 - DNA, 22 bp, Artificial Sequence
  Synthetic oligonucleotide; CTT chr2 60547765 60547786 60547770 60547765 -
ccccctcaatattcagcctggg

SEQ ID NO: 211139 - DNA, 22 bp, Artificial Sequence
  Synthetic oligonucleotide; TTC chr2 60547764 60547785 60547769 60547764 -
cccctcaatattcagcctgggt

SEQ ID NO: 211140 - DNA, 22 bp, Artificial Sequence
  Synthetic oligonucleotide; CTC chr2 60547758 60547779 60547763 60547758 -
aatattcagcctgggtagggtt

SEQ ID NO: 211141 - DNA, 22 bp, Artificial Sequence
  Synthetic oligonucleotide; TTC chr2 60547751 60547772 60547756 60547751 -
agcctgggtagggttgaaataa

SEQ ID NO: 211142 - DNA, 22 bp, Artificial Sequence
  Synthetic oligonucleotide; CTG chr2 60547745 60547766 60547750 60547745 -
ggtagggttgaaataaatttaa

SEQ ID NO: 211143 - DNA, 22 bp, Artificial Sequence
  Synthetic oligonucleotide; TTG chr2 60547735 60547756 60547740 60547735 -
aaataaatttaacctgagttca

SEQ ID NO: 211144 - DNA, 22 bp, Artificial Sequence
  Synthetic oligonucleotide; TTT chr2 60547725 60547746 60547730 60547725 -
aacctgagttcactggattttt

SEQ ID NO: 211145 - DNA, 22 bp, Artificial Sequence
  Synthetic oligonucleotide; TTA chr2 60547724 60547745 60547729 60547724 -
acctgagttcactggatttttg

SEQ ID NO: 211146 - DNA, 22 bp, Artificial Sequence
  Synthetic oligonucleotide; CTG chr2 60547719 60547740 60547724 60547719 -
agttcactggatttttgcactt

SEQ ID NO: 211147 - DNA, 22 bp, Artificial Sequence
  Synthetic oligonucleotide; TTC chr2 60547714 60547735 60547719 60547714 -
actggatttttgcactttatca

SEQ ID NO: 211148 - DNA, 22 bp, Artificial Sequence
  Synthetic oligonucleotide; CTG chr2 60547710 60547731 60547715 60547710 -
gatttttgcactttatcaaaat

SEQ ID NO: 211149 - DNA, 22 bp, Artificial Sequence
  Synthetic oligonucleotide; TTT chr2 60547705 60547726 60547710 60547705 -
ttgcactttatcaaaatctgtt

SEQ ID NO: 211150 - DNA, 22 bp, Artificial Sequence
  Synthetic oligonucleotide; TTT chr2 60547704 60547725 60547709 60547704 -
tgcactttatcaaaatctgttc

SEQ ID NO: 211151 - DNA, 22 bp, Artificial Sequence
  Synthetic oligonucleotide; TTT chr2 60547703 60547724 60547708 60547703 -
gcactttatcaaaatctgttcc

SEQ ID NO: 211152 - DNA, 22 bp, Artificial Sequence
  Synthetic oligonucleotide; TTG chr2 60547702 60547723 60547707 60547702 -
cactttatcaaaatctgttcca

SEQ ID NO: 211153 - DNA, 22 bp, Artificial Sequence
  Synthetic oligonucleotide; CTT chr2 60547697 60547718 60547702 60547697 -
tatcaaaatctgttccaatatt

SEQ ID NO: 211154 - DNA, 22 bp, Artificial Sequence
  Synthetic oligonucleotide; TTT chr2 60547696 60547717 60547701 60547696 -
atcaaaatctgttccaatattc

SEQ ID NO: 211155 - DNA, 22 bp, Artificial Sequence
  Synthetic oligonucleotide; TTA chr2 60547695 60547716 60547700 60547695 -
tcaaaatctgttccaatattct

SEQ ID NO: 211156 - DNA, 22 bp, Artificial Sequence
  Synthetic oligonucleotide; CTG chr2 60547685 60547706 60547690 60547685 -
ttccaatattctacactcaaat

SEQ ID NO: 211157 - DNA, 22 bp, Artificial Sequence
  Synthetic oligonucleotide; TTC chr2 60547682 60547703 60547687 60547682 -
caatattctacactcaaattaa

SEQ ID NO: 211158 - DNA, 22 bp, Artificial Sequence
  Synthetic oligonucleotide; TTC chr2 60547674 60547695 60547679 60547674 -
tacactcaaattaaaatctatt

SEQ ID NO: 211159 - DNA, 22 bp, Artificial Sequence
  Synthetic oligonucleotide; CTA chr2 60547672 60547693 60547677 60547672 -
cactcaaattaaaatctatttt

SEQ ID NO: 211160 - DNA, 22 bp, Artificial Sequence
  Synthetic oligonucleotide; CTC chr2 60547667 60547688 60547672 60547667 -
aaattaaaatctattttttgat

SEQ ID NO: 211161 - DNA, 22 bp, Artificial Sequence
  Synthetic oligonucleotide; TTA chr2 60547661 60547682 60547666 60547661 -
aaatctattttttgattctctg

SEQ ID NO: 211162 - DNA, 22 bp, Artificial Sequence
  Synthetic oligonucleotide; CTA chr2 60547654 60547675 60547659 60547654 -
ttttttgattctctgtggcttt

SEQ ID NO: 211163 - DNA, 22 bp, Artificial Sequence
  Synthetic oligonucleotide; TTT chr2 60547651 60547672 60547656 60547651 -
tttgattctctgtggctttaag

SEQ ID NO: 211164 - DNA, 22 bp, Artificial Sequence
  Synthetic oligonucleotide; TTT chr2 60547650 60547671 60547655 60547650 -
ttgattctctgtggctttaagt

SEQ ID NO: 211165 - DNA, 22 bp, Artificial Sequence
  Synthetic oligonucleotide; TTT chr2 60547649 60547670 60547654 60547649 -
tgattctctgtggctttaagtt

SEQ ID NO: 211166 - DNA, 22 bp, Artificial Sequence
  Synthetic oligonucleotide; TTT chr2 60547648 60547669 60547653 60547648 -
gattctctgtggctttaagttc

SEQ ID NO: 211167 - DNA, 22 bp, Artificial Sequence
  Synthetic oligonucleotide; TTG chr2 60547647 60547668 60547652 60547647 -
attctctgtggctttaagttca

SEQ ID NO: 211168 - DNA, 22 bp, Artificial Sequence
  Synthetic oligonucleotide; TTC chr2 60547643 60547664 60547648 60547643 -
tctgtggctttaagttcattaa

SEQ ID NO: 211169 - DNA, 22 bp, Artificial Sequence
  Synthetic oligonucleotide; CTC chr2 60547641 60547662 60547646 60547641 -
tgtggctttaagttcattaaat

SEQ ID NO: 211170 - DNA, 22 bp, Artificial Sequence
  Synthetic oligonucleotide; CTG chr2 60547639 60547660 60547644 60547639 -
tggctttaagttcattaaatgt

SEQ ID NO: 211171 - DNA, 22 bp, Artificial Sequence
  Synthetic oligonucleotide; CTT chr2 60547633 60547654 60547638 60547633 -
taagttcattaaatgtaaaatt

SEQ ID NO: 211172 - DNA, 22 bp, Artificial Sequence
  Synthetic oligonucleotide; TTT chr2 60547632 60547653 60547637 60547632 -
aagttcattaaatgtaaaattg

SEQ ID NO: 211173 - DNA, 22 bp, Artificial Sequence
  Synthetic oligonucleotide; TTA chr2 60547631 60547652 60547636 60547631 -
agttcattaaatgtaaaattgg

SEQ ID NO: 211174 - DNA, 22 bp, Artificial Sequence
  Synthetic oligonucleotide; TTC chr2 60547626 60547647 60547631 60547626 -
attaaatgtaaaattggcagct

SEQ ID NO: 211175 - DNA, 22 bp, Artificial Sequence
  Synthetic oligonucleotide; TTA chr2 60547622 60547643 60547627 60547622 -
aatgtaaaattggcagcttgct

SEQ ID NO: 211176 - DNA, 22 bp, Artificial Sequence
  Synthetic oligonucleotide; TTG chr2 60547610 60547631 60547615 60547610 -
gcagcttgctaaagaaggtcag

SEQ ID NO: 211177 - DNA, 22 bp, Artificial Sequence
  Synthetic oligonucleotide; CTT chr2 60547603 60547624 60547608 60547603 -
gctaaagaaggtcagactgatt

SEQ ID NO: 211178 - DNA, 22 bp, Artificial Sequence
  Synthetic oligonucleotide; TTG chr2 60547602 60547623 60547607 60547602 -
ctaaagaaggtcagactgatta

SEQ ID NO: 211179 - DNA, 22 bp, Artificial Sequence
  Synthetic oligonucleotide; CTA chr2 60547599 60547620 60547604 60547599 -
aagaaggtcagactgattaact

SEQ ID NO: 211180 - DNA, 22 bp, Artificial Sequence
  Synthetic oligonucleotide; CTG chr2 60547584 60547605 60547589 60547584 -
attaactgtttaagacttgtac

SEQ ID NO: 211181 - DNA, 22 bp, Artificial Sequence
  Synthetic oligonucleotide; TTA chr2 60547580 60547601 60547585 60547580 -
actgtttaagacttgtacattt

SEQ ID NO: 211182 - DNA, 22 bp, Artificial Sequence
  Synthetic oligonucleotide; CTG chr2 60547576 60547597 60547581 60547576 -
tttaagacttgtacattttctg

SEQ ID NO: 211183 - DNA, 22 bp, Artificial Sequence
  Synthetic oligonucleotide; TTT chr2 60547573 60547594 60547578 60547573 -
aagacttgtacattttctgctt

SEQ ID NO: 211184 - DNA, 22 bp, Artificial Sequence
  Synthetic oligonucleotide; TTA chr2 60547572 60547593 60547577 60547572 -
agacttgtacattttctgcttc

SEQ ID NO: 211185 - DNA, 22 bp, Artificial Sequence
  Synthetic oligonucleotide; CTT chr2 60547566 60547587 60547571 60547566 -
gtacattttctgcttcagtttt

SEQ ID NO: 211186 - DNA, 22 bp, Artificial Sequence
  Synthetic oligonucleotide; TTG chr2 60547565 60547586 60547570 60547565 -
tacattttctgcttcagtttta

SEQ ID NO: 211187 - DNA, 22 bp, Artificial Sequence
  Synthetic oligonucleotide; TTT chr2 60547558 60547579 60547563 60547558 -
tctgcttcagttttattaactg

SEQ ID NO: 211188 - DNA, 22 bp, Artificial Sequence
  Synthetic oligonucleotide; TTT chr2 60547557 60547578 60547562 60547557 -
ctgcttcagttttattaactgg

SEQ ID NO: 211189 - DNA, 22 bp, Artificial Sequence
  Synthetic oligonucleotide; TTC chr2 60547556 60547577 60547561 60547556 -
tgcttcagttttattaactggc

SEQ ID NO: 211190 - DNA, 22 bp, Artificial Sequence
  Synthetic oligonucleotide; CTG chr2 60547554 60547575 60547559 60547554 -
cttcagttttattaactggcag

SEQ ID NO: 211191 - DNA, 22 bp, Artificial Sequence
  Synthetic oligonucleotide; CTT chr2 60547551 60547572 60547556 60547551 -
cagttttattaactggcagcat

SEQ ID NO: 211192 - DNA, 22 bp, Artificial Sequence
  Synthetic oligonucleotide; TTC chr2 60547550 60547571 60547555 60547550 -
agttttattaactggcagcatc

SEQ ID NO: 211193 - DNA, 22 bp, Artificial Sequence
  Synthetic oligonucleotide; TTT chr2 60547545 60547566 60547550 60547545 -
tattaactggcagcatcctgga

SEQ ID NO: 211194 - DNA, 22 bp, Artificial Sequence
  Synthetic oligonucleotide; TTT chr2 60547544 60547565 60547549 60547544 -
attaactggcagcatcctggat

SEQ ID NO: 211195 - DNA, 22 bp, Artificial Sequence
  Synthetic oligonucleotide; TTA chr2 60547543 60547564 60547548 60547543 -
ttaactggcagcatcctggatg

SEQ ID NO: 211196 - DNA, 22 bp, Artificial Sequence
  Synthetic oligonucleotide; TTA chr2 60547540 60547561 60547545 60547540 -
actggcagcatcctggatgttt

SEQ ID NO: 211197 - DNA, 22 bp, Artificial Sequence
  Synthetic oligonucleotide; CTG chr2 60547536 60547557 60547541 60547536 -
gcagcatcctggatgttttgta

SEQ ID NO: 211198 - DNA, 22 bp, Artificial Sequence
  Synthetic oligonucleotide; CTG chr2 60547525 60547546 60547530 60547525 -
gatgttttgtattttgtgattt

SEQ ID NO: 211199 - DNA, 22 bp, Artificial Sequence
  Synthetic oligonucleotide; TTT chr2 60547518 60547539 60547523 60547518 -
tgtattttgtgatttttttttt

SEQ ID NO: 211200 - DNA, 22 bp, Artificial Sequence
  Synthetic oligonucleotide; TTT chr2 60547517 60547538 60547522 60547517 -
gtattttgtgattttttttttt

SEQ ID NO: 211201 - DNA, 22 bp, Artificial Sequence
  Synthetic oligonucleotide; TTG chr2 60547516 60547537 60547521 60547516 -
tattttgtgatttttttttttt

SEQ ID NO: 211202 - DNA, 22 bp, Artificial Sequence
  Synthetic oligonucleotide; TTT chr2 60547511 60547532 60547516 60547511 -
tgtgattttttttttttttttg

SEQ ID NO: 211203 - DNA, 22 bp, Artificial Sequence
  Synthetic oligonucleotide; TTT chr2 60547510 60547531 60547515 60547510 -
gtgattttttttttttttttga

SEQ ID NO: 211204 - DNA, 22 bp, Artificial Sequence
  Synthetic oligonucleotide; TTG chr2 60547509 60547530 60547514 60547509 -
tgattttttttttttttttgat

SEQ ID NO: 211205 - DNA, 22 bp, Artificial Sequence
  Synthetic oligonucleotide; TTT chr2 60547503 60547524 60547508 60547503 -
tttttttttttttgatagagca

SEQ ID NO: 211206 - DNA, 22 bp, Artificial Sequence
  Synthetic oligonucleotide; TTT chr2 60547502 60547523 60547507 60547502 -
ttttttttttttgatagagcaa

SEQ ID NO: 211207 - DNA, 22 bp, Artificial Sequence
  Synthetic oligonucleotide; TTT chr2 60547501 60547522 60547506 60547501 -
tttttttttttgatagagcaag

SEQ ID NO: 211208 - DNA, 22 bp, Artificial Sequence
  Synthetic oligonucleotide; TTT chr2 60547500 60547521 60547505 60547500 -
ttttttttttgatagagcaagc

SEQ ID NO: 211209 - DNA, 22 bp, Artificial Sequence
  Synthetic oligonucleotide; TTT chr2 60547499 60547520 60547504 60547499 -
tttttttttgatagagcaagca

SEQ ID NO: 211210 - DNA, 22 bp, Artificial Sequence
  Synthetic oligonucleotide; TTT chr2 60547498 60547519 60547503 60547498 -
ttttttttgatagagcaagcat

SEQ ID NO: 211211 - DNA, 22 bp, Artificial Sequence
  Synthetic oligonucleotide; TTT chr2 60547497 60547518 60547502 60547497 -
tttttttgatagagcaagcata

SEQ ID NO: 211212 - DNA, 22 bp, Artificial Sequence
  Synthetic oligonucleotide; TTT chr2 60547496 60547517 60547501 60547496 -
ttttttgatagagcaagcataa

SEQ ID NO: 211213 - DNA, 22 bp, Artificial Sequence
  Synthetic oligonucleotide; TTT chr2 60547495 60547516 60547500 60547495 -
tttttgatagagcaagcataag

SEQ ID NO: 211214 - DNA, 22 bp, Artificial Sequence
  Synthetic oligonucleotide; TTT chr2 60547494 60547515 60547499 60547494 -
ttttgatagagcaagcataaga

SEQ ID NO: 211215 - DNA, 22 bp, Artificial Sequence
  Synthetic oligonucleotide; TTT chr2 60547493 60547514 60547498 60547493 -
tttgatagagcaagcataagat

SEQ ID NO: 211216 - DNA, 22 bp, Artificial Sequence
  Synthetic oligonucleotide; TTT chr2 60547492 60547513 60547497 60547492 -
ttgatagagcaagcataagatt

SEQ ID NO: 211217 - DNA, 22 bp, Artificial Sequence
  Synthetic oligonucleotide; TTT chr2 60547491 60547512 60547496 60547491 -
tgatagagcaagcataagattt

SEQ ID NO: 211218 - DNA, 22 bp, Artificial Sequence
  Synthetic oligonucleotide; TTT chr2 60547490 60547511 60547495 60547490 -
gatagagcaagcataagatttc

SEQ ID NO: 211219 - DNA, 22 bp, Artificial Sequence
  Synthetic oligonucleotide; TTG chr2 60547489 60547510 60547494 60547489 -
atagagcaagcataagatttca

SEQ ID NO: 211220 - DNA, 22 bp, Artificial Sequence
  Synthetic oligonucleotide; TTT chr2 60547469 60547490 60547474 60547469 -
cacaagcagagacttaccaact

SEQ ID NO: 211221 - DNA, 22 bp, Artificial Sequence
  Synthetic oligonucleotide; TTC chr2 60547468 60547489 60547473 60547468 -
acaagcagagacttaccaactc

SEQ ID NO: 211222 - DNA, 22 bp, Artificial Sequence
  Synthetic oligonucleotide; CTT chr2 60547454 60547475 60547459 60547454 -
accaactctcttttcccctttg

SEQ ID NO: 211223 - DNA, 22 bp, Artificial Sequence
  Synthetic oligonucleotide; TTA chr2 60547453 60547474 60547458 60547453 -
ccaactctcttttcccctttgg

SEQ ID NO: 211224 - DNA, 22 bp, Artificial Sequence
  Synthetic oligonucleotide; CTC chr2 60547446 60547467 60547451 60547446 -
tcttttcccctttggaagctta

SEQ ID NO: 211225 - DNA, 22 bp, Artificial Sequence
  Synthetic oligonucleotide; CTC chr2 60547444 60547465 60547449 60547444 -
ttttcccctttggaagcttaaa

SEQ ID NO: 211226 - DNA, 22 bp, Artificial Sequence
  Synthetic oligonucleotide; CTT chr2 60547442 60547463 60547447 60547442 -
ttcccctttggaagcttaaaaa

SEQ ID NO: 211227 - DNA, 22 bp, Artificial Sequence
  Synthetic oligonucleotide; TTT chr2 60547441 60547462 60547446 60547441 -
tcccctttggaagcttaaaaaa

SEQ ID NO: 211228 - DNA, 22 bp, Artificial Sequence
  Synthetic oligonucleotide; TTT chr2 60547440 60547461 60547445 60547440 -
cccctttggaagcttaaaaaat

SEQ ID NO: 211229 - DNA, 22 bp, Artificial Sequence
  Synthetic oligonucleotide; TTC chr2 60547439 60547460 60547444 60547439 -
ccctttggaagcttaaaaaatg

SEQ ID NO: 211230 - DNA, 22 bp, Artificial Sequence
  Synthetic oligonucleotide; CTT chr2 60547434 60547455 60547439 60547434 -
tggaagcttaaaaaatgataga

SEQ ID NO: 211231 - DNA, 22 bp, Artificial Sequence
  Synthetic oligonucleotide; TTT chr2 60547433 60547454 60547438 60547433 -
ggaagcttaaaaaatgatagaa

SEQ ID NO: 211232 - DNA, 22 bp, Artificial Sequence
  Synthetic oligonucleotide; TTG chr2 60547432 60547453 60547437 60547432 -
gaagcttaaaaaatgatagaag

SEQ ID NO: 211233 - DNA, 22 bp, Artificial Sequence
  Synthetic oligonucleotide; CTT chr2 60547425 60547446 60547430 60547425 -
aaaaaatgatagaagctggtaa

SEQ ID NO: 211234 - DNA, 22 bp, Artificial Sequence
  Synthetic oligonucleotide; TTA chr2 60547424 60547445 60547429 60547424 -
aaaaatgatagaagctggtaaa

SEQ ID NO: 211235 - DNA, 22 bp, Artificial Sequence
  Synthetic oligonucleotide; CTG chr2 60547407 60547428 60547412 60547407 -
gtaaagtagatgctggagtatt

SEQ ID NO: 211236 - DNA, 22 bp, Artificial Sequence
  Synthetic oligonucleotide; CTG chr2 60547392 60547413 60547397 60547392 -
gagtattttagtacaaagttaa

SEQ ID NO: 211237 - DNA, 22 bp, Artificial Sequence
  Synthetic oligonucleotide; TTT chr2 60547384 60547405 60547389 60547384 -
tagtacaaagttaaaaaaaaaa

SEQ ID NO: 211238 - DNA, 22 bp, Artificial Sequence
  Synthetic oligonucleotide; TTT chr2 60547383 60547404 60547388 60547383 -
agtacaaagttaaaaaaaaaag

SEQ ID NO: 211239 - DNA, 22 bp, Artificial Sequence
  Synthetic oligonucleotide; TTA chr2 60547382 60547403 60547387 60547382 -
gtacaaagttaaaaaaaaaagc

SEQ ID NO: 211240 - DNA, 22 bp, Artificial Sequence
  Synthetic oligonucleotide; TTA chr2 60547371 60547392 60547376 60547371 -
aaaaaaaaagcaaacaggaaag

SEQ ID NO: 211241 - DNA, 22 bp, Artificial Sequence
  Synthetic oligonucleotide; CTA chr2 60547336 60547357 60547341 60547336 -
ccttgttataccatccgctggt

SEQ ID NO: 211242 - DNA, 22 bp, Artificial Sequence
  Synthetic oligonucleotide; CTT chr2 60547332 60547353 60547337 60547332 -
gttataccatccgctggtgatt

SEQ ID NO: 211243 - DNA, 22 bp, Artificial Sequence
  Synthetic oligonucleotide; TTG chr2 60547331 60547352 60547336 60547331 -
ttataccatccgctggtgatta

SEQ ID NO: 211244 - DNA, 22 bp, Artificial Sequence
  Synthetic oligonucleotide; TTA chr2 60547328 60547349 60547333 60547328 -
taccatccgctggtgattatgt

SEQ ID NO: 211245 - DNA, 22 bp, Artificial Sequence
  Synthetic oligonucleotide; CTG chr2 60547316 60547337 60547321 60547316 -
gtgattatgtgtgcagaaatag

SEQ ID NO: 211246 - DNA, 22 bp, Artificial Sequence
  Synthetic oligonucleotide; TTA chr2 60547309 60547330 60547314 60547309 -
tgtgtgcagaaatagtctcata

SEQ ID NO: 211247 - DNA, 22 bp, Artificial Sequence
  Synthetic oligonucleotide; CTC chr2 60547290 60547311 60547295 60547290 -
ataatgaagcattttggagctc

SEQ ID NO: 211248 - DNA, 22 bp, Artificial Sequence
  Synthetic oligonucleotide; TTT chr2 60547276 60547297 60547281 60547276 -
tggagctcattcagaaaattag

SEQ ID NO: 211249 - DNA, 22 bp, Artificial Sequence
  Synthetic oligonucleotide; TTT chr2 60547275 60547296 60547280 60547275 -
ggagctcattcagaaaattagt

SEQ ID NO: 211250 - DNA, 22 bp, Artificial Sequence
  Synthetic oligonucleotide; TTG chr2 60547274 60547295 60547279 60547274 -
gagctcattcagaaaattagtc

SEQ ID NO: 211251 - DNA, 22 bp, Artificial Sequence
  Synthetic oligonucleotide; CTC chr2 60547268 60547289 60547273 60547268 -
attcagaaaattagtccacttt

SEQ ID NO: 211252 - DNA, 22 bp, Artificial Sequence
  Synthetic oligonucleotide; TTC chr2 60547264 60547285 60547269 60547264 -
agaaaattagtccactttgaca

SEQ ID NO: 211253 - DNA, 22 bp, Artificial Sequence
  Synthetic oligonucleotide; TTA chr2 60547255 60547276 60547260 60547255 -
gtccactttgacaacattaggc

SEQ ID NO: 211254 - DNA, 22 bp, Artificial Sequence
  Synthetic oligonucleotide; CTT chr2 60547247 60547268 60547252 60547247 -
tgacaacattaggcgaagtatt

SEQ ID NO: 211255 - DNA, 22 bp, Artificial Sequence
  Synthetic oligonucleotide; TTT chr2 60547246 60547267 60547251 60547246 -
gacaacattaggcgaagtattt

SEQ ID NO: 211256 - DNA, 22 bp, Artificial Sequence
  Synthetic oligonucleotide; TTG chr2 60547245 60547266 60547250 60547245 -
acaacattaggcgaagtatttc

SEQ ID NO: 211257 - DNA, 22 bp, Artificial Sequence
  Synthetic oligonucleotide; TTA chr2 60547236 60547257 60547241 60547236 -
ggcgaagtatttcaagtctaaa

SEQ ID NO: 211258 - DNA, 22 bp, Artificial Sequence
  Synthetic oligonucleotide; TTT chr2 60547224 60547245 60547229 60547224 -
caagtctaaagaaaggacttct

SEQ ID NO: 211259 - DNA, 22 bp, Artificial Sequence
  Synthetic oligonucleotide; TTC chr2 60547223 60547244 60547228 60547223 -
aagtctaaagaaaggacttctc

SEQ ID NO: 211260 - DNA, 22 bp, Artificial Sequence
  Synthetic oligonucleotide; CTA chr2 60547216 60547237 60547221 60547216 -
aagaaaggacttctcagccttg

SEQ ID NO: 211261 - DNA, 22 bp, Artificial Sequence
  Synthetic oligonucleotide; CTT chr2 60547204 60547225 60547209 60547204 -
ctcagccttgctctgaaatgtg

SEQ ID NO: 211262 - DNA, 22 bp, Artificial Sequence
  Synthetic oligonucleotide; TTC chr2 60547203 60547224 60547208 60547203 -
tcagccttgctctgaaatgtgg

SEQ ID NO: 211263 - DNA, 22 bp, Artificial Sequence
  Synthetic oligonucleotide; CTC chr2 60547201 60547222 60547206 60547201 -
agccttgctctgaaatgtggtg

SEQ ID NO: 211264 - DNA, 22 bp, Artificial Sequence
  Synthetic oligonucleotide; CTT chr2 60547195 60547216 60547200 60547195 -
gctctgaaatgtggtgtttgct

SEQ ID NO: 211265 - DNA, 22 bp, Artificial Sequence
  Synthetic oligonucleotide; TTG chr2 60547194 60547215 60547199 60547194 -
ctctgaaatgtggtgtttgctt

SEQ ID NO: 211266 - DNA, 22 bp, Artificial Sequence
  Synthetic oligonucleotide; CTC chr2 60547191 60547212 60547196 60547191 -
tgaaatgtggtgtttgcttgac

SEQ ID NO: 211267 - DNA, 22 bp, Artificial Sequence
  Synthetic oligonucleotide; CTG chr2 60547189 60547210 60547194 60547189 -
aaatgtggtgtttgcttgacca

SEQ ID NO: 211268 - DNA, 22 bp, Artificial Sequence
  Synthetic oligonucleotide; TTT chr2 60547176 60547197 60547181 60547176 -
gcttgaccattctgatttttat

SEQ ID NO: 211269 - DNA, 22 bp, Artificial Sequence
  Synthetic oligonucleotide; TTG chr2 60547175 60547196 60547180 60547175 -
cttgaccattctgatttttata

SEQ ID NO: 211270 - DNA, 22 bp, Artificial Sequence
  Synthetic oligonucleotide; CTT chr2 60547172 60547193 60547177 60547172 -
gaccattctgatttttatatca

SEQ ID NO: 211271 - DNA, 22 bp, Artificial Sequence
  Synthetic oligonucleotide; TTG chr2 60547171 60547192 60547176 60547171 -
accattctgatttttatatcat

SEQ ID NO: 211272 - DNA, 22 bp, Artificial Sequence
  Synthetic oligonucleotide; TTC chr2 60547164 60547185 60547169 60547164 -
tgatttttatatcatagatgcc

SEQ ID NO: 211273 - DNA, 22 bp, Artificial Sequence
  Synthetic oligonucleotide; CTG chr2 60547162 60547183 60547167 60547162 -
atttttatatcatagatgccac

SEQ ID NO: 211274 - DNA, 22 bp, Artificial Sequence
  Synthetic oligonucleotide; TTT chr2 60547158 60547179 60547163 60547158 -
ttatatcatagatgccaccaag

SEQ ID NO: 211275 - DNA, 22 bp, Artificial Sequence
  Synthetic oligonucleotide; TTT chr2 60547157 60547178 60547162 60547157 -
tatatcatagatgccaccaagt

SEQ ID NO: 211276 - DNA, 22 bp, Artificial Sequence
  Synthetic oligonucleotide; TTT chr2 60547156 60547177 60547161 60547156 -
atatcatagatgccaccaagtg

SEQ ID NO: 211277 - DNA, 22 bp, Artificial Sequence
  Synthetic oligonucleotide; TTA chr2 60547155 60547176 60547160 60547155 -
tatcatagatgccaccaagtgc

SEQ ID NO: 211278 - DNA, 22 bp, Artificial Sequence
  Synthetic oligonucleotide; TTT chr2 60547123 60547144 60547128 60547123 -
agaatattataggcattccatt

SEQ ID NO: 211279 - DNA, 22 bp, Artificial Sequence
  Synthetic oligonucleotide; TTA chr2 60547122 60547143 60547127 60547122 -
gaatattataggcattccattt

SEQ ID NO: 211280 - DNA, 22 bp, Artificial Sequence
  Synthetic oligonucleotide; TTA chr2 60547114 60547135 60547119 60547114 -
taggcattccatttctcagaat

SEQ ID NO: 211281 - DNA, 22 bp, Artificial Sequence
  Synthetic oligonucleotide; TTC chr2 60547105 60547126 60547110 60547105 -
catttctcagaataaaaaaaaa

SEQ ID NO: 211282 - DNA, 22 bp, Artificial Sequence
  Synthetic oligonucleotide; TTT chr2 60547100 60547121 60547105 60547100 -
ctcagaataaaaaaaaaatgac

SEQ ID NO: 211283 - DNA, 22 bp, Artificial Sequence
  Synthetic oligonucleotide; TTC chr2 60547099 60547120 60547104 60547099 -
tcagaataaaaaaaaaatgact

SEQ ID NO: 211284 - DNA, 22 bp, Artificial Sequence
  Synthetic oligonucleotide; CTC chr2 60547097 60547118 60547102 60547097 -
agaataaaaaaaaaatgactaa

SEQ ID NO: 211285 - DNA, 22 bp, Artificial Sequence
  Synthetic oligonucleotide; CTA chr2 60547076 60547097 60547081 60547076 -
attggcttattttcttaagtac

SEQ ID NO: 211286 - DNA, 22 bp, Artificial Sequence
  Synthetic oligonucleotide; TTG chr2 60547072 60547093 60547077 60547072 -
gcttattttcttaagtactcaa

SEQ ID NO: 211287 - DNA, 22 bp, Artificial Sequence
  Synthetic oligonucleotide; CTT chr2 60547068 60547089 60547073 60547068 -
attttcttaagtactcaaaagt

SEQ ID NO: 211288 - DNA, 22 bp, Artificial Sequence
  Synthetic oligonucleotide; TTA chr2 60547067 60547088 60547072 60547067 -
ttttcttaagtactcaaaagta

SEQ ID NO: 211289 - DNA, 22 bp, Artificial Sequence
  Synthetic oligonucleotide; TTT chr2 60547064 60547085 60547069 60547064 -
tcttaagtactcaaaagtatcc

SEQ ID NO: 211290 - DNA, 22 bp, Artificial Sequence
  Synthetic oligonucleotide; TTT chr2 60547063 60547084 60547068 60547063 -
cttaagtactcaaaagtatccc

SEQ ID NO: 211291 - DNA, 22 bp, Artificial Sequence
  Synthetic oligonucleotide; TTC chr2 60547062 60547083 60547067 60547062 -
ttaagtactcaaaagtatccca

SEQ ID NO: 211292 - DNA, 22 bp, Artificial Sequence
  Synthetic oligonucleotide; CTT chr2 60547060 60547081 60547065 60547060 -
aagtactcaaaagtatcccatt

SEQ ID NO: 211293 - DNA, 22 bp, Artificial Sequence
  Synthetic oligonucleotide; TTA chr2 60547059 60547080 60547064 60547059 -
agtactcaaaagtatcccattt

SEQ ID NO: 211294 - DNA, 22 bp, Artificial Sequence
  Synthetic oligonucleotide; CTC chr2 60547052 60547073 60547057 60547052 -
aaaagtatcccatttagctaat

SEQ ID NO: 211295 - DNA, 22 bp, Artificial Sequence
  Synthetic oligonucleotide; TTT chr2 60547037 60547058 60547042 60547037 -
agctaatgtgtctgagaaatac

SEQ ID NO: 211296 - DNA, 22 bp, Artificial Sequence
  Synthetic oligonucleotide; TTA chr2 60547036 60547057 60547041 60547036 -
gctaatgtgtctgagaaatact

SEQ ID NO: 211297 - DNA, 22 bp, Artificial Sequence
  Synthetic oligonucleotide; CTA chr2 60547032 60547053 60547037 60547032 -
atgtgtctgagaaatactgccc

SEQ ID NO: 211298 - DNA, 22 bp, Artificial Sequence
  Synthetic oligonucleotide; CTG chr2 60547023 60547044 60547028 60547023 -
agaaatactgcccgtgcatttg

SEQ ID NO: 211299 - DNA, 22 bp, Artificial Sequence
  Synthetic oligonucleotide; CTG chr2 60547013 60547034 60547018 60547013 -
cccgtgcatttggtatttcttt

SEQ ID NO: 211300 - DNA, 22 bp, Artificial Sequence
  Synthetic oligonucleotide; TTT chr2 60547002 60547023 60547007 60547002 -
ggtatttctttgattttgtggc

SEQ ID NO: 211301 - DNA, 22 bp, Artificial Sequence
  Synthetic oligonucleotide; TTG chr2 60547001 60547022 60547006 60547001 -
gtatttctttgattttgtggca

SEQ ID NO: 211302 - DNA, 22 bp, Artificial Sequence
  Synthetic oligonucleotide; TTT chr2 60546995 60547016 60547000 60546995 -
ctttgattttgtggcactgctg

SEQ ID NO: 211303 - DNA, 22 bp, Artificial Sequence
  Synthetic oligonucleotide; TTC chr2 60546994 60547015 60546999 60546994 -
tttgattttgtggcactgctga

SEQ ID NO: 211304 - DNA, 22 bp, Artificial Sequence
  Synthetic oligonucleotide; CTT chr2 60546992 60547013 60546997 60546992 -
tgattttgtggcactgctgaga

SEQ ID NO: 211305 - DNA, 22 bp, Artificial Sequence
  Synthetic oligonucleotide; TTT chr2 60546991 60547012 60546996 60546991 -
gattttgtggcactgctgagag

SEQ ID NO: 211306 - DNA, 22 bp, Artificial Sequence
  Synthetic oligonucleotide; TTG chr2 60546990 60547011 60546995 60546990 -
attttgtggcactgctgagagt

SEQ ID NO: 211307 - DNA, 22 bp, Artificial Sequence
  Synthetic oligonucleotide; TTT chr2 60546986 60547007 60546991 60546986 -
tgtggcactgctgagagtgaga

SEQ ID NO: 211308 - DNA, 22 bp, Artificial Sequence
  Synthetic oligonucleotide; TTT chr2 60546985 60547006 60546990 60546985 -
gtggcactgctgagagtgagag

SEQ ID NO: 211309 - DNA, 22 bp, Artificial Sequence
  Synthetic oligonucleotide; TTG chr2 60546984 60547005 60546989 60546984 -
tggcactgctgagagtgagagc

SEQ ID NO: 211310 - DNA, 22 bp, Artificial Sequence
  Synthetic oligonucleotide; CTG chr2 60546976 60546997 60546981 60546976 -
ctgagagtgagagcagaaaggt

SEQ ID NO: 211311 - DNA, 22 bp, Artificial Sequence
  Synthetic oligonucleotide; CTG chr2 60546973 60546994 60546978 60546973 -
agagtgagagcagaaaggtttt

SEQ ID NO: 211312 - DNA, 22 bp, Artificial Sequence
  Synthetic oligonucleotide; TTT chr2 60546952 60546973 60546957 60546952 -
ttggcagtgtgaattatgctgc

SEQ ID NO: 211313 - DNA, 22 bp, Artificial Sequence
  Synthetic oligonucleotide; TTT chr2 60546951 60546972 60546956 60546951 -
tggcagtgtgaattatgctgcg

SEQ ID NO: 211314 - DNA, 22 bp, Artificial Sequence
  Synthetic oligonucleotide; TTT chr2 60546950 60546971 60546955 60546950 -
ggcagtgtgaattatgctgcga

SEQ ID NO: 211315 - DNA, 22 bp, Artificial Sequence
  Synthetic oligonucleotide; TTG chr2 60546949 60546970 60546954 60546949 -
gcagtgtgaattatgctgcgac

SEQ ID NO: 211316 - DNA, 22 bp, Artificial Sequence
  Synthetic oligonucleotide; TTA chr2 60546936 60546957 60546941 60546936 -
tgctgcgacatgattattattt

SEQ ID NO: 211317 - DNA, 22 bp, Artificial Sequence
  Synthetic oligonucleotide; CTG chr2 60546931 60546952 60546936 60546931 -
cgacatgattattatttagatc

SEQ ID NO: 211318 - DNA, 22 bp, Artificial Sequence
  Synthetic oligonucleotide; TTA chr2 60546920 60546941 60546925 60546920 -
ttatttagatccgtttcatagg

SEQ ID NO: 211319 - DNA, 22 bp, Artificial Sequence
  Synthetic oligonucleotide; TTA chr2 60546917 60546938 60546922 60546917 -
tttagatccgtttcataggtgc

SEQ ID NO: 211320 - DNA, 22 bp, Artificial Sequence
  Synthetic oligonucleotide; TTT chr2 60546914 60546935 60546919 60546914 -
agatccgtttcataggtgcatg

SEQ ID NO: 211321 - DNA, 22 bp, Artificial Sequence
  Synthetic oligonucleotide; TTA chr2 60546913 60546934 60546918 60546913 -
gatccgtttcataggtgcatgc

SEQ ID NO: 211322 - DNA, 22 bp, Artificial Sequence
  Synthetic oligonucleotide; TTT chr2 60546904 60546925 60546909 60546904 -
cataggtgcatgcagtcgtttt

SEQ ID NO: 211323 - DNA, 22 bp, Artificial Sequence
  Synthetic oligonucleotide; TTC chr2 60546903 60546924 60546908 60546903 -
ataggtgcatgcagtcgttttc

SEQ ID NO: 211324 - DNA, 22 bp, Artificial Sequence
  Synthetic oligonucleotide; TTT chr2 60546883 60546904 60546888 60546883 -
tcttattacagcagtgtaaatg

SEQ ID NO: 211325 - DNA, 22 bp, Artificial Sequence
  Synthetic oligonucleotide; TTT chr2 60546882 60546903 60546887 60546882 -
cttattacagcagtgtaaatgt

SEQ ID NO: 211326 - DNA, 22 bp, Artificial Sequence
  Synthetic oligonucleotide; TTC chr2 60546881 60546902 60546886 60546881 -
ttattacagcagtgtaaatgtg

SEQ ID NO: 211327 - DNA, 22 bp, Artificial Sequence
  Synthetic oligonucleotide; CTT chr2 60546879 60546900 60546884 60546879 -
attacagcagtgtaaatgtggc

SEQ ID NO: 211328 - DNA, 22 bp, Artificial Sequence
  Synthetic oligonucleotide; TTA chr2 60546878 60546899 60546883 60546878 -
ttacagcagtgtaaatgtggca

SEQ ID NO: 211329 - DNA, 22 bp, Artificial Sequence
  Synthetic oligonucleotide; TTA chr2 60546875 60546896 60546880 60546875 -
cagcagtgtaaatgtggcacat

SEQ ID NO: 211330 - DNA, 22 bp, Artificial Sequence
  Synthetic oligonucleotide; TTT chr2 60546851 60546872 60546856 60546851 -
ttcatgtgacatagtagctttc

SEQ ID NO: 211331 - DNA, 22 bp, Artificial Sequence
  Synthetic oligonucleotide; TTT chr2 60546850 60546871 60546855 60546850 -
tcatgtgacatagtagctttct

SEQ ID NO: 211332 - DNA, 22 bp, Artificial Sequence
  Synthetic oligonucleotide; TTT chr2 60546849 60546870 60546854 60546849 -
catgtgacatagtagctttcta

SEQ ID NO: 211333 - DNA, 22 bp, Artificial Sequence
  Synthetic oligonucleotide; TTC chr2 60546848 60546869 60546853 60546848 -
atgtgacatagtagctttctaa

SEQ ID NO: 211334 - DNA, 22 bp, Artificial Sequence
  Synthetic oligonucleotide; CTT chr2 60546831 60546852 60546836 60546831 -
tctaatttatgaagccatgtct

SEQ ID NO: 211335 - DNA, 22 bp, Artificial Sequence
  Synthetic oligonucleotide; TTT chr2 60546830 60546851 60546835 60546830 -
ctaatttatgaagccatgtctg

SEQ ID NO: 211336 - DNA, 22 bp, Artificial Sequence
  Synthetic oligonucleotide; TTC chr2 60546829 60546850 60546834 60546829 -
taatttatgaagccatgtctgt

SEQ ID NO: 211337 - DNA, 22 bp, Artificial Sequence
  Synthetic oligonucleotide; CTA chr2 60546827 60546848 60546832 60546827 -
atttatgaagccatgtctgttt

SEQ ID NO: 211338 - DNA, 22 bp, Artificial Sequence
  Synthetic oligonucleotide; TTT chr2 60546823 60546844 60546828 60546823 -
atgaagccatgtctgtttactt

SEQ ID NO: 211339 - DNA, 22 bp, Artificial Sequence
  Synthetic oligonucleotide; TTA chr2 60546822 60546843 60546827 60546822 -
tgaagccatgtctgtttactta

SEQ ID NO: 211340 - DNA, 22 bp, Artificial Sequence
  Synthetic oligonucleotide; CTG chr2 60546808 60546829 60546813 60546808 -
tttacttaggagtatatacatt

SEQ ID NO: 211341 - DNA, 22 bp, Artificial Sequence
  Synthetic oligonucleotide; TTT chr2 60546805 60546826 60546810 60546805 -
acttaggagtatatacattcac

SEQ ID NO: 211342 - DNA, 22 bp, Artificial Sequence
  Synthetic oligonucleotide; TTA chr2 60546804 60546825 60546809 60546804 -
cttaggagtatatacattcaca

SEQ ID NO: 211343 - DNA, 22 bp, Artificial Sequence
  Synthetic oligonucleotide; CTT chr2 60546801 60546822 60546806 60546801 -
aggagtatatacattcacacac

SEQ ID NO: 211344 - DNA, 22 bp, Artificial Sequence
  Synthetic oligonucleotide; TTA chr2 60546800 60546821 60546805 60546800 -
ggagtatatacattcacacaca

SEQ ID NO: 211345 - DNA, 22 bp, Artificial Sequence
  Synthetic oligonucleotide; TTC chr2 60546785 60546806 60546790 60546785 -
acacacaaagggtgtgtgtgtt

SEQ ID NO: 211346 - DNA, 22 bp, Artificial Sequence
  Synthetic oligonucleotide; TTT chr2 60546762 60546783 60546767 60546762 -
attcacctctcctttcattctt

SEQ ID NO: 211347 - DNA, 22 bp, Artificial Sequence
  Synthetic oligonucleotide; TTA chr2 60546761 60546782 60546766 60546761 -
ttcacctctcctttcattcttt

SEQ ID NO: 211348 - DNA, 22 bp, Artificial Sequence
  Synthetic oligonucleotide; TTC chr2 60546758 60546779 60546763 60546758 -
acctctcctttcattctttggc

SEQ ID NO: 211349 - DNA, 22 bp, Artificial Sequence
  Synthetic oligonucleotide; CTC chr2 60546753 60546774 60546758 60546753 -
tcctttcattctttggcacaat

SEQ ID NO: 211350 - DNA, 22 bp, Artificial Sequence
  Synthetic oligonucleotide; CTC chr2 60546751 60546772 60546756 60546751 -
ctttcattctttggcacaatgg

SEQ ID NO: 211351 - DNA, 22 bp, Artificial Sequence
  Synthetic oligonucleotide; CTT chr2 60546748 60546769 60546753 60546748 -
tcattctttggcacaatggaca

SEQ ID NO: 211352 - DNA, 22 bp, Artificial Sequence
  Synthetic oligonucleotide; TTT chr2 60546747 60546768 60546752 60546747 -
cattctttggcacaatggacaa

SEQ ID NO: 211353 - DNA, 22 bp, Artificial Sequence
  Synthetic oligonucleotide; TTC chr2 60546746 60546767 60546751 60546746 -
attctttggcacaatggacaac

SEQ ID NO: 211354 - DNA, 22 bp, Artificial Sequence
  Synthetic oligonucleotide; TTC chr2 60546742 60546763 60546747 60546742 -
tttggcacaatggacaacttgg

SEQ ID NO: 211355 - DNA, 22 bp, Artificial Sequence
  Synthetic oligonucleotide; CTT chr2 60546740 60546761 60546745 60546740 -
tggcacaatggacaacttggtg

SEQ ID NO: 211356 - DNA, 22 bp, Artificial Sequence
  Synthetic oligonucleotide; TTT chr2 60546739 60546760 60546744 60546739 -
ggcacaatggacaacttggtgt

SEQ ID NO: 211357 - DNA, 22 bp, Artificial Sequence
  Synthetic oligonucleotide; TTG chr2 60546738 60546759 60546743 60546738 -
gcacaatggacaacttggtgta

SEQ ID NO: 211358 - DNA, 22 bp, Artificial Sequence
  Synthetic oligonucleotide; CTT chr2 60546722 60546743 60546727 60546722 -
ggtgtataggaaaaaagaaaca

SEQ ID NO: 211359 - DNA, 22 bp, Artificial Sequence
  Synthetic oligonucleotide; TTG chr2 60546721 60546742 60546726 60546721 -
gtgtataggaaaaaagaaacaa

SEQ ID NO: 211360 - DNA, 22 bp, Artificial Sequence
  Synthetic oligonucleotide; TTT chr2 60546695 60546716 60546700 60546695 -
ggtttctatccacttttttttt

SEQ ID NO: 211361 - DNA, 22 bp, Artificial Sequence
  Synthetic oligonucleotide; TTG chr2 60546694 60546715 60546699 60546694 -
gtttctatccactttttttttt

SEQ ID NO: 211362 - DNA, 22 bp, Artificial Sequence
  Synthetic oligonucleotide; TTT chr2 60546690 60546711 60546695 60546690 -
ctatccacttttttttttaacc

SEQ ID NO: 211363 - DNA, 22 bp, Artificial Sequence
  Synthetic oligonucleotide; TTC chr2 60546689 60546710 60546694 60546689 -
tatccacttttttttttaacca

SEQ ID NO: 211364 - DNA, 22 bp, Artificial Sequence
  Synthetic oligonucleotide; CTA chr2 60546687 60546708 60546692 60546687 -
tccacttttttttttaaccagt

SEQ ID NO: 211365 - DNA, 22 bp, Artificial Sequence
  Synthetic oligonucleotide; CTT chr2 60546680 60546701 60546685 60546680 -
ttttttttaaccagtttttctt

SEQ ID NO: 211366 - DNA, 22 bp, Artificial Sequence
  Synthetic oligonucleotide; TTT chr2 60546679 60546700 60546684 60546679 -
tttttttaaccagtttttcttg

SEQ ID NO: 211367 - DNA, 22 bp, Artificial Sequence
  Synthetic oligonucleotide; TTT chr2 60546678 60546699 60546683 60546678 -
ttttttaaccagtttttcttgt

SEQ ID NO: 211368 - DNA, 22 bp, Artificial Sequence
  Synthetic oligonucleotide; TTT chr2 60546677 60546698 60546682 60546677 -
tttttaaccagtttttcttgta

SEQ ID NO: 211369 - DNA, 22 bp, Artificial Sequence
  Synthetic oligonucleotide; TTT chr2 60546676 60546697 60546681 60546676 -
ttttaaccagtttttcttgtag

SEQ ID NO: 211370 - DNA, 22 bp, Artificial Sequence
  Synthetic oligonucleotide; TTT chr2 60546675 60546696 60546680 60546675 -
tttaaccagtttttcttgtagt

SEQ ID NO: 211371 - DNA, 22 bp, Artificial Sequence
  Synthetic oligonucleotide; TTT chr2 60546674 60546695 60546679 60546674 -
ttaaccagtttttcttgtagtt

SEQ ID NO: 211372 - DNA, 22 bp, Artificial Sequence
  Synthetic oligonucleotide; TTT chr2 60546673 60546694 60546678 60546673 -
taaccagtttttcttgtagtta

SEQ ID NO: 211373 - DNA, 22 bp, Artificial Sequence
  Synthetic oligonucleotide; TTT chr2 60546672 60546693 60546677 60546672 -
aaccagtttttcttgtagttat

SEQ ID NO: 211374 - DNA, 22 bp, Artificial Sequence
  Synthetic oligonucleotide; TTA chr2 60546671 60546692 60546676 60546671 -
accagtttttcttgtagttatt

SEQ ID NO: 211375 - DNA, 22 bp, Artificial Sequence
  Synthetic oligonucleotide; TTT chr2 60546663 60546684 60546668 60546663 -
ttcttgtagttattatttaagc

SEQ ID NO: 211376 - DNA, 22 bp, Artificial Sequence
  Synthetic oligonucleotide; TTT chr2 60546662 60546683 60546667 60546662 -
tcttgtagttattatttaagct

SEQ ID NO: 211377 - DNA, 22 bp, Artificial Sequence
  Synthetic oligonucleotide; TTT chr2 60546661 60546682 60546666 60546661 -
cttgtagttattatttaagctt

SEQ ID NO: 211378 - DNA, 22 bp, Artificial Sequence
  Synthetic oligonucleotide; TTC chr2 60546660 60546681 60546665 60546660 -
ttgtagttattatttaagcttt

SEQ ID NO: 211379 - DNA, 22 bp, Artificial Sequence
  Synthetic oligonucleotide; CTT chr2 60546658 60546679 60546663 60546658 -
gtagttattatttaagctttct

SEQ ID NO: 211380 - DNA, 22 bp, Artificial Sequence
  Synthetic oligonucleotide; TTG chr2 60546657 60546678 60546662 60546657 -
tagttattatttaagctttctt

SEQ ID NO: 211381 - DNA, 22 bp, Artificial Sequence
  Synthetic oligonucleotide; TTA chr2 60546651 60546672 60546656 60546651 -
ttatttaagctttctttatgtt

SEQ ID NO: 211382 - DNA, 22 bp, Artificial Sequence
  Synthetic oligonucleotide; TTA chr2 60546648 60546669 60546653 60546648 -
tttaagctttctttatgttccc

SEQ ID NO: 211383 - DNA, 22 bp, Artificial Sequence
  Synthetic oligonucleotide; TTT chr2 60546645 60546666 60546650 60546645 -
aagctttctttatgttccctgt

SEQ ID NO: 211384 - DNA, 22 bp, Artificial Sequence
  Synthetic oligonucleotide; TTA chr2 60546644 60546665 60546649 60546644 -
agctttctttatgttccctgtg

SEQ ID NO: 211385 - DNA, 22 bp, Artificial Sequence
  Synthetic oligonucleotide; CTT chr2 60546639 60546660 60546644 60546639 -
tctttatgttccctgtgttaac

SEQ ID NO: 211386 - DNA, 22 bp, Artificial Sequence
  Synthetic oligonucleotide; TTT chr2 60546638 60546659 60546643 60546638 -
ctttatgttccctgtgttaact

SEQ ID NO: 211387 - DNA, 22 bp, Artificial Sequence
  Synthetic oligonucleotide; TTC chr2 60546637 60546658 60546642 60546637 -
tttatgttccctgtgttaacta

SEQ ID NO: 211388 - DNA, 22 bp, Artificial Sequence
  Synthetic oligonucleotide; CTT chr2 60546635 60546656 60546640 60546635 -
tatgttccctgtgttaactatt

SEQ ID NO: 211389 - DNA, 22 bp, Artificial Sequence
  Synthetic oligonucleotide; TTT chr2 60546634 60546655 60546639 60546634 -
atgttccctgtgttaactattt

SEQ ID NO: 211390 - DNA, 22 bp, Artificial Sequence
  Synthetic oligonucleotide; TTA chr2 60546633 60546654 60546638 60546633 -
tgttccctgtgttaactattta

SEQ ID NO: 211391 - DNA, 22 bp, Artificial Sequence
  Synthetic oligonucleotide; TTC chr2 60546628 60546649 60546633 60546628 -
cctgtgttaactatttaagtag

SEQ ID NO: 211392 - DNA, 22 bp, Artificial Sequence
  Synthetic oligonucleotide; CTG chr2 60546624 60546645 60546629 60546624 -
tgttaactatttaagtagcatt

SEQ ID NO: 211393 - DNA, 22 bp, Artificial Sequence
  Synthetic oligonucleotide; TTA chr2 60546619 60546640 60546624 60546619 -
actatttaagtagcattctttc

SEQ ID NO: 211394 - DNA, 22 bp, Artificial Sequence
  Synthetic oligonucleotide; CTA chr2 60546615 60546636 60546620 60546615 -
tttaagtagcattctttctaaa

SEQ ID NO: 211395 - DNA, 22 bp, Artificial Sequence
  Synthetic oligonucleotide; TTT chr2 60546612 60546633 60546617 60546612 -
aagtagcattctttctaaactt

SEQ ID NO: 211396 - DNA, 22 bp, Artificial Sequence
  Synthetic oligonucleotide; TTA chr2 60546611 60546632 60546616 60546611 -
agtagcattctttctaaactta

SEQ ID NO: 211397 - DNA, 22 bp, Artificial Sequence
  Synthetic oligonucleotide; TTC chr2 60546601 60546622 60546606 60546601 -
tttctaaacttacaaaccagac

SEQ ID NO: 211398 - DNA, 22 bp, Artificial Sequence
  Synthetic oligonucleotide; CTT chr2 60546599 60546620 60546604 60546599 -
tctaaacttacaaaccagacac

SEQ ID NO: 211399 - DNA, 22 bp, Artificial Sequence
  Synthetic oligonucleotide; TTT chr2 60546598 60546619 60546603 60546598 -
ctaaacttacaaaccagacaca

SEQ ID NO: 211400 - DNA, 22 bp, Artificial Sequence
  Synthetic oligonucleotide; TTC chr2 60546597 60546618 60546602 60546597 -
taaacttacaaaccagacacat

SEQ ID NO: 211401 - DNA, 22 bp, Artificial Sequence
  Synthetic oligonucleotide; CTA chr2 60546595 60546616 60546600 60546595 -
aacttacaaaccagacacattt

SEQ ID NO: 211402 - DNA, 22 bp, Artificial Sequence
  Synthetic oligonucleotide; CTT chr2 60546590 60546611 60546595 60546590 -
acaaaccagacacatttgttgc

SEQ ID NO: 211403 - DNA, 22 bp, Artificial Sequence
  Synthetic oligonucleotide; TTA chr2 60546589 60546610 60546594 60546589 -
caaaccagacacatttgttgct

SEQ ID NO: 211404 - DNA, 22 bp, Artificial Sequence
  Synthetic oligonucleotide; TTT chr2 60546573 60546594 60546578 60546573 -
gttgctgtgggtgtgtgcatgg

SEQ ID NO: 211405 - DNA, 22 bp, Artificial Sequence
  Synthetic oligonucleotide; TTG chr2 60546572 60546593 60546577 60546572 -
ttgctgtgggtgtgtgcatggg

SEQ ID NO: 211406 - DNA, 22 bp, Artificial Sequence
  Synthetic oligonucleotide; TTG chr2 60546569 60546590 60546574 60546569 -
ctgtgggtgtgtgcatgggtat

SEQ ID NO: 211407 - DNA, 22 bp, Artificial Sequence
  Synthetic oligonucleotide; CTG chr2 60546566 60546587 60546571 60546566 -
tgggtgtgtgcatgggtatatg

SEQ ID NO: 211408 - DNA, 22 bp, Artificial Sequence
  Synthetic oligonucleotide; TTC chr2 60546529 60546550 60546534 60546529 -
tctggagttatgcaaggaagac

SEQ ID NO: 211409 - DNA, 22 bp, Artificial Sequence
  Synthetic oligonucleotide; CTC chr2 60546527 60546548 60546532 60546527 -
tggagttatgcaaggaagactg

SEQ ID NO: 211410 - DNA, 22 bp, Artificial Sequence
  Synthetic oligonucleotide; CTG chr2 60546525 60546546 60546530 60546525 -
gagttatgcaaggaagactgtt

SEQ ID NO: 211411 - DNA, 22 bp, Artificial Sequence
  Synthetic oligonucleotide; TTA chr2 60546519 60546540 60546524 60546519 -
tgcaaggaagactgttttcttt

SEQ ID NO: 211412 - DNA, 22 bp, Artificial Sequence
  Synthetic oligonucleotide; CTG chr2 60546505 60546526 60546510 60546505 -
ttttctttacatatgtgatgat

SEQ ID NO: 211413 - DNA, 22 bp, Artificial Sequence
  Synthetic oligonucleotide; TTT chr2 60546502 60546523 60546507 60546502 -
tctttacatatgtgatgatttg

SEQ ID NO: 211414 - DNA, 22 bp, Artificial Sequence
  Synthetic oligonucleotide; TTT chr2 60546501 60546522 60546506 60546501 -
ctttacatatgtgatgatttgc

SEQ ID NO: 211415 - DNA, 22 bp, Artificial Sequence
  Synthetic oligonucleotide; TTC chr2 60546500 60546521 60546505 60546500 -
tttacatatgtgatgatttgcc

SEQ ID NO: 211416 - DNA, 22 bp, Artificial Sequence
  Synthetic oligonucleotide; CTT chr2 60546498 60546519 60546503 60546498 -
tacatatgtgatgatttgcctc

SEQ ID NO: 211417 - DNA, 22 bp, Artificial Sequence
  Synthetic oligonucleotide; TTT chr2 60546497 60546518 60546502 60546497 -
acatatgtgatgatttgcctca

SEQ ID NO: 211418 - DNA, 22 bp, Artificial Sequence
  Synthetic oligonucleotide; TTA chr2 60546496 60546517 60546501 60546496 -
catatgtgatgatttgcctcat

SEQ ID NO: 211419 - DNA, 22 bp, Artificial Sequence
  Synthetic oligonucleotide; TTT chr2 60546481 60546502 60546486 60546481 -
gcctcattgacaaatttgctct

SEQ ID NO: 211420 - DNA, 22 bp, Artificial Sequence
  Synthetic oligonucleotide; TTG chr2 60546480 60546501 60546485 60546480 -
cctcattgacaaatttgctctc

SEQ ID NO: 211421 - DNA, 22 bp, Artificial Sequence
  Synthetic oligonucleotide; CTC chr2 60546476 60546497 60546481 60546476 -
attgacaaatttgctctctggt

SEQ ID NO: 211422 - DNA, 22 bp, Artificial Sequence
  Synthetic oligonucleotide; TTG chr2 60546472 60546493 60546477 60546472 -
acaaatttgctctctggttgat

SEQ ID NO: 211423 - DNA, 22 bp, Artificial Sequence
  Synthetic oligonucleotide; TTT chr2 60546464 60546485 60546469 60546464 -
gctctctggttgataaccttca

SEQ ID NO: 211424 - DNA, 22 bp, Artificial Sequence
  Synthetic oligonucleotide; TTG chr2 60546463 60546484 60546468 60546463 -
ctctctggttgataaccttcac

SEQ ID NO: 211425 - DNA, 22 bp, Artificial Sequence
  Synthetic oligonucleotide; CTC chr2 60546460 60546481 60546465 60546460 -
tctggttgataaccttcacatc

SEQ ID NO: 211426 - DNA, 22 bp, Artificial Sequence
  Synthetic oligonucleotide; CTC chr2 60546458 60546479 60546463 60546458 -
tggttgataaccttcacatcct

SEQ ID NO: 211427 - DNA, 22 bp, Artificial Sequence
  Synthetic oligonucleotide; CTG chr2 60546456 60546477 60546461 60546456 -
gttgataaccttcacatccttg

SEQ ID NO: 211428 - DNA, 22 bp, Artificial Sequence
  Synthetic oligonucleotide; TTG chr2 60546452 60546473 60546457 60546452 -
ataaccttcacatccttgtact

SEQ ID NO: 211429 - DNA, 22 bp, Artificial Sequence
  Synthetic oligonucleotide; CTT chr2 60546444 60546465 60546449 60546444 -
cacatccttgtactttttgtat

SEQ ID NO: 211430 - DNA, 22 bp, Artificial Sequence
  Synthetic oligonucleotide; TTC chr2 60546443 60546464 60546448 60546443 -
acatccttgtactttttgtatg

SEQ ID NO: 211431 - DNA, 22 bp, Artificial Sequence
  Synthetic oligonucleotide; CTT chr2 60546435 60546456 60546440 60546435 -
gtactttttgtatgctcacatt

SEQ ID NO: 211432 - DNA, 22 bp, Artificial Sequence
  Synthetic oligonucleotide; TTG chr2 60546434 60546455 60546439 60546434 -
tactttttgtatgctcacattt

SEQ ID NO: 211433 - DNA, 22 bp, Artificial Sequence
  Synthetic oligonucleotide; CTT chr2 60546429 60546450 60546434 60546429 -
tttgtatgctcacattttctgg

SEQ ID NO: 211434 - DNA, 22 bp, Artificial Sequence
  Synthetic oligonucleotide; TTT chr2 60546428 60546449 60546433 60546428 -
ttgtatgctcacattttctggg

SEQ ID NO: 211435 - DNA, 22 bp, Artificial Sequence
  Synthetic oligonucleotide; TTT chr2 60546427 60546448 60546432 60546427 -
tgtatgctcacattttctgggt

SEQ ID NO: 211436 - DNA, 22 bp, Artificial Sequence
  Synthetic oligonucleotide; TTT chr2 60546426 60546447 60546431 60546426 -
gtatgctcacattttctgggta

SEQ ID NO: 211437 - DNA, 22 bp, Artificial Sequence
  Synthetic oligonucleotide; TTG chr2 60546425 60546446 60546430 60546425 -
tatgctcacattttctgggtat

SEQ ID NO: 211438 - DNA, 22 bp, Artificial Sequence
  Synthetic oligonucleotide; CTC chr2 60546418 60546439 60546423 60546418 -
acattttctgggtattatatag

SEQ ID NO: 211439 - DNA, 22 bp, Artificial Sequence
  Synthetic oligonucleotide; TTT chr2 60546412 60546433 60546417 60546412 -
tctgggtattatatagagaagc

SEQ ID NO: 211440 - DNA, 22 bp, Artificial Sequence
  Synthetic oligonucleotide; TTT chr2 60546411 60546432 60546416 60546411 -
ctgggtattatatagagaagcc

SEQ ID NO: 211441 - DNA, 22 bp, Artificial Sequence
  Synthetic oligonucleotide; TTC chr2 60546410 60546431 60546415 60546410 -
tgggtattatatagagaagcct

SEQ ID NO: 211442 - DNA, 22 bp, Artificial Sequence
  Synthetic oligonucleotide; CTG chr2 60546408 60546429 60546413 60546408 -
ggtattatatagagaagcctag

SEQ ID NO: 211443 - DNA, 22 bp, Artificial Sequence
  Synthetic oligonucleotide; TTA chr2 60546401 60546422 60546406 60546401 -
tatagagaagcctagaaacact

SEQ ID NO: 211444 - DNA, 22 bp, Artificial Sequence
  Synthetic oligonucleotide; CTA chr2 60546387 60546408 60546392 60546387 -
gaaacactttacatgatgtggt

SEQ ID NO: 211445 - DNA, 22 bp, Artificial Sequence
  Synthetic oligonucleotide; CTT chr2 60546378 60546399 60546383 60546378 -
tacatgatgtggtgggatggca

SEQ ID NO: 211446 - DNA, 22 bp, Artificial Sequence
  Synthetic oligonucleotide; TTT chr2 60546377 60546398 60546382 60546377 -
acatgatgtggtgggatggcat

SEQ ID NO: 211447 - DNA, 22 bp, Artificial Sequence
  Synthetic oligonucleotide; TTA chr2 60546376 60546397 60546381 60546376 -
catgatgtggtgggatggcatg

SEQ ID NO: 211448 - DNA, 22 bp, Artificial Sequence
  Synthetic oligonucleotide; TTG chr2 60546348 60546369 60546353 60546348 -
agatgtgcttctcccctttctg

SEQ ID NO: 211449 - DNA, 22 bp, Artificial Sequence
  Synthetic oligonucleotide; CTT chr2 60546338 60546359 60546343 60546338 -
ctcccctttctgtcctctctgg

SEQ ID NO: 211450 - DNA, 22 bp, Artificial Sequence
  Synthetic oligonucleotide; TTC chr2 60546337 60546358 60546342 60546337 -
tcccctttctgtcctctctggc

SEQ ID NO: 211451 - DNA, 22 bp, Artificial Sequence
  Synthetic oligonucleotide; CTC chr2 60546335 60546356 60546340 60546335 -
ccctttctgtcctctctggcac

SEQ ID NO: 211452 - DNA, 22 bp, Artificial Sequence
  Synthetic oligonucleotide; CTT chr2 60546330 60546351 60546335 60546330 -
tctgtcctctctggcactctaa

SEQ ID NO: 211453 - DNA, 22 bp, Artificial Sequence
  Synthetic oligonucleotide; TTT chr2 60546329 60546350 60546334 60546329 -
ctgtcctctctggcactctaat

SEQ ID NO: 211454 - DNA, 22 bp, Artificial Sequence
  Synthetic oligonucleotide; TTC chr2 60546328 60546349 60546333 60546328 -
tgtcctctctggcactctaata

SEQ ID NO: 211455 - DNA, 22 bp, Artificial Sequence
  Synthetic oligonucleotide; CTG chr2 60546326 60546347 60546331 60546326 -
tcctctctggcactctaataat

SEQ ID NO: 211456 - DNA, 22 bp, Artificial Sequence
  Synthetic oligonucleotide; CTC chr2 60546321 60546342 60546326 60546321 -
tctggcactctaataattgtgc

SEQ ID NO: 211457 - DNA, 22 bp, Artificial Sequence
  Synthetic oligonucleotide; CTC chr2 60546319 60546340 60546324 60546319 -
tggcactctaataattgtgctt

SEQ ID NO: 211458 - DNA, 22 bp, Artificial Sequence
  Synthetic oligonucleotide; CTG chr2 60546317 60546338 60546322 60546317 -
gcactctaataattgtgctttt

SEQ ID NO: 211459 - DNA, 22 bp, Artificial Sequence
  Synthetic oligonucleotide; CTC chr2 60546311 60546332 60546316 60546311 -
taataattgtgcttttgtttct

SEQ ID NO: 211460 - DNA, 22 bp, Artificial Sequence
  Synthetic oligonucleotide; CTA chr2 60546309 60546330 60546314 60546309 -
ataattgtgcttttgtttctcc

SEQ ID NO: 211461 - DNA, 22 bp, Artificial Sequence
  Synthetic oligonucleotide; TTG chr2 60546302 60546323 60546307 60546302 -
tgcttttgtttctccaaccaca

SEQ ID NO: 211462 - DNA, 22 bp, Artificial Sequence
  Synthetic oligonucleotide; CTT chr2 60546297 60546318 60546302 60546297 -
ttgtttctccaaccacagccga

SEQ ID NO: 211463 - DNA, 22 bp, Artificial Sequence
  Synthetic oligonucleotide; TTT chr2 60546296 60546317 60546301 60546296 -
tgtttctccaaccacagccgag

SEQ ID NO: 211464 - DNA, 22 bp, Artificial Sequence
  Synthetic oligonucleotide; TTT chr2 60546295 60546316 60546300 60546295 -
gtttctccaaccacagccgagc

SEQ ID NO: 211465 - DNA, 22 bp, Artificial Sequence
  Synthetic oligonucleotide; TTG chr2 60546294 60546315 60546299 60546294 -
tttctccaaccacagccgagcc

SEQ ID NO: 211466 - DNA, 22 bp, Artificial Sequence
  Synthetic oligonucleotide; TTT chr2 60546291 60546312 60546296 60546291 -
ctccaaccacagccgagcctct

SEQ ID NO: 211467 - DNA, 22 bp, Artificial Sequence
  Synthetic oligonucleotide; TTC chr2 60546290 60546311 60546295 60546290 -
tccaaccacagccgagcctctt

SEQ ID NO: 211468 - DNA, 22 bp, Artificial Sequence
  Synthetic oligonucleotide; CTC chr2 60546288 60546309 60546293 60546288 -
caaccacagccgagcctcttga

SEQ ID NO: 211469 - DNA, 22 bp, Artificial Sequence
  Synthetic oligonucleotide; CTC chr2 60546270 60546291 60546275 60546270 -
ttgaagccattcttacagatga

SEQ ID NO: 211470 - DNA, 22 bp, Artificial Sequence
  Synthetic oligonucleotide; CTT chr2 60546268 60546289 60546273 60546268 -
gaagccattcttacagatgatg

SEQ ID NO: 211471 - DNA, 22 bp, Artificial Sequence
  Synthetic oligonucleotide; TTG chr2 60546267 60546288 60546272 60546267 -
aagccattcttacagatgatga

SEQ ID NO: 211472 - DNA, 22 bp, Artificial Sequence
  Synthetic oligonucleotide; TTC chr2 60546258 60546279 60546263 60546258 -
ttacagatgatgaaccagacca

SEQ ID NO: 211473 - DNA, 22 bp, Artificial Sequence
  Synthetic oligonucleotide; CTT chr2 60546256 60546277 60546261 60546256 -
acagatgatgaaccagaccacg

SEQ ID NO: 211474 - DNA, 22 bp, Artificial Sequence
  Synthetic oligonucleotide; TTA chr2 60546255 60546276 60546260 60546255 -
cagatgatgaaccagaccacgg

SEQ ID NO: 211475 - DNA, 22 bp, Artificial Sequence
  Synthetic oligonucleotide; TTG chr2 60546226 60546247 60546231 60546226 -
ggagctccagaaggggatcatg

SEQ ID NO: 211476 - DNA, 22 bp, Artificial Sequence
  Synthetic oligonucleotide; CTC chr2 60546219 60546240 60546224 60546219 -
cagaaggggatcatgacctcct

SEQ ID NO: 211477 - DNA, 22 bp, Artificial Sequence
  Synthetic oligonucleotide; CTC chr2 60546199 60546220 60546204 60546199 -
ctcacctgtgggcagtgccaga

SEQ ID NO: 211478 - DNA, 22 bp, Artificial Sequence
  Synthetic oligonucleotide; CTC chr2 60546196 60546217 60546201 60546196 -
acctgtgggcagtgccagatga

SEQ ID NO: 211479 - DNA, 22 bp, Artificial Sequence
  Synthetic oligonucleotide; CTG chr2 60546191 60546212 60546196 60546191 -
tgggcagtgccagatgaacttc

SEQ ID NO: 211480 - DNA, 22 bp, Artificial Sequence
  Synthetic oligonucleotide; CTT chr2 60546170 60546191 60546175 60546170 -
cccattgggggacattcttatt

SEQ ID NO: 211481 - DNA, 22 bp, Artificial Sequence
  Synthetic oligonucleotide; TTC chr2 60546169 60546190 60546174 60546169 -
ccattgggggacattcttattt

SEQ ID NO: 211482 - DNA, 22 bp, Artificial Sequence
  Synthetic oligonucleotide; TTG chr2 60546163 60546184 60546168 60546163 -
ggggacattcttatttttatcg

SEQ ID NO: 211483 - DNA, 22 bp, Artificial Sequence
  Synthetic oligonucleotide; TTC chr2 60546153 60546174 60546158 60546153 -
ttatttttatcgagcacaaacg

SEQ ID NO: 211484 - DNA, 22 bp, Artificial Sequence
  Synthetic oligonucleotide; CTT chr2 60546151 60546172 60546156 60546151 -
atttttatcgagcacaaacgga

SEQ ID NO: 211485 - DNA, 22 bp, Artificial Sequence
  Synthetic oligonucleotide; TTA chr2 60546150 60546171 60546155 60546150 -
tttttatcgagcacaaacggaa

SEQ ID NO: 211486 - DNA, 22 bp, Artificial Sequence
  Synthetic oligonucleotide; TTT chr2 60546147 60546168 60546152 60546147 -
ttatcgagcacaaacggaaaca

SEQ ID NO: 211487 - DNA, 22 bp, Artificial Sequence
  Synthetic oligonucleotide; TTT chr2 60546146 60546167 60546151 60546146 -
tatcgagcacaaacggaaacaa

SEQ ID NO: 211488 - DNA, 22 bp, Artificial Sequence
  Synthetic oligonucleotide; TTT chr2 60546145 60546166 60546150 60546145 -
atcgagcacaaacggaaacaat

SEQ ID NO: 211489 - DNA, 22 bp, Artificial Sequence
  Synthetic oligonucleotide; TTA chr2 60546144 60546165 60546149 60546144 -
tcgagcacaaacggaaacaatg

SEQ ID NO: 211490 - DNA, 22 bp, Artificial Sequence
  Synthetic oligonucleotide; CTC chr2 60546109 60546130 60546114 60546109 -
tgcttagaaaaagctgtggata

SEQ ID NO: 211491 - DNA, 22 bp, Artificial Sequence
  Synthetic oligonucleotide; CTG chr2 60546107 60546128 60546112 60546107 -
cttagaaaaagctgtggataag

SEQ ID NO: 211492 - DNA, 22 bp, Artificial Sequence
  Synthetic oligonucleotide; CTT chr2 60546104 60546125 60546109 60546104 -
agaaaaagctgtggataagcca

SEQ ID NO: 211493 - DNA, 22 bp, Artificial Sequence
  Synthetic oligonucleotide; TTA chr2 60546103 60546124 60546108 60546103 -
gaaaaagctgtggataagccac

SEQ ID NO: 211494 - DNA, 22 bp, Artificial Sequence
  Synthetic oligonucleotide; CTG chr2 60546093 60546114 60546098 60546093 -
tggataagccaccttccccttc

SEQ ID NO: 211495 - DNA, 22 bp, Artificial Sequence
  Synthetic oligonucleotide; CTT chr2 60546078 60546099 60546083 60546078 -
ccccttcaccaatcgagatgaa

SEQ ID NO: 211496 - DNA, 22 bp, Artificial Sequence
  Synthetic oligonucleotide; TTC chr2 60546077 60546098 60546082 60546077 -
cccttcaccaatcgagatgaaa

SEQ ID NO: 211497 - DNA, 22 bp, Artificial Sequence
  Synthetic oligonucleotide; CTT chr2 60546072 60546093 60546077 60546072 -
caccaatcgagatgaaaaaagc

SEQ ID NO: 211498 - DNA, 22 bp, Artificial Sequence
  Synthetic oligonucleotide; TTC chr2 60546071 60546092 60546076 60546071 -
accaatcgagatgaaaaaagca

SEQ ID NO: 211499 - DNA, 22 bp, Artificial Sequence
  Synthetic oligonucleotide; TTG chr2 60546030 60546051 60546035 60546030 -
gcatccaggtcacgccagagga

SEQ ID NO: 211500 - DNA, 22 bp, Artificial Sequence
  Synthetic oligonucleotide; TTG chr2 60545999 60546020 60546004 60545999 -
tttatcaacgtcatctagagga

SEQ ID NO: 211501 - DNA, 22 bp, Artificial Sequence
  Synthetic oligonucleotide; TTT chr2 60545996 60546017 60546001 60545996 -
atcaacgtcatctagaggaatt

SEQ ID NO: 211502 - DNA, 22 bp, Artificial Sequence
  Synthetic oligonucleotide; TTA chr2 60545995 60546016 60546000 60545995 -
tcaacgtcatctagaggaattt

SEQ ID NO: 211503 - DNA, 22 bp, Artificial Sequence
  Synthetic oligonucleotide; CTA chr2 60545982 60546003 60545987 60545982 -
gaggaatttgccccaaacagga

SEQ ID NO: 211504 - DNA, 22 bp, Artificial Sequence
  Synthetic oligonucleotide; TTT chr2 60545973 60545994 60545978 60545973 -
gccccaaacaggaacacatagc

SEQ ID NO: 211505 - DNA, 22 bp, Artificial Sequence
  Synthetic oligonucleotide; TTG chr2 60545972 60545993 60545977 60545972 -
ccccaaacaggaacacatagca

SEQ ID NO: 211506 - DNA, 22 bp, Artificial Sequence
  Synthetic oligonucleotide; CTG chr2 60545922 60545943 60545927 60545922 -
tttgcatgttttcttttcattt

SEQ ID NO: 211507 - DNA, 22 bp, Artificial Sequence
  Synthetic oligonucleotide; TTT chr2 60545919 60545940 60545924 60545919 -
gcatgttttcttttcattttca

SEQ ID NO: 211508 - DNA, 22 bp, Artificial Sequence
  Synthetic oligonucleotide; TTG chr2 60545918 60545939 60545923 60545918 -
catgttttcttttcattttcag

SEQ ID NO: 211509 - DNA, 22 bp, Artificial Sequence
  Synthetic oligonucleotide; TTT chr2 60545911 60545932 60545916 60545911 -
tcttttcattttcagaggtgct

SEQ ID NO: 211510 - DNA, 22 bp, Artificial Sequence
  Synthetic oligonucleotide; TTT chr2 60545910 60545931 60545915 60545910 -
cttttcattttcagaggtgctg

SEQ ID NO: 211511 - DNA, 22 bp, Artificial Sequence
  Synthetic oligonucleotide; TTC chr2 60545909 60545930 60545914 60545909 -
ttttcattttcagaggtgctgt

SEQ ID NO: 211512 - DNA, 22 bp, Artificial Sequence
  Synthetic oligonucleotide; CTT chr2 60545907 60545928 60545912 60545907 -
ttcattttcagaggtgctgtag

SEQ ID NO: 211513 - DNA, 22 bp, Artificial Sequence
  Synthetic oligonucleotide; TTT chr2 60545906 60545927 60545911 60545906 -
tcattttcagaggtgctgtagc

SEQ ID NO: 211514 - DNA, 22 bp, Artificial Sequence
  Synthetic oligonucleotide; TTT chr2 60545905 60545926 60545910 60545905 -
cattttcagaggtgctgtagcc

SEQ ID NO: 211515 - DNA, 22 bp, Artificial Sequence
  Synthetic oligonucleotide; TTC chr2 60545904 60545925 60545909 60545904 -
attttcagaggtgctgtagcca

SEQ ID NO: 211516 - DNA, 22 bp, Artificial Sequence
  Synthetic oligonucleotide; TTT chr2 60545900 60545921 60545905 60545900 -
tcagaggtgctgtagccaagca

SEQ ID NO: 211517 - DNA, 22 bp, Artificial Sequence
  Synthetic oligonucleotide; TTT chr2 60545899 60545920 60545904 60545899 -
cagaggtgctgtagccaagcag

SEQ ID NO: 211518 - DNA, 22 bp, Artificial Sequence
  Synthetic oligonucleotide; TTC chr2 60545898 60545919 60545903 60545898 -
agaggtgctgtagccaagcagt

SEQ ID NO: 211519 - DNA, 22 bp, Artificial Sequence
  Synthetic oligonucleotide; CTG chr2 60545888 60545909 60545893 60545888 -
tagccaagcagtaaggagttgt

SEQ ID NO: 211520 - DNA, 22 bp, Artificial Sequence
  Synthetic oligonucleotide; TTG chr2 60545867 60545888 60545872 60545867 -
tgaagtgctttctctattactc

SEQ ID NO: 211521 - DNA, 22 bp, Artificial Sequence
  Synthetic oligonucleotide; CTT chr2 60545857 60545878 60545862 60545857 -
tctctattactctatgtgactg

SEQ ID NO: 211522 - DNA, 22 bp, Artificial Sequence
  Synthetic oligonucleotide; TTT chr2 60545856 60545877 60545861 60545856 -
ctctattactctatgtgactgt

SEQ ID NO: 211523 - DNA, 22 bp, Artificial Sequence
  Synthetic oligonucleotide; TTC chr2 60545855 60545876 60545860 60545855 -
tctattactctatgtgactgtc

SEQ ID NO: 211524 - DNA, 22 bp, Artificial Sequence
  Synthetic oligonucleotide; CTC chr2 60545853 60545874 60545858 60545853 -
tattactctatgtgactgtcca

SEQ ID NO: 211525 - DNA, 22 bp, Artificial Sequence
  Synthetic oligonucleotide; CTA chr2 60545851 60545872 60545856 60545851 -
ttactctatgtgactgtccatg

SEQ ID NO: 211526 - DNA, 22 bp, Artificial Sequence
  Synthetic oligonucleotide; TTA chr2 60545848 60545869 60545853 60545848 -
ctctatgtgactgtccatgaca

SEQ ID NO: 211527 - DNA, 22 bp, Artificial Sequence
  Synthetic oligonucleotide; CTC chr2 60545845 60545866 60545850 60545845 -
tatgtgactgtccatgacagcc

SEQ ID NO: 211528 - DNA, 22 bp, Artificial Sequence
  Synthetic oligonucleotide; CTA chr2 60545843 60545864 60545848 60545843 -
tgtgactgtccatgacagccct

SEQ ID NO: 211529 - DNA, 22 bp, Artificial Sequence
  Synthetic oligonucleotide; CTG chr2 60545835 60545856 60545840 60545835 -
tccatgacagccctgtaatgtt

SEQ ID NO: 211530 - DNA, 22 bp, Artificial Sequence
  Synthetic oligonucleotide; CTG chr2 60545820 60545841 60545825 60545820 -
taatgttaaaataatcatttct

SEQ ID NO: 211531 - DNA, 22 bp, Artificial Sequence
  Synthetic oligonucleotide; TTA chr2 60545812 60545833 60545817 60545812 -
aaataatcatttctgttgctta

SEQ ID NO: 211532 - DNA, 22 bp, Artificial Sequence
  Synthetic oligonucleotide; TTT chr2 60545800 60545821 60545805 60545800 -
ctgttgcttacgtccagaacac

SEQ ID NO: 211533 - DNA, 22 bp, Artificial Sequence
  Synthetic oligonucleotide; TTC chr2 60545799 60545820 60545804 60545799 -
tgttgcttacgtccagaacaca

SEQ ID NO: 211534 - DNA, 22 bp, Artificial Sequence
  Synthetic oligonucleotide; CTG chr2 60545797 60545818 60545802 60545797 -
ttgcttacgtccagaacacaga

SEQ ID NO: 211535 - DNA, 22 bp, Artificial Sequence
  Synthetic oligonucleotide; TTG chr2 60545794 60545815 60545799 60545794 -
cttacgtccagaacacagaaaa

SEQ ID NO: 211536 - DNA, 22 bp, Artificial Sequence
  Synthetic oligonucleotide; CTT chr2 60545791 60545812 60545796 60545791 -
acgtccagaacacagaaaaata

SEQ ID NO: 211537 - DNA, 22 bp, Artificial Sequence
  Synthetic oligonucleotide; TTA chr2 60545790 60545811 60545795 60545790 -
cgtccagaacacagaaaaataa

SEQ ID NO: 211538 - DNA, 22 bp, Artificial Sequence
  Synthetic oligonucleotide; TTT chr2 60545762 60545783 60545767 60545762 -
tccacctcactgaatcagatgt

SEQ ID NO: 211539 - DNA, 22 bp, Artificial Sequence
  Synthetic oligonucleotide; TTT chr2 60545761 60545782 60545766 60545761 -
ccacctcactgaatcagatgta

SEQ ID NO: 211540 - DNA, 22 bp, Artificial Sequence
  Synthetic oligonucleotide; TTC chr2 60545760 60545781 60545765 60545760 -
cacctcactgaatcagatgtag

SEQ ID NO: 211541 - DNA, 22 bp, Artificial Sequence
  Synthetic oligonucleotide; CTC chr2 60545754 60545775 60545759 60545754 -
actgaatcagatgtaggcagga

SEQ ID NO: 211542 - DNA, 22 bp, Artificial Sequence
  Synthetic oligonucleotide; CTG chr2 60545750 60545771 60545755 60545750 -
aatcagatgtaggcaggatagg

SEQ ID NO: 211543 - DNA, 22 bp, Artificial Sequence
  Synthetic oligonucleotide; CTT chr2 60545709 60545730 60545714 60545709 -
ctctctggatctgtcgattttg

SEQ ID NO: 211544 - DNA, 22 bp, Artificial Sequence
  Synthetic oligonucleotide; TTC chr2 60545708 60545729 60545713 60545708 -
tctctggatctgtcgattttgg

SEQ ID NO: 211545 - DNA, 22 bp, Artificial Sequence
  Synthetic oligonucleotide; CTC chr2 60545706 60545727 60545711 60545706 -
tctggatctgtcgattttggat

SEQ ID NO: 211546 - DNA, 22 bp, Artificial Sequence
  Synthetic oligonucleotide; CTC chr2 60545704 60545725 60545709 60545704 -
tggatctgtcgattttggattt

SEQ ID NO: 211547 - DNA, 22 bp, Artificial Sequence
  Synthetic oligonucleotide; CTG chr2 60545702 60545723 60545707 60545702 -
gatctgtcgattttggatttct

SEQ ID NO: 211548 - DNA, 22 bp, Artificial Sequence
  Synthetic oligonucleotide; CTG chr2 60545696 60545717 60545701 60545696 -
tcgattttggatttcttttctt

SEQ ID NO: 211549 - DNA, 22 bp, Artificial Sequence
  Synthetic oligonucleotide; TTT chr2 60545689 60545710 60545694 60545689 -
tggatttcttttcttccccatc

SEQ ID NO: 211550 - DNA, 22 bp, Artificial Sequence
  Synthetic oligonucleotide; TTT chr2 60545688 60545709 60545693 60545688 -
ggatttcttttcttccccatcc

SEQ ID NO: 211551 - DNA, 22 bp, Artificial Sequence
  Synthetic oligonucleotide; TTG chr2 60545687 60545708 60545692 60545687 -
gatttcttttcttccccatccc

SEQ ID NO: 211552 - DNA, 22 bp, Artificial Sequence
  Synthetic oligonucleotide; TTT chr2 60545682 60545703 60545687 60545682 -
cttttcttccccatccccacct

SEQ ID NO: 211553 - DNA, 22 bp, Artificial Sequence
  Synthetic oligonucleotide; TTC chr2 60545681 60545702 60545686 60545681 -
ttttcttccccatccccacctt

SEQ ID NO: 211554 - DNA, 22 bp, Artificial Sequence
  Synthetic oligonucleotide; CTT chr2 60545679 60545700 60545684 60545679 -
ttcttccccatccccaccttct

SEQ ID NO: 211555 - DNA, 22 bp, Artificial Sequence
  Synthetic oligonucleotide; TTT chr2 60545678 60545699 60545683 60545678 -
tcttccccatccccaccttctc

SEQ ID NO: 211556 - DNA, 22 bp, Artificial Sequence
  Synthetic oligonucleotide; TTT chr2 60545677 60545698 60545682 60545677 -
cttccccatccccaccttctca

SEQ ID NO: 211557 - DNA, 22 bp, Artificial Sequence
  Synthetic oligonucleotide; TTC chr2 60545676 60545697 60545681 60545676 -
ttccccatccccaccttctcat

SEQ ID NO: 211558 - DNA, 22 bp, Artificial Sequence
  Synthetic oligonucleotide; CTT chr2 60545674 60545695 60545679 60545674 -
ccccatccccaccttctcattt

SEQ ID NO: 211559 - DNA, 22 bp, Artificial Sequence
  Synthetic oligonucleotide; TTC chr2 60545673 60545694 60545678 60545673 -
cccatccccaccttctcatttt

SEQ ID NO: 211560 - DNA, 22 bp, Artificial Sequence
  Synthetic oligonucleotide; CTT chr2 60545659 60545680 60545664 60545659 -
ctcattttgaagtattgagctt

SEQ ID NO: 211561 - DNA, 22 bp, Artificial Sequence
  Synthetic oligonucleotide; TTC chr2 60545658 60545679 60545663 60545658 -
tcattttgaagtattgagcttt

SEQ ID NO: 211562 - DNA, 22 bp, Artificial Sequence
  Synthetic oligonucleotide; CTC chr2 60545656 60545677 60545661 60545656 -
attttgaagtattgagctttac

SEQ ID NO: 211563 - DNA, 22 bp, Artificial Sequence
  Synthetic oligonucleotide; TTT chr2 60545652 60545673 60545657 60545652 -
tgaagtattgagctttactaca

SEQ ID NO: 211564 - DNA, 22 bp, Artificial Sequence
  Synthetic oligonucleotide; TTT chr2 60545651 60545672 60545656 60545651 -
gaagtattgagctttactacac

SEQ ID NO: 211565 - DNA, 22 bp, Artificial Sequence
  Synthetic oligonucleotide; TTG chr2 60545650 60545671 60545655 60545650 -
aagtattgagctttactacacc

SEQ ID NO: 211566 - DNA, 22 bp, Artificial Sequence
  Synthetic oligonucleotide; TTG chr2 60545642 60545663 60545647 60545642 -
agctttactacacctagtccag

SEQ ID NO: 211567 - DNA, 22 bp, Artificial Sequence
  Synthetic oligonucleotide; CTT chr2 60545637 60545658 60545642 60545637 -
tactacacctagtccagcttcc

SEQ ID NO: 211568 - DNA, 22 bp, Artificial Sequence
  Synthetic oligonucleotide; TTT chr2 60545636 60545657 60545641 60545636 -
actacacctagtccagcttcca

SEQ ID NO: 211569 - DNA, 22 bp, Artificial Sequence
  Synthetic oligonucleotide; TTA chr2 60545635 60545656 60545640 60545635 -
ctacacctagtccagcttccat

SEQ ID NO: 211570 - DNA, 22 bp, Artificial Sequence
  Synthetic oligonucleotide; CTA chr2 60545632 60545653 60545637 60545632 -
cacctagtccagcttccattgt

SEQ ID NO: 211571 - DNA, 22 bp, Artificial Sequence
  Synthetic oligonucleotide; CTA chr2 60545626 60545647 60545631 60545626 -
gtccagcttccattgtccattt

SEQ ID NO: 211572 - DNA, 22 bp, Artificial Sequence
  Synthetic oligonucleotide; CTT chr2 60545617 60545638 60545622 60545617 -
ccattgtccatttccagccttg

SEQ ID NO: 211573 - DNA, 22 bp, Artificial Sequence
  Synthetic oligonucleotide; TTC chr2 60545616 60545637 60545621 60545616 -
cattgtccatttccagccttgg

SEQ ID NO: 211574 - DNA, 22 bp, Artificial Sequence
  Synthetic oligonucleotide; TTG chr2 60545611 60545632 60545616 60545611 -
tccatttccagccttggtgacg

SEQ ID NO: 211575 - DNA, 22 bp, Artificial Sequence
  Synthetic oligonucleotide; TTT chr2 60545604 60545625 60545609 60545604 -
ccagccttggtgacgtgtcaga

SEQ ID NO: 211576 - DNA, 22 bp, Artificial Sequence
  Synthetic oligonucleotide; TTC chr2 60545603 60545624 60545608 60545603 -
cagccttggtgacgtgtcagag

SEQ ID NO: 211577 - DNA, 22 bp, Artificial Sequence
  Synthetic oligonucleotide; CTT chr2 60545596 60545617 60545601 60545596 -
ggtgacgtgtcagaggcaaagt

SEQ ID NO: 211578 - DNA, 22 bp, Artificial Sequence
  Synthetic oligonucleotide; TTG chr2 60545595 60545616 60545600 60545595 -
gtgacgtgtcagaggcaaagtg

SEQ ID NO: 211579 - DNA, 22 bp, Artificial Sequence
  Synthetic oligonucleotide; TTT chr2 60545558 60545579 60545563 60545558 -
gcagttcagccaatgacttgtt

SEQ ID NO: 211580 - DNA, 22 bp, Artificial Sequence
  Synthetic oligonucleotide; TTG chr2 60545557 60545578 60545562 60545557 -
cagttcagccaatgacttgttt

SEQ ID NO: 211581 - DNA, 22 bp, Artificial Sequence
  Synthetic oligonucleotide; TTC chr2 60545551 60545572 60545556 60545551 -
agccaatgacttgtttgactca

SEQ ID NO: 211582 - DNA, 22 bp, Artificial Sequence
  Synthetic oligonucleotide; CTT chr2 60545539 60545560 60545544 60545539 -
gtttgactcagaacatctggcc

SEQ ID NO: 211583 - DNA, 22 bp, Artificial Sequence
  Synthetic oligonucleotide; TTG chr2 60545538 60545559 60545543 60545538 -
tttgactcagaacatctggcca

SEQ ID NO: 211584 - DNA, 22 bp, Artificial Sequence
  Synthetic oligonucleotide; TTT chr2 60545535 60545556 60545540 60545535 -
gactcagaacatctggccaggc

SEQ ID NO: 211585 - DNA, 22 bp, Artificial Sequence
  Synthetic oligonucleotide; TTG chr2 60545534 60545555 60545539 60545534 -
actcagaacatctggccaggcc

SEQ ID NO: 211586 - DNA, 22 bp, Artificial Sequence
  Synthetic oligonucleotide; CTC chr2 60545530 60545551 60545535 60545530 -
agaacatctggccaggcctcct

SEQ ID NO: 211587 - DNA, 22 bp, Artificial Sequence
  Synthetic oligonucleotide; CTG chr2 60545520 60545541 60545525 60545520 -
gccaggcctccttaggggttca

SEQ ID NO: 211588 - DNA, 22 bp, Artificial Sequence
  Synthetic oligonucleotide; CTC chr2 60545510 60545531 60545515 60545510 -
cttaggggttcagctcgttctc

SEQ ID NO: 211589 - DNA, 22 bp, Artificial Sequence
  Synthetic oligonucleotide; CTT chr2 60545507 60545528 60545512 60545507 -
aggggttcagctcgttctcaag

SEQ ID NO: 211590 - DNA, 22 bp, Artificial Sequence
  Synthetic oligonucleotide; TTA chr2 60545506 60545527 60545511 60545506 -
ggggttcagctcgttctcaagg

SEQ ID NO: 211591 - DNA, 22 bp, Artificial Sequence
  Synthetic oligonucleotide; TTC chr2 60545499 60545520 60545504 60545499 -
agctcgttctcaaggcttccct

SEQ ID NO: 211592 - DNA, 22 bp, Artificial Sequence
  Synthetic oligonucleotide; CTC chr2 60545494 60545515 60545499 60545494 -
gttctcaaggcttccctgaagt

SEQ ID NO: 211593 - DNA, 22 bp, Artificial Sequence
  Synthetic oligonucleotide; TTC chr2 60545490 60545511 60545495 60545490 -
tcaaggcttccctgaagtagag

SEQ ID NO: 211594 - DNA, 22 bp, Artificial Sequence
  Synthetic oligonucleotide; CTC chr2 60545488 60545509 60545493 60545488 -
aaggcttccctgaagtagagtg

SEQ ID NO: 211595 - DNA, 22 bp, Artificial Sequence
  Synthetic oligonucleotide; CTT chr2 60545481 60545502 60545486 60545481 -
ccctgaagtagagtgggctggc

SEQ ID NO: 211596 - DNA, 22 bp, Artificial Sequence
  Synthetic oligonucleotide; TTC chr2 60545480 60545501 60545485 60545480 -
cctgaagtagagtgggctggca

SEQ ID NO: 211597 - DNA, 22 bp, Artificial Sequence
  Synthetic oligonucleotide; CTG chr2 60545476 60545497 60545481 60545476 -
aagtagagtgggctggcagggt

SEQ ID NO: 211598 - DNA, 22 bp, Artificial Sequence
  Synthetic oligonucleotide; CTG chr2 60545461 60545482 60545466 60545461 -
gcagggtagttggaggtggtgg

SEQ ID NO: 211599 - DNA, 22 bp, Artificial Sequence
  Synthetic oligonucleotide; TTG chr2 60545449 60545470 60545454 60545449 -
gaggtggtggaaagagttaact

SEQ ID NO: 211600 - DNA, 22 bp, Artificial Sequence
  Synthetic oligonucleotide; TTA chr2 60545430 60545451 60545435 60545430 -
actgagcttcagggctagcctt

SEQ ID NO: 211601 - DNA, 22 bp, Artificial Sequence
  Synthetic oligonucleotide; CTG chr2 60545426 60545447 60545431 60545426 -
agcttcagggctagccttggat

SEQ ID NO: 211602 - DNA, 22 bp, Artificial Sequence
  Synthetic oligonucleotide; CTT chr2 60545421 60545442 60545426 60545421 -
cagggctagccttggatccata

SEQ ID NO: 211603 - DNA, 22 bp, Artificial Sequence
  Synthetic oligonucleotide; TTC chr2 60545420 60545441 60545425 60545420 -
agggctagccttggatccatat

SEQ ID NO: 211604 - DNA, 22 bp, Artificial Sequence
  Synthetic oligonucleotide; CTA chr2 60545413 60545434 60545418 60545413 -
gccttggatccatattggctgt

SEQ ID NO: 211605 - DNA, 22 bp, Artificial Sequence
  Synthetic oligonucleotide; CTT chr2 60545408 60545429 60545413 60545408 -
ggatccatattggctgtcagcc

SEQ ID NO: 211606 - DNA, 22 bp, Artificial Sequence
  Synthetic oligonucleotide; TTG chr2 60545407 60545428 60545412 60545407 -
gatccatattggctgtcagccc

SEQ ID NO: 211607 - DNA, 22 bp, Artificial Sequence
  Synthetic oligonucleotide; TTG chr2 60545396 60545417 60545401 60545396 -
gctgtcagcccggatggggctg

SEQ ID NO: 211608 - DNA, 22 bp, Artificial Sequence
  Synthetic oligonucleotide; CTG chr2 60545392 60545413 60545397 60545392 -
tcagcccggatggggctgtaat

SEQ ID NO: 211609 - DNA, 22 bp, Artificial Sequence
  Synthetic oligonucleotide; CTG chr2 60545374 60545395 60545379 60545374 -
taattaaacacagccccgtggt

SEQ ID NO: 211610 - DNA, 22 bp, Artificial Sequence
  Synthetic oligonucleotide; TTA chr2 60545368 60545389 60545373 60545368 -
aacacagccccgtggtgggatg

SEQ ID NO: 211611 - DNA, 22 bp, Artificial Sequence
  Synthetic oligonucleotide; CTT chr2 60545333 60545354 60545338 60545333 -
gactttaagatgccattttcga

SEQ ID NO: 211612 - DNA, 22 bp, Artificial Sequence
  Synthetic oligonucleotide; TTG chr2 60545332 60545353 60545337 60545332 -
actttaagatgccattttcgac

SEQ ID NO: 211613 - DNA, 22 bp, Artificial Sequence
  Synthetic oligonucleotide; CTT chr2 60545328 60545349 60545333 60545328 -
taagatgccattttcgactggc

SEQ ID NO: 211614 - DNA, 22 bp, Artificial Sequence
  Synthetic oligonucleotide; TTT chr2 60545327 60545348 60545332 60545327 -
aagatgccattttcgactggcc

SEQ ID NO: 211615 - DNA, 22 bp, Artificial Sequence
  Synthetic oligonucleotide; TTA chr2 60545326 60545347 60545331 60545326 -
agatgccattttcgactggcca

SEQ ID NO: 211616 - DNA, 22 bp, Artificial Sequence
  Synthetic oligonucleotide; TTT chr2 60545315 60545336 60545320 60545315 -
tcgactggccaggccagagtag

SEQ ID NO: 211617 - DNA, 22 bp, Artificial Sequence
  Synthetic oligonucleotide; TTT chr2 60545314 60545335 60545319 60545314 -
cgactggccaggccagagtaga

SEQ ID NO: 211618 - DNA, 22 bp, Artificial Sequence
  Synthetic oligonucleotide; TTC chr2 60545313 60545334 60545318 60545313 -
gactggccaggccagagtagag

SEQ ID NO: 211619 - DNA, 22 bp, Artificial Sequence
  Synthetic oligonucleotide; CTG chr2 60545308 60545329 60545313 60545308 -
gccaggccagagtagagagggc

SEQ ID NO: 211620 - DNA, 22 bp, Artificial Sequence
  Synthetic oligonucleotide; TTG chr2 60545281 60545302 60545286 60545281 -
ctgaagcgcacagacatgctta

SEQ ID NO: 211621 - DNA, 22 bp, Artificial Sequence
  Synthetic oligonucleotide; CTG chr2 60545278 60545299 60545283 60545278 -
aagcgcacagacatgcttactc

SEQ ID NO: 211622 - DNA, 22 bp, Artificial Sequence
  Synthetic oligonucleotide; CTT chr2 60545260 60545281 60545265 60545260 -
actcgaaaagtttaagggcatg

SEQ ID NO: 211623 - DNA, 22 bp, Artificial Sequence
  Synthetic oligonucleotide; TTA chr2 60545259 60545280 60545264 60545259 -
ctcgaaaagtttaagggcatgt

SEQ ID NO: 211624 - DNA, 22 bp, Artificial Sequence
  Synthetic oligonucleotide; CTC chr2 60545256 60545277 60545261 60545256 -
gaaaagtttaagggcatgttgg

SEQ ID NO: 211625 - DNA, 22 bp, Artificial Sequence
  Synthetic oligonucleotide; TTT chr2 60545247 60545268 60545252 60545247 -
aagggcatgttggaaatttcaa

SEQ ID NO: 211626 - DNA, 22 bp, Artificial Sequence
  Synthetic oligonucleotide; TTA chr2 60545246 60545267 60545251 60545246 -
agggcatgttggaaatttcaaa

SEQ ID NO: 211627 - DNA, 22 bp, Artificial Sequence
  Synthetic oligonucleotide; TTG chr2 60545235 60545256 60545240 60545235 -
gaaatttcaaaaggttggtttg

SEQ ID NO: 211628 - DNA, 22 bp, Artificial Sequence
  Synthetic oligonucleotide; TTT chr2 60545228 60545249 60545233 60545228 -
caaaaggttggtttgacaggaa

SEQ ID NO: 211629 - DNA, 22 bp, Artificial Sequence
  Synthetic oligonucleotide; TTC chr2 60545227 60545248 60545232 60545227 -
aaaaggttggtttgacaggaac

SEQ ID NO: 211630 - DNA, 22 bp, Artificial Sequence
  Synthetic oligonucleotide; TTG chr2 60545218 60545239 60545223 60545218 -
gtttgacaggaacggctgctcc

SEQ ID NO: 211631 - DNA, 22 bp, Artificial Sequence
  Synthetic oligonucleotide; TTT chr2 60545214 60545235 60545219 60545214 -
gacaggaacggctgctccctgc

SEQ ID NO: 211632 - DNA, 22 bp, Artificial Sequence
  Synthetic oligonucleotide; TTG chr2 60545213 60545234 60545218 60545213 -
acaggaacggctgctccctgca

SEQ ID NO: 211633 - DNA, 22 bp, Artificial Sequence
  Synthetic oligonucleotide; CTG chr2 60545200 60545221 60545205 60545200 -
ctccctgcagcctgcctcctca

SEQ ID NO: 211634 - DNA, 22 bp, Artificial Sequence
  Synthetic oligonucleotide; CTC chr2 60545197 60545218 60545202 60545197 -
cctgcagcctgcctcctcagct

SEQ ID NO: 211635 - DNA, 22 bp, Artificial Sequence
  Synthetic oligonucleotide; CTG chr2 60545193 60545214 60545198 60545193 -
cagcctgcctcctcagctaaat

SEQ ID NO: 211636 - DNA, 22 bp, Artificial Sequence
  Synthetic oligonucleotide; CTG chr2 60545186 60545207 60545191 60545186 -
cctcctcagctaaatgataaat

SEQ ID NO: 211637 - DNA, 22 bp, Artificial Sequence
  Synthetic oligonucleotide; CTC chr2 60545182 60545203 60545187 60545182 -
ctcagctaaatgataaatgctt

SEQ ID NO: 211638 - DNA, 22 bp, Artificial Sequence
  Synthetic oligonucleotide; CTC chr2 60545179 60545200 60545184 60545179 -
agctaaatgataaatgcttctc

SEQ ID NO: 211639 - DNA, 22 bp, Artificial Sequence
  Synthetic oligonucleotide; CTA chr2 60545174 60545195 60545179 60545174 -
aatgataaatgcttctctgtgc

SEQ ID NO: 211640 - DNA, 22 bp, Artificial Sequence
  Synthetic oligonucleotide; CTT chr2 60545160 60545181 60545165 60545160 -
ctctgtgctctctcttgtctct

SEQ ID NO: 211641 - DNA, 22 bp, Artificial Sequence
  Synthetic oligonucleotide; TTC chr2 60545159 60545180 60545164 60545159 -
tctgtgctctctcttgtctctg

SEQ ID NO: 211642 - DNA, 22 bp, Artificial Sequence
  Synthetic oligonucleotide; CTC chr2 60545157 60545178 60545162 60545157 -
tgtgctctctcttgtctctgat

SEQ ID NO: 211643 - DNA, 22 bp, Artificial Sequence
  Synthetic oligonucleotide; CTG chr2 60545155 60545176 60545160 60545155 -
tgctctctcttgtctctgatgt

SEQ ID NO: 211644 - DNA, 22 bp, Artificial Sequence
  Synthetic oligonucleotide; CTC chr2 60545150 60545171 60545155 60545150 -
tctcttgtctctgatgtggttt

SEQ ID NO: 211645 - DNA, 22 bp, Artificial Sequence
  Synthetic oligonucleotide; CTC chr2 60545148 60545169 60545153 60545148 -
tcttgtctctgatgtggttttg

SEQ ID NO: 211646 - DNA, 22 bp, Artificial Sequence
  Synthetic oligonucleotide; CTC chr2 60545146 60545167 60545151 60545146 -
ttgtctctgatgtggttttgac

SEQ ID NO: 211647 - DNA, 22 bp, Artificial Sequence
  Synthetic oligonucleotide; CTT chr2 60545144 60545165 60545149 60545144 -
gtctctgatgtggttttgacag

SEQ ID NO: 211648 - DNA, 22 bp, Artificial Sequence
  Synthetic oligonucleotide; TTG chr2 60545143 60545164 60545148 60545143 -
tctctgatgtggttttgacaga

SEQ ID NO: 211649 - DNA, 22 bp, Artificial Sequence
  Synthetic oligonucleotide; CTC chr2 60545139 60545160 60545144 60545139 -
tgatgtggttttgacagatgta

SEQ ID NO: 211650 - DNA, 22 bp, Artificial Sequence
  Synthetic oligonucleotide; CTG chr2 60545137 60545158 60545142 60545137 -
atgtggttttgacagatgtatc

SEQ ID NO: 211651 - DNA, 22 bp, Artificial Sequence
  Synthetic oligonucleotide; TTT chr2 60545128 60545149 60545133 60545128 -
tgacagatgtatcttgattttg

SEQ ID NO: 211652 - DNA, 22 bp, Artificial Sequence
  Synthetic oligonucleotide; TTT chr2 60545127 60545148 60545132 60545127 -
gacagatgtatcttgattttgt

SEQ ID NO: 211653 - DNA, 22 bp, Artificial Sequence
  Synthetic oligonucleotide; TTG chr2 60545126 60545147 60545131 60545126 -
acagatgtatcttgattttgtt

SEQ ID NO: 211654 - DNA, 22 bp, Artificial Sequence
  Synthetic oligonucleotide; CTT chr2 60545113 60545134 60545118 60545113 -
gattttgtttgtggtttacaca

SEQ ID NO: 211655 - DNA, 22 bp, Artificial Sequence
  Synthetic oligonucleotide; TTG chr2 60545112 60545133 60545117 60545112 -
attttgtttgtggtttacacag

SEQ ID NO: 211656 - DNA, 22 bp, Artificial Sequence
  Synthetic oligonucleotide; TTT chr2 60545108 60545129 60545113 60545108 -
tgtttgtggtttacacagccac

SEQ ID NO: 211657 - DNA, 22 bp, Artificial Sequence
  Synthetic oligonucleotide; TTT chr2 60545107 60545128 60545112 60545107 -
gtttgtggtttacacagccaca

SEQ ID NO: 211658 - DNA, 22 bp, Artificial Sequence
  Synthetic oligonucleotide; TTG chr2 60545106 60545127 60545111 60545106 -
tttgtggtttacacagccacat

SEQ ID NO: 211659 - DNA, 22 bp, Artificial Sequence
  Synthetic oligonucleotide; TTT chr2 60545103 60545124 60545108 60545103 -
gtggtttacacagccacatgtc

SEQ ID NO: 211660 - DNA, 22 bp, Artificial Sequence
  Synthetic oligonucleotide; TTG chr2 60545102 60545123 60545107 60545102 -
tggtttacacagccacatgtca

SEQ ID NO: 211661 - DNA, 22 bp, Artificial Sequence
  Synthetic oligonucleotide; TTT chr2 60545096 60545117 60545101 60545096 -
acacagccacatgtcaccctta

SEQ ID NO: 211662 - DNA, 22 bp, Artificial Sequence
  Synthetic oligonucleotide; TTA chr2 60545095 60545116 60545100 60545095 -
cacagccacatgtcacccttac

SEQ ID NO: 211663 - DNA, 22 bp, Artificial Sequence
  Synthetic oligonucleotide; CTT chr2 60545075 60545096 60545080 60545075 -
acaaatgtccagtccagactcc

SEQ ID NO: 211664 - DNA, 22 bp, Artificial Sequence
  Synthetic oligonucleotide; TTA chr2 60545074 60545095 60545079 60545074 -
caaatgtccagtccagactcca

SEQ ID NO: 211665 - DNA, 22 bp, Artificial Sequence
  Synthetic oligonucleotide; CTC chr2 60545054 60545075 60545059 60545054 -
cactgtttctgctataacacaa

SEQ ID NO: 211666 - DNA, 22 bp, Artificial Sequence
  Synthetic oligonucleotide; CTG chr2 60545049 60545070 60545054 60545049 -
tttctgctataacacaatgtaa

SEQ ID NO: 211667 - DNA, 22 bp, Artificial Sequence
  Synthetic oligonucleotide; TTT chr2 60545046 60545067 60545051 60545046 -
ctgctataacacaatgtaaaaa

SEQ ID NO: 211668 - DNA, 22 bp, Artificial Sequence
  Synthetic oligonucleotide; TTC chr2 60545045 60545066 60545050 60545045 -
tgctataacacaatgtaaaaat

SEQ ID NO: 211669 - DNA, 22 bp, Artificial Sequence
  Synthetic oligonucleotide; CTG chr2 60545043 60545064 60545048 60545043 -
ctataacacaatgtaaaaattt

SEQ ID NO: 211670 - DNA, 22 bp, Artificial Sequence
  Synthetic oligonucleotide; CTA chr2 60545040 60545061 60545045 60545040 -
taacacaatgtaaaaattttct

SEQ ID NO: 211671 - DNA, 22 bp, Artificial Sequence
  Synthetic oligonucleotide; TTT chr2 60545021 60545042 60545026 60545021 -
tcttggaaaaatacacacacgt

SEQ ID NO: 211672 - DNA, 22 bp, Artificial Sequence
  Synthetic oligonucleotide; TTT chr2 60545020 60545041 60545025 60545020 -
cttggaaaaatacacacacgta

SEQ ID NO: 211673 - DNA, 22 bp, Artificial Sequence
  Synthetic oligonucleotide; TTC chr2 60545019 60545040 60545024 60545019 -
ttggaaaaatacacacacgtat

SEQ ID NO: 211674 - DNA, 22 bp, Artificial Sequence
  Synthetic oligonucleotide; CTT chr2 60545017 60545038 60545022 60545017 -
ggaaaaatacacacacgtattc

SEQ ID NO: 211675 - DNA, 22 bp, Artificial Sequence
  Synthetic oligonucleotide; TTG chr2 60545016 60545037 60545021 60545016 -
gaaaaatacacacacgtattca

SEQ ID NO: 211676 - DNA, 22 bp, Artificial Sequence
  Synthetic oligonucleotide; TTC chr2 60544995 60545016 60545000 60544995 -
aacagccctccctcctttggtt

SEQ ID NO: 211677 - DNA, 22 bp, Artificial Sequence
  Synthetic oligonucleotide; CTC chr2 60544985 60545006 60544990 60544985 -
cctcctttggttaattttagca

SEQ ID NO: 211678 - DNA, 22 bp, Artificial Sequence
  Synthetic oligonucleotide; CTC chr2 60544981 60545002 60544986 60544981 -
ctttggttaattttagcaggga

SEQ ID NO: 211679 - DNA, 22 bp, Artificial Sequence
  Synthetic oligonucleotide; CTT chr2 60544978 60544999 60544983 60544978 -
tggttaattttagcagggaggc

SEQ ID NO: 211680 - DNA, 22 bp, Artificial Sequence
  Synthetic oligonucleotide; TTT chr2 60544977 60544998 60544982 60544977 -
ggttaattttagcagggaggca

SEQ ID NO: 211681 - DNA, 22 bp, Artificial Sequence
  Synthetic oligonucleotide; TTG chr2 60544976 60544997 60544981 60544976 -
gttaattttagcagggaggcag

SEQ ID NO: 211682 - DNA, 22 bp, Artificial Sequence
  Synthetic oligonucleotide; TTA chr2 60544972 60544993 60544977 60544972 -
attttagcagggaggcagctag

SEQ ID NO: 211683 - DNA, 22 bp, Artificial Sequence
  Synthetic oligonucleotide; TTT chr2 60544968 60544989 60544973 60544968 -
tagcagggaggcagctaggtgt

SEQ ID NO: 211684 - DNA, 22 bp, Artificial Sequence
  Synthetic oligonucleotide; TTT chr2 60544967 60544988 60544972 60544967 -
agcagggaggcagctaggtgtg

SEQ ID NO: 211685 - DNA, 22 bp, Artificial Sequence
  Synthetic oligonucleotide; TTA chr2 60544966 60544987 60544971 60544966 -
gcagggaggcagctaggtgtgt

SEQ ID NO: 211686 - DNA, 22 bp, Artificial Sequence
  Synthetic oligonucleotide; CTA chr2 60544951 60544972 60544956 60544951 -
ggtgtgtgggtttctcggcagc

SEQ ID NO: 211687 - DNA, 22 bp, Artificial Sequence
  Synthetic oligonucleotide; TTT chr2 60544938 60544959 60544943 60544938 -
ctcggcagctcaagggaaaagg

SEQ ID NO: 211688 - DNA, 22 bp, Artificial Sequence
  Synthetic oligonucleotide; TTC chr2 60544937 60544958 60544942 60544937 -
tcggcagctcaagggaaaagga

SEQ ID NO: 211689 - DNA, 22 bp, Artificial Sequence
  Synthetic oligonucleotide; CTC chr2 60544935 60544956 60544940 60544935 -
ggcagctcaagggaaaaggaat

SEQ ID NO: 211690 - DNA, 22 bp, Artificial Sequence
  Synthetic oligonucleotide; CTC chr2 60544927 60544948 60544932 60544927 -
aagggaaaaggaattaaaggct

SEQ ID NO: 211691 - DNA, 22 bp, Artificial Sequence
  Synthetic oligonucleotide; TTA chr2 60544911 60544932 60544916 60544911 -
aaggctagcagtgggacttaaa

SEQ ID NO: 211692 - DNA, 22 bp, Artificial Sequence
  Synthetic oligonucleotide; CTA chr2 60544904 60544925 60544909 60544904 -
gcagtgggacttaaattccctt

SEQ ID NO: 211693 - DNA, 22 bp, Artificial Sequence
  Synthetic oligonucleotide; CTT chr2 60544892 60544913 60544897 60544892 -
aaattcccttctctaagtgata

SEQ ID NO: 211694 - DNA, 22 bp, Artificial Sequence
  Synthetic oligonucleotide; TTA chr2 60544891 60544912 60544896 60544891 -
aattcccttctctaagtgataa

SEQ ID NO: 211695 - DNA, 22 bp, Artificial Sequence
  Synthetic oligonucleotide; TTC chr2 60544886 60544907 60544891 60544886 -
ccttctctaagtgataaacagt

SEQ ID NO: 211696 - DNA, 22 bp, Artificial Sequence
  Synthetic oligonucleotide; CTT chr2 60544882 60544903 60544887 60544882 -
ctctaagtgataaacagtaaca

SEQ ID NO: 211697 - DNA, 22 bp, Artificial Sequence
  Synthetic oligonucleotide; TTC chr2 60544881 60544902 60544886 60544881 -
tctaagtgataaacagtaacac

SEQ ID NO: 211698 - DNA, 22 bp, Artificial Sequence
  Synthetic oligonucleotide; CTC chr2 60544879 60544900 60544884 60544879 -
taagtgataaacagtaacacta

SEQ ID NO: 211699 - DNA, 22 bp, Artificial Sequence
  Synthetic oligonucleotide; CTA chr2 60544877 60544898 60544882 60544877 -
agtgataaacagtaacactata

SEQ ID NO: 211700 - DNA, 22 bp, Artificial Sequence
  Synthetic oligonucleotide; CTA chr2 60544857 60544878 60544862 60544857 -
tatagtgaccctcaaaacattt

SEQ ID NO: 211701 - DNA, 22 bp, Artificial Sequence
  Synthetic oligonucleotide; CTC chr2 60544844 60544865 60544849 60544844 -
aaaacattttttgcttgagcat

SEQ ID NO: 211702 - DNA, 22 bp, Artificial Sequence
  Synthetic oligonucleotide; TTT chr2 60544835 60544856 60544840 60544835 -
tttgcttgagcatgttagacaa

SEQ ID NO: 211703 - DNA, 22 bp, Artificial Sequence
  Synthetic oligonucleotide; TTT chr2 60544834 60544855 60544839 60544834 -
ttgcttgagcatgttagacaaa

SEQ ID NO: 211704 - DNA, 22 bp, Artificial Sequence
  Synthetic oligonucleotide; TTT chr2 60544833 60544854 60544838 60544833 -
tgcttgagcatgttagacaaaa

SEQ ID NO: 211705 - DNA, 22 bp, Artificial Sequence
  Synthetic oligonucleotide; TTT chr2 60544832 60544853 60544837 60544832 -
gcttgagcatgttagacaaaag

SEQ ID NO: 211706 - DNA, 22 bp, Artificial Sequence
  Synthetic oligonucleotide; TTG chr2 60544831 60544852 60544836 60544831 -
cttgagcatgttagacaaaagt

SEQ ID NO: 211707 - DNA, 22 bp, Artificial Sequence
  Synthetic oligonucleotide; CTT chr2 60544828 60544849 60544833 60544828 -
gagcatgttagacaaaagtcaa

SEQ ID NO: 211708 - DNA, 22 bp, Artificial Sequence
  Synthetic oligonucleotide; TTG chr2 60544827 60544848 60544832 60544827 -
agcatgttagacaaaagtcaat

SEQ ID NO: 211709 - DNA, 22 bp, Artificial Sequence
  Synthetic oligonucleotide; TTA chr2 60544818 60544839 60544823 60544818 -
gacaaaagtcaatgcagattct

SEQ ID NO: 211710 - DNA, 22 bp, Artificial Sequence
  Synthetic oligonucleotide; TTC chr2 60544797 60544818 60544802 60544797 -
tgtgatgacagacatgccatgc

SEQ ID NO: 211711 - DNA, 22 bp, Artificial Sequence
  Synthetic oligonucleotide; CTG chr2 60544795 60544816 60544800 60544795 -
tgatgacagacatgccatgcct

SEQ ID NO: 211712 - DNA, 22 bp, Artificial Sequence
  Synthetic oligonucleotide; CTG chr2 60544772 60544793 60544777 60544772 -
ttggtggatcgctttcttccat

SEQ ID NO: 211713 - DNA, 22 bp, Artificial Sequence
  Synthetic oligonucleotide; TTG chr2 60544769 60544790 60544774 60544769 -
gtggatcgctttcttccatcta

SEQ ID NO: 211714 - DNA, 22 bp, Artificial Sequence
  Synthetic oligonucleotide; CTT chr2 60544758 60544779 60544763 60544758 -
tcttccatctacctaccaccca

SEQ ID NO: 211715 - DNA, 22 bp, Artificial Sequence
  Synthetic oligonucleotide; TTT chr2 60544757 60544778 60544762 60544757 -
cttccatctacctaccacccag

SEQ ID NO: 211716 - DNA, 22 bp, Artificial Sequence
  Synthetic oligonucleotide; TTC chr2 60544756 60544777 60544761 60544756 -
ttccatctacctaccacccagc

SEQ ID NO: 211717 - DNA, 22 bp, Artificial Sequence
  Synthetic oligonucleotide; CTT chr2 60544754 60544775 60544759 60544754 -
ccatctacctaccacccagctc

SEQ ID NO: 211718 - DNA, 22 bp, Artificial Sequence
  Synthetic oligonucleotide; TTC chr2 60544753 60544774 60544758 60544753 -
catctacctaccacccagctcc

SEQ ID NO: 211719 - DNA, 22 bp, Artificial Sequence
  Synthetic oligonucleotide; CTA chr2 60544747 60544768 60544752 60544747 -
cctaccacccagctcccgaaag

SEQ ID NO: 211720 - DNA, 22 bp, Artificial Sequence
  Synthetic oligonucleotide; CTA chr2 60544743 60544764 60544748 60544743 -
ccacccagctcccgaaaggcaa

SEQ ID NO: 211721 - DNA, 22 bp, Artificial Sequence
  Synthetic oligonucleotide; CTC chr2 60544732 60544753 60544737 60544732 -
ccgaaaggcaagaggtttgttc

SEQ ID NO: 211722 - DNA, 22 bp, Artificial Sequence
  Synthetic oligonucleotide; TTT chr2 60544714 60544735 60544719 60544714 -
gttcagttttaggaaaggtagt

SEQ ID NO: 211723 - DNA, 22 bp, Artificial Sequence
  Synthetic oligonucleotide; TTG chr2 60544713 60544734 60544718 60544713 -
ttcagttttaggaaaggtagtg

SEQ ID NO: 211724 - DNA, 22 bp, Artificial Sequence
  Synthetic oligonucleotide; TTC chr2 60544710 60544731 60544715 60544710 -
agttttaggaaaggtagtgcat

SEQ ID NO: 211725 - DNA, 22 bp, Artificial Sequence
  Synthetic oligonucleotide; TTT chr2 60544705 60544726 60544710 60544705 -
taggaaaggtagtgcatatcat

SEQ ID NO: 211726 - DNA, 22 bp, Artificial Sequence
  Synthetic oligonucleotide; TTT chr2 60544704 60544725 60544709 60544704 -
aggaaaggtagtgcatatcatg

SEQ ID NO: 211727 - DNA, 22 bp, Artificial Sequence
  Synthetic oligonucleotide; TTA chr2 60544703 60544724 60544708 60544703 -
ggaaaggtagtgcatatcatga

SEQ ID NO: 211728 - DNA, 22 bp, Artificial Sequence
  Synthetic oligonucleotide; TTG chr2 60544677 60544698 60544682 60544677 -
attcactggaacttgtctctcc

SEQ ID NO: 211729 - DNA, 22 bp, Artificial Sequence
  Synthetic oligonucleotide; TTC chr2 60544673 60544694 60544678 60544673 -
actggaacttgtctctccgacc

SEQ ID NO: 211730 - DNA, 22 bp, Artificial Sequence
  Synthetic oligonucleotide; CTG chr2 60544669 60544690 60544674 60544669 -
gaacttgtctctccgacctagt

SEQ ID NO: 211731 - DNA, 22 bp, Artificial Sequence
  Synthetic oligonucleotide; CTT chr2 60544663 60544684 60544668 60544663 -
gtctctccgacctagtttgacc

SEQ ID NO: 211732 - DNA, 22 bp, Artificial Sequence
  Synthetic oligonucleotide; TTG chr2 60544662 60544683 60544667 60544662 -
tctctccgacctagtttgacca

SEQ ID NO: 211733 - DNA, 22 bp, Artificial Sequence
  Synthetic oligonucleotide; CTC chr2 60544658 60544679 60544663 60544658 -
tccgacctagtttgaccacaaa

SEQ ID NO: 211734 - DNA, 22 bp, Artificial Sequence
  Synthetic oligonucleotide; CTC chr2 60544656 60544677 60544661 60544656 -
cgacctagtttgaccacaaagt

SEQ ID NO: 211735 - DNA, 22 bp, Artificial Sequence
  Synthetic oligonucleotide; CTA chr2 60544649 60544670 60544654 60544649 -
gtttgaccacaaagttgaacca

SEQ ID NO: 211736 - DNA, 22 bp, Artificial Sequence
  Synthetic oligonucleotide; TTT chr2 60544645 60544666 60544650 60544645 -
gaccacaaagttgaaccataat

SEQ ID NO: 211737 - DNA, 22 bp, Artificial Sequence
  Synthetic oligonucleotide; TTG chr2 60544644 60544665 60544649 60544644 -
accacaaagttgaaccataata

SEQ ID NO: 211738 - DNA, 22 bp, Artificial Sequence
  Synthetic oligonucleotide; TTG chr2 60544632 60544653 60544637 60544632 -
aaccataataggtcagtggtct

SEQ ID NO: 211739 - DNA, 22 bp, Artificial Sequence
  Synthetic oligonucleotide; CTA chr2 60544609 60544630 60544614 60544609 -
gaggggattaaatgtcatatta

SEQ ID NO: 211740 - DNA, 22 bp, Artificial Sequence
  Synthetic oligonucleotide; TTA chr2 60544599 60544620 60544604 60544599 -
aatgtcatattatttctcctct

SEQ ID NO: 211741 - DNA, 22 bp, Artificial Sequence
  Synthetic oligonucleotide; TTA chr2 60544587 60544608 60544592 60544587 -
tttctcctctccccctctagaa

SEQ ID NO: 211742 - DNA, 22 bp, Artificial Sequence
  Synthetic oligonucleotide; TTT chr2 60544584 60544605 60544589 60544584 -
ctcctctccccctctagaattt

SEQ ID NO: 211743 - DNA, 22 bp, Artificial Sequence
  Synthetic oligonucleotide; TTC chr2 60544583 60544604 60544588 60544583 -
tcctctccccctctagaatttg

SEQ ID NO: 211744 - DNA, 22 bp, Artificial Sequence
  Synthetic oligonucleotide; CTC chr2 60544581 60544602 60544586 60544581 -
ctctccccctctagaatttgat

SEQ ID NO: 211745 - DNA, 22 bp, Artificial Sequence
  Synthetic oligonucleotide; CTC chr2 60544578 60544599 60544583 60544578 -
tccccctctagaatttgatcat

SEQ ID NO: 211746 - DNA, 22 bp, Artificial Sequence
  Synthetic oligonucleotide; CTC chr2 60544576 60544597 60544581 60544576 -
cccctctagaatttgatcatta

SEQ ID NO: 211747 - DNA, 22 bp, Artificial Sequence
  Synthetic oligonucleotide; CTC chr2 60544570 60544591 60544575 60544570 -
tagaatttgatcattaaaacca

SEQ ID NO: 211748 - DNA, 22 bp, Artificial Sequence
  Synthetic oligonucleotide; CTA chr2 60544568 60544589 60544573 60544568 -
gaatttgatcattaaaaccaaa

SEQ ID NO: 211749 - DNA, 22 bp, Artificial Sequence
  Synthetic oligonucleotide; TTT chr2 60544562 60544583 60544567 60544562 -
gatcattaaaaccaaacatggc

SEQ ID NO: 211750 - DNA, 22 bp, Artificial Sequence
  Synthetic oligonucleotide; TTG chr2 60544561 60544582 60544566 60544561 -
atcattaaaaccaaacatggca

SEQ ID NO: 211751 - DNA, 22 bp, Artificial Sequence
  Synthetic oligonucleotide; TTA chr2 60544554 60544575 60544559 60544554 -
aaaccaaacatggcattttctt

SEQ ID NO: 211752 - DNA, 22 bp, Artificial Sequence
  Synthetic oligonucleotide; TTT chr2 60544536 60544557 60544541 60544536 -
tctttctttttttagtgctttc

SEQ ID NO: 211753 - DNA, 22 bp, Artificial Sequence
  Synthetic oligonucleotide; TTT chr2 60544535 60544556 60544540 60544535 -
ctttctttttttagtgctttct

SEQ ID NO: 211754 - DNA, 22 bp, Artificial Sequence
  Synthetic oligonucleotide; TTC chr2 60544534 60544555 60544539 60544534 -
tttctttttttagtgctttctg

SEQ ID NO: 211755 - DNA, 22 bp, Artificial Sequence
  Synthetic oligonucleotide; CTT chr2 60544532 60544553 60544537 60544532 -
tctttttttagtgctttctgtg

SEQ ID NO: 211756 - DNA, 22 bp, Artificial Sequence
  Synthetic oligonucleotide; TTT chr2 60544531 60544552 60544536 60544531 -
ctttttttagtgctttctgtga

SEQ ID NO: 211757 - DNA, 22 bp, Artificial Sequence
  Synthetic oligonucleotide; TTC chr2 60544530 60544551 60544535 60544530 -
tttttttagtgctttctgtgat

SEQ ID NO: 211758 - DNA, 22 bp, Artificial Sequence
  Synthetic oligonucleotide; CTT chr2 60544528 60544549 60544533 60544528 -
tttttagtgctttctgtgatag

SEQ ID NO: 211759 - DNA, 22 bp, Artificial Sequence
  Synthetic oligonucleotide; TTT chr2 60544527 60544548 60544532 60544527 -
ttttagtgctttctgtgatagc

SEQ ID NO: 211760 - DNA, 22 bp, Artificial Sequence
  Synthetic oligonucleotide; TTT chr2 60544526 60544547 60544531 60544526 -
tttagtgctttctgtgatagca

SEQ ID NO: 211761 - DNA, 22 bp, Artificial Sequence
  Synthetic oligonucleotide; TTT chr2 60544525 60544546 60544530 60544525 -
ttagtgctttctgtgatagcac

SEQ ID NO: 211762 - DNA, 22 bp, Artificial Sequence
  Synthetic oligonucleotide; TTT chr2 60544524 60544545 60544529 60544524 -
tagtgctttctgtgatagcact

SEQ ID NO: 211763 - DNA, 22 bp, Artificial Sequence
  Synthetic oligonucleotide; TTT chr2 60544523 60544544 60544528 60544523 -
agtgctttctgtgatagcactc

SEQ ID NO: 211764 - DNA, 22 bp, Artificial Sequence
  Synthetic oligonucleotide; TTA chr2 60544522 60544543 60544527 60544522 -
gtgctttctgtgatagcactca

SEQ ID NO: 211765 - DNA, 22 bp, Artificial Sequence
  Synthetic oligonucleotide; CTT chr2 60544516 60544537 60544521 60544516 -
tctgtgatagcactcagatact

SEQ ID NO: 211766 - DNA, 22 bp, Artificial Sequence
  Synthetic oligonucleotide; TTT chr2 60544515 60544536 60544520 60544515 -
ctgtgatagcactcagatactt

SEQ ID NO: 211767 - DNA, 22 bp, Artificial Sequence
  Synthetic oligonucleotide; TTC chr2 60544514 60544535 60544519 60544514 -
tgtgatagcactcagatacttt

SEQ ID NO: 211768 - DNA, 22 bp, Artificial Sequence
  Synthetic oligonucleotide; CTG chr2 60544512 60544533 60544517 60544512 -
tgatagcactcagatactttcc

SEQ ID NO: 211769 - DNA, 22 bp, Artificial Sequence
  Synthetic oligonucleotide; CTC chr2 60544501 60544522 60544506 60544501 -
agatactttccctttagtgaaa

SEQ ID NO: 211770 - DNA, 22 bp, Artificial Sequence
  Synthetic oligonucleotide; CTT chr2 60544493 60544514 60544498 60544493 -
tccctttagtgaaatgggaaat

SEQ ID NO: 211771 - DNA, 22 bp, Artificial Sequence
  Synthetic oligonucleotide; TTT chr2 60544492 60544513 60544497 60544492 -
ccctttagtgaaatgggaaatc

SEQ ID NO: 211772 - DNA, 22 bp, Artificial Sequence
  Synthetic oligonucleotide; TTC chr2 60544491 60544512 60544496 60544491 -
cctttagtgaaatgggaaatct

SEQ ID NO: 211773 - DNA, 22 bp, Artificial Sequence
  Synthetic oligonucleotide; CTT chr2 60544487 60544508 60544492 60544487 -
tagtgaaatgggaaatctgctg

SEQ ID NO: 211774 - DNA, 22 bp, Artificial Sequence
  Synthetic oligonucleotide; TTT chr2 60544486 60544507 60544491 60544486 -
agtgaaatgggaaatctgctgc

SEQ ID NO: 211775 - DNA, 22 bp, Artificial Sequence
  Synthetic oligonucleotide; TTA chr2 60544485 60544506 60544490 60544485 -
gtgaaatgggaaatctgctgct

SEQ ID NO: 211776 - DNA, 22 bp, Artificial Sequence
  Synthetic oligonucleotide; CTG chr2 60544468 60544489 60544473 60544468 -
ctgctagggaagctgcatttgt

SEQ ID NO: 211777 - DNA, 22 bp, Artificial Sequence
  Synthetic oligonucleotide; CTG chr2 60544465 60544486 60544470 60544465 -
ctagggaagctgcatttgtgga

SEQ ID NO: 211778 - DNA, 22 bp, Artificial Sequence
  Synthetic oligonucleotide; CTA chr2 60544462 60544483 60544467 60544462 -
gggaagctgcatttgtggagtg

SEQ ID NO: 211779 - DNA, 22 bp, Artificial Sequence
  Synthetic oligonucleotide; CTG chr2 60544453 60544474 60544458 60544453 -
catttgtggagtgtatttcttg

SEQ ID NO: 211780 - DNA, 22 bp, Artificial Sequence
  Synthetic oligonucleotide; TTT chr2 60544448 60544469 60544453 60544448 -
gtggagtgtatttcttgaatcc

SEQ ID NO: 211781 - DNA, 22 bp, Artificial Sequence
  Synthetic oligonucleotide; TTG chr2 60544447 60544468 60544452 60544447 -
tggagtgtatttcttgaatcca

SEQ ID NO: 211782 - DNA, 22 bp, Artificial Sequence
  Synthetic oligonucleotide; TTT chr2 60544435 60544456 60544440 60544435 -
cttgaatccaccacatttacct

SEQ ID NO: 211783 - DNA, 22 bp, Artificial Sequence
  Synthetic oligonucleotide; TTC chr2 60544434 60544455 60544439 60544434 -
ttgaatccaccacatttacctt

SEQ ID NO: 211784 - DNA, 22 bp, Artificial Sequence
  Synthetic oligonucleotide; CTT chr2 60544432 60544453 60544437 60544432 -
gaatccaccacatttaccttat

SEQ ID NO: 211785 - DNA, 22 bp, Artificial Sequence
  Synthetic oligonucleotide; TTG chr2 60544431 60544452 60544436 60544431 -
aatccaccacatttaccttatg

SEQ ID NO: 211786 - DNA, 22 bp, Artificial Sequence
  Synthetic oligonucleotide; TTT chr2 60544417 60544438 60544422 60544417 -
accttatgtgacatgtaggtga

SEQ ID NO: 211787 - DNA, 22 bp, Artificial Sequence
  Synthetic oligonucleotide; TTA chr2 60544416 60544437 60544421 60544416 -
ccttatgtgacatgtaggtgaa

SEQ ID NO: 211788 - DNA, 22 bp, Artificial Sequence
  Synthetic oligonucleotide; CTT chr2 60544412 60544433 60544417 60544412 -
atgtgacatgtaggtgaagatt

SEQ ID NO: 211789 - DNA, 22 bp, Artificial Sequence
  Synthetic oligonucleotide; TTA chr2 60544411 60544432 60544416 60544411 -
tgtgacatgtaggtgaagattt

SEQ ID NO: 211790 - DNA, 22 bp, Artificial Sequence
  Synthetic oligonucleotide; TTT chr2 60544389 60544410 60544394 60544389 -
tatctcccctaccccccagcag

SEQ ID NO: 211791 - DNA, 22 bp, Artificial Sequence
  Synthetic oligonucleotide; TTT chr2 60544388 60544409 60544393 60544388 -
atctcccctaccccccagcagg

SEQ ID NO: 211792 - DNA, 22 bp, Artificial Sequence
  Synthetic oligonucleotide; TTA chr2 60544387 60544408 60544392 60544387 -
tctcccctaccccccagcagga

SEQ ID NO: 211793 - DNA, 22 bp, Artificial Sequence
  Synthetic oligonucleotide; CTC chr2 60544383 60544404 60544388 60544383 -
ccctaccccccagcaggatgtg

SEQ ID NO: 211794 - DNA, 22 bp, Artificial Sequence
  Synthetic oligonucleotide; CTA chr2 60544378 60544399 60544383 60544378 -
ccccccagcaggatgtgggaat

SEQ ID NO: 211795 - DNA, 22 bp, Artificial Sequence
  Synthetic oligonucleotide; TTT chr2 60544348 60544369 60544353 60544348 -
ccatgtgttgtcttgtgactgg

SEQ ID NO: 211796 - DNA, 22 bp, Artificial Sequence
  Synthetic oligonucleotide; TTC chr2 60544347 60544368 60544352 60544347 -
catgtgttgtcttgtgactgga

SEQ ID NO: 211797 - DNA, 22 bp, Artificial Sequence
  Synthetic oligonucleotide; TTG chr2 60544338 60544359 60544343 60544338 -
tcttgtgactggaaggaaaatg

SEQ ID NO: 211798 - DNA, 22 bp, Artificial Sequence
  Synthetic oligonucleotide; CTT chr2 60544334 60544355 60544339 60544334 -
gtgactggaaggaaaatgaaca

SEQ ID NO: 211799 - DNA, 22 bp, Artificial Sequence
  Synthetic oligonucleotide; TTG chr2 60544333 60544354 60544338 60544333 -
tgactggaaggaaaatgaacag

SEQ ID NO: 211800 - DNA, 22 bp, Artificial Sequence
  Synthetic oligonucleotide; CTG chr2 60544327 60544348 60544332 60544327 -
gaaggaaaatgaacagaagtgt

SEQ ID NO: 211801 - DNA, 22 bp, Artificial Sequence
  Synthetic oligonucleotide; TTA chr2 60544293 60544314 60544298 60544293 -
atgaagcaagagcaggcggaag

SEQ ID NO: 211802 - DNA, 22 bp, Artificial Sequence
  Synthetic oligonucleotide; TTT chr2 60544264 60544285 60544269 60544264 -
gtcgtcttcggagatccaaagc

SEQ ID NO: 211803 - DNA, 22 bp, Artificial Sequence
  Synthetic oligonucleotide; TTG chr2 60544263 60544284 60544268 60544263 -
tcgtcttcggagatccaaagcc

SEQ ID NO: 211804 - DNA, 22 bp, Artificial Sequence
  Synthetic oligonucleotide; CTT chr2 60544256 60544277 60544261 60544256 -
cggagatccaaagccttgctaa

SEQ ID NO: 211805 - DNA, 22 bp, Artificial Sequence
  Synthetic oligonucleotide; TTC chr2 60544255 60544276 60544260 60544255 -
ggagatccaaagccttgctaaa

SEQ ID NO: 211806 - DNA, 22 bp, Artificial Sequence
  Synthetic oligonucleotide; CTT chr2 60544239 60544260 60544244 60544239 -
gctaaatcaccaaatatggagt

SEQ ID NO: 211807 - DNA, 22 bp, Artificial Sequence
  Synthetic oligonucleotide; TTG chr2 60544238 60544259 60544243 60544238 -
ctaaatcaccaaatatggagta

SEQ ID NO: 211808 - DNA, 22 bp, Artificial Sequence
  Synthetic oligonucleotide; CTA chr2 60544235 60544256 60544240 60544235 -
aatcaccaaatatggagtaaca

SEQ ID NO: 211809 - DNA, 22 bp, Artificial Sequence
  Synthetic oligonucleotide; CTT chr2 60544210 60544231 60544215 60544210 -
gcgtgatgtaacatcgtattta

SEQ ID NO: 211810 - DNA, 22 bp, Artificial Sequence
  Synthetic oligonucleotide; TTG chr2 60544209 60544230 60544214 60544209 -
cgtgatgtaacatcgtatttac

SEQ ID NO: 211811 - DNA, 22 bp, Artificial Sequence
  Synthetic oligonucleotide; TTT chr2 60544189 60544210 60544194 60544189 -
acatatcgagctgctcgtttaa

SEQ ID NO: 211812 - DNA, 22 bp, Artificial Sequence
  Synthetic oligonucleotide; TTA chr2 60544188 60544209 60544193 60544188 -
catatcgagctgctcgtttaaa

SEQ ID NO: 211813 - DNA, 22 bp, Artificial Sequence
  Synthetic oligonucleotide; CTG chr2 60544176 60544197 60544181 60544176 -
ctcgtttaaaagacaaaacaca

SEQ ID NO: 211814 - DNA, 22 bp, Artificial Sequence
  Synthetic oligonucleotide; CTC chr2 60544173 60544194 60544178 60544173 -
gtttaaaagacaaaacacagtg

SEQ ID NO: 211815 - DNA, 22 bp, Artificial Sequence
  Synthetic oligonucleotide; TTT chr2 60544169 60544190 60544174 60544169 -
aaaagacaaaacacagtgtctg

SEQ ID NO: 211816 - DNA, 22 bp, Artificial Sequence
  Synthetic oligonucleotide; TTA chr2 60544168 60544189 60544173 60544168 -
aaagacaaaacacagtgtctgt

SEQ ID NO: 211817 - DNA, 22 bp, Artificial Sequence
  Synthetic oligonucleotide; CTG chr2 60544147 60544168 60544152 60544147 -
tcaagcaagaattaaaaccaca

SEQ ID NO: 211818 - DNA, 22 bp, Artificial Sequence
  Synthetic oligonucleotide; TTA chr2 60544133 60544154 60544138 60544133 -
aaaccacacttcttactgaggt

SEQ ID NO: 211819 - DNA, 22 bp, Artificial Sequence
  Synthetic oligonucleotide; CTT chr2 60544122 60544143 60544127 60544122 -
cttactgaggtcccaaataggt

SEQ ID NO: 211820 - DNA, 22 bp, Artificial Sequence
  Synthetic oligonucleotide; TTC chr2 60544121 60544142 60544126 60544121 -
ttactgaggtcccaaataggtt

SEQ ID NO: 211821 - DNA, 22 bp, Artificial Sequence
  Synthetic oligonucleotide; CTT chr2 60544119 60544140 60544124 60544119 -
actgaggtcccaaataggttat

SEQ ID NO: 211822 - DNA, 22 bp, Artificial Sequence
  Synthetic oligonucleotide; TTA chr2 60544118 60544139 60544123 60544118 -
ctgaggtcccaaataggttatt

SEQ ID NO: 211823 - DNA, 22 bp, Artificial Sequence
  Synthetic oligonucleotide; CTG chr2 60544115 60544136 60544120 60544115 -
aggtcccaaataggttattcag

SEQ ID NO: 211824 - DNA, 22 bp, Artificial Sequence
  Synthetic oligonucleotide; TTA chr2 60544098 60544119 60544103 60544098 -
ttcagtcttagattaaccagct

SEQ ID NO: 211825 - DNA, 22 bp, Artificial Sequence
  Synthetic oligonucleotide; TTC chr2 60544095 60544116 60544100 60544095 -
agtcttagattaaccagctcaa

SEQ ID NO: 211826 - DNA, 22 bp, Artificial Sequence
  Synthetic oligonucleotide; CTT chr2 60544089 60544110 60544094 60544089 -
agattaaccagctcaaaaattc

SEQ ID NO: 211827 - DNA, 22 bp, Artificial Sequence
  Synthetic oligonucleotide; TTA chr2 60544088 60544109 60544093 60544088 -
gattaaccagctcaaaaattct

SEQ ID NO: 211828 - DNA, 22 bp, Artificial Sequence
  Synthetic oligonucleotide; TTA chr2 60544083 60544104 60544088 60544083 -
accagctcaaaaattctgtgcc

SEQ ID NO: 211829 - DNA, 22 bp, Artificial Sequence
  Synthetic oligonucleotide; CTC chr2 60544075 60544096 60544080 60544075 -
aaaaattctgtgcctctgtatt

SEQ ID NO: 211830 - DNA, 22 bp, Artificial Sequence
  Synthetic oligonucleotide; TTC chr2 60544067 60544088 60544072 60544067 -
tgtgcctctgtatttagaggag

SEQ ID NO: 211831 - DNA, 22 bp, Artificial Sequence
  Synthetic oligonucleotide; CTG chr2 60544065 60544086 60544070 60544065 -
tgcctctgtatttagaggagga

SEQ ID NO: 211832 - DNA, 22 bp, Artificial Sequence
  Synthetic oligonucleotide; CTC chr2 60544059 60544080 60544064 60544059 -
tgtatttagaggaggaatctaa

SEQ ID NO: 211833 - DNA, 22 bp, Artificial Sequence
  Synthetic oligonucleotide; CTG chr2 60544057 60544078 60544062 60544057 -
tatttagaggaggaatctaaat

SEQ ID NO: 211834 - DNA, 22 bp, Artificial Sequence
  Synthetic oligonucleotide; TTT chr2 60544052 60544073 60544057 60544052 -
agaggaggaatctaaatgctgg

SEQ ID NO: 211835 - DNA, 22 bp, Artificial Sequence
  Synthetic oligonucleotide; TTA chr2 60544051 60544072 60544056 60544051 -
gaggaggaatctaaatgctggg

SEQ ID NO: 211836 - DNA, 22 bp, Artificial Sequence
  Synthetic oligonucleotide; CTA chr2 60544038 60544059 60544043 60544038 -
aatgctggggggaaggccttac

SEQ ID NO: 211837 - DNA, 22 bp, Artificial Sequence
  Synthetic oligonucleotide; CTG chr2 60544031 60544052 60544036 60544031 -
gggggaaggccttacatatagt

SEQ ID NO: 211838 - DNA, 22 bp, Artificial Sequence
  Synthetic oligonucleotide; CTT chr2 60544018 60544039 60544023 60544018 -
acatatagttaagacttttact

SEQ ID NO: 211839 - DNA, 22 bp, Artificial Sequence
  Synthetic oligonucleotide; TTA chr2 60544017 60544038 60544022 60544017 -
catatagttaagacttttactg

SEQ ID NO: 211840 - DNA, 22 bp, Artificial Sequence
  Synthetic oligonucleotide; TTA chr2 60544007 60544028 60544012 60544007 -
agacttttactgctatagttgt

SEQ ID NO: 211841 - DNA, 22 bp, Artificial Sequence
  Synthetic oligonucleotide; CTT chr2 60544001 60544022 60544006 60544001 -
ttactgctatagttgtgaatct

SEQ ID NO: 211842 - DNA, 22 bp, Artificial Sequence
  Synthetic oligonucleotide; TTT chr2 60544000 60544021 60544005 60544000 -
tactgctatagttgtgaatcta

SEQ ID NO: 211843 - DNA, 22 bp, Artificial Sequence
  Synthetic oligonucleotide; TTT chr2 60543999 60544020 60544004 60543999 -
actgctatagttgtgaatctat

SEQ ID NO: 211844 - DNA, 22 bp, Artificial Sequence
  Synthetic oligonucleotide; TTA chr2 60543998 60544019 60544003 60543998 -
ctgctatagttgtgaatctatg

SEQ ID NO: 211845 - DNA, 22 bp, Artificial Sequence
  Synthetic oligonucleotide; CTG chr2 60543995 60544016 60544000 60543995 -
ctatagttgtgaatctatgtag

SEQ ID NO: 211846 - DNA, 22 bp, Artificial Sequence
  Synthetic oligonucleotide; CTA chr2 60543992 60544013 60543997 60543992 -
tagttgtgaatctatgtaggga

SEQ ID NO: 211847 - DNA, 22 bp, Artificial Sequence
  Synthetic oligonucleotide; TTG chr2 60543986 60544007 60543991 60543986 -
tgaatctatgtagggaaataag

SEQ ID NO: 211848 - DNA, 22 bp, Artificial Sequence
  Synthetic oligonucleotide; CTA chr2 60543978 60543999 60543983 60543978 -
tgtagggaaataagagatattt

SEQ ID NO: 211849 - DNA, 22 bp, Artificial Sequence
  Synthetic oligonucleotide; TTT chr2 60543956 60543977 60543961 60543956 -
gcttgaactccctggttgtcta

SEQ ID NO: 211850 - DNA, 22 bp, Artificial Sequence
  Synthetic oligonucleotide; TTG chr2 60543955 60543976 60543960 60543955 -
cttgaactccctggttgtctaa

SEQ ID NO: 211851 - DNA, 22 bp, Artificial Sequence
  Synthetic oligonucleotide; CTT chr2 60543952 60543973 60543957 60543952 -
gaactccctggttgtctaaagg

SEQ ID NO: 211852 - DNA, 22 bp, Artificial Sequence
  Synthetic oligonucleotide; TTG chr2 60543951 60543972 60543956 60543951 -
aactccctggttgtctaaaggt

SEQ ID NO: 211853 - DNA, 22 bp, Artificial Sequence
  Synthetic oligonucleotide; CTC chr2 60543946 60543967 60543951 60543946 -
cctggttgtctaaaggttctgt

SEQ ID NO: 211854 - DNA, 22 bp, Artificial Sequence
  Synthetic oligonucleotide; CTG chr2 60543942 60543963 60543947 60543942 -
gttgtctaaaggttctgttatt

SEQ ID NO: 211855 - DNA, 22 bp, Artificial Sequence
  Synthetic oligonucleotide; TTG chr2 60543938 60543959 60543943 60543938 -
tctaaaggttctgttattattt

SEQ ID NO: 211856 - DNA, 22 bp, Artificial Sequence
  Synthetic oligonucleotide; CTA chr2 60543934 60543955 60543939 60543934 -
aaggttctgttattattttttt

SEQ ID NO: 211857 - DNA, 22 bp, Artificial Sequence
  Synthetic oligonucleotide; TTC chr2 60543927 60543948 60543932 60543927 -
tgttattatttttttaaagaac

SEQ ID NO: 211858 - DNA, 22 bp, Artificial Sequence
  Synthetic oligonucleotide; CTG chr2 60543925 60543946 60543930 60543925 -
ttattatttttttaaagaacaa

SEQ ID NO: 211859 - DNA, 22 bp, Artificial Sequence
  Synthetic oligonucleotide; TTA chr2 60543922 60543943 60543927 60543922 -
ttatttttttaaagaacaagta

SEQ ID NO: 211860 - DNA, 22 bp, Artificial Sequence
  Synthetic oligonucleotide; TTA chr2 60543919 60543940 60543924 60543919 -
tttttttaaagaacaagtataa

SEQ ID NO: 211861 - DNA, 22 bp, Artificial Sequence
  Synthetic oligonucleotide; TTT chr2 60543916 60543937 60543921 60543916 -
ttttaaagaacaagtataatag

SEQ ID NO: 211862 - DNA, 22 bp, Artificial Sequence
  Synthetic oligonucleotide; TTT chr2 60543915 60543936 60543920 60543915 -
tttaaagaacaagtataatagc

SEQ ID NO: 211863 - DNA, 22 bp, Artificial Sequence
  Synthetic oligonucleotide; TTT chr2 60543914 60543935 60543919 60543914 -
ttaaagaacaagtataatagca

SEQ ID NO: 211864 - DNA, 22 bp, Artificial Sequence
  Synthetic oligonucleotide; TTT chr2 60543913 60543934 60543918 60543913 -
taaagaacaagtataatagcag

SEQ ID NO: 211865 - DNA, 22 bp, Artificial Sequence
  Synthetic oligonucleotide; TTT chr2 60543912 60543933 60543917 60543912 -
aaagaacaagtataatagcaga

SEQ ID NO: 211866 - DNA, 22 bp, Artificial Sequence
  Synthetic oligonucleotide; TTA chr2 60543911 60543932 60543916 60543911 -
aagaacaagtataatagcagag

SEQ ID NO: 211867 - DNA, 22 bp, Artificial Sequence
  Synthetic oligonucleotide; CTA chr2 60543885 60543906 60543890 60543885 -
gagaagccaaaaccaaaagcaa

SEQ ID NO: 211868 - DNA, 22 bp, Artificial Sequence
  Synthetic oligonucleotide; TTT chr2 60543859 60543880 60543864 60543859 -
aaaatatattttatagcgctaa

SEQ ID NO: 211869 - DNA, 22 bp, Artificial Sequence
  Synthetic oligonucleotide; TTA chr2 60543858 60543879 60543863 60543858 -
aaatatattttatagcgctaat

SEQ ID NO: 211870 - DNA, 22 bp, Artificial Sequence
  Synthetic oligonucleotide; TTT chr2 60543848 60543869 60543853 60543848 -
tatagcgctaataatcaatcat

SEQ ID NO: 211871 - DNA, 22 bp, Artificial Sequence
  Synthetic oligonucleotide; TTT chr2 60543847 60543868 60543852 60543847 -
atagcgctaataatcaatcatt

SEQ ID NO: 211872 - DNA, 22 bp, Artificial Sequence
  Synthetic oligonucleotide; TTA chr2 60543846 60543867 60543851 60543846 -
tagcgctaataatcaatcattt

SEQ ID NO: 211873 - DNA, 22 bp, Artificial Sequence
  Synthetic oligonucleotide; CTA chr2 60543838 60543859 60543843 60543838 -
ataatcaatcatttaactgaga

SEQ ID NO: 211874 - DNA, 22 bp, Artificial Sequence
  Synthetic oligonucleotide; TTT chr2 60543824 60543845 60543829 60543824 -
aactgagacgaaaagctctcta

SEQ ID NO: 211875 - DNA, 22 bp, Artificial Sequence
  Synthetic oligonucleotide; TTA chr2 60543823 60543844 60543828 60543823 -
actgagacgaaaagctctctaa

SEQ ID NO: 211876 - DNA, 22 bp, Artificial Sequence
  Synthetic oligonucleotide; CTG chr2 60543819 60543840 60543824 60543819 -
agacgaaaagctctctaagatg

SEQ ID NO: 211877 - DNA, 22 bp, Artificial Sequence
  Synthetic oligonucleotide; CTC chr2 60543806 60543827 60543811 60543806 -
tctaagatgtctaagatattca

SEQ ID NO: 211878 - DNA, 22 bp, Artificial Sequence
  Synthetic oligonucleotide; CTC chr2 60543804 60543825 60543809 60543804 -
taagatgtctaagatattcaat

SEQ ID NO: 211879 - DNA, 22 bp, Artificial Sequence
  Synthetic oligonucleotide; CTA chr2 60543802 60543823 60543807 60543802 -
agatgtctaagatattcaatgg

SEQ ID NO: 211880 - DNA, 22 bp, Artificial Sequence
  Synthetic oligonucleotide; CTA chr2 60543793 60543814 60543798 60543793 -
agatattcaatgggcgcacaac

SEQ ID NO: 211881 - DNA, 22 bp, Artificial Sequence
  Synthetic oligonucleotide; TTC chr2 60543785 60543806 60543790 60543785 -
aatgggcgcacaacaagtgctg

SEQ ID NO: 211882 - DNA, 22 bp, Artificial Sequence
  Synthetic oligonucleotide; CTG chr2 60543763 60543784 60543768 60543763 -
tgacccaggtgaggtaaacctt

SEQ ID NO: 211883 - DNA, 22 bp, Artificial Sequence
  Synthetic oligonucleotide; CTT chr2 60543741 60543762 60543746 60543741 -
tcgtgcatgaataattacaaag

SEQ ID NO: 211884 - DNA, 22 bp, Artificial Sequence
  Synthetic oligonucleotide; TTT chr2 60543740 60543761 60543745 60543740 -
cgtgcatgaataattacaaagt

SEQ ID NO: 211885 - DNA, 22 bp, Artificial Sequence
  Synthetic oligonucleotide; TTC chr2 60543739 60543760 60543744 60543739 -
gtgcatgaataattacaaagtc

SEQ ID NO: 211886 - DNA, 22 bp, Artificial Sequence
  Synthetic oligonucleotide; TTA chr2 60543724 60543745 60543729 60543724 -
caaagtcttgatttctttcatt

SEQ ID NO: 211887 - DNA, 22 bp, Artificial Sequence
  Synthetic oligonucleotide; CTT chr2 60543715 60543736 60543720 60543715 -
gatttctttcattgtgtttaat

SEQ ID NO: 211888 - DNA, 22 bp, Artificial Sequence
  Synthetic oligonucleotide; TTG chr2 60543714 60543735 60543719 60543714 -
atttctttcattgtgtttaatc

SEQ ID NO: 211889 - DNA, 22 bp, Artificial Sequence
  Synthetic oligonucleotide; TTT chr2 60543710 60543731 60543715 60543710 -
ctttcattgtgtttaatcacct

SEQ ID NO: 211890 - DNA, 22 bp, Artificial Sequence
  Synthetic oligonucleotide; TTC chr2 60543709 60543730 60543714 60543709 -
tttcattgtgtttaatcacctg

SEQ ID NO: 211891 - DNA, 22 bp, Artificial Sequence
  Synthetic oligonucleotide; CTT chr2 60543707 60543728 60543712 60543707 -
tcattgtgtttaatcacctgtt

SEQ ID NO: 211892 - DNA, 22 bp, Artificial Sequence
  Synthetic oligonucleotide; TTT chr2 60543706 60543727 60543711 60543706 -
cattgtgtttaatcacctgttc

SEQ ID NO: 211893 - DNA, 22 bp, Artificial Sequence
  Synthetic oligonucleotide; TTC chr2 60543705 60543726 60543710 60543705 -
attgtgtttaatcacctgttcc

SEQ ID NO: 211894 - DNA, 22 bp, Artificial Sequence
  Synthetic oligonucleotide; TTG chr2 60543701 60543722 60543706 60543701 -
tgtttaatcacctgttcccacc

SEQ ID NO: 211895 - DNA, 22 bp, Artificial Sequence
  Synthetic oligonucleotide; TTT chr2 60543696 60543717 60543701 60543696 -
aatcacctgttcccaccctgga

SEQ ID NO: 211896 - DNA, 22 bp, Artificial Sequence
  Synthetic oligonucleotide; TTA chr2 60543695 60543716 60543700 60543695 -
atcacctgttcccaccctggaa

SEQ ID NO: 211897 - DNA, 22 bp, Artificial Sequence
  Synthetic oligonucleotide; CTG chr2 60543687 60543708 60543692 60543687 -
ttcccaccctggaactggctga

SEQ ID NO: 211898 - DNA, 22 bp, Artificial Sequence
  Synthetic oligonucleotide; TTC chr2 60543684 60543705 60543689 60543684 -
ccaccctggaactggctgaaca

SEQ ID NO: 211899 - DNA, 22 bp, Artificial Sequence
  Synthetic oligonucleotide; CTG chr2 60543676 60543697 60543681 60543676 -
gaactggctgaacataaatagt

SEQ ID NO: 211900 - DNA, 22 bp, Artificial Sequence
  Synthetic oligonucleotide; CTG chr2 60543670 60543691 60543675 60543670 -
gctgaacataaatagtgtggtc

SEQ ID NO: 211901 - DNA, 22 bp, Artificial Sequence
  Synthetic oligonucleotide; CTG chr2 60543666 60543687 60543671 60543666 -
aacataaatagtgtggtcacat

SEQ ID NO: 211902 - DNA, 22 bp, Artificial Sequence
  Synthetic oligonucleotide; CTC chr2 60543641 60543662 60543646 60543641 -
aaagtgagatgtcagtaactag

SEQ ID NO: 211903 - DNA, 22 bp, Artificial Sequence
  Synthetic oligonucleotide; CTA chr2 60543620 60543641 60543625 60543620 -
gaatcacgacttctcataattc

SEQ ID NO: 211904 - DNA, 22 bp, Artificial Sequence
  Synthetic oligonucleotide; CTT chr2 60543608 60543629 60543613 60543608 -
ctcataattcacagtaatgaat

SEQ ID NO: 211905 - DNA, 22 bp, Artificial Sequence
  Synthetic oligonucleotide; TTC chr2 60543607 60543628 60543612 60543607 -
tcataattcacagtaatgaatt

SEQ ID NO: 211906 - DNA, 22 bp, Artificial Sequence
  Synthetic oligonucleotide; CTC chr2 60543605 60543626 60543610 60543605 -
ataattcacagtaatgaattaa

SEQ ID NO: 211907 - DNA, 22 bp, Artificial Sequence
  Synthetic oligonucleotide; TTC chr2 60543598 60543619 60543603 60543598 -
acagtaatgaattaagagtttc

SEQ ID NO: 211908 - DNA, 22 bp, Artificial Sequence
  Synthetic oligonucleotide; TTA chr2 60543584 60543605 60543589 60543584 -
agagtttcctatggtgaagtta

SEQ ID NO: 211909 - DNA, 22 bp, Artificial Sequence
  Synthetic oligonucleotide; TTT chr2 60543577 60543598 60543582 60543577 -
cctatggtgaagttaacattct

SEQ ID NO: 211910 - DNA, 22 bp, Artificial Sequence
  Synthetic oligonucleotide; TTC chr2 60543576 60543597 60543581 60543576 -
ctatggtgaagttaacattcta

SEQ ID NO: 211911 - DNA, 22 bp, Artificial Sequence
  Synthetic oligonucleotide; CTA chr2 60543573 60543594 60543578 60543573 -
tggtgaagttaacattctacca

SEQ ID NO: 211912 - DNA, 22 bp, Artificial Sequence
  Synthetic oligonucleotide; TTA chr2 60543562 60543583 60543567 60543562 -
acattctaccattgcacataaa

SEQ ID NO: 211913 - DNA, 22 bp, Artificial Sequence
  Synthetic oligonucleotide; TTC chr2 60543556 60543577 60543561 60543556 -
taccattgcacataaattccga

SEQ ID NO: 211914 - DNA, 22 bp, Artificial Sequence
  Synthetic oligonucleotide; CTA chr2 60543554 60543575 60543559 60543554 -
ccattgcacataaattccgacg

SEQ ID NO: 211915 - DNA, 22 bp, Artificial Sequence
  Synthetic oligonucleotide; TTG chr2 60543548 60543569 60543553 60543548 -
cacataaattccgacgctctgg

SEQ ID NO: 211916 - DNA, 22 bp, Artificial Sequence
  Synthetic oligonucleotide; TTC chr2 60543537 60543558 60543542 60543537 -
cgacgctctggccctcaggtgc

SEQ ID NO: 211917 - DNA, 22 bp, Artificial Sequence
  Synthetic oligonucleotide; CTC chr2 60543529 60543550 60543534 60543529 -
tggccctcaggtgcccctgaag

SEQ ID NO: 211918 - DNA, 22 bp, Artificial Sequence
  Synthetic oligonucleotide; CTG chr2 60543527 60543548 60543532 60543527 -
gccctcaggtgcccctgaagcg

SEQ ID NO: 211919 - DNA, 22 bp, Artificial Sequence
  Synthetic oligonucleotide; CTC chr2 60543521 60543542 60543526 60543521 -
aggtgcccctgaagcgaagttc

SEQ ID NO: 211920 - DNA, 22 bp, Artificial Sequence
  Synthetic oligonucleotide; CTG chr2 60543510 60543531 60543515 60543510 -
aagcgaagttctggaagacggc

SEQ ID NO: 211921 - DNA, 22 bp, Artificial Sequence
  Synthetic oligonucleotide; TTC chr2 60543499 60543520 60543504 60543499 -
tggaagacggctgtgtgtgtac

SEQ ID NO: 211922 - DNA, 22 bp, Artificial Sequence
  Synthetic oligonucleotide; CTG chr2 60543497 60543518 60543502 60543497 -
gaagacggctgtgtgtgtaccc

SEQ ID NO: 211923 - DNA, 22 bp, Artificial Sequence
  Synthetic oligonucleotide; CTG chr2 60543486 60543507 60543491 60543486 -
tgtgtgtacccccagcccattt

SEQ ID NO: 211924 - DNA, 22 bp, Artificial Sequence
  Synthetic oligonucleotide; TTT chr2 60543464 60543485 60543469 60543464 -
ctctaaagcacgtctgcacaat

SEQ ID NO: 211925 - DNA, 22 bp, Artificial Sequence
  Synthetic oligonucleotide; TTC chr2 60543463 60543484 60543468 60543463 -
tctaaagcacgtctgcacaatt

SEQ ID NO: 211926 - DNA, 22 bp, Artificial Sequence
  Synthetic oligonucleotide; CTC chr2 60543461 60543482 60543466 60543461 -
taaagcacgtctgcacaattcc

SEQ ID NO: 211927 - DNA, 22 bp, Artificial Sequence
  Synthetic oligonucleotide; CTA chr2 60543459 60543480 60543464 60543459 -
aagcacgtctgcacaattccaa

SEQ ID NO: 211928 - DNA, 22 bp, Artificial Sequence
  Synthetic oligonucleotide; CTG chr2 60543448 60543469 60543453 60543448 -
cacaattccaagtctgcttttc

SEQ ID NO: 211929 - DNA, 22 bp, Artificial Sequence
  Synthetic oligonucleotide; TTC chr2 60543440 60543461 60543445 60543440 -
caagtctgcttttctttttatg

SEQ ID NO: 211930 - DNA, 22 bp, Artificial Sequence
  Synthetic oligonucleotide; CTG chr2 60543432 60543453 60543437 60543432 -
cttttctttttatgatgaggaa

SEQ ID NO: 211931 - DNA, 22 bp, Artificial Sequence
  Synthetic oligonucleotide; CTT chr2 60543429 60543450 60543434 60543429 -
ttctttttatgatgaggaagga

SEQ ID NO: 211932 - DNA, 22 bp, Artificial Sequence
  Synthetic oligonucleotide; TTT chr2 60543428 60543449 60543433 60543428 -
tctttttatgatgaggaaggaa

SEQ ID NO: 211933 - DNA, 22 bp, Artificial Sequence
  Synthetic oligonucleotide; TTT chr2 60543427 60543448 60543432 60543427 -
ctttttatgatgaggaaggaaa

SEQ ID NO: 211934 - DNA, 22 bp, Artificial Sequence
  Synthetic oligonucleotide; TTC chr2 60543426 60543447 60543431 60543426 -
tttttatgatgaggaaggaaac

SEQ ID NO: 211935 - DNA, 22 bp, Artificial Sequence
  Synthetic oligonucleotide; CTT chr2 60543424 60543445 60543429 60543424 -
tttatgatgaggaaggaaacaa

SEQ ID NO: 211936 - DNA, 22 bp, Artificial Sequence
  Synthetic oligonucleotide; TTT chr2 60543423 60543444 60543428 60543423 -
ttatgatgaggaaggaaacaat

SEQ ID NO: 211937 - DNA, 22 bp, Artificial Sequence
  Synthetic oligonucleotide; TTT chr2 60543422 60543443 60543427 60543422 -
tatgatgaggaaggaaacaata

SEQ ID NO: 211938 - DNA, 22 bp, Artificial Sequence
  Synthetic oligonucleotide; TTT chr2 60543421 60543442 60543426 60543421 -
atgatgaggaaggaaacaataa

SEQ ID NO: 211939 - DNA, 22 bp, Artificial Sequence
  Synthetic oligonucleotide; TTA chr2 60543420 60543441 60543425 60543420 -
tgatgaggaaggaaacaataac

SEQ ID NO: 211940 - DNA, 22 bp, Artificial Sequence
  Synthetic oligonucleotide; TTC chr2 60543387 60543408 60543392 60543387 -
agtagatatttgaattgtgtca

SEQ ID NO: 211941 - DNA, 22 bp, Artificial Sequence
  Synthetic oligonucleotide; TTT chr2 60543376 60543397 60543381 60543376 -
gaattgtgtcacaaaaagaaag

SEQ ID NO: 211942 - DNA, 22 bp, Artificial Sequence
  Synthetic oligonucleotide; TTG chr2 60543375 60543396 60543380 60543375 -
aattgtgtcacaaaaagaaagg

SEQ ID NO: 211943 - DNA, 22 bp, Artificial Sequence
  Synthetic oligonucleotide; TTG chr2 60543370 60543391 60543375 60543370 -
tgtcacaaaaagaaaggagaag

SEQ ID NO: 211944 - DNA, 22 bp, Artificial Sequence
  Synthetic oligonucleotide; CTT chr2 60543339 60543360 60543344 60543339 -
gtattaaggaaagagatatatt

SEQ ID NO: 211945 - DNA, 22 bp, Artificial Sequence
  Synthetic oligonucleotide; TTG chr2 60543338 60543359 60543343 60543338 -
tattaaggaaagagatatattg

SEQ ID NO: 211946 - DNA, 22 bp, Artificial Sequence
  Synthetic oligonucleotide; TTA chr2 60543333 60543354 60543338 60543333 -
aggaaagagatatattgatgaa

SEQ ID NO: 211947 - DNA, 22 bp, Artificial Sequence
  Synthetic oligonucleotide; TTG chr2 60543316 60543337 60543321 60543316 -
atgaatctctagaagaatgtgt

SEQ ID NO: 211948 - DNA, 22 bp, Artificial Sequence
  Synthetic oligonucleotide; CTC chr2 60543307 60543328 60543312 60543307 -
tagaagaatgtgtttggcaacc

SEQ ID NO: 211949 - DNA, 22 bp, Artificial Sequence
  Synthetic oligonucleotide; CTA chr2 60543305 60543326 60543310 60543305 -
gaagaatgtgtttggcaaccac

SEQ ID NO: 211950 - DNA, 22 bp, Artificial Sequence
  Synthetic oligonucleotide; TTT chr2 60543292 60543313 60543297 60543292 -
ggcaaccacataaaaggtagtc

SEQ ID NO: 211951 - DNA, 22 bp, Artificial Sequence
  Synthetic oligonucleotide; TTG chr2 60543291 60543312 60543296 60543291 -
gcaaccacataaaaggtagtca

SEQ ID NO: 211952 - DNA, 22 bp, Artificial Sequence
  Synthetic oligonucleotide; TTT chr2 60543266 60543287 60543271 60543266 -
aagcgtgctgggtaggaaaggc

SEQ ID NO: 211953 - DNA, 22 bp, Artificial Sequence
  Synthetic oligonucleotide; TTA chr2 60543265 60543286 60543270 60543265 -
agcgtgctgggtaggaaaggct

SEQ ID NO: 211954 - DNA, 22 bp, Artificial Sequence
  Synthetic oligonucleotide; CTG chr2 60543256 60543277 60543261 60543256 -
ggtaggaaaggctttattaaag

SEQ ID NO: 211955 - DNA, 22 bp, Artificial Sequence
  Synthetic oligonucleotide; CTT chr2 60543242 60543263 60543247 60543242 -
tattaaagtgatgtaagttgga

SEQ ID NO: 211956 - DNA, 22 bp, Artificial Sequence
  Synthetic oligonucleotide; TTT chr2 60543241 60543262 60543246 60543241 -
attaaagtgatgtaagttggat

SEQ ID NO: 211957 - DNA, 22 bp, Artificial Sequence
  Synthetic oligonucleotide; TTA chr2 60543240 60543261 60543245 60543240 -
ttaaagtgatgtaagttggatt

SEQ ID NO: 211958 - DNA, 22 bp, Artificial Sequence
  Synthetic oligonucleotide; TTA chr2 60543237 60543258 60543242 60543237 -
aagtgatgtaagttggatttga

SEQ ID NO: 211959 - DNA, 22 bp, Artificial Sequence
  Synthetic oligonucleotide; TTG chr2 60543222 60543243 60543227 60543222 -
gatttgagttcactgtgagcct

SEQ ID NO: 211960 - DNA, 22 bp, Artificial Sequence
  Synthetic oligonucleotide; TTT chr2 60543217 60543238 60543222 60543217 -
gagttcactgtgagcctgtact

SEQ ID NO: 211961 - DNA, 22 bp, Artificial Sequence
  Synthetic oligonucleotide; TTG chr2 60543216 60543237 60543221 60543216 -
agttcactgtgagcctgtacta

SEQ ID NO: 211962 - DNA, 22 bp, Artificial Sequence
  Synthetic oligonucleotide; TTC chr2 60543211 60543232 60543216 60543211 -
actgtgagcctgtactatttta

SEQ ID NO: 211963 - DNA, 22 bp, Artificial Sequence
  Synthetic oligonucleotide; CTG chr2 60543207 60543228 60543212 60543207 -
tgagcctgtactattttatagg

SEQ ID NO: 211964 - DNA, 22 bp, Artificial Sequence
  Synthetic oligonucleotide; CTG chr2 60543199 60543220 60543204 60543199 -
tactattttataggcaggaagc

SEQ ID NO: 211965 - DNA, 22 bp, Artificial Sequence
  Synthetic oligonucleotide; CTA chr2 60543194 60543215 60543199 60543194 -
ttttataggcaggaagcaagaa

SEQ ID NO: 211966 - DNA, 22 bp, Artificial Sequence
  Synthetic oligonucleotide; TTT chr2 60543191 60543212 60543196 60543191 -
tataggcaggaagcaagaataa

SEQ ID NO: 211967 - DNA, 22 bp, Artificial Sequence
  Synthetic oligonucleotide; TTT chr2 60543190 60543211 60543195 60543190 -
ataggcaggaagcaagaataaa

SEQ ID NO: 211968 - DNA, 22 bp, Artificial Sequence
  Synthetic oligonucleotide; TTA chr2 60543189 60543210 60543194 60543189 -
taggcaggaagcaagaataaaa

SEQ ID NO: 211969 - DNA, 22 bp, Artificial Sequence
  Synthetic oligonucleotide; CTT chr2 60543153 60543174 60543158 60543153 -
cttcctaagataaataaagctt

SEQ ID NO: 211970 - DNA, 22 bp, Artificial Sequence
  Synthetic oligonucleotide; TTC chr2 60543152 60543173 60543157 60543152 -
ttcctaagataaataaagctta

SEQ ID NO: 211971 - DNA, 22 bp, Artificial Sequence
  Synthetic oligonucleotide; CTT chr2 60543150 60543171 60543155 60543150 -
cctaagataaataaagcttaga

SEQ ID NO: 211972 - DNA, 22 bp, Artificial Sequence
  Synthetic oligonucleotide; TTC chr2 60543149 60543170 60543154 60543149 -
ctaagataaataaagcttagaa

SEQ ID NO: 211973 - DNA, 22 bp, Artificial Sequence
  Synthetic oligonucleotide; CTA chr2 60543146 60543167 60543151 60543146 -
agataaataaagcttagaattc

SEQ ID NO: 211974 - DNA, 22 bp, Artificial Sequence
  Synthetic oligonucleotide; CTT chr2 60543131 60543152 60543136 60543131 -
agaattcgggactttcagatag

SEQ ID NO: 211975 - DNA, 22 bp, Artificial Sequence
  Synthetic oligonucleotide; TTA chr2 60543130 60543151 60543135 60543130 -
gaattcgggactttcagatagg

SEQ ID NO: 211976 - DNA, 22 bp, Artificial Sequence
  Synthetic oligonucleotide; TTC chr2 60543124 60543145 60543129 60543124 -
gggactttcagataggagaata

SEQ ID NO: 211977 - DNA, 22 bp, Artificial Sequence
  Synthetic oligonucleotide; CTT chr2 60543117 60543138 60543122 60543117 -
tcagataggagaataaggcaga

SEQ ID NO: 211978 - DNA, 22 bp, Artificial Sequence
  Synthetic oligonucleotide; TTT chr2 60543116 60543137 60543121 60543116 -
cagataggagaataaggcagag

SEQ ID NO: 211979 - DNA, 22 bp, Artificial Sequence
  Synthetic oligonucleotide; TTC chr2 60543115 60543136 60543120 60543115 -
agataggagaataaggcagagt

SEQ ID NO: 211980 - DNA, 22 bp, Artificial Sequence
  Synthetic oligonucleotide; TTC chr2 60543091 60543112 60543096 60543091 -
tttaaatcttgagtaaaatggt

SEQ ID NO: 211981 - DNA, 22 bp, Artificial Sequence
  Synthetic oligonucleotide; CTT chr2 60543089 60543110 60543094 60543089 -
taaatcttgagtaaaatggtat

SEQ ID NO: 211982 - DNA, 22 bp, Artificial Sequence
  Synthetic oligonucleotide; TTT chr2 60543088 60543109 60543093 60543088 -
aaatcttgagtaaaatggtatg

SEQ ID NO: 211983 - DNA, 22 bp, Artificial Sequence
  Synthetic oligonucleotide; TTA chr2 60543087 60543108 60543092 60543087 -
aatcttgagtaaaatggtatgc

SEQ ID NO: 211984 - DNA, 22 bp, Artificial Sequence
  Synthetic oligonucleotide; CTT chr2 60543081 60543102 60543086 60543081 -
gagtaaaatggtatgcattttc

SEQ ID NO: 211985 - DNA, 22 bp, Artificial Sequence
  Synthetic oligonucleotide; TTG chr2 60543080 60543101 60543085 60543080 -
agtaaaatggtatgcattttca

SEQ ID NO: 211986 - DNA, 22 bp, Artificial Sequence
  Synthetic oligonucleotide; TTT chr2 60543061 60543082 60543066 60543061 -
tcactgtactcaggcctctcca

SEQ ID NO: 211987 - DNA, 22 bp, Artificial Sequence
  Synthetic oligonucleotide; TTT chr2 60543060 60543081 60543065 60543060 -
cactgtactcaggcctctccaa

SEQ ID NO: 211988 - DNA, 22 bp, Artificial Sequence
  Synthetic oligonucleotide; TTC chr2 60543059 60543080 60543064 60543059 -
actgtactcaggcctctccaag

SEQ ID NO: 211989 - DNA, 22 bp, Artificial Sequence
  Synthetic oligonucleotide; CTG chr2 60543055 60543076 60543060 60543055 -
tactcaggcctctccaagctga

SEQ ID NO: 211990 - DNA, 22 bp, Artificial Sequence
  Synthetic oligonucleotide; CTC chr2 60543050 60543071 60543055 60543050 -
aggcctctccaagctgagtttt

SEQ ID NO: 211991 - DNA, 22 bp, Artificial Sequence
  Synthetic oligonucleotide; CTC chr2 60543043 60543064 60543048 60543043 -
tccaagctgagttttttttttt

SEQ ID NO: 211992 - DNA, 22 bp, Artificial Sequence
  Synthetic oligonucleotide; CTC chr2 60543041 60543062 60543046 60543041 -
caagctgagttttttttttttt

SEQ ID NO: 211993 - DNA, 22 bp, Artificial Sequence
  Synthetic oligonucleotide; CTG chr2 60543034 60543055 60543039 60543034 -
agtttttttttttttttttttt

SEQ ID NO: 211994 - DNA, 22 bp, Artificial Sequence
  Synthetic oligonucleotide; TTT chr2 60543029 60543050 60543034 60543029 -
ttttttttttttttttttttta

SEQ ID NO: 211995 - DNA, 22 bp, Artificial Sequence
  Synthetic oligonucleotide; TTT chr2 60543028 60543049 60543033 60543028 -
ttttttttttttttttttttag

SEQ ID NO: 211996 - DNA, 22 bp, Artificial Sequence
  Synthetic oligonucleotide; TTT chr2 60543027 60543048 60543032 60543027 -
tttttttttttttttttttaga

SEQ ID NO: 211997 - DNA, 22 bp, Artificial Sequence
  Synthetic oligonucleotide; TTT chr2 60543026 60543047 60543031 60543026 -
ttttttttttttttttttagac

SEQ ID NO: 211998 - DNA, 22 bp, Artificial Sequence
  Synthetic oligonucleotide; TTT chr2 60543025 60543046 60543030 60543025 -
tttttttttttttttttagaca

SEQ ID NO: 211999 - DNA, 22 bp, Artificial Sequence
  Synthetic oligonucleotide; TTT chr2 60543024 60543045 60543029 60543024 -
ttttttttttttttttagacag

SEQ ID NO: 212000 - DNA, 22 bp, Artificial Sequence
  Synthetic oligonucleotide; TTT chr2 60543023 60543044 60543028 60543023 -
tttttttttttttttagacaga

SEQ ID NO: 212001 - DNA, 22 bp, Artificial Sequence
  Synthetic oligonucleotide; TTT chr2 60543022 60543043 60543027 60543022 -
ttttttttttttttagacagag

SEQ ID NO: 212002 - DNA, 22 bp, Artificial Sequence
  Synthetic oligonucleotide; TTT chr2 60543021 60543042 60543026 60543021 -
tttttttttttttagacagagt

SEQ ID NO: 212003 - DNA, 22 bp, Artificial Sequence
  Synthetic oligonucleotide; TTT chr2 60543020 60543041 60543025 60543020 -
ttttttttttttagacagagtt

SEQ ID NO: 212004 - DNA, 22 bp, Artificial Sequence
  Synthetic oligonucleotide; TTT chr2 60543019 60543040 60543024 60543019 -
tttttttttttagacagagttt

SEQ ID NO: 212005 - DNA, 22 bp, Artificial Sequence
  Synthetic oligonucleotide; TTT chr2 60543018 60543039 60543023 60543018 -
ttttttttttagacagagtttt

SEQ ID NO: 212006 - DNA, 22 bp, Artificial Sequence
  Synthetic oligonucleotide; TTT chr2 60543017 60543038 60543022 60543017 -
tttttttttagacagagttttg

SEQ ID NO: 212007 - DNA, 22 bp, Artificial Sequence
  Synthetic oligonucleotide; TTT chr2 60543016 60543037 60543021 60543016 -
ttttttttagacagagttttgc

SEQ ID NO: 212008 - DNA, 22 bp, Artificial Sequence
  Synthetic oligonucleotide; TTT chr2 60543015 60543036 60543020 60543015 -
tttttttagacagagttttgct

SEQ ID NO: 212009 - DNA, 22 bp, Artificial Sequence
  Synthetic oligonucleotide; TTT chr2 60543014 60543035 60543019 60543014 -
ttttttagacagagttttgctc

SEQ ID NO: 212010 - DNA, 22 bp, Artificial Sequence
  Synthetic oligonucleotide; TTT chr2 60543013 60543034 60543018 60543013 -
tttttagacagagttttgctct

SEQ ID NO: 212011 - DNA, 22 bp, Artificial Sequence
  Synthetic oligonucleotide; TTT chr2 60543012 60543033 60543017 60543012 -
ttttagacagagttttgctctt

SEQ ID NO: 212012 - DNA, 22 bp, Artificial Sequence
  Synthetic oligonucleotide; TTT chr2 60543011 60543032 60543016 60543011 -
tttagacagagttttgctcttg

SEQ ID NO: 212013 - DNA, 22 bp, Artificial Sequence
  Synthetic oligonucleotide; TTT chr2 60543010 60543031 60543015 60543010 -
ttagacagagttttgctcttgt

SEQ ID NO: 212014 - DNA, 22 bp, Artificial Sequence
  Synthetic oligonucleotide; TTT chr2 60543009 60543030 60543014 60543009 -
tagacagagttttgctcttgtt

SEQ ID NO: 212015 - DNA, 22 bp, Artificial Sequence
  Synthetic oligonucleotide; TTT chr2 60543008 60543029 60543013 60543008 -
agacagagttttgctcttgttg

SEQ ID NO: 212016 - DNA, 22 bp, Artificial Sequence
  Synthetic oligonucleotide; TTA chr2 60543007 60543028 60543012 60543007 -
gacagagttttgctcttgttgc

SEQ ID NO: 212017 - DNA, 22 bp, Artificial Sequence
  Synthetic oligonucleotide; TTT chr2 60542997 60543018 60543002 60542997 -
tgctcttgttgcccaggctgga

SEQ ID NO: 212018 - DNA, 22 bp, Artificial Sequence
  Synthetic oligonucleotide; TTT chr2 60542996 60543017 60543001 60542996 -
gctcttgttgcccaggctggag

SEQ ID NO: 212019 - DNA, 22 bp, Artificial Sequence
  Synthetic oligonucleotide; TTG chr2 60542995 60543016 60543000 60542995 -
ctcttgttgcccaggctggagt

SEQ ID NO: 212020 - DNA, 22 bp, Artificial Sequence
  Synthetic oligonucleotide; CTC chr2 60542992 60543013 60542997 60542992 -
ttgttgcccaggctggagtgca

SEQ ID NO: 212021 - DNA, 22 bp, Artificial Sequence
  Synthetic oligonucleotide; CTT chr2 60542990 60543011 60542995 60542990 -
gttgcccaggctggagtgcagt

SEQ ID NO: 212022 - DNA, 22 bp, Artificial Sequence
  Synthetic oligonucleotide; TTG chr2 60542989 60543010 60542994 60542989 -
ttgcccaggctggagtgcagtg

SEQ ID NO: 212023 - DNA, 22 bp, Artificial Sequence
  Synthetic oligonucleotide; TTG chr2 60542986 60543007 60542991 60542986 -
cccaggctggagtgcagtggca

SEQ ID NO: 212024 - DNA, 22 bp, Artificial Sequence
  Synthetic oligonucleotide; CTG chr2 60542977 60542998 60542982 60542977 -
gagtgcagtggcatgattttgg

SEQ ID NO: 212025 - DNA, 22 bp, Artificial Sequence
  Synthetic oligonucleotide; TTT chr2 60542958 60542979 60542963 60542958 -
tggctcactgcaacctctgcct

SEQ ID NO: 212026 - DNA, 22 bp, Artificial Sequence
  Synthetic oligonucleotide; TTT chr2 60542957 60542978 60542962 60542957 -
ggctcactgcaacctctgcctc

SEQ ID NO: 212027 - DNA, 22 bp, Artificial Sequence
  Synthetic oligonucleotide; TTG chr2 60542956 60542977 60542961 60542956 -
gctcactgcaacctctgcctcc

SEQ ID NO: 212028 - DNA, 22 bp, Artificial Sequence
  Synthetic oligonucleotide; CTC chr2 60542952 60542973 60542957 60542952 -
actgcaacctctgcctcctagg

SEQ ID NO: 212029 - DNA, 22 bp, Artificial Sequence
  Synthetic oligonucleotide; CTG chr2 60542948 60542969 60542953 60542948 -
caacctctgcctcctaggttca

SEQ ID NO: 212030 - DNA, 22 bp, Artificial Sequence
  Synthetic oligonucleotide; CTC chr2 60542941 60542962 60542946 60542941 -
tgcctcctaggttcaagcgatt

SEQ ID NO: 212031 - DNA, 22 bp, Artificial Sequence
  Synthetic oligonucleotide; CTG chr2 60542939 60542960 60542944 60542939 -
cctcctaggttcaagcgattct

SEQ ID NO: 212032 - DNA, 22 bp, Artificial Sequence
  Synthetic oligonucleotide; CTC chr2 60542935 60542956 60542940 60542935 -
ctaggttcaagcgattctcctg

SEQ ID NO: 212033 - DNA, 22 bp, Artificial Sequence
  Synthetic oligonucleotide; CTA chr2 60542932 60542953 60542937 60542932 -
ggttcaagcgattctcctgcct

SEQ ID NO: 212034 - DNA, 22 bp, Artificial Sequence
  Synthetic oligonucleotide; TTC chr2 60542927 60542948 60542932 60542927 -
aagcgattctcctgcctcagcc

SEQ ID NO: 212035 - DNA, 22 bp, Artificial Sequence
  Synthetic oligonucleotide; TTC chr2 60542918 60542939 60542923 60542918 -
tcctgcctcagcctcccaagta

SEQ ID NO: 212036 - DNA, 22 bp, Artificial Sequence
  Synthetic oligonucleotide; CTC chr2 60542916 60542937 60542921 60542916 -
ctgcctcagcctcccaagtagc

SEQ ID NO: 212037 - DNA, 22 bp, Artificial Sequence
  Synthetic oligonucleotide; CTG chr2 60542913 60542934 60542918 60542913 -
cctcagcctcccaagtagctgg

SEQ ID NO: 212038 - DNA, 22 bp, Artificial Sequence
  Synthetic oligonucleotide; CTC chr2 60542909 60542930 60542914 60542909 -
agcctcccaagtagctgggatt

SEQ ID NO: 212039 - DNA, 22 bp, Artificial Sequence
  Synthetic oligonucleotide; CTC chr2 60542903 60542924 60542908 60542903 -
ccaagtagctgggattacaggc

SEQ ID NO: 212040 - DNA, 22 bp, Artificial Sequence
  Synthetic oligonucleotide; CTG chr2 60542892 60542913 60542897 60542892 -
ggattacaggcgtgtgccacta

SEQ ID NO: 212041 - DNA, 22 bp, Artificial Sequence
  Synthetic oligonucleotide; TTA chr2 60542886 60542907 60542891 60542886 -
caggcgtgtgccactacgccca

SEQ ID NO: 212042 - DNA, 22 bp, Artificial Sequence
  Synthetic oligonucleotide; CTA chr2 60542870 60542891 60542875 60542870 -
cgcccagctagttttttgtatt

SEQ ID NO: 212043 - DNA, 22 bp, Artificial Sequence
  Synthetic oligonucleotide; CTA chr2 60542860 60542881 60542865 60542860 -
gttttttgtattttcagtagag

SEQ ID NO: 212044 - DNA, 22 bp, Artificial Sequence
  Synthetic oligonucleotide; TTT chr2 60542856 60542877 60542861 60542856 -
tttgtattttcagtagaggcag

SEQ ID NO: 212045 - DNA, 22 bp, Artificial Sequence
  Synthetic oligonucleotide; TTT chr2 60542855 60542876 60542860 60542855 -
ttgtattttcagtagaggcagg

SEQ ID NO: 212046 - DNA, 22 bp, Artificial Sequence
  Synthetic oligonucleotide; TTT chr2 60542854 60542875 60542859 60542854 -
tgtattttcagtagaggcaggg

SEQ ID NO: 212047 - DNA, 22 bp, Artificial Sequence
  Synthetic oligonucleotide; TTT chr2 60542853 60542874 60542858 60542853 -
gtattttcagtagaggcagggt

SEQ ID NO: 212048 - DNA, 22 bp, Artificial Sequence
  Synthetic oligonucleotide; TTG chr2 60542852 60542873 60542857 60542852 -
tattttcagtagaggcagggtt

SEQ ID NO: 212049 - DNA, 22 bp, Artificial Sequence
  Synthetic oligonucleotide; TTT chr2 60542847 60542868 60542852 60542847 -
tcagtagaggcagggtttcacc

SEQ ID NO: 212050 - DNA, 22 bp, Artificial Sequence
  Synthetic oligonucleotide; TTT chr2 60542846 60542867 60542851 60542846 -
cagtagaggcagggtttcacca

SEQ ID NO: 212051 - DNA, 22 bp, Artificial Sequence
  Synthetic oligonucleotide; TTC chr2 60542845 60542866 60542850 60542845 -
agtagaggcagggtttcaccat

SEQ ID NO: 212052 - DNA, 22 bp, Artificial Sequence
  Synthetic oligonucleotide; TTT chr2 60542829 60542850 60542834 60542829 -
caccatgttggccaggctggtc

SEQ ID NO: 212053 - DNA, 22 bp, Artificial Sequence
  Synthetic oligonucleotide; TTC chr2 60542828 60542849 60542833 60542828 -
accatgttggccaggctggtct

SEQ ID NO: 212054 - DNA, 22 bp, Artificial Sequence
  Synthetic oligonucleotide; TTG chr2 60542819 60542840 60542824 60542819 -
gccaggctggtcttgaactcct

SEQ ID NO: 212055 - DNA, 22 bp, Artificial Sequence
  Synthetic oligonucleotide; CTG chr2 60542810 60542831 60542815 60542810 -
gtcttgaactcctgacctcagg

SEQ ID NO: 212056 - DNA, 22 bp, Artificial Sequence
  Synthetic oligonucleotide; CTT chr2 60542805 60542826 60542810 60542805 -
gaactcctgacctcaggtgatc

SEQ ID NO: 212057 - DNA, 22 bp, Artificial Sequence
  Synthetic oligonucleotide; TTG chr2 60542804 60542825 60542809 60542804 -
aactcctgacctcaggtgatcc

SEQ ID NO: 212058 - DNA, 22 bp, Artificial Sequence
  Synthetic oligonucleotide; CTC chr2 60542799 60542820 60542804 60542799 -
ctgacctcaggtgatccacctg

SEQ ID NO: 212059 - DNA, 22 bp, Artificial Sequence
  Synthetic oligonucleotide; CTG chr2 60542796 60542817 60542801 60542796 -
acctcaggtgatccacctggct

SEQ ID NO: 212060 - DNA, 22 bp, Artificial Sequence
  Synthetic oligonucleotide; CTC chr2 60542791 60542812 60542796 60542791 -
aggtgatccacctggcttggcc

SEQ ID NO: 212061 - DNA, 22 bp, Artificial Sequence
  Synthetic oligonucleotide; CTG chr2 60542777 60542798 60542782 60542777 -
gcttggcctcccaaagtgctgg

SEQ ID NO: 212062 - DNA, 22 bp, Artificial Sequence
  Synthetic oligonucleotide; CTT chr2 60542773 60542794 60542778 60542773 -
ggcctcccaaagtgctgggatt

SEQ ID NO: 212063 - DNA, 22 bp, Artificial Sequence
  Synthetic oligonucleotide; TTG chr2 60542772 60542793 60542777 60542772 -
gcctcccaaagtgctgggatta

SEQ ID NO: 212064 - DNA, 22 bp, Artificial Sequence
  Synthetic oligonucleotide; CTC chr2 60542767 60542788 60542772 60542767 -
ccaaagtgctgggattacaggc

SEQ ID NO: 212065 - DNA, 22 bp, Artificial Sequence
  Synthetic oligonucleotide; CTG chr2 60542756 60542777 60542761 60542756 -
ggattacaggcttgagcgaccg

SEQ ID NO: 212066 - DNA, 22 bp, Artificial Sequence
  Synthetic oligonucleotide; TTA chr2 60542750 60542771 60542755 60542750 -
caggcttgagcgaccgcacctg

SEQ ID NO: 212067 - DNA, 22 bp, Artificial Sequence
  Synthetic oligonucleotide; CTT chr2 60542743 60542764 60542748 60542743 -
gagcgaccgcacctggcccaaa

SEQ ID NO: 212068 - DNA, 22 bp, Artificial Sequence
  Synthetic oligonucleotide; TTG chr2 60542742 60542763 60542747 60542742 -
agcgaccgcacctggcccaaac

SEQ ID NO: 212069 - DNA, 22 bp, Artificial Sequence
  Synthetic oligonucleotide; CTG chr2 60542728 60542749 60542733 60542728 -
gcccaaactgagtattttttag

SEQ ID NO: 212070 - DNA, 22 bp, Artificial Sequence
  Synthetic oligonucleotide; CTG chr2 60542718 60542739 60542723 60542718 -
agtattttttagaggattcttt

SEQ ID NO: 212071 - DNA, 22 bp, Artificial Sequence
  Synthetic oligonucleotide; TTT chr2 60542711 60542732 60542716 60542711 -
tttagaggattctttttacctg

SEQ ID NO: 212072 - DNA, 22 bp, Artificial Sequence
  Synthetic oligonucleotide; TTT chr2 60542710 60542731 60542715 60542710 -
ttagaggattctttttacctgg

SEQ ID NO: 212073 - DNA, 22 bp, Artificial Sequence
  Synthetic oligonucleotide; TTT chr2 60542709 60542730 60542714 60542709 -
tagaggattctttttacctggt

SEQ ID NO: 212074 - DNA, 22 bp, Artificial Sequence
  Synthetic oligonucleotide; TTT chr2 60542708 60542729 60542713 60542708 -
agaggattctttttacctggtg

SEQ ID NO: 212075 - DNA, 22 bp, Artificial Sequence
  Synthetic oligonucleotide; TTA chr2 60542707 60542728 60542712 60542707 -
gaggattctttttacctggtga

SEQ ID NO: 212076 - DNA, 22 bp, Artificial Sequence
  Synthetic oligonucleotide; TTC chr2 60542699 60542720 60542704 60542699 -
tttttacctggtgaatagatgg

SEQ ID NO: 212077 - DNA, 22 bp, Artificial Sequence
  Synthetic oligonucleotide; CTT chr2 60542697 60542718 60542702 60542697 -
tttacctggtgaatagatgggt

SEQ ID NO: 212078 - DNA, 22 bp, Artificial Sequence
  Synthetic oligonucleotide; TTT chr2 60542696 60542717 60542701 60542696 -
ttacctggtgaatagatgggta

SEQ ID NO: 212079 - DNA, 22 bp, Artificial Sequence
  Synthetic oligonucleotide; TTT chr2 60542695 60542716 60542700 60542695 -
tacctggtgaatagatgggtat

SEQ ID NO: 212080 - DNA, 22 bp, Artificial Sequence
  Synthetic oligonucleotide; TTT chr2 60542694 60542715 60542699 60542694 -
acctggtgaatagatgggtatg

SEQ ID NO: 212081 - DNA, 22 bp, Artificial Sequence
  Synthetic oligonucleotide; TTA chr2 60542693 60542714 60542698 60542693 -
cctggtgaatagatgggtatgt

SEQ ID NO: 212082 - DNA, 22 bp, Artificial Sequence
  Synthetic oligonucleotide; CTG chr2 60542689 60542710 60542694 60542689 -
gtgaatagatgggtatgtgctc

SEQ ID NO: 212083 - DNA, 22 bp, Artificial Sequence
  Synthetic oligonucleotide; CTC chr2 60542667 60542688 60542672 60542667 -
ccccacttcatccacgtacaca

SEQ ID NO: 212084 - DNA, 22 bp, Artificial Sequence
  Synthetic oligonucleotide; CTT chr2 60542659 60542680 60542664 60542659 -
catccacgtacacatatgagct

SEQ ID NO: 212085 - DNA, 22 bp, Artificial Sequence
  Synthetic oligonucleotide; TTC chr2 60542658 60542679 60542663 60542658 -
atccacgtacacatatgagctg

SEQ ID NO: 212086 - DNA, 22 bp, Artificial Sequence
  Synthetic oligonucleotide; CTG chr2 60542636 60542657 60542641 60542636 -
tacacatagatgttaatcaggt

SEQ ID NO: 212087 - DNA, 22 bp, Artificial Sequence
  Synthetic oligonucleotide; TTA chr2 60542621 60542642 60542626 60542621 -
atcaggttgcttttttcatttt

SEQ ID NO: 212088 - DNA, 22 bp, Artificial Sequence
  Synthetic oligonucleotide; TTG chr2 60542612 60542633 60542617 60542612 -
cttttttcattttatttaaata

SEQ ID NO: 212089 - DNA, 22 bp, Artificial Sequence
  Synthetic oligonucleotide; CTT chr2 60542609 60542630 60542614 60542609 -
ttttcattttatttaaatattc

SEQ ID NO: 212090 - DNA, 22 bp, Artificial Sequence
  Synthetic oligonucleotide; TTT chr2 60542608 60542629 60542613 60542608 -
tttcattttatttaaatattca

SEQ ID NO: 212091 - DNA, 22 bp, Artificial Sequence
  Synthetic oligonucleotide; TTT chr2 60542607 60542628 60542612 60542607 -
ttcattttatttaaatattcaa

SEQ ID NO: 212092 - DNA, 22 bp, Artificial Sequence
  Synthetic oligonucleotide; TTT chr2 60542606 60542627 60542611 60542606 -
tcattttatttaaatattcaaa

SEQ ID NO: 212093 - DNA, 22 bp, Artificial Sequence
  Synthetic oligonucleotide; TTT chr2 60542605 60542626 60542610 60542605 -
cattttatttaaatattcaaaa

SEQ ID NO: 212094 - DNA, 22 bp, Artificial Sequence
  Synthetic oligonucleotide; TTC chr2 60542604 60542625 60542609 60542604 -
attttatttaaatattcaaaat

SEQ ID NO: 212095 - DNA, 22 bp, Artificial Sequence
  Synthetic oligonucleotide; TTT chr2 60542600 60542621 60542605 60542600 -
tatttaaatattcaaaatattg

SEQ ID NO: 212096 - DNA, 22 bp, Artificial Sequence
  Synthetic oligonucleotide; TTT chr2 60542599 60542620 60542604 60542599 -
atttaaatattcaaaatattgt

SEQ ID NO: 212097 - DNA, 22 bp, Artificial Sequence
  Synthetic oligonucleotide; TTA chr2 60542598 60542619 60542603 60542598 -
tttaaatattcaaaatattgtg

SEQ ID NO: 212098 - DNA, 22 bp, Artificial Sequence
  Synthetic oligonucleotide; TTT chr2 60542595 60542616 60542600 60542595 -
aaatattcaaaatattgtgtga

SEQ ID NO: 212099 - DNA, 22 bp, Artificial Sequence
  Synthetic oligonucleotide; TTA chr2 60542594 60542615 60542599 60542594 -
aatattcaaaatattgtgtgat

SEQ ID NO: 212100 - DNA, 22 bp, Artificial Sequence
  Synthetic oligonucleotide; TTC chr2 60542587 60542608 60542592 60542587 -
aaaatattgtgtgattgtgatc

SEQ ID NO: 212101 - DNA, 22 bp, Artificial Sequence
  Synthetic oligonucleotide; TTG chr2 60542578 60542599 60542583 60542578 -
tgtgattgtgatccattgagat

SEQ ID NO: 212102 - DNA, 22 bp, Artificial Sequence
  Synthetic oligonucleotide; TTG chr2 60542570 60542591 60542575 60542570 -
tgatccattgagatcattgaag

SEQ ID NO: 212103 - DNA, 22 bp, Artificial Sequence
  Synthetic oligonucleotide; TTG chr2 60542560 60542581 60542565 60542560 -
agatcattgaagtagtattaat

SEQ ID NO: 212104 - DNA, 22 bp, Artificial Sequence
  Synthetic oligonucleotide; TTG chr2 60542551 60542572 60542556 60542551 -
aagtagtattaatttagctggg

SEQ ID NO: 212105 - DNA, 22 bp, Artificial Sequence
  Synthetic oligonucleotide; TTA chr2 60542540 60542561 60542545 60542540 -
atttagctgggaattagcagct

SEQ ID NO: 212106 - DNA, 22 bp, Artificial Sequence
  Synthetic oligonucleotide; TTT chr2 60542536 60542557 60542541 60542536 -
agctgggaattagcagcttatg

SEQ ID NO: 212107 - DNA, 22 bp, Artificial Sequence
  Synthetic oligonucleotide; TTA chr2 60542535 60542556 60542540 60542535 -
gctgggaattagcagcttatgt

SEQ ID NO: 212108 - DNA, 22 bp, Artificial Sequence
  Synthetic oligonucleotide; CTG chr2 60542531 60542552 60542536 60542531 -
ggaattagcagcttatgttgtg

SEQ ID NO: 212109 - DNA, 22 bp, Artificial Sequence
  Synthetic oligonucleotide; TTA chr2 60542524 60542545 60542529 60542524 -
gcagcttatgttgtgtgggccc

SEQ ID NO: 212110 - DNA, 22 bp, Artificial Sequence
  Synthetic oligonucleotide; CTT chr2 60542517 60542538 60542522 60542517 -
atgttgtgtgggcccagttcat

SEQ ID NO: 212111 - DNA, 22 bp, Artificial Sequence
  Synthetic oligonucleotide; TTA chr2 60542516 60542537 60542521 60542516 -
tgttgtgtgggcccagttcatc

SEQ ID NO: 212112 - DNA, 22 bp, Artificial Sequence
  Synthetic oligonucleotide; TTG chr2 60542511 60542532 60542516 60542511 -
tgtgggcccagttcatcaatat

SEQ ID NO: 212113 - DNA, 22 bp, Artificial Sequence
  Synthetic oligonucleotide; TTC chr2 60542497 60542518 60542502 60542497 -
atcaatatgtgtgtcaaatatc

SEQ ID NO: 212114 - DNA, 22 bp, Artificial Sequence
  Synthetic oligonucleotide; CTC chr2 60542468 60542489 60542473 60542468 -
agatatcagcagcctttgactt

SEQ ID NO: 212115 - DNA, 22 bp, Artificial Sequence
  Synthetic oligonucleotide; CTT chr2 60542452 60542473 60542457 60542452 -
tgacttgcagtcagagctttca

SEQ ID NO: 212116 - DNA, 22 bp, Artificial Sequence
  Synthetic oligonucleotide; TTT chr2 60542451 60542472 60542456 60542451 -
gacttgcagtcagagctttcaa

SEQ ID NO: 212117 - DNA, 22 bp, Artificial Sequence
  Synthetic oligonucleotide; TTG chr2 60542450 60542471 60542455 60542450 -
acttgcagtcagagctttcaat

SEQ ID NO: 212118 - DNA, 22 bp, Artificial Sequence
  Synthetic oligonucleotide; CTT chr2 60542446 60542467 60542451 60542446 -
gcagtcagagctttcaataggg

SEQ ID NO: 212119 - DNA, 22 bp, Artificial Sequence
  Synthetic oligonucleotide; TTG chr2 60542445 60542466 60542450 60542445 -
cagtcagagctttcaatagggg

SEQ ID NO: 212120 - DNA, 22 bp, Artificial Sequence
  Synthetic oligonucleotide; CTT chr2 60542433 60542454 60542438 60542433 -
tcaataggggttttgttttgtt

SEQ ID NO: 212121 - DNA, 22 bp, Artificial Sequence
  Synthetic oligonucleotide; TTT chr2 60542432 60542453 60542437 60542432 -
caataggggttttgttttgttt

SEQ ID NO: 212122 - DNA, 22 bp, Artificial Sequence
  Synthetic oligonucleotide; TTC chr2 60542431 60542452 60542436 60542431 -
aataggggttttgttttgtttt

SEQ ID NO: 212123 - DNA, 22 bp, Artificial Sequence
  Synthetic oligonucleotide; TTT chr2 60542420 60542441 60542425 60542420 -
tgttttgttttgttttcttttt

SEQ ID NO: 212124 - DNA, 22 bp, Artificial Sequence
  Synthetic oligonucleotide; TTT chr2 60542419 60542440 60542424 60542419 -
gttttgttttgttttctttttt

SEQ ID NO: 212125 - DNA, 22 bp, Artificial Sequence
  Synthetic oligonucleotide; TTG chr2 60542418 60542439 60542423 60542418 -
ttttgttttgttttcttttttt

SEQ ID NO: 212126 - DNA, 22 bp, Artificial Sequence
  Synthetic oligonucleotide; TTT chr2 60542415 60542436 60542420 60542415 -
tgttttgttttcttttttttta

SEQ ID NO: 212127 - DNA, 22 bp, Artificial Sequence
  Synthetic oligonucleotide; TTT chr2 60542414 60542435 60542419 60542414 -
gttttgttttctttttttttag

SEQ ID NO: 212128 - DNA, 22 bp, Artificial Sequence
  Synthetic oligonucleotide; TTG chr2 60542413 60542434 60542418 60542413 -
ttttgttttctttttttttagt

SEQ ID NO: 212129 - DNA, 22 bp, Artificial Sequence
  Synthetic oligonucleotide; TTT chr2 60542410 60542431 60542415 60542410 -
tgttttctttttttttagtctc

SEQ ID NO: 212130 - DNA, 22 bp, Artificial Sequence
  Synthetic oligonucleotide; TTT chr2 60542409 60542430 60542414 60542409 -
gttttctttttttttagtctca

SEQ ID NO: 212131 - DNA, 22 bp, Artificial Sequence
  Synthetic oligonucleotide; TTG chr2 60542408 60542429 60542413 60542408 -
ttttctttttttttagtctcat

SEQ ID NO: 212132 - DNA, 22 bp, Artificial Sequence
  Synthetic oligonucleotide; TTT chr2 60542405 60542426 60542410 60542405 -
tctttttttttagtctcatatt

SEQ ID NO: 212133 - DNA, 22 bp, Artificial Sequence
  Synthetic oligonucleotide; TTT chr2 60542404 60542425 60542409 60542404 -
ctttttttttagtctcatattt

SEQ ID NO: 212134 - DNA, 22 bp, Artificial Sequence
  Synthetic oligonucleotide; TTC chr2 60542403 60542424 60542408 60542403 -
tttttttttagtctcatatttt

SEQ ID NO: 212135 - DNA, 22 bp, Artificial Sequence
  Synthetic oligonucleotide; CTT chr2 60542401 60542422 60542406 60542401 -
tttttttagtctcatattttat

SEQ ID NO: 212136 - DNA, 22 bp, Artificial Sequence
  Synthetic oligonucleotide; TTT chr2 60542400 60542421 60542405 60542400 -
ttttttagtctcatattttatg

SEQ ID NO: 212137 - DNA, 22 bp, Artificial Sequence
  Synthetic oligonucleotide; TTT chr2 60542399 60542420 60542404 60542399 -
tttttagtctcatattttatga

SEQ ID NO: 212138 - DNA, 22 bp, Artificial Sequence
  Synthetic oligonucleotide; TTT chr2 60542398 60542419 60542403 60542398 -
ttttagtctcatattttatgat

SEQ ID NO: 212139 - DNA, 22 bp, Artificial Sequence
  Synthetic oligonucleotide; TTT chr2 60542397 60542418 60542402 60542397 -
tttagtctcatattttatgatg

SEQ ID NO: 212140 - DNA, 22 bp, Artificial Sequence
  Synthetic oligonucleotide; TTT chr2 60542396 60542417 60542401 60542396 -
ttagtctcatattttatgatgg

SEQ ID NO: 212141 - DNA, 22 bp, Artificial Sequence
  Synthetic oligonucleotide; TTT chr2 60542395 60542416 60542400 60542395 -
tagtctcatattttatgatggg

SEQ ID NO: 212142 - DNA, 22 bp, Artificial Sequence
  Synthetic oligonucleotide; TTT chr2 60542394 60542415 60542399 60542394 -
agtctcatattttatgatgggg

SEQ ID NO: 212143 - DNA, 22 bp, Artificial Sequence
  Synthetic oligonucleotide; TTA chr2 60542393 60542414 60542398 60542393 -
gtctcatattttatgatggggg

SEQ ID NO: 212144 - DNA, 22 bp, Artificial Sequence
  Synthetic oligonucleotide; CTC chr2 60542388 60542409 60542393 60542388 -
atattttatgatggggggaaat

SEQ ID NO: 212145 - DNA, 22 bp, Artificial Sequence
  Synthetic oligonucleotide; TTT chr2 60542382 60542403 60542387 60542382 -
tatgatggggggaaatattcat

SEQ ID NO: 212146 - DNA, 22 bp, Artificial Sequence
  Synthetic oligonucleotide; TTT chr2 60542381 60542402 60542386 60542381 -
atgatggggggaaatattcatg

SEQ ID NO: 212147 - DNA, 22 bp, Artificial Sequence
  Synthetic oligonucleotide; TTA chr2 60542380 60542401 60542385 60542380 -
tgatggggggaaatattcatgg

SEQ ID NO: 212148 - DNA, 22 bp, Artificial Sequence
  Synthetic oligonucleotide; TTC chr2 60542362 60542383 60542367 60542362 -
atggaagattactgaatgtgaa

SEQ ID NO: 212149 - DNA, 22 bp, Artificial Sequence
  Synthetic oligonucleotide; TTA chr2 60542351 60542372 60542356 60542351 -
ctgaatgtgaaactgctgttcc

SEQ ID NO: 212150 - DNA, 22 bp, Artificial Sequence
  Synthetic oligonucleotide; CTG chr2 60542348 60542369 60542353 60542348 -
aatgtgaaactgctgttccctt

SEQ ID NO: 212151 - DNA, 22 bp, Artificial Sequence
  Synthetic oligonucleotide; CTG chr2 60542336 60542357 60542341 60542336 -
ctgttcccttatagaaaagacc

SEQ ID NO: 212152 - DNA, 22 bp, Artificial Sequence
  Synthetic oligonucleotide; CTG chr2 60542333 60542354 60542338 60542333 -
ttcccttatagaaaagacccaa

SEQ ID NO: 212153 - DNA, 22 bp, Artificial Sequence
  Synthetic oligonucleotide; TTC chr2 60542330 60542351 60542335 60542330 -
ccttatagaaaagacccaaaca

SEQ ID NO: 212154 - DNA, 22 bp, Artificial Sequence
  Synthetic oligonucleotide; CTT chr2 60542326 60542347 60542331 60542326 -
atagaaaagacccaaacattat

SEQ ID NO: 212155 - DNA, 22 bp, Artificial Sequence
  Synthetic oligonucleotide; TTA chr2 60542325 60542346 60542330 60542325 -
tagaaaagacccaaacattatc

SEQ ID NO: 212156 - DNA, 22 bp, Artificial Sequence
  Synthetic oligonucleotide; TTA chr2 60542305 60542326 60542310 60542305 -
tcccatcatgtcagatttgagg

SEQ ID NO: 212157 - DNA, 22 bp, Artificial Sequence
  Synthetic oligonucleotide; TTT chr2 60542287 60542308 60542292 60542287 -
gaggttttggcttattgcacat

SEQ ID NO: 212158 - DNA, 22 bp, Artificial Sequence
  Synthetic oligonucleotide; TTG chr2 60542286 60542307 60542291 60542286 -
aggttttggcttattgcacata

SEQ ID NO: 212159 - DNA, 22 bp, Artificial Sequence
  Synthetic oligonucleotide; TTT chr2 60542280 60542301 60542285 60542280 -
tggcttattgcacataggaatc

SEQ ID NO: 212160 - DNA, 22 bp, Artificial Sequence
  Synthetic oligonucleotide; TTT chr2 60542279 60542300 60542284 60542279 -
ggcttattgcacataggaatct

SEQ ID NO: 212161 - DNA, 22 bp, Artificial Sequence
  Synthetic oligonucleotide; TTG chr2 60542278 60542299 60542283 60542278 -
gcttattgcacataggaatctt

SEQ ID NO: 212162 - DNA, 22 bp, Artificial Sequence
  Synthetic oligonucleotide; CTT chr2 60542274 60542295 60542279 60542274 -
attgcacataggaatctttaaa

SEQ ID NO: 212163 - DNA, 22 bp, Artificial Sequence
  Synthetic oligonucleotide; TTA chr2 60542273 60542294 60542278 60542273 -
ttgcacataggaatctttaaat

SEQ ID NO: 212164 - DNA, 22 bp, Artificial Sequence
  Synthetic oligonucleotide; TTG chr2 60542270 60542291 60542275 60542270 -
cacataggaatctttaaattag

SEQ ID NO: 212165 - DNA, 22 bp, Artificial Sequence
  Synthetic oligonucleotide; CTT chr2 60542256 60542277 60542261 60542256 -
taaattaggtttgggctgtcat

SEQ ID NO: 212166 - DNA, 22 bp, Artificial Sequence
  Synthetic oligonucleotide; TTT chr2 60542255 60542276 60542260 60542255 -
aaattaggtttgggctgtcata

SEQ ID NO: 212167 - DNA, 22 bp, Artificial Sequence
  Synthetic oligonucleotide; TTA chr2 60542254 60542275 60542259 60542254 -
aattaggtttgggctgtcataa

SEQ ID NO: 212168 - DNA, 22 bp, Artificial Sequence
  Synthetic oligonucleotide; TTA chr2 60542249 60542270 60542254 60542249 -
ggtttgggctgtcataaagtta

SEQ ID NO: 212169 - DNA, 22 bp, Artificial Sequence
  Synthetic oligonucleotide; TTT chr2 60542244 60542265 60542249 60542244 -
gggctgtcataaagttagcttt

SEQ ID NO: 212170 - DNA, 22 bp, Artificial Sequence
  Synthetic oligonucleotide; TTG chr2 60542243 60542264 60542248 60542243 -
ggctgtcataaagttagctttt

SEQ ID NO: 212171 - DNA, 22 bp, Artificial Sequence
  Synthetic oligonucleotide; CTG chr2 60542238 60542259 60542243 60542238 -
tcataaagttagctttttgaga

SEQ ID NO: 212172 - DNA, 22 bp, Artificial Sequence
  Synthetic oligonucleotide; TTA chr2 60542227 60542248 60542232 60542227 -
gctttttgagagactagagaaa

SEQ ID NO: 212173 - DNA, 22 bp, Artificial Sequence
  Synthetic oligonucleotide; CTT chr2 60542223 60542244 60542228 60542223 -
tttgagagactagagaaaaaat

SEQ ID NO: 212174 - DNA, 22 bp, Artificial Sequence
  Synthetic oligonucleotide; TTT chr2 60542222 60542243 60542227 60542222 -
ttgagagactagagaaaaaata

SEQ ID NO: 212175 - DNA, 22 bp, Artificial Sequence
  Synthetic oligonucleotide; TTT chr2 60542221 60542242 60542226 60542221 -
tgagagactagagaaaaaatat

SEQ ID NO: 212176 - DNA, 22 bp, Artificial Sequence
  Synthetic oligonucleotide; TTT chr2 60542220 60542241 60542225 60542220 -
gagagactagagaaaaaatatg

SEQ ID NO: 212177 - DNA, 22 bp, Artificial Sequence
  Synthetic oligonucleotide; TTG chr2 60542219 60542240 60542224 60542219 -
agagactagagaaaaaatatga

SEQ ID NO: 212178 - DNA, 22 bp, Artificial Sequence
  Synthetic oligonucleotide; CTA chr2 60542211 60542232 60542216 60542211 -
gagaaaaaatatgacaagtcct

SEQ ID NO: 212179 - DNA, 22 bp, Artificial Sequence
  Synthetic oligonucleotide; CTA chr2 60542188 60542209 60542193 60542188 -
taaaatgtagtaaagtctgctc

SEQ ID NO: 212180 - DNA, 22 bp, Artificial Sequence
  Synthetic oligonucleotide; CTG chr2 60542169 60542190 60542174 60542169 -
ctcctgttgatatataacattt

SEQ ID NO: 212181 - DNA, 22 bp, Artificial Sequence
  Synthetic oligonucleotide; CTC chr2 60542166 60542187 60542171 60542166 -
ctgttgatatataacatttttt

SEQ ID NO: 212182 - DNA, 22 bp, Artificial Sequence
  Synthetic oligonucleotide; CTG chr2 60542163 60542184 60542168 60542163 -
ttgatatataacattttttctc

SEQ ID NO: 212183 - DNA, 22 bp, Artificial Sequence
  Synthetic oligonucleotide; TTG chr2 60542160 60542181 60542165 60542160 -
atatataacattttttctcttt

SEQ ID NO: 212184 - DNA, 22 bp, Artificial Sequence
  Synthetic oligonucleotide; TTT chr2 60542147 60542168 60542152 60542147 -
tttctctttaaaatcatgaaca

SEQ ID NO: 212185 - DNA, 22 bp, Artificial Sequence
  Synthetic oligonucleotide; TTT chr2 60542146 60542167 60542151 60542146 -
ttctctttaaaatcatgaacat

SEQ ID NO: 212186 - DNA, 22 bp, Artificial Sequence
  Synthetic oligonucleotide; TTT chr2 60542145 60542166 60542150 60542145 -
tctctttaaaatcatgaacata

SEQ ID NO: 212187 - DNA, 22 bp, Artificial Sequence
  Synthetic oligonucleotide; TTT chr2 60542144 60542165 60542149 60542144 -
ctctttaaaatcatgaacatag

SEQ ID NO: 212188 - DNA, 22 bp, Artificial Sequence
  Synthetic oligonucleotide; TTC chr2 60542143 60542164 60542148 60542143 -
tctttaaaatcatgaacataga

SEQ ID NO: 212189 - DNA, 22 bp, Artificial Sequence
  Synthetic oligonucleotide; CTC chr2 60542141 60542162 60542146 60542141 -
tttaaaatcatgaacatagaca

SEQ ID NO: 212190 - DNA, 22 bp, Artificial Sequence
  Synthetic oligonucleotide; CTT chr2 60542139 60542160 60542144 60542139 -
taaaatcatgaacatagacatt

SEQ ID NO: 212191 - DNA, 22 bp, Artificial Sequence
  Synthetic oligonucleotide; TTT chr2 60542138 60542159 60542143 60542138 -
aaaatcatgaacatagacattt

SEQ ID NO: 212192 - DNA, 22 bp, Artificial Sequence
  Synthetic oligonucleotide; TTA chr2 60542137 60542158 60542142 60542137 -
aaatcatgaacatagacattta

SEQ ID NO: 212193 - DNA, 22 bp, Artificial Sequence
  Synthetic oligonucleotide; TTT chr2 60542116 60542137 60542121 60542116 -
atatcagggtatttaaaattat

SEQ ID NO: 212194 - DNA, 22 bp, Artificial Sequence
  Synthetic oligonucleotide; TTA chr2 60542115 60542136 60542120 60542115 -
tatcagggtatttaaaattatt

SEQ ID NO: 212195 - DNA, 22 bp, Artificial Sequence
  Synthetic oligonucleotide; TTT chr2 60542102 60542123 60542107 60542102 -
aaaattatttgcctagacagta

SEQ ID NO: 212196 - DNA, 22 bp, Artificial Sequence
  Synthetic oligonucleotide; TTA chr2 60542101 60542122 60542106 60542101 -
aaattatttgcctagacagtat

SEQ ID NO: 212197 - DNA, 22 bp, Artificial Sequence
  Synthetic oligonucleotide; TTA chr2 60542095 60542116 60542100 60542095 -
tttgcctagacagtatagctgg

SEQ ID NO: 212198 - DNA, 22 bp, Artificial Sequence
  Synthetic oligonucleotide; TTT chr2 60542092 60542113 60542097 60542092 -
gcctagacagtatagctggtat

SEQ ID NO: 212199 - DNA, 22 bp, Artificial Sequence
  Synthetic oligonucleotide; TTG chr2 60542091 60542112 60542096 60542091 -
cctagacagtatagctggtatt

SEQ ID NO: 212200 - DNA, 22 bp, Artificial Sequence
  Synthetic oligonucleotide; CTA chr2 60542087 60542108 60542092 60542087 -
gacagtatagctggtatttaga

SEQ ID NO: 212201 - DNA, 22 bp, Artificial Sequence
  Synthetic oligonucleotide; CTG chr2 60542074 60542095 60542079 60542074 -
gtatttagataatgatatatca

SEQ ID NO: 212202 - DNA, 22 bp, Artificial Sequence
  Synthetic oligonucleotide; TTT chr2 60542068 60542089 60542073 60542068 -
agataatgatatatcagacaga

SEQ ID NO: 212203 - DNA, 22 bp, Artificial Sequence
  Synthetic oligonucleotide; TTA chr2 60542067 60542088 60542072 60542067 -
gataatgatatatcagacagat

SEQ ID NO: 212204 - DNA, 22 bp, Artificial Sequence
  Synthetic oligonucleotide; CTC chr2 60542041 60542062 60542046 60542041 -
taaagaagggagatatagtaat

SEQ ID NO: 212205 - DNA, 22 bp, Artificial Sequence
  Synthetic oligonucleotide; CTA chr2 60542039 60542060 60542044 60542039 -
aagaagggagatatagtaattc

SEQ ID NO: 212206 - DNA, 22 bp, Artificial Sequence
  Synthetic oligonucleotide; TTC chr2 60542017 60542038 60542022 60542017 -
aaaatggaaatacattagcatg

SEQ ID NO: 212207 - DNA, 22 bp, Artificial Sequence
  Synthetic oligonucleotide; TTA chr2 60542000 60542021 60542005 60542000 -
gcatgctcttaaaagtaaatca

SEQ ID NO: 212208 - DNA, 22 bp, Artificial Sequence
  Synthetic oligonucleotide; CTC chr2 60541992 60542013 60541997 60541992 -
ttaaaagtaaatcaaatacaat

SEQ ID NO: 212209 - DNA, 22 bp, Artificial Sequence
  Synthetic oligonucleotide; CTT chr2 60541990 60542011 60541995 60541990 -
aaaagtaaatcaaatacaatat

SEQ ID NO: 212210 - DNA, 22 bp, Artificial Sequence
  Synthetic oligonucleotide; TTA chr2 60541989 60542010 60541994 60541989 -
aaagtaaatcaaatacaatatg

SEQ ID NO: 212211 - DNA, 22 bp, Artificial Sequence
  Synthetic oligonucleotide; CTT chr2 60541964 60541985 60541969 60541964 -
ttcagaatttagaaaatgaact

SEQ ID NO: 212212 - DNA, 22 bp, Artificial Sequence
  Synthetic oligonucleotide; TTT chr2 60541963 60541984 60541968 60541963 -
tcagaatttagaaaatgaactt

SEQ ID NO: 212213 - DNA, 22 bp, Artificial Sequence
  Synthetic oligonucleotide; TTT chr2 60541962 60541983 60541967 60541962 -
cagaatttagaaaatgaactta

SEQ ID NO: 212214 - DNA, 22 bp, Artificial Sequence
  Synthetic oligonucleotide; TTC chr2 60541961 60541982 60541966 60541961 -
agaatttagaaaatgaacttac

SEQ ID NO: 212215 - DNA, 22 bp, Artificial Sequence
  Synthetic oligonucleotide; TTT chr2 60541954 60541975 60541959 60541954 -
agaaaatgaacttaccttttct

SEQ ID NO: 212216 - DNA, 22 bp, Artificial Sequence
  Synthetic oligonucleotide; TTA chr2 60541953 60541974 60541958 60541953 -
gaaaatgaacttaccttttctt

SEQ ID NO: 212217 - DNA, 22 bp, Artificial Sequence
  Synthetic oligonucleotide; CTT chr2 60541941 60541962 60541946 60541941 -
accttttctttttgtatccatt

SEQ ID NO: 212218 - DNA, 22 bp, Artificial Sequence
  Synthetic oligonucleotide; TTA chr2 60541940 60541961 60541945 60541940 -
ccttttctttttgtatccattc

SEQ ID NO: 212219 - DNA, 22 bp, Artificial Sequence
  Synthetic oligonucleotide; CTT chr2 60541936 60541957 60541941 60541936 -
ttctttttgtatccattctgat

SEQ ID NO: 212220 - DNA, 22 bp, Artificial Sequence
  Synthetic oligonucleotide; TTT chr2 60541935 60541956 60541940 60541935 -
tctttttgtatccattctgatt

SEQ ID NO: 212221 - DNA, 22 bp, Artificial Sequence
  Synthetic oligonucleotide; TTT chr2 60541934 60541955 60541939 60541934 -
ctttttgtatccattctgattc

SEQ ID NO: 212222 - DNA, 22 bp, Artificial Sequence
  Synthetic oligonucleotide; TTC chr2 60541933 60541954 60541938 60541933 -
tttttgtatccattctgattct

SEQ ID NO: 212223 - DNA, 22 bp, Artificial Sequence
  Synthetic oligonucleotide; CTT chr2 60541931 60541952 60541936 60541931 -
tttgtatccattctgattctct

SEQ ID NO: 212224 - DNA, 22 bp, Artificial Sequence
  Synthetic oligonucleotide; TTT chr2 60541930 60541951 60541935 60541930 -
ttgtatccattctgattctctc

SEQ ID NO: 212225 - DNA, 22 bp, Artificial Sequence
  Synthetic oligonucleotide; TTT chr2 60541929 60541950 60541934 60541929 -
tgtatccattctgattctctcc

SEQ ID NO: 212226 - DNA, 22 bp, Artificial Sequence
  Synthetic oligonucleotide; TTT chr2 60541928 60541949 60541933 60541928 -
gtatccattctgattctctcct

SEQ ID NO: 212227 - DNA, 22 bp, Artificial Sequence
  Synthetic oligonucleotide; TTG chr2 60541927 60541948 60541932 60541927 -
tatccattctgattctctccta

SEQ ID NO: 212228 - DNA, 22 bp, Artificial Sequence
  Synthetic oligonucleotide; TTC chr2 60541918 60541939 60541923 60541918 -
tgattctctcctagctcagact

SEQ ID NO: 212229 - DNA, 22 bp, Artificial Sequence
  Synthetic oligonucleotide; CTG chr2 60541916 60541937 60541921 60541916 -
attctctcctagctcagactga

SEQ ID NO: 212230 - DNA, 22 bp, Artificial Sequence
  Synthetic oligonucleotide; TTC chr2 60541912 60541933 60541917 60541912 -
tctcctagctcagactgaactg

SEQ ID NO: 212231 - DNA, 22 bp, Artificial Sequence
  Synthetic oligonucleotide; CTC chr2 60541910 60541931 60541915 60541910 -
tcctagctcagactgaactgga

SEQ ID NO: 212232 - DNA, 22 bp, Artificial Sequence
  Synthetic oligonucleotide; CTC chr2 60541908 60541929 60541913 60541908 -
ctagctcagactgaactggagg

SEQ ID NO: 212233 - DNA, 22 bp, Artificial Sequence
  Synthetic oligonucleotide; CTA chr2 60541905 60541926 60541910 60541905 -
gctcagactgaactggaggatg

SEQ ID NO: 212234 - DNA, 22 bp, Artificial Sequence
  Synthetic oligonucleotide; CTC chr2 60541901 60541922 60541906 60541901 -
agactgaactggaggatgtatt

SEQ ID NO: 212235 - DNA, 22 bp, Artificial Sequence
  Synthetic oligonucleotide; CTG chr2 60541895 60541916 60541900 60541895 -
aactggaggatgtatttgtgta

SEQ ID NO: 212236 - DNA, 22 bp, Artificial Sequence
  Synthetic oligonucleotide; CTG chr2 60541890 60541911 60541895 60541890 -
gaggatgtatttgtgtacctta

SEQ ID NO: 212237 - DNA, 22 bp, Artificial Sequence
  Synthetic oligonucleotide; TTT chr2 60541878 60541899 60541883 60541878 -
gtgtaccttatggtgtaattgt

SEQ ID NO: 212238 - DNA, 22 bp, Artificial Sequence
  Synthetic oligonucleotide; TTG chr2 60541877 60541898 60541882 60541877 -
tgtaccttatggtgtaattgta

SEQ ID NO: 212239 - DNA, 22 bp, Artificial Sequence
  Synthetic oligonucleotide; CTT chr2 60541869 60541890 60541874 60541869 -
atggtgtaattgtaaatgagac

SEQ ID NO: 212240 - DNA, 22 bp, Artificial Sequence
  Synthetic oligonucleotide; TTA chr2 60541868 60541889 60541873 60541868 -
tggtgtaattgtaaatgagact

SEQ ID NO: 212241 - DNA, 22 bp, Artificial Sequence
  Synthetic oligonucleotide; TTG chr2 60541857 60541878 60541862 60541857 -
taaatgagactataaattatag

SEQ ID NO: 212242 - DNA, 22 bp, Artificial Sequence
  Synthetic oligonucleotide; CTA chr2 60541845 60541866 60541850 60541845 -
taaattatagtatgctattatg

SEQ ID NO: 212243 - DNA, 22 bp, Artificial Sequence
  Synthetic oligonucleotide; TTA chr2 60541838 60541859 60541843 60541838 -
tagtatgctattatgactactt

SEQ ID NO: 212244 - DNA, 22 bp, Artificial Sequence
  Synthetic oligonucleotide; CTA chr2 60541828 60541849 60541833 60541828 -
ttatgactacttatttttcttt

SEQ ID NO: 212245 - DNA, 22 bp, Artificial Sequence
  Synthetic oligonucleotide; TTA chr2 60541825 60541846 60541830 60541825 -
tgactacttatttttcttttct

SEQ ID NO: 212246 - DNA, 22 bp, Artificial Sequence
  Synthetic oligonucleotide; CTA chr2 60541819 60541840 60541824 60541819 -
cttatttttcttttctctttat

SEQ ID NO: 212247 - DNA, 22 bp, Artificial Sequence
  Synthetic oligonucleotide; CTT chr2 60541816 60541837 60541821 60541816 -
atttttcttttctctttattta

SEQ ID NO: 212248 - DNA, 22 bp, Artificial Sequence
  Synthetic oligonucleotide; TTA chr2 60541815 60541836 60541820 60541815 -
tttttcttttctctttatttat

SEQ ID NO: 212249 - DNA, 22 bp, Artificial Sequence
  Synthetic oligonucleotide; TTT chr2 60541812 60541833 60541817 60541812 -
ttcttttctctttatttatgtg

SEQ ID NO: 212250 - DNA, 22 bp, Artificial Sequence
  Synthetic oligonucleotide; TTT chr2 60541811 60541832 60541816 60541811 -
tcttttctctttatttatgtga

SEQ ID NO: 212251 - DNA, 22 bp, Artificial Sequence
  Synthetic oligonucleotide; TTT chr2 60541810 60541831 60541815 60541810 -
cttttctctttatttatgtgat

SEQ ID NO: 212252 - DNA, 22 bp, Artificial Sequence
  Synthetic oligonucleotide; TTC chr2 60541809 60541830 60541814 60541809 -
ttttctctttatttatgtgatt

SEQ ID NO: 212253 - DNA, 22 bp, Artificial Sequence
  Synthetic oligonucleotide; CTT chr2 60541807 60541828 60541812 60541807 -
ttctctttatttatgtgattct

SEQ ID NO: 212254 - DNA, 22 bp, Artificial Sequence
  Synthetic oligonucleotide; TTT chr2 60541806 60541827 60541811 60541806 -
tctctttatttatgtgattctg

SEQ ID NO: 212255 - DNA, 22 bp, Artificial Sequence
  Synthetic oligonucleotide; TTT chr2 60541805 60541826 60541810 60541805 -
ctctttatttatgtgattctga

SEQ ID NO: 212256 - DNA, 22 bp, Artificial Sequence
  Synthetic oligonucleotide; TTC chr2 60541804 60541825 60541809 60541804 -
tctttatttatgtgattctgaa

SEQ ID NO: 212257 - DNA, 22 bp, Artificial Sequence
  Synthetic oligonucleotide; CTC chr2 60541802 60541823 60541807 60541802 -
tttatttatgtgattctgaata

SEQ ID NO: 212258 - DNA, 22 bp, Artificial Sequence
  Synthetic oligonucleotide; CTT chr2 60541800 60541821 60541805 60541800 -
tatttatgtgattctgaataaa

SEQ ID NO: 212259 - DNA, 22 bp, Artificial Sequence
  Synthetic oligonucleotide; TTT chr2 60541799 60541820 60541804 60541799 -
atttatgtgattctgaataaaa

SEQ ID NO: 212260 - DNA, 22 bp, Artificial Sequence
  Synthetic oligonucleotide; TTA chr2 60541798 60541819 60541803 60541798 -
tttatgtgattctgaataaaaa

SEQ ID NO: 212261 - DNA, 22 bp, Artificial Sequence
  Synthetic oligonucleotide; TTT chr2 60541795 60541816 60541800 60541795 -
atgtgattctgaataaaaacga

SEQ ID NO: 212262 - DNA, 22 bp, Artificial Sequence
  Synthetic oligonucleotide; TTA chr2 60541794 60541815 60541799 60541794 -
tgtgattctgaataaaaacgac

SEQ ID NO: 212263 - DNA, 22 bp, Artificial Sequence
  Synthetic oligonucleotide; TTC chr2 60541786 60541807 60541791 60541786 -
tgaataaaaacgactgacttct

SEQ ID NO: 212264 - DNA, 22 bp, Artificial Sequence
  Synthetic oligonucleotide; CTG chr2 60541784 60541805 60541789 60541784 -
aataaaaacgactgacttctga

SEQ ID NO: 212265 - DNA, 22 bp, Artificial Sequence
  Synthetic oligonucleotide; CTG chr2 60541770 60541791 60541775 60541770 -
acttctgaagtgaattttcagc

SEQ ID NO: 212266 - DNA, 22 bp, Artificial Sequence
  Synthetic oligonucleotide; CTT chr2 60541766 60541787 60541771 60541766 -
ctgaagtgaattttcagcatgg

SEQ ID NO: 212267 - DNA, 22 bp, Artificial Sequence
  Synthetic oligonucleotide; TTC chr2 60541765 60541786 60541770 60541765 -
tgaagtgaattttcagcatggc

SEQ ID NO: 212268 - DNA, 22 bp, Artificial Sequence
  Synthetic oligonucleotide; CTG chr2 60541763 60541784 60541768 60541763 -
aagtgaattttcagcatggcag

SEQ ID NO: 212269 - DNA, 22 bp, Artificial Sequence
  Synthetic oligonucleotide; TTT chr2 60541753 60541774 60541758 60541753 -
tcagcatggcagttaaaacaaa

SEQ ID NO: 212270 - DNA, 22 bp, Artificial Sequence
  Synthetic oligonucleotide; TTT chr2 60541752 60541773 60541757 60541752 -
cagcatggcagttaaaacaaaa

SEQ ID NO: 212271 - DNA, 22 bp, Artificial Sequence
  Synthetic oligonucleotide; TTC chr2 60541751 60541772 60541756 60541751 -
agcatggcagttaaaacaaaaa

SEQ ID NO: 212272 - DNA, 22 bp, Artificial Sequence
  Synthetic oligonucleotide; TTA chr2 60541738 60541759 60541743 60541738 -
aaacaaaaaaacaccactacca

SEQ ID NO: 212273 - DNA, 22 bp, Artificial Sequence
  Synthetic oligonucleotide; CTA chr2 60541719 60541740 60541724 60541719 -
ccacaaaaaacaatatactggt

SEQ ID NO: 212274 - DNA, 22 bp, Artificial Sequence
  Synthetic oligonucleotide; CTG chr2 60541699 60541720 60541704 60541699 -
gtgaacattttacttaccttca

SEQ ID NO: 212275 - DNA, 22 bp, Artificial Sequence
  Synthetic oligonucleotide; TTT chr2 60541689 60541710 60541694 60541689 -
tacttaccttcaaaatccagag

SEQ ID NO: 212276 - DNA, 22 bp, Artificial Sequence
  Synthetic oligonucleotide; TTT chr2 60541688 60541709 60541693 60541688 -
acttaccttcaaaatccagaga

SEQ ID NO: 212277 - DNA, 22 bp, Artificial Sequence
  Synthetic oligonucleotide; TTA chr2 60541687 60541708 60541692 60541687 -
cttaccttcaaaatccagagag

SEQ ID NO: 212278 - DNA, 22 bp, Artificial Sequence
  Synthetic oligonucleotide; CTT chr2 60541684 60541705 60541689 60541684 -
accttcaaaatccagagagtag

SEQ ID NO: 212279 - DNA, 22 bp, Artificial Sequence
  Synthetic oligonucleotide; TTA chr2 60541683 60541704 60541688 60541683 -
ccttcaaaatccagagagtaga

SEQ ID NO: 212280 - DNA, 22 bp, Artificial Sequence
  Synthetic oligonucleotide; CTT chr2 60541679 60541700 60541684 60541679 -
caaaatccagagagtagagaat

SEQ ID NO: 212281 - DNA, 22 bp, Artificial Sequence
  Synthetic oligonucleotide; TTC chr2 60541678 60541699 60541683 60541678 -
aaaatccagagagtagagaata

SEQ ID NO: 212282 - DNA, 22 bp, Artificial Sequence
  Synthetic oligonucleotide; TTG chr2 60541653 60541674 60541658 60541653 -
ttttctaataagtacctaggat

SEQ ID NO: 212283 - DNA, 22 bp, Artificial Sequence
  Synthetic oligonucleotide; TTT chr2 60541650 60541671 60541655 60541650 -
tctaataagtacctaggatttt

SEQ ID NO: 212284 - DNA, 22 bp, Artificial Sequence
  Synthetic oligonucleotide; TTT chr2 60541649 60541670 60541654 60541649 -
ctaataagtacctaggattttc

SEQ ID NO: 212285 - DNA, 22 bp, Artificial Sequence
  Synthetic oligonucleotide; TTC chr2 60541648 60541669 60541653 60541648 -
taataagtacctaggattttca

SEQ ID NO: 212286 - DNA, 22 bp, Artificial Sequence
  Synthetic oligonucleotide; CTA chr2 60541646 60541667 60541651 60541646 -
ataagtacctaggattttcata

SEQ ID NO: 212287 - DNA, 22 bp, Artificial Sequence
  Synthetic oligonucleotide; CTA chr2 60541635 60541656 60541640 60541635 -
ggattttcatagggagcctatg

SEQ ID NO: 212288 - DNA, 22 bp, Artificial Sequence
  Synthetic oligonucleotide; TTT chr2 60541629 60541650 60541634 60541629 -
tcatagggagcctatgtttgtg

SEQ ID NO: 212289 - DNA, 22 bp, Artificial Sequence
  Synthetic oligonucleotide; TTT chr2 60541628 60541649 60541633 60541628 -
catagggagcctatgtttgtga

SEQ ID NO: 212290 - DNA, 22 bp, Artificial Sequence
  Synthetic oligonucleotide; TTC chr2 60541627 60541648 60541632 60541627 -
atagggagcctatgtttgtgag

SEQ ID NO: 212291 - DNA, 22 bp, Artificial Sequence
  Synthetic oligonucleotide; CTA chr2 60541615 60541636 60541620 60541615 -
tgtttgtgaggccactatccaa

SEQ ID NO: 212292 - DNA, 22 bp, Artificial Sequence
  Synthetic oligonucleotide; TTT chr2 60541610 60541631 60541615 60541610 -
gtgaggccactatccaaagact

SEQ ID NO: 212293 - DNA, 22 bp, Artificial Sequence
  Synthetic oligonucleotide; TTG chr2 60541609 60541630 60541614 60541609 -
tgaggccactatccaaagacta

SEQ ID NO: 212294 - DNA, 22 bp, Artificial Sequence
  Synthetic oligonucleotide; CTA chr2 60541598 60541619 60541603 60541598 -
tccaaagactaatgttcatgaa

SEQ ID NO: 212295 - DNA, 22 bp, Artificial Sequence
  Synthetic oligonucleotide; CTA chr2 60541587 60541608 60541592 60541587 -
atgttcatgaaactgggagtcc

SEQ ID NO: 212296 - DNA, 22 bp, Artificial Sequence
  Synthetic oligonucleotide; TTC chr2 60541581 60541602 60541586 60541581 -
atgaaactgggagtcctatata

SEQ ID NO: 212297 - DNA, 22 bp, Artificial Sequence
  Synthetic oligonucleotide; CTG chr2 60541572 60541593 60541577 60541572 -
ggagtcctatatacaagctgta

SEQ ID NO: 212298 - DNA, 22 bp, Artificial Sequence
  Synthetic oligonucleotide; CTA chr2 60541563 60541584 60541568 60541563 -
tatacaagctgtatttgtaaat

SEQ ID NO: 212299 - DNA, 22 bp, Artificial Sequence
  Synthetic oligonucleotide; CTG chr2 60541552 60541573 60541557 60541552 -
tatttgtaaataagacagagaa

SEQ ID NO: 212300 - DNA, 22 bp, Artificial Sequence
  Synthetic oligonucleotide; TTT chr2 60541547 60541568 60541552 60541547 -
gtaaataagacagagaaaggtt

SEQ ID NO: 212301 - DNA, 22 bp, Artificial Sequence
  Synthetic oligonucleotide; TTG chr2 60541546 60541567 60541551 60541546 -
taaataagacagagaaaggttg

SEQ ID NO: 212302 - DNA, 22 bp, Artificial Sequence
  Synthetic oligonucleotide; TTG chr2 60541524 60541545 60541529 60541524 -
tgaactggcagcttggatgttt

SEQ ID NO: 212303 - DNA, 22 bp, Artificial Sequence
  Synthetic oligonucleotide; CTG chr2 60541517 60541538 60541522 60541517 -
gcagcttggatgttttgtcaaa

SEQ ID NO: 212304 - DNA, 22 bp, Artificial Sequence
  Synthetic oligonucleotide; CTT chr2 60541510 60541531 60541515 60541510 -
ggatgttttgtcaaagtacaat

SEQ ID NO: 212305 - DNA, 22 bp, Artificial Sequence
  Synthetic oligonucleotide; TTG chr2 60541509 60541530 60541514 60541509 -
gatgttttgtcaaagtacaatg

SEQ ID NO: 212306 - DNA, 22 bp, Artificial Sequence
  Synthetic oligonucleotide; TTT chr2 60541502 60541523 60541507 60541502 -
tgtcaaagtacaatgtcagaga

SEQ ID NO: 212307 - DNA, 22 bp, Artificial Sequence
  Synthetic oligonucleotide; TTT chr2 60541501 60541522 60541506 60541501 -
gtcaaagtacaatgtcagagaa

SEQ ID NO: 212308 - DNA, 22 bp, Artificial Sequence
  Synthetic oligonucleotide; TTG chr2 60541500 60541521 60541505 60541500 -
tcaaagtacaatgtcagagaaa

SEQ ID NO: 212309 - DNA, 22 bp, Artificial Sequence
  Synthetic oligonucleotide; CTC chr2 60541475 60541496 60541480 60541475 -
tttctaagacaaattgtaaata

SEQ ID NO: 212310 - DNA, 22 bp, Artificial Sequence
  Synthetic oligonucleotide; CTT chr2 60541473 60541494 60541478 60541473 -
tctaagacaaattgtaaataga

SEQ ID NO: 212311 - DNA, 22 bp, Artificial Sequence
  Synthetic oligonucleotide; TTT chr2 60541472 60541493 60541477 60541472 -
ctaagacaaattgtaaatagaa

SEQ ID NO: 212312 - DNA, 22 bp, Artificial Sequence
  Synthetic oligonucleotide; TTC chr2 60541471 60541492 60541476 60541471 -
taagacaaattgtaaatagaac

SEQ ID NO: 212313 - DNA, 22 bp, Artificial Sequence
  Synthetic oligonucleotide; CTA chr2 60541469 60541490 60541474 60541469 -
agacaaattgtaaatagaactg

SEQ ID NO: 212314 - DNA, 22 bp, Artificial Sequence
  Synthetic oligonucleotide; TTG chr2 60541459 60541480 60541464 60541459 -
taaatagaactgtcacagtgat

SEQ ID NO: 212315 - DNA, 22 bp, Artificial Sequence
  Synthetic oligonucleotide; CTG chr2 60541447 60541468 60541452 60541447 -
tcacagtgattgcatgattgag

SEQ ID NO: 212316 - DNA, 22 bp, Artificial Sequence
  Synthetic oligonucleotide; TTG chr2 60541435 60541456 60541440 60541435 -
catgattgagccgcagaagtgt

SEQ ID NO: 212317 - DNA, 22 bp, Artificial Sequence
  Synthetic oligonucleotide; TTG chr2 60541427 60541448 60541432 60541427 -
agccgcagaagtgtcctacaat

SEQ ID NO: 212318 - DNA, 22 bp, Artificial Sequence
  Synthetic oligonucleotide; CTA chr2 60541409 60541430 60541414 60541409 -
caattgttggcattgtcaggac

SEQ ID NO: 212319 - DNA, 22 bp, Artificial Sequence
  Synthetic oligonucleotide; TTG chr2 60541403 60541424 60541408 60541403 -
ttggcattgtcaggacttttga

SEQ ID NO: 212320 - DNA, 22 bp, Artificial Sequence
  Synthetic oligonucleotide; TTG chr2 60541400 60541421 60541405 60541400 -
gcattgtcaggacttttgaaag

SEQ ID NO: 212321 - DNA, 22 bp, Artificial Sequence
  Synthetic oligonucleotide; TTG chr2 60541394 60541415 60541399 60541394 -
tcaggacttttgaaagcttaat

SEQ ID NO: 212322 - DNA, 22 bp, Artificial Sequence
  Synthetic oligonucleotide; CTT chr2 60541385 60541406 60541390 60541385 -
ttgaaagcttaattaaacacag

SEQ ID NO: 212323 - DNA, 22 bp, Artificial Sequence
  Synthetic oligonucleotide; TTT chr2 60541384 60541405 60541389 60541384 -
tgaaagcttaattaaacacagt

SEQ ID NO: 212324 - DNA, 22 bp, Artificial Sequence
  Synthetic oligonucleotide; TTT chr2 60541383 60541404 60541388 60541383 -
gaaagcttaattaaacacagtg

SEQ ID NO: 212325 - DNA, 22 bp, Artificial Sequence
  Synthetic oligonucleotide; TTG chr2 60541382 60541403 60541387 60541382 -
aaagcttaattaaacacagtgg

SEQ ID NO: 212326 - DNA, 22 bp, Artificial Sequence
  Synthetic oligonucleotide; CTT chr2 60541375 60541396 60541380 60541375 -
aattaaacacagtggcccgcat

SEQ ID NO: 212327 - DNA, 22 bp, Artificial Sequence
  Synthetic oligonucleotide; TTA chr2 60541374 60541395 60541379 60541374 -
attaaacacagtggcccgcatg

SEQ ID NO: 212328 - DNA, 22 bp, Artificial Sequence
  Synthetic oligonucleotide; TTA chr2 60541370 60541391 60541375 60541370 -
aacacagtggcccgcatggctg

SEQ ID NO: 212329 - DNA, 22 bp, Artificial Sequence
  Synthetic oligonucleotide; CTG chr2 60541348 60541369 60541353 60541348 -
ctaaacttactaaggaaagcca

SEQ ID NO: 212330 - DNA, 22 bp, Artificial Sequence
  Synthetic oligonucleotide; CTA chr2 60541345 60541366 60541350 60541345 -
aacttactaaggaaagccaaaa

SEQ ID NO: 212331 - DNA, 22 bp, Artificial Sequence
  Synthetic oligonucleotide; CTT chr2 60541340 60541361 60541345 60541340 -
actaaggaaagccaaaaggaaa

SEQ ID NO: 212332 - DNA, 22 bp, Artificial Sequence
  Synthetic oligonucleotide; TTA chr2 60541339 60541360 60541344 60541339 -
ctaaggaaagccaaaaggaaaa

SEQ ID NO: 212333 - DNA, 22 bp, Artificial Sequence
  Synthetic oligonucleotide; CTA chr2 60541336 60541357 60541341 60541336 -
aggaaagccaaaaggaaaaaaa

SEQ ID NO: 212334 - DNA, 22 bp, Artificial Sequence
  Synthetic oligonucleotide; CTA chr2 60541303 60541324 60541308 60541303 -
aaatgtagaagatcctaaagat

SEQ ID NO: 212335 - DNA, 22 bp, Artificial Sequence
  Synthetic oligonucleotide; CTA chr2 60541286 60541307 60541291 60541286 -
aagatcccaaacttcttcagac

SEQ ID NO: 212336 - DNA, 22 bp, Artificial Sequence
  Synthetic oligonucleotide; CTT chr2 60541272 60541293 60541277 60541272 -
cttcagacattacccttgtggt

SEQ ID NO: 212337 - DNA, 22 bp, Artificial Sequence
  Synthetic oligonucleotide; TTC chr2 60541271 60541292 60541276 60541271 -
ttcagacattacccttgtggtg

SEQ ID NO: 212338 - DNA, 22 bp, Artificial Sequence
  Synthetic oligonucleotide; CTT chr2 60541269 60541290 60541274 60541269 -
cagacattacccttgtggtgac

SEQ ID NO: 212339 - DNA, 22 bp, Artificial Sequence
  Synthetic oligonucleotide; TTC chr2 60541268 60541289 60541273 60541268 -
agacattacccttgtggtgaca

SEQ ID NO: 212340 - DNA, 22 bp, Artificial Sequence
  Synthetic oligonucleotide; TTA chr2 60541260 60541281 60541265 60541260 -
cccttgtggtgacacagaaaag

SEQ ID NO: 212341 - DNA, 22 bp, Artificial Sequence
  Synthetic oligonucleotide; CTT chr2 60541255 60541276 60541260 60541255 -
gtggtgacacagaaaagatgca

SEQ ID NO: 212342 - DNA, 22 bp, Artificial Sequence
  Synthetic oligonucleotide; TTG chr2 60541254 60541275 60541259 60541254 -
tggtgacacagaaaagatgcat

SEQ ID NO: 212343 - DNA, 22 bp, Artificial Sequence
  Synthetic oligonucleotide; TTG chr2 60541230 60541251 60541235 60541230 -
tgcattttcctagtcatctttt

SEQ ID NO: 212344 - DNA, 22 bp, Artificial Sequence
  Synthetic oligonucleotide; TTT chr2 60541223 60541244 60541228 60541223 -
tcctagtcatcttttataaata

SEQ ID NO: 212345 - DNA, 22 bp, Artificial Sequence
  Synthetic oligonucleotide; TTT chr2 60541222 60541243 60541227 60541222 -
cctagtcatcttttataaataa

SEQ ID NO: 212346 - DNA, 22 bp, Artificial Sequence
  Synthetic oligonucleotide; TTC chr2 60541221 60541242 60541226 60541221 -
ctagtcatcttttataaataat

SEQ ID NO: 212347 - DNA, 22 bp, Artificial Sequence
  Synthetic oligonucleotide; CTA chr2 60541218 60541239 60541223 60541218 -
gtcatcttttataaataatgtt

SEQ ID NO: 212348 - DNA, 22 bp, Artificial Sequence
  Synthetic oligonucleotide; CTT chr2 60541210 60541231 60541215 60541210 -
ttataaataatgttttgagaat

SEQ ID NO: 212349 - DNA, 22 bp, Artificial Sequence
  Synthetic oligonucleotide; TTT chr2 60541209 60541230 60541214 60541209 -
tataaataatgttttgagaata

SEQ ID NO: 212350 - DNA, 22 bp, Artificial Sequence
  Synthetic oligonucleotide; TTT chr2 60541208 60541229 60541213 60541208 -
ataaataatgttttgagaatag

SEQ ID NO: 212351 - DNA, 22 bp, Artificial Sequence
  Synthetic oligonucleotide; TTA chr2 60541207 60541228 60541212 60541207 -
taaataatgttttgagaatagg

SEQ ID NO: 212352 - DNA, 22 bp, Artificial Sequence
  Synthetic oligonucleotide; TTT chr2 60541195 60541216 60541200 60541195 -
tgagaataggtccacgtgatat

SEQ ID NO: 212353 - DNA, 22 bp, Artificial Sequence
  Synthetic oligonucleotide; TTT chr2 60541194 60541215 60541199 60541194 -
gagaataggtccacgtgatatg

SEQ ID NO: 212354 - DNA, 22 bp, Artificial Sequence
  Synthetic oligonucleotide; TTG chr2 60541193 60541214 60541198 60541193 -
agaataggtccacgtgatatga

SEQ ID NO: 212355 - DNA, 22 bp, Artificial Sequence
  Synthetic oligonucleotide; CTG chr2 60541160 60541181 60541165 60541160 -
tgtgtgatgtggagattgtgtt

SEQ ID NO: 212356 - DNA, 22 bp, Artificial Sequence
  Synthetic oligonucleotide; TTG chr2 60541142 60541163 60541147 60541142 -
tgttagtttttctgtctcctgc

SEQ ID NO: 212357 - DNA, 22 bp, Artificial Sequence
  Synthetic oligonucleotide; TTA chr2 60541137 60541158 60541142 60541137 -
gtttttctgtctcctgctgtta

SEQ ID NO: 212358 - DNA, 22 bp, Artificial Sequence
  Synthetic oligonucleotide; TTT chr2 60541133 60541154 60541138 60541133 -
ttctgtctcctgctgttacaga

SEQ ID NO: 212359 - DNA, 22 bp, Artificial Sequence
  Synthetic oligonucleotide; TTT chr2 60541132 60541153 60541137 60541132 -
tctgtctcctgctgttacagac

SEQ ID NO: 212360 - DNA, 22 bp, Artificial Sequence
  Synthetic oligonucleotide; TTT chr2 60541131 60541152 60541136 60541131 -
ctgtctcctgctgttacagaca

SEQ ID NO: 212361 - DNA, 22 bp, Artificial Sequence
  Synthetic oligonucleotide; TTC chr2 60541130 60541151 60541135 60541130 -
tgtctcctgctgttacagacag

SEQ ID NO: 212362 - DNA, 22 bp, Artificial Sequence
  Synthetic oligonucleotide; CTG chr2 60541128 60541149 60541133 60541128 -
tctcctgctgttacagacagtt

SEQ ID NO: 212363 - DNA, 22 bp, Artificial Sequence
  Synthetic oligonucleotide; CTC chr2 60541124 60541145 60541129 60541124 -
ctgctgttacagacagttaatg

SEQ ID NO: 212364 - DNA, 22 bp, Artificial Sequence
  Synthetic oligonucleotide; CTG chr2 60541121 60541142 60541126 60541121 -
ctgttacagacagttaatgtaa

SEQ ID NO: 212365 - DNA, 22 bp, Artificial Sequence
  Synthetic oligonucleotide; CTG chr2 60541118 60541139 60541123 60541118 -
ttacagacagttaatgtaaaaa

SEQ ID NO: 212366 - DNA, 22 bp, Artificial Sequence
  Synthetic oligonucleotide; TTA chr2 60541115 60541136 60541120 60541115 -
cagacagttaatgtaaaaatgg

SEQ ID NO: 212367 - DNA, 22 bp, Artificial Sequence
  Synthetic oligonucleotide; TTA chr2 60541105 60541126 60541110 60541105 -
atgtaaaaatggccttttattg

SEQ ID NO: 212368 - DNA, 22 bp, Artificial Sequence
  Synthetic oligonucleotide; CTT chr2 60541089 60541110 60541094 60541089 -
ttattggaaacacaaatatgta

SEQ ID NO: 212369 - DNA, 22 bp, Artificial Sequence
  Synthetic oligonucleotide; TTT chr2 60541088 60541109 60541093 60541088 -
tattggaaacacaaatatgtat

SEQ ID NO: 212370 - DNA, 22 bp, Artificial Sequence
  Synthetic oligonucleotide; TTT chr2 60541087 60541108 60541092 60541087 -
attggaaacacaaatatgtatt

SEQ ID NO: 212371 - DNA, 22 bp, Artificial Sequence
  Synthetic oligonucleotide; TTA chr2 60541086 60541107 60541091 60541086 -
ttggaaacacaaatatgtattc

SEQ ID NO: 212372 - DNA, 22 bp, Artificial Sequence
  Synthetic oligonucleotide; TTG chr2 60541083 60541104 60541088 60541083 -
gaaacacaaatatgtattcact

SEQ ID NO: 212373 - DNA, 22 bp, Artificial Sequence
  Synthetic oligonucleotide; TTC chr2 60541064 60541085 60541069 60541064 -
acttcaagaacaggagcagagg

SEQ ID NO: 212374 - DNA, 22 bp, Artificial Sequence
  Synthetic oligonucleotide; CTT chr2 60541060 60541081 60541065 60541060 -
caagaacaggagcagaggggga

SEQ ID NO: 212375 - DNA, 22 bp, Artificial Sequence
  Synthetic oligonucleotide; TTC chr2 60541059 60541080 60541064 60541059 -
aagaacaggagcagagggggac

SEQ ID NO: 212376 - DNA, 22 bp, Artificial Sequence
  Synthetic oligonucleotide; TTT chr2 60541030 60541051 60541035 60541030 -
ccctcccgttctctgtgtttat

SEQ ID NO: 212377 - DNA, 22 bp, Artificial Sequence
  Synthetic oligonucleotide; TTC chr2 60541029 60541050 60541034 60541029 -
cctcccgttctctgtgtttatt

SEQ ID NO: 212378 - DNA, 22 bp, Artificial Sequence
  Synthetic oligonucleotide; CTC chr2 60541025 60541046 60541030 60541025 -
ccgttctctgtgtttattctgt

SEQ ID NO: 212379 - DNA, 22 bp, Artificial Sequence
  Synthetic oligonucleotide; TTC chr2 60541019 60541040 60541024 60541019 -
tctgtgtttattctgtgaaagc

SEQ ID NO: 212380 - DNA, 22 bp, Artificial Sequence
  Synthetic oligonucleotide; CTC chr2 60541017 60541038 60541022 60541017 -
tgtgtttattctgtgaaagctt

SEQ ID NO: 212381 - DNA, 22 bp, Artificial Sequence
  Synthetic oligonucleotide; CTG chr2 60541015 60541036 60541020 60541015 -
tgtttattctgtgaaagcttaa

SEQ ID NO: 212382 - DNA, 22 bp, Artificial Sequence
  Synthetic oligonucleotide; TTT chr2 60541010 60541031 60541015 60541010 -
attctgtgaaagcttaaaaaaa

SEQ ID NO: 212383 - DNA, 22 bp, Artificial Sequence
  Synthetic oligonucleotide; TTA chr2 60541009 60541030 60541014 60541009 -
ttctgtgaaagcttaaaaaaac

SEQ ID NO: 212384 - DNA, 22 bp, Artificial Sequence
  Synthetic oligonucleotide; TTC chr2 60541006 60541027 60541011 60541006 -
tgtgaaagcttaaaaaaacaaa

SEQ ID NO: 212385 - DNA, 22 bp, Artificial Sequence
  Synthetic oligonucleotide; CTG chr2 60541004 60541025 60541009 60541004 -
tgaaagcttaaaaaaacaaaaa

SEQ ID NO: 212386 - DNA, 22 bp, Artificial Sequence
  Synthetic oligonucleotide; CTT chr2 60540995 60541016 60541000 60540995 -
aaaaaaacaaaaaaacaaaata

SEQ ID NO: 212387 - DNA, 22 bp, Artificial Sequence
  Synthetic oligonucleotide; TTA chr2 60540994 60541015 60540999 60540994 -
aaaaaacaaaaaaacaaaataa

SEQ ID NO: 212388 - DNA, 22 bp, Artificial Sequence
  Synthetic oligonucleotide; CTG chr2 60540913 60540934 60540918 60540913 -
taatttcttaaatcaccccatt

SEQ ID NO: 212389 - DNA, 22 bp, Artificial Sequence
  Synthetic oligonucleotide; TTT chr2 60540907 60540928 60540912 60540907 -
cttaaatcaccccattccttgt

SEQ ID NO: 212390 - DNA, 22 bp, Artificial Sequence
  Synthetic oligonucleotide; TTC chr2 60540906 60540927 60540911 60540906 -
ttaaatcaccccattccttgtt

SEQ ID NO: 212391 - DNA, 22 bp, Artificial Sequence
  Synthetic oligonucleotide; CTT chr2 60540904 60540925 60540909 60540904 -
aaatcaccccattccttgttgt

SEQ ID NO: 212392 - DNA, 22 bp, Artificial Sequence
  Synthetic oligonucleotide; TTA chr2 60540903 60540924 60540908 60540903 -
aatcaccccattccttgttgtg

SEQ ID NO: 212393 - DNA, 22 bp, Artificial Sequence
  Synthetic oligonucleotide; TTC chr2 60540890 60540911 60540895 60540890 -
cttgttgtgttgcaagttgtgc

SEQ ID NO: 212394 - DNA, 22 bp, Artificial Sequence
  Synthetic oligonucleotide; CTT chr2 60540887 60540908 60540892 60540887 -
gttgtgttgcaagttgtgcctt

SEQ ID NO: 212395 - DNA, 22 bp, Artificial Sequence
  Synthetic oligonucleotide; TTG chr2 60540886 60540907 60540891 60540886 -
ttgtgttgcaagttgtgccttt

SEQ ID NO: 212396 - DNA, 22 bp, Artificial Sequence
  Synthetic oligonucleotide; TTG chr2 60540883 60540904 60540888 60540883 -
tgttgcaagttgtgcctttact

SEQ ID NO: 212397 - DNA, 22 bp, Artificial Sequence
  Synthetic oligonucleotide; TTG chr2 60540878 60540899 60540883 60540878 -
caagttgtgcctttactataaa

SEQ ID NO: 212398 - DNA, 22 bp, Artificial Sequence
  Synthetic oligonucleotide; TTG chr2 60540871 60540892 60540876 60540871 -
tgcctttactataaaggatctg

SEQ ID NO: 212399 - DNA, 22 bp, Artificial Sequence
  Synthetic oligonucleotide; CTT chr2 60540865 60540886 60540870 60540865 -
tactataaaggatctgaaatat

SEQ ID NO: 212400 - DNA, 22 bp, Artificial Sequence
  Synthetic oligonucleotide; TTT chr2 60540864 60540885 60540869 60540864 -
actataaaggatctgaaatatg

SEQ ID NO: 212401 - DNA, 22 bp, Artificial Sequence
  Synthetic oligonucleotide; TTA chr2 60540863 60540884 60540868 60540863 -
ctataaaggatctgaaatatgt

SEQ ID NO: 212402 - DNA, 22 bp, Artificial Sequence
  Synthetic oligonucleotide; CTA chr2 60540860 60540881 60540865 60540860 -
taaaggatctgaaatatgtttt

SEQ ID NO: 212403 - DNA, 22 bp, Artificial Sequence
  Synthetic oligonucleotide; CTG chr2 60540849 60540870 60540854 60540849 -
aaatatgttttgcacacctttc

SEQ ID NO: 212404 - DNA, 22 bp, Artificial Sequence
  Synthetic oligonucleotide; TTT chr2 60540839 60540860 60540844 60540839 -
tgcacacctttctcttagtgaa

SEQ ID NO: 212405 - DNA, 22 bp, Artificial Sequence
  Synthetic oligonucleotide; TTT chr2 60540838 60540859 60540843 60540838 -
gcacacctttctcttagtgaat

SEQ ID NO: 212406 - DNA, 22 bp, Artificial Sequence
  Synthetic oligonucleotide; TTG chr2 60540837 60540858 60540842 60540837 -
cacacctttctcttagtgaatg

SEQ ID NO: 212407 - DNA, 22 bp, Artificial Sequence
  Synthetic oligonucleotide; CTT chr2 60540829 60540850 60540834 60540829 -
tctcttagtgaatgtggcatat

SEQ ID NO: 212408 - DNA, 22 bp, Artificial Sequence
  Synthetic oligonucleotide; TTT chr2 60540828 60540849 60540833 60540828 -
ctcttagtgaatgtggcatata

SEQ ID NO: 212409 - DNA, 22 bp, Artificial Sequence
  Synthetic oligonucleotide; TTC chr2 60540827 60540848 60540832 60540827 -
tcttagtgaatgtggcatataa

SEQ ID NO: 212410 - DNA, 22 bp, Artificial Sequence
  Synthetic oligonucleotide; CTC chr2 60540825 60540846 60540830 60540825 -
ttagtgaatgtggcatataatt

SEQ ID NO: 212411 - DNA, 22 bp, Artificial Sequence
  Synthetic oligonucleotide; CTT chr2 60540823 60540844 60540828 60540823 -
agtgaatgtggcatataattgt

SEQ ID NO: 212412 - DNA, 22 bp, Artificial Sequence
  Synthetic oligonucleotide; TTA chr2 60540822 60540843 60540827 60540822 -
gtgaatgtggcatataattgtg

SEQ ID NO: 212413 - DNA, 22 bp, Artificial Sequence
  Synthetic oligonucleotide; TTG chr2 60540802 60540823 60540807 60540802 -
tggagctgcacatgggctggaa

SEQ ID NO: 212414 - DNA, 22 bp, Artificial Sequence
  Synthetic oligonucleotide; CTG chr2 60540794 60540815 60540799 60540794 -
cacatgggctggaaaatgcaac

SEQ ID NO: 212415 - DNA, 22 bp, Artificial Sequence
  Synthetic oligonucleotide; CTG chr2 60540783 60540804 60540788 60540783 -
gaaaatgcaactgggtgtagaa

SEQ ID NO: 212416 - DNA, 22 bp, Artificial Sequence
  Synthetic oligonucleotide; CTG chr2 60540770 60540791 60540775 60540770 -
ggtgtagaaacgtgcaggcagg

SEQ ID NO: 212417 - DNA, 22 bp, Artificial Sequence
  Synthetic oligonucleotide; CTT chr2 60540730 60540751 60540735 60540730 -
cagctcagggaggaggcgagtt

SEQ ID NO: 212418 - DNA, 22 bp, Artificial Sequence
  Synthetic oligonucleotide; TTC chr2 60540729 60540750 60540734 60540729 -
agctcagggaggaggcgagttg

SEQ ID NO: 212419 - DNA, 22 bp, Artificial Sequence
  Synthetic oligonucleotide; CTC chr2 60540724 60540745 60540729 60540724 -
agggaggaggcgagttggatgc

SEQ ID NO: 212420 - DNA, 22 bp, Artificial Sequence
  Synthetic oligonucleotide; TTG chr2 60540707 60540728 60540712 60540707 -
gatgcttattaatggcatcttt

SEQ ID NO: 212421 - DNA, 22 bp, Artificial Sequence
  Synthetic oligonucleotide; CTT chr2 60540700 60540721 60540705 60540700 -
attaatggcatcttttagagtc

SEQ ID NO: 212422 - DNA, 22 bp, Artificial Sequence
  Synthetic oligonucleotide; TTA chr2 60540699 60540720 60540704 60540699 -
ttaatggcatcttttagagtcc

SEQ ID NO: 212423 - DNA, 22 bp, Artificial Sequence
  Synthetic oligonucleotide; TTA chr2 60540696 60540717 60540701 60540696 -
atggcatcttttagagtcctgg

SEQ ID NO: 212424 - DNA, 22 bp, Artificial Sequence
  Synthetic oligonucleotide; CTT chr2 60540686 60540707 60540691 60540686 -
ttagagtcctggaaaatcatta

SEQ ID NO: 212425 - DNA, 22 bp, Artificial Sequence
  Synthetic oligonucleotide; TTT chr2 60540685 60540706 60540690 60540685 -
tagagtcctggaaaatcattaa

SEQ ID NO: 212426 - DNA, 22 bp, Artificial Sequence
  Synthetic oligonucleotide; TTT chr2 60540684 60540705 60540689 60540684 -
agagtcctggaaaatcattaat

SEQ ID NO: 212427 - DNA, 22 bp, Artificial Sequence
  Synthetic oligonucleotide; TTA chr2 60540683 60540704 60540688 60540683 -
gagtcctggaaaatcattaatt

SEQ ID NO: 212428 - DNA, 22 bp, Artificial Sequence
  Synthetic oligonucleotide; CTG chr2 60540675 60540696 60540680 60540675 -
gaaaatcattaatttcacactg

SEQ ID NO: 212429 - DNA, 22 bp, Artificial Sequence
  Synthetic oligonucleotide; TTA chr2 60540664 60540685 60540669 60540664 -
atttcacactgcagcttccatg

SEQ ID NO: 212430 - DNA, 22 bp, Artificial Sequence
  Synthetic oligonucleotide; TTT chr2 60540660 60540681 60540665 60540660 -
cacactgcagcttccatgtagt

SEQ ID NO: 212431 - DNA, 22 bp, Artificial Sequence
  Synthetic oligonucleotide; TTC chr2 60540659 60540680 60540664 60540659 -
acactgcagcttccatgtagtt

SEQ ID NO: 212432 - DNA, 22 bp, Artificial Sequence
  Synthetic oligonucleotide; CTG chr2 60540653 60540674 60540658 60540653 -
cagcttccatgtagtttggcta

SEQ ID NO: 212433 - DNA, 22 bp, Artificial Sequence
  Synthetic oligonucleotide; CTT chr2 60540647 60540668 60540652 60540647 -
ccatgtagtttggctaatgtgg

SEQ ID NO: 212434 - DNA, 22 bp, Artificial Sequence
  Synthetic oligonucleotide; TTC chr2 60540646 60540667 60540651 60540646 -
catgtagtttggctaatgtggg

SEQ ID NO: 212435 - DNA, 22 bp, Artificial Sequence
  Synthetic oligonucleotide; TTT chr2 60540636 60540657 60540641 60540636 -
ggctaatgtgggagtactaaat

SEQ ID NO: 212436 - DNA, 22 bp, Artificial Sequence
  Synthetic oligonucleotide; TTG chr2 60540635 60540656 60540640 60540635 -
gctaatgtgggagtactaaatt

SEQ ID NO: 212437 - DNA, 22 bp, Artificial Sequence
  Synthetic oligonucleotide; CTA chr2 60540631 60540652 60540636 60540631 -
atgtgggagtactaaattgggg

SEQ ID NO: 212438 - DNA, 22 bp, Artificial Sequence
  Synthetic oligonucleotide; CTA chr2 60540617 60540638 60540622 60540617 -
aattggggtacataaaaaacat

SEQ ID NO: 212439 - DNA, 22 bp, Artificial Sequence
  Synthetic oligonucleotide; TTG chr2 60540612 60540633 60540617 60540612 -
gggtacataaaaaacatgcaaa

SEQ ID NO: 212440 - DNA, 22 bp, Artificial Sequence
  Synthetic oligonucleotide; CTA chr2 60540585 60540606 60540590 60540585 -
gggaaacattttttagattttt

SEQ ID NO: 212441 - DNA, 22 bp, Artificial Sequence
  Synthetic oligonucleotide; TTT chr2 60540574 60540595 60540579 60540574 -
tttagatttttgtgatttctca

SEQ ID NO: 212442 - DNA, 22 bp, Artificial Sequence
  Synthetic oligonucleotide; TTT chr2 60540573 60540594 60540578 60540573 -
ttagatttttgtgatttctcaa

SEQ ID NO: 212443 - DNA, 22 bp, Artificial Sequence
  Synthetic oligonucleotide; TTT chr2 60540572 60540593 60540577 60540572 -
tagatttttgtgatttctcaat

SEQ ID NO: 212444 - DNA, 22 bp, Artificial Sequence
  Synthetic oligonucleotide; TTT chr2 60540571 60540592 60540576 60540571 -
agatttttgtgatttctcaatg

SEQ ID NO: 212445 - DNA, 22 bp, Artificial Sequence
  Synthetic oligonucleotide; TTA chr2 60540570 60540591 60540575 60540570 -
gatttttgtgatttctcaatga

SEQ ID NO: 212446 - DNA, 22 bp, Artificial Sequence
  Synthetic oligonucleotide; TTT chr2 60540565 60540586 60540570 60540565 -
ttgtgatttctcaatgaaaatg

SEQ ID NO: 212447 - DNA, 22 bp, Artificial Sequence
  Synthetic oligonucleotide; TTT chr2 60540564 60540585 60540569 60540564 -
tgtgatttctcaatgaaaatgt

SEQ ID NO: 212448 - DNA, 22 bp, Artificial Sequence
  Synthetic oligonucleotide; TTT chr2 60540563 60540584 60540568 60540563 -
gtgatttctcaatgaaaatgtt

SEQ ID NO: 212449 - DNA, 22 bp, Artificial Sequence
  Synthetic oligonucleotide; TTG chr2 60540562 60540583 60540567 60540562 -
tgatttctcaatgaaaatgttt

SEQ ID NO: 212450 - DNA, 22 bp, Artificial Sequence
  Synthetic oligonucleotide; TTT chr2 60540556 60540577 60540561 60540556 -
ctcaatgaaaatgtttaataaa

SEQ ID NO: 212451 - DNA, 22 bp, Artificial Sequence
  Synthetic oligonucleotide; TTC chr2 60540555 60540576 60540560 60540555 -
tcaatgaaaatgtttaataaag

SEQ ID NO: 212452 - DNA, 22 bp, Artificial Sequence
  Synthetic oligonucleotide; CTC chr2 60540553 60540574 60540558 60540553 -
aatgaaaatgtttaataaagga

SEQ ID NO: 212453 - DNA, 22 bp, Artificial Sequence
  Synthetic oligonucleotide; TTT chr2 60540540 60540561 60540545 60540540 -
aataaaggagaataggtgaatg

SEQ ID NO: 212454 - DNA, 22 bp, Artificial Sequence
  Synthetic oligonucleotide; TTA chr2 60540539 60540560 60540544 60540539 -
ataaaggagaataggtgaatgg

SEQ ID NO: 212455 - DNA, 22 bp, Artificial Sequence
  Synthetic oligonucleotide; CTT chr2 60540511 60540532 60540516 60540511 -
tgcgtgctggtcagtaagaaag

SEQ ID NO: 212456 - DNA, 22 bp, Artificial Sequence
  Synthetic oligonucleotide; TTT chr2 60540510 60540531 60540515 60540510 -
gcgtgctggtcagtaagaaagg

SEQ ID NO: 212457 - DNA, 22 bp, Artificial Sequence
  Synthetic oligonucleotide; TTG chr2 60540509 60540530 60540514 60540509 -
cgtgctggtcagtaagaaagga

SEQ ID NO: 212458 - DNA, 22 bp, Artificial Sequence
  Synthetic oligonucleotide; CTG chr2 60540502 60540523 60540507 60540502 -
gtcagtaagaaaggaaacaaat

SEQ ID NO: 212459 - DNA, 22 bp, Artificial Sequence
  Synthetic oligonucleotide; TTT chr2 60540478 60540499 60540483 60540478 -
tggctttcctttggggggaaat

SEQ ID NO: 212460 - DNA, 22 bp, Artificial Sequence
  Synthetic oligonucleotide; TTT chr2 60540477 60540498 60540482 60540477 -
ggctttcctttggggggaaata

SEQ ID NO: 212461 - DNA, 22 bp, Artificial Sequence
  Synthetic oligonucleotide; TTG chr2 60540476 60540497 60540481 60540476 -
gctttcctttggggggaaatat

SEQ ID NO: 212462 - DNA, 22 bp, Artificial Sequence
  Synthetic oligonucleotide; CTT chr2 60540472 60540493 60540477 60540472 -
tcctttggggggaaatattaaa

SEQ ID NO: 212463 - DNA, 22 bp, Artificial Sequence
  Synthetic oligonucleotide; TTT chr2 60540471 60540492 60540476 60540471 -
cctttggggggaaatattaaat

SEQ ID NO: 212464 - DNA, 22 bp, Artificial Sequence
  Synthetic oligonucleotide; TTC chr2 60540470 60540491 60540475 60540470 -
ctttggggggaaatattaaatt

SEQ ID NO: 212465 - DNA, 22 bp, Artificial Sequence
  Synthetic oligonucleotide; CTT chr2 60540467 60540488 60540472 60540467 -
tggggggaaatattaaatttaa

SEQ ID NO: 212466 - DNA, 22 bp, Artificial Sequence
  Synthetic oligonucleotide; TTT chr2 60540466 60540487 60540471 60540466 -
ggggggaaatattaaatttaac

SEQ ID NO: 212467 - DNA, 22 bp, Artificial Sequence
  Synthetic oligonucleotide; TTG chr2 60540465 60540486 60540470 60540465 -
gggggaaatattaaatttaacc

SEQ ID NO: 212468 - DNA, 22 bp, Artificial Sequence
  Synthetic oligonucleotide; TTA chr2 60540452 60540473 60540457 60540452 -
aatttaaccgaagtagaaagca

SEQ ID NO: 212469 - DNA, 22 bp, Artificial Sequence
  Synthetic oligonucleotide; TTT chr2 60540447 60540468 60540452 60540447 -
aaccgaagtagaaagcacagct

SEQ ID NO: 212470 - DNA, 22 bp, Artificial Sequence
  Synthetic oligonucleotide; TTA chr2 60540446 60540467 60540451 60540446 -
accgaagtagaaagcacagcta

SEQ ID NO: 212471 - DNA, 22 bp, Artificial Sequence
  Synthetic oligonucleotide; CTA chr2 60540424 60540445 60540429 60540424 -
gggagatgcaccaagattgcgt

SEQ ID NO: 212472 - DNA, 22 bp, Artificial Sequence
  Synthetic oligonucleotide; TTG chr2 60540405 60540426 60540410 60540405 -
cgtcactggatgttaatttaat

SEQ ID NO: 212473 - DNA, 22 bp, Artificial Sequence
  Synthetic oligonucleotide; CTG chr2 60540397 60540418 60540402 60540397 -
gatgttaatttaatctactttg

SEQ ID NO: 212474 - DNA, 22 bp, Artificial Sequence
  Synthetic oligonucleotide; TTA chr2 60540390 60540411 60540395 60540390 -
atttaatctactttggttggtc

SEQ ID NO: 212475 - DNA, 22 bp, Artificial Sequence
  Synthetic oligonucleotide; TTT chr2 60540386 60540407 60540391 60540386 -
aatctactttggttggtctgtt

SEQ ID NO: 212476 - DNA, 22 bp, Artificial Sequence
  Synthetic oligonucleotide; TTA chr2 60540385 60540406 60540390 60540385 -
atctactttggttggtctgttc

SEQ ID NO: 212477 - DNA, 22 bp, Artificial Sequence
  Synthetic oligonucleotide; CTA chr2 60540380 60540401 60540385 60540380 -
ctttggttggtctgttcacacc

SEQ ID NO: 212478 - DNA, 22 bp, Artificial Sequence
  Synthetic oligonucleotide; CTT chr2 60540377 60540398 60540382 60540377 -
tggttggtctgttcacaccctt

SEQ ID NO: 212479 - DNA, 22 bp, Artificial Sequence
  Synthetic oligonucleotide; TTT chr2 60540376 60540397 60540381 60540376 -
ggttggtctgttcacacccttt

SEQ ID NO: 212480 - DNA, 22 bp, Artificial Sequence
  Synthetic oligonucleotide; TTG chr2 60540375 60540396 60540380 60540375 -
gttggtctgttcacacccttta

SEQ ID NO: 212481 - DNA, 22 bp, Artificial Sequence
  Synthetic oligonucleotide; TTG chr2 60540371 60540392 60540376 60540371 -
gtctgttcacaccctttattgc

SEQ ID NO: 212482 - DNA, 22 bp, Artificial Sequence
  Synthetic oligonucleotide; CTG chr2 60540366 60540387 60540371 60540366 -
ttcacaccctttattgcacaaa

SEQ ID NO: 212483 - DNA, 22 bp, Artificial Sequence
  Synthetic oligonucleotide; TTC chr2 60540363 60540384 60540368 60540363 -
acaccctttattgcacaaagaa

SEQ ID NO: 212484 - DNA, 22 bp, Artificial Sequence
  Synthetic oligonucleotide; CTT chr2 60540355 60540376 60540360 60540355 -
tattgcacaaagaagtcatttg

SEQ ID NO: 212485 - DNA, 22 bp, Artificial Sequence
  Synthetic oligonucleotide; TTT chr2 60540354 60540375 60540359 60540354 -
attgcacaaagaagtcatttga

SEQ ID NO: 212486 - DNA, 22 bp, Artificial Sequence
  Synthetic oligonucleotide; TTA chr2 60540353 60540374 60540358 60540353 -
ttgcacaaagaagtcatttgac

SEQ ID NO: 212487 - DNA, 22 bp, Artificial Sequence
  Synthetic oligonucleotide; TTG chr2 60540350 60540371 60540355 60540350 -
cacaaagaagtcatttgacaaa

SEQ ID NO: 212488 - DNA, 22 bp, Artificial Sequence
  Synthetic oligonucleotide; TTT chr2 60540334 60540355 60540339 60540334 -
gacaaaatttaccccaagccca

SEQ ID NO: 212489 - DNA, 22 bp, Artificial Sequence
  Synthetic oligonucleotide; TTG chr2 60540333 60540354 60540338 60540333 -
acaaaatttaccccaagcccaa

SEQ ID NO: 212490 - DNA, 22 bp, Artificial Sequence
  Synthetic oligonucleotide; TTT chr2 60540324 60540345 60540329 60540324 -
accccaagcccaagtctgtttt

SEQ ID NO: 212491 - DNA, 22 bp, Artificial Sequence
  Synthetic oligonucleotide; TTA chr2 60540323 60540344 60540328 60540323 -
ccccaagcccaagtctgttttt

SEQ ID NO: 212492 - DNA, 22 bp, Artificial Sequence
  Synthetic oligonucleotide; CTG chr2 60540306 60540327 60540311 60540306 -
tttttacatacagtagtaccag

SEQ ID NO: 212493 - DNA, 22 bp, Artificial Sequence
  Synthetic oligonucleotide; TTT chr2 60540303 60540324 60540308 60540303 -
ttacatacagtagtaccagctt

SEQ ID NO: 212494 - DNA, 22 bp, Artificial Sequence
  Synthetic oligonucleotide; TTT chr2 60540302 60540323 60540307 60540302 -
tacatacagtagtaccagcttt

SEQ ID NO: 212495 - DNA, 22 bp, Artificial Sequence
  Synthetic oligonucleotide; TTT chr2 60540301 60540322 60540306 60540301 -
acatacagtagtaccagctttg

SEQ ID NO: 212496 - DNA, 22 bp, Artificial Sequence
  Synthetic oligonucleotide; TTA chr2 60540300 60540321 60540305 60540300 -
catacagtagtaccagctttgt

SEQ ID NO: 212497 - DNA, 22 bp, Artificial Sequence
  Synthetic oligonucleotide; CTT chr2 60540281 60540302 60540286 60540281 -
tgtgcaataaaaagcacttagc

SEQ ID NO: 212498 - DNA, 22 bp, Artificial Sequence
  Synthetic oligonucleotide; TTT chr2 60540280 60540301 60540285 60540280 -
gtgcaataaaaagcacttagca

SEQ ID NO: 212499 - DNA, 22 bp, Artificial Sequence
  Synthetic oligonucleotide; TTG chr2 60540279 60540300 60540284 60540279 -
tgcaataaaaagcacttagcat

SEQ ID NO: 212500 - DNA, 22 bp, Artificial Sequence
  Synthetic oligonucleotide; CTT chr2 60540262 60540283 60540267 60540262 -
agcatcaagctggacccagcct

SEQ ID NO: 212501 - DNA, 22 bp, Artificial Sequence
  Synthetic oligonucleotide; TTA chr2 60540261 60540282 60540266 60540261 -
gcatcaagctggacccagcctg

SEQ ID NO: 212502 - DNA, 22 bp, Artificial Sequence
  Synthetic oligonucleotide; CTG chr2 60540250 60540271 60540255 60540250 -
gacccagcctggcaccttgcca

SEQ ID NO: 212503 - DNA, 22 bp, Artificial Sequence
  Synthetic oligonucleotide; CTG chr2 60540239 60540260 60540244 60540239 -
gcaccttgccacttttttagca

SEQ ID NO: 212504 - DNA, 22 bp, Artificial Sequence
  Synthetic oligonucleotide; CTT chr2 60540232 60540253 60540237 60540232 -
gccacttttttagcatgagatt

SEQ ID NO: 212505 - DNA, 22 bp, Artificial Sequence
  Synthetic oligonucleotide; TTG chr2 60540231 60540252 60540236 60540231 -
ccacttttttagcatgagattt

SEQ ID NO: 212506 - DNA, 22 bp, Artificial Sequence
  Synthetic oligonucleotide; CTT chr2 60540225 60540246 60540230 60540225 -
ttttagcatgagatttaatcac

SEQ ID NO: 212507 - DNA, 22 bp, Artificial Sequence
  Synthetic oligonucleotide; TTT chr2 60540224 60540245 60540229 60540224 -
tttagcatgagatttaatcacc

SEQ ID NO: 212508 - DNA, 22 bp, Artificial Sequence
  Synthetic oligonucleotide; TTT chr2 60540223 60540244 60540228 60540223 -
ttagcatgagatttaatcacca

SEQ ID NO: 212509 - DNA, 22 bp, Artificial Sequence
  Synthetic oligonucleotide; TTT chr2 60540222 60540243 60540227 60540222 -
tagcatgagatttaatcaccaa

SEQ ID NO: 212510 - DNA, 22 bp, Artificial Sequence
  Synthetic oligonucleotide; TTT chr2 60540221 60540242 60540226 60540221 -
agcatgagatttaatcaccaag

SEQ ID NO: 212511 - DNA, 22 bp, Artificial Sequence
  Synthetic oligonucleotide; TTA chr2 60540220 60540241 60540225 60540220 -
gcatgagatttaatcaccaagc

SEQ ID NO: 212512 - DNA, 22 bp, Artificial Sequence
  Synthetic oligonucleotide; TTT chr2 60540209 60540230 60540214 60540209 -
aatcaccaagcatctttagtac

SEQ ID NO: 212513 - DNA, 22 bp, Artificial Sequence
  Synthetic oligonucleotide; TTA chr2 60540208 60540229 60540213 60540208 -
atcaccaagcatctttagtacc

SEQ ID NO: 212514 - DNA, 22 bp, Artificial Sequence
  Synthetic oligonucleotide; CTT chr2 60540193 60540214 60540198 60540193 -
tagtacctttctgcttgttcag

SEQ ID NO: 212515 - DNA, 22 bp, Artificial Sequence
  Synthetic oligonucleotide; TTT chr2 60540192 60540213 60540197 60540192 -
agtacctttctgcttgttcaga

SEQ ID NO: 212516 - DNA, 22 bp, Artificial Sequence
  Synthetic oligonucleotide; TTA chr2 60540191 60540212 60540196 60540191 -
gtacctttctgcttgttcagat

SEQ ID NO: 212517 - DNA, 22 bp, Artificial Sequence
  Synthetic oligonucleotide; CTT chr2 60540184 60540205 60540189 60540184 -
tctgcttgttcagatttcattt

SEQ ID NO: 212518 - DNA, 22 bp, Artificial Sequence
  Synthetic oligonucleotide; TTT chr2 60540183 60540204 60540188 60540183 -
ctgcttgttcagatttcatttg

SEQ ID NO: 212519 - DNA, 22 bp, Artificial Sequence
  Synthetic oligonucleotide; TTC chr2 60540182 60540203 60540187 60540182 -
tgcttgttcagatttcatttgg

SEQ ID NO: 212520 - DNA, 22 bp, Artificial Sequence
  Synthetic oligonucleotide; CTG chr2 60540180 60540201 60540185 60540180 -
cttgttcagatttcatttgggt

SEQ ID NO: 212521 - DNA, 22 bp, Artificial Sequence
  Synthetic oligonucleotide; CTT chr2 60540177 60540198 60540182 60540177 -
gttcagatttcatttgggtcat

SEQ ID NO: 212522 - DNA, 22 bp, Artificial Sequence
  Synthetic oligonucleotide; TTG chr2 60540176 60540197 60540181 60540176 -
ttcagatttcatttgggtcatg

SEQ ID NO: 212523 - DNA, 22 bp, Artificial Sequence
  Synthetic oligonucleotide; TTC chr2 60540173 60540194 60540178 60540173 -
agatttcatttgggtcatggct

SEQ ID NO: 212524 - DNA, 22 bp, Artificial Sequence
  Synthetic oligonucleotide; TTT chr2 60540167 60540188 60540172 60540167 -
catttgggtcatggctatgtca

SEQ ID NO: 212525 - DNA, 22 bp, Artificial Sequence
  Synthetic oligonucleotide; TTC chr2 60540166 60540187 60540171 60540166 -
atttgggtcatggctatgtcag

SEQ ID NO: 212526 - DNA, 22 bp, Artificial Sequence
  Synthetic oligonucleotide; TTT chr2 60540162 60540183 60540167 60540162 -
gggtcatggctatgtcagcagt

SEQ ID NO: 212527 - DNA, 22 bp, Artificial Sequence
  Synthetic oligonucleotide; TTG chr2 60540161 60540182 60540166 60540161 -
ggtcatggctatgtcagcagtg

SEQ ID NO: 212528 - DNA, 22 bp, Artificial Sequence
  Synthetic oligonucleotide; CTA chr2 60540150 60540171 60540155 60540150 -
tgtcagcagtgttgttatttca

SEQ ID NO: 212529 - DNA, 22 bp, Artificial Sequence
  Synthetic oligonucleotide; TTG chr2 60540136 60540157 60540141 60540136 -
ttatttcaaggattaaaaaaaa

SEQ ID NO: 212530 - DNA, 22 bp, Artificial Sequence
  Synthetic oligonucleotide; TTA chr2 60540133 60540154 60540138 60540133 -
tttcaaggattaaaaaaaaaga

SEQ ID NO: 212531 - DNA, 22 bp, Artificial Sequence
  Synthetic oligonucleotide; TTT chr2 60540130 60540151 60540135 60540130 -
caaggattaaaaaaaaagattc

SEQ ID NO: 212532 - DNA, 22 bp, Artificial Sequence
  Synthetic oligonucleotide; TTC chr2 60540129 60540150 60540134 60540129 -
aaggattaaaaaaaaagattct

SEQ ID NO: 212533 - DNA, 22 bp, Artificial Sequence
  Synthetic oligonucleotide; TTA chr2 60540121 60540142 60540126 60540121 -
aaaaaaaagattctaacttaga

SEQ ID NO: 212534 - DNA, 22 bp, Artificial Sequence
  Synthetic oligonucleotide; TTC chr2 60540108 60540129 60540113 60540108 -
taacttagagcccacttttaac

SEQ ID NO: 212535 - DNA, 22 bp, Artificial Sequence
  Synthetic oligonucleotide; CTA chr2 60540106 60540127 60540111 60540106 -
acttagagcccacttttaacat

SEQ ID NO: 212536 - DNA, 22 bp, Artificial Sequence
  Synthetic oligonucleotide; CTT chr2 60540102 60540123 60540107 60540102 -
agagcccacttttaacattatt

SEQ ID NO: 212537 - DNA, 22 bp, Artificial Sequence
  Synthetic oligonucleotide; TTA chr2 60540101 60540122 60540106 60540101 -
gagcccacttttaacattattt

SEQ ID NO: 212538 - DNA, 22 bp, Artificial Sequence
  Synthetic oligonucleotide; CTT chr2 60540091 60540112 60540096 60540091 -
ttaacattatttcaaatcaagc

SEQ ID NO: 212539 - DNA, 22 bp, Artificial Sequence
  Synthetic oligonucleotide; TTT chr2 60540090 60540111 60540095 60540090 -
taacattatttcaaatcaagca

SEQ ID NO: 212540 - DNA, 22 bp, Artificial Sequence
  Synthetic oligonucleotide; TTT chr2 60540089 60540110 60540094 60540089 -
aacattatttcaaatcaagcag

SEQ ID NO: 212541 - DNA, 22 bp, Artificial Sequence
  Synthetic oligonucleotide; TTA chr2 60540088 60540109 60540093 60540088 -
acattatttcaaatcaagcagg

SEQ ID NO: 212542 - DNA, 22 bp, Artificial Sequence
  Synthetic oligonucleotide; TTA chr2 60540082 60540103 60540087 60540082 -
tttcaaatcaagcaggttttta

SEQ ID NO: 212543 - DNA, 22 bp, Artificial Sequence
  Synthetic oligonucleotide; TTT chr2 60540079 60540100 60540084 60540079 -
caaatcaagcaggtttttatgt

SEQ ID NO: 212544 - DNA, 22 bp, Artificial Sequence
  Synthetic oligonucleotide; TTC chr2 60540078 60540099 60540083 60540078 -
aaatcaagcaggtttttatgtt

SEQ ID NO: 212545 - DNA, 22 bp, Artificial Sequence
  Synthetic oligonucleotide; TTT chr2 60540063 60540084 60540068 60540063 -
ttatgttatgtatcaatttgga

SEQ ID NO: 212546 - DNA, 22 bp, Artificial Sequence
  Synthetic oligonucleotide; TTT chr2 60540062 60540083 60540067 60540062 -
tatgttatgtatcaatttggat

SEQ ID NO: 212547 - DNA, 22 bp, Artificial Sequence
  Synthetic oligonucleotide; TTT chr2 60540061 60540082 60540066 60540061 -
atgttatgtatcaatttggatg

SEQ ID NO: 212548 - DNA, 22 bp, Artificial Sequence
  Synthetic oligonucleotide; TTA chr2 60540060 60540081 60540065 60540060 -
tgttatgtatcaatttggatga

SEQ ID NO: 212549 - DNA, 22 bp, Artificial Sequence
  Synthetic oligonucleotide; TTA chr2 60540055 60540076 60540060 60540055 -
tgtatcaatttggatgacatta

SEQ ID NO: 212550 - DNA, 22 bp, Artificial Sequence
  Synthetic oligonucleotide; TTT chr2 60540044 60540065 60540049 60540044 -
ggatgacattaatgaagttcat

SEQ ID NO: 212551 - DNA, 22 bp, Artificial Sequence
  Synthetic oligonucleotide; TTG chr2 60540043 60540064 60540048 60540043 -
gatgacattaatgaagttcata

SEQ ID NO: 212552 - DNA, 22 bp, Artificial Sequence
  Synthetic oligonucleotide; TTA chr2 60540033 60540054 60540038 60540033 -
atgaagttcataaaatatgttc

SEQ ID NO: 212553 - DNA, 22 bp, Artificial Sequence
  Synthetic oligonucleotide; TTC chr2 60540024 60540045 60540029 60540024 -
ataaaatatgttcagactatat

SEQ ID NO: 212554 - DNA, 22 bp, Artificial Sequence
  Synthetic oligonucleotide; TTC chr2 60540011 60540032 60540016 60540011 -
agactatataatttaatggata

SEQ ID NO: 212555 - DNA, 22 bp, Artificial Sequence
  Synthetic oligonucleotide; CTA chr2 60540005 60540026 60540010 60540005 -
tataatttaatggataatgact

SEQ ID NO: 212556 - DNA, 22 bp, Artificial Sequence
  Synthetic oligonucleotide; TTT chr2 60539997 60540018 60540002 60539997 -
aatggataatgactactatttt

SEQ ID NO: 212557 - DNA, 22 bp, Artificial Sequence
  Synthetic oligonucleotide; TTA chr2 60539996 60540017 60540001 60539996 -
atggataatgactactattttt

SEQ ID NO: 212558 - DNA, 22 bp, Artificial Sequence
  Synthetic oligonucleotide; CTA chr2 60539982 60540003 60539987 60539982 -
ctatttttatttgtaatacaaa

SEQ ID NO: 212559 - DNA, 22 bp, Artificial Sequence
  Synthetic oligonucleotide; CTA chr2 60539979 60540000 60539984 60539979 -
tttttatttgtaatacaaatag

SEQ ID NO: 212560 - DNA, 22 bp, Artificial Sequence
  Synthetic oligonucleotide; TTT chr2 60539976 60539997 60539981 60539976 -
ttatttgtaatacaaataggaa

SEQ ID NO: 212561 - DNA, 22 bp, Artificial Sequence
  Synthetic oligonucleotide; TTT chr2 60539975 60539996 60539980 60539975 -
tatttgtaatacaaataggaaa

SEQ ID NO: 212562 - DNA, 22 bp, Artificial Sequence
  Synthetic oligonucleotide; TTT chr2 60539974 60539995 60539979 60539974 -
atttgtaatacaaataggaaat

SEQ ID NO: 212563 - DNA, 22 bp, Artificial Sequence
  Synthetic oligonucleotide; TTA chr2 60539973 60539994 60539978 60539973 -
tttgtaatacaaataggaaatt

SEQ ID NO: 212564 - DNA, 22 bp, Artificial Sequence
  Synthetic oligonucleotide; TTT chr2 60539970 60539991 60539975 60539970 -
gtaatacaaataggaaattgac

SEQ ID NO: 212565 - DNA, 22 bp, Artificial Sequence
  Synthetic oligonucleotide; TTG chr2 60539969 60539990 60539974 60539969 -
taatacaaataggaaattgact

SEQ ID NO: 212566 - DNA, 22 bp, Artificial Sequence
  Synthetic oligonucleotide; TTG chr2 60539950 60539971 60539955 60539950 -
actgttgtctccctccctcctt

SEQ ID NO: 212567 - DNA, 22 bp, Artificial Sequence
  Synthetic oligonucleotide; CTG chr2 60539946 60539967 60539951 60539946 -
ttgtctccctccctccttggtt

SEQ ID NO: 212568 - DNA, 22 bp, Artificial Sequence
  Synthetic oligonucleotide; TTG chr2 60539943 60539964 60539948 60539943 -
tctccctccctccttggttctt

SEQ ID NO: 212569 - DNA, 22 bp, Artificial Sequence
  Synthetic oligonucleotide; CTC chr2 60539939 60539960 60539944 60539939 -
cctccctccttggttcttttct

SEQ ID NO: 212570 - DNA, 22 bp, Artificial Sequence
  Synthetic oligonucleotide; CTC chr2 60539935 60539956 60539940 60539935 -
cctccttggttcttttctccta

SEQ ID NO: 212571 - DNA, 22 bp, Artificial Sequence
  Synthetic oligonucleotide; CTC chr2 60539931 60539952 60539936 60539931 -
cttggttcttttctcctaccta

SEQ ID NO: 212572 - DNA, 22 bp, Artificial Sequence
  Synthetic oligonucleotide; CTT chr2 60539928 60539949 60539933 60539928 -
ggttcttttctcctacctaggt

SEQ ID NO: 212573 - DNA, 22 bp, Artificial Sequence
  Synthetic oligonucleotide; TTG chr2 60539927 60539948 60539932 60539927 -
gttcttttctcctacctaggta

SEQ ID NO: 212574 - DNA, 22 bp, Artificial Sequence
  Synthetic oligonucleotide; TTC chr2 60539923 60539944 60539928 60539923 -
ttttctcctacctaggtaaatg

SEQ ID NO: 212575 - DNA, 22 bp, Artificial Sequence
  Synthetic oligonucleotide; CTT chr2 60539921 60539942 60539926 60539921 -
ttctcctacctaggtaaatggg

SEQ ID NO: 212576 - DNA, 22 bp, Artificial Sequence
  Synthetic oligonucleotide; TTT chr2 60539920 60539941 60539925 60539920 -
tctcctacctaggtaaatgggc

SEQ ID NO: 212577 - DNA, 22 bp, Artificial Sequence
  Synthetic oligonucleotide; TTT chr2 60539919 60539940 60539924 60539919 -
ctcctacctaggtaaatgggca

SEQ ID NO: 212578 - DNA, 22 bp, Artificial Sequence
  Synthetic oligonucleotide; TTC chr2 60539918 60539939 60539923 60539918 -
tcctacctaggtaaatgggcat

SEQ ID NO: 212579 - DNA, 22 bp, Artificial Sequence
  Synthetic oligonucleotide; CTC chr2 60539916 60539937 60539921 60539916 -
ctacctaggtaaatgggcatcc

SEQ ID NO: 212580 - DNA, 22 bp, Artificial Sequence
  Synthetic oligonucleotide; CTA chr2 60539913 60539934 60539918 60539913 -
cctaggtaaatgggcatcctta

SEQ ID NO: 212581 - DNA, 22 bp, Artificial Sequence
  Synthetic oligonucleotide; CTA chr2 60539909 60539930 60539914 60539909 -
ggtaaatgggcatccttaaaca

SEQ ID NO: 212582 - DNA, 22 bp, Artificial Sequence
  Synthetic oligonucleotide; CTT chr2 60539892 60539913 60539897 60539892 -
aaacagcttctcccctttacga

SEQ ID NO: 212583 - DNA, 22 bp, Artificial Sequence
  Synthetic oligonucleotide; TTA chr2 60539891 60539912 60539896 60539891 -
aacagcttctcccctttacgac

SEQ ID NO: 212584 - DNA, 22 bp, Artificial Sequence
  Synthetic oligonucleotide; CTT chr2 60539883 60539904 60539888 60539883 -
ctcccctttacgaccagggtat

SEQ ID NO: 212585 - DNA, 22 bp, Artificial Sequence
  Synthetic oligonucleotide; TTC chr2 60539882 60539903 60539887 60539882 -
tcccctttacgaccagggtata

SEQ ID NO: 212586 - DNA, 22 bp, Artificial Sequence
  Synthetic oligonucleotide; CTC chr2 60539880 60539901 60539885 60539880 -
ccctttacgaccagggtataga

SEQ ID NO: 212587 - DNA, 22 bp, Artificial Sequence
  Synthetic oligonucleotide; CTT chr2 60539875 60539896 60539880 60539875 -
tacgaccagggtatagagcact

SEQ ID NO: 212588 - DNA, 22 bp, Artificial Sequence
  Synthetic oligonucleotide; TTT chr2 60539874 60539895 60539879 60539874 -
acgaccagggtatagagcactg

SEQ ID NO: 212589 - DNA, 22 bp, Artificial Sequence
  Synthetic oligonucleotide; TTA chr2 60539873 60539894 60539878 60539873 -
cgaccagggtatagagcactgg

SEQ ID NO: 212590 - DNA, 22 bp, Artificial Sequence
  Synthetic oligonucleotide; CTG chr2 60539852 60539873 60539857 60539852 -
gccaatatcagtaaatttacct

SEQ ID NO: 212591 - DNA, 22 bp, Artificial Sequence
  Synthetic oligonucleotide; TTT chr2 60539834 60539855 60539839 60539834 -
acctttgtaatttgccacgtag

SEQ ID NO: 212592 - DNA, 22 bp, Artificial Sequence
  Synthetic oligonucleotide; TTA chr2 60539833 60539854 60539838 60539833 -
cctttgtaatttgccacgtagt

SEQ ID NO: 212593 - DNA, 22 bp, Artificial Sequence
  Synthetic oligonucleotide; CTT chr2 60539829 60539850 60539834 60539829 -
tgtaatttgccacgtagttttt

SEQ ID NO: 212594 - DNA, 22 bp, Artificial Sequence
  Synthetic oligonucleotide; TTT chr2 60539828 60539849 60539833 60539828 -
gtaatttgccacgtagttttta

SEQ ID NO: 212595 - DNA, 22 bp, Artificial Sequence
  Synthetic oligonucleotide; TTG chr2 60539827 60539848 60539832 60539827 -
taatttgccacgtagtttttac

SEQ ID NO: 212596 - DNA, 22 bp, Artificial Sequence
  Synthetic oligonucleotide; TTT chr2 60539821 60539842 60539826 60539821 -
gccacgtagtttttacaacatg

SEQ ID NO: 212597 - DNA, 22 bp, Artificial Sequence
  Synthetic oligonucleotide; TTG chr2 60539820 60539841 60539825 60539820 -
ccacgtagtttttacaacatga

SEQ ID NO: 212598 - DNA, 22 bp, Artificial Sequence
  Synthetic oligonucleotide; TTT chr2 60539809 60539830 60539814 60539809 -
ttacaacatgacctaattaatt

SEQ ID NO: 212599 - DNA, 22 bp, Artificial Sequence
  Synthetic oligonucleotide; TTT chr2 60539808 60539829 60539813 60539808 -
tacaacatgacctaattaattt

SEQ ID NO: 212600 - DNA, 22 bp, Artificial Sequence
  Synthetic oligonucleotide; TTT chr2 60539807 60539828 60539812 60539807 -
acaacatgacctaattaatttg

SEQ ID NO: 212601 - DNA, 22 bp, Artificial Sequence
  Synthetic oligonucleotide; TTA chr2 60539806 60539827 60539811 60539806 -
caacatgacctaattaatttga

SEQ ID NO: 212602 - DNA, 22 bp, Artificial Sequence
  Synthetic oligonucleotide; CTA chr2 60539794 60539815 60539799 60539794 -
attaatttgagcacgaaccata

SEQ ID NO: 212603 - DNA, 22 bp, Artificial Sequence
  Synthetic oligonucleotide; TTA chr2 60539790 60539811 60539795 60539790 -
atttgagcacgaaccatattat

SEQ ID NO: 212604 - DNA, 22 bp, Artificial Sequence
  Synthetic oligonucleotide; TTT chr2 60539786 60539807 60539791 60539786 -
gagcacgaaccatattattgct

SEQ ID NO: 212605 - DNA, 22 bp, Artificial Sequence
  Synthetic oligonucleotide; TTG chr2 60539785 60539806 60539790 60539785 -
agcacgaaccatattattgcta

SEQ ID NO: 212606 - DNA, 22 bp, Artificial Sequence
  Synthetic oligonucleotide; TTA chr2 60539769 60539790 60539774 60539769 -
ttgctactggagtcattttctg

SEQ ID NO: 212607 - DNA, 22 bp, Artificial Sequence
  Synthetic oligonucleotide; TTG chr2 60539766 60539787 60539771 60539766 -
ctactggagtcattttctgtca

SEQ ID NO: 212608 - DNA, 22 bp, Artificial Sequence
  Synthetic oligonucleotide; CTA chr2 60539763 60539784 60539768 60539763 -
ctggagtcattttctgtcacaa

SEQ ID NO: 212609 - DNA, 22 bp, Artificial Sequence
  Synthetic oligonucleotide; CTG chr2 60539760 60539781 60539765 60539760 -
gagtcattttctgtcacaaact

SEQ ID NO: 212610 - DNA, 22 bp, Artificial Sequence
  Synthetic oligonucleotide; TTT chr2 60539751 60539772 60539756 60539751 -
tctgtcacaaacttaatttcca

SEQ ID NO: 212611 - DNA, 22 bp, Artificial Sequence
  Synthetic oligonucleotide; TTT chr2 60539750 60539771 60539755 60539750 -
ctgtcacaaacttaatttccag

SEQ ID NO: 212612 - DNA, 22 bp, Artificial Sequence
  Synthetic oligonucleotide; TTC chr2 60539749 60539770 60539754 60539749 -
tgtcacaaacttaatttccagg

SEQ ID NO: 212613 - DNA, 22 bp, Artificial Sequence
  Synthetic oligonucleotide; CTG chr2 60539747 60539768 60539752 60539747 -
tcacaaacttaatttccaggaa

SEQ ID NO: 212614 - DNA, 22 bp, Artificial Sequence
  Synthetic oligonucleotide; CTT chr2 60539737 60539758 60539742 60539737 -
aatttccaggaaatgtaacctg

SEQ ID NO: 212615 - DNA, 22 bp, Artificial Sequence
  Synthetic oligonucleotide; TTA chr2 60539736 60539757 60539741 60539736 -
atttccaggaaatgtaacctga

SEQ ID NO: 212616 - DNA, 22 bp, Artificial Sequence
  Synthetic oligonucleotide; TTT chr2 60539732 60539753 60539737 60539732 -
ccaggaaatgtaacctgacaaa

SEQ ID NO: 212617 - DNA, 22 bp, Artificial Sequence
  Synthetic oligonucleotide; TTC chr2 60539731 60539752 60539736 60539731 -
caggaaatgtaacctgacaaat

SEQ ID NO: 212618 - DNA, 22 bp, Artificial Sequence
  Synthetic oligonucleotide; CTG chr2 60539715 60539736 60539720 60539715 -
acaaataagaattctttagctc

SEQ ID NO: 212619 - DNA, 22 bp, Artificial Sequence
  Synthetic oligonucleotide; TTC chr2 60539701 60539722 60539706 60539701 -
tttagctctctacatgtgctcc

SEQ ID NO: 212620 - DNA, 22 bp, Artificial Sequence
  Synthetic oligonucleotide; CTT chr2 60539699 60539720 60539704 60539699 -
tagctctctacatgtgctccta

SEQ ID NO: 212621 - DNA, 22 bp, Artificial Sequence
  Synthetic oligonucleotide; TTT chr2 60539698 60539719 60539703 60539698 -
agctctctacatgtgctcctag

SEQ ID NO: 212622 - DNA, 22 bp, Artificial Sequence
  Synthetic oligonucleotide; TTA chr2 60539697 60539718 60539702 60539697 -
gctctctacatgtgctcctaga

SEQ ID NO: 212623 - DNA, 22 bp, Artificial Sequence
  Synthetic oligonucleotide; CTC chr2 60539693 60539714 60539698 60539693 -
tctacatgtgctcctagagacc

SEQ ID NO: 212624 - DNA, 22 bp, Artificial Sequence
  Synthetic oligonucleotide; CTC chr2 60539691 60539712 60539696 60539691 -
tacatgtgctcctagagaccaa

SEQ ID NO: 212625 - DNA, 22 bp, Artificial Sequence
  Synthetic oligonucleotide; CTA chr2 60539689 60539710 60539694 60539689 -
catgtgctcctagagaccaaag

SEQ ID NO: 212626 - DNA, 22 bp, Artificial Sequence
  Synthetic oligonucleotide; CTC chr2 60539680 60539701 60539685 60539680 -
ctagagaccaaaggcagattta

SEQ ID NO: 212627 - DNA, 22 bp, Artificial Sequence
  Synthetic oligonucleotide; CTA chr2 60539677 60539698 60539682 60539677 -
gagaccaaaggcagatttaaaa

SEQ ID NO: 212628 - DNA, 22 bp, Artificial Sequence
  Synthetic oligonucleotide; TTT chr2 60539659 60539680 60539664 60539659 -
aaaataataataattttaaaag

SEQ ID NO: 212629 - DNA, 22 bp, Artificial Sequence
  Synthetic oligonucleotide; TTA chr2 60539658 60539679 60539663 60539658 -
aaataataataattttaaaagt

SEQ ID NO: 212630 - DNA, 22 bp, Artificial Sequence
  Synthetic oligonucleotide; TTT chr2 60539643 60539664 60539648 60539643 -
taaaagtgccagcattattaaa

SEQ ID NO: 212631 - DNA, 22 bp, Artificial Sequence
  Synthetic oligonucleotide; TTT chr2 60539642 60539663 60539647 60539642 -
aaaagtgccagcattattaaag

SEQ ID NO: 212632 - DNA, 22 bp, Artificial Sequence
  Synthetic oligonucleotide; TTA chr2 60539641 60539662 60539646 60539641 -
aaagtgccagcattattaaagc

SEQ ID NO: 212633 - DNA, 22 bp, Artificial Sequence
  Synthetic oligonucleotide; TTA chr2 60539626 60539647 60539631 60539626 -
ttaaagccagtatacttgatgc

SEQ ID NO: 212634 - DNA, 22 bp, Artificial Sequence
  Synthetic oligonucleotide; TTA chr2 60539623 60539644 60539628 60539623 -
aagccagtatacttgatgccaa

SEQ ID NO: 212635 - DNA, 22 bp, Artificial Sequence
  Synthetic oligonucleotide; CTT chr2 60539609 60539630 60539614 60539609 -
gatgccaaactcaatttgaagc

SEQ ID NO: 212636 - DNA, 22 bp, Artificial Sequence
  Synthetic oligonucleotide; TTG chr2 60539608 60539629 60539613 60539608 -
atgccaaactcaatttgaagcc

SEQ ID NO: 212637 - DNA, 22 bp, Artificial Sequence
  Synthetic oligonucleotide; CTC chr2 60539597 60539618 60539602 60539597 -
aatttgaagccagtaaacatca

SEQ ID NO: 212638 - DNA, 22 bp, Artificial Sequence
  Synthetic oligonucleotide; TTT chr2 60539592 60539613 60539597 60539592 -
gaagccagtaaacatcagactg

SEQ ID NO: 212639 - DNA, 22 bp, Artificial Sequence
  Synthetic oligonucleotide; TTG chr2 60539591 60539612 60539596 60539591 -
aagccagtaaacatcagactgt

SEQ ID NO: 212640 - DNA, 22 bp, Artificial Sequence
  Synthetic oligonucleotide; CTG chr2 60539570 60539591 60539575 60539570 -
tatttctaatcagttttaaaat

SEQ ID NO: 212641 - DNA, 22 bp, Artificial Sequence
  Synthetic oligonucleotide; TTT chr2 60539565 60539586 60539570 60539565 -
ctaatcagttttaaaatgtaac

SEQ ID NO: 212642 - DNA, 22 bp, Artificial Sequence
  Synthetic oligonucleotide; TTC chr2 60539564 60539585 60539569 60539564 -
taatcagttttaaaatgtaact

SEQ ID NO: 212643 - DNA, 22 bp, Artificial Sequence
  Synthetic oligonucleotide; CTA chr2 60539562 60539583 60539567 60539562 -
atcagttttaaaatgtaactta

SEQ ID NO: 212644 - DNA, 22 bp, Artificial Sequence
  Synthetic oligonucleotide; TTT chr2 60539554 60539575 60539559 60539554 -
taaaatgtaacttattccatat

SEQ ID NO: 212645 - DNA, 22 bp, Artificial Sequence
  Synthetic oligonucleotide; TTT chr2 60539553 60539574 60539558 60539553 -
aaaatgtaacttattccatatt

SEQ ID NO: 212646 - DNA, 22 bp, Artificial Sequence
  Synthetic oligonucleotide; TTA chr2 60539552 60539573 60539557 60539552 -
aaatgtaacttattccatattg

SEQ ID NO: 212647 - DNA, 22 bp, Artificial Sequence
  Synthetic oligonucleotide; CTT chr2 60539541 60539562 60539546 60539541 -
attccatattgggttcattgga

SEQ ID NO: 212648 - DNA, 22 bp, Artificial Sequence
  Synthetic oligonucleotide; TTA chr2 60539540 60539561 60539545 60539540 -
ttccatattgggttcattggaa

SEQ ID NO: 212649 - DNA, 22 bp, Artificial Sequence
  Synthetic oligonucleotide; TTC chr2 60539537 60539558 60539542 60539537 -
catattgggttcattggaattt

SEQ ID NO: 212650 - DNA, 22 bp, Artificial Sequence
  Synthetic oligonucleotide; TTG chr2 60539530 60539551 60539535 60539530 -
ggttcattggaatttgtctccc

SEQ ID NO: 212651 - DNA, 22 bp, Artificial Sequence
  Synthetic oligonucleotide; TTC chr2 60539525 60539546 60539530 60539525 -
attggaatttgtctccctgctt

SEQ ID NO: 212652 - DNA, 22 bp, Artificial Sequence
  Synthetic oligonucleotide; TTG chr2 60539521 60539542 60539526 60539521 -
gaatttgtctccctgcttttta

SEQ ID NO: 212653 - DNA, 22 bp, Artificial Sequence
  Synthetic oligonucleotide; TTT chr2 60539515 60539536 60539520 60539515 -
gtctccctgctttttactggcc

SEQ ID NO: 212654 - DNA, 22 bp, Artificial Sequence
  Synthetic oligonucleotide; TTG chr2 60539514 60539535 60539519 60539514 -
tctccctgctttttactggcca

SEQ ID NO: 212655 - DNA, 22 bp, Artificial Sequence
  Synthetic oligonucleotide; CTC chr2 60539510 60539531 60539515 60539510 -
cctgctttttactggccagctg

SEQ ID NO: 212656 - DNA, 22 bp, Artificial Sequence
  Synthetic oligonucleotide; CTG chr2 60539506 60539527 60539511 60539506 -
ctttttactggccagctgcact

SEQ ID NO: 212657 - DNA, 22 bp, Artificial Sequence
  Synthetic oligonucleotide; CTT chr2 60539503 60539524 60539508 60539503 -
tttactggccagctgcactccc

SEQ ID NO: 212658 - DNA, 22 bp, Artificial Sequence
  Synthetic oligonucleotide; TTT chr2 60539502 60539523 60539507 60539502 -
ttactggccagctgcactccct

SEQ ID NO: 212659 - DNA, 22 bp, Artificial Sequence
  Synthetic oligonucleotide; TTT chr2 60539501 60539522 60539506 60539501 -
tactggccagctgcactcccta

SEQ ID NO: 212660 - DNA, 22 bp, Artificial Sequence
  Synthetic oligonucleotide; TTT chr2 60539500 60539521 60539505 60539500 -
actggccagctgcactccctat

SEQ ID NO: 212661 - DNA, 22 bp, Artificial Sequence
  Synthetic oligonucleotide; TTA chr2 60539499 60539520 60539504 60539499 -
ctggccagctgcactccctatg

SEQ ID NO: 212662 - DNA, 22 bp, Artificial Sequence
  Synthetic oligonucleotide; CTG chr2 60539496 60539517 60539501 60539496 -
gccagctgcactccctatgcat

SEQ ID NO: 212663 - DNA, 22 bp, Artificial Sequence
  Synthetic oligonucleotide; CTG chr2 60539488 60539509 60539493 60539488 -
cactccctatgcatttttaaaa

SEQ ID NO: 212664 - DNA, 22 bp, Artificial Sequence
  Synthetic oligonucleotide; CTC chr2 60539483 60539504 60539488 60539483 -
cctatgcatttttaaaacattt

SEQ ID NO: 212665 - DNA, 22 bp, Artificial Sequence
  Synthetic oligonucleotide; CTA chr2 60539479 60539500 60539484 60539479 -
tgcatttttaaaacatttcagc

SEQ ID NO: 212666 - DNA, 22 bp, Artificial Sequence
  Synthetic oligonucleotide; TTT chr2 60539472 60539493 60539477 60539472 -
ttaaaacatttcagcaaaggct

SEQ ID NO: 212667 - DNA, 22 bp, Artificial Sequence
  Synthetic oligonucleotide; TTT chr2 60539471 60539492 60539476 60539471 -
taaaacatttcagcaaaggctt

SEQ ID NO: 212668 - DNA, 22 bp, Artificial Sequence
  Synthetic oligonucleotide; TTT chr2 60539470 60539491 60539475 60539470 -
aaaacatttcagcaaaggcttt

SEQ ID NO: 212669 - DNA, 22 bp, Artificial Sequence
  Synthetic oligonucleotide; TTA chr2 60539469 60539490 60539474 60539469 -
aaacatttcagcaaaggctttt

SEQ ID NO: 212670 - DNA, 22 bp, Artificial Sequence
  Synthetic oligonucleotide; TTT chr2 60539461 60539482 60539466 60539461 -
cagcaaaggcttttgctgttct

SEQ ID NO: 212671 - DNA, 22 bp, Artificial Sequence
  Synthetic oligonucleotide; TTC chr2 60539460 60539481 60539465 60539460 -
agcaaaggcttttgctgttctt

SEQ ID NO: 212672 - DNA, 22 bp, Artificial Sequence
  Synthetic oligonucleotide; CTT chr2 60539449 60539470 60539454 60539449 -
ttgctgttcttagcagggttag

SEQ ID NO: 212673 - DNA, 22 bp, Artificial Sequence
  Synthetic oligonucleotide; TTT chr2 60539448 60539469 60539453 60539448 -
tgctgttcttagcagggttagt

SEQ ID NO: 212674 - DNA, 22 bp, Artificial Sequence
  Synthetic oligonucleotide; TTT chr2 60539447 60539468 60539452 60539447 -
gctgttcttagcagggttagta

SEQ ID NO: 212675 - DNA, 22 bp, Artificial Sequence
  Synthetic oligonucleotide; TTG chr2 60539446 60539467 60539451 60539446 -
ctgttcttagcagggttagtaa

SEQ ID NO: 212676 - DNA, 22 bp, Artificial Sequence
  Synthetic oligonucleotide; CTG chr2 60539443 60539464 60539448 60539443 -
ttcttagcagggttagtaactt

SEQ ID NO: 212677 - DNA, 22 bp, Artificial Sequence
  Synthetic oligonucleotide; TTC chr2 60539440 60539461 60539445 60539440 -
ttagcagggttagtaacttggg

SEQ ID NO: 212678 - DNA, 22 bp, Artificial Sequence
  Synthetic oligonucleotide; CTT chr2 60539438 60539459 60539443 60539438 -
agcagggttagtaacttggggt

SEQ ID NO: 212679 - DNA, 22 bp, Artificial Sequence
  Synthetic oligonucleotide; TTA chr2 60539437 60539458 60539442 60539437 -
gcagggttagtaacttggggtc

SEQ ID NO: 212680 - DNA, 22 bp, Artificial Sequence
  Synthetic oligonucleotide; TTA chr2 60539428 60539449 60539433 60539428 -
gtaacttggggtctatttctga

SEQ ID NO: 212681 - DNA, 22 bp, Artificial Sequence
  Synthetic oligonucleotide; CTT chr2 60539421 60539442 60539426 60539421 -
ggggtctatttctgagctcatt

SEQ ID NO: 212682 - DNA, 22 bp, Artificial Sequence
  Synthetic oligonucleotide; TTG chr2 60539420 60539441 60539425 60539420 -
gggtctatttctgagctcattc

SEQ ID NO: 212683 - DNA, 22 bp, Artificial Sequence
  Synthetic oligonucleotide; CTA chr2 60539413 60539434 60539418 60539413 -
tttctgagctcattcgtcattc

SEQ ID NO: 212684 - DNA, 22 bp, Artificial Sequence
  Synthetic oligonucleotide; TTT chr2 60539410 60539431 60539415 60539410 -
ctgagctcattcgtcattctgc

SEQ ID NO: 212685 - DNA, 22 bp, Artificial Sequence
  Synthetic oligonucleotide; TTC chr2 60539409 60539430 60539414 60539409 -
tgagctcattcgtcattctgca

SEQ ID NO: 212686 - DNA, 22 bp, Artificial Sequence
  Synthetic oligonucleotide; CTG chr2 60539407 60539428 60539412 60539407 -
agctcattcgtcattctgcaat

SEQ ID NO: 212687 - DNA, 22 bp, Artificial Sequence
  Synthetic oligonucleotide; CTC chr2 60539402 60539423 60539407 60539402 -
attcgtcattctgcaatggcat

SEQ ID NO: 212688 - DNA, 22 bp, Artificial Sequence
  Synthetic oligonucleotide; TTC chr2 60539398 60539419 60539403 60539398 -
gtcattctgcaatggcattgag

SEQ ID NO: 212689 - DNA, 22 bp, Artificial Sequence
  Synthetic oligonucleotide; TTC chr2 60539391 60539412 60539396 60539391 -
tgcaatggcattgagttaggtt

SEQ ID NO: 212690 - DNA, 22 bp, Artificial Sequence
  Synthetic oligonucleotide; CTG chr2 60539389 60539410 60539394 60539389 -
caatggcattgagttaggttgg

SEQ ID NO: 212691 - DNA, 22 bp, Artificial Sequence
  Synthetic oligonucleotide; TTG chr2 60539378 60539399 60539383 60539378 -
agttaggttggcaagggaagga

SEQ ID NO: 212692 - DNA, 22 bp, Artificial Sequence
  Synthetic oligonucleotide; TTA chr2 60539373 60539394 60539378 60539373 -
ggttggcaagggaaggatttga

SEQ ID NO: 212693 - DNA, 22 bp, Artificial Sequence
  Synthetic oligonucleotide; TTG chr2 60539368 60539389 60539373 60539368 -
gcaagggaaggatttgaggcat

SEQ ID NO: 212694 - DNA, 22 bp, Artificial Sequence
  Synthetic oligonucleotide; TTT chr2 60539353 60539374 60539358 60539353 -
gaggcatggggggtggtgaggt

SEQ ID NO: 212695 - DNA, 22 bp, Artificial Sequence
  Synthetic oligonucleotide; TTG chr2 60539352 60539373 60539357 60539352 -
aggcatggggggtggtgaggtc

SEQ ID NO: 212696 - DNA, 22 bp, Artificial Sequence
  Synthetic oligonucleotide; CTT chr2 60539326 60539347 60539331 60539326 -
ctgatcccagcagggaataggt

SEQ ID NO: 212697 - DNA, 22 bp, Artificial Sequence
  Synthetic oligonucleotide; TTC chr2 60539325 60539346 60539330 60539325 -
tgatcccagcagggaataggtg

SEQ ID NO: 212698 - DNA, 22 bp, Artificial Sequence
  Synthetic oligonucleotide; CTG chr2 60539323 60539344 60539328 60539323 -
atcccagcagggaataggtgag

SEQ ID NO: 212699 - DNA, 22 bp, Artificial Sequence
  Synthetic oligonucleotide; CTT chr2 60539298 60539319 60539303 60539298 -
catttgcctttacaataggcgc

SEQ ID NO: 212700 - DNA, 22 bp, Artificial Sequence
  Synthetic oligonucleotide; TTC chr2 60539297 60539318 60539302 60539297 -
atttgcctttacaataggcgca

SEQ ID NO: 212701 - DNA, 22 bp, Artificial Sequence
  Synthetic oligonucleotide; TTT chr2 60539293 60539314 60539298 60539293 -
gcctttacaataggcgcacagt

SEQ ID NO: 212702 - DNA, 22 bp, Artificial Sequence
  Synthetic oligonucleotide; TTG chr2 60539292 60539313 60539297 60539292 -
cctttacaataggcgcacagtt

SEQ ID NO: 212703 - DNA, 22 bp, Artificial Sequence
  Synthetic oligonucleotide; CTT chr2 60539288 60539309 60539293 60539288 -
tacaataggcgcacagttactg

SEQ ID NO: 212704 - DNA, 22 bp, Artificial Sequence
  Synthetic oligonucleotide; TTT chr2 60539287 60539308 60539292 60539287 -
acaataggcgcacagttactgc

SEQ ID NO: 212705 - DNA, 22 bp, Artificial Sequence
  Synthetic oligonucleotide; TTA chr2 60539286 60539307 60539291 60539286 -
caataggcgcacagttactgca

SEQ ID NO: 212706 - DNA, 22 bp, Artificial Sequence
  Synthetic oligonucleotide; TTA chr2 60539269 60539290 60539274 60539269 -
ctgcaccttggaggagctctca

SEQ ID NO: 212707 - DNA, 22 bp, Artificial Sequence
  Synthetic oligonucleotide; CTG chr2 60539266 60539287 60539271 60539266 -
caccttggaggagctctcaggt

SEQ ID NO: 212708 - DNA, 22 bp, Artificial Sequence
  Synthetic oligonucleotide; CTT chr2 60539260 60539281 60539265 60539260 -
ggaggagctctcaggtgccgct

SEQ ID NO: 212709 - DNA, 22 bp, Artificial Sequence
  Synthetic oligonucleotide; TTG chr2 60539259 60539280 60539264 60539259 -
gaggagctctcaggtgccgctc

SEQ ID NO: 212710 - DNA, 22 bp, Artificial Sequence
  Synthetic oligonucleotide; CTC chr2 60539250 60539271 60539255 60539250 -
tcaggtgccgctcagatgggcg

SEQ ID NO: 212711 - DNA, 22 bp, Artificial Sequence
  Synthetic oligonucleotide; CTC chr2 60539248 60539269 60539253 60539248 -
aggtgccgctcagatgggcgca

SEQ ID NO: 212712 - DNA, 22 bp, Artificial Sequence
  Synthetic oligonucleotide; CTC chr2 60539237 60539258 60539242 60539237 -
agatgggcgcatgtaaatgccc

SEQ ID NO: 212713 - DNA, 22 bp, Artificial Sequence
  Synthetic oligonucleotide; CTG chr2 60539213 60539234 60539218 60539213 -
tcagatgcggagctggaatatt

SEQ ID NO: 212714 - DNA, 22 bp, Artificial Sequence
  Synthetic oligonucleotide; CTG chr2 60539198 60539219 60539203 60539198 -
gaatattaatgcttcttccacc

SEQ ID NO: 212715 - DNA, 22 bp, Artificial Sequence
  Synthetic oligonucleotide; TTA chr2 60539190 60539211 60539195 60539190 -
atgcttcttccaccaccacacc

SEQ ID NO: 212716 - DNA, 22 bp, Artificial Sequence
  Synthetic oligonucleotide; CTT chr2 60539184 60539205 60539189 60539184 -
cttccaccaccacaccataata

SEQ ID NO: 212717 - DNA, 22 bp, Artificial Sequence
  Synthetic oligonucleotide; TTC chr2 60539183 60539204 60539188 60539183 -
ttccaccaccacaccataataa

SEQ ID NO: 212718 - DNA, 22 bp, Artificial Sequence
  Synthetic oligonucleotide; CTT chr2 60539181 60539202 60539186 60539181 -
ccaccaccacaccataataaag

SEQ ID NO: 212719 - DNA, 22 bp, Artificial Sequence
  Synthetic oligonucleotide; TTC chr2 60539180 60539201 60539185 60539180 -
caccaccacaccataataaagc

SEQ ID NO: 212720 - DNA, 22 bp, Artificial Sequence
  Synthetic oligonucleotide; CTG chr2 60539156 60539177 60539161 60539156 -
tacacagcaagcttaatatgca

SEQ ID NO: 212721 - DNA, 22 bp, Artificial Sequence
  Synthetic oligonucleotide; CTT chr2 60539142 60539163 60539147 60539142 -
aatatgcagctagtctggggaa

SEQ ID NO: 212722 - DNA, 22 bp, Artificial Sequence
  Synthetic oligonucleotide; TTA chr2 60539141 60539162 60539146 60539141 -
atatgcagctagtctggggaat

SEQ ID NO: 212723 - DNA, 22 bp, Artificial Sequence
  Synthetic oligonucleotide; CTA chr2 60539130 60539151 60539135 60539130 -
gtctggggaattgtataaactt

SEQ ID NO: 212724 - DNA, 22 bp, Artificial Sequence
  Synthetic oligonucleotide; CTG chr2 60539125 60539146 60539130 60539125 -
gggaattgtataaacttagata

SEQ ID NO: 212725 - DNA, 22 bp, Artificial Sequence
  Synthetic oligonucleotide; TTG chr2 60539117 60539138 60539122 60539117 -
tataaacttagatagcccagtg

SEQ ID NO: 212726 - DNA, 22 bp, Artificial Sequence
  Synthetic oligonucleotide; CTT chr2 60539108 60539129 60539113 60539108 -
agatagcccagtgtgaaagaca

SEQ ID NO: 212727 - DNA, 22 bp, Artificial Sequence
  Synthetic oligonucleotide; TTA chr2 60539107 60539128 60539112 60539107 -
gatagcccagtgtgaaagacag

SEQ ID NO: 212728 - DNA, 22 bp, Artificial Sequence
  Synthetic oligonucleotide; CTC chr2 60539069 60539090 60539074 60539069 -
gatatgccacagtttccattct

SEQ ID NO: 212729 - DNA, 22 bp, Artificial Sequence
  Synthetic oligonucleotide; TTT chr2 60539054 60539075 60539059 60539054 -
ccattcttgttctcctttgatc

SEQ ID NO: 212730 - DNA, 22 bp, Artificial Sequence
  Synthetic oligonucleotide; TTC chr2 60539053 60539074 60539058 60539053 -
cattcttgttctcctttgatct

SEQ ID NO: 212731 - DNA, 22 bp, Artificial Sequence
  Synthetic oligonucleotide; TTC chr2 60539048 60539069 60539053 60539048 -
ttgttctcctttgatctatagc

SEQ ID NO: 212732 - DNA, 22 bp, Artificial Sequence
  Synthetic oligonucleotide; CTT chr2 60539046 60539067 60539051 60539046 -
gttctcctttgatctatagcga

SEQ ID NO: 212733 - DNA, 22 bp, Artificial Sequence
  Synthetic oligonucleotide; TTG chr2 60539045 60539066 60539050 60539045 -
ttctcctttgatctatagcgaa

SEQ ID NO: 212734 - DNA, 22 bp, Artificial Sequence
  Synthetic oligonucleotide; TTC chr2 60539042 60539063 60539047 60539042 -
tcctttgatctatagcgaaatg

SEQ ID NO: 212735 - DNA, 22 bp, Artificial Sequence
  Synthetic oligonucleotide; CTC chr2 60539040 60539061 60539045 60539040 -
ctttgatctatagcgaaatgaa

SEQ ID NO: 212736 - DNA, 22 bp, Artificial Sequence
  Synthetic oligonucleotide; CTT chr2 60539037 60539058 60539042 60539037 -
tgatctatagcgaaatgaaaac

SEQ ID NO: 212737 - DNA, 22 bp, Artificial Sequence
  Synthetic oligonucleotide; TTT chr2 60539036 60539057 60539041 60539036 -
gatctatagcgaaatgaaaaca

SEQ ID NO: 212738 - DNA, 22 bp, Artificial Sequence
  Synthetic oligonucleotide; TTG chr2 60539035 60539056 60539040 60539035 -
atctatagcgaaatgaaaacat

SEQ ID NO: 212739 - DNA, 22 bp, Artificial Sequence
  Synthetic oligonucleotide; CTA chr2 60539030 60539051 60539035 60539030 -
tagcgaaatgaaaacatcatcc

SEQ ID NO: 212740 - DNA, 22 bp, Artificial Sequence
  Synthetic oligonucleotide; CTT chr2 60539006 60539027 60539011 60539006 -
ttcttctcttggagttgtctcc

SEQ ID NO: 212741 - DNA, 22 bp, Artificial Sequence
  Synthetic oligonucleotide; TTT chr2 60539005 60539026 60539010 60539005 -
tcttctcttggagttgtctccc

SEQ ID NO: 212742 - DNA, 22 bp, Artificial Sequence
  Synthetic oligonucleotide; TTT chr2 60539004 60539025 60539009 60539004 -
cttctcttggagttgtctcccc

SEQ ID NO: 212743 - DNA, 22 bp, Artificial Sequence
  Synthetic oligonucleotide; TTC chr2 60539003 60539024 60539008 60539003 -
ttctcttggagttgtctcccca

SEQ ID NO: 212744 - DNA, 22 bp, Artificial Sequence
  Synthetic oligonucleotide; CTT chr2 60539001 60539022 60539006 60539001 -
ctcttggagttgtctccccaac

SEQ ID NO: 212745 - DNA, 22 bp, Artificial Sequence
  Synthetic oligonucleotide; TTC chr2 60539000 60539021 60539005 60539000 -
tcttggagttgtctccccaact

SEQ ID NO: 212746 - DNA, 22 bp, Artificial Sequence
  Synthetic oligonucleotide; CTC chr2 60538998 60539019 60539003 60538998 -
ttggagttgtctccccaactct

SEQ ID NO: 212747 - DNA, 22 bp, Artificial Sequence
  Synthetic oligonucleotide; CTT chr2 60538996 60539017 60539001 60538996 -
ggagttgtctccccaactctgc

SEQ ID NO: 212748 - DNA, 22 bp, Artificial Sequence
  Synthetic oligonucleotide; TTG chr2 60538995 60539016 60539000 60538995 -
gagttgtctccccaactctgcc

SEQ ID NO: 212749 - DNA, 22 bp, Artificial Sequence
  Synthetic oligonucleotide; TTG chr2 60538989 60539010 60538994 60538989 -
tctccccaactctgccacctcc

SEQ ID NO: 212750 - DNA, 22 bp, Artificial Sequence
  Synthetic oligonucleotide; CTC chr2 60538985 60539006 60538990 60538985 -
cccaactctgccacctcccaat

SEQ ID NO: 212751 - DNA, 22 bp, Artificial Sequence
  Synthetic oligonucleotide; CTC chr2 60538977 60538998 60538982 60538977 -
tgccacctcccaattcaccacc

SEQ ID NO: 212752 - DNA, 22 bp, Artificial Sequence
  Synthetic oligonucleotide; CTG chr2 60538975 60538996 60538980 60538975 -
ccacctcccaattcaccaccag

SEQ ID NO: 212753 - DNA, 22 bp, Artificial Sequence
  Synthetic oligonucleotide; CTC chr2 60538968 60538989 60538973 60538968 -
ccaattcaccaccagaattttt

SEQ ID NO: 212754 - DNA, 22 bp, Artificial Sequence
  Synthetic oligonucleotide; TTC chr2 60538961 60538982 60538966 60538961 -
accaccagaatttttttgcatg

SEQ ID NO: 212755 - DNA, 22 bp, Artificial Sequence
  Synthetic oligonucleotide; TTT chr2 60538948 60538969 60538953 60538948 -
ttttgcatgtgctggtatggag

SEQ ID NO: 212756 - DNA, 22 bp, Artificial Sequence
  Synthetic oligonucleotide; TTT chr2 60538947 60538968 60538952 60538947 -
tttgcatgtgctggtatggaga

SEQ ID NO: 212757 - DNA, 22 bp, Artificial Sequence
  Synthetic oligonucleotide; TTT chr2 60538946 60538967 60538951 60538946 -
ttgcatgtgctggtatggagaa

SEQ ID NO: 212758 - DNA, 22 bp, Artificial Sequence
  Synthetic oligonucleotide; TTT chr2 60538945 60538966 60538950 60538945 -
tgcatgtgctggtatggagaaa

SEQ ID NO: 212759 - DNA, 22 bp, Artificial Sequence
  Synthetic oligonucleotide; TTT chr2 60538944 60538965 60538949 60538944 -
gcatgtgctggtatggagaaat

SEQ ID NO: 212760 - DNA, 22 bp, Artificial Sequence
  Synthetic oligonucleotide; TTG chr2 60538943 60538964 60538948 60538943 -
catgtgctggtatggagaaatg

SEQ ID NO: 212761 - DNA, 22 bp, Artificial Sequence
  Synthetic oligonucleotide; CTG chr2 60538934 60538955 60538939 60538934 -
gtatggagaaatgcaacataat

SEQ ID NO: 212762 - DNA, 22 bp, Artificial Sequence
  Synthetic oligonucleotide; TTT chr2 60538910 60538931 60538915 60538910 -
gtttcatatggttaattacagg

SEQ ID NO: 212763 - DNA, 22 bp, Artificial Sequence
  Synthetic oligonucleotide; TTG chr2 60538909 60538930 60538914 60538909 -
tttcatatggttaattacaggc

SEQ ID NO: 212764 - DNA, 22 bp, Artificial Sequence
  Synthetic oligonucleotide; TTT chr2 60538906 60538927 60538911 60538906 -
catatggttaattacaggcgtt

SEQ ID NO: 212765 - DNA, 22 bp, Artificial Sequence
  Synthetic oligonucleotide; TTC chr2 60538905 60538926 60538910 60538905 -
atatggttaattacaggcgttt

SEQ ID NO: 212766 - DNA, 22 bp, Artificial Sequence
  Synthetic oligonucleotide; TTA chr2 60538896 60538917 60538901 60538896 -
attacaggcgtttgaatattta

SEQ ID NO: 212767 - DNA, 22 bp, Artificial Sequence
  Synthetic oligonucleotide; TTA chr2 60538892 60538913 60538897 60538892 -
caggcgtttgaatatttaaaat

SEQ ID NO: 212768 - DNA, 22 bp, Artificial Sequence
  Synthetic oligonucleotide; TTT chr2 60538883 60538904 60538888 60538883 -
gaatatttaaaattttaaatag

SEQ ID NO: 212769 - DNA, 22 bp, Artificial Sequence
  Synthetic oligonucleotide; TTG chr2 60538882 60538903 60538887 60538882 -
aatatttaaaattttaaatagc

SEQ ID NO: 212770 - DNA, 22 bp, Artificial Sequence
  Synthetic oligonucleotide; TTT chr2 60538875 60538896 60538880 60538875 -
aaaattttaaatagccacagtt

SEQ ID NO: 212771 - DNA, 22 bp, Artificial Sequence
  Synthetic oligonucleotide; TTA chr2 60538874 60538895 60538879 60538874 -
aaattttaaatagccacagttc

SEQ ID NO: 212772 - DNA, 22 bp, Artificial Sequence
  Synthetic oligonucleotide; TTT chr2 60538868 60538889 60538873 60538868 -
taaatagccacagttccagctt

SEQ ID NO: 212773 - DNA, 22 bp, Artificial Sequence
  Synthetic oligonucleotide; TTT chr2 60538867 60538888 60538872 60538867 -
aaatagccacagttccagcttt

SEQ ID NO: 212774 - DNA, 22 bp, Artificial Sequence
  Synthetic oligonucleotide; TTA chr2 60538866 60538887 60538871 60538866 -
aatagccacagttccagctttt

SEQ ID NO: 212775 - DNA, 22 bp, Artificial Sequence
  Synthetic oligonucleotide; TTC chr2 60538852 60538873 60538857 60538852 -
cagcttttcccgttaaaagtat

SEQ ID NO: 212776 - DNA, 22 bp, Artificial Sequence
  Synthetic oligonucleotide; CTT chr2 60538846 60538867 60538851 60538846 -
ttcccgttaaaagtatgtgatt

SEQ ID NO: 212777 - DNA, 22 bp, Artificial Sequence
  Synthetic oligonucleotide; TTT chr2 60538845 60538866 60538850 60538845 -
tcccgttaaaagtatgtgattt

SEQ ID NO: 212778 - DNA, 22 bp, Artificial Sequence
  Synthetic oligonucleotide; TTT chr2 60538844 60538865 60538849 60538844 -
cccgttaaaagtatgtgatttg

SEQ ID NO: 212779 - DNA, 22 bp, Artificial Sequence
  Synthetic oligonucleotide; TTC chr2 60538843 60538864 60538848 60538843 -
ccgttaaaagtatgtgatttga

SEQ ID NO: 212780 - DNA, 22 bp, Artificial Sequence
  Synthetic oligonucleotide; TTA chr2 60538837 60538858 60538842 60538837 -
aaagtatgtgatttgaacaaag

SEQ ID NO: 212781 - DNA, 22 bp, Artificial Sequence
  Synthetic oligonucleotide; TTT chr2 60538823 60538844 60538828 60538823 -
gaacaaagggagtacagtgtaa

SEQ ID NO: 212782 - DNA, 22 bp, Artificial Sequence
  Synthetic oligonucleotide; TTG chr2 60538822 60538843 60538827 60538822 -
aacaaagggagtacagtgtaaa

SEQ ID NO: 212783 - DNA, 22 bp, Artificial Sequence
  Synthetic oligonucleotide; TTT chr2 60538795 60538816 60538800 60538795 -
gtggtgatttgcaacacccctc

SEQ ID NO: 212784 - DNA, 22 bp, Artificial Sequence
  Synthetic oligonucleotide; TTG chr2 60538794 60538815 60538799 60538794 -
tggtgatttgcaacacccctct

SEQ ID NO: 212785 - DNA, 22 bp, Artificial Sequence
  Synthetic oligonucleotide; TTT chr2 60538785 60538806 60538790 60538785 -
gcaacacccctctttccccatt

SEQ ID NO: 212786 - DNA, 22 bp, Artificial Sequence
  Synthetic oligonucleotide; TTG chr2 60538784 60538805 60538789 60538784 -
caacacccctctttccccatta

SEQ ID NO: 212787 - DNA, 22 bp, Artificial Sequence
  Synthetic oligonucleotide; CTC chr2 60538773 60538794 60538778 60538773 -
tttccccattacacacacacac

SEQ ID NO: 212788 - DNA, 22 bp, Artificial Sequence
  Synthetic oligonucleotide; CTT chr2 60538771 60538792 60538776 60538771 -
tccccattacacacacacacac

SEQ ID NO: 212789 - DNA, 22 bp, Artificial Sequence
  Synthetic oligonucleotide; TTT chr2 60538770 60538791 60538775 60538770 -
ccccattacacacacacacaca

SEQ ID NO: 212790 - DNA, 22 bp, Artificial Sequence
  Synthetic oligonucleotide; TTC chr2 60538769 60538790 60538774 60538769 -
cccattacacacacacacacac

SEQ ID NO: 212791 - DNA, 22 bp, Artificial Sequence
  Synthetic oligonucleotide; TTA chr2 60538762 60538783 60538767 60538762 -
cacacacacacacacacacaca

SEQ ID NO: 212792 - DNA, 22 bp, Artificial Sequence
  Synthetic oligonucleotide; TTC chr2 60538693 60538714 60538698 60538693 -
agtttaaatctagtactgatct

SEQ ID NO: 212793 - DNA, 22 bp, Artificial Sequence
  Synthetic oligonucleotide; TTT chr2 60538688 60538709 60538693 60538688 -
aaatctagtactgatctaaagg

SEQ ID NO: 212794 - DNA, 22 bp, Artificial Sequence
  Synthetic oligonucleotide; TTA chr2 60538687 60538708 60538692 60538687 -
aatctagtactgatctaaagga

SEQ ID NO: 212795 - DNA, 22 bp, Artificial Sequence
  Synthetic oligonucleotide; CTA chr2 60538681 60538702 60538686 60538681 -
gtactgatctaaaggacttctg

SEQ ID NO: 212796 - DNA, 22 bp, Artificial Sequence
  Synthetic oligonucleotide; CTG chr2 60538675 60538696 60538680 60538675 -
atctaaaggacttctgtacctt

SEQ ID NO: 212797 - DNA, 22 bp, Artificial Sequence
  Synthetic oligonucleotide; CTA chr2 60538670 60538691 60538675 60538670 -
aaggacttctgtaccttcattt

SEQ ID NO: 212798 - DNA, 22 bp, Artificial Sequence
  Synthetic oligonucleotide; CTT chr2 60538662 60538683 60538667 60538662 -
ctgtaccttcatttgtactttt

SEQ ID NO: 212799 - DNA, 22 bp, Artificial Sequence
  Synthetic oligonucleotide; TTC chr2 60538661 60538682 60538666 60538661 -
tgtaccttcatttgtacttttt

SEQ ID NO: 212800 - DNA, 22 bp, Artificial Sequence
  Synthetic oligonucleotide; CTG chr2 60538659 60538680 60538664 60538659 -
taccttcatttgtacttttttt

SEQ ID NO: 212801 - DNA, 22 bp, Artificial Sequence
  Synthetic oligonucleotide; CTT chr2 60538653 60538674 60538658 60538653 -
catttgtactttttttaaaaaa

SEQ ID NO: 212802 - DNA, 22 bp, Artificial Sequence
  Synthetic oligonucleotide; TTC chr2 60538652 60538673 60538657 60538652 -
atttgtactttttttaaaaaac

SEQ ID NO: 212803 - DNA, 22 bp, Artificial Sequence
  Synthetic oligonucleotide; TTT chr2 60538648 60538669 60538653 60538648 -
gtactttttttaaaaaacaact

SEQ ID NO: 212804 - DNA, 22 bp, Artificial Sequence
  Synthetic oligonucleotide; TTG chr2 60538647 60538668 60538652 60538647 -
tactttttttaaaaaacaactt

SEQ ID NO: 212805 - DNA, 22 bp, Artificial Sequence
  Synthetic oligonucleotide; CTT chr2 60538642 60538663 60538647 60538642 -
tttttaaaaaacaactttcaac

SEQ ID NO: 212806 - DNA, 22 bp, Artificial Sequence
  Synthetic oligonucleotide; TTT chr2 60538641 60538662 60538646 60538641 -
ttttaaaaaacaactttcaact

SEQ ID NO: 212807 - DNA, 22 bp, Artificial Sequence
  Synthetic oligonucleotide; TTT chr2 60538640 60538661 60538645 60538640 -
tttaaaaaacaactttcaactg

SEQ ID NO: 212808 - DNA, 22 bp, Artificial Sequence
  Synthetic oligonucleotide; TTT chr2 60538639 60538660 60538644 60538639 -
ttaaaaaacaactttcaactgg

SEQ ID NO: 212809 - DNA, 22 bp, Artificial Sequence
  Synthetic oligonucleotide; TTT chr2 60538638 60538659 60538643 60538638 -
taaaaaacaactttcaactgga

SEQ ID NO: 212810 - DNA, 22 bp, Artificial Sequence
  Synthetic oligonucleotide; TTT chr2 60538637 60538658 60538642 60538637 -
aaaaaacaactttcaactggaa

SEQ ID NO: 212811 - DNA, 22 bp, Artificial Sequence
  Synthetic oligonucleotide; TTA chr2 60538636 60538657 60538641 60538636 -
aaaaacaactttcaactggaat

SEQ ID NO: 212812 - DNA, 22 bp, Artificial Sequence
  Synthetic oligonucleotide; CTT chr2 60538625 60538646 60538630 60538625 -
tcaactggaattccattaaaat

SEQ ID NO: 212813 - DNA, 22 bp, Artificial Sequence
  Synthetic oligonucleotide; TTT chr2 60538624 60538645 60538629 60538624 -
caactggaattccattaaaata

SEQ ID NO: 212814 - DNA, 22 bp, Artificial Sequence
  Synthetic oligonucleotide; TTC chr2 60538623 60538644 60538628 60538623 -
aactggaattccattaaaatat

SEQ ID NO: 212815 - DNA, 22 bp, Artificial Sequence
  Synthetic oligonucleotide; CTG chr2 60538618 60538639 60538623 60538618 -
gaattccattaaaatatttcac

SEQ ID NO: 212816 - DNA, 22 bp, Artificial Sequence
  Synthetic oligonucleotide; TTC chr2 60538612 60538633 60538617 60538612 -
cattaaaatatttcaccattat

SEQ ID NO: 212817 - DNA, 22 bp, Artificial Sequence
  Synthetic oligonucleotide; TTA chr2 60538607 60538628 60538612 60538607 -
aaatatttcaccattatatttt

SEQ ID NO: 212818 - DNA, 22 bp, Artificial Sequence
  Synthetic oligonucleotide; TTT chr2 60538599 60538620 60538604 60538599 -
caccattatatttttgagtcca

SEQ ID NO: 212819 - DNA, 22 bp, Artificial Sequence
  Synthetic oligonucleotide; TTC chr2 60538598 60538619 60538603 60538598 -
accattatatttttgagtccac

SEQ ID NO: 212820 - DNA, 22 bp, Artificial Sequence
  Synthetic oligonucleotide; TTA chr2 60538591 60538612 60538596 60538591 -
tatttttgagtccacattgctt

SEQ ID NO: 212821 - DNA, 22 bp, Artificial Sequence
  Synthetic oligonucleotide; TTT chr2 60538586 60538607 60538591 60538586 -
ttgagtccacattgcttgaggt

SEQ ID NO: 212822 - DNA, 22 bp, Artificial Sequence
  Synthetic oligonucleotide; TTT chr2 60538585 60538606 60538590 60538585 -
tgagtccacattgcttgaggtt

SEQ ID NO: 212823 - DNA, 22 bp, Artificial Sequence
  Synthetic oligonucleotide; TTT chr2 60538584 60538605 60538589 60538584 -
gagtccacattgcttgaggttt

SEQ ID NO: 212824 - DNA, 22 bp, Artificial Sequence
  Synthetic oligonucleotide; TTG chr2 60538583 60538604 60538588 60538583 -
agtccacattgcttgaggtttt

SEQ ID NO: 212825 - DNA, 22 bp, Artificial Sequence
  Synthetic oligonucleotide; TTG chr2 60538572 60538593 60538577 60538572 -
cttgaggttttaaagaagattt

SEQ ID NO: 212826 - DNA, 22 bp, Artificial Sequence
  Synthetic oligonucleotide; CTT chr2 60538569 60538590 60538574 60538569 -
gaggttttaaagaagattttta

SEQ ID NO: 212827 - DNA, 22 bp, Artificial Sequence
  Synthetic oligonucleotide; TTG chr2 60538568 60538589 60538573 60538568 -
aggttttaaagaagatttttat

SEQ ID NO: 212828 - DNA, 22 bp, Artificial Sequence
  Synthetic oligonucleotide; TTT chr2 60538562 60538583 60538567 60538562 -
taaagaagatttttataatgtg

SEQ ID NO: 212829 - DNA, 22 bp, Artificial Sequence
  Synthetic oligonucleotide; TTT chr2 60538561 60538582 60538566 60538561 -
aaagaagatttttataatgtgt

SEQ ID NO: 212830 - DNA, 22 bp, Artificial Sequence
  Synthetic oligonucleotide; TTA chr2 60538560 60538581 60538565 60538560 -
aagaagatttttataatgtgtt

SEQ ID NO: 212831 - DNA, 22 bp, Artificial Sequence
  Synthetic oligonucleotide; TTT chr2 60538550 60538571 60538555 60538550 -
ttataatgtgttcctttaacag

SEQ ID NO: 212832 - DNA, 22 bp, Artificial Sequence
  Synthetic oligonucleotide; TTT chr2 60538549 60538570 60538554 60538549 -
tataatgtgttcctttaacaga

SEQ ID NO: 212833 - DNA, 22 bp, Artificial Sequence
  Synthetic oligonucleotide; TTT chr2 60538548 60538569 60538553 60538548 -
ataatgtgttcctttaacagaa

SEQ ID NO: 212834 - DNA, 22 bp, Artificial Sequence
  Synthetic oligonucleotide; TTA chr2 60538547 60538568 60538552 60538547 -
taatgtgttcctttaacagaat

SEQ ID NO: 212835 - DNA, 22 bp, Artificial Sequence
  Synthetic oligonucleotide; TTC chr2 60538537 60538558 60538542 60538537 -
ctttaacagaatcaacagctgt

SEQ ID NO: 212836 - DNA, 22 bp, Artificial Sequence
  Synthetic oligonucleotide; CTT chr2 60538534 60538555 60538539 60538534 -
taacagaatcaacagctgtcag

SEQ ID NO: 212837 - DNA, 22 bp, Artificial Sequence
  Synthetic oligonucleotide; TTT chr2 60538533 60538554 60538538 60538533 -
aacagaatcaacagctgtcaga

SEQ ID NO: 212838 - DNA, 22 bp, Artificial Sequence
  Synthetic oligonucleotide; TTA chr2 60538532 60538553 60538537 60538532 -
acagaatcaacagctgtcagaa

SEQ ID NO: 212839 - DNA, 22 bp, Artificial Sequence
  Synthetic oligonucleotide; CTG chr2 60538516 60538537 60538521 60538516 -
tcagaagcagttgtggtagatc

SEQ ID NO: 212840 - DNA, 22 bp, Artificial Sequence
  Synthetic oligonucleotide; TTG chr2 60538503 60538524 60538508 60538503 -
tggtagatccacaaaacgtata

SEQ ID NO: 212841 - DNA, 22 bp, Artificial Sequence
  Synthetic oligonucleotide; TTT chr2 60538464 60538485 60538469 60538464 -
cctgaaacaaaacacttggaaa

SEQ ID NO: 212842 - DNA, 22 bp, Artificial Sequence
  Synthetic oligonucleotide; TTC chr2 60538463 60538484 60538468 60538463 -
ctgaaacaaaacacttggaaaa

SEQ ID NO: 212843 - DNA, 22 bp, Artificial Sequence
  Synthetic oligonucleotide; CTG chr2 60538460 60538481 60538465 60538460 -
aaacaaaacacttggaaaaata

SEQ ID NO: 212844 - DNA, 22 bp, Artificial Sequence
  Synthetic oligonucleotide; CTT chr2 60538447 60538468 60538452 60538447 -
ggaaaaataagctgctaagaac

SEQ ID NO: 212845 - DNA, 22 bp, Artificial Sequence
  Synthetic oligonucleotide; TTG chr2 60538446 60538467 60538451 60538446 -
gaaaaataagctgctaagaact

SEQ ID NO: 212846 - DNA, 22 bp, Artificial Sequence
  Synthetic oligonucleotide; CTG chr2 60538433 60538454 60538438 60538433 -
ctaagaactggcgaattagaag

SEQ ID NO: 212847 - DNA, 22 bp, Artificial Sequence
  Synthetic oligonucleotide; CTA chr2 60538430 60538451 60538435 60538430 -
agaactggcgaattagaagttt

SEQ ID NO: 212848 - DNA, 22 bp, Artificial Sequence
  Synthetic oligonucleotide; CTG chr2 60538423 60538444 60538428 60538423 -
gcgaattagaagtttgcagaca

SEQ ID NO: 212849 - DNA, 22 bp, Artificial Sequence
  Synthetic oligonucleotide; TTA chr2 60538415 60538436 60538420 60538415 -
gaagtttgcagacagggaactg

SEQ ID NO: 212850 - DNA, 22 bp, Artificial Sequence
  Synthetic oligonucleotide; TTT chr2 60538408 60538429 60538413 60538408 -
gcagacagggaactgaagtgtc

SEQ ID NO: 212851 - DNA, 22 bp, Artificial Sequence
  Synthetic oligonucleotide; TTG chr2 60538407 60538428 60538412 60538407 -
cagacagggaactgaagtgtca

SEQ ID NO: 212852 - DNA, 22 bp, Artificial Sequence
  Synthetic oligonucleotide; CTG chr2 60538393 60538414 60538398 60538393 -
aagtgtcatctcttggttcacc

SEQ ID NO: 212853 - DNA, 22 bp, Artificial Sequence
  Synthetic oligonucleotide; CTC chr2 60538381 60538402 60538386 60538381 -
ttggttcaccctggagactgat

SEQ ID NO: 212854 - DNA, 22 bp, Artificial Sequence
  Synthetic oligonucleotide; CTT chr2 60538379 60538400 60538384 60538379 -
ggttcaccctggagactgatgt

SEQ ID NO: 212855 - DNA, 22 bp, Artificial Sequence
  Synthetic oligonucleotide; TTG chr2 60538378 60538399 60538383 60538378 -
gttcaccctggagactgatgtg

SEQ ID NO: 212856 - DNA, 22 bp, Artificial Sequence
  Synthetic oligonucleotide; TTC chr2 60538374 60538395 60538379 60538374 -
accctggagactgatgtgagtg

SEQ ID NO: 212857 - DNA, 22 bp, Artificial Sequence
  Synthetic oligonucleotide; CTG chr2 60538368 60538389 60538373 60538368 -
gagactgatgtgagtggatctg

SEQ ID NO: 212858 - DNA, 22 bp, Artificial Sequence
  Synthetic oligonucleotide; CTG chr2 60538361 60538382 60538366 60538361 -
atgtgagtggatctgatgcaat

SEQ ID NO: 212859 - DNA, 22 bp, Artificial Sequence
  Synthetic oligonucleotide; CTG chr2 60538346 60538367 60538351 60538346 -
atgcaatgctgctggaagattt

SEQ ID NO: 212860 - DNA, 22 bp, Artificial Sequence
  Synthetic oligonucleotide; CTG chr2 60538335 60538356 60538340 60538335 -
ctggaagatttacctgcacagg

SEQ ID NO: 212861 - DNA, 22 bp, Artificial Sequence
  Synthetic oligonucleotide; CTG chr2 60538332 60538353 60538337 60538332 -
gaagatttacctgcacaggttg

SEQ ID NO: 212862 - DNA, 22 bp, Artificial Sequence
  Synthetic oligonucleotide; TTT chr2 60538324 60538345 60538329 60538324 -
acctgcacaggttgctcctcta

SEQ ID NO: 212863 - DNA, 22 bp, Artificial Sequence
  Synthetic oligonucleotide; TTA chr2 60538323 60538344 60538328 60538323 -
cctgcacaggttgctcctctaa

SEQ ID NO: 212864 - DNA, 22 bp, Artificial Sequence
  Synthetic oligonucleotide; CTG chr2 60538319 60538340 60538324 60538319 -
cacaggttgctcctctaaggca

SEQ ID NO: 212865 - DNA, 22 bp, Artificial Sequence
  Synthetic oligonucleotide; TTG chr2 60538310 60538331 60538315 60538310 -
ctcctctaaggcaacgcgcagt

SEQ ID NO: 212866 - DNA, 22 bp, Artificial Sequence
  Synthetic oligonucleotide; CTC chr2 60538307 60538328 60538312 60538307 -
ctctaaggcaacgcgcagtgca

SEQ ID NO: 212867 - DNA, 22 bp, Artificial Sequence
  Synthetic oligonucleotide; CTC chr2 60538304 60538325 60538309 60538304 -
taaggcaacgcgcagtgcacga

SEQ ID NO: 212868 - DNA, 22 bp, Artificial Sequence
  Synthetic oligonucleotide; CTA chr2 60538302 60538323 60538307 60538302 -
aggcaacgcgcagtgcacgatt

SEQ ID NO: 212869 - DNA, 22 bp, Artificial Sequence
  Synthetic oligonucleotide; TTG chr2 60538279 60538300 60538284 60538279 -
acgtatgcaccagagctaggct

SEQ ID NO: 212870 - DNA, 22 bp, Artificial Sequence
  Synthetic oligonucleotide; CTA chr2 60538261 60538282 60538266 60538261 -
ggctgggcctcagctcgctcca

SEQ ID NO: 212871 - DNA, 22 bp, Artificial Sequence
  Synthetic oligonucleotide; CTG chr2 60538256 60538277 60538261 60538256 -
ggcctcagctcgctccatcttt

SEQ ID NO: 212872 - DNA, 22 bp, Artificial Sequence
  Synthetic oligonucleotide; CTC chr2 60538250 60538271 60538255 60538250 -
agctcgctccatcttttgccct

SEQ ID NO: 212873 - DNA, 22 bp, Artificial Sequence
  Synthetic oligonucleotide; CTC chr2 60538245 60538266 60538250 60538245 -
gctccatcttttgccctttttg

SEQ ID NO: 212874 - DNA, 22 bp, Artificial Sequence
  Synthetic oligonucleotide; CTC chr2 60538241 60538262 60538246 60538241 -
catcttttgccctttttgatct

SEQ ID NO: 212875 - DNA, 22 bp, Artificial Sequence
  Synthetic oligonucleotide; CTT chr2 60538235 60538256 60538240 60538235 -
ttgccctttttgatctctttag

SEQ ID NO: 212876 - DNA, 22 bp, Artificial Sequence
  Synthetic oligonucleotide; TTT chr2 60538234 60538255 60538239 60538234 -
tgccctttttgatctctttaga

SEQ ID NO: 212877 - DNA, 22 bp, Artificial Sequence
  Synthetic oligonucleotide; TTT chr2 60538233 60538254 60538238 60538233 -
gccctttttgatctctttagat

SEQ ID NO: 212878 - DNA, 22 bp, Artificial Sequence
  Synthetic oligonucleotide; TTG chr2 60538232 60538253 60538237 60538232 -
ccctttttgatctctttagata

SEQ ID NO: 212879 - DNA, 22 bp, Artificial Sequence
  Synthetic oligonucleotide; CTT chr2 60538227 60538248 60538232 60538227 -
tttgatctctttagatagataa

SEQ ID NO: 212880 - DNA, 22 bp, Artificial Sequence
  Synthetic oligonucleotide; TTT chr2 60538226 60538247 60538231 60538226 -
ttgatctctttagatagataaa

SEQ ID NO: 212881 - DNA, 22 bp, Artificial Sequence
  Synthetic oligonucleotide; TTT chr2 60538225 60538246 60538230 60538225 -
tgatctctttagatagataaaa

SEQ ID NO: 212882 - DNA, 22 bp, Artificial Sequence
  Synthetic oligonucleotide; TTT chr2 60538224 60538245 60538229 60538224 -
gatctctttagatagataaaat

SEQ ID NO: 212883 - DNA, 22 bp, Artificial Sequence
  Synthetic oligonucleotide; TTG chr2 60538223 60538244 60538228 60538223 -
atctctttagatagataaaata

SEQ ID NO: 212884 - DNA, 22 bp, Artificial Sequence
  Synthetic oligonucleotide; CTC chr2 60538218 60538239 60538223 60538218 -
tttagatagataaaataccaag

SEQ ID NO: 212885 - DNA, 22 bp, Artificial Sequence
  Synthetic oligonucleotide; CTT chr2 60538216 60538237 60538221 60538216 -
tagatagataaaataccaagtt

SEQ ID NO: 212886 - DNA, 22 bp, Artificial Sequence
  Synthetic oligonucleotide; TTT chr2 60538215 60538236 60538220 60538215 -
agatagataaaataccaagttc

SEQ ID NO: 212887 - DNA, 22 bp, Artificial Sequence
  Synthetic oligonucleotide; TTA chr2 60538214 60538235 60538219 60538214 -
gatagataaaataccaagttct

SEQ ID NO: 212888 - DNA, 22 bp, Artificial Sequence
  Synthetic oligonucleotide; TTC chr2 60538193 60538214 60538198 60538193 -
tcagagtgctaaacaacaaatt

SEQ ID NO: 212889 - DNA, 22 bp, Artificial Sequence
  Synthetic oligonucleotide; CTC chr2 60538191 60538212 60538196 60538191 -
agagtgctaaacaacaaattat

SEQ ID NO: 212890 - DNA, 22 bp, Artificial Sequence
  Synthetic oligonucleotide; CTA chr2 60538182 60538203 60538187 60538182 -
aacaacaaattatatataccta

SEQ ID NO: 212891 - DNA, 22 bp, Artificial Sequence
  Synthetic oligonucleotide; TTA chr2 60538170 60538191 60538175 60538170 -
tatatacctaaaggtgagatga

SEQ ID NO: 212892 - DNA, 22 bp, Artificial Sequence
  Synthetic oligonucleotide; CTA chr2 60538160 60538181 60538165 60538160 -
aaggtgagatgatcaggtttaa

SEQ ID NO: 212893 - DNA, 22 bp, Artificial Sequence
  Synthetic oligonucleotide; TTT chr2 60538140 60538161 60538145 60538140 -
aaacttcctgtaaaagaggcga

SEQ ID NO: 212894 - DNA, 22 bp, Artificial Sequence
  Synthetic oligonucleotide; TTA chr2 60538139 60538160 60538144 60538139 -
aacttcctgtaaaagaggcgag

SEQ ID NO: 212895 - DNA, 22 bp, Artificial Sequence
  Synthetic oligonucleotide; CTT chr2 60538134 60538155 60538139 60538134 -
cctgtaaaagaggcgagaaggc

SEQ ID NO: 212896 - DNA, 22 bp, Artificial Sequence
  Synthetic oligonucleotide; TTC chr2 60538133 60538154 60538138 60538133 -
ctgtaaaagaggcgagaaggcg

SEQ ID NO: 212897 - DNA, 22 bp, Artificial Sequence
  Synthetic oligonucleotide; CTG chr2 60538130 60538151 60538135 60538130 -
taaaagaggcgagaaggcgcct

SEQ ID NO: 212898 - DNA, 22 bp, Artificial Sequence
  Synthetic oligonucleotide; CTT chr2 60538107 60538128 60538112 60538107 -
gcacacccttttccagataggg

SEQ ID NO: 212899 - DNA, 22 bp, Artificial Sequence
  Synthetic oligonucleotide; TTG chr2 60538106 60538127 60538111 60538106 -
cacacccttttccagatagggc

SEQ ID NO: 212900 - DNA, 22 bp, Artificial Sequence
  Synthetic oligonucleotide; CTT chr2 60538097 60538118 60538102 60538097 -
ttccagatagggctggcagcat

SEQ ID NO: 212901 - DNA, 22 bp, Artificial Sequence
  Synthetic oligonucleotide; TTT chr2 60538096 60538117 60538101 60538096 -
tccagatagggctggcagcatg

SEQ ID NO: 212902 - DNA, 22 bp, Artificial Sequence
  Synthetic oligonucleotide; TTT chr2 60538095 60538116 60538100 60538095 -
ccagatagggctggcagcatgt

SEQ ID NO: 212903 - DNA, 22 bp, Artificial Sequence
  Synthetic oligonucleotide; TTC chr2 60538094 60538115 60538099 60538094 -
cagatagggctggcagcatgtt

SEQ ID NO: 212904 - DNA, 22 bp, Artificial Sequence
  Synthetic oligonucleotide; CTG chr2 60538082 60538103 60538087 60538082 -
gcagcatgttattcagaactga

SEQ ID NO: 212905 - DNA, 22 bp, Artificial Sequence
  Synthetic oligonucleotide; TTA chr2 60538071 60538092 60538076 60538071 -
ttcagaactgaatcagtctctg

SEQ ID NO: 212906 - DNA, 22 bp, Artificial Sequence
  Synthetic oligonucleotide; TTC chr2 60538068 60538089 60538073 60538068 -
agaactgaatcagtctctgcca

SEQ ID NO: 212907 - DNA, 22 bp, Artificial Sequence
  Synthetic oligonucleotide; CTG chr2 60538061 60538082 60538066 60538061 -
aatcagtctctgccagagaatt

SEQ ID NO: 212908 - DNA, 22 bp, Artificial Sequence
  Synthetic oligonucleotide; CTC chr2 60538051 60538072 60538056 60538051 -
tgccagagaattcccagtggga

SEQ ID NO: 212909 - DNA, 22 bp, Artificial Sequence
  Synthetic oligonucleotide; CTG chr2 60538049 60538070 60538054 60538049 -
ccagagaattcccagtgggaac

SEQ ID NO: 212910 - DNA, 22 bp, Artificial Sequence
  Synthetic oligonucleotide; TTC chr2 60538038 60538059 60538043 60538038 -
ccagtgggaacctggagcaggt

SEQ ID NO: 212911 - DNA, 22 bp, Artificial Sequence
  Synthetic oligonucleotide; CTG chr2 60538024 60538045 60538029 60538024 -
gagcaggtatgttgatgaaggg

SEQ ID NO: 212912 - DNA, 22 bp, Artificial Sequence
  Synthetic oligonucleotide; TTG chr2 60538010 60538031 60538015 60538010 -
atgaaggggatacctggggacc

SEQ ID NO: 212913 - DNA, 22 bp, Artificial Sequence
  Synthetic oligonucleotide; CTG chr2 60537994 60538015 60537999 60537994 -
gggacctttggtcactcacaat

SEQ ID NO: 212914 - DNA, 22 bp, Artificial Sequence
  Synthetic oligonucleotide; CTT chr2 60537986 60538007 60537991 60537986 -
tggtcactcacaatgagttttt

SEQ ID NO: 212915 - DNA, 22 bp, Artificial Sequence
  Synthetic oligonucleotide; TTT chr2 60537985 60538006 60537990 60537985 -
ggtcactcacaatgagtttttg

SEQ ID NO: 212916 - DNA, 22 bp, Artificial Sequence
  Synthetic oligonucleotide; TTG chr2 60537984 60538005 60537989 60537984 -
gtcactcacaatgagtttttgt

SEQ ID NO: 212917 - DNA, 22 bp, Artificial Sequence
  Synthetic oligonucleotide; CTC chr2 60537977 60537998 60537982 60537977 -
acaatgagtttttgtttgtatt

SEQ ID NO: 212918 - DNA, 22 bp, Artificial Sequence
  Synthetic oligonucleotide; TTT chr2 60537966 60537987 60537971 60537966 -
ttgtttgtattctcactgttgt

SEQ ID NO: 212919 - DNA, 22 bp, Artificial Sequence
  Synthetic oligonucleotide; TTT chr2 60537965 60537986 60537970 60537965 -
tgtttgtattctcactgttgtt

SEQ ID NO: 212920 - DNA, 22 bp, Artificial Sequence
  Synthetic oligonucleotide; TTT chr2 60537964 60537985 60537969 60537964 -
gtttgtattctcactgttgtta

SEQ ID NO: 212921 - DNA, 22 bp, Artificial Sequence
  Synthetic oligonucleotide; TTG chr2 60537963 60537984 60537968 60537963 -
tttgtattctcactgttgttag

SEQ ID NO: 212922 - DNA, 22 bp, Artificial Sequence
  Synthetic oligonucleotide; TTT chr2 60537960 60537981 60537965 60537960 -
gtattctcactgttgttagcat

SEQ ID NO: 212923 - DNA, 22 bp, Artificial Sequence
  Synthetic oligonucleotide; TTG chr2 60537959 60537980 60537964 60537959 -
tattctcactgttgttagcatt

SEQ ID NO: 212924 - DNA, 22 bp, Artificial Sequence
  Synthetic oligonucleotide; TTC chr2 60537954 60537975 60537959 60537954 -
tcactgttgttagcattgccaa

SEQ ID NO: 212925 - DNA, 22 bp, Artificial Sequence
  Synthetic oligonucleotide; CTC chr2 60537952 60537973 60537957 60537952 -
actgttgttagcattgccaatg

SEQ ID NO: 212926 - DNA, 22 bp, Artificial Sequence
  Synthetic oligonucleotide; CTG chr2 60537948 60537969 60537953 60537948 -
ttgttagcattgccaatgaaca

SEQ ID NO: 212927 - DNA, 22 bp, Artificial Sequence
  Synthetic oligonucleotide; TTG chr2 60537945 60537966 60537950 60537945 -
ttagcattgccaatgaacaatt

SEQ ID NO: 212928 - DNA, 22 bp, Artificial Sequence
  Synthetic oligonucleotide; TTA chr2 60537942 60537963 60537947 60537942 -
gcattgccaatgaacaattgca

SEQ ID NO: 212929 - DNA, 22 bp, Artificial Sequence
  Synthetic oligonucleotide; TTG chr2 60537936 60537957 60537941 60537936 -
ccaatgaacaattgcacctaca

SEQ ID NO: 212930 - DNA, 22 bp, Artificial Sequence
  Synthetic oligonucleotide; TTG chr2 60537922 60537943 60537927 60537922 -
cacctacaatttgattttagtt

SEQ ID NO: 212931 - DNA, 22 bp, Artificial Sequence
  Synthetic oligonucleotide; CTA chr2 60537916 60537937 60537921 60537916 -
caatttgattttagttttagat

SEQ ID NO: 212932 - DNA, 22 bp, Artificial Sequence
  Synthetic oligonucleotide; TTT chr2 60537910 60537931 60537915 60537910 -
gattttagttttagatagaggc

SEQ ID NO: 212933 - DNA, 22 bp, Artificial Sequence
  Synthetic oligonucleotide; TTG chr2 60537909 60537930 60537914 60537909 -
attttagttttagatagaggcg

SEQ ID NO: 212934 - DNA, 22 bp, Artificial Sequence
  Synthetic oligonucleotide; TTT chr2 60537905 60537926 60537910 60537905 -
tagttttagatagaggcgaatc

SEQ ID NO: 212935 - DNA, 22 bp, Artificial Sequence
  Synthetic oligonucleotide; TTT chr2 60537904 60537925 60537909 60537904 -
agttttagatagaggcgaatcc

SEQ ID NO: 212936 - DNA, 22 bp, Artificial Sequence
  Synthetic oligonucleotide; TTA chr2 60537903 60537924 60537908 60537903 -
gttttagatagaggcgaatcca

SEQ ID NO: 212937 - DNA, 22 bp, Artificial Sequence
  Synthetic oligonucleotide; TTT chr2 60537899 60537920 60537904 60537899 -
tagatagaggcgaatccactga

SEQ ID NO: 212938 - DNA, 22 bp, Artificial Sequence
  Synthetic oligonucleotide; TTT chr2 60537898 60537919 60537903 60537898 -
agatagaggcgaatccactgat

SEQ ID NO: 212939 - DNA, 22 bp, Artificial Sequence
  Synthetic oligonucleotide; TTA chr2 60537897 60537918 60537902 60537897 -
gatagaggcgaatccactgatt

SEQ ID NO: 212940 - DNA, 22 bp, Artificial Sequence
  Synthetic oligonucleotide; CTG chr2 60537878 60537899 60537883 60537878 -
attaaaaactcccattaaaata

SEQ ID NO: 212941 - DNA, 22 bp, Artificial Sequence
  Synthetic oligonucleotide; TTA chr2 60537874 60537895 60537879 60537874 -
aaaactcccattaaaataaaga

SEQ ID NO: 212942 - DNA, 22 bp, Artificial Sequence
  Synthetic oligonucleotide; CTC chr2 60537867 60537888 60537872 60537867 -
ccattaaaataaagaatggaat

SEQ ID NO: 212943 - DNA, 22 bp, Artificial Sequence
  Synthetic oligonucleotide; TTA chr2 60537861 60537882 60537866 60537861 -
aaataaagaatggaattattgt

SEQ ID NO: 212944 - DNA, 22 bp, Artificial Sequence
  Synthetic oligonucleotide; TTA chr2 60537843 60537864 60537848 60537843 -
ttgtgaaacctgcaagggtgcc

SEQ ID NO: 212945 - DNA, 22 bp, Artificial Sequence
  Synthetic oligonucleotide; TTG chr2 60537840 60537861 60537845 60537840 -
tgaaacctgcaagggtgccttc

SEQ ID NO: 212946 - DNA, 22 bp, Artificial Sequence
  Synthetic oligonucleotide; CTG chr2 60537831 60537852 60537836 60537831 -
caagggtgccttcaaaaagaaa

SEQ ID NO: 212947 - DNA, 22 bp, Artificial Sequence
  Synthetic oligonucleotide; CTT chr2 60537819 60537840 60537824 60537819 -
caaaaagaaaaccagtgctgtt

SEQ ID NO: 212948 - DNA, 22 bp, Artificial Sequence
  Synthetic oligonucleotide; TTC chr2 60537818 60537839 60537823 60537818 -
aaaaagaaaaccagtgctgttg

SEQ ID NO: 212949 - DNA, 22 bp, Artificial Sequence
  Synthetic oligonucleotide; CTG chr2 60537799 60537820 60537804 60537799 -
ttgtatacctacctcgcctttc

SEQ ID NO: 212950 - DNA, 22 bp, Artificial Sequence
  Synthetic oligonucleotide; TTG chr2 60537796 60537817 60537801 60537796 -
tatacctacctcgcctttctat

SEQ ID NO: 212951 - DNA, 22 bp, Artificial Sequence
  Synthetic oligonucleotide; CTA chr2 60537788 60537809 60537793 60537788 -
cctcgcctttctatttgctttt

SEQ ID NO: 212952 - DNA, 22 bp, Artificial Sequence
  Synthetic oligonucleotide; CTC chr2 60537784 60537805 60537789 60537784 -
gcctttctatttgctttttgaa

SEQ ID NO: 212953 - DNA, 22 bp, Artificial Sequence
  Synthetic oligonucleotide; CTT chr2 60537779 60537800 60537784 60537779 -
tctatttgctttttgaactttc

SEQ ID NO: 212954 - DNA, 22 bp, Artificial Sequence
  Synthetic oligonucleotide; TTT chr2 60537778 60537799 60537783 60537778 -
ctatttgctttttgaactttct

SEQ ID NO: 212955 - DNA, 22 bp, Artificial Sequence
  Synthetic oligonucleotide; TTC chr2 60537777 60537798 60537782 60537777 -
tatttgctttttgaactttcta

SEQ ID NO: 212956 - DNA, 22 bp, Artificial Sequence
  Synthetic oligonucleotide; CTA chr2 60537775 60537796 60537780 60537775 -
tttgctttttgaactttctaaa

SEQ ID NO: 212957 - DNA, 22 bp, Artificial Sequence
  Synthetic oligonucleotide; TTT chr2 60537772 60537793 60537777 60537772 -
gctttttgaactttctaaaaaa

SEQ ID NO: 212958 - DNA, 22 bp, Artificial Sequence
  Synthetic oligonucleotide; TTG chr2 60537771 60537792 60537776 60537771 -
ctttttgaactttctaaaaaac

SEQ ID NO: 212959 - DNA, 22 bp, Artificial Sequence
  Synthetic oligonucleotide; CTT chr2 60537768 60537789 60537773 60537768 -
tttgaactttctaaaaaacaca

SEQ ID NO: 212960 - DNA, 22 bp, Artificial Sequence
  Synthetic oligonucleotide; TTT chr2 60537767 60537788 60537772 60537767 -
ttgaactttctaaaaaacacaa

SEQ ID NO: 212961 - DNA, 22 bp, Artificial Sequence
  Synthetic oligonucleotide; TTT chr2 60537766 60537787 60537771 60537766 -
tgaactttctaaaaaacacaag

SEQ ID NO: 212962 - DNA, 22 bp, Artificial Sequence
  Synthetic oligonucleotide; TTT chr2 60537765 60537786 60537770 60537765 -
gaactttctaaaaaacacaagg

SEQ ID NO: 212963 - DNA, 22 bp, Artificial Sequence
  Synthetic oligonucleotide; TTG chr2 60537764 60537785 60537769 60537764 -
aactttctaaaaaacacaagga

SEQ ID NO: 212964 - DNA, 22 bp, Artificial Sequence
  Synthetic oligonucleotide; CTT chr2 60537759 60537780 60537764 60537759 -
tctaaaaaacacaaggaagctt

SEQ ID NO: 212965 - DNA, 22 bp, Artificial Sequence
  Synthetic oligonucleotide; TTT chr2 60537758 60537779 60537763 60537758 -
ctaaaaaacacaaggaagcttt

SEQ ID NO: 212966 - DNA, 22 bp, Artificial Sequence
  Synthetic oligonucleotide; TTC chr2 60537757 60537778 60537762 60537757 -
taaaaaacacaaggaagctttt

SEQ ID NO: 212967 - DNA, 22 bp, Artificial Sequence
  Synthetic oligonucleotide; CTA chr2 60537755 60537776 60537760 60537755 -
aaaaacacaaggaagctttttg

SEQ ID NO: 212968 - DNA, 22 bp, Artificial Sequence
  Synthetic oligonucleotide; CTT chr2 60537737 60537758 60537742 60537737 -
tttgctaagcatcagggcattt

SEQ ID NO: 212969 - DNA, 22 bp, Artificial Sequence
  Synthetic oligonucleotide; TTT chr2 60537736 60537757 60537741 60537736 -
ttgctaagcatcagggcattta

SEQ ID NO: 212970 - DNA, 22 bp, Artificial Sequence
  Synthetic oligonucleotide; TTT chr2 60537735 60537756 60537740 60537735 -
tgctaagcatcagggcatttaa

SEQ ID NO: 212971 - DNA, 22 bp, Artificial Sequence
  Synthetic oligonucleotide; TTT chr2 60537734 60537755 60537739 60537734 -
gctaagcatcagggcatttaaa

SEQ ID NO: 212972 - DNA, 22 bp, Artificial Sequence
  Synthetic oligonucleotide; TTG chr2 60537733 60537754 60537738 60537733 -
ctaagcatcagggcatttaaat

SEQ ID NO: 212973 - DNA, 22 bp, Artificial Sequence
  Synthetic oligonucleotide; CTA chr2 60537730 60537751 60537735 60537730 -
agcatcagggcatttaaattta

SEQ ID NO: 212974 - DNA, 22 bp, Artificial Sequence
  Synthetic oligonucleotide; TTT chr2 60537715 60537736 60537720 60537715 -
aaatttatattcatcagttgtt

SEQ ID NO: 212975 - DNA, 22 bp, Artificial Sequence
  Synthetic oligonucleotide; TTA chr2 60537714 60537735 60537719 60537714 -
aatttatattcatcagttgttc

SEQ ID NO: 212976 - DNA, 22 bp, Artificial Sequence
  Synthetic oligonucleotide; TTT chr2 60537709 60537730 60537714 60537709 -
atattcatcagttgttcatttt

SEQ ID NO: 212977 - DNA, 22 bp, Artificial Sequence
  Synthetic oligonucleotide; TTA chr2 60537708 60537729 60537713 60537708 -
tattcatcagttgttcattttc

SEQ ID NO: 212978 - DNA, 22 bp, Artificial Sequence
  Synthetic oligonucleotide; TTC chr2 60537703 60537724 60537708 60537703 -
atcagttgttcattttcttaat

SEQ ID NO: 212979 - DNA, 22 bp, Artificial Sequence
  Synthetic oligonucleotide; TTG chr2 60537695 60537716 60537700 60537695 -
ttcattttcttaatatgtaatg

SEQ ID NO: 212980 - DNA, 22 bp, Artificial Sequence
  Synthetic oligonucleotide; TTC chr2 60537692 60537713 60537697 60537692 -
attttcttaatatgtaatgatg

SEQ ID NO: 212981 - DNA, 22 bp, Artificial Sequence
  Synthetic oligonucleotide; TTT chr2 60537688 60537709 60537693 60537688 -
tcttaatatgtaatgatgcata

SEQ ID NO: 212982 - DNA, 22 bp, Artificial Sequence
  Synthetic oligonucleotide; TTT chr2 60537687 60537708 60537692 60537687 -
cttaatatgtaatgatgcataa

SEQ ID NO: 212983 - DNA, 22 bp, Artificial Sequence
  Synthetic oligonucleotide; TTC chr2 60537686 60537707 60537691 60537686 -
ttaatatgtaatgatgcataaa

SEQ ID NO: 212984 - DNA, 22 bp, Artificial Sequence
  Synthetic oligonucleotide; CTT chr2 60537684 60537705 60537689 60537684 -
aatatgtaatgatgcataaaaa

SEQ ID NO: 212985 - DNA, 22 bp, Artificial Sequence
  Synthetic oligonucleotide; TTA chr2 60537683 60537704 60537688 60537683 -
atatgtaatgatgcataaaaag

SEQ ID NO: 212986 - DNA, 22 bp, Artificial Sequence
  Synthetic oligonucleotide; CTG chr2 60537657 60537678 60537662 60537657 -
caaggaaatcacatctgttaat

SEQ ID NO: 212987 - DNA, 22 bp, Artificial Sequence
  Synthetic oligonucleotide; CTG chr2 60537640 60537661 60537645 60537640 -
ttaatttttagggaaataaagt

SEQ ID NO: 212988 - DNA, 22 bp, Artificial Sequence
  Synthetic oligonucleotide; TTA chr2 60537637 60537658 60537642 60537637 -
atttttagggaaataaagtgta

SEQ ID NO: 212989 - DNA, 22 bp, Artificial Sequence
  Synthetic oligonucleotide; TTT chr2 60537633 60537654 60537638 60537633 -
ttagggaaataaagtgtagctt

SEQ ID NO: 212990 - DNA, 22 bp, Artificial Sequence
  Synthetic oligonucleotide; TTT chr2 60537632 60537653 60537637 60537632 -
tagggaaataaagtgtagcttg

SEQ ID NO: 212991 - DNA, 22 bp, Artificial Sequence
  Synthetic oligonucleotide; TTT chr2 60537631 60537652 60537636 60537631 -
agggaaataaagtgtagcttgg

SEQ ID NO: 212992 - DNA, 22 bp, Artificial Sequence
  Synthetic oligonucleotide; TTA chr2 60537630 60537651 60537635 60537630 -
gggaaataaagtgtagcttgga

SEQ ID NO: 212993 - DNA, 22 bp, Artificial Sequence
  Synthetic oligonucleotide; CTT chr2 60537611 60537632 60537616 60537611 -
ggattcttatgttggagcacaa

SEQ ID NO: 212994 - DNA, 22 bp, Artificial Sequence
  Synthetic oligonucleotide; TTG chr2 60537610 60537631 60537615 60537610 -
gattcttatgttggagcacaaa

SEQ ID NO: 212995 - DNA, 22 bp, Artificial Sequence
  Synthetic oligonucleotide; TTC chr2 60537605 60537626 60537610 60537605 -
ttatgttggagcacaaagcact

SEQ ID NO: 212996 - DNA, 22 bp, Artificial Sequence
  Synthetic oligonucleotide; CTT chr2 60537603 60537624 60537608 60537603 -
atgttggagcacaaagcactat

SEQ ID NO: 212997 - DNA, 22 bp, Artificial Sequence
  Synthetic oligonucleotide; TTA chr2 60537602 60537623 60537607 60537602 -
tgttggagcacaaagcactatg

SEQ ID NO: 212998 - DNA, 22 bp, Artificial Sequence
  Synthetic oligonucleotide; TTG chr2 60537597 60537618 60537602 60537597 -
gagcacaaagcactatgtgcca

SEQ ID NO: 212999 - DNA, 22 bp, Artificial Sequence
  Synthetic oligonucleotide; CTA chr2 60537582 60537603 60537587 60537582 -
tgtgccaagtctgttcctgtac

SEQ ID NO: 213000 - DNA, 22 bp, Artificial Sequence
  Synthetic oligonucleotide; CTG chr2 60537569 60537590 60537574 60537569 -
ttcctgtacattttaaatatag

SEQ ID NO: 213001 - DNA, 22 bp, Artificial Sequence
  Synthetic oligonucleotide; TTC chr2 60537566 60537587 60537571 60537566 -
ctgtacattttaaatatagagt

SEQ ID NO: 213002 - DNA, 22 bp, Artificial Sequence
  Synthetic oligonucleotide; CTG chr2 60537563 60537584 60537568 60537563 -
tacattttaaatatagagtttt

SEQ ID NO: 213003 - DNA, 22 bp, Artificial Sequence
  Synthetic oligonucleotide; TTT chr2 60537556 60537577 60537561 60537556 -
taaatatagagttttaatattt

SEQ ID NO: 213004 - DNA, 22 bp, Artificial Sequence
  Synthetic oligonucleotide; TTT chr2 60537555 60537576 60537560 60537555 -
aaatatagagttttaatatttg

SEQ ID NO: 213005 - DNA, 22 bp, Artificial Sequence
  Synthetic oligonucleotide; TTA chr2 60537554 60537575 60537559 60537554 -
aatatagagttttaatatttgg

SEQ ID NO: 213006 - DNA, 22 bp, Artificial Sequence
  Synthetic oligonucleotide; TTT chr2 60537542 60537563 60537547 60537542 -
taatatttggccaatccctgca

SEQ ID NO: 213007 - DNA, 22 bp, Artificial Sequence
  Synthetic oligonucleotide; TTT chr2 60537541 60537562 60537546 60537541 -
aatatttggccaatccctgcac

SEQ ID NO: 213008 - DNA, 22 bp, Artificial Sequence
  Synthetic oligonucleotide; TTA chr2 60537540 60537561 60537545 60537540 -
atatttggccaatccctgcacc

SEQ ID NO: 213009 - DNA, 22 bp, Artificial Sequence
  Synthetic oligonucleotide; TTT chr2 60537534 60537555 60537539 60537534 -
ggccaatccctgcacctcctca

SEQ ID NO: 213010 - DNA, 22 bp, Artificial Sequence
  Synthetic oligonucleotide; TTG chr2 60537533 60537554 60537538 60537533 -
gccaatccctgcacctcctcaa

SEQ ID NO: 213011 - DNA, 22 bp, Artificial Sequence
  Synthetic oligonucleotide; CTG chr2 60537522 60537543 60537527 60537522 -
cacctcctcaaacaaaaacaaa

SEQ ID NO: 213012 - DNA, 22 bp, Artificial Sequence
  Synthetic oligonucleotide; CTC chr2 60537516 60537537 60537521 60537516 -
ctcaaacaaaaacaaacctcaa

SEQ ID NO: 213013 - DNA, 22 bp, Artificial Sequence
  Synthetic oligonucleotide; CTC chr2 60537513 60537534 60537518 60537513 -
aaacaaaaacaaacctcaaaaa

SEQ ID NO: 213014 - DNA, 22 bp, Artificial Sequence
  Synthetic oligonucleotide; CTC chr2 60537496 60537517 60537501 60537496 -
aaaaaactaagagaaccaaacc

SEQ ID NO: 213015 - DNA, 22 bp, Artificial Sequence
  Synthetic oligonucleotide; CTA chr2 60537487 60537508 60537492 60537487 -
agagaaccaaacctgaagtatt

SEQ ID NO: 213016 - DNA, 22 bp, Artificial Sequence
  Synthetic oligonucleotide; CTG chr2 60537472 60537493 60537477 60537472 -
aagtattctccttcaccaactc

SEQ ID NO: 213017 - DNA, 22 bp, Artificial Sequence
  Synthetic oligonucleotide; TTC chr2 60537464 60537485 60537469 60537464 -
tccttcaccaactcaaggtata

SEQ ID NO: 213018 - DNA, 22 bp, Artificial Sequence
  Synthetic oligonucleotide; CTC chr2 60537462 60537483 60537467 60537462 -
cttcaccaactcaaggtatacc

SEQ ID NO: 213019 - DNA, 22 bp, Artificial Sequence
  Synthetic oligonucleotide; CTT chr2 60537459 60537480 60537464 60537459 -
caccaactcaaggtataccatg

SEQ ID NO: 213020 - DNA, 22 bp, Artificial Sequence
  Synthetic oligonucleotide; TTC chr2 60537458 60537479 60537463 60537458 -
accaactcaaggtataccatga

SEQ ID NO: 213021 - DNA, 22 bp, Artificial Sequence
  Synthetic oligonucleotide; CTC chr2 60537450 60537471 60537455 60537450 -
aaggtataccatgattttatga

SEQ ID NO: 213022 - DNA, 22 bp, Artificial Sequence
  Synthetic oligonucleotide; TTT chr2 60537433 60537454 60537438 60537433 -
tatgatttatttacatttaggg

SEQ ID NO: 213023 - DNA, 22 bp, Artificial Sequence
  Synthetic oligonucleotide; TTT chr2 60537432 60537453 60537437 60537432 -
atgatttatttacatttagggg

SEQ ID NO: 213024 - DNA, 22 bp, Artificial Sequence
  Synthetic oligonucleotide; TTA chr2 60537431 60537452 60537436 60537431 -
tgatttatttacatttaggggg

SEQ ID NO: 213025 - DNA, 22 bp, Artificial Sequence
  Synthetic oligonucleotide; TTT chr2 60537425 60537446 60537430 60537425 -
atttacatttaggggggaaccc

SEQ ID NO: 213026 - DNA, 22 bp, Artificial Sequence
  Synthetic oligonucleotide; TTA chr2 60537424 60537445 60537429 60537424 -
tttacatttaggggggaacccc

SEQ ID NO: 213027 - DNA, 22 bp, Artificial Sequence
  Synthetic oligonucleotide; TTT chr2 60537421 60537442 60537426 60537421 -
acatttaggggggaacccctca

SEQ ID NO: 213028 - DNA, 22 bp, Artificial Sequence
  Synthetic oligonucleotide; TTA chr2 60537420 60537441 60537425 60537420 -
catttaggggggaacccctcag

SEQ ID NO: 213029 - DNA, 22 bp, Artificial Sequence
  Synthetic oligonucleotide; TTT chr2 60537415 60537436 60537420 60537415 -
aggggggaacccctcagtgaac

SEQ ID NO: 213030 - DNA, 22 bp, Artificial Sequence
  Synthetic oligonucleotide; TTA chr2 60537414 60537435 60537419 60537414 -
ggggggaacccctcagtgaacc

SEQ ID NO: 213031 - DNA, 22 bp, Artificial Sequence
  Synthetic oligonucleotide; CTC chr2 60537400 60537421 60537405 60537400 -
agtgaaccatttactccccatt

SEQ ID NO: 213032 - DNA, 22 bp, Artificial Sequence
  Synthetic oligonucleotide; TTT chr2 60537388 60537409 60537393 60537388 -
actccccattttaactcccctg

SEQ ID NO: 213033 - DNA, 22 bp, Artificial Sequence
  Synthetic oligonucleotide; TTA chr2 60537387 60537408 60537392 60537387 -
ctccccattttaactcccctgc

SEQ ID NO: 213034 - DNA, 22 bp, Artificial Sequence
  Synthetic oligonucleotide; CTC chr2 60537384 60537405 60537389 60537384 -
cccattttaactcccctgcccc

SEQ ID NO: 213035 - DNA, 22 bp, Artificial Sequence
  Synthetic oligonucleotide; TTT chr2 60537377 60537398 60537382 60537377 -
taactcccctgccccgatcctt

SEQ ID NO: 213036 - DNA, 22 bp, Artificial Sequence
  Synthetic oligonucleotide; TTT chr2 60537376 60537397 60537381 60537376 -
aactcccctgccccgatccttt

SEQ ID NO: 213037 - DNA, 22 bp, Artificial Sequence
  Synthetic oligonucleotide; TTA chr2 60537375 60537396 60537380 60537375 -
actcccctgccccgatcctttc

SEQ ID NO: 213038 - DNA, 22 bp, Artificial Sequence
  Synthetic oligonucleotide; CTC chr2 60537371 60537392 60537376 60537371 -
ccctgccccgatcctttcagtt

SEQ ID NO: 213039 - DNA, 22 bp, Artificial Sequence
  Synthetic oligonucleotide; CTG chr2 60537366 60537387 60537371 60537366 -
ccccgatcctttcagtttccag

SEQ ID NO: 213040 - DNA, 22 bp, Artificial Sequence
  Synthetic oligonucleotide; CTT chr2 60537355 60537376 60537360 60537355 -
tcagtttccagttaaaacaatg

SEQ ID NO: 213041 - DNA, 22 bp, Artificial Sequence
  Synthetic oligonucleotide; TTT chr2 60537354 60537375 60537359 60537354 -
cagtttccagttaaaacaatgc

SEQ ID NO: 213042 - DNA, 22 bp, Artificial Sequence
  Synthetic oligonucleotide; TTC chr2 60537353 60537374 60537358 60537353 -
agtttccagttaaaacaatgca

SEQ ID NO: 213043 - DNA, 22 bp, Artificial Sequence
  Synthetic oligonucleotide; TTT chr2 60537348 60537369 60537353 60537348 -
ccagttaaaacaatgcattaac

SEQ ID NO: 213044 - DNA, 22 bp, Artificial Sequence
  Synthetic oligonucleotide; TTC chr2 60537347 60537368 60537352 60537347 -
cagttaaaacaatgcattaacc

SEQ ID NO: 213045 - DNA, 22 bp, Artificial Sequence
  Synthetic oligonucleotide; TTA chr2 60537341 60537362 60537346 60537341 -
aaacaatgcattaaccaatgtt

SEQ ID NO: 213046 - DNA, 22 bp, Artificial Sequence
  Synthetic oligonucleotide; TTA chr2 60537328 60537349 60537333 60537328 -
accaatgttaaatcttaaatct

SEQ ID NO: 213047 - DNA, 22 bp, Artificial Sequence
  Synthetic oligonucleotide; TTA chr2 60537318 60537339 60537323 60537318 -
aatcttaaatctcgtgagtttc

SEQ ID NO: 213048 - DNA, 22 bp, Artificial Sequence
  Synthetic oligonucleotide; CTT chr2 60537312 60537333 60537317 60537312 -
aaatctcgtgagtttctctcca

SEQ ID NO: 213049 - DNA, 22 bp, Artificial Sequence
  Synthetic oligonucleotide; TTA chr2 60537311 60537332 60537316 60537311 -
aatctcgtgagtttctctccat

SEQ ID NO: 213050 - DNA, 22 bp, Artificial Sequence
  Synthetic oligonucleotide; CTC chr2 60537305 60537326 60537310 60537305 -
gtgagtttctctccatcacacc

SEQ ID NO: 213051 - DNA, 22 bp, Artificial Sequence
  Synthetic oligonucleotide; TTT chr2 60537297 60537318 60537302 60537297 -
ctctccatcacaccctaatatt

SEQ ID NO: 213052 - DNA, 22 bp, Artificial Sequence
  Synthetic oligonucleotide; TTC chr2 60537296 60537317 60537301 60537296 -
tctccatcacaccctaatattt

SEQ ID NO: 213053 - DNA, 22 bp, Artificial Sequence
  Synthetic oligonucleotide; CTC chr2 60537294 60537315 60537299 60537294 -
tccatcacaccctaatatttta

SEQ ID NO: 213054 - DNA, 22 bp, Artificial Sequence
  Synthetic oligonucleotide; CTC chr2 60537292 60537313 60537297 60537292 -
catcacaccctaatattttaaa

SEQ ID NO: 213055 - DNA, 22 bp, Artificial Sequence
  Synthetic oligonucleotide; CTA chr2 60537280 60537301 60537285 60537280 -
atattttaaaaaaattattcct

SEQ ID NO: 213056 - DNA, 22 bp, Artificial Sequence
  Synthetic oligonucleotide; TTT chr2 60537274 60537295 60537279 60537274 -
taaaaaaattattcctttacat

SEQ ID NO: 213057 - DNA, 22 bp, Artificial Sequence
  Synthetic oligonucleotide; TTT chr2 60537273 60537294 60537278 60537273 -
aaaaaaattattcctttacatt

SEQ ID NO: 213058 - DNA, 22 bp, Artificial Sequence
  Synthetic oligonucleotide; TTA chr2 60537272 60537293 60537277 60537272 -
aaaaaattattcctttacattt

SEQ ID NO: 213059 - DNA, 22 bp, Artificial Sequence
  Synthetic oligonucleotide; TTA chr2 60537263 60537284 60537268 60537263 -
ttcctttacatttaaaactgaa

SEQ ID NO: 213060 - DNA, 22 bp, Artificial Sequence
  Synthetic oligonucleotide; TTC chr2 60537260 60537281 60537265 60537260 -
ctttacatttaaaactgaacat

SEQ ID NO: 213061 - DNA, 22 bp, Artificial Sequence
  Synthetic oligonucleotide; CTT chr2 60537257 60537278 60537262 60537257 -
tacatttaaaactgaacattgg

SEQ ID NO: 213062 - DNA, 22 bp, Artificial Sequence
  Synthetic oligonucleotide; TTT chr2 60537256 60537277 60537261 60537256 -
acatttaaaactgaacattggc

SEQ ID NO: 213063 - DNA, 22 bp, Artificial Sequence
  Synthetic oligonucleotide; TTA chr2 60537255 60537276 60537260 60537255 -
catttaaaactgaacattggct

SEQ ID NO: 213064 - DNA, 22 bp, Artificial Sequence
  Synthetic oligonucleotide; TTT chr2 60537250 60537271 60537255 60537250 -
aaaactgaacattggctactga

SEQ ID NO: 213065 - DNA, 22 bp, Artificial Sequence
  Synthetic oligonucleotide; TTA chr2 60537249 60537270 60537254 60537249 -
aaactgaacattggctactgaa

SEQ ID NO: 213066 - DNA, 22 bp, Artificial Sequence
  Synthetic oligonucleotide; CTG chr2 60537243 60537264 60537248 60537243 -
aacattggctactgaagaatga

SEQ ID NO: 213067 - DNA, 22 bp, Artificial Sequence
  Synthetic oligonucleotide; TTG chr2 60537236 60537257 60537241 60537236 -
gctactgaagaatgatttaaag

SEQ ID NO: 213068 - DNA, 22 bp, Artificial Sequence
  Synthetic oligonucleotide; CTA chr2 60537232 60537253 60537237 60537232 -
ctgaagaatgatttaaaggctg

SEQ ID NO: 213069 - DNA, 22 bp, Artificial Sequence
  Synthetic oligonucleotide; CTG chr2 60537229 60537250 60537234 60537229 -
aagaatgatttaaaggctgaaa

SEQ ID NO: 213070 - DNA, 22 bp, Artificial Sequence
  Synthetic oligonucleotide; TTT chr2 60537218 60537239 60537223 60537218 -
aaaggctgaaaaaaattttaat

SEQ ID NO: 213071 - DNA, 22 bp, Artificial Sequence
  Synthetic oligonucleotide; TTA chr2 60537217 60537238 60537222 60537217 -
aaggctgaaaaaaattttaata

SEQ ID NO: 213072 - DNA, 22 bp, Artificial Sequence
  Synthetic oligonucleotide; CTG chr2 60537210 60537231 60537215 60537210 -
aaaaaaattttaataataaatc

SEQ ID NO: 213073 - DNA, 22 bp, Artificial Sequence
  Synthetic oligonucleotide; TTT chr2 60537200 60537221 60537205 60537200 -
taataataaatcgtaaccttct

SEQ ID NO: 213074 - DNA, 22 bp, Artificial Sequence
  Synthetic oligonucleotide; TTT chr2 60537199 60537220 60537204 60537199 -
aataataaatcgtaaccttctc

SEQ ID NO: 213075 - DNA, 22 bp, Artificial Sequence
  Synthetic oligonucleotide; TTA chr2 60537198 60537219 60537203 60537198 -
ataataaatcgtaaccttctca

SEQ ID NO: 213076 - DNA, 22 bp, Artificial Sequence
  Synthetic oligonucleotide; CTT chr2 60537180 60537201 60537185 60537180 -
ctcatgttatgtttttgttatg

SEQ ID NO: 213077 - DNA, 22 bp, Artificial Sequence
  Synthetic oligonucleotide; TTC chr2 60537179 60537200 60537184 60537179 -
tcatgttatgtttttgttatgt

SEQ ID NO: 213078 - DNA, 22 bp, Artificial Sequence
  Synthetic oligonucleotide; CTC chr2 60537177 60537198 60537182 60537177 -
atgttatgtttttgttatgtta

SEQ ID NO: 213079 - DNA, 22 bp, Artificial Sequence
  Synthetic oligonucleotide; TTA chr2 60537171 60537192 60537176 60537171 -
tgtttttgttatgttaaggaga

SEQ ID NO: 213080 - DNA, 22 bp, Artificial Sequence
  Synthetic oligonucleotide; TTT chr2 60537166 60537187 60537171 60537166 -
ttgttatgttaaggagaaaaaa

SEQ ID NO: 213081 - DNA, 22 bp, Artificial Sequence
  Synthetic oligonucleotide; TTT chr2 60537165 60537186 60537170 60537165 -
tgttatgttaaggagaaaaaaa

SEQ ID NO: 213082 - DNA, 22 bp, Artificial Sequence
  Synthetic oligonucleotide; TTT chr2 60537164 60537185 60537169 60537164 -
gttatgttaaggagaaaaaaat

SEQ ID NO: 213083 - DNA, 22 bp, Artificial Sequence
  Synthetic oligonucleotide; TTG chr2 60537163 60537184 60537168 60537163 -
ttatgttaaggagaaaaaaatc

SEQ ID NO: 213084 - DNA, 22 bp, Artificial Sequence
  Synthetic oligonucleotide; TTA chr2 60537160 60537181 60537165 60537160 -
tgttaaggagaaaaaaatcaat

SEQ ID NO: 213085 - DNA, 22 bp, Artificial Sequence
  Synthetic oligonucleotide; TTA chr2 60537155 60537176 60537160 60537155 -
aggagaaaaaaatcaataagga

SEQ ID NO: 213086 - DNA, 22 bp, Artificial Sequence
  Synthetic oligonucleotide; TTT chr2 60537126 60537147 60537131 60537126 -
aattctgataaagatactcttg

SEQ ID NO: 213087 - DNA, 22 bp, Artificial Sequence
  Synthetic oligonucleotide; TTA chr2 60537125 60537146 60537130 60537125 -
attctgataaagatactcttgg

SEQ ID NO: 213088 - DNA, 22 bp, Artificial Sequence
  Synthetic oligonucleotide; TTC chr2 60537121 60537142 60537126 60537121 -
tgataaagatactcttggatct

SEQ ID NO: 213089 - DNA, 22 bp, Artificial Sequence
  Synthetic oligonucleotide; CTG chr2 60537119 60537140 60537124 60537119 -
ataaagatactcttggatcttt

SEQ ID NO: 213090 - DNA, 22 bp, Artificial Sequence
  Synthetic oligonucleotide; CTC chr2 60537107 60537128 60537112 60537107 -
ttggatctttgaaaacaactgc

SEQ ID NO: 213091 - DNA, 22 bp, Artificial Sequence
  Synthetic oligonucleotide; CTT chr2 60537105 60537126 60537110 60537105 -
ggatctttgaaaacaactgctg

SEQ ID NO: 213092 - DNA, 22 bp, Artificial Sequence
  Synthetic oligonucleotide; TTG chr2 60537104 60537125 60537109 60537104 -
gatctttgaaaacaactgctgt

SEQ ID NO: 213093 - DNA, 22 bp, Artificial Sequence
  Synthetic oligonucleotide; CTT chr2 60537098 60537119 60537103 60537098 -
tgaaaacaactgctgtcctttt

SEQ ID NO: 213094 - DNA, 22 bp, Artificial Sequence
  Synthetic oligonucleotide; TTT chr2 60537097 60537118 60537102 60537097 -
gaaaacaactgctgtcctttta

SEQ ID NO: 213095 - DNA, 22 bp, Artificial Sequence
  Synthetic oligonucleotide; TTG chr2 60537096 60537117 60537101 60537096 -
aaaacaactgctgtccttttaa

SEQ ID NO: 213096 - DNA, 22 bp, Artificial Sequence
  Synthetic oligonucleotide; CTG chr2 60537086 60537107 60537091 60537086 -
ctgtccttttaactaaaacatt

SEQ ID NO: 213097 - DNA, 22 bp, Artificial Sequence
  Synthetic oligonucleotide; CTG chr2 60537083 60537104 60537088 60537083 -
tccttttaactaaaacatttga

SEQ ID NO: 213098 - DNA, 22 bp, Artificial Sequence
  Synthetic oligonucleotide; CTT chr2 60537078 60537099 60537083 60537078 -
ttaactaaaacatttgagcagc

SEQ ID NO: 213099 - DNA, 22 bp, Artificial Sequence
  Synthetic oligonucleotide; TTT chr2 60537077 60537098 60537082 60537077 -
taactaaaacatttgagcagct

SEQ ID NO: 213100 - DNA, 22 bp, Artificial Sequence
  Synthetic oligonucleotide; TTT chr2 60537076 60537097 60537081 60537076 -
aactaaaacatttgagcagctt

SEQ ID NO: 213101 - DNA, 22 bp, Artificial Sequence
  Synthetic oligonucleotide; TTA chr2 60537075 60537096 60537080 60537075 -
actaaaacatttgagcagcttc

SEQ ID NO: 213102 - DNA, 22 bp, Artificial Sequence
  Synthetic oligonucleotide; CTA chr2 60537071 60537092 60537076 60537071 -
aaacatttgagcagcttcaaag

SEQ ID NO: 213103 - DNA, 22 bp, Artificial Sequence
  Synthetic oligonucleotide; TTT chr2 60537063 60537084 60537068 60537063 -
gagcagcttcaaagactatgta

SEQ ID NO: 213104 - DNA, 22 bp, Artificial Sequence
  Synthetic oligonucleotide; TTG chr2 60537062 60537083 60537067 60537062 -
agcagcttcaaagactatgtat

SEQ ID NO: 213105 - DNA, 22 bp, Artificial Sequence
  Synthetic oligonucleotide; CTT chr2 60537054 60537075 60537059 60537054 -
caaagactatgtatttcttctg

SEQ ID NO: 213106 - DNA, 22 bp, Artificial Sequence
  Synthetic oligonucleotide; TTC chr2 60537053 60537074 60537058 60537053 -
aaagactatgtatttcttctga

SEQ ID NO: 213107 - DNA, 22 bp, Artificial Sequence
  Synthetic oligonucleotide; CTA chr2 60537045 60537066 60537050 60537045 -
tgtatttcttctgatcttggag

SEQ ID NO: 213108 - DNA, 22 bp, Artificial Sequence
  Synthetic oligonucleotide; TTT chr2 60537038 60537059 60537043 60537038 -
cttctgatcttggagctgtgtg

SEQ ID NO: 213109 - DNA, 22 bp, Artificial Sequence
  Synthetic oligonucleotide; TTC chr2 60537037 60537058 60537042 60537037 -
ttctgatcttggagctgtgtga

SEQ ID NO: 213110 - DNA, 22 bp, Artificial Sequence
  Synthetic oligonucleotide; CTT chr2 60537035 60537056 60537040 60537035 -
ctgatcttggagctgtgtgact

SEQ ID NO: 213111 - DNA, 22 bp, Artificial Sequence
  Synthetic oligonucleotide; TTC chr2 60537034 60537055 60537039 60537034 -
tgatcttggagctgtgtgactg

SEQ ID NO: 213112 - DNA, 22 bp, Artificial Sequence
  Synthetic oligonucleotide; CTG chr2 60537032 60537053 60537037 60537032 -
atcttggagctgtgtgactggt

SEQ ID NO: 213113 - DNA, 22 bp, Artificial Sequence
  Synthetic oligonucleotide; CTT chr2 60537027 60537048 60537032 60537027 -
ggagctgtgtgactggtagcaa

SEQ ID NO: 213114 - DNA, 22 bp, Artificial Sequence
  Synthetic oligonucleotide; TTG chr2 60537026 60537047 60537031 60537026 -
gagctgtgtgactggtagcaag

SEQ ID NO: 213115 - DNA, 22 bp, Artificial Sequence
  Synthetic oligonucleotide; CTG chr2 60537020 60537041 60537025 60537020 -
tgtgactggtagcaagaaagaa

SEQ ID NO: 213116 - DNA, 22 bp, Artificial Sequence
  Synthetic oligonucleotide; CTG chr2 60537012 60537033 60537017 60537012 -
gtagcaagaaagaaaaaaaatc

SEQ ID NO: 213117 - DNA, 22 bp, Artificial Sequence
  Synthetic oligonucleotide; CTT chr2 60536988 60537009 60536993 60536988 -
attctacatacaagtggattgc

SEQ ID NO: 213118 - DNA, 22 bp, Artificial Sequence
  Synthetic oligonucleotide; TTA chr2 60536987 60537008 60536992 60536987 -
ttctacatacaagtggattgct

SEQ ID NO: 213119 - DNA, 22 bp, Artificial Sequence
  Synthetic oligonucleotide; TTC chr2 60536984 60537005 60536989 60536984 -
tacatacaagtggattgcttaa

SEQ ID NO: 213120 - DNA, 22 bp, Artificial Sequence
  Synthetic oligonucleotide; CTA chr2 60536982 60537003 60536987 60536982 -
catacaagtggattgcttaaca

SEQ ID NO: 213121 - DNA, 22 bp, Artificial Sequence
  Synthetic oligonucleotide; TTG chr2 60536967 60536988 60536972 60536967 -
cttaacaagtcagcacagacac

SEQ ID NO: 213122 - DNA, 22 bp, Artificial Sequence
  Synthetic oligonucleotide; CTT chr2 60536964 60536985 60536969 60536964 -
aacaagtcagcacagacacgta

SEQ ID NO: 213123 - DNA, 22 bp, Artificial Sequence
  Synthetic oligonucleotide; TTA chr2 60536963 60536984 60536968 60536963 -
acaagtcagcacagacacgtac

SEQ ID NO: 213124 - DNA, 22 bp, Artificial Sequence
  Synthetic oligonucleotide; CTT chr2 60536939 60536960 60536944 60536939 -
gtttgtacaatagagataaaaa

SEQ ID NO: 213125 - DNA, 22 bp, Artificial Sequence
  Synthetic oligonucleotide; TTG chr2 60536938 60536959 60536943 60536938 -
tttgtacaatagagataaaaat

SEQ ID NO: 213126 - DNA, 22 bp, Artificial Sequence
  Synthetic oligonucleotide; TTT chr2 60536935 60536956 60536940 60536935 -
gtacaatagagataaaaattcc

SEQ ID NO: 213127 - DNA, 22 bp, Artificial Sequence
  Synthetic oligonucleotide; TTG chr2 60536934 60536955 60536939 60536934 -
tacaatagagataaaaattcct

SEQ ID NO: 213128 - DNA, 22 bp, Artificial Sequence
  Synthetic oligonucleotide; TTC chr2 60536914 60536935 60536919 60536914 -
ctgtataaaaataattcagctg

SEQ ID NO: 213129 - DNA, 22 bp, Artificial Sequence
  Synthetic oligonucleotide; CTG chr2 60536911 60536932 60536916 60536911 -
tataaaaataattcagctgctg

SEQ ID NO: 213130 - DNA, 22 bp, Artificial Sequence
  Synthetic oligonucleotide; TTC chr2 60536897 60536918 60536902 60536897 -
agctgctgacagcaggcattgt

SEQ ID NO: 213131 - DNA, 22 bp, Artificial Sequence
  Synthetic oligonucleotide; CTG chr2 60536892 60536913 60536897 60536892 -
ctgacagcaggcattgttgttg

SEQ ID NO: 213132 - DNA, 22 bp, Artificial Sequence
  Synthetic oligonucleotide; CTG chr2 60536889 60536910 60536894 60536889 -
acagcaggcattgttgttggac

SEQ ID NO: 213133 - DNA, 22 bp, Artificial Sequence
  Synthetic oligonucleotide; TTG chr2 60536876 60536897 60536881 60536876 -
ttgttggacctgtcttttgtgc

SEQ ID NO: 213134 - DNA, 22 bp, Artificial Sequence
  Synthetic oligonucleotide; TTG chr2 60536873 60536894 60536878 60536873 -
ttggacctgtcttttgtgcttg

SEQ ID NO: 213135 - DNA, 22 bp, Artificial Sequence
  Synthetic oligonucleotide; TTG chr2 60536870 60536891 60536875 60536870 -
gacctgtcttttgtgcttgtcc

SEQ ID NO: 213136 - DNA, 22 bp, Artificial Sequence
  Synthetic oligonucleotide; CTG chr2 60536864 60536885 60536869 60536864 -
tcttttgtgcttgtcccagctc

SEQ ID NO: 213137 - DNA, 22 bp, Artificial Sequence
  Synthetic oligonucleotide; CTT chr2 60536860 60536881 60536865 60536860 -
ttgtgcttgtcccagctctggg

SEQ ID NO: 213138 - DNA, 22 bp, Artificial Sequence
  Synthetic oligonucleotide; TTT chr2 60536859 60536880 60536864 60536859 -
tgtgcttgtcccagctctgggt

SEQ ID NO: 213139 - DNA, 22 bp, Artificial Sequence
  Synthetic oligonucleotide; TTT chr2 60536858 60536879 60536863 60536858 -
gtgcttgtcccagctctgggtc

SEQ ID NO: 213140 - DNA, 22 bp, Artificial Sequence
  Synthetic oligonucleotide; TTG chr2 60536857 60536878 60536862 60536857 -
tgcttgtcccagctctgggtcc

SEQ ID NO: 213141 - DNA, 22 bp, Artificial Sequence
  Synthetic oligonucleotide; CTT chr2 60536852 60536873 60536857 60536852 -
gtcccagctctgggtccccctc

SEQ ID NO: 213142 - DNA, 22 bp, Artificial Sequence
  Synthetic oligonucleotide; TTG chr2 60536851 60536872 60536856 60536851 -
tcccagctctgggtccccctcc

SEQ ID NO: 213143 - DNA, 22 bp, Artificial Sequence
  Synthetic oligonucleotide; CTC chr2 60536842 60536863 60536847 60536842 -
tgggtccccctcccctcctatc

SEQ ID NO: 213144 - DNA, 22 bp, Artificial Sequence
  Synthetic oligonucleotide; CTG chr2 60536840 60536861 60536845 60536840 -
ggtccccctcccctcctatctg

SEQ ID NO: 213145 - DNA, 22 bp, Artificial Sequence
  Synthetic oligonucleotide; CTC chr2 60536830 60536851 60536835 60536830 -
ccctcctatctgcttggggcag

SEQ ID NO: 213146 - DNA, 22 bp, Artificial Sequence
  Synthetic oligonucleotide; CTC chr2 60536825 60536846 60536830 60536825 -
ctatctgcttggggcagcctgc

SEQ ID NO: 213147 - DNA, 22 bp, Artificial Sequence
  Synthetic oligonucleotide; CTA chr2 60536822 60536843 60536827 60536822 -
tctgcttggggcagcctgctgc

SEQ ID NO: 213148 - DNA, 22 bp, Artificial Sequence
  Synthetic oligonucleotide; CTG chr2 60536818 60536839 60536823 60536818 -
cttggggcagcctgctgcctgc

SEQ ID NO: 213149 - DNA, 22 bp, Artificial Sequence
  Synthetic oligonucleotide; CTT chr2 60536815 60536836 60536820 60536815 -
ggggcagcctgctgcctgcaca

SEQ ID NO: 213150 - DNA, 22 bp, Artificial Sequence
  Synthetic oligonucleotide; TTG chr2 60536814 60536835 60536819 60536814 -
gggcagcctgctgcctgcacac

SEQ ID NO: 213151 - DNA, 22 bp, Artificial Sequence
  Synthetic oligonucleotide; CTG chr2 60536804 60536825 60536809 60536804 -
ctgcctgcacactgctgaccag

SEQ ID NO: 213152 - DNA, 22 bp, Artificial Sequence
  Synthetic oligonucleotide; CTG chr2 60536801 60536822 60536806 60536801 -
cctgcacactgctgaccagaag

SEQ ID NO: 213153 - DNA, 22 bp, Artificial Sequence
  Synthetic oligonucleotide; CTG chr2 60536797 60536818 60536802 60536797 -
cacactgctgaccagaagttaa

SEQ ID NO: 213154 - DNA, 22 bp, Artificial Sequence
  Synthetic oligonucleotide; CTG chr2 60536790 60536811 60536795 60536790 -
ctgaccagaagttaattgctat

SEQ ID NO: 213155 - DNA, 22 bp, Artificial Sequence
  Synthetic oligonucleotide; CTG chr2 60536787 60536808 60536792 60536787 -
accagaagttaattgctatata

SEQ ID NO: 213156 - DNA, 22 bp, Artificial Sequence
  Synthetic oligonucleotide; TTA chr2 60536776 60536797 60536781 60536776 -
attgctatatattaagtatata

SEQ ID NO: 213157 - DNA, 22 bp, Artificial Sequence
  Synthetic oligonucleotide; TTG chr2 60536772 60536793 60536777 60536772 -
ctatatattaagtatataggta

SEQ ID NO: 213158 - DNA, 22 bp, Artificial Sequence
  Synthetic oligonucleotide; CTA chr2 60536769 60536790 60536774 60536769 -
tatattaagtatataggtattg

SEQ ID NO: 213159 - DNA, 22 bp, Artificial Sequence
  Synthetic oligonucleotide; TTA chr2 60536762 60536783 60536767 60536762 -
agtatataggtattgtatttaa

SEQ ID NO: 213160 - DNA, 22 bp, Artificial Sequence
  Synthetic oligonucleotide; TTG chr2 60536747 60536768 60536752 60536747 -
tatttaaagaggaatatctcaa

SEQ ID NO: 213161 - DNA, 22 bp, Artificial Sequence
  Synthetic oligonucleotide; TTT chr2 60536742 60536763 60536747 60536742 -
aaagaggaatatctcaaggctt

SEQ ID NO: 213162 - DNA, 22 bp, Artificial Sequence
  Synthetic oligonucleotide; TTA chr2 60536741 60536762 60536746 60536741 -
aagaggaatatctcaaggcttc

SEQ ID NO: 213163 - DNA, 22 bp, Artificial Sequence
  Synthetic oligonucleotide; CTC chr2 60536727 60536748 60536732 60536727 -
aaggcttcctatatgcattcca

SEQ ID NO: 213164 - DNA, 22 bp, Artificial Sequence
  Synthetic oligonucleotide; CTT chr2 60536720 60536741 60536725 60536720 -
cctatatgcattccactttact

SEQ ID NO: 213165 - DNA, 22 bp, Artificial Sequence
  Synthetic oligonucleotide; TTC chr2 60536719 60536740 60536724 60536719 -
ctatatgcattccactttactt

SEQ ID NO: 213166 - DNA, 22 bp, Artificial Sequence
  Synthetic oligonucleotide; CTA chr2 60536716 60536737 60536721 60536716 -
tatgcattccactttactttct

SEQ ID NO: 213167 - DNA, 22 bp, Artificial Sequence
  Synthetic oligonucleotide; TTC chr2 60536707 60536728 60536712 60536707 -
cactttactttctgatgtgatt

SEQ ID NO: 213168 - DNA, 22 bp, Artificial Sequence
  Synthetic oligonucleotide; CTT chr2 60536702 60536723 60536707 60536702 -
tactttctgatgtgattgcggt

SEQ ID NO: 213169 - DNA, 22 bp, Artificial Sequence
  Synthetic oligonucleotide; TTT chr2 60536701 60536722 60536706 60536701 -
actttctgatgtgattgcggtg

SEQ ID NO: 213170 - DNA, 22 bp, Artificial Sequence
  Synthetic oligonucleotide; TTA chr2 60536700 60536721 60536705 60536700 -
ctttctgatgtgattgcggtgt

SEQ ID NO: 213171 - DNA, 22 bp, Artificial Sequence
  Synthetic oligonucleotide; CTT chr2 60536697 60536718 60536702 60536697 -
tctgatgtgattgcggtgttgc

SEQ ID NO: 213172 - DNA, 22 bp, Artificial Sequence
  Synthetic oligonucleotide; TTT chr2 60536696 60536717 60536701 60536696 -
ctgatgtgattgcggtgttgcc

SEQ ID NO: 213173 - DNA, 22 bp, Artificial Sequence
  Synthetic oligonucleotide; TTC chr2 60536695 60536716 60536700 60536695 -
tgatgtgattgcggtgttgcca

SEQ ID NO: 213174 - DNA, 22 bp, Artificial Sequence
  Synthetic oligonucleotide; CTG chr2 60536693 60536714 60536698 60536693 -
atgtgattgcggtgttgccagc

SEQ ID NO: 213175 - DNA, 22 bp, Artificial Sequence
  Synthetic oligonucleotide; TTG chr2 60536684 60536705 60536689 60536684 -
cggtgttgccagcaggggggtg

SEQ ID NO: 213176 - DNA, 22 bp, Artificial Sequence
  Synthetic oligonucleotide; TTG chr2 60536676 60536697 60536681 60536676 -
ccagcaggggggtggcaggcaa

SEQ ID NO: 213177 - DNA, 22 bp, Artificial Sequence
  Synthetic oligonucleotide; CTC chr2 60536648 60536669 60536653 60536648 -
taatagggaaaatcacttgaag

SEQ ID NO: 213178 - DNA, 22 bp, Artificial Sequence
  Synthetic oligonucleotide; CTA chr2 60536646 60536667 60536651 60536646 -
atagggaaaatcacttgaaggc

SEQ ID NO: 213179 - DNA, 22 bp, Artificial Sequence
  Synthetic oligonucleotide; CTT chr2 60536630 60536651 60536635 60536630 -
gaaggcagttaggggaaatttg

SEQ ID NO: 213180 - DNA, 22 bp, Artificial Sequence
  Synthetic oligonucleotide; TTG chr2 60536629 60536650 60536634 60536629 -
aaggcagttaggggaaatttgg

SEQ ID NO: 213181 - DNA, 22 bp, Artificial Sequence
  Synthetic oligonucleotide; TTA chr2 60536619 60536640 60536624 60536619 -
ggggaaatttggccttcaagtc

SEQ ID NO: 213182 - DNA, 22 bp, Artificial Sequence
  Synthetic oligonucleotide; TTT chr2 60536609 60536630 60536614 60536609 -
ggccttcaagtcccatttgctc

SEQ ID NO: 213183 - DNA, 22 bp, Artificial Sequence
  Synthetic oligonucleotide; TTG chr2 60536608 60536629 60536613 60536608 -
gccttcaagtcccatttgctct

SEQ ID NO: 213184 - DNA, 22 bp, Artificial Sequence
  Synthetic oligonucleotide; CTT chr2 60536603 60536624 60536608 60536603 -
caagtcccatttgctctgtagt

SEQ ID NO: 213185 - DNA, 22 bp, Artificial Sequence
  Synthetic oligonucleotide; TTC chr2 60536602 60536623 60536607 60536602 -
aagtcccatttgctctgtagtg

SEQ ID NO: 213186 - DNA, 22 bp, Artificial Sequence
  Synthetic oligonucleotide; TTT chr2 60536591 60536612 60536596 60536591 -
gctctgtagtgtagcattggtt

SEQ ID NO: 213187 - DNA, 22 bp, Artificial Sequence
  Synthetic oligonucleotide; TTG chr2 60536590 60536611 60536595 60536590 -
ctctgtagtgtagcattggttt

SEQ ID NO: 213188 - DNA, 22 bp, Artificial Sequence
  Synthetic oligonucleotide; CTC chr2 60536587 60536608 60536592 60536587 -
tgtagtgtagcattggtttcta

SEQ ID NO: 213189 - DNA, 22 bp, Artificial Sequence
  Synthetic oligonucleotide; CTG chr2 60536585 60536606 60536590 60536585 -
tagtgtagcattggtttctaaa

SEQ ID NO: 213190 - DNA, 22 bp, Artificial Sequence
  Synthetic oligonucleotide; TTG chr2 60536572 60536593 60536577 60536572 -
gtttctaaacttttgtttttaa

SEQ ID NO: 213191 - DNA, 22 bp, Artificial Sequence
  Synthetic oligonucleotide; TTT chr2 60536568 60536589 60536573 60536568 -
ctaaacttttgtttttaatcta

SEQ ID NO: 213192 - DNA, 22 bp, Artificial Sequence
  Synthetic oligonucleotide; TTC chr2 60536567 60536588 60536572 60536567 -
taaacttttgtttttaatctaa

SEQ ID NO: 213193 - DNA, 22 bp, Artificial Sequence
  Synthetic oligonucleotide; CTA chr2 60536565 60536586 60536570 60536565 -
aacttttgtttttaatctaatt

SEQ ID NO: 213194 - DNA, 22 bp, Artificial Sequence
  Synthetic oligonucleotide; CTT chr2 60536560 60536581 60536565 60536560 -
ttgtttttaatctaattctgat

SEQ ID NO: 213195 - DNA, 22 bp, Artificial Sequence
  Synthetic oligonucleotide; TTT chr2 60536559 60536580 60536564 60536559 -
tgtttttaatctaattctgatt

SEQ ID NO: 213196 - DNA, 22 bp, Artificial Sequence
  Synthetic oligonucleotide; TTT chr2 60536558 60536579 60536563 60536558 -
gtttttaatctaattctgattt

SEQ ID NO: 213197 - DNA, 22 bp, Artificial Sequence
  Synthetic oligonucleotide; TTG chr2 60536557 60536578 60536562 60536557 -
tttttaatctaattctgatttg

SEQ ID NO: 213198 - DNA, 22 bp, Artificial Sequence
  Synthetic oligonucleotide; TTT chr2 60536554 60536575 60536559 60536554 -
ttaatctaattctgatttgccc

SEQ ID NO: 213199 - DNA, 22 bp, Artificial Sequence
  Synthetic oligonucleotide; TTT chr2 60536553 60536574 60536558 60536553 -
taatctaattctgatttgccct

SEQ ID NO: 213200 - DNA, 22 bp, Artificial Sequence
  Synthetic oligonucleotide; TTT chr2 60536552 60536573 60536557 60536552 -
aatctaattctgatttgccctg

SEQ ID NO: 213201 - DNA, 22 bp, Artificial Sequence
  Synthetic oligonucleotide; TTA chr2 60536551 60536572 60536556 60536551 -
atctaattctgatttgccctgt

SEQ ID NO: 213202 - DNA, 22 bp, Artificial Sequence
  Synthetic oligonucleotide; CTA chr2 60536546 60536567 60536551 60536546 -
attctgatttgccctgtcacat

SEQ ID NO: 213203 - DNA, 22 bp, Artificial Sequence
  Synthetic oligonucleotide; TTC chr2 60536542 60536563 60536547 60536542 -
tgatttgccctgtcacatccca

SEQ ID NO: 213204 - DNA, 22 bp, Artificial Sequence
  Synthetic oligonucleotide; CTG chr2 60536540 60536561 60536545 60536540 -
atttgccctgtcacatcccata

SEQ ID NO: 213205 - DNA, 22 bp, Artificial Sequence
  Synthetic oligonucleotide; TTT chr2 60536536 60536557 60536541 60536536 -
gccctgtcacatcccatatcaa

SEQ ID NO: 213206 - DNA, 22 bp, Artificial Sequence
  Synthetic oligonucleotide; TTG chr2 60536535 60536556 60536540 60536535 -
ccctgtcacatcccatatcaac

SEQ ID NO: 213207 - DNA, 22 bp, Artificial Sequence
  Synthetic oligonucleotide; CTG chr2 60536530 60536551 60536535 60536530 -
tcacatcccatatcaaccctca

SEQ ID NO: 213208 - DNA, 22 bp, Artificial Sequence
  Synthetic oligonucleotide; CTC chr2 60536509 60536530 60536514 60536509 -
attgaactctactcatgtagag

SEQ ID NO: 213209 - DNA, 22 bp, Artificial Sequence
  Synthetic oligonucleotide; TTG chr2 60536505 60536526 60536510 60536505 -
aactctactcatgtagagtaac

SEQ ID NO: 213210 - DNA, 22 bp, Artificial Sequence
  Synthetic oligonucleotide; CTC chr2 60536500 60536521 60536505 60536500 -
tactcatgtagagtaacattag

SEQ ID NO: 213211 - DNA, 22 bp, Artificial Sequence
  Synthetic oligonucleotide; CTA chr2 60536498 60536519 60536503 60536498 -
ctcatgtagagtaacattagtg

SEQ ID NO: 213212 - DNA, 22 bp, Artificial Sequence
  Synthetic oligonucleotide; CTC chr2 60536495 60536516 60536500 60536495 -
atgtagagtaacattagtgtca

SEQ ID NO: 213213 - DNA, 22 bp, Artificial Sequence
  Synthetic oligonucleotide; TTA chr2 60536479 60536500 60536484 60536479 -
gtgtcaaacggaattggtcagg

SEQ ID NO: 213214 - DNA, 22 bp, Artificial Sequence
  Synthetic oligonucleotide; TTG chr2 60536463 60536484 60536468 60536463 -
gtcaggactgtggacctgtggc

SEQ ID NO: 213215 - DNA, 22 bp, Artificial Sequence
  Synthetic oligonucleotide; CTG chr2 60536453 60536474 60536458 60536453 -
tggacctgtggctcatacagat

SEQ ID NO: 213216 - DNA, 22 bp, Artificial Sequence
  Synthetic oligonucleotide; CTG chr2 60536445 60536466 60536450 60536445 -
tggctcatacagatggttgtgg

SEQ ID NO: 213217 - DNA, 22 bp, Artificial Sequence
  Synthetic oligonucleotide; CTC chr2 60536439 60536460 60536444 60536439 -
atacagatggttgtggatgtgg

SEQ ID NO: 213218 - DNA, 22 bp, Artificial Sequence
  Synthetic oligonucleotide; TTG chr2 60536426 60536447 60536431 60536426 -
tggatgtgggttccatgcagct

SEQ ID NO: 213219 - DNA, 22 bp, Artificial Sequence
  Synthetic oligonucleotide; TTC chr2 60536413 60536434 60536418 60536413 -
catgcagctctgcatcctatcc

SEQ ID NO: 213220 - DNA, 22 bp, Artificial Sequence
  Synthetic oligonucleotide; CTC chr2 60536403 60536424 60536408 60536403 -
tgcatcctatcctttctaataa

SEQ ID NO: 213221 - DNA, 22 bp, Artificial Sequence
  Synthetic oligonucleotide; CTG chr2 60536401 60536422 60536406 60536401 -
catcctatcctttctaataaat

SEQ ID NO: 213222 - DNA, 22 bp, Artificial Sequence
  Synthetic oligonucleotide; CTA chr2 60536394 60536415 60536399 60536394 -
tcctttctaataaatgttaaaa

SEQ ID NO: 213223 - DNA, 22 bp, Artificial Sequence
  Synthetic oligonucleotide; CTT chr2 60536389 60536410 60536394 60536389 -
tctaataaatgttaaaatgtgg

SEQ ID NO: 213224 - DNA, 22 bp, Artificial Sequence
  Synthetic oligonucleotide; TTT chr2 60536388 60536409 60536393 60536388 -
ctaataaatgttaaaatgtggc

SEQ ID NO: 213225 - DNA, 22 bp, Artificial Sequence
  Synthetic oligonucleotide; TTC chr2 60536387 60536408 60536392 60536387 -
taataaatgttaaaatgtggca

SEQ ID NO: 213226 - DNA, 22 bp, Artificial Sequence
  Synthetic oligonucleotide; CTA chr2 60536385 60536406 60536390 60536385 -
ataaatgttaaaatgtggcaca

SEQ ID NO: 213227 - DNA, 22 bp, Artificial Sequence
  Synthetic oligonucleotide; TTA chr2 60536375 60536396 60536380 60536375 -
aaatgtggcacatttctgagca

SEQ ID NO: 213228 - DNA, 22 bp, Artificial Sequence
  Synthetic oligonucleotide; TTT chr2 60536360 60536381 60536365 60536360 -
ctgagcagggcccaaggataag

SEQ ID NO: 213229 - DNA, 22 bp, Artificial Sequence
  Synthetic oligonucleotide; TTC chr2 60536359 60536380 60536364 60536359 -
tgagcagggcccaaggataaga

SEQ ID NO: 213230 - DNA, 22 bp, Artificial Sequence
  Synthetic oligonucleotide; CTG chr2 60536357 60536378 60536362 60536357 -
agcagggcccaaggataagaga

SEQ ID NO: 213231 - DNA, 22 bp, Artificial Sequence
  Synthetic oligonucleotide; TTA chr2 60536331 60536352 60536336 60536331 -
agaaatcagggggtagtacctg

SEQ ID NO: 213232 - DNA, 22 bp, Artificial Sequence
  Synthetic oligonucleotide; CTG chr2 60536309 60536330 60536314 60536309 -
agatttttctcccttctctttc

SEQ ID NO: 213233 - DNA, 22 bp, Artificial Sequence
  Synthetic oligonucleotide; TTT chr2 60536303 60536324 60536308 60536303 -
ttctcccttctctttccgattt

SEQ ID NO: 213234 - DNA, 22 bp, Artificial Sequence
  Synthetic oligonucleotide; TTT chr2 60536302 60536323 60536307 60536302 -
tctcccttctctttccgatttc

SEQ ID NO: 213235 - DNA, 22 bp, Artificial Sequence
  Synthetic oligonucleotide; TTT chr2 60536301 60536322 60536306 60536301 -
ctcccttctctttccgatttcc

SEQ ID NO: 213236 - DNA, 22 bp, Artificial Sequence
  Synthetic oligonucleotide; TTC chr2 60536300 60536321 60536305 60536300 -
tcccttctctttccgatttcct

SEQ ID NO: 213237 - DNA, 22 bp, Artificial Sequence
  Synthetic oligonucleotide; CTC chr2 60536298 60536319 60536303 60536298 -
ccttctctttccgatttccttg

SEQ ID NO: 213238 - DNA, 22 bp, Artificial Sequence
  Synthetic oligonucleotide; CTT chr2 60536294 60536315 60536299 60536294 -
ctctttccgatttccttgataa

SEQ ID NO: 213239 - DNA, 22 bp, Artificial Sequence
  Synthetic oligonucleotide; TTC chr2 60536293 60536314 60536298 60536293 -
tctttccgatttccttgataac

SEQ ID NO: 213240 - DNA, 22 bp, Artificial Sequence
  Synthetic oligonucleotide; CTC chr2 60536291 60536312 60536296 60536291 -
tttccgatttccttgataacat

SEQ ID NO: 213241 - DNA, 22 bp, Artificial Sequence
  Synthetic oligonucleotide; CTT chr2 60536289 60536310 60536294 60536289 -
tccgatttccttgataacatcc

SEQ ID NO: 213242 - DNA, 22 bp, Artificial Sequence
  Synthetic oligonucleotide; TTT chr2 60536288 60536309 60536293 60536288 -
ccgatttccttgataacatcca

SEQ ID NO: 213243 - DNA, 22 bp, Artificial Sequence
  Synthetic oligonucleotide; TTC chr2 60536287 60536308 60536292 60536287 -
cgatttccttgataacatccac

SEQ ID NO: 213244 - DNA, 22 bp, Artificial Sequence
  Synthetic oligonucleotide; TTT chr2 60536281 60536302 60536286 60536281 -
ccttgataacatccacatttcc

SEQ ID NO: 213245 - DNA, 22 bp, Artificial Sequence
  Synthetic oligonucleotide; TTC chr2 60536280 60536301 60536285 60536280 -
cttgataacatccacatttccg

SEQ ID NO: 213246 - DNA, 22 bp, Artificial Sequence
  Synthetic oligonucleotide; CTT chr2 60536277 60536298 60536282 60536277 -
gataacatccacatttccggta

SEQ ID NO: 213247 - DNA, 22 bp, Artificial Sequence
  Synthetic oligonucleotide; TTG chr2 60536276 60536297 60536281 60536276 -
ataacatccacatttccggtaa

SEQ ID NO: 213248 - DNA, 22 bp, Artificial Sequence
  Synthetic oligonucleotide; TTT chr2 60536261 60536282 60536266 60536261 -
ccggtaagatcaactctaggag

SEQ ID NO: 213249 - DNA, 22 bp, Artificial Sequence
  Synthetic oligonucleotide; TTC chr2 60536260 60536281 60536265 60536260 -
cggtaagatcaactctaggaga

SEQ ID NO: 213250 - DNA, 22 bp, Artificial Sequence
  Synthetic oligonucleotide; CTC chr2 60536245 60536266 60536250 60536245 -
taggagaaagtctgaggctggg

SEQ ID NO: 213251 - DNA, 22 bp, Artificial Sequence
  Synthetic oligonucleotide; CTA chr2 60536243 60536264 60536248 60536243 -
ggagaaagtctgaggctggggg

SEQ ID NO: 213252 - DNA, 22 bp, Artificial Sequence
  Synthetic oligonucleotide; CTG chr2 60536231 60536252 60536236 60536231 -
aggctgggggagagagggggag

SEQ ID NO: 213253 - DNA, 22 bp, Artificial Sequence
  Synthetic oligonucleotide; CTG chr2 60536225 60536246 60536230 60536225 -
ggggagagagggggagaagggt

SEQ ID NO: 213254 - DNA, 22 bp, Artificial Sequence
  Synthetic oligonucleotide; TTC chr2 60536189 60536210 60536194 60536189 -
ttggaatattcttcgatagcag

SEQ ID NO: 213255 - DNA, 22 bp, Artificial Sequence
  Synthetic oligonucleotide; CTT chr2 60536187 60536208 60536192 60536187 -
ggaatattcttcgatagcagtt

SEQ ID NO: 213256 - DNA, 22 bp, Artificial Sequence
  Synthetic oligonucleotide; TTG chr2 60536186 60536207 60536191 60536186 -
gaatattcttcgatagcagttc

SEQ ID NO: 213257 - DNA, 22 bp, Artificial Sequence
  Synthetic oligonucleotide; TTC chr2 60536178 60536199 60536183 60536178 -
ttcgatagcagttcaaatgaaa

SEQ ID NO: 213258 - DNA, 22 bp, Artificial Sequence
  Synthetic oligonucleotide; CTT chr2 60536176 60536197 60536181 60536176 -
cgatagcagttcaaatgaaatc

SEQ ID NO: 213259 - DNA, 22 bp, Artificial Sequence
  Synthetic oligonucleotide; TTC chr2 60536175 60536196 60536180 60536175 -
gatagcagttcaaatgaaatcc

SEQ ID NO: 213260 - DNA, 22 bp, Artificial Sequence
  Synthetic oligonucleotide; TTC chr2 60536164 60536185 60536169 60536164 -
aaatgaaatccccacagcagag

SEQ ID NO: 213261 - DNA, 22 bp, Artificial Sequence
  Synthetic oligonucleotide; CTT chr2 60536137 60536158 60536142 60536137 -
ttgggtctagcagtggagcggt

SEQ ID NO: 213262 - DNA, 22 bp, Artificial Sequence
  Synthetic oligonucleotide; TTT chr2 60536136 60536157 60536141 60536136 -
tgggtctagcagtggagcggta

SEQ ID NO: 213263 - DNA, 22 bp, Artificial Sequence
  Synthetic oligonucleotide; TTT chr2 60536135 60536156 60536140 60536135 -
gggtctagcagtggagcggtaa

SEQ ID NO: 213264 - DNA, 22 bp, Artificial Sequence
  Synthetic oligonucleotide; TTG chr2 60536134 60536155 60536139 60536134 -
ggtctagcagtggagcggtaag

SEQ ID NO: 213265 - DNA, 22 bp, Artificial Sequence
  Synthetic oligonucleotide; CTA chr2 60536128 60536149 60536133 60536128 -
gcagtggagcggtaagctggga

SEQ ID NO: 213266 - DNA, 22 bp, Artificial Sequence
  Synthetic oligonucleotide; CTG chr2 60536109 60536130 60536114 60536109 -
ggacacgtggcctttcgaagct

SEQ ID NO: 213267 - DNA, 22 bp, Artificial Sequence
  Synthetic oligonucleotide; CTT chr2 60536095 60536116 60536100 60536095 -
tcgaagctgttattctcagtct

SEQ ID NO: 213268 - DNA, 22 bp, Artificial Sequence
  Synthetic oligonucleotide; TTT chr2 60536094 60536115 60536099 60536094 -
cgaagctgttattctcagtctg

SEQ ID NO: 213269 - DNA, 22 bp, Artificial Sequence
  Synthetic oligonucleotide; TTC chr2 60536093 60536114 60536098 60536093 -
gaagctgttattctcagtctga

SEQ ID NO: 213270 - DNA, 22 bp, Artificial Sequence
  Synthetic oligonucleotide; CTG chr2 60536086 60536107 60536091 60536086 -
ttattctcagtctgacttgcac

SEQ ID NO: 213271 - DNA, 22 bp, Artificial Sequence
  Synthetic oligonucleotide; TTA chr2 60536083 60536104 60536088 60536083 -
ttctcagtctgacttgcacacc

SEQ ID NO: 213272 - DNA, 22 bp, Artificial Sequence
  Synthetic oligonucleotide; TTC chr2 60536080 60536101 60536085 60536080 -
tcagtctgacttgcacaccagc

SEQ ID NO: 213273 - DNA, 22 bp, Artificial Sequence
  Synthetic oligonucleotide; CTC chr2 60536078 60536099 60536083 60536078 -
agtctgacttgcacaccagctg

SEQ ID NO: 213274 - DNA, 22 bp, Artificial Sequence
  Synthetic oligonucleotide; CTG chr2 60536072 60536093 60536077 60536072 -
acttgcacaccagctgagatag

SEQ ID NO: 213275 - DNA, 22 bp, Artificial Sequence
  Synthetic oligonucleotide; CTT chr2 60536068 60536089 60536073 60536068 -
gcacaccagctgagataggact

SEQ ID NO: 213276 - DNA, 22 bp, Artificial Sequence
  Synthetic oligonucleotide; TTG chr2 60536067 60536088 60536072 60536067 -
cacaccagctgagataggactt

SEQ ID NO: 213277 - DNA, 22 bp, Artificial Sequence
  Synthetic oligonucleotide; CTG chr2 60536056 60536077 60536061 60536056 -
agataggacttaacatatactt

SEQ ID NO: 213278 - DNA, 22 bp, Artificial Sequence
  Synthetic oligonucleotide; CTT chr2 60536045 60536066 60536050 60536045 -
aacatatactttcttgctttca

SEQ ID NO: 213279 - DNA, 22 bp, Artificial Sequence
  Synthetic oligonucleotide; TTA chr2 60536044 60536065 60536049 60536044 -
acatatactttcttgctttcac

SEQ ID NO: 213280 - DNA, 22 bp, Artificial Sequence
  Synthetic oligonucleotide; CTT chr2 60536034 60536055 60536039 60536034 -
tcttgctttcacctgggttgga

SEQ ID NO: 213281 - DNA, 22 bp, Artificial Sequence
  Synthetic oligonucleotide; TTT chr2 60536033 60536054 60536038 60536033 -
cttgctttcacctgggttggag

SEQ ID NO: 213282 - DNA, 22 bp, Artificial Sequence
  Synthetic oligonucleotide; TTC chr2 60536032 60536053 60536037 60536032 -
ttgctttcacctgggttggaga

SEQ ID NO: 213283 - DNA, 22 bp, Artificial Sequence
  Synthetic oligonucleotide; CTT chr2 60536030 60536051 60536035 60536030 -
gctttcacctgggttggagagg

SEQ ID NO: 213284 - DNA, 22 bp, Artificial Sequence
  Synthetic oligonucleotide; TTG chr2 60536029 60536050 60536034 60536029 -
ctttcacctgggttggagaggt

SEQ ID NO: 213285 - DNA, 22 bp, Artificial Sequence
  Synthetic oligonucleotide; CTT chr2 60536026 60536047 60536031 60536026 -
tcacctgggttggagaggttgg

SEQ ID NO: 213286 - DNA, 22 bp, Artificial Sequence
  Synthetic oligonucleotide; TTT chr2 60536025 60536046 60536030 60536025 -
cacctgggttggagaggttggg

SEQ ID NO: 213287 - DNA, 22 bp, Artificial Sequence
  Synthetic oligonucleotide; TTC chr2 60536024 60536045 60536029 60536024 -
acctgggttggagaggttgggg

SEQ ID NO: 213288 - DNA, 22 bp, Artificial Sequence
  Synthetic oligonucleotide; CTG chr2 60536019 60536040 60536024 60536019 -
ggttggagaggttggggttggg

SEQ ID NO: 213289 - DNA, 22 bp, Artificial Sequence
  Synthetic oligonucleotide; TTG chr2 60536014 60536035 60536019 60536014 -
gagaggttggggttgggaggaa

SEQ ID NO: 213290 - DNA, 22 bp, Artificial Sequence
  Synthetic oligonucleotide; TTG chr2 60536005 60536026 60536010 60536005 -
gggttgggaggaagaggaggag

SEQ ID NO: 213291 - DNA, 22 bp, Artificial Sequence
  Synthetic oligonucleotide; TTG chr2 60535999 60536020 60536004 60535999 -
ggaggaagaggaggagttcatt

SEQ ID NO: 213292 - DNA, 22 bp, Artificial Sequence
  Synthetic oligonucleotide; TTC chr2 60535980 60536001 60535985 60535980 -
attgggaattctgtcactagaa

SEQ ID NO: 213293 - DNA, 22 bp, Artificial Sequence
  Synthetic oligonucleotide; TTG chr2 60535976 60535997 60535981 60535976 -
ggaattctgtcactagaatttt

SEQ ID NO: 213294 - DNA, 22 bp, Artificial Sequence
  Synthetic oligonucleotide; TTC chr2 60535969 60535990 60535974 60535969 -
tgtcactagaattttttaaatg

SEQ ID NO: 213295 - DNA, 22 bp, Artificial Sequence
  Synthetic oligonucleotide; CTG chr2 60535967 60535988 60535972 60535967 -
tcactagaattttttaaatgtc

SEQ ID NO: 213296 - DNA, 22 bp, Artificial Sequence
  Synthetic oligonucleotide; CTA chr2 60535961 60535982 60535966 60535961 -
gaattttttaaatgtcaggagg

SEQ ID NO: 213297 - DNA, 22 bp, Artificial Sequence
  Synthetic oligonucleotide; TTT chr2 60535955 60535976 60535960 60535955 -
tttaaatgtcaggaggttagca

SEQ ID NO: 213298 - DNA, 22 bp, Artificial Sequence
  Synthetic oligonucleotide; TTT chr2 60535954 60535975 60535959 60535954 -
ttaaatgtcaggaggttagcaa

SEQ ID NO: 213299 - DNA, 22 bp, Artificial Sequence
  Synthetic oligonucleotide; TTT chr2 60535953 60535974 60535958 60535953 -
taaatgtcaggaggttagcaag

SEQ ID NO: 213300 - DNA, 22 bp, Artificial Sequence
  Synthetic oligonucleotide; TTT chr2 60535952 60535973 60535957 60535952 -
aaatgtcaggaggttagcaagg

SEQ ID NO: 213301 - DNA, 22 bp, Artificial Sequence
  Synthetic oligonucleotide; TTA chr2 60535951 60535972 60535956 60535951 -
aatgtcaggaggttagcaaggt

SEQ ID NO: 213302 - DNA, 22 bp, Artificial Sequence
  Synthetic oligonucleotide; TTA chr2 60535936 60535957 60535941 60535936 -
gcaaggtgtgagttagcattca

SEQ ID NO: 213303 - DNA, 22 bp, Artificial Sequence
  Synthetic oligonucleotide; TTA chr2 60535921 60535942 60535926 60535921 -
gcattcaagcaaaggattcttc

SEQ ID NO: 213304 - DNA, 22 bp, Artificial Sequence
  Synthetic oligonucleotide; TTC chr2 60535915 60535936 60535920 60535915 -
aagcaaaggattcttctccaga

SEQ ID NO: 213305 - DNA, 22 bp, Artificial Sequence
  Synthetic oligonucleotide; TTC chr2 60535902 60535923 60535907 60535902 -
ttctccagactagtaattggaa

SEQ ID NO: 213306 - DNA, 22 bp, Artificial Sequence
  Synthetic oligonucleotide; CTT chr2 60535900 60535921 60535905 60535900 -
ctccagactagtaattggaaag

SEQ ID NO: 213307 - DNA, 22 bp, Artificial Sequence
  Synthetic oligonucleotide; TTC chr2 60535899 60535920 60535904 60535899 -
tccagactagtaattggaaagc

SEQ ID NO: 213308 - DNA, 22 bp, Artificial Sequence
  Synthetic oligonucleotide; CTC chr2 60535897 60535918 60535902 60535897 -
cagactagtaattggaaagcct

SEQ ID NO: 213309 - DNA, 22 bp, Artificial Sequence
  Synthetic oligonucleotide; CTA chr2 60535890 60535911 60535895 60535890 -
gtaattggaaagcctgcaaatc

SEQ ID NO: 213310 - DNA, 22 bp, Artificial Sequence
  Synthetic oligonucleotide; TTG chr2 60535883 60535904 60535888 60535883 -
gaaagcctgcaaatccaggttc

SEQ ID NO: 213311 - DNA, 22 bp, Artificial Sequence
  Synthetic oligonucleotide; CTG chr2 60535874 60535895 60535879 60535874 -
caaatccaggttcccacgatac

SEQ ID NO: 213312 - DNA, 22 bp, Artificial Sequence
  Synthetic oligonucleotide; TTC chr2 60535861 60535882 60535866 60535861 -
ccacgatactctctaataactg

SEQ ID NO: 213313 - DNA, 22 bp, Artificial Sequence
  Synthetic oligonucleotide; CTC chr2 60535850 60535871 60535855 60535850 -
tctaataactggggtgggatgg

SEQ ID NO: 213314 - DNA, 22 bp, Artificial Sequence
  Synthetic oligonucleotide; CTC chr2 60535848 60535869 60535853 60535848 -
taataactggggtgggatggtg

SEQ ID NO: 213315 - DNA, 22 bp, Artificial Sequence
  Synthetic oligonucleotide; CTA chr2 60535846 60535867 60535851 60535846 -
ataactggggtgggatggtggt

SEQ ID NO: 213316 - DNA, 22 bp, Artificial Sequence
  Synthetic oligonucleotide; CTG chr2 60535839 60535860 60535844 60535839 -
gggtgggatggtggtggtgggt

SEQ ID NO: 213317 - DNA, 22 bp, Artificial Sequence
  Synthetic oligonucleotide; CTT chr2 60535803 60535824 60535808 60535803 -
tctgaatgtcagctgatgtctg

SEQ ID NO: 213318 - DNA, 22 bp, Artificial Sequence
  Synthetic oligonucleotide; TTT chr2 60535802 60535823 60535807 60535802 -
ctgaatgtcagctgatgtctgc

SEQ ID NO: 213319 - DNA, 22 bp, Artificial Sequence
  Synthetic oligonucleotide; TTC chr2 60535801 60535822 60535806 60535801 -
tgaatgtcagctgatgtctgca

SEQ ID NO: 213320 - DNA, 22 bp, Artificial Sequence
  Synthetic oligonucleotide; CTG chr2 60535799 60535820 60535804 60535799 -
aatgtcagctgatgtctgcatg

SEQ ID NO: 213321 - DNA, 22 bp, Artificial Sequence
  Synthetic oligonucleotide; CTG chr2 60535788 60535809 60535793 60535788 -
atgtctgcatgacccgttcacc

SEQ ID NO: 213322 - DNA, 22 bp, Artificial Sequence
  Synthetic oligonucleotide; CTG chr2 60535781 60535802 60535786 60535781 -
catgacccgttcaccatggatt

SEQ ID NO: 213323 - DNA, 22 bp, Artificial Sequence
  Synthetic oligonucleotide; TTC chr2 60535769 60535790 60535774 60535769 -
accatggattaaatgcggctgg

SEQ ID NO: 213324 - DNA, 22 bp, Artificial Sequence
  Synthetic oligonucleotide; TTA chr2 60535758 60535779 60535763 60535758 -
aatgcggctggtgccgaatgga

SEQ ID NO: 213325 - DNA, 22 bp, Artificial Sequence
  Synthetic oligonucleotide; CTG chr2 60535748 60535769 60535753 60535748 -
gtgccgaatggaggaaatcaga

SEQ ID NO: 213326 - DNA, 22 bp, Artificial Sequence
  Synthetic oligonucleotide; CTC chr2 60535714 60535735 60535719 60535714 -
aagcaacaggatttgcactcct

SEQ ID NO: 213327 - DNA, 22 bp, Artificial Sequence
  Synthetic oligonucleotide; TTT chr2 60535700 60535721 60535705 60535700 -
gcactcctcagaagtaaaccag

SEQ ID NO: 213328 - DNA, 22 bp, Artificial Sequence
  Synthetic oligonucleotide; TTG chr2 60535699 60535720 60535704 60535699 -
cactcctcagaagtaaaccaga

SEQ ID NO: 213329 - DNA, 22 bp, Artificial Sequence
  Synthetic oligonucleotide; CTC chr2 60535694 60535715 60535699 60535694 -
ctcagaagtaaaccagaccttg

SEQ ID NO: 213330 - DNA, 22 bp, Artificial Sequence
  Synthetic oligonucleotide; CTC chr2 60535691 60535712 60535696 60535691 -
agaagtaaaccagaccttgctc

SEQ ID NO: 213331 - DNA, 22 bp, Artificial Sequence
  Synthetic oligonucleotide; CTT chr2 60535673 60535694 60535678 60535673 -
gctcctctccctcctgtgcttc

SEQ ID NO: 213332 - DNA, 22 bp, Artificial Sequence
  Synthetic oligonucleotide; TTG chr2 60535672 60535693 60535677 60535672 -
ctcctctccctcctgtgcttct

SEQ ID NO: 213333 - DNA, 22 bp, Artificial Sequence
  Synthetic oligonucleotide; CTC chr2 60535669 60535690 60535674 60535669 -
ctctccctcctgtgcttctcct

SEQ ID NO: 213334 - DNA, 22 bp, Artificial Sequence
  Synthetic oligonucleotide; CTC chr2 60535666 60535687 60535671 60535666 -
tccctcctgtgcttctcctttc

SEQ ID NO: 213335 - DNA, 22 bp, Artificial Sequence
  Synthetic oligonucleotide; CTC chr2 60535664 60535685 60535669 60535664 -
cctcctgtgcttctcctttctt

SEQ ID NO: 213336 - DNA, 22 bp, Artificial Sequence
  Synthetic oligonucleotide; CTC chr2 60535660 60535681 60535665 60535660 -
ctgtgcttctcctttcttgctg

SEQ ID NO: 213337 - DNA, 22 bp, Artificial Sequence
  Synthetic oligonucleotide; CTG chr2 60535657 60535678 60535662 60535657 -
tgcttctcctttcttgctggtt

SEQ ID NO: 213338 - DNA, 22 bp, Artificial Sequence
  Synthetic oligonucleotide; CTT chr2 60535652 60535673 60535657 60535652 -
ctcctttcttgctggtttccct

SEQ ID NO: 213339 - DNA, 22 bp, Artificial Sequence
  Synthetic oligonucleotide; TTC chr2 60535651 60535672 60535656 60535651 -
tcctttcttgctggtttccctt

SEQ ID NO: 213340 - DNA, 22 bp, Artificial Sequence
  Synthetic oligonucleotide; CTC chr2 60535649 60535670 60535654 60535649 -
ctttcttgctggtttccctttg

SEQ ID NO: 213341 - DNA, 22 bp, Artificial Sequence
  Synthetic oligonucleotide; CTT chr2 60535646 60535667 60535651 60535646 -
tcttgctggtttccctttggaa

SEQ ID NO: 213342 - DNA, 22 bp, Artificial Sequence
  Synthetic oligonucleotide; TTT chr2 60535645 60535666 60535650 60535645 -
cttgctggtttccctttggaag

SEQ ID NO: 213343 - DNA, 22 bp, Artificial Sequence
  Synthetic oligonucleotide; TTC chr2 60535644 60535665 60535649 60535644 -
ttgctggtttccctttggaagc

SEQ ID NO: 213344 - DNA, 22 bp, Artificial Sequence
  Synthetic oligonucleotide; CTT chr2 60535642 60535663 60535647 60535642 -
gctggtttccctttggaagcag

SEQ ID NO: 213345 - DNA, 22 bp, Artificial Sequence
  Synthetic oligonucleotide; TTG chr2 60535641 60535662 60535646 60535641 -
ctggtttccctttggaagcaga

SEQ ID NO: 213346 - DNA, 22 bp, Artificial Sequence
  Synthetic oligonucleotide; CTG chr2 60535638 60535659 60535643 60535638 -
gtttccctttggaagcagaaac

SEQ ID NO: 213347 - DNA, 22 bp, Artificial Sequence
  Synthetic oligonucleotide; TTT chr2 60535634 60535655 60535639 60535634 -
ccctttggaagcagaaacttct

SEQ ID NO: 213348 - DNA, 22 bp, Artificial Sequence
  Synthetic oligonucleotide; TTC chr2 60535633 60535654 60535638 60535633 -
cctttggaagcagaaacttcta

SEQ ID NO: 213349 - DNA, 22 bp, Artificial Sequence
  Synthetic oligonucleotide; CTT chr2 60535629 60535650 60535634 60535629 -
tggaagcagaaacttctaaaat

SEQ ID NO: 213350 - DNA, 22 bp, Artificial Sequence
  Synthetic oligonucleotide; TTT chr2 60535628 60535649 60535633 60535628 -
ggaagcagaaacttctaaaatt

SEQ ID NO: 213351 - DNA, 22 bp, Artificial Sequence
  Synthetic oligonucleotide; TTG chr2 60535627 60535648 60535632 60535627 -
gaagcagaaacttctaaaatta

SEQ ID NO: 213352 - DNA, 22 bp, Artificial Sequence
  Synthetic oligonucleotide; CTT chr2 60535614 60535635 60535619 60535614 -
ctaaaattaatgccactccaag

SEQ ID NO: 213353 - DNA, 22 bp, Artificial Sequence
  Synthetic oligonucleotide; TTC chr2 60535613 60535634 60535618 60535613 -
taaaattaatgccactccaagc

SEQ ID NO: 213354 - DNA, 22 bp, Artificial Sequence
  Synthetic oligonucleotide; CTA chr2 60535611 60535632 60535616 60535611 -
aaattaatgccactccaagcca

SEQ ID NO: 213355 - DNA, 22 bp, Artificial Sequence
  Synthetic oligonucleotide; TTA chr2 60535605 60535626 60535610 60535605 -
atgccactccaagccaatgaaa

SEQ ID NO: 213356 - DNA, 22 bp, Artificial Sequence
  Synthetic oligonucleotide; CTC chr2 60535596 60535617 60535601 60535596 -
caagccaatgaaaaagctgttt

SEQ ID NO: 213357 - DNA, 22 bp, Artificial Sequence
  Synthetic oligonucleotide; CTG chr2 60535577 60535598 60535582 60535577 -
tttttataccacagtggatgtt

SEQ ID NO: 213358 - DNA, 22 bp, Artificial Sequence
  Synthetic oligonucleotide; TTT chr2 60535574 60535595 60535579 60535574 -
ttataccacagtggatgtttac

SEQ ID NO: 213359 - DNA, 22 bp, Artificial Sequence
  Synthetic oligonucleotide; TTT chr2 60535573 60535594 60535578 60535573 -
tataccacagtggatgtttaca

SEQ ID NO: 213360 - DNA, 22 bp, Artificial Sequence
  Synthetic oligonucleotide; TTT chr2 60535572 60535593 60535577 60535572 -
ataccacagtggatgtttacac

SEQ ID NO: 213361 - DNA, 22 bp, Artificial Sequence
  Synthetic oligonucleotide; TTA chr2 60535571 60535592 60535576 60535571 -
taccacagtggatgtttacaca

SEQ ID NO: 213362 - DNA, 22 bp, Artificial Sequence
  Synthetic oligonucleotide; TTT chr2 60535554 60535575 60535559 60535554 -
acacaggagagacaacttgagg

SEQ ID NO: 213363 - DNA, 22 bp, Artificial Sequence
  Synthetic oligonucleotide; TTA chr2 60535553 60535574 60535558 60535553 -
cacaggagagacaacttgaggg

SEQ ID NO: 213364 - DNA, 22 bp, Artificial Sequence
  Synthetic oligonucleotide; CTT chr2 60535536 60535557 60535541 60535536 -
gagggggaaaaggctttttgga

SEQ ID NO: 213365 - DNA, 22 bp, Artificial Sequence
  Synthetic oligonucleotide; TTG chr2 60535535 60535556 60535540 60535535 -
agggggaaaaggctttttggaa

SEQ ID NO: 213366 - DNA, 22 bp, Artificial Sequence
  Synthetic oligonucleotide; CTT chr2 60535520 60535541 60535525 60535520 -
tttggaagggtggagggactcg

SEQ ID NO: 213367 - DNA, 22 bp, Artificial Sequence
  Synthetic oligonucleotide; TTT chr2 60535519 60535540 60535524 60535519 -
ttggaagggtggagggactcgt

SEQ ID NO: 213368 - DNA, 22 bp, Artificial Sequence
  Synthetic oligonucleotide; TTT chr2 60535518 60535539 60535523 60535518 -
tggaagggtggagggactcgtg

SEQ ID NO: 213369 - DNA, 22 bp, Artificial Sequence
  Synthetic oligonucleotide; TTT chr2 60535517 60535538 60535522 60535517 -
ggaagggtggagggactcgtgt

SEQ ID NO: 213370 - DNA, 22 bp, Artificial Sequence
  Synthetic oligonucleotide; TTG chr2 60535516 60535537 60535521 60535516 -
gaagggtggagggactcgtgtt

SEQ ID NO: 213371 - DNA, 22 bp, Artificial Sequence
  Synthetic oligonucleotide; CTC chr2 60535499 60535520 60535504 60535499 -
gtgttaatctgttctgttggag

SEQ ID NO: 213372 - DNA, 22 bp, Artificial Sequence
  Synthetic oligonucleotide; TTA chr2 60535493 60535514 60535498 60535493 -
atctgttctgttggaggactat

SEQ ID NO: 213373 - DNA, 22 bp, Artificial Sequence
  Synthetic oligonucleotide; CTG chr2 60535488 60535509 60535493 60535488 -
ttctgttggaggactatgcagt

SEQ ID NO: 213374 - DNA, 22 bp, Artificial Sequence
  Synthetic oligonucleotide; TTC chr2 60535485 60535506 60535490 60535485 -
tgttggaggactatgcagtatt

SEQ ID NO: 213375 - DNA, 22 bp, Artificial Sequence
  Synthetic oligonucleotide; CTG chr2 60535483 60535504 60535488 60535483 -
ttggaggactatgcagtattgc

SEQ ID NO: 213376 - DNA, 22 bp, Artificial Sequence
  Synthetic oligonucleotide; TTG chr2 60535480 60535501 60535485 60535480 -
gaggactatgcagtattgccta

SEQ ID NO: 213377 - DNA, 22 bp, Artificial Sequence
  Synthetic oligonucleotide; CTA chr2 60535472 60535493 60535477 60535472 -
tgcagtattgcctatgagcgac

SEQ ID NO: 213378 - DNA, 22 bp, Artificial Sequence
  Synthetic oligonucleotide; TTG chr2 60535462 60535483 60535467 60535462 -
cctatgagcgactctgggctgt

SEQ ID NO: 213379 - DNA, 22 bp, Artificial Sequence
  Synthetic oligonucleotide; CTA chr2 60535458 60535479 60535463 60535458 -
tgagcgactctgggctgttttt

SEQ ID NO: 213380 - DNA, 22 bp, Artificial Sequence
  Synthetic oligonucleotide; CTC chr2 60535448 60535469 60535453 60535448 -
tgggctgtttttgataaattac

SEQ ID NO: 213381 - DNA, 22 bp, Artificial Sequence
  Synthetic oligonucleotide; CTG chr2 60535446 60535467 60535451 60535446 -
ggctgtttttgataaattacca

SEQ ID NO: 213382 - DNA, 22 bp, Artificial Sequence
  Synthetic oligonucleotide; CTG chr2 60535441 60535462 60535446 60535441 -
tttttgataaattaccatgttt

SEQ ID NO: 213383 - DNA, 22 bp, Artificial Sequence
  Synthetic oligonucleotide; TTT chr2 60535438 60535459 60535443 60535438 -
ttgataaattaccatgtttaga

SEQ ID NO: 213384 - DNA, 22 bp, Artificial Sequence
  Synthetic oligonucleotide; TTT chr2 60535437 60535458 60535442 60535437 -
tgataaattaccatgtttagag

SEQ ID NO: 213385 - DNA, 22 bp, Artificial Sequence
  Synthetic oligonucleotide; TTT chr2 60535436 60535457 60535441 60535436 -
gataaattaccatgtttagaga

SEQ ID NO: 213386 - DNA, 22 bp, Artificial Sequence
  Synthetic oligonucleotide; TTG chr2 60535435 60535456 60535440 60535435 -
ataaattaccatgtttagagat

SEQ ID NO: 213387 - DNA, 22 bp, Artificial Sequence
  Synthetic oligonucleotide; TTA chr2 60535427 60535448 60535432 60535427 -
ccatgtttagagataggtttgg

SEQ ID NO: 213388 - DNA, 22 bp, Artificial Sequence
  Synthetic oligonucleotide; TTT chr2 60535419 60535440 60535424 60535419 -
agagataggtttggctcttaag

SEQ ID NO: 213389 - DNA, 22 bp, Artificial Sequence
  Synthetic oligonucleotide; TTA chr2 60535418 60535439 60535423 60535418 -
gagataggtttggctcttaagg

SEQ ID NO: 213390 - DNA, 22 bp, Artificial Sequence
  Synthetic oligonucleotide; TTT chr2 60535407 60535428 60535412 60535407 -
ggctcttaagggcttagtttta

SEQ ID NO: 213391 - DNA, 22 bp, Artificial Sequence
  Synthetic oligonucleotide; TTG chr2 60535406 60535427 60535411 60535406 -
gctcttaagggcttagttttat

SEQ ID NO: 213392 - DNA, 22 bp, Artificial Sequence
  Synthetic oligonucleotide; CTC chr2 60535402 60535423 60535407 60535402 -
ttaagggcttagttttatgaac

SEQ ID NO: 213393 - DNA, 22 bp, Artificial Sequence
  Synthetic oligonucleotide; CTT chr2 60535400 60535421 60535405 60535400 -
aagggcttagttttatgaacaa

SEQ ID NO: 213394 - DNA, 22 bp, Artificial Sequence
  Synthetic oligonucleotide; TTA chr2 60535399 60535420 60535404 60535399 -
agggcttagttttatgaacaaa

SEQ ID NO: 213395 - DNA, 22 bp, Artificial Sequence
  Synthetic oligonucleotide; CTT chr2 60535392 60535413 60535397 60535392 -
agttttatgaacaaagtccgtg

SEQ ID NO: 213396 - DNA, 22 bp, Artificial Sequence
  Synthetic oligonucleotide; TTA chr2 60535391 60535412 60535396 60535391 -
gttttatgaacaaagtccgtga

SEQ ID NO: 213397 - DNA, 22 bp, Artificial Sequence
  Synthetic oligonucleotide; TTT chr2 60535387 60535408 60535392 60535387 -
tatgaacaaagtccgtgacgat

SEQ ID NO: 213398 - DNA, 22 bp, Artificial Sequence
  Synthetic oligonucleotide; TTT chr2 60535386 60535407 60535391 60535386 -
atgaacaaagtccgtgacgatg

SEQ ID NO: 213399 - DNA, 22 bp, Artificial Sequence
  Synthetic oligonucleotide; TTA chr2 60535385 60535406 60535390 60535385 -
tgaacaaagtccgtgacgatgt

SEQ ID NO: 213400 - DNA, 22 bp, Artificial Sequence
  Synthetic oligonucleotide; TTT chr2 60535361 60535382 60535366 60535361 -
gcagcctctgtttgtatcttag

SEQ ID NO: 213401 - DNA, 22 bp, Artificial Sequence
  Synthetic oligonucleotide; TTG chr2 60535360 60535381 60535365 60535360 -
cagcctctgtttgtatcttagc

SEQ ID NO: 213402 - DNA, 22 bp, Artificial Sequence
  Synthetic oligonucleotide; CTC chr2 60535353 60535374 60535358 60535353 -
tgtttgtatcttagcccctttg

SEQ ID NO: 213403 - DNA, 22 bp, Artificial Sequence
  Synthetic oligonucleotide; CTG chr2 60535351 60535372 60535356 60535351 -
tttgtatcttagcccctttggc

SEQ ID NO: 213404 - DNA, 22 bp, Artificial Sequence
  Synthetic oligonucleotide; TTT chr2 60535348 60535369 60535353 60535348 -
gtatcttagcccctttggcttg

SEQ ID NO: 213405 - DNA, 22 bp, Artificial Sequence
  Synthetic oligonucleotide; TTG chr2 60535347 60535368 60535352 60535347 -
tatcttagcccctttggcttga

SEQ ID NO: 213406 - DNA, 22 bp, Artificial Sequence
  Synthetic oligonucleotide; CTT chr2 60535341 60535362 60535346 60535341 -
agcccctttggcttgactagaa

SEQ ID NO: 213407 - DNA, 22 bp, Artificial Sequence
  Synthetic oligonucleotide; TTA chr2 60535340 60535361 60535345 60535340 -
gcccctttggcttgactagaag

SEQ ID NO: 213408 - DNA, 22 bp, Artificial Sequence
  Synthetic oligonucleotide; CTT chr2 60535333 60535354 60535338 60535333 -
tggcttgactagaagctctatg

SEQ ID NO: 213409 - DNA, 22 bp, Artificial Sequence
  Synthetic oligonucleotide; TTT chr2 60535332 60535353 60535337 60535332 -
ggcttgactagaagctctatgt

SEQ ID NO: 213410 - DNA, 22 bp, Artificial Sequence
  Synthetic oligonucleotide; TTG chr2 60535331 60535352 60535336 60535331 -
gcttgactagaagctctatgtt

SEQ ID NO: 213411 - DNA, 22 bp, Artificial Sequence
  Synthetic oligonucleotide; CTT chr2 60535327 60535348 60535332 60535327 -
gactagaagctctatgtttagt

SEQ ID NO: 213412 - DNA, 22 bp, Artificial Sequence
  Synthetic oligonucleotide; TTG chr2 60535326 60535347 60535331 60535326 -
actagaagctctatgtttagtt

SEQ ID NO: 213413 - DNA, 22 bp, Artificial Sequence
  Synthetic oligonucleotide; CTA chr2 60535322 60535343 60535327 60535322 -
gaagctctatgtttagtttaag

SEQ ID NO: 213414 - DNA, 22 bp, Artificial Sequence
  Synthetic oligonucleotide; CTC chr2 60535315 60535336 60535320 60535315 -
tatgtttagtttaagctcagtc

SEQ ID NO: 213415 - DNA, 22 bp, Artificial Sequence
  Synthetic oligonucleotide; CTA chr2 60535313 60535334 60535318 60535313 -
tgtttagtttaagctcagtctg

SEQ ID NO: 213416 - DNA, 22 bp, Artificial Sequence
  Synthetic oligonucleotide; TTT chr2 60535308 60535329 60535313 60535308 -
agtttaagctcagtctggaaga

SEQ ID NO: 213417 - DNA, 22 bp, Artificial Sequence
  Synthetic oligonucleotide; TTA chr2 60535307 60535328 60535312 60535307 -
gtttaagctcagtctggaagat

SEQ ID NO: 213418 - DNA, 22 bp, Artificial Sequence
  Synthetic oligonucleotide; TTT chr2 60535303 60535324 60535308 60535303 -
aagctcagtctggaagatatta

SEQ ID NO: 213419 - DNA, 22 bp, Artificial Sequence
  Synthetic oligonucleotide; TTA chr2 60535302 60535323 60535307 60535302 -
agctcagtctggaagatattac

SEQ ID NO: 213420 - DNA, 22 bp, Artificial Sequence
  Synthetic oligonucleotide; CTC chr2 60535297 60535318 60535302 60535297 -
agtctggaagatattacaattt

SEQ ID NO: 213421 - DNA, 22 bp, Artificial Sequence
  Synthetic oligonucleotide; CTG chr2 60535291 60535312 60535296 60535291 -
gaagatattacaattttgcatt

SEQ ID NO: 213422 - DNA, 22 bp, Artificial Sequence
  Synthetic oligonucleotide; TTA chr2 60535281 60535302 60535286 60535281 -
caattttgcattaaaaaaatga

SEQ ID NO: 213423 - DNA, 22 bp, Artificial Sequence
  Synthetic oligonucleotide; TTT chr2 60535275 60535296 60535280 60535275 -
tgcattaaaaaaatgaggaaat

SEQ ID NO: 213424 - DNA, 22 bp, Artificial Sequence
  Synthetic oligonucleotide; TTT chr2 60535274 60535295 60535279 60535274 -
gcattaaaaaaatgaggaaatc

SEQ ID NO: 213425 - DNA, 22 bp, Artificial Sequence
  Synthetic oligonucleotide; TTG chr2 60535273 60535294 60535278 60535273 -
cattaaaaaaatgaggaaatca

SEQ ID NO: 213426 - DNA, 22 bp, Artificial Sequence
  Synthetic oligonucleotide; TTA chr2 60535268 60535289 60535273 60535268 -
aaaaaatgaggaaatcatagga

SEQ ID NO: 213427 - DNA, 22 bp, Artificial Sequence
  Synthetic oligonucleotide; CTT chr2 60535234 60535255 60535239 60535234 -
tgctttttggatgaatcttact

SEQ ID NO: 213428 - DNA, 22 bp, Artificial Sequence
  Synthetic oligonucleotide; TTT chr2 60535233 60535254 60535238 60535233 -
gctttttggatgaatcttactg

SEQ ID NO: 213429 - DNA, 22 bp, Artificial Sequence
  Synthetic oligonucleotide; TTG chr2 60535232 60535253 60535237 60535232 -
ctttttggatgaatcttactga

SEQ ID NO: 213430 - DNA, 22 bp, Artificial Sequence
  Synthetic oligonucleotide; CTT chr2 60535229 60535250 60535234 60535229 -
tttggatgaatcttactgataa

SEQ ID NO: 213431 - DNA, 22 bp, Artificial Sequence
  Synthetic oligonucleotide; TTT chr2 60535228 60535249 60535233 60535228 -
ttggatgaatcttactgataat

SEQ ID NO: 213432 - DNA, 22 bp, Artificial Sequence
  Synthetic oligonucleotide; TTT chr2 60535227 60535248 60535232 60535227 -
tggatgaatcttactgataatt

SEQ ID NO: 213433 - DNA, 22 bp, Artificial Sequence
  Synthetic oligonucleotide; TTT chr2 60535226 60535247 60535231 60535226 -
ggatgaatcttactgataattt

SEQ ID NO: 213434 - DNA, 22 bp, Artificial Sequence
  Synthetic oligonucleotide; TTG chr2 60535225 60535246 60535230 60535225 -
gatgaatcttactgataatttg

SEQ ID NO: 213435 - DNA, 22 bp, Artificial Sequence
  Synthetic oligonucleotide; CTT chr2 60535215 60535236 60535220 60535215 -
actgataatttgctaaagctca

SEQ ID NO: 213436 - DNA, 22 bp, Artificial Sequence
  Synthetic oligonucleotide; TTA chr2 60535214 60535235 60535219 60535214 -
ctgataatttgctaaagctcat

SEQ ID NO: 213437 - DNA, 22 bp, Artificial Sequence
  Synthetic oligonucleotide; CTG chr2 60535211 60535232 60535216 60535211 -
ataatttgctaaagctcatttg

SEQ ID NO: 213438 - DNA, 22 bp, Artificial Sequence
  Synthetic oligonucleotide; TTT chr2 60535204 60535225 60535209 60535204 -
gctaaagctcatttgaatttta

SEQ ID NO: 213439 - DNA, 22 bp, Artificial Sequence
  Synthetic oligonucleotide; TTG chr2 60535203 60535224 60535208 60535203 -
ctaaagctcatttgaattttaa

SEQ ID NO: 213440 - DNA, 22 bp, Artificial Sequence
  Synthetic oligonucleotide; CTA chr2 60535200 60535221 60535205 60535200 -
aagctcatttgaattttaagca

SEQ ID NO: 213441 - DNA, 22 bp, Artificial Sequence
  Synthetic oligonucleotide; CTC chr2 60535194 60535215 60535199 60535194 -
atttgaattttaagcacttctt

SEQ ID NO: 213442 - DNA, 22 bp, Artificial Sequence
  Synthetic oligonucleotide; TTT chr2 60535190 60535211 60535195 60535190 -
gaattttaagcacttctttaat

SEQ ID NO: 213443 - DNA, 22 bp, Artificial Sequence
  Synthetic oligonucleotide; TTG chr2 60535189 60535210 60535194 60535189 -
aattttaagcacttctttaatc

SEQ ID NO: 213444 - DNA, 22 bp, Artificial Sequence
  Synthetic oligonucleotide; TTT chr2 60535184 60535205 60535189 60535184 -
taagcacttctttaatcttcaa

SEQ ID NO: 213445 - DNA, 22 bp, Artificial Sequence
  Synthetic oligonucleotide; TTT chr2 60535183 60535204 60535188 60535183 -
aagcacttctttaatcttcaaa

SEQ ID NO: 213446 - DNA, 22 bp, Artificial Sequence
  Synthetic oligonucleotide; TTA chr2 60535182 60535203 60535187 60535182 -
agcacttctttaatcttcaaag

SEQ ID NO: 213447 - DNA, 22 bp, Artificial Sequence
  Synthetic oligonucleotide; CTT chr2 60535175 60535196 60535180 60535175 -
ctttaatcttcaaaggctaaat

SEQ ID NO: 213448 - DNA, 22 bp, Artificial Sequence
  Synthetic oligonucleotide; TTC chr2 60535174 60535195 60535179 60535174 -
tttaatcttcaaaggctaaatt

SEQ ID NO: 213449 - DNA, 22 bp, Artificial Sequence
  Synthetic oligonucleotide; CTT chr2 60535172 60535193 60535177 60535172 -
taatcttcaaaggctaaattgc

SEQ ID NO: 213450 - DNA, 22 bp, Artificial Sequence
  Synthetic oligonucleotide; TTT chr2 60535171 60535192 60535176 60535171 -
aatcttcaaaggctaaattgct

SEQ ID NO: 213451 - DNA, 22 bp, Artificial Sequence
  Synthetic oligonucleotide; TTA chr2 60535170 60535191 60535175 60535170 -
atcttcaaaggctaaattgctt

SEQ ID NO: 213452 - DNA, 22 bp, Artificial Sequence
  Synthetic oligonucleotide; CTT chr2 60535165 60535186 60535170 60535165 -
caaaggctaaattgctttatga

SEQ ID NO: 213453 - DNA, 22 bp, Artificial Sequence
  Synthetic oligonucleotide; TTC chr2 60535164 60535185 60535169 60535164 -
aaaggctaaattgctttatgaa

SEQ ID NO: 213454 - DNA, 22 bp, Artificial Sequence
  Synthetic oligonucleotide; CTA chr2 60535156 60535177 60535161 60535156 -
aattgctttatgaatatgcatg

SEQ ID NO: 213455 - DNA, 22 bp, Artificial Sequence
  Synthetic oligonucleotide; TTG chr2 60535151 60535172 60535156 60535151 -
ctttatgaatatgcatggtgtg

SEQ ID NO: 213456 - DNA, 22 bp, Artificial Sequence
  Synthetic oligonucleotide; CTT chr2 60535148 60535169 60535153 60535148 -
tatgaatatgcatggtgtgggc

SEQ ID NO: 213457 - DNA, 22 bp, Artificial Sequence
  Synthetic oligonucleotide; TTT chr2 60535147 60535168 60535152 60535147 -
atgaatatgcatggtgtgggca

SEQ ID NO: 213458 - DNA, 22 bp, Artificial Sequence
  Synthetic oligonucleotide; TTA chr2 60535146 60535167 60535151 60535146 -
tgaatatgcatggtgtgggcag

SEQ ID NO: 213459 - DNA, 22 bp, Artificial Sequence
  Synthetic oligonucleotide; CTT chr2 60535120 60535141 60535125 60535120 -
cagttcattacctagttgtaaa

SEQ ID NO: 213460 - DNA, 22 bp, Artificial Sequence
  Synthetic oligonucleotide; TTC chr2 60535119 60535140 60535124 60535119 -
agttcattacctagttgtaaat

SEQ ID NO: 213461 - DNA, 22 bp, Artificial Sequence
  Synthetic oligonucleotide; TTC chr2 60535114 60535135 60535119 60535114 -
attacctagttgtaaattctaa

SEQ ID NO: 213462 - DNA, 22 bp, Artificial Sequence
  Synthetic oligonucleotide; TTA chr2 60535110 60535131 60535115 60535110 -
cctagttgtaaattctaatgac

SEQ ID NO: 213463 - DNA, 22 bp, Artificial Sequence
  Synthetic oligonucleotide; CTA chr2 60535106 60535127 60535111 60535106 -
gttgtaaattctaatgaccatt

SEQ ID NO: 213464 - DNA, 22 bp, Artificial Sequence
  Synthetic oligonucleotide; TTG chr2 60535102 60535123 60535107 60535102 -
taaattctaatgaccattaggt

SEQ ID NO: 213465 - DNA, 22 bp, Artificial Sequence
  Synthetic oligonucleotide; TTC chr2 60535095 60535116 60535100 60535095 -
taatgaccattaggtccttcca

SEQ ID NO: 213466 - DNA, 22 bp, Artificial Sequence
  Synthetic oligonucleotide; CTA chr2 60535093 60535114 60535098 60535093 -
atgaccattaggtccttccagt

SEQ ID NO: 213467 - DNA, 22 bp, Artificial Sequence
  Synthetic oligonucleotide; TTA chr2 60535083 60535104 60535088 60535083 -
ggtccttccagtaattgcgaat

SEQ ID NO: 213468 - DNA, 22 bp, Artificial Sequence
  Synthetic oligonucleotide; CTT chr2 60535076 60535097 60535081 60535076 -
ccagtaattgcgaattgttttg

SEQ ID NO: 213469 - DNA, 22 bp, Artificial Sequence
  Synthetic oligonucleotide; TTC chr2 60535075 60535096 60535080 60535075 -
cagtaattgcgaattgttttgc

SEQ ID NO: 213470 - DNA, 22 bp, Artificial Sequence
  Synthetic oligonucleotide; TTG chr2 60535066 60535087 60535071 60535066 -
cgaattgttttgcatttttgat

SEQ ID NO: 213471 - DNA, 22 bp, Artificial Sequence
  Synthetic oligonucleotide; TTG chr2 60535059 60535080 60535064 60535059 -
ttttgcatttttgattggccta

SEQ ID NO: 213472 - DNA, 22 bp, Artificial Sequence
  Synthetic oligonucleotide; TTT chr2 60535056 60535077 60535061 60535056 -
tgcatttttgattggcctatta

SEQ ID NO: 213473 - DNA, 22 bp, Artificial Sequence
  Synthetic oligonucleotide; TTT chr2 60535055 60535076 60535060 60535055 -
gcatttttgattggcctattaa

SEQ ID NO: 213474 - DNA, 22 bp, Artificial Sequence
  Synthetic oligonucleotide; TTG chr2 60535054 60535075 60535059 60535054 -
catttttgattggcctattaac

SEQ ID NO: 213475 - DNA, 22 bp, Artificial Sequence
  Synthetic oligonucleotide; TTT chr2 60535049 60535070 60535054 60535049 -
ttgattggcctattaacatgta

SEQ ID NO: 213476 - DNA, 22 bp, Artificial Sequence
  Synthetic oligonucleotide; TTT chr2 60535048 60535069 60535053 60535048 -
tgattggcctattaacatgtac

SEQ ID NO: 213477 - DNA, 22 bp, Artificial Sequence
  Synthetic oligonucleotide; TTT chr2 60535047 60535068 60535052 60535047 -
gattggcctattaacatgtaca

SEQ ID NO: 213478 - DNA, 22 bp, Artificial Sequence
  Synthetic oligonucleotide; TTG chr2 60535046 60535067 60535051 60535046 -
attggcctattaacatgtacat

SEQ ID NO: 213479 - DNA, 22 bp, Artificial Sequence
  Synthetic oligonucleotide; TTG chr2 60535042 60535063 60535047 60535042 -
gcctattaacatgtacattcgg

SEQ ID NO: 213480 - DNA, 22 bp, Artificial Sequence
  Synthetic oligonucleotide; CTA chr2 60535037 60535058 60535042 60535037 -
ttaacatgtacattcggtgcac

SEQ ID NO: 213481 - DNA, 22 bp, Artificial Sequence
  Synthetic oligonucleotide; TTA chr2 60535034 60535055 60535039 60535034 -
acatgtacattcggtgcacatc

SEQ ID NO: 213482 - DNA, 22 bp, Artificial Sequence
  Synthetic oligonucleotide; TTC chr2 60535022 60535043 60535027 60535022 -
ggtgcacatcaggctggcctgt

SEQ ID NO: 213483 - DNA, 22 bp, Artificial Sequence
  Synthetic oligonucleotide; CTG chr2 60535006 60535027 60535011 60535006 -
gcctgtcagcctgctgaaggag

SEQ ID NO: 213484 - DNA, 22 bp, Artificial Sequence
  Synthetic oligonucleotide; CTG chr2 60535001 60535022 60535006 60535001 -
tcagcctgctgaaggagaaaaa

SEQ ID NO: 213485 - DNA, 22 bp, Artificial Sequence
  Synthetic oligonucleotide; CTG chr2 60534993 60535014 60534998 60534993 -
ctgaaggagaaaaaaaaggtga

SEQ ID NO: 213486 - DNA, 22 bp, Artificial Sequence
  Synthetic oligonucleotide; CTG chr2 60534990 60535011 60534995 60534990 -
aaggagaaaaaaaaggtgaaaa

SEQ ID NO: 213487 - DNA, 22 bp, Artificial Sequence
  Synthetic oligonucleotide; TTG chr2 60534965 60534986 60534970 60534965 -
tttatagcaccaagattcttag

SEQ ID NO: 213488 - DNA, 22 bp, Artificial Sequence
  Synthetic oligonucleotide; TTT chr2 60534962 60534983 60534967 60534962 -
atagcaccaagattcttagatt

SEQ ID NO: 213489 - DNA, 22 bp, Artificial Sequence
  Synthetic oligonucleotide; TTA chr2 60534961 60534982 60534966 60534961 -
tagcaccaagattcttagattt

SEQ ID NO: 213490 - DNA, 22 bp, Artificial Sequence
  Synthetic oligonucleotide; TTC chr2 60534947 60534968 60534952 60534947 -
ttagattttcaatcttgcaaaa

SEQ ID NO: 213491 - DNA, 22 bp, Artificial Sequence
  Synthetic oligonucleotide; CTT chr2 60534945 60534966 60534950 60534945 -
agattttcaatcttgcaaaatt

SEQ ID NO: 213492 - DNA, 22 bp, Artificial Sequence
  Synthetic oligonucleotide; TTA chr2 60534944 60534965 60534949 60534944 -
gattttcaatcttgcaaaattg

SEQ ID NO: 213493 - DNA, 22 bp, Artificial Sequence
  Synthetic oligonucleotide; TTT chr2 60534939 60534960 60534944 60534939 -
tcaatcttgcaaaattgatgat

SEQ ID NO: 213494 - DNA, 22 bp, Artificial Sequence
  Synthetic oligonucleotide; TTT chr2 60534938 60534959 60534943 60534938 -
caatcttgcaaaattgatgatg

SEQ ID NO: 213495 - DNA, 22 bp, Artificial Sequence
  Synthetic oligonucleotide; TTC chr2 60534937 60534958 60534942 60534937 -
aatcttgcaaaattgatgatgt

SEQ ID NO: 213496 - DNA, 22 bp, Artificial Sequence
  Synthetic oligonucleotide; CTT chr2 60534931 60534952 60534936 60534931 -
gcaaaattgatgatgtaaaaaa

SEQ ID NO: 213497 - DNA, 22 bp, Artificial Sequence
  Synthetic oligonucleotide; TTG chr2 60534930 60534951 60534935 60534930 -
caaaattgatgatgtaaaaaaa

SEQ ID NO: 213498 - DNA, 22 bp, Artificial Sequence
  Synthetic oligonucleotide; TTG chr2 60534922 60534943 60534927 60534922 -
atgatgtaaaaaaattaaagca

SEQ ID NO: 213499 - DNA, 22 bp, Artificial Sequence
  Synthetic oligonucleotide; TTA chr2 60534905 60534926 60534910 60534905 -
aagcagtgttttttcttctcaa

SEQ ID NO: 213500 - DNA, 22 bp, Artificial Sequence
  Synthetic oligonucleotide; TTT chr2 60534894 60534915 60534899 60534894 -
tttcttctcaagattaaaagtt

SEQ ID NO: 213501 - DNA, 22 bp, Artificial Sequence
  Synthetic oligonucleotide; TTT chr2 60534893 60534914 60534898 60534893 -
ttcttctcaagattaaaagttc

SEQ ID NO: 213502 - DNA, 22 bp, Artificial Sequence
  Synthetic oligonucleotide; TTT chr2 60534892 60534913 60534897 60534892 -
tcttctcaagattaaaagttca

SEQ ID NO: 213503 - DNA, 22 bp, Artificial Sequence
  Synthetic oligonucleotide; TTT chr2 60534891 60534912 60534896 60534891 -
cttctcaagattaaaagttcac

SEQ ID NO: 213504 - DNA, 22 bp, Artificial Sequence
  Synthetic oligonucleotide; TTC chr2 60534890 60534911 60534895 60534890 -
ttctcaagattaaaagttcacc

SEQ ID NO: 213505 - DNA, 22 bp, Artificial Sequence
  Synthetic oligonucleotide; CTT chr2 60534888 60534909 60534893 60534888 -
ctcaagattaaaagttcaccaa

SEQ ID NO: 213506 - DNA, 22 bp, Artificial Sequence
  Synthetic oligonucleotide; TTC chr2 60534887 60534908 60534892 60534887 -
tcaagattaaaagttcaccaag

SEQ ID NO: 213507 - DNA, 22 bp, Artificial Sequence
  Synthetic oligonucleotide; CTC chr2 60534885 60534906 60534890 60534885 -
aagattaaaagttcaccaagag

SEQ ID NO: 213508 - DNA, 22 bp, Artificial Sequence
  Synthetic oligonucleotide; TTA chr2 60534878 60534899 60534883 60534878 -
aaagttcaccaagagatttgac

SEQ ID NO: 213509 - DNA, 22 bp, Artificial Sequence
  Synthetic oligonucleotide; TTC chr2 60534871 60534892 60534876 60534871 -
accaagagatttgacatattta

SEQ ID NO: 213510 - DNA, 22 bp, Artificial Sequence
  Synthetic oligonucleotide; TTT chr2 60534859 60534880 60534864 60534859 -
gacatatttaatttacatgatg

SEQ ID NO: 213511 - DNA, 22 bp, Artificial Sequence
  Synthetic oligonucleotide; TTG chr2 60534858 60534879 60534863 60534858 -
acatatttaatttacatgatga

SEQ ID NO: 213512 - DNA, 22 bp, Artificial Sequence
  Synthetic oligonucleotide; TTT chr2 60534850 60534871 60534855 60534850 -
aatttacatgatgactttgcac

SEQ ID NO: 213513 - DNA, 22 bp, Artificial Sequence
  Synthetic oligonucleotide; TTA chr2 60534849 60534870 60534854 60534849 -
atttacatgatgactttgcact

SEQ ID NO: 213514 - DNA, 22 bp, Artificial Sequence
  Synthetic oligonucleotide; TTT chr2 60534845 60534866 60534850 60534845 -
acatgatgactttgcactcctt

SEQ ID NO: 213515 - DNA, 22 bp, Artificial Sequence
  Synthetic oligonucleotide; TTA chr2 60534844 60534865 60534849 60534844 -
catgatgactttgcactccttc

SEQ ID NO: 213516 - DNA, 22 bp, Artificial Sequence
  Synthetic oligonucleotide; CTT chr2 60534833 60534854 60534838 60534833 -
tgcactccttcattaatgtaat

SEQ ID NO: 213517 - DNA, 22 bp, Artificial Sequence
  Synthetic oligonucleotide; TTT chr2 60534832 60534853 60534837 60534832 -
gcactccttcattaatgtaatt

SEQ ID NO: 213518 - DNA, 22 bp, Artificial Sequence
  Synthetic oligonucleotide; TTG chr2 60534831 60534852 60534836 60534831 -
cactccttcattaatgtaattt

SEQ ID NO: 213519 - DNA, 22 bp, Artificial Sequence
  Synthetic oligonucleotide; CTC chr2 60534826 60534847 60534831 60534826 -
cttcattaatgtaatttgcata

SEQ ID NO: 213520 - DNA, 22 bp, Artificial Sequence
  Synthetic oligonucleotide; CTT chr2 60534823 60534844 60534828 60534823 -
cattaatgtaatttgcatatga

SEQ ID NO: 213521 - DNA, 22 bp, Artificial Sequence
  Synthetic oligonucleotide; TTC chr2 60534822 60534843 60534827 60534822 -
attaatgtaatttgcatatgaa

SEQ ID NO: 213522 - DNA, 22 bp, Artificial Sequence
  Synthetic oligonucleotide; TTA chr2 60534818 60534839 60534823 60534818 -
atgtaatttgcatatgaagctg

SEQ ID NO: 213523 - DNA, 22 bp, Artificial Sequence
  Synthetic oligonucleotide; TTT chr2 60534809 60534830 60534814 60534809 -
gcatatgaagctgttgttaatc

SEQ ID NO: 213524 - DNA, 22 bp, Artificial Sequence
  Synthetic oligonucleotide; TTG chr2 60534808 60534829 60534813 60534808 -
catatgaagctgttgttaatca

SEQ ID NO: 213525 - DNA, 22 bp, Artificial Sequence
  Synthetic oligonucleotide; CTG chr2 60534796 60534817 60534801 60534796 -
ttgttaatcacttttgatcatg

SEQ ID NO: 213526 - DNA, 22 bp, Artificial Sequence
  Synthetic oligonucleotide; TTG chr2 60534793 60534814 60534798 60534793 -
ttaatcacttttgatcatgttt

SEQ ID NO: 213527 - DNA, 22 bp, Artificial Sequence
  Synthetic oligonucleotide; TTA chr2 60534790 60534811 60534795 60534790 -
atcacttttgatcatgttttgt

SEQ ID NO: 213528 - DNA, 22 bp, Artificial Sequence
  Synthetic oligonucleotide; CTT chr2 60534783 60534804 60534788 60534783 -
ttgatcatgttttgtgtattag

SEQ ID NO: 213529 - DNA, 22 bp, Artificial Sequence
  Synthetic oligonucleotide; TTT chr2 60534782 60534803 60534787 60534782 -
tgatcatgttttgtgtattagc

SEQ ID NO: 213530 - DNA, 22 bp, Artificial Sequence
  Synthetic oligonucleotide; TTT chr2 60534781 60534802 60534786 60534781 -
gatcatgttttgtgtattagct

SEQ ID NO: 213531 - DNA, 22 bp, Artificial Sequence
  Synthetic oligonucleotide; TTG chr2 60534780 60534801 60534785 60534780 -
atcatgttttgtgtattagctg

SEQ ID NO: 213532 - DNA, 22 bp, Artificial Sequence
  Synthetic oligonucleotide; TTT chr2 60534771 60534792 60534776 60534771 -
tgtgtattagctgcctcagtgg

SEQ ID NO: 213533 - DNA, 22 bp, Artificial Sequence
  Synthetic oligonucleotide; TTT chr2 60534770 60534791 60534775 60534770 -
gtgtattagctgcctcagtggc

SEQ ID NO: 213534 - DNA, 22 bp, Artificial Sequence
  Synthetic oligonucleotide; TTG chr2 60534769 60534790 60534774 60534769 -
tgtattagctgcctcagtggct

SEQ ID NO: 213535 - DNA, 22 bp, Artificial Sequence
  Synthetic oligonucleotide; TTA chr2 60534762 60534783 60534767 60534762 -
gctgcctcagtggctctcctcc

SEQ ID NO: 213536 - DNA, 22 bp, Artificial Sequence
  Synthetic oligonucleotide; CTG chr2 60534758 60534779 60534763 60534758 -
cctcagtggctctcctcctcag

SEQ ID NO: 213537 - DNA, 22 bp, Artificial Sequence
  Synthetic oligonucleotide; CTC chr2 60534754 60534775 60534759 60534754 -
agtggctctcctcctcagatgc

SEQ ID NO: 213538 - DNA, 22 bp, Artificial Sequence
  Synthetic oligonucleotide; CTC chr2 60534746 60534767 60534751 60534746 -
tcctcctcagatgccccagtag

SEQ ID NO: 213539 - DNA, 22 bp, Artificial Sequence
  Synthetic oligonucleotide; CTC chr2 60534744 60534765 60534749 60534744 -
ctcctcagatgccccagtagaa

SEQ ID NO: 213540 - DNA, 22 bp, Artificial Sequence
  Synthetic oligonucleotide; CTC chr2 60534741 60534762 60534746 60534741 -
ctcagatgccccagtagaaagg

SEQ ID NO: 213541 - DNA, 22 bp, Artificial Sequence
  Synthetic oligonucleotide; CTC chr2 60534738 60534759 60534743 60534738 -
agatgccccagtagaaaggagc

SEQ ID NO: 213542 - DNA, 22 bp, Artificial Sequence
  Synthetic oligonucleotide; CTT chr2 60534701 60534722 60534706 60534701 -
cttgccaagtttcctttagtga

SEQ ID NO: 213543 - DNA, 22 bp, Artificial Sequence
  Synthetic oligonucleotide; TTC chr2 60534700 60534721 60534705 60534700 -
ttgccaagtttcctttagtgaa

SEQ ID NO: 213544 - DNA, 22 bp, Artificial Sequence
  Synthetic oligonucleotide; CTT chr2 60534698 60534719 60534703 60534698 -
gccaagtttcctttagtgaatt

SEQ ID NO: 213545 - DNA, 22 bp, Artificial Sequence
  Synthetic oligonucleotide; TTG chr2 60534697 60534718 60534702 60534697 -
ccaagtttcctttagtgaattg

SEQ ID NO: 213546 - DNA, 22 bp, Artificial Sequence
  Synthetic oligonucleotide; TTT chr2 60534689 60534710 60534694 60534689 -
cctttagtgaattgaggaatta

SEQ ID NO: 213547 - DNA, 22 bp, Artificial Sequence
  Synthetic oligonucleotide; TTC chr2 60534688 60534709 60534693 60534688 -
ctttagtgaattgaggaattag

SEQ ID NO: 213548 - DNA, 22 bp, Artificial Sequence
  Synthetic oligonucleotide; CTT chr2 60534685 60534706 60534690 60534685 -
tagtgaattgaggaattagaag

SEQ ID NO: 213549 - DNA, 22 bp, Artificial Sequence
  Synthetic oligonucleotide; TTT chr2 60534684 60534705 60534689 60534684 -
agtgaattgaggaattagaagt

SEQ ID NO: 213550 - DNA, 22 bp, Artificial Sequence
  Synthetic oligonucleotide; TTA chr2 60534683 60534704 60534688 60534683 -
gtgaattgaggaattagaagtc

SEQ ID NO: 213551 - DNA, 22 bp, Artificial Sequence
  Synthetic oligonucleotide; TTG chr2 60534675 60534696 60534680 60534675 -
aggaattagaagtctaaccttg

SEQ ID NO: 213552 - DNA, 22 bp, Artificial Sequence
  Synthetic oligonucleotide; TTA chr2 60534667 60534688 60534672 60534667 -
gaagtctaaccttgagtaatta

SEQ ID NO: 213553 - DNA, 22 bp, Artificial Sequence
  Synthetic oligonucleotide; CTA chr2 60534659 60534680 60534664 60534659 -
accttgagtaattacatatgtt

SEQ ID NO: 213554 - DNA, 22 bp, Artificial Sequence
  Synthetic oligonucleotide; CTT chr2 60534654 60534675 60534659 60534654 -
gagtaattacatatgttttatc

SEQ ID NO: 213555 - DNA, 22 bp, Artificial Sequence
  Synthetic oligonucleotide; TTG chr2 60534653 60534674 60534658 60534653 -
agtaattacatatgttttatcc

SEQ ID NO: 213556 - DNA, 22 bp, Artificial Sequence
  Synthetic oligonucleotide; TTA chr2 60534645 60534666 60534650 60534645 -
catatgttttatccgttttctt

SEQ ID NO: 213557 - DNA, 22 bp, Artificial Sequence
  Synthetic oligonucleotide; TTT chr2 60534636 60534657 60534641 60534636 -
tatccgttttcttttaacgtta

SEQ ID NO: 213558 - DNA, 22 bp, Artificial Sequence
  Synthetic oligonucleotide; TTT chr2 60534635 60534656 60534640 60534635 -
atccgttttcttttaacgttaa

SEQ ID NO: 213559 - DNA, 22 bp, Artificial Sequence
  Synthetic oligonucleotide; TTA chr2 60534634 60534655 60534639 60534634 -
tccgttttcttttaacgttaag

SEQ ID NO: 213560 - DNA, 22 bp, Artificial Sequence
  Synthetic oligonucleotide; TTT chr2 60534627 60534648 60534632 60534627 -
tcttttaacgttaagtacagtt

SEQ ID NO: 213561 - DNA, 22 bp, Artificial Sequence
  Synthetic oligonucleotide; TTT chr2 60534626 60534647 60534631 60534626 -
cttttaacgttaagtacagttt

SEQ ID NO: 213562 - DNA, 22 bp, Artificial Sequence
  Synthetic oligonucleotide; TTC chr2 60534625 60534646 60534630 60534625 -
ttttaacgttaagtacagtttg

SEQ ID NO: 213563 - DNA, 22 bp, Artificial Sequence
  Synthetic oligonucleotide; CTT chr2 60534623 60534644 60534628 60534623 -
ttaacgttaagtacagtttgtg

SEQ ID NO: 213564 - DNA, 22 bp, Artificial Sequence
  Synthetic oligonucleotide; TTT chr2 60534622 60534643 60534627 60534622 -
taacgttaagtacagtttgtga

SEQ ID NO: 213565 - DNA, 22 bp, Artificial Sequence
  Synthetic oligonucleotide; TTT chr2 60534621 60534642 60534626 60534621 -
aacgttaagtacagtttgtgaa

SEQ ID NO: 213566 - DNA, 22 bp, Artificial Sequence
  Synthetic oligonucleotide; TTA chr2 60534620 60534641 60534625 60534620 -
acgttaagtacagtttgtgaac

SEQ ID NO: 213567 - DNA, 22 bp, Artificial Sequence
  Synthetic oligonucleotide; TTA chr2 60534614 60534635 60534619 60534614 -
agtacagtttgtgaacgtgttg

SEQ ID NO: 213568 - DNA, 22 bp, Artificial Sequence
  Synthetic oligonucleotide; TTT chr2 60534604 60534625 60534609 60534604 -
gtgaacgtgttggctggaaatc

SEQ ID NO: 213569 - DNA, 22 bp, Artificial Sequence
  Synthetic oligonucleotide; TTG chr2 60534603 60534624 60534608 60534603 -
tgaacgtgttggctggaaatcg

SEQ ID NO: 213570 - DNA, 22 bp, Artificial Sequence
  Synthetic oligonucleotide; TTG chr2 60534592 60534613 60534597 60534592 -
gctggaaatcgttctcatttgg

SEQ ID NO: 213571 - DNA, 22 bp, Artificial Sequence
  Synthetic oligonucleotide; CTG chr2 60534588 60534609 60534593 60534588 -
gaaatcgttctcatttggggag

SEQ ID NO: 213572 - DNA, 22 bp, Artificial Sequence
  Synthetic oligonucleotide; TTC chr2 60534578 60534599 60534583 60534578 -
tcatttggggagaagactgtaa

SEQ ID NO: 213573 - DNA, 22 bp, Artificial Sequence
  Synthetic oligonucleotide; CTC chr2 60534576 60534597 60534581 60534576 -
atttggggagaagactgtaaaa

SEQ ID NO: 213574 - DNA, 22 bp, Artificial Sequence
  Synthetic oligonucleotide; TTT chr2 60534572 60534593 60534577 60534572 -
ggggagaagactgtaaaattta

SEQ ID NO: 213575 - DNA, 22 bp, Artificial Sequence
  Synthetic oligonucleotide; TTG chr2 60534571 60534592 60534576 60534571 -
gggagaagactgtaaaatttaa

SEQ ID NO: 213576 - DNA, 22 bp, Artificial Sequence
  Synthetic oligonucleotide; CTG chr2 60534559 60534580 60534564 60534559 -
taaaatttaagtatatgattga

SEQ ID NO: 213577 - DNA, 22 bp, Artificial Sequence
  Synthetic oligonucleotide; TTT chr2 60534551 60534572 60534556 60534551 -
aagtatatgattgaggcacttc

SEQ ID NO: 213578 - DNA, 22 bp, Artificial Sequence
  Synthetic oligonucleotide; TTA chr2 60534550 60534571 60534555 60534550 -
agtatatgattgaggcacttcc

SEQ ID NO: 213579 - DNA, 22 bp, Artificial Sequence
  Synthetic oligonucleotide; TTG chr2 60534538 60534559 60534543 60534538 -
aggcacttccagatacatagag

SEQ ID NO: 213580 - DNA, 22 bp, Artificial Sequence
  Synthetic oligonucleotide; CTT chr2 60534530 60534551 60534535 60534530 -
ccagatacatagagaaatatgt

SEQ ID NO: 213581 - DNA, 22 bp, Artificial Sequence
  Synthetic oligonucleotide; TTC chr2 60534529 60534550 60534534 60534529 -
cagatacatagagaaatatgta

SEQ ID NO: 213582 - DNA, 22 bp, Artificial Sequence
  Synthetic oligonucleotide; TTG chr2 60534504 60534525 60534509 60534504 -
cctgtttctgttccccacgaac

SEQ ID NO: 213583 - DNA, 22 bp, Artificial Sequence
  Synthetic oligonucleotide; CTG chr2 60534500 60534521 60534505 60534500 -
tttctgttccccacgaacattg

SEQ ID NO: 213584 - DNA, 22 bp, Artificial Sequence
  Synthetic oligonucleotide; TTT chr2 60534497 60534518 60534502 60534497 -
ctgttccccacgaacattgcag

SEQ ID NO: 213585 - DNA, 22 bp, Artificial Sequence
  Synthetic oligonucleotide; TTC chr2 60534496 60534517 60534501 60534496 -
tgttccccacgaacattgcagg

SEQ ID NO: 213586 - DNA, 22 bp, Artificial Sequence
  Synthetic oligonucleotide; CTG chr2 60534494 60534515 60534499 60534494 -
ttccccacgaacattgcagggc

SEQ ID NO: 213587 - DNA, 22 bp, Artificial Sequence
  Synthetic oligonucleotide; TTC chr2 60534491 60534512 60534496 60534491 -
cccacgaacattgcagggcagt

SEQ ID NO: 213588 - DNA, 22 bp, Artificial Sequence
  Synthetic oligonucleotide; TTG chr2 60534478 60534499 60534483 60534478 -
cagggcagttttattgttagca

SEQ ID NO: 213589 - DNA, 22 bp, Artificial Sequence
  Synthetic oligonucleotide; TTT chr2 60534467 60534488 60534472 60534467 -
tattgttagcagtttgatggca

SEQ ID NO: 213590 - DNA, 22 bp, Artificial Sequence
  Synthetic oligonucleotide; TTT chr2 60534466 60534487 60534471 60534466 -
attgttagcagtttgatggcag

SEQ ID NO: 213591 - DNA, 22 bp, Artificial Sequence
  Synthetic oligonucleotide; TTA chr2 60534465 60534486 60534470 60534465 -
ttgttagcagtttgatggcagg

SEQ ID NO: 213592 - DNA, 22 bp, Artificial Sequence
  Synthetic oligonucleotide; TTG chr2 60534462 60534483 60534467 60534462 -
ttagcagtttgatggcaggaag

SEQ ID NO: 213593 - DNA, 22 bp, Artificial Sequence
  Synthetic oligonucleotide; TTA chr2 60534459 60534480 60534464 60534459 -
gcagtttgatggcaggaagcct

SEQ ID NO: 213594 - DNA, 22 bp, Artificial Sequence
  Synthetic oligonucleotide; TTT chr2 60534452 60534473 60534457 60534452 -
gatggcaggaagccttggctat

SEQ ID NO: 213595 - DNA, 22 bp, Artificial Sequence
  Synthetic oligonucleotide; TTG chr2 60534451 60534472 60534456 60534451 -
atggcaggaagccttggctatt

SEQ ID NO: 213596 - DNA, 22 bp, Artificial Sequence
  Synthetic oligonucleotide; CTT chr2 60534436 60534457 60534441 60534436 -
ggctattatagtgtattaagac

SEQ ID NO: 213597 - DNA, 22 bp, Artificial Sequence
  Synthetic oligonucleotide; TTG chr2 60534435 60534456 60534440 60534435 -
gctattatagtgtattaagaca

SEQ ID NO: 213598 - DNA, 22 bp, Artificial Sequence
  Synthetic oligonucleotide; CTA chr2 60534431 60534452 60534436 60534431 -
ttatagtgtattaagacatcag

SEQ ID NO: 213599 - DNA, 22 bp, Artificial Sequence
  Synthetic oligonucleotide; TTA chr2 60534428 60534449 60534433 60534428 -
tagtgtattaagacatcaggtt

SEQ ID NO: 213600 - DNA, 22 bp, Artificial Sequence
  Synthetic oligonucleotide; TTA chr2 60534418 60534439 60534423 60534418 -
agacatcaggttcctcctttgg

SEQ ID NO: 213601 - DNA, 22 bp, Artificial Sequence
  Synthetic oligonucleotide; TTC chr2 60534405 60534426 60534410 60534405 -
ctcctttggaggagggaaggct

SEQ ID NO: 213602 - DNA, 22 bp, Artificial Sequence
  Synthetic oligonucleotide; CTC chr2 60534402 60534423 60534407 60534402 -
ctttggaggagggaaggctaca

SEQ ID NO: 213603 - DNA, 22 bp, Artificial Sequence
  Synthetic oligonucleotide; CTT chr2 60534399 60534420 60534404 60534399 -
tggaggagggaaggctacagaa

SEQ ID NO: 213604 - DNA, 22 bp, Artificial Sequence
  Synthetic oligonucleotide; TTT chr2 60534398 60534419 60534403 60534398 -
ggaggagggaaggctacagaac

SEQ ID NO: 213605 - DNA, 22 bp, Artificial Sequence
  Synthetic oligonucleotide; TTG chr2 60534397 60534418 60534402 60534397 -
gaggagggaaggctacagaact

SEQ ID NO: 213606 - DNA, 22 bp, Artificial Sequence
  Synthetic oligonucleotide; CTA chr2 60534382 60534403 60534387 60534382 -
cagaactacaaacctttctaac

SEQ ID NO: 213607 - DNA, 22 bp, Artificial Sequence
  Synthetic oligonucleotide; CTA chr2 60534374 60534395 60534379 60534374 -
caaacctttctaacaatgcttt

SEQ ID NO: 213608 - DNA, 22 bp, Artificial Sequence
  Synthetic oligonucleotide; CTT chr2 60534366 60534387 60534371 60534366 -
tctaacaatgctttaggtttct

SEQ ID NO: 213609 - DNA, 22 bp, Artificial Sequence
  Synthetic oligonucleotide; TTT chr2 60534365 60534386 60534370 60534365 -
ctaacaatgctttaggtttctt

SEQ ID NO: 213610 - DNA, 22 bp, Artificial Sequence
  Synthetic oligonucleotide; TTC chr2 60534364 60534385 60534369 60534364 -
taacaatgctttaggtttcttc

SEQ ID NO: 213611 - DNA, 22 bp, Artificial Sequence
  Synthetic oligonucleotide; CTA chr2 60534362 60534383 60534367 60534362 -
acaatgctttaggtttcttctt

SEQ ID NO: 213612 - DNA, 22 bp, Artificial Sequence
  Synthetic oligonucleotide; CTT chr2 60534353 60534374 60534358 60534353 -
taggtttcttctttagatagat

SEQ ID NO: 213613 - DNA, 22 bp, Artificial Sequence
  Synthetic oligonucleotide; TTT chr2 60534352 60534373 60534357 60534352 -
aggtttcttctttagatagatg

SEQ ID NO: 213614 - DNA, 22 bp, Artificial Sequence
  Synthetic oligonucleotide; TTA chr2 60534351 60534372 60534356 60534351 -
ggtttcttctttagatagatgg

SEQ ID NO: 213615 - DNA, 22 bp, Artificial Sequence
  Synthetic oligonucleotide; TTT chr2 60534346 60534367 60534351 60534346 -
cttctttagatagatggctggc

SEQ ID NO: 213616 - DNA, 22 bp, Artificial Sequence
  Synthetic oligonucleotide; TTC chr2 60534345 60534366 60534350 60534345 -
ttctttagatagatggctggca

SEQ ID NO: 213617 - DNA, 22 bp, Artificial Sequence
  Synthetic oligonucleotide; CTT chr2 60534343 60534364 60534348 60534343 -
ctttagatagatggctggcacc

SEQ ID NO: 213618 - DNA, 22 bp, Artificial Sequence
  Synthetic oligonucleotide; TTC chr2 60534342 60534363 60534347 60534342 -
tttagatagatggctggcacct

SEQ ID NO: 213619 - DNA, 22 bp, Artificial Sequence
  Synthetic oligonucleotide; CTT chr2 60534340 60534361 60534345 60534340 -
tagatagatggctggcacctaa

SEQ ID NO: 213620 - DNA, 22 bp, Artificial Sequence
  Synthetic oligonucleotide; TTT chr2 60534339 60534360 60534344 60534339 -
agatagatggctggcacctaaa

SEQ ID NO: 213621 - DNA, 22 bp, Artificial Sequence
  Synthetic oligonucleotide; TTA chr2 60534338 60534359 60534343 60534338 -
gatagatggctggcacctaaag

SEQ ID NO: 213622 - DNA, 22 bp, Artificial Sequence
  Synthetic oligonucleotide; CTG chr2 60534326 60534347 60534331 60534326 -
gcacctaaaggacttgggcctg

SEQ ID NO: 213623 - DNA, 22 bp, Artificial Sequence
  Synthetic oligonucleotide; CTA chr2 60534319 60534340 60534324 60534319 -
aaggacttgggcctgggtttgg

SEQ ID NO: 213624 - DNA, 22 bp, Artificial Sequence
  Synthetic oligonucleotide; CTT chr2 60534311 60534332 60534316 60534311 -
gggcctgggtttggctgactct

SEQ ID NO: 213625 - DNA, 22 bp, Artificial Sequence
  Synthetic oligonucleotide; TTG chr2 60534310 60534331 60534315 60534310 -
ggcctgggtttggctgactctt

SEQ ID NO: 213626 - DNA, 22 bp, Artificial Sequence
  Synthetic oligonucleotide; CTG chr2 60534304 60534325 60534309 60534304 -
ggtttggctgactcttttatct

SEQ ID NO: 213627 - DNA, 22 bp, Artificial Sequence
  Synthetic oligonucleotide; TTT chr2 60534299 60534320 60534304 60534299 -
ggctgactcttttatcttttag

SEQ ID NO: 213628 - DNA, 22 bp, Artificial Sequence
  Synthetic oligonucleotide; TTG chr2 60534298 60534319 60534303 60534298 -
gctgactcttttatcttttaga

SEQ ID NO: 213629 - DNA, 22 bp, Artificial Sequence
  Synthetic oligonucleotide; CTG chr2 60534294 60534315 60534299 60534294 -
actcttttatcttttagatcaa

SEQ ID NO: 213630 - DNA, 22 bp, Artificial Sequence
  Synthetic oligonucleotide; CTC chr2 60534290 60534311 60534295 60534290 -
ttttatcttttagatcaagtaa

SEQ ID NO: 213631 - DNA, 22 bp, Artificial Sequence
  Synthetic oligonucleotide; CTT chr2 60534288 60534309 60534293 60534288 -
ttatcttttagatcaagtaagt

SEQ ID NO: 213632 - DNA, 22 bp, Artificial Sequence
  Synthetic oligonucleotide; TTT chr2 60534287 60534308 60534292 60534287 -
tatcttttagatcaagtaagtt

SEQ ID NO: 213633 - DNA, 22 bp, Artificial Sequence
  Synthetic oligonucleotide; TTT chr2 60534286 60534307 60534291 60534286 -
atcttttagatcaagtaagttt

SEQ ID NO: 213634 - DNA, 22 bp, Artificial Sequence
  Synthetic oligonucleotide; TTA chr2 60534285 60534306 60534290 60534285 -
tcttttagatcaagtaagtttt

SEQ ID NO: 213635 - DNA, 22 bp, Artificial Sequence
  Synthetic oligonucleotide; CTT chr2 60534281 60534302 60534286 60534281 -
ttagatcaagtaagttttctca

SEQ ID NO: 213636 - DNA, 22 bp, Artificial Sequence
  Synthetic oligonucleotide; TTT chr2 60534280 60534301 60534285 60534280 -
tagatcaagtaagttttctcat

SEQ ID NO: 213637 - DNA, 22 bp, Artificial Sequence
  Synthetic oligonucleotide; TTT chr2 60534279 60534300 60534284 60534279 -
agatcaagtaagttttctcatt

SEQ ID NO: 213638 - DNA, 22 bp, Artificial Sequence
  Synthetic oligonucleotide; TTA chr2 60534278 60534299 60534283 60534278 -
gatcaagtaagttttctcattc

SEQ ID NO: 213639 - DNA, 22 bp, Artificial Sequence
  Synthetic oligonucleotide; TTT chr2 60534264 60534285 60534269 60534264 -
tctcattcagctgctgctctga

SEQ ID NO: 213640 - DNA, 22 bp, Artificial Sequence
  Synthetic oligonucleotide; TTT chr2 60534263 60534284 60534268 60534263 -
ctcattcagctgctgctctgag

SEQ ID NO: 213641 - DNA, 22 bp, Artificial Sequence
  Synthetic oligonucleotide; TTC chr2 60534262 60534283 60534267 60534262 -
tcattcagctgctgctctgagc

SEQ ID NO: 213642 - DNA, 22 bp, Artificial Sequence
  Synthetic oligonucleotide; CTC chr2 60534260 60534281 60534265 60534260 -
attcagctgctgctctgagcta

SEQ ID NO: 213643 - DNA, 22 bp, Artificial Sequence
  Synthetic oligonucleotide; TTC chr2 60534256 60534277 60534261 60534256 -
agctgctgctctgagctacaat

SEQ ID NO: 213644 - DNA, 22 bp, Artificial Sequence
  Synthetic oligonucleotide; CTG chr2 60534251 60534272 60534256 60534251 -
ctgctctgagctacaatgtgtc

SEQ ID NO: 213645 - DNA, 22 bp, Artificial Sequence
  Synthetic oligonucleotide; CTG chr2 60534248 60534269 60534253 60534248 -
ctctgagctacaatgtgtcctc

SEQ ID NO: 213646 - DNA, 22 bp, Artificial Sequence
  Synthetic oligonucleotide; CTC chr2 60534245 60534266 60534250 60534245 -
tgagctacaatgtgtcctcccc

SEQ ID NO: 213647 - DNA, 22 bp, Artificial Sequence
  Synthetic oligonucleotide; CTG chr2 60534243 60534264 60534248 60534243 -
agctacaatgtgtcctcccctc

SEQ ID NO: 213648 - DNA, 22 bp, Artificial Sequence
  Synthetic oligonucleotide; CTA chr2 60534238 60534259 60534243 60534238 -
caatgtgtcctcccctcatcac

SEQ ID NO: 213649 - DNA, 22 bp, Artificial Sequence
  Synthetic oligonucleotide; CTC chr2 60534226 60534247 60534231 60534226 -
ccctcatcaccaaagtatatcc

SEQ ID NO: 213650 - DNA, 22 bp, Artificial Sequence
  Synthetic oligonucleotide; CTC chr2 60534221 60534242 60534226 60534221 -
atcaccaaagtatatcctggtc

SEQ ID NO: 213651 - DNA, 22 bp, Artificial Sequence
  Synthetic oligonucleotide; CTG chr2 60534202 60534223 60534207 60534202 -
gtctccaggctccctgggctcc

SEQ ID NO: 213652 - DNA, 22 bp, Artificial Sequence
  Synthetic oligonucleotide; CTC chr2 60534197 60534218 60534202 60534197 -
caggctccctgggctcccagtg

SEQ ID NO: 213653 - DNA, 22 bp, Artificial Sequence
  Synthetic oligonucleotide; CTC chr2 60534190 60534211 60534195 60534190 -
cctgggctcccagtgtctccct

SEQ ID NO: 213654 - DNA, 22 bp, Artificial Sequence
  Synthetic oligonucleotide; CTG chr2 60534186 60534207 60534191 60534186 -
ggctcccagtgtctccctcaag

SEQ ID NO: 213655 - DNA, 22 bp, Artificial Sequence
  Synthetic oligonucleotide; CTC chr2 60534181 60534202 60534186 60534181 -
ccagtgtctccctcaaggtaca

SEQ ID NO: 213656 - DNA, 22 bp, Artificial Sequence
  Synthetic oligonucleotide; CTC chr2 60534171 60534192 60534176 60534171 -
cctcaaggtacacgagtgccct

SEQ ID NO: 213657 - DNA, 22 bp, Artificial Sequence
  Synthetic oligonucleotide; CTC chr2 60534167 60534188 60534172 60534167 -
aaggtacacgagtgccctggtg

SEQ ID NO: 213658 - DNA, 22 bp, Artificial Sequence
  Synthetic oligonucleotide; CTG chr2 60534148 60534169 60534153 60534148 -
gtggtgaaaacaaggtgctaac

SEQ ID NO: 213659 - DNA, 22 bp, Artificial Sequence
  Synthetic oligonucleotide; CTA chr2 60534128 60534149 60534133 60534128 -
actaacggtttccgatttttga

SEQ ID NO: 213660 - DNA, 22 bp, Artificial Sequence
  Synthetic oligonucleotide; CTA chr2 60534124 60534145 60534129 60534124 -
acggtttccgatttttgagagc

SEQ ID NO: 213661 - DNA, 22 bp, Artificial Sequence
  Synthetic oligonucleotide; TTT chr2 60534117 60534138 60534122 60534117 -
ccgatttttgagagcctgtgat

SEQ ID NO: 213662 - DNA, 22 bp, Artificial Sequence
  Synthetic oligonucleotide; TTC chr2 60534116 60534137 60534121 60534116 -
cgatttttgagagcctgtgatt

SEQ ID NO: 213663 - DNA, 22 bp, Artificial Sequence
  Synthetic oligonucleotide; TTT chr2 60534110 60534131 60534115 60534110 -
ttgagagcctgtgattttggtg

SEQ ID NO: 213664 - DNA, 22 bp, Artificial Sequence
  Synthetic oligonucleotide; TTT chr2 60534109 60534130 60534114 60534109 -
tgagagcctgtgattttggtgt

SEQ ID NO: 213665 - DNA, 22 bp, Artificial Sequence
  Synthetic oligonucleotide; TTT chr2 60534108 60534129 60534113 60534108 -
gagagcctgtgattttggtgtt

SEQ ID NO: 213666 - DNA, 22 bp, Artificial Sequence
  Synthetic oligonucleotide; TTG chr2 60534107 60534128 60534112 60534107 -
agagcctgtgattttggtgttt

SEQ ID NO: 213667 - DNA, 22 bp, Artificial Sequence
  Synthetic oligonucleotide; CTG chr2 60534099 60534120 60534104 60534099 -
tgattttggtgtttgcctttgc

SEQ ID NO: 213668 - DNA, 22 bp, Artificial Sequence
  Synthetic oligonucleotide; TTT chr2 60534093 60534114 60534098 60534093 -
tggtgtttgcctttgctgttga

SEQ ID NO: 213669 - DNA, 22 bp, Artificial Sequence
  Synthetic oligonucleotide; TTT chr2 60534092 60534113 60534097 60534092 -
ggtgtttgcctttgctgttgaa

SEQ ID NO: 213670 - DNA, 22 bp, Artificial Sequence
  Synthetic oligonucleotide; TTG chr2 60534091 60534112 60534096 60534091 -
gtgtttgcctttgctgttgaat

SEQ ID NO: 213671 - DNA, 22 bp, Artificial Sequence
  Synthetic oligonucleotide; TTT chr2 60534085 60534106 60534090 60534085 -
gcctttgctgttgaataacctg

SEQ ID NO: 213672 - DNA, 22 bp, Artificial Sequence
  Synthetic oligonucleotide; TTG chr2 60534084 60534105 60534089 60534084 -
cctttgctgttgaataacctgt

SEQ ID NO: 213673 - DNA, 22 bp, Artificial Sequence
  Synthetic oligonucleotide; CTT chr2 60534080 60534101 60534085 60534080 -
tgctgttgaataacctgtgctg

SEQ ID NO: 213674 - DNA, 22 bp, Artificial Sequence
  Synthetic oligonucleotide; TTT chr2 60534079 60534100 60534084 60534079 -
gctgttgaataacctgtgctgt

SEQ ID NO: 213675 - DNA, 22 bp, Artificial Sequence
  Synthetic oligonucleotide; TTG chr2 60534078 60534099 60534083 60534078 -
ctgttgaataacctgtgctgta

SEQ ID NO: 213676 - DNA, 22 bp, Artificial Sequence
  Synthetic oligonucleotide; CTG chr2 60534075 60534096 60534080 60534075 -
ttgaataacctgtgctgtatta

SEQ ID NO: 213677 - DNA, 22 bp, Artificial Sequence
  Synthetic oligonucleotide; TTG chr2 60534072 60534093 60534077 60534072 -
aataacctgtgctgtattattg

SEQ ID NO: 213678 - DNA, 22 bp, Artificial Sequence
  Synthetic oligonucleotide; CTG chr2 60534063 60534084 60534068 60534063 -
tgctgtattattgatgttcatc

SEQ ID NO: 213679 - DNA, 22 bp, Artificial Sequence
  Synthetic oligonucleotide; CTG chr2 60534058 60534079 60534063 60534058 -
tattattgatgttcatctttgg

SEQ ID NO: 213680 - DNA, 22 bp, Artificial Sequence
  Synthetic oligonucleotide; TTA chr2 60534053 60534074 60534058 60534053 -
ttgatgttcatctttggtttat

SEQ ID NO: 213681 - DNA, 22 bp, Artificial Sequence
  Synthetic oligonucleotide; TTG chr2 60534050 60534071 60534055 60534050 -
atgttcatctttggtttatgag

SEQ ID NO: 213682 - DNA, 22 bp, Artificial Sequence
  Synthetic oligonucleotide; TTC chr2 60534044 60534065 60534049 60534044 -
atctttggtttatgagtttatc

SEQ ID NO: 213683 - DNA, 22 bp, Artificial Sequence
  Synthetic oligonucleotide; CTT chr2 60534039 60534060 60534044 60534039 -
tggtttatgagtttatcactgg

SEQ ID NO: 213684 - DNA, 22 bp, Artificial Sequence
  Synthetic oligonucleotide; TTT chr2 60534038 60534059 60534043 60534038 -
ggtttatgagtttatcactggt

SEQ ID NO: 213685 - DNA, 22 bp, Artificial Sequence
  Synthetic oligonucleotide; TTG chr2 60534037 60534058 60534042 60534037 -
gtttatgagtttatcactggtt

SEQ ID NO: 213686 - DNA, 22 bp, Artificial Sequence
  Synthetic oligonucleotide; TTT chr2 60534033 60534054 60534038 60534033 -
atgagtttatcactggttaaca

SEQ ID NO: 213687 - DNA, 22 bp, Artificial Sequence
  Synthetic oligonucleotide; TTA chr2 60534032 60534053 60534037 60534032 -
tgagtttatcactggttaacaa

SEQ ID NO: 213688 - DNA, 22 bp, Artificial Sequence
  Synthetic oligonucleotide; TTT chr2 60534025 60534046 60534030 60534025 -
atcactggttaacaagcagaat

SEQ ID NO: 213689 - DNA, 22 bp, Artificial Sequence
  Synthetic oligonucleotide; TTA chr2 60534024 60534045 60534029 60534024 -
tcactggttaacaagcagaatc

SEQ ID NO: 213690 - DNA, 22 bp, Artificial Sequence
  Synthetic oligonucleotide; CTG chr2 60534018 60534039 60534023 60534018 -
gttaacaagcagaatcagaaca

SEQ ID NO: 213691 - DNA, 22 bp, Artificial Sequence
  Synthetic oligonucleotide; TTA chr2 60534014 60534035 60534019 60534014 -
acaagcagaatcagaacagtgt

SEQ ID NO: 213692 - DNA, 22 bp, Artificial Sequence
  Synthetic oligonucleotide; CTG chr2 60533987 60534008 60533992 60533987 -
atattctgattaaaacgaatgt

SEQ ID NO: 213693 - DNA, 22 bp, Artificial Sequence
  Synthetic oligonucleotide; TTC chr2 60533981 60534002 60533986 60533981 -
tgattaaaacgaatgtttaatg

SEQ ID NO: 213694 - DNA, 22 bp, Artificial Sequence
  Synthetic oligonucleotide; CTG chr2 60533979 60534000 60533984 60533979 -
attaaaacgaatgtttaatgaa

SEQ ID NO: 213695 - DNA, 22 bp, Artificial Sequence
  Synthetic oligonucleotide; TTA chr2 60533975 60533996 60533980 60533975 -
aaacgaatgtttaatgaaagaa

SEQ ID NO: 213696 - DNA, 22 bp, Artificial Sequence
  Synthetic oligonucleotide; TTT chr2 60533963 60533984 60533968 60533963 -
aatgaaagaaaataaattgtga

SEQ ID NO: 213697 - DNA, 22 bp, Artificial Sequence
  Synthetic oligonucleotide; TTA chr2 60533962 60533983 60533967 60533962 -
atgaaagaaaataaattgtgat

SEQ ID NO: 213698 - DNA, 22 bp, Artificial Sequence
  Synthetic oligonucleotide; TTG chr2 60533944 60533965 60533949 60533944 -
tgatggaaaatgaacagtgtgt

SEQ ID NO: 213699 - DNA, 22 bp, Artificial Sequence
  Synthetic oligonucleotide; CTA chr2 60533908 60533929 60533913 60533908 -
taattttaacctccgagggacc

SEQ ID NO: 213700 - DNA, 22 bp, Artificial Sequence
  Synthetic oligonucleotide; TTT chr2 60533902 60533923 60533907 60533902 -
taacctccgagggacctagcac

SEQ ID NO: 213701 - DNA, 22 bp, Artificial Sequence
  Synthetic oligonucleotide; TTT chr2 60533901 60533922 60533906 60533901 -
aacctccgagggacctagcact

SEQ ID NO: 213702 - DNA, 22 bp, Artificial Sequence
  Synthetic oligonucleotide; TTA chr2 60533900 60533921 60533905 60533900 -
acctccgagggacctagcactg

SEQ ID NO: 213703 - DNA, 22 bp, Artificial Sequence
  Synthetic oligonucleotide; CTC chr2 60533895 60533916 60533900 60533895 -
cgagggacctagcactgcccta

SEQ ID NO: 213704 - DNA, 22 bp, Artificial Sequence
  Synthetic oligonucleotide; CTA chr2 60533884 60533905 60533889 60533884 -
gcactgccctaccgtgacttcc

SEQ ID NO: 213705 - DNA, 22 bp, Artificial Sequence
  Synthetic oligonucleotide; CTG chr2 60533878 60533899 60533883 60533878 -
ccctaccgtgacttccatccat

SEQ ID NO: 213706 - DNA, 22 bp, Artificial Sequence
  Synthetic oligonucleotide; CTA chr2 60533873 60533894 60533878 60533873 -
ccgtgacttccatccataccat

SEQ ID NO: 213707 - DNA, 22 bp, Artificial Sequence
  Synthetic oligonucleotide; CTT chr2 60533864 60533885 60533869 60533864 -
ccatccataccatgctaaaagc

SEQ ID NO: 213708 - DNA, 22 bp, Artificial Sequence
  Synthetic oligonucleotide; TTC chr2 60533863 60533884 60533868 60533863 -
catccataccatgctaaaagca

SEQ ID NO: 213709 - DNA, 22 bp, Artificial Sequence
  Synthetic oligonucleotide; CTA chr2 60533847 60533868 60533852 60533847 -
aaagcatgcttcagtttaaagt

SEQ ID NO: 213710 - DNA, 22 bp, Artificial Sequence
  Synthetic oligonucleotide; CTT chr2 60533836 60533857 60533841 60533836 -
cagtttaaagttgttaatattc

SEQ ID NO: 213711 - DNA, 22 bp, Artificial Sequence
  Synthetic oligonucleotide; TTC chr2 60533835 60533856 60533840 60533835 -
agtttaaagttgttaatattca

SEQ ID NO: 213712 - DNA, 22 bp, Artificial Sequence
  Synthetic oligonucleotide; TTT chr2 60533830 60533851 60533835 60533830 -
aaagttgttaatattcagctgg

SEQ ID NO: 213713 - DNA, 22 bp, Artificial Sequence
  Synthetic oligonucleotide; TTA chr2 60533829 60533850 60533834 60533829 -
aagttgttaatattcagctggg

SEQ ID NO: 213714 - DNA, 22 bp, Artificial Sequence
  Synthetic oligonucleotide; TTG chr2 60533823 60533844 60533828 60533823 -
ttaatattcagctgggaaacag

SEQ ID NO: 213715 - DNA, 22 bp, Artificial Sequence
  Synthetic oligonucleotide; TTA chr2 60533820 60533841 60533825 60533820 -
atattcagctgggaaacagtat

SEQ ID NO: 213716 - DNA, 22 bp, Artificial Sequence
  Synthetic oligonucleotide; TTC chr2 60533814 60533835 60533819 60533814 -
agctgggaaacagtatccagaa

SEQ ID NO: 213717 - DNA, 22 bp, Artificial Sequence
  Synthetic oligonucleotide; CTG chr2 60533809 60533830 60533814 60533809 -
ggaaacagtatccagaacacaa

SEQ ID NO: 213718 - DNA, 22 bp, Artificial Sequence
  Synthetic oligonucleotide; TTA chr2 60533779 60533800 60533784 60533779 -
ttaagtgcatgaactttttagg

SEQ ID NO: 213719 - DNA, 22 bp, Artificial Sequence
  Synthetic oligonucleotide; TTA chr2 60533776 60533797 60533781 60533776 -
agtgcatgaactttttaggcag

SEQ ID NO: 213720 - DNA, 22 bp, Artificial Sequence
  Synthetic oligonucleotide; CTT chr2 60533763 60533784 60533768 60533763 -
tttaggcagtaagatgaactga

SEQ ID NO: 213721 - DNA, 22 bp, Artificial Sequence
  Synthetic oligonucleotide; TTT chr2 60533762 60533783 60533767 60533762 -
ttaggcagtaagatgaactgat

SEQ ID NO: 213722 - DNA, 22 bp, Artificial Sequence
  Synthetic oligonucleotide; TTT chr2 60533761 60533782 60533766 60533761 -
taggcagtaagatgaactgatg

SEQ ID NO: 213723 - DNA, 22 bp, Artificial Sequence
  Synthetic oligonucleotide; TTT chr2 60533760 60533781 60533765 60533760 -
aggcagtaagatgaactgatgg

SEQ ID NO: 213724 - DNA, 22 bp, Artificial Sequence
  Synthetic oligonucleotide; TTA chr2 60533759 60533780 60533764 60533759 -
ggcagtaagatgaactgatggg

SEQ ID NO: 213725 - DNA, 22 bp, Artificial Sequence
  Synthetic oligonucleotide; CTG chr2 60533742 60533763 60533747 60533742 -
atggggtccatctgtgagatcc

SEQ ID NO: 213726 - DNA, 22 bp, Artificial Sequence
  Synthetic oligonucleotide; CTG chr2 60533728 60533749 60533733 60533728 -
tgagatccaggggctttttatt

SEQ ID NO: 213727 - DNA, 22 bp, Artificial Sequence
  Synthetic oligonucleotide; CTT chr2 60533712 60533733 60533717 60533712 -
tttatttgtgtgtgtcgagcga

SEQ ID NO: 213728 - DNA, 22 bp, Artificial Sequence
  Synthetic oligonucleotide; TTT chr2 60533711 60533732 60533716 60533711 -
ttatttgtgtgtgtcgagcgat

SEQ ID NO: 213729 - DNA, 22 bp, Artificial Sequence
  Synthetic oligonucleotide; TTT chr2 60533710 60533731 60533715 60533710 -
tatttgtgtgtgtcgagcgatt

SEQ ID NO: 213730 - DNA, 22 bp, Artificial Sequence
  Synthetic oligonucleotide; TTT chr2 60533709 60533730 60533714 60533709 -
atttgtgtgtgtcgagcgattc

SEQ ID NO: 213731 - DNA, 22 bp, Artificial Sequence
  Synthetic oligonucleotide; TTA chr2 60533708 60533729 60533713 60533708 -
tttgtgtgtgtcgagcgattct

SEQ ID NO: 213732 - DNA, 22 bp, Artificial Sequence
  Synthetic oligonucleotide; TTT chr2 60533705 60533726 60533710 60533705 -
gtgtgtgtcgagcgattctgcc

SEQ ID NO: 213733 - DNA, 22 bp, Artificial Sequence
  Synthetic oligonucleotide; TTG chr2 60533704 60533725 60533709 60533704 -
tgtgtgtcgagcgattctgccc

SEQ ID NO: 213734 - DNA, 22 bp, Artificial Sequence
  Synthetic oligonucleotide; TTC chr2 60533687 60533708 60533692 60533687 -
tgccctctccgacttcacagcc

SEQ ID NO: 213735 - DNA, 22 bp, Artificial Sequence
  Synthetic oligonucleotide; CTG chr2 60533685 60533706 60533690 60533685 -
ccctctccgacttcacagcctt

SEQ ID NO: 213736 - DNA, 22 bp, Artificial Sequence
  Synthetic oligonucleotide; CTC chr2 60533680 60533701 60533685 60533680 -
tccgacttcacagcctttggtc

SEQ ID NO: 213737 - DNA, 22 bp, Artificial Sequence
  Synthetic oligonucleotide; CTC chr2 60533678 60533699 60533683 60533678 -
cgacttcacagcctttggtctc

SEQ ID NO: 213738 - DNA, 22 bp, Artificial Sequence
  Synthetic oligonucleotide; CTT chr2 60533672 60533693 60533677 60533672 -
cacagcctttggtctccggcca

SEQ ID NO: 213739 - DNA, 22 bp, Artificial Sequence
  Synthetic oligonucleotide; TTC chr2 60533671 60533692 60533676 60533671 -
acagcctttggtctccggccaa

SEQ ID NO: 213740 - DNA, 22 bp, Artificial Sequence
  Synthetic oligonucleotide; CTT chr2 60533663 60533684 60533668 60533663 -
tggtctccggccaactgcatgc

SEQ ID NO: 213741 - DNA, 22 bp, Artificial Sequence
  Synthetic oligonucleotide; TTT chr2 60533662 60533683 60533667 60533662 -
ggtctccggccaactgcatgca

SEQ ID NO: 213742 - DNA, 22 bp, Artificial Sequence
  Synthetic oligonucleotide; TTG chr2 60533661 60533682 60533666 60533661 -
gtctccggccaactgcatgcat

SEQ ID NO: 213743 - DNA, 22 bp, Artificial Sequence
  Synthetic oligonucleotide; CTC chr2 60533656 60533677 60533661 60533656 -
cggccaactgcatgcataattg

SEQ ID NO: 213744 - DNA, 22 bp, Artificial Sequence
  Synthetic oligonucleotide; CTG chr2 60533646 60533667 60533651 60533646 -
catgcataattgattccacacg

SEQ ID NO: 213745 - DNA, 22 bp, Artificial Sequence
  Synthetic oligonucleotide; TTG chr2 60533634 60533655 60533639 60533634 -
attccacacgcactatcatttt

SEQ ID NO: 213746 - DNA, 22 bp, Artificial Sequence
  Synthetic oligonucleotide; TTC chr2 60533630 60533651 60533635 60533630 -
cacacgcactatcattttcttg

SEQ ID NO: 213747 - DNA, 22 bp, Artificial Sequence
  Synthetic oligonucleotide; CTA chr2 60533619 60533640 60533624 60533619 -
tcattttcttgatgtaattgct

SEQ ID NO: 213748 - DNA, 22 bp, Artificial Sequence
  Synthetic oligonucleotide; TTT chr2 60533613 60533634 60533618 60533613 -
tcttgatgtaattgctttacta

SEQ ID NO: 213749 - DNA, 22 bp, Artificial Sequence
  Synthetic oligonucleotide; TTT chr2 60533612 60533633 60533617 60533612 -
cttgatgtaattgctttactaa

SEQ ID NO: 213750 - DNA, 22 bp, Artificial Sequence
  Synthetic oligonucleotide; TTC chr2 60533611 60533632 60533616 60533611 -
ttgatgtaattgctttactaag

SEQ ID NO: 213751 - DNA, 22 bp, Artificial Sequence
  Synthetic oligonucleotide; CTT chr2 60533609 60533630 60533614 60533609 -
gatgtaattgctttactaagat

SEQ ID NO: 213752 - DNA, 22 bp, Artificial Sequence
  Synthetic oligonucleotide; TTG chr2 60533608 60533629 60533613 60533608 -
atgtaattgctttactaagata

SEQ ID NO: 213753 - DNA, 22 bp, Artificial Sequence
  Synthetic oligonucleotide; TTG chr2 60533599 60533620 60533604 60533599 -
ctttactaagatatgatgaaat

SEQ ID NO: 213754 - DNA, 22 bp, Artificial Sequence
  Synthetic oligonucleotide; CTT chr2 60533596 60533617 60533601 60533596 -
tactaagatatgatgaaatcta

SEQ ID NO: 213755 - DNA, 22 bp, Artificial Sequence
  Synthetic oligonucleotide; TTT chr2 60533595 60533616 60533600 60533595 -
actaagatatgatgaaatctaa

SEQ ID NO: 213756 - DNA, 22 bp, Artificial Sequence
  Synthetic oligonucleotide; TTA chr2 60533594 60533615 60533599 60533594 -
ctaagatatgatgaaatctaat

SEQ ID NO: 213757 - DNA, 22 bp, Artificial Sequence
  Synthetic oligonucleotide; CTA chr2 60533591 60533612 60533596 60533591 -
agatatgatgaaatctaatgga

SEQ ID NO: 213758 - DNA, 22 bp, Artificial Sequence
  Synthetic oligonucleotide; CTA chr2 60533574 60533595 60533579 60533574 -
atggataatttgctatttgaaa

SEQ ID NO: 213759 - DNA, 22 bp, Artificial Sequence
  Synthetic oligonucleotide; TTT chr2 60533563 60533584 60533568 60533563 -
gctatttgaaaatggtcaaaaa

SEQ ID NO: 213760 - DNA, 22 bp, Artificial Sequence
  Synthetic oligonucleotide; TTG chr2 60533562 60533583 60533567 60533562 -
ctatttgaaaatggtcaaaaaa

SEQ ID NO: 213761 - DNA, 22 bp, Artificial Sequence
  Synthetic oligonucleotide; CTA chr2 60533559 60533580 60533564 60533559 -
tttgaaaatggtcaaaaaaaat

SEQ ID NO: 213762 - DNA, 22 bp, Artificial Sequence
  Synthetic oligonucleotide; TTT chr2 60533556 60533577 60533561 60533556 -
gaaaatggtcaaaaaaaatctt

SEQ ID NO: 213763 - DNA, 22 bp, Artificial Sequence
  Synthetic oligonucleotide; TTG chr2 60533555 60533576 60533560 60533555 -
aaaatggtcaaaaaaaatcttc

SEQ ID NO: 213764 - DNA, 22 bp, Artificial Sequence
  Synthetic oligonucleotide; CTT chr2 60533534 60533555 60533539 60533534 -
catactttatgtggggctgagt

SEQ ID NO: 213765 - DNA, 22 bp, Artificial Sequence
  Synthetic oligonucleotide; TTC chr2 60533533 60533554 60533538 60533533 -
atactttatgtggggctgagtg

SEQ ID NO: 213766 - DNA, 22 bp, Artificial Sequence
  Synthetic oligonucleotide; CTT chr2 60533527 60533548 60533532 60533527 -
tatgtggggctgagtgggcagt

SEQ ID NO: 213767 - DNA, 22 bp, Artificial Sequence
  Synthetic oligonucleotide; TTT chr2 60533526 60533547 60533531 60533526 -
atgtggggctgagtgggcagtg

SEQ ID NO: 213768 - DNA, 22 bp, Artificial Sequence
  Synthetic oligonucleotide; TTA chr2 60533525 60533546 60533530 60533525 -
tgtggggctgagtgggcagtgg

SEQ ID NO: 213769 - DNA, 22 bp, Artificial Sequence
  Synthetic oligonucleotide; CTG chr2 60533515 60533536 60533520 60533515 -
agtgggcagtggagaaaggggt

SEQ ID NO: 213770 - DNA, 22 bp, Artificial Sequence
  Synthetic oligonucleotide; TTC chr2 60533489 60533510 60533494 60533489 -
agctgacccggtatttaagaaa

SEQ ID NO: 213771 - DNA, 22 bp, Artificial Sequence
  Synthetic oligonucleotide; CTG chr2 60533484 60533505 60533489 60533484 -
acccggtatttaagaaaacaaa

SEQ ID NO: 213772 - DNA, 22 bp, Artificial Sequence
  Synthetic oligonucleotide; TTT chr2 60533473 60533494 60533478 60533473 -
aagaaaacaaaacaagcaacac

SEQ ID NO: 213773 - DNA, 22 bp, Artificial Sequence
  Synthetic oligonucleotide; TTA chr2 60533472 60533493 60533477 60533472 -
agaaaacaaaacaagcaacact

SEQ ID NO: 213774 - DNA, 22 bp, Artificial Sequence
  Synthetic oligonucleotide; CTA chr2 60533449 60533470 60533454 60533449 -
acttatgcatgctgcttcagtc

SEQ ID NO: 213775 - DNA, 22 bp, Artificial Sequence
  Synthetic oligonucleotide; CTT chr2 60533445 60533466 60533450 60533445 -
atgcatgctgcttcagtcgcgt

SEQ ID NO: 213776 - DNA, 22 bp, Artificial Sequence
  Synthetic oligonucleotide; TTA chr2 60533444 60533465 60533449 60533444 -
tgcatgctgcttcagtcgcgtt

SEQ ID NO: 213777 - DNA, 22 bp, Artificial Sequence
  Synthetic oligonucleotide; CTG chr2 60533435 60533456 60533440 60533435 -
cttcagtcgcgttggctgtgga

SEQ ID NO: 213778 - DNA, 22 bp, Artificial Sequence
  Synthetic oligonucleotide; CTT chr2 60533432 60533453 60533437 60533432 -
cagtcgcgttggctgtggatag

SEQ ID NO: 213779 - DNA, 22 bp, Artificial Sequence
  Synthetic oligonucleotide; TTC chr2 60533431 60533452 60533436 60533431 -
agtcgcgttggctgtggatagg

SEQ ID NO: 213780 - DNA, 22 bp, Artificial Sequence
  Synthetic oligonucleotide; TTG chr2 60533421 60533442 60533426 60533421 -
gctgtggataggaaggtctttg

SEQ ID NO: 213781 - DNA, 22 bp, Artificial Sequence
  Synthetic oligonucleotide; CTG chr2 60533417 60533438 60533422 60533417 -
tggataggaaggtctttgtgac

SEQ ID NO: 213782 - DNA, 22 bp, Artificial Sequence
  Synthetic oligonucleotide; CTT chr2 60533401 60533422 60533406 60533401 -
tgtgacatatggaagccagtgt

SEQ ID NO: 213783 - DNA, 22 bp, Artificial Sequence
  Synthetic oligonucleotide; TTT chr2 60533400 60533421 60533405 60533400 -
gtgacatatggaagccagtgta

SEQ ID NO: 213784 - DNA, 22 bp, Artificial Sequence
  Synthetic oligonucleotide; TTG chr2 60533399 60533420 60533404 60533399 -
tgacatatggaagccagtgtat

SEQ ID NO: 213785 - DNA, 22 bp, Artificial Sequence
  Synthetic oligonucleotide; CTC chr2 60533370 60533391 60533375 60533370 -
tctccttctatcttgcatcacc

SEQ ID NO: 213786 - DNA, 22 bp, Artificial Sequence
  Synthetic oligonucleotide; CTC chr2 60533368 60533389 60533373 60533368 -
tccttctatcttgcatcacccc

SEQ ID NO: 213787 - DNA, 22 bp, Artificial Sequence
  Synthetic oligonucleotide; CTC chr2 60533366 60533387 60533371 60533366 -
cttctatcttgcatcaccccct

SEQ ID NO: 213788 - DNA, 22 bp, Artificial Sequence
  Synthetic oligonucleotide; CTT chr2 60533363 60533384 60533368 60533363 -
ctatcttgcatcacccccttca

SEQ ID NO: 213789 - DNA, 22 bp, Artificial Sequence
  Synthetic oligonucleotide; TTC chr2 60533362 60533383 60533367 60533362 -
tatcttgcatcacccccttcat

SEQ ID NO: 213790 - DNA, 22 bp, Artificial Sequence
  Synthetic oligonucleotide; CTA chr2 60533360 60533381 60533365 60533360 -
tcttgcatcacccccttcattc

SEQ ID NO: 213791 - DNA, 22 bp, Artificial Sequence
  Synthetic oligonucleotide; CTT chr2 60533356 60533377 60533361 60533356 -
gcatcacccccttcattccttc

SEQ ID NO: 213792 - DNA, 22 bp, Artificial Sequence
  Synthetic oligonucleotide; TTG chr2 60533355 60533376 60533360 60533355 -
catcacccccttcattccttct

SEQ ID NO: 213793 - DNA, 22 bp, Artificial Sequence
  Synthetic oligonucleotide; CTT chr2 60533343 60533364 60533348 60533343 -
cattccttctctctttctctcc

SEQ ID NO: 213794 - DNA, 22 bp, Artificial Sequence
  Synthetic oligonucleotide; TTC chr2 60533342 60533363 60533347 60533342 -
attccttctctctttctctcct

SEQ ID NO: 213795 - DNA, 22 bp, Artificial Sequence
  Synthetic oligonucleotide; TTC chr2 60533338 60533359 60533343 60533338 -
cttctctctttctctcctctct

SEQ ID NO: 213796 - DNA, 22 bp, Artificial Sequence
  Synthetic oligonucleotide; CTT chr2 60533335 60533356 60533340 60533335 -
ctctctttctctcctctctctc

SEQ ID NO: 213797 - DNA, 22 bp, Artificial Sequence
  Synthetic oligonucleotide; TTC chr2 60533334 60533355 60533339 60533334 -
tctctttctctcctctctctct

SEQ ID NO: 213798 - DNA, 22 bp, Artificial Sequence
  Synthetic oligonucleotide; CTC chr2 60533332 60533353 60533337 60533332 -
tctttctctcctctctctctcc

SEQ ID NO: 213799 - DNA, 22 bp, Artificial Sequence
  Synthetic oligonucleotide; CTC chr2 60533330 60533351 60533335 60533330 -
tttctctcctctctctctcccc

SEQ ID NO: 213800 - DNA, 22 bp, Artificial Sequence
  Synthetic oligonucleotide; CTT chr2 60533328 60533349 60533333 60533328 -
tctctcctctctctctccccca

SEQ ID NO: 213801 - DNA, 22 bp, Artificial Sequence
  Synthetic oligonucleotide; TTT chr2 60533327 60533348 60533332 60533327 -
ctctcctctctctctcccccaa

SEQ ID NO: 213802 - DNA, 22 bp, Artificial Sequence
  Synthetic oligonucleotide; TTC chr2 60533326 60533347 60533331 60533326 -
tctcctctctctctcccccaaa

SEQ ID NO: 213803 - DNA, 22 bp, Artificial Sequence
  Synthetic oligonucleotide; CTC chr2 60533324 60533345 60533329 60533324 -
tcctctctctctcccccaaact

SEQ ID NO: 213804 - DNA, 22 bp, Artificial Sequence
  Synthetic oligonucleotide; CTC chr2 60533322 60533343 60533327 60533322 -
ctctctctctcccccaaacttt

SEQ ID NO: 213805 - DNA, 22 bp, Artificial Sequence
  Synthetic oligonucleotide; CTC chr2 60533319 60533340 60533324 60533319 -
tctctctcccccaaactttaca

SEQ ID NO: 213806 - DNA, 22 bp, Artificial Sequence
  Synthetic oligonucleotide; CTC chr2 60533317 60533338 60533322 60533317 -
tctctcccccaaactttacaag

SEQ ID NO: 213807 - DNA, 22 bp, Artificial Sequence
  Synthetic oligonucleotide; CTC chr2 60533315 60533336 60533320 60533315 -
tctcccccaaactttacaagaa

SEQ ID NO: 213808 - DNA, 22 bp, Artificial Sequence
  Synthetic oligonucleotide; CTC chr2 60533313 60533334 60533318 60533313 -
tcccccaaactttacaagaaag

SEQ ID NO: 213809 - DNA, 22 bp, Artificial Sequence
  Synthetic oligonucleotide; CTC chr2 60533311 60533332 60533316 60533311 -
ccccaaactttacaagaaaggg

SEQ ID NO: 213810 - DNA, 22 bp, Artificial Sequence
  Synthetic oligonucleotide; CTT chr2 60533301 60533322 60533306 60533301 -
tacaagaaagggatcctaacaa

SEQ ID NO: 213811 - DNA, 22 bp, Artificial Sequence
  Synthetic oligonucleotide; TTT chr2 60533300 60533321 60533305 60533300 -
acaagaaagggatcctaacaag

SEQ ID NO: 213812 - DNA, 22 bp, Artificial Sequence
  Synthetic oligonucleotide; TTA chr2 60533299 60533320 60533304 60533299 -
caagaaagggatcctaacaagg

SEQ ID NO: 213813 - DNA, 22 bp, Artificial Sequence
  Synthetic oligonucleotide; CTA chr2 60533283 60533304 60533288 60533283 -
acaaggtaaaaagtaaacaatt

SEQ ID NO: 213814 - DNA, 22 bp, Artificial Sequence
  Synthetic oligonucleotide; TTT chr2 60533260 60533281 60533265 60533260 -
agtcatcacaagccttattatt

SEQ ID NO: 213815 - DNA, 22 bp, Artificial Sequence
  Synthetic oligonucleotide; TTA chr2 60533259 60533280 60533264 60533259 -
gtcatcacaagccttattattc

SEQ ID NO: 213816 - DNA, 22 bp, Artificial Sequence
  Synthetic oligonucleotide; CTT chr2 60533244 60533265 60533249 60533244 -
attattcagtctatccaggagt

SEQ ID NO: 213817 - DNA, 22 bp, Artificial Sequence
  Synthetic oligonucleotide; TTA chr2 60533243 60533264 60533248 60533243 -
ttattcagtctatccaggagtt

SEQ ID NO: 213818 - DNA, 22 bp, Artificial Sequence
  Synthetic oligonucleotide; TTA chr2 60533240 60533261 60533245 60533240 -
ttcagtctatccaggagttttg

SEQ ID NO: 213819 - DNA, 22 bp, Artificial Sequence
  Synthetic oligonucleotide; TTC chr2 60533237 60533258 60533242 60533237 -
agtctatccaggagttttgcca

SEQ ID NO: 213820 - DNA, 22 bp, Artificial Sequence
  Synthetic oligonucleotide; CTA chr2 60533231 60533252 60533236 60533231 -
tccaggagttttgccatgtcgg

SEQ ID NO: 213821 - DNA, 22 bp, Artificial Sequence
  Synthetic oligonucleotide; TTT chr2 60533220 60533241 60533225 60533220 -
tgccatgtcggtttatttaact

SEQ ID NO: 213822 - DNA, 22 bp, Artificial Sequence
  Synthetic oligonucleotide; TTT chr2 60533219 60533240 60533224 60533219 -
gccatgtcggtttatttaactt

SEQ ID NO: 213823 - DNA, 22 bp, Artificial Sequence
  Synthetic oligonucleotide; TTG chr2 60533218 60533239 60533223 60533218 -
ccatgtcggtttatttaacttc

SEQ ID NO: 213824 - DNA, 22 bp, Artificial Sequence
  Synthetic oligonucleotide; TTT chr2 60533206 60533227 60533211 60533206 -
atttaacttccaggaatgtaaa

SEQ ID NO: 213825 - DNA, 22 bp, Artificial Sequence
  Synthetic oligonucleotide; TTA chr2 60533205 60533226 60533210 60533205 -
tttaacttccaggaatgtaaac

SEQ ID NO: 213826 - DNA, 22 bp, Artificial Sequence
  Synthetic oligonucleotide; TTT chr2 60533202 60533223 60533207 60533202 -
aacttccaggaatgtaaacact

SEQ ID NO: 213827 - DNA, 22 bp, Artificial Sequence
  Synthetic oligonucleotide; TTA chr2 60533201 60533222 60533206 60533201 -
acttccaggaatgtaaacactg

SEQ ID NO: 213828 - DNA, 22 bp, Artificial Sequence
  Synthetic oligonucleotide; CTT chr2 60533197 60533218 60533202 60533197 -
ccaggaatgtaaacactgacac

SEQ ID NO: 213829 - DNA, 22 bp, Artificial Sequence
  Synthetic oligonucleotide; TTC chr2 60533196 60533217 60533201 60533196 -
caggaatgtaaacactgacaca

SEQ ID NO: 213830 - DNA, 22 bp, Artificial Sequence
  Synthetic oligonucleotide; CTG chr2 60533179 60533200 60533184 60533179 -
acacagccctagaagcagcaag

SEQ ID NO: 213831 - DNA, 22 bp, Artificial Sequence
  Synthetic oligonucleotide; CTA chr2 60533168 60533189 60533173 60533168 -
gaagcagcaagaaagattacag

SEQ ID NO: 213832 - DNA, 22 bp, Artificial Sequence
  Synthetic oligonucleotide; TTA chr2 60533149 60533170 60533154 60533149 -
cagtattagagttaaaaacgtg

SEQ ID NO: 213833 - DNA, 22 bp, Artificial Sequence
  Synthetic oligonucleotide; TTA chr2 60533141 60533162 60533146 60533141 -
gagttaaaaacgtgagcatgga

SEQ ID NO: 213834 - DNA, 22 bp, Artificial Sequence
  Synthetic oligonucleotide; TTA chr2 60533135 60533156 60533140 60533135 -
aaaacgtgagcatggaggagct

SEQ ID NO: 213835 - DNA, 22 bp, Artificial Sequence
  Synthetic oligonucleotide; CTG chr2 60533112 60533133 60533117 60533112 -
tgctttatactctgctataata

SEQ ID NO: 213836 - DNA, 22 bp, Artificial Sequence
  Synthetic oligonucleotide; CTT chr2 60533107 60533128 60533112 60533107 -
tatactctgctataataacact

SEQ ID NO: 213837 - DNA, 22 bp, Artificial Sequence
  Synthetic oligonucleotide; TTT chr2 60533106 60533127 60533111 60533106 -
atactctgctataataacactt

SEQ ID NO: 213838 - DNA, 22 bp, Artificial Sequence
  Synthetic oligonucleotide; TTA chr2 60533105 60533126 60533110 60533105 -
tactctgctataataacacttt

SEQ ID NO: 213839 - DNA, 22 bp, Artificial Sequence
  Synthetic oligonucleotide; CTC chr2 60533100 60533121 60533105 60533100 -
tgctataataacactttacatt

SEQ ID NO: 213840 - DNA, 22 bp, Artificial Sequence
  Synthetic oligonucleotide; CTG chr2 60533098 60533119 60533103 60533098 -
ctataataacactttacattga

SEQ ID NO: 213841 - DNA, 22 bp, Artificial Sequence
  Synthetic oligonucleotide; CTA chr2 60533095 60533116 60533100 60533095 -
taataacactttacattgaaac

SEQ ID NO: 213842 - DNA, 22 bp, Artificial Sequence
  Synthetic oligonucleotide; CTT chr2 60533084 60533105 60533089 60533084 -
tacattgaaacataatggtaag

SEQ ID NO: 213843 - DNA, 22 bp, Artificial Sequence
  Synthetic oligonucleotide; TTT chr2 60533083 60533104 60533088 60533083 -
acattgaaacataatggtaagt

SEQ ID NO: 213844 - DNA, 22 bp, Artificial Sequence
  Synthetic oligonucleotide; TTA chr2 60533082 60533103 60533087 60533082 -
cattgaaacataatggtaagtc

SEQ ID NO: 213845 - DNA, 22 bp, Artificial Sequence
  Synthetic oligonucleotide; TTG chr2 60533077 60533098 60533082 60533077 -
aaacataatggtaagtcaaaag

SEQ ID NO: 213846 - DNA, 22 bp, Artificial Sequence
  Synthetic oligonucleotide; CTG chr2 60533049 60533070 60533054 60533049 -
gaaacttctgcttatatggagt

SEQ ID NO: 213847 - DNA, 22 bp, Artificial Sequence
  Synthetic oligonucleotide; CTT chr2 60533042 60533063 60533047 60533042 -
ctgcttatatggagtacaaatt

SEQ ID NO: 213848 - DNA, 22 bp, Artificial Sequence
  Synthetic oligonucleotide; TTC chr2 60533041 60533062 60533046 60533041 -
tgcttatatggagtacaaattt

SEQ ID NO: 213849 - DNA, 22 bp, Artificial Sequence
  Synthetic oligonucleotide; CTG chr2 60533039 60533060 60533044 60533039 -
cttatatggagtacaaatttca

SEQ ID NO: 213850 - DNA, 22 bp, Artificial Sequence
  Synthetic oligonucleotide; CTT chr2 60533036 60533057 60533041 60533036 -
atatggagtacaaatttcattc

SEQ ID NO: 213851 - DNA, 22 bp, Artificial Sequence
  Synthetic oligonucleotide; TTA chr2 60533035 60533056 60533040 60533035 -
tatggagtacaaatttcattct

SEQ ID NO: 213852 - DNA, 22 bp, Artificial Sequence
  Synthetic oligonucleotide; TTT chr2 60533019 60533040 60533024 60533019 -
cattctaatagattggcataat

SEQ ID NO: 213853 - DNA, 22 bp, Artificial Sequence
  Synthetic oligonucleotide; TTC chr2 60533018 60533039 60533023 60533018 -
attctaatagattggcataatc

SEQ ID NO: 213854 - DNA, 22 bp, Artificial Sequence
  Synthetic oligonucleotide; TTC chr2 60533014 60533035 60533019 60533014 -
taatagattggcataatctagt

SEQ ID NO: 213855 - DNA, 22 bp, Artificial Sequence
  Synthetic oligonucleotide; CTA chr2 60533012 60533033 60533017 60533012 -
atagattggcataatctagtgt

SEQ ID NO: 213856 - DNA, 22 bp, Artificial Sequence
  Synthetic oligonucleotide; TTG chr2 60533004 60533025 60533009 60533004 -
gcataatctagtgtacccaggg

SEQ ID NO: 213857 - DNA, 22 bp, Artificial Sequence
  Synthetic oligonucleotide; CTA chr2 60532994 60533015 60532999 60532994 -
gtgtacccagggtagattgtta

SEQ ID NO: 213858 - DNA, 22 bp, Artificial Sequence
  Synthetic oligonucleotide; TTG chr2 60532975 60532996 60532980 60532975 -
ttatataatggagaaactgtat

SEQ ID NO: 213859 - DNA, 22 bp, Artificial Sequence
  Synthetic oligonucleotide; TTA chr2 60532972 60532993 60532977 60532972 -
tataatggagaaactgtataaa

SEQ ID NO: 213860 - DNA, 22 bp, Artificial Sequence
  Synthetic oligonucleotide; CTG chr2 60532956 60532977 60532961 60532956 -
tataaatgtcaagtacacaaat

SEQ ID NO: 213861 - DNA, 22 bp, Artificial Sequence
  Synthetic oligonucleotide; TTC chr2 60532929 60532950 60532934 60532929 -
tacaggaagtaaataaaaagta

SEQ ID NO: 213862 - DNA, 22 bp, Artificial Sequence
  Synthetic oligonucleotide; CTA chr2 60532927 60532948 60532932 60532927 -
caggaagtaaataaaaagtatt

SEQ ID NO: 213863 - DNA, 22 bp, Artificial Sequence
  Synthetic oligonucleotide; TTA chr2 60532904 60532925 60532909 60532904 -
gaatttcttaagtcaccattaa

SEQ ID NO: 213864 - DNA, 22 bp, Artificial Sequence
  Synthetic oligonucleotide; TTT chr2 60532898 60532919 60532903 60532898 -
cttaagtcaccattaaattttg

SEQ ID NO: 213865 - DNA, 22 bp, Artificial Sequence
  Synthetic oligonucleotide; TTC chr2 60532897 60532918 60532902 60532897 -
ttaagtcaccattaaattttgg

SEQ ID NO: 213866 - DNA, 22 bp, Artificial Sequence
  Synthetic oligonucleotide; CTT chr2 60532895 60532916 60532900 60532895 -
aagtcaccattaaattttggtg

SEQ ID NO: 213867 - DNA, 22 bp, Artificial Sequence
  Synthetic oligonucleotide; TTA chr2 60532894 60532915 60532899 60532894 -
agtcaccattaaattttggtgg

SEQ ID NO: 213868 - DNA, 22 bp, Artificial Sequence
  Synthetic oligonucleotide; TTA chr2 60532883 60532904 60532888 60532883 -
aattttggtggtgggacaatct

SEQ ID NO: 213869 - DNA, 22 bp, Artificial Sequence
  Synthetic oligonucleotide; TTT chr2 60532878 60532899 60532883 60532878 -
tggtggtgggacaatctcatta

SEQ ID NO: 213870 - DNA, 22 bp, Artificial Sequence
  Synthetic oligonucleotide; TTT chr2 60532877 60532898 60532882 60532877 -
ggtggtgggacaatctcattag

SEQ ID NO: 213871 - DNA, 22 bp, Artificial Sequence
  Synthetic oligonucleotide; TTG chr2 60532876 60532897 60532881 60532876 -
gtggtgggacaatctcattagc

SEQ ID NO: 213872 - DNA, 22 bp, Artificial Sequence
  Synthetic oligonucleotide; CTC chr2 60532860 60532881 60532865 60532860 -
attagctccttcaaaatcatgt

SEQ ID NO: 213873 - DNA, 22 bp, Artificial Sequence
  Synthetic oligonucleotide; TTA chr2 60532856 60532877 60532861 60532856 -
gctccttcaaaatcatgtggct

SEQ ID NO: 213874 - DNA, 22 bp, Artificial Sequence
  Synthetic oligonucleotide; CTC chr2 60532852 60532873 60532857 60532852 -
cttcaaaatcatgtggctttgc

SEQ ID NO: 213875 - DNA, 22 bp, Artificial Sequence
  Synthetic oligonucleotide; CTT chr2 60532849 60532870 60532854 60532849 -
caaaatcatgtggctttgcata

SEQ ID NO: 213876 - DNA, 22 bp, Artificial Sequence
  Synthetic oligonucleotide; TTC chr2 60532848 60532869 60532853 60532848 -
aaaatcatgtggctttgcataa

SEQ ID NO: 213877 - DNA, 22 bp, Artificial Sequence
  Synthetic oligonucleotide; CTT chr2 60532833 60532854 60532838 60532833 -
tgcataagtcttttgaaaatgt

SEQ ID NO: 213878 - DNA, 22 bp, Artificial Sequence
  Synthetic oligonucleotide; TTT chr2 60532832 60532853 60532837 60532832 -
gcataagtcttttgaaaatgta

SEQ ID NO: 213879 - DNA, 22 bp, Artificial Sequence
  Synthetic oligonucleotide; TTG chr2 60532831 60532852 60532836 60532831 -
cataagtcttttgaaaatgtat

SEQ ID NO: 213880 - DNA, 22 bp, Artificial Sequence
  Synthetic oligonucleotide; CTT chr2 60532821 60532842 60532826 60532821 -
ttgaaaatgtattttcagggaa

SEQ ID NO: 213881 - DNA, 22 bp, Artificial Sequence
  Synthetic oligonucleotide; TTT chr2 60532820 60532841 60532825 60532820 -
tgaaaatgtattttcagggaat

SEQ ID NO: 213882 - DNA, 22 bp, Artificial Sequence
  Synthetic oligonucleotide; TTT chr2 60532819 60532840 60532824 60532819 -
gaaaatgtattttcagggaatt

SEQ ID NO: 213883 - DNA, 22 bp, Artificial Sequence
  Synthetic oligonucleotide; TTG chr2 60532818 60532839 60532823 60532818 -
aaaatgtattttcagggaattt

SEQ ID NO: 213884 - DNA, 22 bp, Artificial Sequence
  Synthetic oligonucleotide; TTT chr2 60532807 60532828 60532812 60532807 -
tcagggaatttacagatggtga

SEQ ID NO: 213885 - DNA, 22 bp, Artificial Sequence
  Synthetic oligonucleotide; TTT chr2 60532806 60532827 60532811 60532806 -
cagggaatttacagatggtgaa

SEQ ID NO: 213886 - DNA, 22 bp, Artificial Sequence
  Synthetic oligonucleotide; TTC chr2 60532805 60532826 60532810 60532805 -
agggaatttacagatggtgaaa

SEQ ID NO: 213887 - DNA, 22 bp, Artificial Sequence
  Synthetic oligonucleotide; TTT chr2 60532796 60532817 60532801 60532796 -
acagatggtgaaacattgtttt

SEQ ID NO: 213888 - DNA, 22 bp, Artificial Sequence
  Synthetic oligonucleotide; TTA chr2 60532795 60532816 60532800 60532795 -
cagatggtgaaacattgtttta

SEQ ID NO: 213889 - DNA, 22 bp, Artificial Sequence
  Synthetic oligonucleotide; TTG chr2 60532778 60532799 60532783 60532778 -
ttttaatccaaaccagttaatg

SEQ ID NO: 213890 - DNA, 22 bp, Artificial Sequence
  Synthetic oligonucleotide; TTT chr2 60532775 60532796 60532780 60532775 -
taatccaaaccagttaatgctt

SEQ ID NO: 213891 - DNA, 22 bp, Artificial Sequence
  Synthetic oligonucleotide; TTT chr2 60532774 60532795 60532779 60532774 -
aatccaaaccagttaatgcttt

SEQ ID NO: 213892 - DNA, 22 bp, Artificial Sequence
  Synthetic oligonucleotide; TTA chr2 60532773 60532794 60532778 60532773 -
atccaaaccagttaatgcttta

SEQ ID NO: 213893 - DNA, 22 bp, Artificial Sequence
  Synthetic oligonucleotide; TTA chr2 60532759 60532780 60532764 60532759 -
atgctttaaatctacctttaaa

SEQ ID NO: 213894 - DNA, 22 bp, Artificial Sequence
  Synthetic oligonucleotide; CTT chr2 60532753 60532774 60532758 60532753 -
taaatctacctttaaaaaaatt

SEQ ID NO: 213895 - DNA, 22 bp, Artificial Sequence
  Synthetic oligonucleotide; TTT chr2 60532752 60532773 60532757 60532752 -
aaatctacctttaaaaaaattg

SEQ ID NO: 213896 - DNA, 22 bp, Artificial Sequence
  Synthetic oligonucleotide; TTA chr2 60532751 60532772 60532756 60532751 -
aatctacctttaaaaaaattgt

SEQ ID NO: 213897 - DNA, 22 bp, Artificial Sequence
  Synthetic oligonucleotide; CTA chr2 60532745 60532766 60532750 60532745 -
cctttaaaaaaattgtactgtt

SEQ ID NO: 213898 - DNA, 22 bp, Artificial Sequence
  Synthetic oligonucleotide; CTT chr2 60532741 60532762 60532746 60532741 -
taaaaaaattgtactgtttttc

SEQ ID NO: 213899 - DNA, 22 bp, Artificial Sequence
  Synthetic oligonucleotide; TTT chr2 60532740 60532761 60532745 60532740 -
aaaaaaattgtactgtttttcg

SEQ ID NO: 213900 - DNA, 22 bp, Artificial Sequence
  Synthetic oligonucleotide; TTA chr2 60532739 60532760 60532744 60532739 -
aaaaaattgtactgtttttcga

SEQ ID NO: 213901 - DNA, 22 bp, Artificial Sequence
  Synthetic oligonucleotide; TTG chr2 60532730 60532751 60532735 60532730 -
tactgtttttcgaagtacttaa

SEQ ID NO: 213902 - DNA, 22 bp, Artificial Sequence
  Synthetic oligonucleotide; CTG chr2 60532725 60532746 60532730 60532725 -
tttttcgaagtacttaaaggga

SEQ ID NO: 213903 - DNA, 22 bp, Artificial Sequence
  Synthetic oligonucleotide; TTT chr2 60532722 60532743 60532727 60532722 -
ttcgaagtacttaaagggagtg

SEQ ID NO: 213904 - DNA, 22 bp, Artificial Sequence
  Synthetic oligonucleotide; TTT chr2 60532721 60532742 60532726 60532721 -
tcgaagtacttaaagggagtgg

SEQ ID NO: 213905 - DNA, 22 bp, Artificial Sequence
  Synthetic oligonucleotide; TTT chr2 60532720 60532741 60532725 60532720 -
cgaagtacttaaagggagtgga

SEQ ID NO: 213906 - DNA, 22 bp, Artificial Sequence
  Synthetic oligonucleotide; TTC chr2 60532719 60532740 60532724 60532719 -
gaagtacttaaagggagtggag

SEQ ID NO: 213907 - DNA, 22 bp, Artificial Sequence
  Synthetic oligonucleotide; CTT chr2 60532710 60532731 60532715 60532710 -
aaagggagtggaggggtagaaa

SEQ ID NO: 213908 - DNA, 22 bp, Artificial Sequence
  Synthetic oligonucleotide; TTA chr2 60532709 60532730 60532714 60532709 -
aagggagtggaggggtagaaag

SEQ ID NO: 213909 - DNA, 22 bp, Artificial Sequence
  Synthetic oligonucleotide; CTC chr2 60532667 60532688 60532672 60532667 -
actgtggcaaactgtttttcaa

SEQ ID NO: 213910 - DNA, 22 bp, Artificial Sequence
  Synthetic oligonucleotide; CTG chr2 60532663 60532684 60532668 60532663 -
tggcaaactgtttttcaagtaa

SEQ ID NO: 213911 - DNA, 22 bp, Artificial Sequence
  Synthetic oligonucleotide; CTG chr2 60532653 60532674 60532658 60532653 -
tttttcaagtaaagtcataata

SEQ ID NO: 213912 - DNA, 22 bp, Artificial Sequence
  Synthetic oligonucleotide; TTT chr2 60532650 60532671 60532655 60532650 -
ttcaagtaaagtcataataatg

SEQ ID NO: 213913 - DNA, 22 bp, Artificial Sequence
  Synthetic oligonucleotide; TTT chr2 60532649 60532670 60532654 60532649 -
tcaagtaaagtcataataatga

SEQ ID NO: 213914 - DNA, 22 bp, Artificial Sequence
  Synthetic oligonucleotide; TTT chr2 60532648 60532669 60532653 60532648 -
caagtaaagtcataataatgaa

SEQ ID NO: 213915 - DNA, 22 bp, Artificial Sequence
  Synthetic oligonucleotide; TTC chr2 60532647 60532668 60532652 60532647 -
aagtaaagtcataataatgaac

SEQ ID NO: 213916 - DNA, 22 bp, Artificial Sequence
  Synthetic oligonucleotide; CTG chr2 60532612 60532633 60532617 60532612 -
aaatttgatcagcaaacatatc

SEQ ID NO: 213917 - DNA, 22 bp, Artificial Sequence
  Synthetic oligonucleotide; TTT chr2 60532606 60532627 60532611 60532606 -
gatcagcaaacatatccttatg

SEQ ID NO: 213918 - DNA, 22 bp, Artificial Sequence
  Synthetic oligonucleotide; TTG chr2 60532605 60532626 60532610 60532605 -
atcagcaaacatatccttatgc

SEQ ID NO: 213919 - DNA, 22 bp, Artificial Sequence
  Synthetic oligonucleotide; CTT chr2 60532587 60532608 60532592 60532587 -
atgccaaggaattttctttttt

SEQ ID NO: 213920 - DNA, 22 bp, Artificial Sequence
  Synthetic oligonucleotide; TTA chr2 60532586 60532607 60532591 60532586 -
tgccaaggaattttcttttttt

SEQ ID NO: 213921 - DNA, 22 bp, Artificial Sequence
  Synthetic oligonucleotide; TTT chr2 60532573 60532594 60532578 60532573 -
tctttttttctttccttttttt

SEQ ID NO: 213922 - DNA, 22 bp, Artificial Sequence
  Synthetic oligonucleotide; TTT chr2 60532572 60532593 60532577 60532572 -
ctttttttctttcctttttttt

SEQ ID NO: 213923 - DNA, 22 bp, Artificial Sequence
  Synthetic oligonucleotide; TTC chr2 60532571 60532592 60532576 60532571 -
tttttttctttccttttttttc

SEQ ID NO: 213924 - DNA, 22 bp, Artificial Sequence
  Synthetic oligonucleotide; CTT chr2 60532569 60532590 60532574 60532569 -
tttttctttccttttttttctt

SEQ ID NO: 213925 - DNA, 22 bp, Artificial Sequence
  Synthetic oligonucleotide; TTT chr2 60532568 60532589 60532573 60532568 -
ttttctttccttttttttcttt

SEQ ID NO: 213926 - DNA, 22 bp, Artificial Sequence
  Synthetic oligonucleotide; TTT chr2 60532567 60532588 60532572 60532567 -
tttctttccttttttttctttt

SEQ ID NO: 213927 - DNA, 22 bp, Artificial Sequence
  Synthetic oligonucleotide; TTT chr2 60532566 60532587 60532571 60532566 -
ttctttccttttttttcttttt

SEQ ID NO: 213928 - DNA, 22 bp, Artificial Sequence
  Synthetic oligonucleotide; TTT chr2 60532565 60532586 60532570 60532565 -
tctttccttttttttctttttc

SEQ ID NO: 213929 - DNA, 22 bp, Artificial Sequence
  Synthetic oligonucleotide; TTT chr2 60532564 60532585 60532569 60532564 -
ctttccttttttttctttttcg

SEQ ID NO: 213930 - DNA, 22 bp, Artificial Sequence
  Synthetic oligonucleotide; TTC chr2 60532563 60532584 60532568 60532563 -
tttccttttttttctttttcgc

SEQ ID NO: 213931 - DNA, 22 bp, Artificial Sequence
  Synthetic oligonucleotide; CTT chr2 60532561 60532582 60532566 60532561 -
tccttttttttctttttcgcca

SEQ ID NO: 213932 - DNA, 22 bp, Artificial Sequence
  Synthetic oligonucleotide; TTT chr2 60532560 60532581 60532565 60532560 -
ccttttttttctttttcgccat

SEQ ID NO: 213933 - DNA, 22 bp, Artificial Sequence
  Synthetic oligonucleotide; TTC chr2 60532559 60532580 60532564 60532559 -
cttttttttctttttcgccatt

SEQ ID NO: 213934 - DNA, 22 bp, Artificial Sequence
  Synthetic oligonucleotide; CTT chr2 60532556 60532577 60532561 60532556 -
ttttttctttttcgccattcac

SEQ ID NO: 213935 - DNA, 22 bp, Artificial Sequence
  Synthetic oligonucleotide; TTT chr2 60532555 60532576 60532560 60532555 -
tttttctttttcgccattcaca

SEQ ID NO: 213936 - DNA, 22 bp, Artificial Sequence
  Synthetic oligonucleotide; TTT chr2 60532554 60532575 60532559 60532554 -
ttttctttttcgccattcacat

SEQ ID NO: 213937 - DNA, 22 bp, Artificial Sequence
  Synthetic oligonucleotide; TTT chr2 60532553 60532574 60532558 60532553 -
tttctttttcgccattcacata

SEQ ID NO: 213938 - DNA, 22 bp, Artificial Sequence
  Synthetic oligonucleotide; TTT chr2 60532552 60532573 60532557 60532552 -
ttctttttcgccattcacatac

SEQ ID NO: 213939 - DNA, 22 bp, Artificial Sequence
  Synthetic oligonucleotide; TTT chr2 60532551 60532572 60532556 60532551 -
tctttttcgccattcacatacc

SEQ ID NO: 213940 - DNA, 22 bp, Artificial Sequence
  Synthetic oligonucleotide; TTT chr2 60532550 60532571 60532555 60532550 -
ctttttcgccattcacatacca

SEQ ID NO: 213941 - DNA, 22 bp, Artificial Sequence
  Synthetic oligonucleotide; TTC chr2 60532549 60532570 60532554 60532549 -
tttttcgccattcacataccaa

SEQ ID NO: 213942 - DNA, 22 bp, Artificial Sequence
  Synthetic oligonucleotide; CTT chr2 60532547 60532568 60532552 60532547 -
tttcgccattcacataccaagg

SEQ ID NO: 213943 - DNA, 22 bp, Artificial Sequence
  Synthetic oligonucleotide; TTT chr2 60532546 60532567 60532551 60532546 -
ttcgccattcacataccaaggt

SEQ ID NO: 213944 - DNA, 22 bp, Artificial Sequence
  Synthetic oligonucleotide; TTT chr2 60532545 60532566 60532550 60532545 -
tcgccattcacataccaaggtt

SEQ ID NO: 213945 - DNA, 22 bp, Artificial Sequence
  Synthetic oligonucleotide; TTT chr2 60532544 60532565 60532549 60532544 -
cgccattcacataccaaggttc

SEQ ID NO: 213946 - DNA, 22 bp, Artificial Sequence
  Synthetic oligonucleotide; TTC chr2 60532543 60532564 60532548 60532543 -
gccattcacataccaaggttct

SEQ ID NO: 213947 - DNA, 22 bp, Artificial Sequence
  Synthetic oligonucleotide; TTC chr2 60532536 60532557 60532541 60532536 -
acataccaaggttctgtaaatc

SEQ ID NO: 213948 - DNA, 22 bp, Artificial Sequence
  Synthetic oligonucleotide; TTC chr2 60532522 60532543 60532527 60532522 -
tgtaaatcagtaaaccaggcag

SEQ ID NO: 213949 - DNA, 22 bp, Artificial Sequence
  Synthetic oligonucleotide; CTG chr2 60532520 60532541 60532525 60532520 -
taaatcagtaaaccaggcagag

SEQ ID NO: 213950 - DNA, 22 bp, Artificial Sequence
  Synthetic oligonucleotide; CTA chr2 60532490 60532511 60532495 60532490 -
ttgtaagggggaaaccaaatca

SEQ ID NO: 213951 - DNA, 22 bp, Artificial Sequence
  Synthetic oligonucleotide; TTG chr2 60532487 60532508 60532492 60532487 -
taagggggaaaccaaatcataa

SEQ ID NO: 213952 - DNA, 22 bp, Artificial Sequence
  Synthetic oligonucleotide; CTG chr2 60532442 60532463 60532447 60532442 -
tctttctgaagaaacattaacg

SEQ ID NO: 213953 - DNA, 22 bp, Artificial Sequence
  Synthetic oligonucleotide; CTT chr2 60532438 60532459 60532443 60532438 -
tctgaagaaacattaacgccac

SEQ ID NO: 213954 - DNA, 22 bp, Artificial Sequence
  Synthetic oligonucleotide; TTT chr2 60532437 60532458 60532442 60532437 -
ctgaagaaacattaacgccacc

SEQ ID NO: 213955 - DNA, 22 bp, Artificial Sequence
  Synthetic oligonucleotide; TTC chr2 60532436 60532457 60532441 60532436 -
tgaagaaacattaacgccacca

SEQ ID NO: 213956 - DNA, 22 bp, Artificial Sequence
  Synthetic oligonucleotide; CTG chr2 60532434 60532455 60532439 60532434 -
aagaaacattaacgccaccacc

SEQ ID NO: 213957 - DNA, 22 bp, Artificial Sequence
  Synthetic oligonucleotide; TTA chr2 60532423 60532444 60532428 60532423 -
acgccaccaccaccaaaaaaag

SEQ ID NO: 213958 - DNA, 22 bp, Artificial Sequence
  Synthetic oligonucleotide; CTT chr2 60532357 60532378 60532362 60532357 -
tttaaaaaactggaaatgacag

SEQ ID NO: 213959 - DNA, 22 bp, Artificial Sequence
  Synthetic oligonucleotide; TTT chr2 60532356 60532377 60532361 60532356 -
ttaaaaaactggaaatgacaga

SEQ ID NO: 213960 - DNA, 22 bp, Artificial Sequence
  Synthetic oligonucleotide; TTT chr2 60532355 60532376 60532360 60532355 -
taaaaaactggaaatgacagaa

SEQ ID NO: 213961 - DNA, 22 bp, Artificial Sequence
  Synthetic oligonucleotide; TTT chr2 60532354 60532375 60532359 60532354 -
aaaaaactggaaatgacagaat

SEQ ID NO: 213962 - DNA, 22 bp, Artificial Sequence
  Synthetic oligonucleotide; TTA chr2 60532353 60532374 60532358 60532353 -
aaaaactggaaatgacagaata

SEQ ID NO: 213963 - DNA, 22 bp, Artificial Sequence
  Synthetic oligonucleotide; CTG chr2 60532345 60532366 60532350 60532345 -
gaaatgacagaatagttttaaa

SEQ ID NO: 213964 - DNA, 22 bp, Artificial Sequence
  Synthetic oligonucleotide; TTT chr2 60532327 60532348 60532332 60532327 -
taaaaggaaaaaaaaaaaaacc

SEQ ID NO: 213965 - DNA, 22 bp, Artificial Sequence
  Synthetic oligonucleotide; TTT chr2 60532326 60532347 60532331 60532326 -
aaaaggaaaaaaaaaaaaaccc

SEQ ID NO: 213966 - DNA, 22 bp, Artificial Sequence
  Synthetic oligonucleotide; TTA chr2 60532325 60532346 60532330 60532325 -
aaaggaaaaaaaaaaaaaccca

SEQ ID NO: 213967 - DNA, 22 bp, Artificial Sequence
  Synthetic oligonucleotide; CTT chr2 60532278 60532299 60532283 60532278 -
ctgacgctcaaaacttcaaact

SEQ ID NO: 213968 - DNA, 22 bp, Artificial Sequence
  Synthetic oligonucleotide; TTC chr2 60532277 60532298 60532282 60532277 -
tgacgctcaaaacttcaaacta

SEQ ID NO: 213969 - DNA, 22 bp, Artificial Sequence
  Synthetic oligonucleotide; CTG chr2 60532275 60532296 60532280 60532275 -
acgctcaaaacttcaaactatt

SEQ ID NO: 213970 - DNA, 22 bp, Artificial Sequence
  Synthetic oligonucleotide; CTC chr2 60532269 60532290 60532274 60532269 -
aaaacttcaaactattaataga

SEQ ID NO: 213971 - DNA, 22 bp, Artificial Sequence
  Synthetic oligonucleotide; CTT chr2 60532262 60532283 60532267 60532262 -
caaactattaatagaccaccag

SEQ ID NO: 213972 - DNA, 22 bp, Artificial Sequence
  Synthetic oligonucleotide; TTC chr2 60532261 60532282 60532266 60532261 -
aaactattaatagaccaccagt

SEQ ID NO: 213973 - DNA, 22 bp, Artificial Sequence
  Synthetic oligonucleotide; CTA chr2 60532255 60532276 60532260 60532255 -
ttaatagaccaccagtgagata

SEQ ID NO: 213974 - DNA, 22 bp, Artificial Sequence
  Synthetic oligonucleotide; TTA chr2 60532252 60532273 60532257 60532252 -
atagaccaccagtgagatagac

SEQ ID NO: 213975 - DNA, 22 bp, Artificial Sequence
  Synthetic oligonucleotide; CTG chr2 60532228 60532249 60532233 60532228 -
tctttgtgccttgaaatgcaaa

SEQ ID NO: 213976 - DNA, 22 bp, Artificial Sequence
  Synthetic oligonucleotide; CTT chr2 60532224 60532245 60532229 60532224 -
tgtgccttgaaatgcaaaatga

SEQ ID NO: 213977 - DNA, 22 bp, Artificial Sequence
  Synthetic oligonucleotide; TTT chr2 60532223 60532244 60532228 60532223 -
gtgccttgaaatgcaaaatgag

SEQ ID NO: 213978 - DNA, 22 bp, Artificial Sequence
  Synthetic oligonucleotide; TTG chr2 60532222 60532243 60532227 60532222 -
tgccttgaaatgcaaaatgagg

SEQ ID NO: 213979 - DNA, 22 bp, Artificial Sequence
  Synthetic oligonucleotide; CTT chr2 60532216 60532237 60532221 60532216 -
gaaatgcaaaatgagggaaata

SEQ ID NO: 213980 - DNA, 22 bp, Artificial Sequence
  Synthetic oligonucleotide; TTG chr2 60532215 60532236 60532220 60532215 -
aaatgcaaaatgagggaaataa

SEQ ID NO: 213981 - DNA, 22 bp, Artificial Sequence
  Synthetic oligonucleotide; TTA chr2 60532190 60532211 60532195 60532190 -
gcagaggaacaaaattctcaaa

SEQ ID NO: 213982 - DNA, 22 bp, Artificial Sequence
  Synthetic oligonucleotide; TTC chr2 60532173 60532194 60532178 60532173 -
tcaaaatttgaagaacttctgt

SEQ ID NO: 213983 - DNA, 22 bp, Artificial Sequence
  Synthetic oligonucleotide; CTC chr2 60532171 60532192 60532176 60532171 -
aaaatttgaagaacttctgtga

SEQ ID NO: 213984 - DNA, 22 bp, Artificial Sequence
  Synthetic oligonucleotide; TTT chr2 60532164 60532185 60532169 60532164 -
gaagaacttctgtgattactgg

SEQ ID NO: 213985 - DNA, 22 bp, Artificial Sequence
  Synthetic oligonucleotide; TTG chr2 60532163 60532184 60532168 60532163 -
aagaacttctgtgattactggg

SEQ ID NO: 213986 - DNA, 22 bp, Artificial Sequence
  Synthetic oligonucleotide; CTT chr2 60532155 60532176 60532160 60532155 -
ctgtgattactgggggtacagt

SEQ ID NO: 213987 - DNA, 22 bp, Artificial Sequence
  Synthetic oligonucleotide; TTC chr2 60532154 60532175 60532159 60532154 -
tgtgattactgggggtacagtg

SEQ ID NO: 213988 - DNA, 22 bp, Artificial Sequence
  Synthetic oligonucleotide; CTG chr2 60532152 60532173 60532157 60532152 -
tgattactgggggtacagtgaa

SEQ ID NO: 213989 - DNA, 22 bp, Artificial Sequence
  Synthetic oligonucleotide; TTA chr2 60532146 60532167 60532151 60532146 -
ctgggggtacagtgaaaagaaa

SEQ ID NO: 213990 - DNA, 22 bp, Artificial Sequence
  Synthetic oligonucleotide; CTG chr2 60532143 60532164 60532148 60532143 -
ggggtacagtgaaaagaaaatg

SEQ ID NO: 213991 - DNA, 22 bp, Artificial Sequence
  Synthetic oligonucleotide; TTT chr2 60532114 60532135 60532119 60532114 -
cttcctgatcttaattagattc

SEQ ID NO: 213992 - DNA, 22 bp, Artificial Sequence
  Synthetic oligonucleotide; TTC chr2 60532113 60532134 60532118 60532113 -
ttcctgatcttaattagattcg

SEQ ID NO: 213993 - DNA, 22 bp, Artificial Sequence
  Synthetic oligonucleotide; CTT chr2 60532111 60532132 60532116 60532111 -
cctgatcttaattagattcgat

SEQ ID NO: 213994 - DNA, 22 bp, Artificial Sequence
  Synthetic oligonucleotide; TTC chr2 60532110 60532131 60532115 60532110 -
ctgatcttaattagattcgatt

SEQ ID NO: 213995 - DNA, 22 bp, Artificial Sequence
  Synthetic oligonucleotide; CTG chr2 60532107 60532128 60532112 60532107 -
atcttaattagattcgattgtg

SEQ ID NO: 213996 - DNA, 22 bp, Artificial Sequence
  Synthetic oligonucleotide; CTT chr2 60532102 60532123 60532107 60532102 -
aattagattcgattgtgcggtg

SEQ ID NO: 213997 - DNA, 22 bp, Artificial Sequence
  Synthetic oligonucleotide; TTA chr2 60532101 60532122 60532106 60532101 -
attagattcgattgtgcggtgg

SEQ ID NO: 213998 - DNA, 22 bp, Artificial Sequence
  Synthetic oligonucleotide; TTA chr2 60532097 60532118 60532102 60532097 -
gattcgattgtgcggtgggtgt

SEQ ID NO: 213999 - DNA, 22 bp, Artificial Sequence
  Synthetic oligonucleotide; TTC chr2 60532092 60532113 60532097 60532092 -
gattgtgcggtgggtgtgttgg

SEQ ID NO: 214000 - DNA, 22 bp, Artificial Sequence
  Synthetic oligonucleotide; TTG chr2 60532087 60532108 60532092 60532087 -
tgcggtgggtgtgttggatttg

SEQ ID NO: 214001 - DNA, 22 bp, Artificial Sequence
  Synthetic oligonucleotide; TTG chr2 60532071 60532092 60532076 60532071 -
gatttggggggaggggcagagg

SEQ ID NO: 214002 - DNA, 22 bp, Artificial Sequence
  Synthetic oligonucleotide; TTT chr2 60532066 60532087 60532071 60532066 -
ggggggaggggcagaggcaggg

SEQ ID NO: 214003 - DNA, 22 bp, Artificial Sequence
  Synthetic oligonucleotide; TTG chr2 60532065 60532086 60532070 60532065 -
gggggaggggcagaggcaggga

SEQ ID NO: 214004 - DNA, 22 bp, Artificial Sequence
  Synthetic oligonucleotide; CTG chr2 60532037 60532058 60532042 60532037 -
gggtgaggcgtgaggctgagtg

SEQ ID NO: 214005 - DNA, 22 bp, Artificial Sequence
  Synthetic oligonucleotide; CTG chr2 60532019 60532040 60532024 60532019 -
agtgttgtggagacaggttagc

SEQ ID NO: 214006 - DNA, 22 bp, Artificial Sequence
  Synthetic oligonucleotide; TTG chr2 60532012 60532033 60532017 60532012 -
tggagacaggttagcaggggcc

SEQ ID NO: 214007 - DNA, 22 bp, Artificial Sequence
  Synthetic oligonucleotide; TTA chr2 60531999 60532020 60532004 60531999 -
gcaggggcccggcggtgtggca

SEQ ID NO: 214008 - DNA, 22 bp, Artificial Sequence
  Synthetic oligonucleotide; CTT chr2 60531961 60531982 60531966 60531961 -
ccaacgctggtgcaggattccg

SEQ ID NO: 214009 - DNA, 22 bp, Artificial Sequence
  Synthetic oligonucleotide; TTC chr2 60531960 60531981 60531965 60531960 -
caacgctggtgcaggattccga

SEQ ID NO: 214010 - DNA, 22 bp, Artificial Sequence
  Synthetic oligonucleotide; CTG chr2 60531952 60531973 60531957 60531952 -
gtgcaggattccgagccttaac

SEQ ID NO: 214011 - DNA, 22 bp, Artificial Sequence
  Synthetic oligonucleotide; TTC chr2 60531941 60531962 60531946 60531941 -
cgagccttaacccagatgctca

SEQ ID NO: 214012 - DNA, 22 bp, Artificial Sequence
  Synthetic oligonucleotide; CTT chr2 60531933 60531954 60531938 60531933 -
aacccagatgctcatggtgccc

SEQ ID NO: 214013 - DNA, 22 bp, Artificial Sequence
  Synthetic oligonucleotide; TTA chr2 60531932 60531953 60531937 60531932 -
acccagatgctcatggtgccct

SEQ ID NO: 214014 - DNA, 22 bp, Artificial Sequence
  Synthetic oligonucleotide; CTC chr2 60531920 60531941 60531925 60531920 -
atggtgccctagtcttgagttc

SEQ ID NO: 214015 - DNA, 22 bp, Artificial Sequence
  Synthetic oligonucleotide; CTA chr2 60531909 60531930 60531914 60531909 -
gtcttgagttcttcatttaggt

SEQ ID NO: 214016 - DNA, 22 bp, Artificial Sequence
  Synthetic oligonucleotide; CTT chr2 60531904 60531925 60531909 60531904 -
gagttcttcatttaggtgggct

SEQ ID NO: 214017 - DNA, 22 bp, Artificial Sequence
  Synthetic oligonucleotide; TTG chr2 60531903 60531924 60531908 60531903 -
agttcttcatttaggtgggctt

SEQ ID NO: 214018 - DNA, 22 bp, Artificial Sequence
  Synthetic oligonucleotide; TTC chr2 60531898 60531919 60531903 60531898 -
ttcatttaggtgggcttatttc

SEQ ID NO: 214019 - DNA, 22 bp, Artificial Sequence
  Synthetic oligonucleotide; CTT chr2 60531896 60531917 60531901 60531896 -
catttaggtgggcttatttccc

SEQ ID NO: 214020 - DNA, 22 bp, Artificial Sequence
  Synthetic oligonucleotide; TTC chr2 60531895 60531916 60531900 60531895 -
atttaggtgggcttatttccca

SEQ ID NO: 214021 - DNA, 22 bp, Artificial Sequence
  Synthetic oligonucleotide; TTT chr2 60531891 60531912 60531896 60531891 -
aggtgggcttatttcccactgg

SEQ ID NO: 214022 - DNA, 22 bp, Artificial Sequence
  Synthetic oligonucleotide; TTA chr2 60531890 60531911 60531895 60531890 -
ggtgggcttatttcccactggg

SEQ ID NO: 214023 - DNA, 22 bp, Artificial Sequence
  Synthetic oligonucleotide; CTT chr2 60531881 60531902 60531886 60531881 -
atttcccactgggtctggggga

SEQ ID NO: 214024 - DNA, 22 bp, Artificial Sequence
  Synthetic oligonucleotide; TTA chr2 60531880 60531901 60531885 60531880 -
tttcccactgggtctgggggat

SEQ ID NO: 214025 - DNA, 22 bp, Artificial Sequence
  Synthetic oligonucleotide; TTT chr2 60531877 60531898 60531882 60531877 -
cccactgggtctgggggatttc

SEQ ID NO: 214026 - DNA, 22 bp, Artificial Sequence
  Synthetic oligonucleotide; TTC chr2 60531876 60531897 60531881 60531876 -
ccactgggtctgggggatttca

SEQ ID NO: 214027 - DNA, 22 bp, Artificial Sequence
  Synthetic oligonucleotide; CTG chr2 60531870 60531891 60531875 60531870 -
ggtctgggggatttcatttgtc

SEQ ID NO: 214028 - DNA, 22 bp, Artificial Sequence
  Synthetic oligonucleotide; CTG chr2 60531864 60531885 60531869 60531864 -
ggggatttcatttgtcctttga

SEQ ID NO: 214029 - DNA, 22 bp, Artificial Sequence
  Synthetic oligonucleotide; TTT chr2 60531856 60531877 60531861 60531856 -
catttgtcctttgaggggcagg

SEQ ID NO: 214030 - DNA, 22 bp, Artificial Sequence
  Synthetic oligonucleotide; TTC chr2 60531855 60531876 60531860 60531855 -
atttgtcctttgaggggcaggg

SEQ ID NO: 214031 - DNA, 22 bp, Artificial Sequence
  Synthetic oligonucleotide; TTT chr2 60531851 60531872 60531856 60531851 -
gtcctttgaggggcagggtgga

SEQ ID NO: 214032 - DNA, 22 bp, Artificial Sequence
  Synthetic oligonucleotide; TTG chr2 60531850 60531871 60531855 60531850 -
tcctttgaggggcagggtggac

SEQ ID NO: 214033 - DNA, 22 bp, Artificial Sequence
  Synthetic oligonucleotide; CTT chr2 60531845 60531866 60531850 60531845 -
tgaggggcagggtggacactga

SEQ ID NO: 214034 - DNA, 22 bp, Artificial Sequence
  Synthetic oligonucleotide; TTT chr2 60531844 60531865 60531849 60531844 -
gaggggcagggtggacactgac

SEQ ID NO: 214035 - DNA, 22 bp, Artificial Sequence
  Synthetic oligonucleotide; TTG chr2 60531843 60531864 60531848 60531843 -
aggggcagggtggacactgaca

SEQ ID NO: 214036 - DNA, 22 bp, Artificial Sequence
  Synthetic oligonucleotide; CTG chr2 60531824 60531845 60531829 60531824 -
acagaacagctgcggccggcag

SEQ ID NO: 214037 - DNA, 22 bp, Artificial Sequence
  Synthetic oligonucleotide; CTG chr2 60531812 60531833 60531817 60531812 -
cggccggcagagagggtggtta

SEQ ID NO: 214038 - DNA, 22 bp, Artificial Sequence
  Synthetic oligonucleotide; TTA chr2 60531790 60531811 60531795 60531790 -
ggaagagggaagcagcctgtgg

SEQ ID NO: 214039 - DNA, 22 bp, Artificial Sequence
  Synthetic oligonucleotide; CTG chr2 60531771 60531792 60531776 60531771 -
tgggtaacttcccgaccacatg

SEQ ID NO: 214040 - DNA, 22 bp, Artificial Sequence
  Synthetic oligonucleotide; CTT chr2 60531761 60531782 60531766 60531761 -
cccgaccacatggaaaggctga

SEQ ID NO: 214041 - DNA, 22 bp, Artificial Sequence
  Synthetic oligonucleotide; TTC chr2 60531760 60531781 60531765 60531760 -
ccgaccacatggaaaggctgaa

SEQ ID NO: 214042 - DNA, 22 bp, Artificial Sequence
  Synthetic oligonucleotide; CTG chr2 60531740 60531761 60531745 60531740 -
aataagacgttatggaccctgc

SEQ ID NO: 214043 - DNA, 22 bp, Artificial Sequence
  Synthetic oligonucleotide; TTA chr2 60531728 60531749 60531733 60531728 -
tggaccctgccttgggtactgg

SEQ ID NO: 214044 - DNA, 22 bp, Artificial Sequence
  Synthetic oligonucleotide; CTG chr2 60531719 60531740 60531724 60531719 -
ccttgggtactggggtcagcgt

SEQ ID NO: 214045 - DNA, 22 bp, Artificial Sequence
  Synthetic oligonucleotide; CTT chr2 60531715 60531736 60531720 60531715 -
gggtactggggtcagcgtctcc

SEQ ID NO: 214046 - DNA, 22 bp, Artificial Sequence
  Synthetic oligonucleotide; TTG chr2 60531714 60531735 60531719 60531714 -
ggtactggggtcagcgtctcct

SEQ ID NO: 214047 - DNA, 22 bp, Artificial Sequence
  Synthetic oligonucleotide; CTG chr2 60531707 60531728 60531712 60531707 -
gggtcagcgtctcctggtggtg

SEQ ID NO: 214048 - DNA, 22 bp, Artificial Sequence
  Synthetic oligonucleotide; CTC chr2 60531694 60531715 60531699 60531694 -
ctggtggtgtctgcacagggcc

SEQ ID NO: 214049 - DNA, 22 bp, Artificial Sequence
  Synthetic oligonucleotide; CTG chr2 60531691 60531712 60531696 60531691 -
gtggtgtctgcacagggccccc

SEQ ID NO: 214050 - DNA, 22 bp, Artificial Sequence
  Synthetic oligonucleotide; CTG chr2 60531681 60531702 60531686 60531681 -
cacagggccccccaatgccagg

SEQ ID NO: 214051 - DNA, 22 bp, Artificial Sequence
  Synthetic oligonucleotide; CTG chr2 60531653 60531674 60531658 60531653 -
ccaaaacacgctcttgagttta

SEQ ID NO: 214052 - DNA, 22 bp, Artificial Sequence
  Synthetic oligonucleotide; CTC chr2 60531640 60531661 60531645 60531640 -
ttgagtttaatggtagtggttg

SEQ ID NO: 214053 - DNA, 22 bp, Artificial Sequence
  Synthetic oligonucleotide; CTT chr2 60531638 60531659 60531643 60531638 -
gagtttaatggtagtggttggt

SEQ ID NO: 214054 - DNA, 22 bp, Artificial Sequence
  Synthetic oligonucleotide; TTG chr2 60531637 60531658 60531642 60531637 -
agtttaatggtagtggttggtc

SEQ ID NO: 214055 - DNA, 22 bp, Artificial Sequence
  Synthetic oligonucleotide; TTT chr2 60531632 60531653 60531637 60531632 -
aatggtagtggttggtctgagt

SEQ ID NO: 214056 - DNA, 22 bp, Artificial Sequence
  Synthetic oligonucleotide; TTA chr2 60531631 60531652 60531636 60531631 -
atggtagtggttggtctgagtc

SEQ ID NO: 214057 - DNA, 22 bp, Artificial Sequence
  Synthetic oligonucleotide; TTG chr2 60531618 60531639 60531623 60531618 -
gtctgagtcctgccaaagtgta

SEQ ID NO: 214058 - DNA, 22 bp, Artificial Sequence
  Synthetic oligonucleotide; CTG chr2 60531613 60531634 60531618 60531613 -
agtcctgccaaagtgtatggag

SEQ ID NO: 214059 - DNA, 22 bp, Artificial Sequence
  Synthetic oligonucleotide; CTG chr2 60531606 60531627 60531611 60531606 -
ccaaagtgtatggagcaagttt

SEQ ID NO: 214060 - DNA, 22 bp, Artificial Sequence
  Synthetic oligonucleotide; TTT chr2 60531584 60531605 60531589 60531584 -
cattggctggactttccccttg

SEQ ID NO: 214061 - DNA, 22 bp, Artificial Sequence
  Synthetic oligonucleotide; TTC chr2 60531583 60531604 60531588 60531583 -
attggctggactttccccttgc

SEQ ID NO: 214062 - DNA, 22 bp, Artificial Sequence
  Synthetic oligonucleotide; TTG chr2 60531579 60531600 60531584 60531579 -
gctggactttccccttgcatga

SEQ ID NO: 214063 - DNA, 22 bp, Artificial Sequence
  Synthetic oligonucleotide; CTG chr2 60531575 60531596 60531580 60531575 -
gactttccccttgcatgaaata

SEQ ID NO: 214064 - DNA, 22 bp, Artificial Sequence
  Synthetic oligonucleotide; CTT chr2 60531570 60531591 60531575 60531570 -
tccccttgcatgaaataataaa

SEQ ID NO: 214065 - DNA, 22 bp, Artificial Sequence
  Synthetic oligonucleotide; TTT chr2 60531569 60531590 60531574 60531569 -
ccccttgcatgaaataataaaa

SEQ ID NO: 214066 - DNA, 22 bp, Artificial Sequence
  Synthetic oligonucleotide; TTC chr2 60531568 60531589 60531573 60531568 -
cccttgcatgaaataataaaag

SEQ ID NO: 214067 - DNA, 22 bp, Artificial Sequence
  Synthetic oligonucleotide; CTT chr2 60531563 60531584 60531568 60531563 -
gcatgaaataataaaagccctg

SEQ ID NO: 214068 - DNA, 22 bp, Artificial Sequence
  Synthetic oligonucleotide; TTG chr2 60531562 60531583 60531567 60531562 -
catgaaataataaaagccctgg

SEQ ID NO: 214069 - DNA, 22 bp, Artificial Sequence
  Synthetic oligonucleotide; CTG chr2 60531541 60531562 60531546 60531541 -
gccaaggcttatgaatctattt

SEQ ID NO: 214070 - DNA, 22 bp, Artificial Sequence
  Synthetic oligonucleotide; CTT chr2 60531531 60531552 60531536 60531531 -
atgaatctatttttgtttcatt

SEQ ID NO: 214071 - DNA, 22 bp, Artificial Sequence
  Synthetic oligonucleotide; TTA chr2 60531530 60531551 60531535 60531530 -
tgaatctatttttgtttcatta

SEQ ID NO: 214072 - DNA, 22 bp, Artificial Sequence
  Synthetic oligonucleotide; CTA chr2 60531522 60531543 60531527 60531522 -
tttttgtttcattaatattatt

SEQ ID NO: 214073 - DNA, 22 bp, Artificial Sequence
  Synthetic oligonucleotide; TTT chr2 60531519 60531540 60531524 60531519 -
ttgtttcattaatattatttat

SEQ ID NO: 214074 - DNA, 22 bp, Artificial Sequence
  Synthetic oligonucleotide; TTT chr2 60531518 60531539 60531523 60531518 -
tgtttcattaatattatttatt

SEQ ID NO: 214075 - DNA, 22 bp, Artificial Sequence
  Synthetic oligonucleotide; TTT chr2 60531517 60531538 60531522 60531517 -
gtttcattaatattatttatta

SEQ ID NO: 214076 - DNA, 22 bp, Artificial Sequence
  Synthetic oligonucleotide; TTG chr2 60531516 60531537 60531521 60531516 -
tttcattaatattatttattat

SEQ ID NO: 214077 - DNA, 22 bp, Artificial Sequence
  Synthetic oligonucleotide; TTT chr2 60531513 60531534 60531518 60531513 -
cattaatattatttattatgta

SEQ ID NO: 214078 - DNA, 22 bp, Artificial Sequence
  Synthetic oligonucleotide; TTC chr2 60531512 60531533 60531517 60531512 -
attaatattatttattatgtat

SEQ ID NO: 214079 - DNA, 22 bp, Artificial Sequence
  Synthetic oligonucleotide; TTA chr2 60531508 60531529 60531513 60531508 -
atattatttattatgtatttta

SEQ ID NO: 214080 - DNA, 22 bp, Artificial Sequence
  Synthetic oligonucleotide; TTA chr2 60531502 60531523 60531507 60531502 -
tttattatgtattttattaata

SEQ ID NO: 214081 - DNA, 22 bp, Artificial Sequence
  Synthetic oligonucleotide; TTT chr2 60531499 60531520 60531504 60531499 -
attatgtattttattaatattt

SEQ ID NO: 214082 - DNA, 22 bp, Artificial Sequence
  Synthetic oligonucleotide; TTA chr2 60531498 60531519 60531503 60531498 -
ttatgtattttattaatatttt

SEQ ID NO: 214083 - DNA, 22 bp, Artificial Sequence
  Synthetic oligonucleotide; TTA chr2 60531495 60531516 60531500 60531495 -
tgtattttattaatattttttg

SEQ ID NO: 214084 - DNA, 22 bp, Artificial Sequence
  Synthetic oligonucleotide; TTT chr2 60531488 60531509 60531493 60531488 -
tattaatattttttggagggac

SEQ ID NO: 214085 - DNA, 22 bp, Artificial Sequence
  Synthetic oligonucleotide; TTT chr2 60531487 60531508 60531492 60531487 -
attaatattttttggagggacc

SEQ ID NO: 214086 - DNA, 22 bp, Artificial Sequence
  Synthetic oligonucleotide; TTA chr2 60531486 60531507 60531491 60531486 -
ttaatattttttggagggacct

SEQ ID NO: 214087 - DNA, 22 bp, Artificial Sequence
  Synthetic oligonucleotide; TTA chr2 60531483 60531504 60531488 60531483 -
atattttttggagggaccttgc

SEQ ID NO: 214088 - DNA, 22 bp, Artificial Sequence
  Synthetic oligonucleotide; TTT chr2 60531477 60531498 60531482 60531477 -
tttggagggaccttgctctcat

SEQ ID NO: 214089 - DNA, 22 bp, Artificial Sequence
  Synthetic oligonucleotide; TTT chr2 60531476 60531497 60531481 60531476 -
ttggagggaccttgctctcatt

SEQ ID NO: 214090 - DNA, 22 bp, Artificial Sequence
  Synthetic oligonucleotide; TTT chr2 60531475 60531496 60531480 60531475 -
tggagggaccttgctctcattt

SEQ ID NO: 214091 - DNA, 22 bp, Artificial Sequence
  Synthetic oligonucleotide; TTT chr2 60531474 60531495 60531479 60531474 -
ggagggaccttgctctcatttg

SEQ ID NO: 214092 - DNA, 22 bp, Artificial Sequence
  Synthetic oligonucleotide; TTG chr2 60531473 60531494 60531478 60531473 -
gagggaccttgctctcatttga

SEQ ID NO: 214093 - DNA, 22 bp, Artificial Sequence
  Synthetic oligonucleotide; CTT chr2 60531463 60531484 60531468 60531463 -
gctctcatttgaccatttgtag

SEQ ID NO: 214094 - DNA, 22 bp, Artificial Sequence
  Synthetic oligonucleotide; TTG chr2 60531462 60531483 60531467 60531462 -
ctctcatttgaccatttgtagt

SEQ ID NO: 214095 - DNA, 22 bp, Artificial Sequence
  Synthetic oligonucleotide; CTC chr2 60531459 60531480 60531464 60531459 -
tcatttgaccatttgtagttat

SEQ ID NO: 214096 - DNA, 22 bp, Artificial Sequence
  Synthetic oligonucleotide; CTC chr2 60531457 60531478 60531462 60531457 -
atttgaccatttgtagttataa

SEQ ID NO: 214097 - DNA, 22 bp, Artificial Sequence
  Synthetic oligonucleotide; TTT chr2 60531453 60531474 60531458 60531453 -
gaccatttgtagttataattaa

SEQ ID NO: 214098 - DNA, 22 bp, Artificial Sequence
  Synthetic oligonucleotide; TTG chr2 60531452 60531473 60531457 60531452 -
accatttgtagttataattaat

SEQ ID NO: 214099 - DNA, 22 bp, Artificial Sequence
  Synthetic oligonucleotide; TTT chr2 60531445 60531466 60531450 60531445 -
gtagttataattaatgcattcc

SEQ ID NO: 214100 - DNA, 22 bp, Artificial Sequence
  Synthetic oligonucleotide; TTG chr2 60531444 60531465 60531449 60531444 -
tagttataattaatgcattccg

SEQ ID NO: 214101 - DNA, 22 bp, Artificial Sequence
  Synthetic oligonucleotide; TTA chr2 60531438 60531459 60531443 60531438 -
taattaatgcattccgtactgg

SEQ ID NO: 214102 - DNA, 22 bp, Artificial Sequence
  Synthetic oligonucleotide; TTA chr2 60531432 60531453 60531437 60531432 -
atgcattccgtactggttgtaa

SEQ ID NO: 214103 - DNA, 22 bp, Artificial Sequence
  Synthetic oligonucleotide; TTC chr2 60531424 60531445 60531429 60531424 -
cgtactggttgtaaaaagtgtg

SEQ ID NO: 214104 - DNA, 22 bp, Artificial Sequence
  Synthetic oligonucleotide; CTG chr2 60531417 60531438 60531422 60531417 -
gttgtaaaaagtgtgcttgcat

SEQ ID NO: 214105 - DNA, 22 bp, Artificial Sequence
  Synthetic oligonucleotide; TTG chr2 60531413 60531434 60531418 60531413 -
taaaaagtgtgcttgcatttaa

SEQ ID NO: 214106 - DNA, 22 bp, Artificial Sequence
  Synthetic oligonucleotide; CTT chr2 60531399 60531420 60531404 60531399 -
gcatttaattgcaagtcagggt

SEQ ID NO: 214107 - DNA, 22 bp, Artificial Sequence
  Synthetic oligonucleotide; TTG chr2 60531398 60531419 60531403 60531398 -
catttaattgcaagtcagggta

SEQ ID NO: 214108 - DNA, 22 bp, Artificial Sequence
  Synthetic oligonucleotide; TTT chr2 60531393 60531414 60531398 60531393 -
aattgcaagtcagggtaaatta

SEQ ID NO: 214109 - DNA, 22 bp, Artificial Sequence
  Synthetic oligonucleotide; TTA chr2 60531392 60531413 60531397 60531392 -
attgcaagtcagggtaaattaa

SEQ ID NO: 214110 - DNA, 22 bp, Artificial Sequence
  Synthetic oligonucleotide; TTG chr2 60531388 60531409 60531393 60531388 -
caagtcagggtaaattaatgga

SEQ ID NO: 214111 - DNA, 22 bp, Artificial Sequence
  Synthetic oligonucleotide; TTA chr2 60531371 60531392 60531376 60531371 -
atggatatgatttaaaacaaaa

SEQ ID NO: 214112 - DNA, 22 bp, Artificial Sequence
  Synthetic oligonucleotide; TTT chr2 60531358 60531379 60531363 60531358 -
aaaacaaaactcacttaaaata

SEQ ID NO: 214113 - DNA, 22 bp, Artificial Sequence
  Synthetic oligonucleotide; TTA chr2 60531357 60531378 60531362 60531357 -
aaacaaaactcacttaaaatat

SEQ ID NO: 214114 - DNA, 22 bp, Artificial Sequence
  Synthetic oligonucleotide; CTC chr2 60531346 60531367 60531351 60531346 -
acttaaaatattcttgcagaac

SEQ ID NO: 214115 - DNA, 22 bp, Artificial Sequence
  Synthetic oligonucleotide; CTT chr2 60531342 60531363 60531347 60531342 -
aaaatattcttgcagaacgcaa

SEQ ID NO: 214116 - DNA, 22 bp, Artificial Sequence
  Synthetic oligonucleotide; TTA chr2 60531341 60531362 60531346 60531341 -
aaatattcttgcagaacgcaaa

SEQ ID NO: 214117 - DNA, 22 bp, Artificial Sequence
  Synthetic oligonucleotide; TTC chr2 60531333 60531354 60531338 60531333 -
ttgcagaacgcaaaggaggggg

SEQ ID NO: 214118 - DNA, 22 bp, Artificial Sequence
  Synthetic oligonucleotide; CTT chr2 60531331 60531352 60531336 60531331 -
gcagaacgcaaaggagggggca

SEQ ID NO: 214119 - DNA, 22 bp, Artificial Sequence
  Synthetic oligonucleotide; TTG chr2 60531330 60531351 60531335 60531330 -
cagaacgcaaaggagggggcag

SEQ ID NO: 214120 - DNA, 22 bp, Artificial Sequence
  Synthetic oligonucleotide; TTT chr2 60531297 60531318 60531302 60531297 -
aatttattttctggtttagtgt

SEQ ID NO: 214121 - DNA, 22 bp, Artificial Sequence
  Synthetic oligonucleotide; TTA chr2 60531296 60531317 60531301 60531296 -
atttattttctggtttagtgtt

SEQ ID NO: 214122 - DNA, 22 bp, Artificial Sequence
  Synthetic oligonucleotide; TTT chr2 60531292 60531313 60531297 60531292 -
attttctggtttagtgttagtg

SEQ ID NO: 214123 - DNA, 22 bp, Artificial Sequence
  Synthetic oligonucleotide; TTA chr2 60531291 60531312 60531296 60531291 -
ttttctggtttagtgttagtgt

SEQ ID NO: 214124 - DNA, 22 bp, Artificial Sequence
  Synthetic oligonucleotide; TTT chr2 60531288 60531309 60531293 60531288 -
tctggtttagtgttagtgtgag

SEQ ID NO: 214125 - DNA, 22 bp, Artificial Sequence
  Synthetic oligonucleotide; TTT chr2 60531287 60531308 60531292 60531287 -
ctggtttagtgttagtgtgaga

SEQ ID NO: 214126 - DNA, 22 bp, Artificial Sequence
  Synthetic oligonucleotide; TTC chr2 60531286 60531307 60531291 60531286 -
tggtttagtgttagtgtgagag

SEQ ID NO: 214127 - DNA, 22 bp, Artificial Sequence
  Synthetic oligonucleotide; CTG chr2 60531284 60531305 60531289 60531284 -
gtttagtgttagtgtgagaggg

SEQ ID NO: 214128 - DNA, 22 bp, Artificial Sequence
  Synthetic oligonucleotide; TTT chr2 60531280 60531301 60531285 60531280 -
agtgttagtgtgagagggtcga

SEQ ID NO: 214129 - DNA, 22 bp, Artificial Sequence
  Synthetic oligonucleotide; TTA chr2 60531279 60531300 60531284 60531279 -
gtgttagtgtgagagggtcgaa

SEQ ID NO: 214130 - DNA, 22 bp, Artificial Sequence
  Synthetic oligonucleotide; TTA chr2 60531273 60531294 60531278 60531273 -
gtgtgagagggtcgaaaagatt

SEQ ID NO: 214131 - DNA, 22 bp, Artificial Sequence
  Synthetic oligonucleotide; TTC chr2 60531250 60531271 60531255 60531250 -
tgtgggtccaacgggatttgtg

SEQ ID NO: 214132 - DNA, 22 bp, Artificial Sequence
  Synthetic oligonucleotide; CTG chr2 60531248 60531269 60531253 60531248 -
tgggtccaacgggatttgtgtc

SEQ ID NO: 214133 - DNA, 22 bp, Artificial Sequence
  Synthetic oligonucleotide; TTT chr2 60531231 60531252 60531236 60531231 -
gtgtctgtgtgtgcaggaccgt

SEQ ID NO: 214134 - DNA, 22 bp, Artificial Sequence
  Synthetic oligonucleotide; TTG chr2 60531230 60531251 60531235 60531230 -
tgtctgtgtgtgcaggaccgtc

SEQ ID NO: 214135 - DNA, 22 bp, Artificial Sequence
  Synthetic oligonucleotide; CTG chr2 60531224 60531245 60531229 60531224 -
tgtgtgcaggaccgtcgggcaa

SEQ ID NO: 214136 - DNA, 22 bp, Artificial Sequence
  Synthetic oligonucleotide; CTG chr2 60531179 60531200 60531184 60531179 -
gaccggagtagggtagccagga

SEQ ID NO: 214137 - DNA, 22 bp, Artificial Sequence
  Synthetic oligonucleotide; CTC chr2 60531153 60531174 60531158 60531153 -
tttttttttttttctctaattt

SEQ ID NO: 214138 - DNA, 22 bp, Artificial Sequence
  Synthetic oligonucleotide; CTT chr2 60531151 60531172 60531156 60531151 -
tttttttttttctctaatttct

SEQ ID NO: 214139 - DNA, 22 bp, Artificial Sequence
  Synthetic oligonucleotide; TTT chr2 60531150 60531171 60531155 60531150 -
ttttttttttctctaatttctg

SEQ ID NO: 214140 - DNA, 22 bp, Artificial Sequence
  Synthetic oligonucleotide; TTT chr2 60531149 60531170 60531154 60531149 -
tttttttttctctaatttctga

SEQ ID NO: 214141 - DNA, 22 bp, Artificial Sequence
  Synthetic oligonucleotide; TTT chr2 60531148 60531169 60531153 60531148 -
ttttttttctctaatttctgag

SEQ ID NO: 214142 - DNA, 22 bp, Artificial Sequence
  Synthetic oligonucleotide; TTT chr2 60531147 60531168 60531152 60531147 -
tttttttctctaatttctgagg

SEQ ID NO: 214143 - DNA, 22 bp, Artificial Sequence
  Synthetic oligonucleotide; TTT chr2 60531146 60531167 60531151 60531146 -
ttttttctctaatttctgaggt

SEQ ID NO: 214144 - DNA, 22 bp, Artificial Sequence
  Synthetic oligonucleotide; TTT chr2 60531145 60531166 60531150 60531145 -
tttttctctaatttctgaggtt

SEQ ID NO: 214145 - DNA, 22 bp, Artificial Sequence
  Synthetic oligonucleotide; TTT chr2 60531144 60531165 60531149 60531144 -
ttttctctaatttctgaggttg

SEQ ID NO: 214146 - DNA, 22 bp, Artificial Sequence
  Synthetic oligonucleotide; TTT chr2 60531143 60531164 60531148 60531143 -
tttctctaatttctgaggttgc

SEQ ID NO: 214147 - DNA, 22 bp, Artificial Sequence
  Synthetic oligonucleotide; TTT chr2 60531142 60531163 60531147 60531142 -
ttctctaatttctgaggttgcc

SEQ ID NO: 214148 - DNA, 22 bp, Artificial Sequence
  Synthetic oligonucleotide; TTT chr2 60531141 60531162 60531146 60531141 -
tctctaatttctgaggttgcca

SEQ ID NO: 214149 - DNA, 22 bp, Artificial Sequence
  Synthetic oligonucleotide; TTT chr2 60531140 60531161 60531145 60531140 -
ctctaatttctgaggttgccag

SEQ ID NO: 214150 - DNA, 22 bp, Artificial Sequence
  Synthetic oligonucleotide; TTC chr2 60531139 60531160 60531144 60531139 -
tctaatttctgaggttgccagg

SEQ ID NO: 214151 - DNA, 22 bp, Artificial Sequence
  Synthetic oligonucleotide; CTC chr2 60531137 60531158 60531142 60531137 -
taatttctgaggttgccaggag

SEQ ID NO: 214152 - DNA, 22 bp, Artificial Sequence
  Synthetic oligonucleotide; CTA chr2 60531135 60531156 60531140 60531135 -
atttctgaggttgccaggaggg

SEQ ID NO: 214153 - DNA, 22 bp, Artificial Sequence
  Synthetic oligonucleotide; TTT chr2 60531131 60531152 60531136 60531131 -
ctgaggttgccaggaggggctt

SEQ ID NO: 214154 - DNA, 22 bp, Artificial Sequence
  Synthetic oligonucleotide; TTC chr2 60531130 60531151 60531135 60531130 -
tgaggttgccaggaggggctta

SEQ ID NO: 214155 - DNA, 22 bp, Artificial Sequence
  Synthetic oligonucleotide; CTG chr2 60531128 60531149 60531133 60531128 -
aggttgccaggaggggcttaag

SEQ ID NO: 214156 - DNA, 22 bp, Artificial Sequence
  Synthetic oligonucleotide; TTG chr2 60531122 60531143 60531127 60531122 -
ccaggaggggcttaagcaaagt

SEQ ID NO: 214157 - DNA, 22 bp, Artificial Sequence
  Synthetic oligonucleotide; CTT chr2 60531109 60531130 60531114 60531109 -
aagcaaagtggtcaagtccatc

SEQ ID NO: 214158 - DNA, 22 bp, Artificial Sequence
  Synthetic oligonucleotide; TTA chr2 60531108 60531129 60531113 60531108 -
agcaaagtggtcaagtccatct

SEQ ID NO: 214159 - DNA, 22 bp, Artificial Sequence
  Synthetic oligonucleotide; CTG chr2 60531085 60531106 60531090 60531085 -
ctccggagaaggtggtaaagaa

SEQ ID NO: 214160 - DNA, 22 bp, Artificial Sequence
  Synthetic oligonucleotide; CTC chr2 60531082 60531103 60531087 60531082 -
cggagaaggtggtaaagaaaag

SEQ ID NO: 214161 - DNA, 22 bp, Artificial Sequence
  Synthetic oligonucleotide; TTA chr2 60531054 60531075 60531059 60531054 -
gtggcaagagggaaggagcaca

SEQ ID NO: 214162 - DNA, 22 bp, Artificial Sequence
  Synthetic oligonucleotide; TTG chr2 60531020 60531041 60531025 60531020 -
tacattgggagcgttactctcc

SEQ ID NO: 214163 - DNA, 22 bp, Artificial Sequence
  Synthetic oligonucleotide; TTG chr2 60531013 60531034 60531018 60531013 -
ggagcgttactctccctggcca

SEQ ID NO: 214164 - DNA, 22 bp, Artificial Sequence
  Synthetic oligonucleotide; TTA chr2 60531004 60531025 60531009 60531004 -
ctctccctggccatggtgtagc

SEQ ID NO: 214165 - DNA, 22 bp, Artificial Sequence
  Synthetic oligonucleotide; CTC chr2 60531001 60531022 60531006 60531001 -
tccctggccatggtgtagccag

SEQ ID NO: 214166 - DNA, 22 bp, Artificial Sequence
  Synthetic oligonucleotide; CTC chr2 60530999 60531020 60531004 60530999 -
cctggccatggtgtagccagac

SEQ ID NO: 214167 - DNA, 22 bp, Artificial Sequence
  Synthetic oligonucleotide; CTG chr2 60530995 60531016 60531000 60530995 -
gccatggtgtagccagactggt

SEQ ID NO: 214168 - DNA, 22 bp, Artificial Sequence
  Synthetic oligonucleotide; CTG chr2 60530975 60530996 60530980 60530975 -
gtttagcagacagaatgataga

SEQ ID NO: 214169 - DNA, 22 bp, Artificial Sequence
  Synthetic oligonucleotide; TTT chr2 60530971 60530992 60530976 60530971 -
agcagacagaatgatagattgt

SEQ ID NO: 214170 - DNA, 22 bp, Artificial Sequence
  Synthetic oligonucleotide; TTA chr2 60530970 60530991 60530975 60530970 -
gcagacagaatgatagattgtt

SEQ ID NO: 214171 - DNA, 22 bp, Artificial Sequence
  Synthetic oligonucleotide; TTG chr2 60530950 60530971 60530955 60530950 -
ttttgtcaggggtcccagggtg

SEQ ID NO: 214172 - DNA, 22 bp, Artificial Sequence
  Synthetic oligonucleotide; TTT chr2 60530947 60530968 60530952 60530947 -
tgtcaggggtcccagggtgcgc

SEQ ID NO: 214173 - DNA, 22 bp, Artificial Sequence
  Synthetic oligonucleotide; TTT chr2 60530946 60530967 60530951 60530946 -
gtcaggggtcccagggtgcgcc

SEQ ID NO: 214174 - DNA, 22 bp, Artificial Sequence
  Synthetic oligonucleotide; TTG chr2 60530945 60530966 60530950 60530945 -
tcaggggtcccagggtgcgccc

SEQ ID NO: 214175 - DNA, 22 bp, Artificial Sequence
  Synthetic oligonucleotide; CTG chr2 60530921 60530942 60530926 60530921 -
aacttgaagcactttgtttatc

SEQ ID NO: 214176 - DNA, 22 bp, Artificial Sequence
  Synthetic oligonucleotide; CTT chr2 60530916 60530937 60530921 60530916 -
gaagcactttgtttatcttgaa

SEQ ID NO: 214177 - DNA, 22 bp, Artificial Sequence
  Synthetic oligonucleotide; TTG chr2 60530915 60530936 60530920 60530915 -
aagcactttgtttatcttgaat

SEQ ID NO: 214178 - DNA, 22 bp, Artificial Sequence
  Synthetic oligonucleotide; CTT chr2 60530907 60530928 60530912 60530907 -
tgtttatcttgaatagaaaggg

SEQ ID NO: 214179 - DNA, 22 bp, Artificial Sequence
  Synthetic oligonucleotide; TTT chr2 60530906 60530927 60530911 60530906 -
gtttatcttgaatagaaaggga

SEQ ID NO: 214180 - DNA, 22 bp, Artificial Sequence
  Synthetic oligonucleotide; TTG chr2 60530905 60530926 60530910 60530905 -
tttatcttgaatagaaagggaa

SEQ ID NO: 214181 - DNA, 22 bp, Artificial Sequence
  Synthetic oligonucleotide; TTT chr2 60530902 60530923 60530907 60530902 -
atcttgaatagaaagggaaaag

SEQ ID NO: 214182 - DNA, 22 bp, Artificial Sequence
  Synthetic oligonucleotide; TTA chr2 60530901 60530922 60530906 60530901 -
tcttgaatagaaagggaaaagc

SEQ ID NO: 214183 - DNA, 22 bp, Artificial Sequence
  Synthetic oligonucleotide; CTT chr2 60530897 60530918 60530902 60530897 -
gaatagaaagggaaaagcgcag

SEQ ID NO: 214184 - DNA, 22 bp, Artificial Sequence
  Synthetic oligonucleotide; TTG chr2 60530896 60530917 60530901 60530896 -
aatagaaagggaaaagcgcaga

SEQ ID NO: 214185 - DNA, 22 bp, Artificial Sequence
  Synthetic oligonucleotide; CTA chr2 60530859 60530880 60530864 60530859 -
gtttttaggagctcgaaagagg

SEQ ID NO: 214186 - DNA, 22 bp, Artificial Sequence
  Synthetic oligonucleotide; TTT chr2 60530855 60530876 60530860 60530855 -
ttaggagctcgaaagaggtagg

SEQ ID NO: 214187 - DNA, 22 bp, Artificial Sequence
  Synthetic oligonucleotide; TTT chr2 60530854 60530875 60530859 60530854 -
taggagctcgaaagaggtagga

SEQ ID NO: 214188 - DNA, 22 bp, Artificial Sequence
  Synthetic oligonucleotide; TTT chr2 60530853 60530874 60530858 60530853 -
aggagctcgaaagaggtaggag

SEQ ID NO: 214189 - DNA, 22 bp, Artificial Sequence
  Synthetic oligonucleotide; TTA chr2 60530852 60530873 60530857 60530852 -
ggagctcgaaagaggtaggaga

SEQ ID NO: 214190 - DNA, 22 bp, Artificial Sequence
  Synthetic oligonucleotide; CTC chr2 60530845 60530866 60530850 60530845 -
gaaagaggtaggagaacagaga

SEQ ID NO: 214191 - DNA, 22 bp, Artificial Sequence
  Synthetic oligonucleotide; CTC chr2 60530817 60530838 60530822 60530817 -
aggaggggtagtgggaggtggg

SEQ ID NO: 214192 - DNA, 22 bp, Artificial Sequence
  Synthetic oligonucleotide; CTG chr2 60530779 60530800 60530784 60530779 -
gttgtggttgtccattaacaga

SEQ ID NO: 214193 - DNA, 22 bp, Artificial Sequence
  Synthetic oligonucleotide; TTG chr2 60530775 60530796 60530780 60530775 -
tggttgtccattaacagatgaa

SEQ ID NO: 214194 - DNA, 22 bp, Artificial Sequence
  Synthetic oligonucleotide; TTG chr2 60530769 60530790 60530774 60530769 -
tccattaacagatgaacttggc

SEQ ID NO: 214195 - DNA, 22 bp, Artificial Sequence
  Synthetic oligonucleotide; TTA chr2 60530762 60530783 60530767 60530762 -
acagatgaacttggccgagggc

SEQ ID NO: 214196 - DNA, 22 bp, Artificial Sequence
  Synthetic oligonucleotide; CTT chr2 60530750 60530771 60530755 60530750 -
ggccgagggccaggctttagat

SEQ ID NO: 214197 - DNA, 22 bp, Artificial Sequence
  Synthetic oligonucleotide; TTG chr2 60530749 60530770 60530754 60530749 -
gccgagggccaggctttagatg

SEQ ID NO: 214198 - DNA, 22 bp, Artificial Sequence
  Synthetic oligonucleotide; CTT chr2 60530733 60530754 60530738 60530733 -
tagatgagagcgtgtcagggcc

SEQ ID NO: 214199 - DNA, 22 bp, Artificial Sequence
  Synthetic oligonucleotide; TTT chr2 60530732 60530753 60530737 60530732 -
agatgagagcgtgtcagggccc

SEQ ID NO: 214200 - DNA, 22 bp, Artificial Sequence
  Synthetic oligonucleotide; TTA chr2 60530731 60530752 60530736 60530731 -
gatgagagcgtgtcagggcccc

SEQ ID NO: 214201 - DNA, 22 bp, Artificial Sequence
  Synthetic oligonucleotide; CTT chr2 60530693 60530714 60530698 60530693 -
ttcagtgttttttttttccttt

SEQ ID NO: 214202 - DNA, 22 bp, Artificial Sequence
  Synthetic oligonucleotide; TTT chr2 60530692 60530713 60530697 60530692 -
tcagtgttttttttttcctttt

SEQ ID NO: 214203 - DNA, 22 bp, Artificial Sequence
  Synthetic oligonucleotide; TTT chr2 60530691 60530712 60530696 60530691 -
cagtgttttttttttccttttt

SEQ ID NO: 214204 - DNA, 22 bp, Artificial Sequence
  Synthetic oligonucleotide; TTC chr2 60530690 60530711 60530695 60530690 -
agtgttttttttttcctttttc

SEQ ID NO: 214205 - DNA, 22 bp, Artificial Sequence
  Synthetic oligonucleotide; TTT chr2 60530683 60530704 60530688 60530683 -
tttttttcctttttctttcttt

SEQ ID NO: 214206 - DNA, 22 bp, Artificial Sequence
  Synthetic oligonucleotide; TTT chr2 60530682 60530703 60530687 60530682 -
ttttttcctttttctttctttc

SEQ ID NO: 214207 - DNA, 22 bp, Artificial Sequence
  Synthetic oligonucleotide; TTT chr2 60530681 60530702 60530686 60530681 -
tttttcctttttctttctttct

SEQ ID NO: 214208 - DNA, 22 bp, Artificial Sequence
  Synthetic oligonucleotide; TTT chr2 60530680 60530701 60530685 60530680 -
ttttcctttttctttctttctt

SEQ ID NO: 214209 - DNA, 22 bp, Artificial Sequence
  Synthetic oligonucleotide; TTT chr2 60530679 60530700 60530684 60530679 -
tttcctttttctttctttcttt

SEQ ID NO: 214210 - DNA, 22 bp, Artificial Sequence
  Synthetic oligonucleotide; TTT chr2 60530678 60530699 60530683 60530678 -
ttcctttttctttctttctttt

SEQ ID NO: 214211 - DNA, 22 bp, Artificial Sequence
  Synthetic oligonucleotide; TTT chr2 60530677 60530698 60530682 60530677 -
tcctttttctttctttcttttt

SEQ ID NO: 214212 - DNA, 22 bp, Artificial Sequence
  Synthetic oligonucleotide; TTT chr2 60530676 60530697 60530681 60530676 -
cctttttctttctttctttttt

SEQ ID NO: 214213 - DNA, 22 bp, Artificial Sequence
  Synthetic oligonucleotide; TTC chr2 60530675 60530696 60530680 60530675 -
ctttttctttctttctttttta

SEQ ID NO: 214214 - DNA, 22 bp, Artificial Sequence
  Synthetic oligonucleotide; CTT chr2 60530672 60530693 60530677 60530672 -
tttctttctttcttttttaaat

SEQ ID NO: 214215 - DNA, 22 bp, Artificial Sequence
  Synthetic oligonucleotide; TTT chr2 60530671 60530692 60530676 60530671 -
ttctttctttcttttttaaata

SEQ ID NO: 214216 - DNA, 22 bp, Artificial Sequence
  Synthetic oligonucleotide; TTT chr2 60530670 60530691 60530675 60530670 -
tctttctttcttttttaaatac

SEQ ID NO: 214217 - DNA, 22 bp, Artificial Sequence
  Synthetic oligonucleotide; TTT chr2 60530669 60530690 60530674 60530669 -
ctttctttcttttttaaatacc

SEQ ID NO: 214218 - DNA, 22 bp, Artificial Sequence
  Synthetic oligonucleotide; TTC chr2 60530668 60530689 60530673 60530668 -
tttctttcttttttaaatacct

SEQ ID NO: 214219 - DNA, 22 bp, Artificial Sequence
  Synthetic oligonucleotide; CTT chr2 60530666 60530687 60530671 60530666 -
tctttcttttttaaatacctgc

SEQ ID NO: 214220 - DNA, 22 bp, Artificial Sequence
  Synthetic oligonucleotide; TTT chr2 60530665 60530686 60530670 60530665 -
ctttcttttttaaatacctgct

SEQ ID NO: 214221 - DNA, 22 bp, Artificial Sequence
  Synthetic oligonucleotide; TTC chr2 60530664 60530685 60530669 60530664 -
tttcttttttaaatacctgctg

SEQ ID NO: 214222 - DNA, 22 bp, Artificial Sequence
  Synthetic oligonucleotide; CTT chr2 60530662 60530683 60530667 60530662 -
tcttttttaaatacctgctgac

SEQ ID NO: 214223 - DNA, 22 bp, Artificial Sequence
  Synthetic oligonucleotide; TTT chr2 60530661 60530682 60530666 60530661 -
cttttttaaatacctgctgact

SEQ ID NO: 214224 - DNA, 22 bp, Artificial Sequence
  Synthetic oligonucleotide; TTC chr2 60530660 60530681 60530665 60530660 -
ttttttaaatacctgctgactg

SEQ ID NO: 214225 - DNA, 22 bp, Artificial Sequence
  Synthetic oligonucleotide; CTT chr2 60530658 60530679 60530663 60530658 -
ttttaaatacctgctgactgta

SEQ ID NO: 214226 - DNA, 22 bp, Artificial Sequence
  Synthetic oligonucleotide; TTT chr2 60530657 60530678 60530662 60530657 -
tttaaatacctgctgactgtac

SEQ ID NO: 214227 - DNA, 22 bp, Artificial Sequence
  Synthetic oligonucleotide; TTT chr2 60530656 60530677 60530661 60530656 -
ttaaatacctgctgactgtaca

SEQ ID NO: 214228 - DNA, 22 bp, Artificial Sequence
  Synthetic oligonucleotide; TTT chr2 60530655 60530676 60530660 60530655 -
taaatacctgctgactgtacat

SEQ ID NO: 214229 - DNA, 22 bp, Artificial Sequence
  Synthetic oligonucleotide; TTT chr2 60530654 60530675 60530659 60530654 -
aaatacctgctgactgtacatc

SEQ ID NO: 214230 - DNA, 22 bp, Artificial Sequence
  Synthetic oligonucleotide; TTA chr2 60530653 60530674 60530658 60530653 -
aatacctgctgactgtacatca

SEQ ID NO: 214231 - DNA, 22 bp, Artificial Sequence
  Synthetic oligonucleotide; CTG chr2 60530645 60530666 60530650 60530645 -
ctgactgtacatcaaatgctcc

SEQ ID NO: 214232 - DNA, 22 bp, Artificial Sequence
  Synthetic oligonucleotide; CTG chr2 60530642 60530663 60530647 60530642 -
actgtacatcaaatgctccctg

SEQ ID NO: 214233 - DNA, 22 bp, Artificial Sequence
  Synthetic oligonucleotide; CTG chr2 60530638 60530659 60530643 60530638 -
tacatcaaatgctccctggtct

SEQ ID NO: 214234 - DNA, 22 bp, Artificial Sequence
  Synthetic oligonucleotide; CTC chr2 60530624 60530645 60530629 60530624 -
cctggtcttttggctaaaggca

SEQ ID NO: 214235 - DNA, 22 bp, Artificial Sequence
  Synthetic oligonucleotide; CTG chr2 60530620 60530641 60530625 60530620 -
gtcttttggctaaaggcaaaaa

SEQ ID NO: 214236 - DNA, 22 bp, Artificial Sequence
  Synthetic oligonucleotide; CTT chr2 60530615 60530636 60530620 60530615 -
ttggctaaaggcaaaaaaataa

SEQ ID NO: 214237 - DNA, 22 bp, Artificial Sequence
  Synthetic oligonucleotide; TTT chr2 60530614 60530635 60530619 60530614 -
tggctaaaggcaaaaaaataaa

SEQ ID NO: 214238 - DNA, 22 bp, Artificial Sequence
  Synthetic oligonucleotide; TTT chr2 60530613 60530634 60530618 60530613 -
ggctaaaggcaaaaaaataaaa

SEQ ID NO: 214239 - DNA, 22 bp, Artificial Sequence
  Synthetic oligonucleotide; TTG chr2 60530612 60530633 60530617 60530612 -
gctaaaggcaaaaaaataaaaa

SEQ ID NO: 214240 - DNA, 22 bp, Artificial Sequence
  Synthetic oligonucleotide; CTA chr2 60530608 60530629 60530613 60530608 -
aaggcaaaaaaataaaaaataa

SEQ ID NO: 214241 - DNA, 22 bp, Artificial Sequence
  Synthetic oligonucleotide; CTC chr2 60530563 60530584 60530568 60530563 -
aattttttccctcctctgaacc

SEQ ID NO: 214242 - DNA, 22 bp, Artificial Sequence
  Synthetic oligonucleotide; TTT chr2 60530558 60530579 60530563 60530558 -
tttccctcctctgaaccagttg

SEQ ID NO: 214243 - DNA, 22 bp, Artificial Sequence
  Synthetic oligonucleotide; TTT chr2 60530557 60530578 60530562 60530557 -
ttccctcctctgaaccagttga

SEQ ID NO: 214244 - DNA, 22 bp, Artificial Sequence
  Synthetic oligonucleotide; TTT chr2 60530556 60530577 60530561 60530556 -
tccctcctctgaaccagttgag

SEQ ID NO: 214245 - DNA, 22 bp, Artificial Sequence
  Synthetic oligonucleotide; TTT chr2 60530555 60530576 60530560 60530555 -
ccctcctctgaaccagttgagg

SEQ ID NO: 214246 - DNA, 22 bp, Artificial Sequence
  Synthetic oligonucleotide; TTC chr2 60530554 60530575 60530559 60530554 -
cctcctctgaaccagttgaggc

SEQ ID NO: 214247 - DNA, 22 bp, Artificial Sequence
  Synthetic oligonucleotide; CTC chr2 60530550 60530571 60530555 60530550 -
ctctgaaccagttgaggccagt

SEQ ID NO: 214248 - DNA, 22 bp, Artificial Sequence
  Synthetic oligonucleotide; CTC chr2 60530547 60530568 60530552 60530547 -
tgaaccagttgaggccagtctt

SEQ ID NO: 214249 - DNA, 22 bp, Artificial Sequence
  Synthetic oligonucleotide; CTG chr2 60530545 60530566 60530550 60530545 -
aaccagttgaggccagtctttt

SEQ ID NO: 214250 - DNA, 22 bp, Artificial Sequence
  Synthetic oligonucleotide; TTG chr2 60530536 60530557 60530541 60530536 -
aggccagtcttttggctacata

SEQ ID NO: 214251 - DNA, 22 bp, Artificial Sequence
  Synthetic oligonucleotide; CTT chr2 60530525 60530546 60530530 60530525 -
ttggctacatatgcgggttcta

SEQ ID NO: 214252 - DNA, 22 bp, Artificial Sequence
  Synthetic oligonucleotide; TTT chr2 60530524 60530545 60530529 60530524 -
tggctacatatgcgggttctat

SEQ ID NO: 214253 - DNA, 22 bp, Artificial Sequence
  Synthetic oligonucleotide; TTT chr2 60530523 60530544 60530528 60530523 -
ggctacatatgcgggttctatc

SEQ ID NO: 214254 - DNA, 22 bp, Artificial Sequence
  Synthetic oligonucleotide; TTG chr2 60530522 60530543 60530527 60530522 -
gctacatatgcgggttctatca

SEQ ID NO: 214255 - DNA, 22 bp, Artificial Sequence
  Synthetic oligonucleotide; CTA chr2 60530518 60530539 60530523 60530518 -
catatgcgggttctatcatctt

SEQ ID NO: 214256 - DNA, 22 bp, Artificial Sequence
  Synthetic oligonucleotide; TTC chr2 60530505 60530526 60530510 60530505 -
tatcatctttcctggcttgccg

SEQ ID NO: 214257 - DNA, 22 bp, Artificial Sequence
  Synthetic oligonucleotide; CTA chr2 60530503 60530524 60530508 60530503 -
tcatctttcctggcttgccgtt

SEQ ID NO: 214258 - DNA, 22 bp, Artificial Sequence
  Synthetic oligonucleotide; CTT chr2 60530496 60530517 60530501 60530496 -
tcctggcttgccgttgggaaaa

SEQ ID NO: 214259 - DNA, 22 bp, Artificial Sequence
  Synthetic oligonucleotide; TTT chr2 60530495 60530516 60530500 60530495 -
cctggcttgccgttgggaaaaa

SEQ ID NO: 214260 - DNA, 22 bp, Artificial Sequence
  Synthetic oligonucleotide; TTC chr2 60530494 60530515 60530499 60530494 -
ctggcttgccgttgggaaaaaa

SEQ ID NO: 214261 - DNA, 22 bp, Artificial Sequence
  Synthetic oligonucleotide; CTG chr2 60530491 60530512 60530496 60530491 -
gcttgccgttgggaaaaaaagt

SEQ ID NO: 214262 - DNA, 22 bp, Artificial Sequence
  Synthetic oligonucleotide; CTT chr2 60530487 60530508 60530492 60530487 -
gccgttgggaaaaaaagttgtg

SEQ ID NO: 214263 - DNA, 22 bp, Artificial Sequence
  Synthetic oligonucleotide; TTG chr2 60530486 60530507 60530491 60530486 -
ccgttgggaaaaaaagttgtga

SEQ ID NO: 214264 - DNA, 22 bp, Artificial Sequence
  Synthetic oligonucleotide; TTG chr2 60530480 60530501 60530485 60530480 -
ggaaaaaaagttgtgataacgc

SEQ ID NO: 214265 - DNA, 22 bp, Artificial Sequence
  Synthetic oligonucleotide; TTG chr2 60530467 60530488 60530472 60530467 -
tgataacgccagtaacccgagg

SEQ ID NO: 214266 - DNA, 22 bp, Artificial Sequence
  Synthetic oligonucleotide; TTT chr2 60530427 60530448 60530432 60530427 -
ggttgtgttcaggcgaccaggt

SEQ ID NO: 214267 - DNA, 22 bp, Artificial Sequence
  Synthetic oligonucleotide; TTG chr2 60530426 60530447 60530431 60530426 -
gttgtgttcaggcgaccaggtg

SEQ ID NO: 214268 - DNA, 22 bp, Artificial Sequence
  Synthetic oligonucleotide; TTG chr2 60530422 60530443 60530427 60530422 -
tgttcaggcgaccaggtgtgag

SEQ ID NO: 214269 - DNA, 22 bp, Artificial Sequence
  Synthetic oligonucleotide; TTC chr2 60530417 60530438 60530422 60530417 -
aggcgaccaggtgtgagagctc

SEQ ID NO: 214270 - DNA, 22 bp, Artificial Sequence
  Synthetic oligonucleotide; CTC chr2 60530395 60530416 60530400 60530395 -
gtggtgcagtggggtggggcgt

SEQ ID NO: 214271 - DNA, 22 bp, Artificial Sequence
  Synthetic oligonucleotide; CTG chr2 60530359 60530380 60530364 60530359 -
cgtgtgcaggtaagaaatcagt

SEQ ID NO: 214272 - DNA, 22 bp, Artificial Sequence
  Synthetic oligonucleotide; CTC chr2 60530329 60530350 60530334 60530329 -
ttttttttttttttttttaaat

SEQ ID NO: 214273 - DNA, 22 bp, Artificial Sequence
  Synthetic oligonucleotide; CTT chr2 60530327 60530348 60530332 60530327 -
ttttttttttttttttaaatgg

SEQ ID NO: 214274 - DNA, 22 bp, Artificial Sequence
  Synthetic oligonucleotide; TTT chr2 60530326 60530347 60530331 60530326 -
tttttttttttttttaaatggc

SEQ ID NO: 214275 - DNA, 22 bp, Artificial Sequence
  Synthetic oligonucleotide; TTT chr2 60530325 60530346 60530330 60530325 -
ttttttttttttttaaatggct

SEQ ID NO: 214276 - DNA, 22 bp, Artificial Sequence
  Synthetic oligonucleotide; TTT chr2 60530324 60530345 60530329 60530324 -
tttttttttttttaaatggctg

SEQ ID NO: 214277 - DNA, 22 bp, Artificial Sequence
  Synthetic oligonucleotide; TTT chr2 60530323 60530344 60530328 60530323 -
ttttttttttttaaatggctga

SEQ ID NO: 214278 - DNA, 22 bp, Artificial Sequence
  Synthetic oligonucleotide; TTT chr2 60530322 60530343 60530327 60530322 -
tttttttttttaaatggctgaa

SEQ ID NO: 214279 - DNA, 22 bp, Artificial Sequence
  Synthetic oligonucleotide; TTT chr2 60530321 60530342 60530326 60530321 -
ttttttttttaaatggctgaag

SEQ ID NO: 214280 - DNA, 22 bp, Artificial Sequence
  Synthetic oligonucleotide; TTT chr2 60530320 60530341 60530325 60530320 -
tttttttttaaatggctgaagt

SEQ ID NO: 214281 - DNA, 22 bp, Artificial Sequence
  Synthetic oligonucleotide; TTT chr2 60530319 60530340 60530324 60530319 -
ttttttttaaatggctgaagtt

SEQ ID NO: 214282 - DNA, 22 bp, Artificial Sequence
  Synthetic oligonucleotide; TTT chr2 60530318 60530339 60530323 60530318 -
tttttttaaatggctgaagttt

SEQ ID NO: 214283 - DNA, 22 bp, Artificial Sequence
  Synthetic oligonucleotide; TTT chr2 60530317 60530338 60530322 60530317 -
ttttttaaatggctgaagttta

SEQ ID NO: 214284 - DNA, 22 bp, Artificial Sequence
  Synthetic oligonucleotide; TTT chr2 60530316 60530337 60530321 60530316 -
tttttaaatggctgaagtttaa

SEQ ID NO: 214285 - DNA, 22 bp, Artificial Sequence
  Synthetic oligonucleotide; TTT chr2 60530315 60530336 60530320 60530315 -
ttttaaatggctgaagtttaac

SEQ ID NO: 214286 - DNA, 22 bp, Artificial Sequence
  Synthetic oligonucleotide; TTT chr2 60530314 60530335 60530319 60530314 -
tttaaatggctgaagtttaact

SEQ ID NO: 214287 - DNA, 22 bp, Artificial Sequence
  Synthetic oligonucleotide; TTT chr2 60530313 60530334 60530318 60530313 -
ttaaatggctgaagtttaactt

SEQ ID NO: 214288 - DNA, 22 bp, Artificial Sequence
  Synthetic oligonucleotide; TTT chr2 60530312 60530333 60530317 60530312 -
taaatggctgaagtttaacttg

SEQ ID NO: 214289 - DNA, 22 bp, Artificial Sequence
  Synthetic oligonucleotide; TTT chr2 60530311 60530332 60530316 60530311 -
aaatggctgaagtttaacttgt

SEQ ID NO: 214290 - DNA, 22 bp, Artificial Sequence
  Synthetic oligonucleotide; TTA chr2 60530310 60530331 60530315 60530310 -
aatggctgaagtttaacttgtt

SEQ ID NO: 214291 - DNA, 22 bp, Artificial Sequence
  Synthetic oligonucleotide; CTG chr2 60530302 60530323 60530307 60530302 -
aagtttaacttgttggaagggc

SEQ ID NO: 214292 - DNA, 22 bp, Artificial Sequence
  Synthetic oligonucleotide; TTT chr2 60530296 60530317 60530301 60530296 -
aacttgttggaagggcctgtga

SEQ ID NO: 214293 - DNA, 22 bp, Artificial Sequence
  Synthetic oligonucleotide; TTA chr2 60530295 60530316 60530300 60530295 -
acttgttggaagggcctgtgaa

SEQ ID NO: 214294 - DNA, 22 bp, Artificial Sequence
  Synthetic oligonucleotide; CTT chr2 60530291 60530312 60530296 60530291 -
gttggaagggcctgtgaattaa

SEQ ID NO: 214295 - DNA, 22 bp, Artificial Sequence
  Synthetic oligonucleotide; TTG chr2 60530290 60530311 60530295 60530290 -
ttggaagggcctgtgaattaag

SEQ ID NO: 214296 - DNA, 22 bp, Artificial Sequence
  Synthetic oligonucleotide; TTG chr2 60530287 60530308 60530292 60530287 -
gaagggcctgtgaattaagctg

SEQ ID NO: 214297 - DNA, 22 bp, Artificial Sequence
  Synthetic oligonucleotide; CTG chr2 60530277 60530298 60530282 60530277 -
tgaattaagctgtcggtggctg

SEQ ID NO: 214298 - DNA, 22 bp, Artificial Sequence
  Synthetic oligonucleotide; TTA chr2 60530270 60530291 60530275 60530270 -
agctgtcggtggctgagaacga

SEQ ID NO: 214299 - DNA, 22 bp, Artificial Sequence
  Synthetic oligonucleotide; CTG chr2 60530265 60530286 60530270 60530265 -
tcggtggctgagaacgataata

SEQ ID NO: 214300 - DNA, 22 bp, Artificial Sequence
  Synthetic oligonucleotide; CTG chr2 60530255 60530276 60530260 60530255 -
agaacgataatatgcaaggaag

SEQ ID NO: 214301 - DNA, 22 bp, Artificial Sequence
  Synthetic oligonucleotide; CTC chr2 60530229 60530250 60530234 60530229 -
aaggaaggctcaagaaaggcca

SEQ ID NO: 214302 - DNA, 22 bp, Artificial Sequence
  Synthetic oligonucleotide; CTC chr2 60530218 60530239 60530223 60530218 -
aagaaaggccaggggtggggaa

SEQ ID NO: 214303 - DNA, 22 bp, Artificial Sequence
  Synthetic oligonucleotide; CTC chr2 60530187 60530208 60530192 60530187 -
ttgttagaggcgcagcctttcc

SEQ ID NO: 214304 - DNA, 22 bp, Artificial Sequence
  Synthetic oligonucleotide; CTT chr2 60530185 60530206 60530190 60530185 -
gttagaggcgcagcctttcctg

SEQ ID NO: 214305 - DNA, 22 bp, Artificial Sequence
  Synthetic oligonucleotide; TTG chr2 60530184 60530205 60530189 60530184 -
ttagaggcgcagcctttcctgg

SEQ ID NO: 214306 - DNA, 22 bp, Artificial Sequence
  Synthetic oligonucleotide; TTA chr2 60530181 60530202 60530186 60530181 -
gaggcgcagcctttcctgggca

SEQ ID NO: 214307 - DNA, 22 bp, Artificial Sequence
  Synthetic oligonucleotide; CTT chr2 60530168 60530189 60530173 60530168 -
tcctgggcaggacccaggaccg

SEQ ID NO: 214308 - DNA, 22 bp, Artificial Sequence
  Synthetic oligonucleotide; TTT chr2 60530167 60530188 60530172 60530167 -
cctgggcaggacccaggaccga

SEQ ID NO: 214309 - DNA, 22 bp, Artificial Sequence
  Synthetic oligonucleotide; TTC chr2 60530166 60530187 60530171 60530166 -
ctgggcaggacccaggaccgat

SEQ ID NO: 214310 - DNA, 22 bp, Artificial Sequence
  Synthetic oligonucleotide; CTG chr2 60530163 60530184 60530168 60530163 -
ggcaggacccaggaccgatggc

SEQ ID NO: 214311 - DNA, 22 bp, Artificial Sequence
  Synthetic oligonucleotide; TTT chr2 60530127 60530148 60530132 60530127 -
gggcttgttttgttctcgattt

SEQ ID NO: 214312 - DNA, 22 bp, Artificial Sequence
  Synthetic oligonucleotide; TTG chr2 60530126 60530147 60530131 60530126 -
ggcttgttttgttctcgatttt

SEQ ID NO: 214313 - DNA, 22 bp, Artificial Sequence
  Synthetic oligonucleotide; CTT chr2 60530121 60530142 60530126 60530121 -
gttttgttctcgattttcttat

SEQ ID NO: 214314 - DNA, 22 bp, Artificial Sequence
  Synthetic oligonucleotide; TTG chr2 60530120 60530141 60530125 60530120 -
ttttgttctcgattttcttatc

SEQ ID NO: 214315 - DNA, 22 bp, Artificial Sequence
  Synthetic oligonucleotide; TTT chr2 60530117 60530138 60530122 60530117 -
tgttctcgattttcttatcttc

SEQ ID NO: 214316 - DNA, 22 bp, Artificial Sequence
  Synthetic oligonucleotide; TTT chr2 60530116 60530137 60530121 60530116 -
gttctcgattttcttatcttct

SEQ ID NO: 214317 - DNA, 22 bp, Artificial Sequence
  Synthetic oligonucleotide; TTG chr2 60530115 60530136 60530120 60530115 -
ttctcgattttcttatcttctt

SEQ ID NO: 214318 - DNA, 22 bp, Artificial Sequence
  Synthetic oligonucleotide; TTC chr2 60530112 60530133 60530117 60530112 -
tcgattttcttatcttcttggc

SEQ ID NO: 214319 - DNA, 22 bp, Artificial Sequence
  Synthetic oligonucleotide; CTC chr2 60530110 60530131 60530115 60530110 -
gattttcttatcttcttggcct

SEQ ID NO: 214320 - DNA, 22 bp, Artificial Sequence
  Synthetic oligonucleotide; TTT chr2 60530105 60530126 60530110 60530105 -
tcttatcttcttggcctcttcc

SEQ ID NO: 214321 - DNA, 22 bp, Artificial Sequence
  Synthetic oligonucleotide; TTT chr2 60530104 60530125 60530109 60530104 -
cttatcttcttggcctcttcct

SEQ ID NO: 214322 - DNA, 22 bp, Artificial Sequence
  Synthetic oligonucleotide; TTC chr2 60530103 60530124 60530108 60530103 -
ttatcttcttggcctcttcctg

SEQ ID NO: 214323 - DNA, 22 bp, Artificial Sequence
  Synthetic oligonucleotide; CTT chr2 60530101 60530122 60530106 60530101 -
atcttcttggcctcttcctgtg

SEQ ID NO: 214324 - DNA, 22 bp, Artificial Sequence
  Synthetic oligonucleotide; TTA chr2 60530100 60530121 60530105 60530100 -
tcttcttggcctcttcctgtgt

SEQ ID NO: 214325 - DNA, 22 bp, Artificial Sequence
  Synthetic oligonucleotide; CTT chr2 60530096 60530117 60530101 60530096 -
cttggcctcttcctgtgttttt

SEQ ID NO: 214326 - DNA, 22 bp, Artificial Sequence
  Synthetic oligonucleotide; TTC chr2 60530095 60530116 60530100 60530095 -
ttggcctcttcctgtgtttttt

SEQ ID NO: 214327 - DNA, 22 bp, Artificial Sequence
  Synthetic oligonucleotide; CTT chr2 60530093 60530114 60530098 60530093 -
ggcctcttcctgtgttttttag

SEQ ID NO: 214328 - DNA, 22 bp, Artificial Sequence
  Synthetic oligonucleotide; TTG chr2 60530092 60530113 60530097 60530092 -
gcctcttcctgtgttttttagt

SEQ ID NO: 214329 - DNA, 22 bp, Artificial Sequence
  Synthetic oligonucleotide; CTC chr2 60530087 60530108 60530092 60530087 -
ttcctgtgttttttagtttatt

SEQ ID NO: 214330 - DNA, 22 bp, Artificial Sequence
  Synthetic oligonucleotide; CTT chr2 60530085 60530106 60530090 60530085 -
cctgtgttttttagtttattgt

SEQ ID NO: 214331 - DNA, 22 bp, Artificial Sequence
  Synthetic oligonucleotide; TTC chr2 60530084 60530105 60530089 60530084 -
ctgtgttttttagtttattgtg

SEQ ID NO: 214332 - DNA, 22 bp, Artificial Sequence
  Synthetic oligonucleotide; CTG chr2 60530081 60530102 60530086 60530081 -
tgttttttagtttattgtgaca

SEQ ID NO: 214333 - DNA, 22 bp, Artificial Sequence
  Synthetic oligonucleotide; TTT chr2 60530076 60530097 60530081 60530076 -
tttagtttattgtgacattatg

SEQ ID NO: 214334 - DNA, 22 bp, Artificial Sequence
  Synthetic oligonucleotide; TTT chr2 60530075 60530096 60530080 60530075 -
ttagtttattgtgacattatgc

SEQ ID NO: 214335 - DNA, 22 bp, Artificial Sequence
  Synthetic oligonucleotide; TTT chr2 60530074 60530095 60530079 60530074 -
tagtttattgtgacattatgca

SEQ ID NO: 214336 - DNA, 22 bp, Artificial Sequence
  Synthetic oligonucleotide; TTT chr2 60530073 60530094 60530078 60530073 -
agtttattgtgacattatgcat

SEQ ID NO: 214337 - DNA, 22 bp, Artificial Sequence
  Synthetic oligonucleotide; TTA chr2 60530072 60530093 60530077 60530072 -
gtttattgtgacattatgcatt

SEQ ID NO: 214338 - DNA, 22 bp, Artificial Sequence
  Synthetic oligonucleotide; TTT chr2 60530068 60530089 60530073 60530068 -
attgtgacattatgcattcata

SEQ ID NO: 214339 - DNA, 22 bp, Artificial Sequence
  Synthetic oligonucleotide; TTA chr2 60530067 60530088 60530072 60530067 -
ttgtgacattatgcattcatat

SEQ ID NO: 214340 - DNA, 22 bp, Artificial Sequence
  Synthetic oligonucleotide; TTG chr2 60530064 60530085 60530069 60530064 -
tgacattatgcattcatatatg

SEQ ID NO: 214341 - DNA, 22 bp, Artificial Sequence
  Synthetic oligonucleotide; TTA chr2 60530056 60530077 60530061 60530056 -
tgcattcatatatgaatgttgg

SEQ ID NO: 214342 - DNA, 22 bp, Artificial Sequence
  Synthetic oligonucleotide; TTC chr2 60530049 60530070 60530054 60530049 -
atatatgaatgttggcaagcag

SEQ ID NO: 214343 - DNA, 22 bp, Artificial Sequence
  Synthetic oligonucleotide; TTG chr2 60530035 60530056 60530040 60530035 -
gcaagcaggagtcatcatccca

SEQ ID NO: 214344 - DNA, 22 bp, Artificial Sequence
  Synthetic oligonucleotide; CTT chr2 60530006 60530027 60530011 60530006 -
cctgacatttttagctctttta

SEQ ID NO: 214345 - DNA, 22 bp, Artificial Sequence
  Synthetic oligonucleotide; TTC chr2 60530005 60530026 60530010 60530005 -
ctgacatttttagctcttttaa

SEQ ID NO: 214346 - DNA, 22 bp, Artificial Sequence
  Synthetic oligonucleotide; CTG chr2 60530002 60530023 60530007 60530002 -
acatttttagctcttttaatgt

SEQ ID NO: 214347 - DNA, 22 bp, Artificial Sequence
  Synthetic oligonucleotide; TTT chr2 60529996 60530017 60530001 60529996 -
ttagctcttttaatgtgcagtc

SEQ ID NO: 214348 - DNA, 22 bp, Artificial Sequence
  Synthetic oligonucleotide; TTT chr2 60529995 60530016 60530000 60529995 -
tagctcttttaatgtgcagtct

SEQ ID NO: 214349 - DNA, 22 bp, Artificial Sequence
  Synthetic oligonucleotide; TTT chr2 60529994 60530015 60529999 60529994 -
agctcttttaatgtgcagtctt

SEQ ID NO: 214350 - DNA, 22 bp, Artificial Sequence
  Synthetic oligonucleotide; TTA chr2 60529993 60530014 60529998 60529993 -
gctcttttaatgtgcagtcttt

SEQ ID NO: 214351 - DNA, 22 bp, Artificial Sequence
  Synthetic oligonucleotide; CTC chr2 60529989 60530010 60529994 60529989 -
ttttaatgtgcagtctttgccc

SEQ ID NO: 214352 - DNA, 22 bp, Artificial Sequence
  Synthetic oligonucleotide; CTT chr2 60529987 60530008 60529992 60529987 -
ttaatgtgcagtctttgccctc

SEQ ID NO: 214353 - DNA, 22 bp, Artificial Sequence
  Synthetic oligonucleotide; TTT chr2 60529986 60530007 60529991 60529986 -
taatgtgcagtctttgccctcc

SEQ ID NO: 214354 - DNA, 22 bp, Artificial Sequence
  Synthetic oligonucleotide; TTT chr2 60529985 60530006 60529990 60529985 -
aatgtgcagtctttgccctcct

SEQ ID NO: 214355 - DNA, 22 bp, Artificial Sequence
  Synthetic oligonucleotide; TTA chr2 60529984 60530005 60529989 60529984 -
atgtgcagtctttgccctcctg

SEQ ID NO: 214356 - DNA, 22 bp, Artificial Sequence
  Synthetic oligonucleotide; CTT chr2 60529972 60529993 60529977 60529972 -
tgccctcctgccacaagtggcg

SEQ ID NO: 214357 - DNA, 22 bp, Artificial Sequence
  Synthetic oligonucleotide; TTT chr2 60529971 60529992 60529976 60529971 -
gccctcctgccacaagtggcga

SEQ ID NO: 214358 - DNA, 22 bp, Artificial Sequence
  Synthetic oligonucleotide; TTG chr2 60529970 60529991 60529975 60529970 -
ccctcctgccacaagtggcgaa

SEQ ID NO: 214359 - DNA, 22 bp, Artificial Sequence
  Synthetic oligonucleotide; CTC chr2 60529965 60529986 60529970 60529965 -
ctgccacaagtggcgaagtaat

SEQ ID NO: 214360 - DNA, 22 bp, Artificial Sequence
  Synthetic oligonucleotide; CTG chr2 60529962 60529983 60529967 60529962 -
ccacaagtggcgaagtaattga

SEQ ID NO: 214361 - DNA, 22 bp, Artificial Sequence
  Synthetic oligonucleotide; TTG chr2 60529941 60529962 60529946 60529941 -
aatttccctgttactaactggc

SEQ ID NO: 214362 - DNA, 22 bp, Artificial Sequence
  Synthetic oligonucleotide; TTT chr2 60529936 60529957 60529941 60529936 -
ccctgttactaactggcaggag

SEQ ID NO: 214363 - DNA, 22 bp, Artificial Sequence
  Synthetic oligonucleotide; TTC chr2 60529935 60529956 60529940 60529935 -
cctgttactaactggcaggagg

SEQ ID NO: 214364 - DNA, 22 bp, Artificial Sequence
  Synthetic oligonucleotide; CTG chr2 60529931 60529952 60529936 60529931 -
ttactaactggcaggaggcatg

SEQ ID NO: 214365 - DNA, 22 bp, Artificial Sequence
  Synthetic oligonucleotide; TTA chr2 60529928 60529949 60529933 60529928 -
ctaactggcaggaggcatgttc

SEQ ID NO: 214366 - DNA, 22 bp, Artificial Sequence
  Synthetic oligonucleotide; CTA chr2 60529925 60529946 60529930 60529925 -
actggcaggaggcatgttctag

SEQ ID NO: 214367 - DNA, 22 bp, Artificial Sequence
  Synthetic oligonucleotide; CTG chr2 60529921 60529942 60529926 60529921 -
gcaggaggcatgttctagttcc

SEQ ID NO: 214368 - DNA, 22 bp, Artificial Sequence
  Synthetic oligonucleotide; TTC chr2 60529906 60529927 60529911 60529906 -
tagttcccaccagaggagctgc

SEQ ID NO: 214369 - DNA, 22 bp, Artificial Sequence
  Synthetic oligonucleotide; CTA chr2 60529904 60529925 60529909 60529904 -
gttcccaccagaggagctgctg

SEQ ID NO: 214370 - DNA, 22 bp, Artificial Sequence
  Synthetic oligonucleotide; TTC chr2 60529900 60529921 60529905 60529900 -
ccaccagaggagctgctggggc

SEQ ID NO: 214371 - DNA, 22 bp, Artificial Sequence
  Synthetic oligonucleotide; CTG chr2 60529885 60529906 60529890 60529885 -
ctggggctaaagctgggttcat

SEQ ID NO: 214372 - DNA, 22 bp, Artificial Sequence
  Synthetic oligonucleotide; CTG chr2 60529882 60529903 60529887 60529882 -
gggctaaagctgggttcataga

SEQ ID NO: 214373 - DNA, 22 bp, Artificial Sequence
  Synthetic oligonucleotide; CTA chr2 60529876 60529897 60529881 60529876 -
aagctgggttcatagaatccca

SEQ ID NO: 214374 - DNA, 22 bp, Artificial Sequence
  Synthetic oligonucleotide; CTG chr2 60529870 60529891 60529875 60529870 -
ggttcatagaatcccacctagg

SEQ ID NO: 214375 - DNA, 22 bp, Artificial Sequence
  Synthetic oligonucleotide; TTC chr2 60529865 60529886 60529870 60529865 -
atagaatcccacctaggggaca

SEQ ID NO: 214376 - DNA, 22 bp, Artificial Sequence
  Synthetic oligonucleotide; CTA chr2 60529850 60529871 60529855 60529850 -
ggggacaccagggctttcaagt

SEQ ID NO: 214377 - DNA, 22 bp, Artificial Sequence
  Synthetic oligonucleotide; CTT chr2 60529834 60529855 60529839 60529834 -
tcaagtggtttggggacctgtc

SEQ ID NO: 214378 - DNA, 22 bp, Artificial Sequence
  Synthetic oligonucleotide; TTT chr2 60529833 60529854 60529838 60529833 -
caagtggtttggggacctgtct

SEQ ID NO: 214379 - DNA, 22 bp, Artificial Sequence
  Synthetic oligonucleotide; TTC chr2 60529832 60529853 60529837 60529832 -
aagtggtttggggacctgtctg

SEQ ID NO: 214380 - DNA, 22 bp, Artificial Sequence
  Synthetic oligonucleotide; TTT chr2 60529823 60529844 60529828 60529823 -
ggggacctgtctgaaatgatat

SEQ ID NO: 214381 - DNA, 22 bp, Artificial Sequence
  Synthetic oligonucleotide; TTG chr2 60529822 60529843 60529827 60529822 -
gggacctgtctgaaatgatatt

SEQ ID NO: 214382 - DNA, 22 bp, Artificial Sequence
  Synthetic oligonucleotide; CTG chr2 60529814 60529835 60529819 60529814 -
tctgaaatgatattcacacaat

SEQ ID NO: 214383 - DNA, 22 bp, Artificial Sequence
  Synthetic oligonucleotide; CTG chr2 60529810 60529831 60529815 60529810 -
aaatgatattcacacaataaaa

SEQ ID NO: 214384 - DNA, 22 bp, Artificial Sequence
  Synthetic oligonucleotide; TTC chr2 60529799 60529820 60529804 60529799 -
acacaataaaaaatatttttcc

SEQ ID NO: 214385 - DNA, 22 bp, Artificial Sequence
  Synthetic oligonucleotide; TTT chr2 60529781 60529802 60529786 60529781 -
ttcccatcatagacttgaaaag

SEQ ID NO: 214386 - DNA, 22 bp, Artificial Sequence
  Synthetic oligonucleotide; TTT chr2 60529780 60529801 60529785 60529780 -
tcccatcatagacttgaaaagg

SEQ ID NO: 214387 - DNA, 22 bp, Artificial Sequence
  Synthetic oligonucleotide; TTT chr2 60529779 60529800 60529784 60529779 -
cccatcatagacttgaaaaggc

SEQ ID NO: 214388 - DNA, 22 bp, Artificial Sequence
  Synthetic oligonucleotide; TTC chr2 60529778 60529799 60529783 60529778 -
ccatcatagacttgaaaaggca

SEQ ID NO: 214389 - DNA, 22 bp, Artificial Sequence
  Synthetic oligonucleotide; CTT chr2 60529765 60529786 60529770 60529765 -
gaaaaggcaccattgtgcacat

SEQ ID NO: 214390 - DNA, 22 bp, Artificial Sequence
  Synthetic oligonucleotide; TTG chr2 60529764 60529785 60529769 60529764 -
aaaaggcaccattgtgcacatc

SEQ ID NO: 214391 - DNA, 22 bp, Artificial Sequence
  Synthetic oligonucleotide; TTG chr2 60529750 60529771 60529755 60529750 -
tgcacatctatataaaatgtga

SEQ ID NO: 214392 - DNA, 22 bp, Artificial Sequence
  Synthetic oligonucleotide; CTA chr2 60529740 60529761 60529745 60529740 -
tataaaatgtgataaaatcaca

SEQ ID NO: 214393 - DNA, 22 bp, Artificial Sequence
  Synthetic oligonucleotide; TTT chr2 60529715 60529736 60529720 60529715 -
acttcccctggctaggcctcat

SEQ ID NO: 214394 - DNA, 22 bp, Artificial Sequence
  Synthetic oligonucleotide; TTA chr2 60529714 60529735 60529719 60529714 -
cttcccctggctaggcctcata

SEQ ID NO: 214395 - DNA, 22 bp, Artificial Sequence
  Synthetic oligonucleotide; CTT chr2 60529711 60529732 60529716 60529711 -
cccctggctaggcctcataagg

SEQ ID NO: 214396 - DNA, 22 bp, Artificial Sequence
  Synthetic oligonucleotide; TTC chr2 60529710 60529731 60529715 60529710 -
ccctggctaggcctcataaggg

SEQ ID NO: 214397 - DNA, 22 bp, Artificial Sequence
  Synthetic oligonucleotide; CTG chr2 60529705 60529726 60529710 60529705 -
gctaggcctcataagggaggca

SEQ ID NO: 214398 - DNA, 22 bp, Artificial Sequence
  Synthetic oligonucleotide; CTA chr2 60529701 60529722 60529706 60529701 -
ggcctcataagggaggcaggat

SEQ ID NO: 214399 - DNA, 22 bp, Artificial Sequence
  Synthetic oligonucleotide; CTC chr2 60529695 60529716 60529700 60529695 -
ataagggaggcaggatttcctt

SEQ ID NO: 214400 - DNA, 22 bp, Artificial Sequence
  Synthetic oligonucleotide; TTT chr2 60529677 60529698 60529682 60529677 -
ccttctccttttctagtagcaa

SEQ ID NO: 214401 - DNA, 22 bp, Artificial Sequence
  Synthetic oligonucleotide; TTC chr2 60529676 60529697 60529681 60529676 -
cttctccttttctagtagcaaa

SEQ ID NO: 214402 - DNA, 22 bp, Artificial Sequence
  Synthetic oligonucleotide; CTT chr2 60529673 60529694 60529678 60529673 -
ctccttttctagtagcaaataa

SEQ ID NO: 214403 - DNA, 22 bp, Artificial Sequence
  Synthetic oligonucleotide; TTC chr2 60529672 60529693 60529677 60529672 -
tccttttctagtagcaaataaa

SEQ ID NO: 214404 - DNA, 22 bp, Artificial Sequence
  Synthetic oligonucleotide; CTC chr2 60529670 60529691 60529675 60529670 -
cttttctagtagcaaataaaaa

SEQ ID NO: 214405 - DNA, 22 bp, Artificial Sequence
  Synthetic oligonucleotide; CTT chr2 60529667 60529688 60529672 60529667 -
ttctagtagcaaataaaaactg

SEQ ID NO: 214406 - DNA, 22 bp, Artificial Sequence
  Synthetic oligonucleotide; TTT chr2 60529666 60529687 60529671 60529666 -
tctagtagcaaataaaaactgg

SEQ ID NO: 214407 - DNA, 22 bp, Artificial Sequence
  Synthetic oligonucleotide; TTT chr2 60529665 60529686 60529670 60529665 -
ctagtagcaaataaaaactggg

SEQ ID NO: 214408 - DNA, 22 bp, Artificial Sequence
  Synthetic oligonucleotide; TTC chr2 60529664 60529685 60529669 60529664 -
tagtagcaaataaaaactggga

SEQ ID NO: 214409 - DNA, 22 bp, Artificial Sequence
  Synthetic oligonucleotide; CTA chr2 60529662 60529683 60529667 60529662 -
gtagcaaataaaaactgggaaa

SEQ ID NO: 214410 - DNA, 22 bp, Artificial Sequence
  Synthetic oligonucleotide; CTG chr2 60529645 60529666 60529650 60529645 -
ggaaaatttgggggcctctggg

SEQ ID NO: 214411 - DNA, 22 bp, Artificial Sequence
  Synthetic oligonucleotide; TTT chr2 60529636 60529657 60529641 60529636 -
gggggcctctgggtttatccca

SEQ ID NO: 214412 - DNA, 22 bp, Artificial Sequence
  Synthetic oligonucleotide; TTG chr2 60529635 60529656 60529640 60529635 -
ggggcctctgggtttatcccat

SEQ ID NO: 214413 - DNA, 22 bp, Artificial Sequence
  Synthetic oligonucleotide; CTC chr2 60529627 60529648 60529632 60529627 -
tgggtttatcccatggatacct

SEQ ID NO: 214414 - DNA, 22 bp, Artificial Sequence
  Synthetic oligonucleotide; CTG chr2 60529625 60529646 60529630 60529625 -
ggtttatcccatggatacctgc

SEQ ID NO: 214415 - DNA, 22 bp, Artificial Sequence
  Synthetic oligonucleotide; TTT chr2 60529620 60529641 60529625 60529620 -
atcccatggatacctgcccccg

SEQ ID NO: 214416 - DNA, 22 bp, Artificial Sequence
  Synthetic oligonucleotide; TTA chr2 60529619 60529640 60529624 60529619 -
tcccatggatacctgcccccgc

SEQ ID NO: 214417 - DNA, 22 bp, Artificial Sequence
  Synthetic oligonucleotide; CTG chr2 60529604 60529625 60529609 60529604 -
cccccgctcccgcccgccaact

SEQ ID NO: 214418 - DNA, 22 bp, Artificial Sequence
  Synthetic oligonucleotide; CTC chr2 60529595 60529616 60529600 60529595 -
ccgcccgccaactcagccaagc

SEQ ID NO: 214419 - DNA, 22 bp, Artificial Sequence
  Synthetic oligonucleotide; CTC chr2 60529581 60529602 60529586 60529581 -
agccaagcccttagaggcagtc

SEQ ID NO: 214420 - DNA, 22 bp, Artificial Sequence
  Synthetic oligonucleotide; CTT chr2 60529569 60529590 60529574 60529569 -
agaggcagtcttctctcccacc

SEQ ID NO: 214421 - DNA, 22 bp, Artificial Sequence
  Synthetic oligonucleotide; TTA chr2 60529568 60529589 60529573 60529568 -
gaggcagtcttctctcccacct

SEQ ID NO: 214422 - DNA, 22 bp, Artificial Sequence
  Synthetic oligonucleotide; CTT chr2 60529557 60529578 60529562 60529557 -
ctctcccacctagatgtctttg

SEQ ID NO: 214423 - DNA, 22 bp, Artificial Sequence
  Synthetic oligonucleotide; TTC chr2 60529556 60529577 60529561 60529556 -
tctcccacctagatgtctttgt

SEQ ID NO: 214424 - DNA, 22 bp, Artificial Sequence
  Synthetic oligonucleotide; CTC chr2 60529554 60529575 60529559 60529554 -
tcccacctagatgtctttgtaa

SEQ ID NO: 214425 - DNA, 22 bp, Artificial Sequence
  Synthetic oligonucleotide; CTC chr2 60529552 60529573 60529557 60529552 -
ccacctagatgtctttgtaacc

SEQ ID NO: 214426 - DNA, 22 bp, Artificial Sequence
  Synthetic oligonucleotide; CTA chr2 60529545 60529566 60529550 60529545 -
gatgtctttgtaacctgagctg

SEQ ID NO: 214427 - DNA, 22 bp, Artificial Sequence
  Synthetic oligonucleotide; CTT chr2 60529537 60529558 60529542 60529537 -
tgtaacctgagctggtaagaaa

SEQ ID NO: 214428 - DNA, 22 bp, Artificial Sequence
  Synthetic oligonucleotide; TTT chr2 60529536 60529557 60529541 60529536 -
gtaacctgagctggtaagaaag

SEQ ID NO: 214429 - DNA, 22 bp, Artificial Sequence
  Synthetic oligonucleotide; TTG chr2 60529535 60529556 60529540 60529535 -
taacctgagctggtaagaaagg

SEQ ID NO: 214430 - DNA, 22 bp, Artificial Sequence
  Synthetic oligonucleotide; CTG chr2 60529528 60529549 60529533 60529528 -
agctggtaagaaagggaggagg

SEQ ID NO: 214431 - DNA, 22 bp, Artificial Sequence
  Synthetic oligonucleotide; CTG chr2 60529523 60529544 60529528 60529523 -
gtaagaaagggaggagggacag

SEQ ID NO: 214432 - DNA, 22 bp, Artificial Sequence
  Synthetic oligonucleotide; CTT chr2 60529480 60529501 60529485 60529480 -
gacatatgatgtatcttctttc

SEQ ID NO: 214433 - DNA, 22 bp, Artificial Sequence
  Synthetic oligonucleotide; TTG chr2 60529479 60529500 60529484 60529479 -
acatatgatgtatcttctttct

SEQ ID NO: 214434 - DNA, 22 bp, Artificial Sequence
  Synthetic oligonucleotide; CTT chr2 60529463 60529484 60529468 60529463 -
ctttcttttcttcttctctttg

SEQ ID NO: 214435 - DNA, 22 bp, Artificial Sequence
  Synthetic oligonucleotide; TTC chr2 60529462 60529483 60529467 60529462 -
tttcttttcttcttctctttga

SEQ ID NO: 214436 - DNA, 22 bp, Artificial Sequence
  Synthetic oligonucleotide; CTT chr2 60529460 60529481 60529465 60529460 -
tcttttcttcttctctttgatt

SEQ ID NO: 214437 - DNA, 22 bp, Artificial Sequence
  Synthetic oligonucleotide; TTT chr2 60529459 60529480 60529464 60529459 -
cttttcttcttctctttgatta

SEQ ID NO: 214438 - DNA, 22 bp, Artificial Sequence
  Synthetic oligonucleotide; TTC chr2 60529458 60529479 60529463 60529458 -
ttttcttcttctctttgattac

SEQ ID NO: 214439 - DNA, 22 bp, Artificial Sequence
  Synthetic oligonucleotide; CTT chr2 60529456 60529477 60529461 60529456 -
ttcttcttctctttgattacac

SEQ ID NO: 214440 - DNA, 22 bp, Artificial Sequence
  Synthetic oligonucleotide; TTT chr2 60529455 60529476 60529460 60529455 -
tcttcttctctttgattacacg

SEQ ID NO: 214441 - DNA, 22 bp, Artificial Sequence
  Synthetic oligonucleotide; TTT chr2 60529454 60529475 60529459 60529454 -
cttcttctctttgattacacga

SEQ ID NO: 214442 - DNA, 22 bp, Artificial Sequence
  Synthetic oligonucleotide; TTC chr2 60529453 60529474 60529458 60529453 -
ttcttctctttgattacacgaa

SEQ ID NO: 214443 - DNA, 22 bp, Artificial Sequence
  Synthetic oligonucleotide; CTT chr2 60529451 60529472 60529456 60529451 -
cttctctttgattacacgaaat

SEQ ID NO: 214444 - DNA, 22 bp, Artificial Sequence
  Synthetic oligonucleotide; TTC chr2 60529450 60529471 60529455 60529450 -
ttctctttgattacacgaaata

SEQ ID NO: 214445 - DNA, 22 bp, Artificial Sequence
  Synthetic oligonucleotide; CTT chr2 60529448 60529469 60529453 60529448 -
ctctttgattacacgaaataaa

SEQ ID NO: 214446 - DNA, 22 bp, Artificial Sequence
  Synthetic oligonucleotide; TTC chr2 60529447 60529468 60529452 60529447 -
tctttgattacacgaaataaaa

SEQ ID NO: 214447 - DNA, 22 bp, Artificial Sequence
  Synthetic oligonucleotide; CTC chr2 60529445 60529466 60529450 60529445 -
tttgattacacgaaataaaatg

SEQ ID NO: 214448 - DNA, 22 bp, Artificial Sequence
  Synthetic oligonucleotide; CTT chr2 60529443 60529464 60529448 60529443 -
tgattacacgaaataaaatggt

SEQ ID NO: 214449 - DNA, 22 bp, Artificial Sequence
  Synthetic oligonucleotide; TTT chr2 60529442 60529463 60529447 60529442 -
gattacacgaaataaaatggtt

SEQ ID NO: 214450 - DNA, 22 bp, Artificial Sequence
  Synthetic oligonucleotide; TTG chr2 60529441 60529462 60529446 60529441 -
attacacgaaataaaatggttt

SEQ ID NO: 214451 - DNA, 22 bp, Artificial Sequence
  Synthetic oligonucleotide; TTA chr2 60529437 60529458 60529442 60529437 -
cacgaaataaaatggtttaggc

SEQ ID NO: 214452 - DNA, 22 bp, Artificial Sequence
  Synthetic oligonucleotide; TTT chr2 60529419 60529440 60529424 60529419 -
aggctgagggtaaagaagtaat

SEQ ID NO: 214453 - DNA, 22 bp, Artificial Sequence
  Synthetic oligonucleotide; TTA chr2 60529418 60529439 60529423 60529418 -
ggctgagggtaaagaagtaata

SEQ ID NO: 214454 - DNA, 22 bp, Artificial Sequence
  Synthetic oligonucleotide; CTG chr2 60529413 60529434 60529418 60529413 -
agggtaaagaagtaataccatt

SEQ ID NO: 214455 - DNA, 22 bp, Artificial Sequence
  Synthetic oligonucleotide; TTT chr2 60529390 60529411 60529395 60529390 -
ctagttgtgcaaccttgggcag

SEQ ID NO: 214456 - DNA, 22 bp, Artificial Sequence
  Synthetic oligonucleotide; TTC chr2 60529389 60529410 60529394 60529389 -
tagttgtgcaaccttgggcaga

SEQ ID NO: 214457 - DNA, 22 bp, Artificial Sequence
  Synthetic oligonucleotide; CTA chr2 60529387 60529408 60529392 60529387 -
gttgtgcaaccttgggcagatt

SEQ ID NO: 214458 - DNA, 22 bp, Artificial Sequence
  Synthetic oligonucleotide; TTG chr2 60529383 60529404 60529388 60529383 -
tgcaaccttgggcagatttcat

SEQ ID NO: 214459 - DNA, 22 bp, Artificial Sequence
  Synthetic oligonucleotide; CTT chr2 60529374 60529395 60529379 60529374 -
gggcagatttcattccctaagc

SEQ ID NO: 214460 - DNA, 22 bp, Artificial Sequence
  Synthetic oligonucleotide; TTG chr2 60529373 60529394 60529378 60529373 -
ggcagatttcattccctaagcc

SEQ ID NO: 214461 - DNA, 22 bp, Artificial Sequence
  Synthetic oligonucleotide; TTT chr2 60529364 60529385 60529369 60529364 -
cattccctaagcctccgcttcc

SEQ ID NO: 214462 - DNA, 22 bp, Artificial Sequence
  Synthetic oligonucleotide; TTC chr2 60529363 60529384 60529368 60529363 -
attccctaagcctccgcttcct

SEQ ID NO: 214463 - DNA, 22 bp, Artificial Sequence
  Synthetic oligonucleotide; TTC chr2 60529359 60529380 60529364 60529359 -
cctaagcctccgcttcctcaat

SEQ ID NO: 214464 - DNA, 22 bp, Artificial Sequence
  Synthetic oligonucleotide; CTA chr2 60529355 60529376 60529360 60529355 -
agcctccgcttcctcaatctgt

SEQ ID NO: 214465 - DNA, 22 bp, Artificial Sequence
  Synthetic oligonucleotide; CTC chr2 60529349 60529370 60529354 60529349 -
cgcttcctcaatctgtaaagtg

SEQ ID NO: 214466 - DNA, 22 bp, Artificial Sequence
  Synthetic oligonucleotide; CTT chr2 60529344 60529365 60529349 60529344 -
cctcaatctgtaaagtggggag

SEQ ID NO: 214467 - DNA, 22 bp, Artificial Sequence
  Synthetic oligonucleotide; TTC chr2 60529343 60529364 60529348 60529343 -
ctcaatctgtaaagtggggaga

SEQ ID NO: 214468 - DNA, 22 bp, Artificial Sequence
  Synthetic oligonucleotide; CTC chr2 60529340 60529361 60529345 60529340 -
aatctgtaaagtggggagaatc

SEQ ID NO: 214469 - DNA, 22 bp, Artificial Sequence
  Synthetic oligonucleotide; CTG chr2 60529334 60529355 60529339 60529334 -
taaagtggggagaatcacgggg

SEQ ID NO: 214470 - DNA, 22 bp, Artificial Sequence
  Synthetic oligonucleotide; CTT chr2 60529309 60529330 60529314 60529309 -
gcctcatagggcctttgagcat

SEQ ID NO: 214471 - DNA, 22 bp, Artificial Sequence
  Synthetic oligonucleotide; TTG chr2 60529308 60529329 60529313 60529308 -
cctcatagggcctttgagcatc

SEQ ID NO: 214472 - DNA, 22 bp, Artificial Sequence
  Synthetic oligonucleotide; CTC chr2 60529304 60529325 60529309 60529304 -
atagggcctttgagcatcctat

SEQ ID NO: 214473 - DNA, 22 bp, Artificial Sequence
  Synthetic oligonucleotide; CTT chr2 60529294 60529315 60529299 60529294 -
tgagcatcctatgagagcatgt

SEQ ID NO: 214474 - DNA, 22 bp, Artificial Sequence
  Synthetic oligonucleotide; TTT chr2 60529293 60529314 60529298 60529293 -
gagcatcctatgagagcatgtg

SEQ ID NO: 214475 - DNA, 22 bp, Artificial Sequence
  Synthetic oligonucleotide; TTG chr2 60529292 60529313 60529297 60529292 -
agcatcctatgagagcatgtgg

SEQ ID NO: 214476 - DNA, 22 bp, Artificial Sequence
  Synthetic oligonucleotide; CTA chr2 60529283 60529304 60529288 60529283 -
tgagagcatgtgggggcgctgg

SEQ ID NO: 214477 - DNA, 22 bp, Artificial Sequence
  Synthetic oligonucleotide; CTG chr2 60529262 60529283 60529267 60529262 -
ggctcagtgctgggcacatggt

SEQ ID NO: 214478 - DNA, 22 bp, Artificial Sequence
  Synthetic oligonucleotide; CTC chr2 60529257 60529278 60529262 60529257 -
agtgctgggcacatggtaaaac

SEQ ID NO: 214479 - DNA, 22 bp, Artificial Sequence
  Synthetic oligonucleotide; CTG chr2 60529250 60529271 60529255 60529250 -
ggcacatggtaaaacatgtcac

SEQ ID NO: 214480 - DNA, 22 bp, Artificial Sequence
  Synthetic oligonucleotide; CTC chr2 60529220 60529241 60529225 60529220 -
attactattacggttatgactc

SEQ ID NO: 214481 - DNA, 22 bp, Artificial Sequence
  Synthetic oligonucleotide; TTA chr2 60529216 60529237 60529221 60529216 -
ctattacggttatgactcatgg

SEQ ID NO: 214482 - DNA, 22 bp, Artificial Sequence
  Synthetic oligonucleotide; CTA chr2 60529213 60529234 60529218 60529213 -
ttacggttatgactcatggctt

SEQ ID NO: 214483 - DNA, 22 bp, Artificial Sequence
  Synthetic oligonucleotide; TTA chr2 60529210 60529231 60529215 60529210 -
cggttatgactcatggcttgga

SEQ ID NO: 214484 - DNA, 22 bp, Artificial Sequence
  Synthetic oligonucleotide; TTA chr2 60529204 60529225 60529209 60529204 -
tgactcatggcttggaactgtg

SEQ ID NO: 214485 - DNA, 22 bp, Artificial Sequence
  Synthetic oligonucleotide; CTC chr2 60529198 60529219 60529203 60529198 -
atggcttggaactgtgtgctcc

SEQ ID NO: 214486 - DNA, 22 bp, Artificial Sequence
  Synthetic oligonucleotide; CTT chr2 60529191 60529212 60529196 60529191 -
ggaactgtgtgctcctggggtc

SEQ ID NO: 214487 - DNA, 22 bp, Artificial Sequence
  Synthetic oligonucleotide; TTG chr2 60529190 60529211 60529195 60529190 -
gaactgtgtgctcctggggtct

SEQ ID NO: 214488 - DNA, 22 bp, Artificial Sequence
  Synthetic oligonucleotide; CTG chr2 60529184 60529205 60529189 60529184 -
tgtgctcctggggtctcaaagt

SEQ ID NO: 214489 - DNA, 22 bp, Artificial Sequence
  Synthetic oligonucleotide; CTC chr2 60529177 60529198 60529182 60529177 -
ctggggtctcaaagtagttccc

SEQ ID NO: 214490 - DNA, 22 bp, Artificial Sequence
  Synthetic oligonucleotide; CTG chr2 60529174 60529195 60529179 60529174 -
gggtctcaaagtagttccccca

SEQ ID NO: 214491 - DNA, 22 bp, Artificial Sequence
  Synthetic oligonucleotide; CTC chr2 60529167 60529188 60529172 60529167 -
aaagtagttcccccattatggg

SEQ ID NO: 214492 - DNA, 22 bp, Artificial Sequence
  Synthetic oligonucleotide; TTC chr2 60529157 60529178 60529162 60529157 -
ccccattatggggtgagcaggt

SEQ ID NO: 214493 - DNA, 22 bp, Artificial Sequence
  Synthetic oligonucleotide; TTA chr2 60529149 60529170 60529154 60529149 -
tggggtgagcaggttgggatga

SEQ ID NO: 214494 - DNA, 22 bp, Artificial Sequence
  Synthetic oligonucleotide; TTG chr2 60529133 60529154 60529138 60529133 -
ggatgagagaagagcagggcag

SEQ ID NO: 214495 - DNA, 22 bp, Artificial Sequence
  Synthetic oligonucleotide; CTA chr2 60529100 60529121 60529105 60529100 -
aagagctcagggtctcattatg

SEQ ID NO: 214496 - DNA, 22 bp, Artificial Sequence
  Synthetic oligonucleotide; CTC chr2 60529092 60529113 60529097 60529092 -
agggtctcattatgtttctggt

SEQ ID NO: 214497 - DNA, 22 bp, Artificial Sequence
  Synthetic oligonucleotide; CTC chr2 60529084 60529105 60529089 60529084 -
attatgtttctggtggcagctc

SEQ ID NO: 214498 - DNA, 22 bp, Artificial Sequence
  Synthetic oligonucleotide; TTA chr2 60529080 60529101 60529085 60529080 -
tgtttctggtggcagctccctc

SEQ ID NO: 214499 - DNA, 22 bp, Artificial Sequence
  Synthetic oligonucleotide; TTT chr2 60529075 60529096 60529080 60529075 -
ctggtggcagctccctcgtggg

SEQ ID NO: 214500 - DNA, 22 bp, Artificial Sequence
  Synthetic oligonucleotide; TTC chr2 60529074 60529095 60529079 60529074 -
tggtggcagctccctcgtgggt

SEQ ID NO: 214501 - DNA, 22 bp, Artificial Sequence
  Synthetic oligonucleotide; CTG chr2 60529072 60529093 60529077 60529072 -
gtggcagctccctcgtgggtgg

SEQ ID NO: 214502 - DNA, 22 bp, Artificial Sequence
  Synthetic oligonucleotide; CTC chr2 60529062 60529083 60529067 60529062 -
cctcgtgggtgggagtcccctc

SEQ ID NO: 214503 - DNA, 22 bp, Artificial Sequence
  Synthetic oligonucleotide; CTC chr2 60529058 60529079 60529063 60529058 -
gtgggtgggagtcccctctccc

SEQ ID NO: 214504 - DNA, 22 bp, Artificial Sequence
  Synthetic oligonucleotide; CTC chr2 60529040 60529061 60529045 60529040 -
tccccatagacgtgtgttgcct

SEQ ID NO: 214505 - DNA, 22 bp, Artificial Sequence
  Synthetic oligonucleotide; CTC chr2 60529038 60529059 60529043 60529038 -
cccatagacgtgtgttgcctta

SEQ ID NO: 214506 - DNA, 22 bp, Artificial Sequence
  Synthetic oligonucleotide; TTG chr2 60529021 60529042 60529026 60529021 -
ccttacgagaggcttgtgcctg

SEQ ID NO: 214507 - DNA, 22 bp, Artificial Sequence
  Synthetic oligonucleotide; CTT chr2 60529017 60529038 60529022 60529017 -
acgagaggcttgtgcctgcctg

SEQ ID NO: 214508 - DNA, 22 bp, Artificial Sequence
  Synthetic oligonucleotide; TTA chr2 60529016 60529037 60529021 60529016 -
cgagaggcttgtgcctgcctgg

SEQ ID NO: 214509 - DNA, 22 bp, Artificial Sequence
  Synthetic oligonucleotide; CTT chr2 60529006 60529027 60529011 60529006 -
gtgcctgcctgggtgtgtgaca

SEQ ID NO: 214510 - DNA, 22 bp, Artificial Sequence
  Synthetic oligonucleotide; TTG chr2 60529005 60529026 60529010 60529005 -
tgcctgcctgggtgtgtgacac

SEQ ID NO: 214511 - DNA, 22 bp, Artificial Sequence
  Synthetic oligonucleotide; CTG chr2 60528999 60529020 60529004 60528999 -
cctgggtgtgtgacacagttac

SEQ ID NO: 214512 - DNA, 22 bp, Artificial Sequence
  Synthetic oligonucleotide; CTG chr2 60528995 60529016 60529000 60528995 -
ggtgtgtgacacagttactctg

SEQ ID NO: 214513 - DNA, 22 bp, Artificial Sequence
  Synthetic oligonucleotide; TTA chr2 60528978 60528999 60528983 60528978 -
ctctgggttcagatttctatgt

SEQ ID NO: 214514 - DNA, 22 bp, Artificial Sequence
  Synthetic oligonucleotide; CTC chr2 60528975 60528996 60528980 60528975 -
tgggttcagatttctatgttac

SEQ ID NO: 214515 - DNA, 22 bp, Artificial Sequence
  Synthetic oligonucleotide; CTG chr2 60528973 60528994 60528978 60528973 -
ggttcagatttctatgttactg

SEQ ID NO: 214516 - DNA, 22 bp, Artificial Sequence
  Synthetic oligonucleotide; TTC chr2 60528968 60528989 60528973 60528968 -
agatttctatgttactgctagc

SEQ ID NO: 214517 - DNA, 22 bp, Artificial Sequence
  Synthetic oligonucleotide; TTT chr2 60528962 60528983 60528967 60528962 -
ctatgttactgctagctggttg

SEQ ID NO: 214518 - DNA, 22 bp, Artificial Sequence
  Synthetic oligonucleotide; TTC chr2 60528961 60528982 60528966 60528961 -
tatgttactgctagctggttgg

SEQ ID NO: 214519 - DNA, 22 bp, Artificial Sequence
  Synthetic oligonucleotide; CTA chr2 60528959 60528980 60528964 60528959 -
tgttactgctagctggttggga

SEQ ID NO: 214520 - DNA, 22 bp, Artificial Sequence
  Synthetic oligonucleotide; TTA chr2 60528954 60528975 60528959 60528954 -
ctgctagctggttgggagagtc

SEQ ID NO: 214521 - DNA, 22 bp, Artificial Sequence
  Synthetic oligonucleotide; CTG chr2 60528951 60528972 60528956 60528951 -
ctagctggttgggagagtctga

SEQ ID NO: 214522 - DNA, 22 bp, Artificial Sequence
  Synthetic oligonucleotide; CTA chr2 60528948 60528969 60528953 60528948 -
gctggttgggagagtctgaggg

SEQ ID NO: 214523 - DNA, 22 bp, Artificial Sequence
  Synthetic oligonucleotide; CTG chr2 60528944 60528965 60528949 60528944 -
gttgggagagtctgagggaatc

SEQ ID NO: 214524 - DNA, 22 bp, Artificial Sequence
  Synthetic oligonucleotide; TTG chr2 60528940 60528961 60528945 60528940 -
ggagagtctgagggaatcattt

SEQ ID NO: 214525 - DNA, 22 bp, Artificial Sequence
  Synthetic oligonucleotide; CTG chr2 60528930 60528951 60528935 60528930 -
agggaatcatttcacctctctg

SEQ ID NO: 214526 - DNA, 22 bp, Artificial Sequence
  Synthetic oligonucleotide; TTT chr2 60528918 60528939 60528923 60528918 -
cacctctctgtgaaatggagat

SEQ ID NO: 214527 - DNA, 22 bp, Artificial Sequence
  Synthetic oligonucleotide; TTC chr2 60528917 60528938 60528922 60528917 -
acctctctgtgaaatggagata

SEQ ID NO: 214528 - DNA, 22 bp, Artificial Sequence
  Synthetic oligonucleotide; CTC chr2 60528912 60528933 60528917 60528912 -
tctgtgaaatggagataactca

SEQ ID NO: 214529 - DNA, 22 bp, Artificial Sequence
  Synthetic oligonucleotide; CTC chr2 60528910 60528931 60528915 60528910 -
tgtgaaatggagataactcaag

SEQ ID NO: 214530 - DNA, 22 bp, Artificial Sequence
  Synthetic oligonucleotide; CTG chr2 60528908 60528929 60528913 60528908 -
tgaaatggagataactcaaggt

SEQ ID NO: 214531 - DNA, 22 bp, Artificial Sequence
  Synthetic oligonucleotide; CTC chr2 60528891 60528912 60528896 60528891 -
aaggtcccttacctcatagagt

SEQ ID NO: 214532 - DNA, 22 bp, Artificial Sequence
  Synthetic oligonucleotide; CTT chr2 60528881 60528902 60528886 60528881 -
acctcatagagtccatgtgaga

SEQ ID NO: 214533 - DNA, 22 bp, Artificial Sequence
  Synthetic oligonucleotide; TTA chr2 60528880 60528901 60528885 60528880 -
cctcatagagtccatgtgagaa

SEQ ID NO: 214534 - DNA, 22 bp, Artificial Sequence
  Synthetic oligonucleotide; CTC chr2 60528876 60528897 60528881 60528876 -
atagagtccatgtgagaagtaa

SEQ ID NO: 214535 - DNA, 22 bp, Artificial Sequence
  Synthetic oligonucleotide; TTA chr2 60528832 60528853 60528837 60528832 -
ctcgctccgggggctgcacctc

SEQ ID NO: 214536 - DNA, 22 bp, Artificial Sequence
  Synthetic oligonucleotide; CTC chr2 60528829 60528850 60528834 60528829 -
gctccgggggctgcacctccag

SEQ ID NO: 214537 - DNA, 22 bp, Artificial Sequence
  Synthetic oligonucleotide; CTC chr2 60528825 60528846 60528830 60528825 -
cgggggctgcacctccagaatt

SEQ ID NO: 214538 - DNA, 22 bp, Artificial Sequence
  Synthetic oligonucleotide; CTG chr2 60528816 60528837 60528821 60528816 -
cacctccagaattgctgttgtc

SEQ ID NO: 214539 - DNA, 22 bp, Artificial Sequence
  Synthetic oligonucleotide; CTC chr2 60528810 60528831 60528815 60528810 -
cagaattgctgttgtcattatt

SEQ ID NO: 214540 - DNA, 22 bp, Artificial Sequence
  Synthetic oligonucleotide; TTG chr2 60528802 60528823 60528807 60528802 -
ctgttgtcattattaccatgtg

SEQ ID NO: 214541 - DNA, 22 bp, Artificial Sequence
  Synthetic oligonucleotide; CTG chr2 60528799 60528820 60528804 60528799 -
ttgtcattattaccatgtgtct

SEQ ID NO: 214542 - DNA, 22 bp, Artificial Sequence
  Synthetic oligonucleotide; TTG chr2 60528796 60528817 60528801 60528796 -
tcattattaccatgtgtctgac

SEQ ID NO: 214543 - DNA, 22 bp, Artificial Sequence
  Synthetic oligonucleotide; TTA chr2 60528790 60528811 60528795 60528790 -
ttaccatgtgtctgacacattg

SEQ ID NO: 214544 - DNA, 22 bp, Artificial Sequence
  Synthetic oligonucleotide; TTA chr2 60528787 60528808 60528792 60528787 -
ccatgtgtctgacacattgata

SEQ ID NO: 214545 - DNA, 22 bp, Artificial Sequence
  Synthetic oligonucleotide; CTG chr2 60528776 60528797 60528781 60528776 -
acacattgatattccatcccac

SEQ ID NO: 214546 - DNA, 22 bp, Artificial Sequence
  Synthetic oligonucleotide; TTG chr2 60528768 60528789 60528773 60528768 -
atattccatcccacaacaacct

SEQ ID NO: 214547 - DNA, 22 bp, Artificial Sequence
  Synthetic oligonucleotide; TTC chr2 60528762 60528783 60528767 60528762 -
catcccacaacaacctcggaaa

SEQ ID NO: 214548 - DNA, 22 bp, Artificial Sequence
  Synthetic oligonucleotide; CTC chr2 60528745 60528766 60528750 60528745 -
ggaaaggaaacactcccattag

SEQ ID NO: 214549 - DNA, 22 bp, Artificial Sequence
  Synthetic oligonucleotide; CTC chr2 60528730 60528751 60528735 60528730 -
ccattagcctcatttggtagag

SEQ ID NO: 214550 - DNA, 22 bp, Artificial Sequence
  Synthetic oligonucleotide; TTA chr2 60528724 60528745 60528729 60528724 -
gcctcatttggtagaggaggaa

SEQ ID NO: 214551 - DNA, 22 bp, Artificial Sequence
  Synthetic oligonucleotide; CTC chr2 60528719 60528740 60528724 60528719 -
atttggtagaggaggaaattgg

SEQ ID NO: 214552 - DNA, 22 bp, Artificial Sequence
  Synthetic oligonucleotide; TTT chr2 60528715 60528736 60528720 60528715 -
ggtagaggaggaaattggggtt

SEQ ID NO: 214553 - DNA, 22 bp, Artificial Sequence
  Synthetic oligonucleotide; TTG chr2 60528714 60528735 60528719 60528714 -
gtagaggaggaaattggggttc

SEQ ID NO: 214554 - DNA, 22 bp, Artificial Sequence
  Synthetic oligonucleotide; TTG chr2 60528698 60528719 60528703 60528698 -
gggttcatcaagggttaaatga

SEQ ID NO: 214555 - DNA, 22 bp, Artificial Sequence
  Synthetic oligonucleotide; TTC chr2 60528692 60528713 60528697 60528692 -
atcaagggttaaatgacttccc

SEQ ID NO: 214556 - DNA, 22 bp, Artificial Sequence
  Synthetic oligonucleotide; TTA chr2 60528681 60528702 60528686 60528681 -
aatgacttccctgagggtccac

SEQ ID NO: 214557 - DNA, 22 bp, Artificial Sequence
  Synthetic oligonucleotide; CTT chr2 60528673 60528694 60528678 60528673 -
ccctgagggtccacagttgttc

SEQ ID NO: 214558 - DNA, 22 bp, Artificial Sequence
  Synthetic oligonucleotide; TTC chr2 60528672 60528693 60528677 60528672 -
cctgagggtccacagttgttca

SEQ ID NO: 214559 - DNA, 22 bp, Artificial Sequence
  Synthetic oligonucleotide; CTG chr2 60528668 60528689 60528673 60528668 -
agggtccacagttgttcaatcc

SEQ ID NO: 214560 - DNA, 22 bp, Artificial Sequence
  Synthetic oligonucleotide; TTG chr2 60528654 60528675 60528659 60528654 -
ttcaatcctttggcctgcggcc

SEQ ID NO: 214561 - DNA, 22 bp, Artificial Sequence
  Synthetic oligonucleotide; TTC chr2 60528651 60528672 60528656 60528651 -
aatcctttggcctgcggccgcc

SEQ ID NO: 214562 - DNA, 22 bp, Artificial Sequence
  Synthetic oligonucleotide; CTT chr2 60528644 60528665 60528649 60528644 -
tggcctgcggccgccaccctct

SEQ ID NO: 214563 - DNA, 22 bp, Artificial Sequence
  Synthetic oligonucleotide; TTT chr2 60528643 60528664 60528648 60528643 -
ggcctgcggccgccaccctctg

SEQ ID NO: 214564 - DNA, 22 bp, Artificial Sequence
  Synthetic oligonucleotide; TTG chr2 60528642 60528663 60528647 60528642 -
gcctgcggccgccaccctctgc

SEQ ID NO: 214565 - DNA, 22 bp, Artificial Sequence
  Synthetic oligonucleotide; CTG chr2 60528637 60528658 60528642 60528637 -
cggccgccaccctctgctacct

SEQ ID NO: 214566 - DNA, 22 bp, Artificial Sequence
  Synthetic oligonucleotide; CTC chr2 60528623 60528644 60528628 60528623 -
tgctacctcttcagtacgtttg

SEQ ID NO: 214567 - DNA, 22 bp, Artificial Sequence
  Synthetic oligonucleotide; CTG chr2 60528621 60528642 60528626 60528621 -
ctacctcttcagtacgtttgca

SEQ ID NO: 214568 - DNA, 22 bp, Artificial Sequence
  Synthetic oligonucleotide; CTA chr2 60528618 60528639 60528623 60528618 -
cctcttcagtacgtttgcagct

SEQ ID NO: 214569 - DNA, 22 bp, Artificial Sequence
  Synthetic oligonucleotide; CTC chr2 60528614 60528635 60528619 60528614 -
ttcagtacgtttgcagctttct

SEQ ID NO: 214570 - DNA, 22 bp, Artificial Sequence
  Synthetic oligonucleotide; CTT chr2 60528612 60528633 60528617 60528612 -
cagtacgtttgcagctttcttc

SEQ ID NO: 214571 - DNA, 22 bp, Artificial Sequence
  Synthetic oligonucleotide; TTC chr2 60528611 60528632 60528616 60528611 -
agtacgtttgcagctttcttca

SEQ ID NO: 214572 - DNA, 22 bp, Artificial Sequence
  Synthetic oligonucleotide; TTT chr2 60528602 60528623 60528607 60528602 -
gcagctttcttcagcggtgcca

SEQ ID NO: 214573 - DNA, 22 bp, Artificial Sequence
  Synthetic oligonucleotide; TTG chr2 60528601 60528622 60528606 60528601 -
cagctttcttcagcggtgccag

SEQ ID NO: 214574 - DNA, 22 bp, Artificial Sequence
  Synthetic oligonucleotide; CTT chr2 60528595 60528616 60528600 60528595 -
tcttcagcggtgccaggcaaca

SEQ ID NO: 214575 - DNA, 22 bp, Artificial Sequence
  Synthetic oligonucleotide; TTT chr2 60528594 60528615 60528599 60528594 -
cttcagcggtgccaggcaacaa

SEQ ID NO: 214576 - DNA, 22 bp, Artificial Sequence
  Synthetic oligonucleotide; TTC chr2 60528593 60528614 60528598 60528593 -
ttcagcggtgccaggcaacaac

SEQ ID NO: 214577 - DNA, 22 bp, Artificial Sequence
  Synthetic oligonucleotide; CTT chr2 60528591 60528612 60528596 60528591 -
cagcggtgccaggcaacaactg

SEQ ID NO: 214578 - DNA, 22 bp, Artificial Sequence
  Synthetic oligonucleotide; TTC chr2 60528590 60528611 60528595 60528590 -
agcggtgccaggcaacaactgg

SEQ ID NO: 214579 - DNA, 22 bp, Artificial Sequence
  Synthetic oligonucleotide; CTG chr2 60528569 60528590 60528574 60528569 -
ggcaggaagctctggtgctgga

SEQ ID NO: 214580 - DNA, 22 bp, Artificial Sequence
  Synthetic oligonucleotide; CTC chr2 60528557 60528578 60528562 60528557 -
tggtgctggacagttgtccctc

SEQ ID NO: 214581 - DNA, 22 bp, Artificial Sequence
  Synthetic oligonucleotide; CTG chr2 60528555 60528576 60528560 60528555 -
gtgctggacagttgtccctccc

SEQ ID NO: 214582 - DNA, 22 bp, Artificial Sequence
  Synthetic oligonucleotide; CTG chr2 60528549 60528570 60528554 60528549 -
gacagttgtccctcccatgggt

SEQ ID NO: 214583 - DNA, 22 bp, Artificial Sequence
  Synthetic oligonucleotide; TTG chr2 60528541 60528562 60528546 60528541 -
tccctcccatgggttctgtggt

SEQ ID NO: 214584 - DNA, 22 bp, Artificial Sequence
  Synthetic oligonucleotide; CTC chr2 60528535 60528556 60528540 60528535 -
ccatgggttctgtggtcaagtt

SEQ ID NO: 214585 - DNA, 22 bp, Artificial Sequence
  Synthetic oligonucleotide; TTC chr2 60528525 60528546 60528530 60528525 -
tgtggtcaagtttttcaatctt

SEQ ID NO: 214586 - DNA, 22 bp, Artificial Sequence
  Synthetic oligonucleotide; CTG chr2 60528523 60528544 60528528 60528523 -
tggtcaagtttttcaatcttct

SEQ ID NO: 214587 - DNA, 22 bp, Artificial Sequence
  Synthetic oligonucleotide; TTT chr2 60528512 60528533 60528517 60528512 -
ttcaatcttctgggaaagagaa

SEQ ID NO: 214588 - DNA, 22 bp, Artificial Sequence
  Synthetic oligonucleotide; TTT chr2 60528511 60528532 60528516 60528511 -
tcaatcttctgggaaagagaag

SEQ ID NO: 214589 - DNA, 22 bp, Artificial Sequence
  Synthetic oligonucleotide; TTT chr2 60528510 60528531 60528515 60528510 -
caatcttctgggaaagagaaga

SEQ ID NO: 214590 - DNA, 22 bp, Artificial Sequence
  Synthetic oligonucleotide; TTC chr2 60528509 60528530 60528514 60528509 -
aatcttctgggaaagagaagaa

SEQ ID NO: 214591 - DNA, 22 bp, Artificial Sequence
  Synthetic oligonucleotide; CTT chr2 60528503 60528524 60528508 60528503 -
ctgggaaagagaagaatgttcc

SEQ ID NO: 214592 - DNA, 22 bp, Artificial Sequence
  Synthetic oligonucleotide; TTC chr2 60528502 60528523 60528507 60528502 -
tgggaaagagaagaatgttccc

SEQ ID NO: 214593 - DNA, 22 bp, Artificial Sequence
  Synthetic oligonucleotide; CTG chr2 60528500 60528521 60528505 60528500 -
ggaaagagaagaatgttcccct

SEQ ID NO: 214594 - DNA, 22 bp, Artificial Sequence
  Synthetic oligonucleotide; TTC chr2 60528482 60528503 60528487 60528482 -
ccctccagttctgggcatattg

SEQ ID NO: 214595 - DNA, 22 bp, Artificial Sequence
  Synthetic oligonucleotide; CTC chr2 60528477 60528498 60528482 60528477 -
cagttctgggcatattgaagga

SEQ ID NO: 214596 - DNA, 22 bp, Artificial Sequence
  Synthetic oligonucleotide; TTC chr2 60528471 60528492 60528476 60528471 -
tgggcatattgaaggagcacgg

SEQ ID NO: 214597 - DNA, 22 bp, Artificial Sequence
  Synthetic oligonucleotide; CTG chr2 60528469 60528490 60528474 60528469 -
ggcatattgaaggagcacggag

SEQ ID NO: 214598 - DNA, 22 bp, Artificial Sequence
  Synthetic oligonucleotide; TTG chr2 60528460 60528481 60528465 60528460 -
aaggagcacggagctgttggga

SEQ ID NO: 214599 - DNA, 22 bp, Artificial Sequence
  Synthetic oligonucleotide; CTG chr2 60528444 60528465 60528449 60528444 -
ttgggaaaagttgcaatgtaag

SEQ ID NO: 214600 - DNA, 22 bp, Artificial Sequence
  Synthetic oligonucleotide; TTG chr2 60528441 60528462 60528446 60528441 -
ggaaaagttgcaatgtaaggaa

SEQ ID NO: 214601 - DNA, 22 bp, Artificial Sequence
  Synthetic oligonucleotide; TTG chr2 60528431 60528452 60528436 60528431 -
caatgtaaggaatcctgctttg

SEQ ID NO: 214602 - DNA, 22 bp, Artificial Sequence
  Synthetic oligonucleotide; CTG chr2 60528414 60528435 60528419 60528414 -
ctttgcaagtagtcatttcccc

SEQ ID NO: 214603 - DNA, 22 bp, Artificial Sequence
  Synthetic oligonucleotide; CTT chr2 60528411 60528432 60528416 60528411 -
tgcaagtagtcatttccccatc

SEQ ID NO: 214604 - DNA, 22 bp, Artificial Sequence
  Synthetic oligonucleotide; TTT chr2 60528410 60528431 60528415 60528410 -
gcaagtagtcatttccccatct

SEQ ID NO: 214605 - DNA, 22 bp, Artificial Sequence
  Synthetic oligonucleotide; TTG chr2 60528409 60528430 60528414 60528409 -
caagtagtcatttccccatctg

SEQ ID NO: 214606 - DNA, 22 bp, Artificial Sequence
  Synthetic oligonucleotide; TTT chr2 60528396 60528417 60528401 60528396 -
ccccatctgtccagaatgagcc

SEQ ID NO: 214607 - DNA, 22 bp, Artificial Sequence
  Synthetic oligonucleotide; TTC chr2 60528395 60528416 60528400 60528395 -
cccatctgtccagaatgagcct

SEQ ID NO: 214608 - DNA, 22 bp, Artificial Sequence
  Synthetic oligonucleotide; CTG chr2 60528387 60528408 60528392 60528387 -
tccagaatgagcctgaaatcaa

SEQ ID NO: 214609 - DNA, 22 bp, Artificial Sequence
  Synthetic oligonucleotide; CTG chr2 60528372 60528393 60528377 60528372 -
aaatcaagtgagggtcctgaga

SEQ ID NO: 214610 - DNA, 22 bp, Artificial Sequence
  Synthetic oligonucleotide; CTG chr2 60528353 60528374 60528358 60528353 -
agaaacagagggaggaggtttt

SEQ ID NO: 214611 - DNA, 22 bp, Artificial Sequence
  Synthetic oligonucleotide; TTT chr2 60528332 60528353 60528337 60528332 -
tactgtttgtgtgtggcttggt

SEQ ID NO: 214612 - DNA, 22 bp, Artificial Sequence
  Synthetic oligonucleotide; TTT chr2 60528331 60528352 60528336 60528331 -
actgtttgtgtgtggcttggtc

SEQ ID NO: 214613 - DNA, 22 bp, Artificial Sequence
  Synthetic oligonucleotide; TTA chr2 60528330 60528351 60528335 60528330 -
ctgtttgtgtgtggcttggtca

SEQ ID NO: 214614 - DNA, 22 bp, Artificial Sequence
  Synthetic oligonucleotide; CTG chr2 60528327 60528348 60528332 60528327 -
tttgtgtgtggcttggtcagga

SEQ ID NO: 214615 - DNA, 22 bp, Artificial Sequence
  Synthetic oligonucleotide; TTT chr2 60528324 60528345 60528329 60528324 -
gtgtgtggcttggtcaggagac

SEQ ID NO: 214616 - DNA, 22 bp, Artificial Sequence
  Synthetic oligonucleotide; TTG chr2 60528323 60528344 60528328 60528323 -
tgtgtggcttggtcaggagact

SEQ ID NO: 214617 - DNA, 22 bp, Artificial Sequence
  Synthetic oligonucleotide; CTT chr2 60528313 60528334 60528318 60528313 -
ggtcaggagactgcagtgggct

SEQ ID NO: 214618 - DNA, 22 bp, Artificial Sequence
  Synthetic oligonucleotide; TTG chr2 60528312 60528333 60528317 60528312 -
gtcaggagactgcagtgggctg

SEQ ID NO: 214619 - DNA, 22 bp, Artificial Sequence
  Synthetic oligonucleotide; CTG chr2 60528300 60528321 60528305 60528300 -
cagtgggctgaatgagaaacta

SEQ ID NO: 214620 - DNA, 22 bp, Artificial Sequence
  Synthetic oligonucleotide; CTG chr2 60528290 60528311 60528295 60528290 -
aatgagaaactaagctcggact

SEQ ID NO: 214621 - DNA, 22 bp, Artificial Sequence
  Synthetic oligonucleotide; CTA chr2 60528278 60528299 60528283 60528278 -
agctcggacttttaagaagtgg

SEQ ID NO: 214622 - DNA, 22 bp, Artificial Sequence
  Synthetic oligonucleotide; CTC chr2 60528273 60528294 60528278 60528273 -
ggacttttaagaagtggtgagg

SEQ ID NO: 214623 - DNA, 22 bp, Artificial Sequence
  Synthetic oligonucleotide; CTT chr2 60528267 60528288 60528272 60528267 -
ttaagaagtggtgaggcttggc

SEQ ID NO: 214624 - DNA, 22 bp, Artificial Sequence
  Synthetic oligonucleotide; TTT chr2 60528266 60528287 60528271 60528266 -
taagaagtggtgaggcttggcc

SEQ ID NO: 214625 - DNA, 22 bp, Artificial Sequence
  Synthetic oligonucleotide; TTT chr2 60528265 60528286 60528270 60528265 -
aagaagtggtgaggcttggcct

SEQ ID NO: 214626 - DNA, 22 bp, Artificial Sequence
  Synthetic oligonucleotide; TTA chr2 60528264 60528285 60528269 60528264 -
agaagtggtgaggcttggcctg

SEQ ID NO: 214627 - DNA, 22 bp, Artificial Sequence
  Synthetic oligonucleotide; CTT chr2 60528248 60528269 60528253 60528248 -
ggcctgcagcagttctgtgtgt

SEQ ID NO: 214628 - DNA, 22 bp, Artificial Sequence
  Synthetic oligonucleotide; TTG chr2 60528247 60528268 60528252 60528247 -
gcctgcagcagttctgtgtgtt

SEQ ID NO: 214629 - DNA, 22 bp, Artificial Sequence
  Synthetic oligonucleotide; CTG chr2 60528242 60528263 60528247 60528242 -
cagcagttctgtgtgttgtctc

SEQ ID NO: 214630 - DNA, 22 bp, Artificial Sequence
  Synthetic oligonucleotide; TTC chr2 60528233 60528254 60528238 60528233 -
tgtgtgttgtctctgtggcatt

SEQ ID NO: 214631 - DNA, 22 bp, Artificial Sequence
  Synthetic oligonucleotide; CTG chr2 60528231 60528252 60528236 60528231 -
tgtgttgtctctgtggcattta

SEQ ID NO: 214632 - DNA, 22 bp, Artificial Sequence
  Synthetic oligonucleotide; TTG chr2 60528224 60528245 60528229 60528224 -
tctctgtggcatttacttctcg

SEQ ID NO: 214633 - DNA, 22 bp, Artificial Sequence
  Synthetic oligonucleotide; CTC chr2 60528220 60528241 60528225 60528220 -
tgtggcatttacttctcggatc

SEQ ID NO: 214634 - DNA, 22 bp, Artificial Sequence
  Synthetic oligonucleotide; CTG chr2 60528218 60528239 60528223 60528218 -
tggcatttacttctcggatcgt

SEQ ID NO: 214635 - DNA, 22 bp, Artificial Sequence
  Synthetic oligonucleotide; TTT chr2 60528210 60528231 60528215 60528210 -
acttctcggatcgtaccttcaa

SEQ ID NO: 214636 - DNA, 22 bp, Artificial Sequence
  Synthetic oligonucleotide; TTA chr2 60528209 60528230 60528214 60528209 -
cttctcggatcgtaccttcaaa

SEQ ID NO: 214637 - DNA, 22 bp, Artificial Sequence
  Synthetic oligonucleotide; CTT chr2 60528206 60528227 60528211 60528206 -
ctcggatcgtaccttcaaaggc

SEQ ID NO: 214638 - DNA, 22 bp, Artificial Sequence
  Synthetic oligonucleotide; TTC chr2 60528205 60528226 60528210 60528205 -
tcggatcgtaccttcaaaggct

SEQ ID NO: 214639 - DNA, 22 bp, Artificial Sequence
  Synthetic oligonucleotide; CTC chr2 60528203 60528224 60528208 60528203 -
ggatcgtaccttcaaaggctgg

SEQ ID NO: 214640 - DNA, 22 bp, Artificial Sequence
  Synthetic oligonucleotide; CTT chr2 60528191 60528212 60528196 60528191 -
caaaggctggggagaatcagaa

SEQ ID NO: 214641 - DNA, 22 bp, Artificial Sequence
  Synthetic oligonucleotide; TTC chr2 60528190 60528211 60528195 60528190 -
aaaggctggggagaatcagaat

SEQ ID NO: 214642 - DNA, 22 bp, Artificial Sequence
  Synthetic oligonucleotide; CTG chr2 60528182 60528203 60528187 60528182 -
gggagaatcagaattatacagg

SEQ ID NO: 214643 - DNA, 22 bp, Artificial Sequence
  Synthetic oligonucleotide; TTA chr2 60528166 60528187 60528171 60528166 -
tacagggagggagagactgagt

SEQ ID NO: 214644 - DNA, 22 bp, Artificial Sequence
  Synthetic oligonucleotide; CTG chr2 60528147 60528168 60528152 60528147 -
agtgtgagtgagtgtgcgtggc

SEQ ID NO: 214645 - DNA, 22 bp, Artificial Sequence
  Synthetic oligonucleotide; TTT chr2 60528115 60528136 60528120 60528115 -
cttaggacgatgggttctgggg

SEQ ID NO: 214646 - DNA, 22 bp, Artificial Sequence
  Synthetic oligonucleotide; TTC chr2 60528114 60528135 60528119 60528114 -
ttaggacgatgggttctggggg

SEQ ID NO: 214647 - DNA, 22 bp, Artificial Sequence
  Synthetic oligonucleotide; CTT chr2 60528112 60528133 60528117 60528112 -
aggacgatgggttctggggggt

SEQ ID NO: 214648 - DNA, 22 bp, Artificial Sequence
  Synthetic oligonucleotide; TTA chr2 60528111 60528132 60528116 60528111 -
ggacgatgggttctggggggtc

SEQ ID NO: 214649 - DNA, 22 bp, Artificial Sequence
  Synthetic oligonucleotide; TTC chr2 60528098 60528119 60528103 60528098 -
tggggggtcataatctgcttcg

SEQ ID NO: 214650 - DNA, 22 bp, Artificial Sequence
  Synthetic oligonucleotide; CTG chr2 60528096 60528117 60528101 60528096 -
gggggtcataatctgcttcgag

SEQ ID NO: 214651 - DNA, 22 bp, Artificial Sequence
  Synthetic oligonucleotide; CTG chr2 60528081 60528102 60528086 60528081 -
cttcgaggaggttttcatttct

SEQ ID NO: 214652 - DNA, 22 bp, Artificial Sequence
  Synthetic oligonucleotide; CTT chr2 60528078 60528099 60528083 60528078 -
cgaggaggttttcatttctggc

SEQ ID NO: 214653 - DNA, 22 bp, Artificial Sequence
  Synthetic oligonucleotide; TTC chr2 60528077 60528098 60528082 60528077 -
gaggaggttttcatttctggct

SEQ ID NO: 214654 - DNA, 22 bp, Artificial Sequence
  Synthetic oligonucleotide; TTT chr2 60528067 60528088 60528072 60528067 -
tcatttctggctgaacaaggct

SEQ ID NO: 214655 - DNA, 22 bp, Artificial Sequence
  Synthetic oligonucleotide; TTT chr2 60528066 60528087 60528071 60528066 -
catttctggctgaacaaggctg

SEQ ID NO: 214656 - DNA, 22 bp, Artificial Sequence
  Synthetic oligonucleotide; TTC chr2 60528065 60528086 60528070 60528065 -
atttctggctgaacaaggctgt

SEQ ID NO: 214657 - DNA, 22 bp, Artificial Sequence
  Synthetic oligonucleotide; TTT chr2 60528061 60528082 60528066 60528061 -
ctggctgaacaaggctgtggta

SEQ ID NO: 214658 - DNA, 22 bp, Artificial Sequence
  Synthetic oligonucleotide; TTC chr2 60528060 60528081 60528065 60528060 -
tggctgaacaaggctgtggtaa

SEQ ID NO: 214659 - DNA, 22 bp, Artificial Sequence
  Synthetic oligonucleotide; CTG chr2 60528058 60528079 60528063 60528058 -
gctgaacaaggctgtggtaagg

SEQ ID NO: 214660 - DNA, 22 bp, Artificial Sequence
  Synthetic oligonucleotide; CTG chr2 60528054 60528075 60528059 60528054 -
aacaaggctgtggtaaggcaag

SEQ ID NO: 214661 - DNA, 22 bp, Artificial Sequence
  Synthetic oligonucleotide; CTG chr2 60528044 60528065 60528049 60528044 -
tggtaaggcaagtccggaaggc

SEQ ID NO: 214662 - DNA, 22 bp, Artificial Sequence
  Synthetic oligonucleotide; CTG chr2 60528016 60528037 60528021 60528016 -
gaaacttgagggaagttttgaa

SEQ ID NO: 214663 - DNA, 22 bp, Artificial Sequence
  Synthetic oligonucleotide; CTT chr2 60528009 60528030 60528014 60528009 -
gagggaagttttgaatggaaac

SEQ ID NO: 214664 - DNA, 22 bp, Artificial Sequence
  Synthetic oligonucleotide; TTG chr2 60528008 60528029 60528013 60528008 -
agggaagttttgaatggaaact

SEQ ID NO: 214665 - DNA, 22 bp, Artificial Sequence
  Synthetic oligonucleotide; TTT chr2 60527998 60528019 60528003 60527998 -
tgaatggaaactgcagtcaaca

SEQ ID NO: 214666 - DNA, 22 bp, Artificial Sequence
  Synthetic oligonucleotide; TTT chr2 60527997 60528018 60528002 60527997 -
gaatggaaactgcagtcaacag

SEQ ID NO: 214667 - DNA, 22 bp, Artificial Sequence
  Synthetic oligonucleotide; TTG chr2 60527996 60528017 60528001 60527996 -
aatggaaactgcagtcaacagc

SEQ ID NO: 214668 - DNA, 22 bp, Artificial Sequence
  Synthetic oligonucleotide; CTG chr2 60527985 60528006 60527990 60527985 -
cagtcaacagctccatatgatc

SEQ ID NO: 214669 - DNA, 22 bp, Artificial Sequence
  Synthetic oligonucleotide; CTC chr2 60527972 60527993 60527977 60527972 -
catatgatccgcatgtggcttc

SEQ ID NO: 214670 - DNA, 22 bp, Artificial Sequence
  Synthetic oligonucleotide; CTT chr2 60527951 60527972 60527956 60527951 -
ccccagaggcaagttttcagct

SEQ ID NO: 214671 - DNA, 22 bp, Artificial Sequence
  Synthetic oligonucleotide; TTC chr2 60527950 60527971 60527955 60527950 -
cccagaggcaagttttcagctg

SEQ ID NO: 214672 - DNA, 22 bp, Artificial Sequence
  Synthetic oligonucleotide; TTT chr2 60527935 60527956 60527940 60527935 -
tcagctgcgtggtggcctctcc

SEQ ID NO: 214673 - DNA, 22 bp, Artificial Sequence
  Synthetic oligonucleotide; TTT chr2 60527934 60527955 60527939 60527934 -
cagctgcgtggtggcctctccc

SEQ ID NO: 214674 - DNA, 22 bp, Artificial Sequence
  Synthetic oligonucleotide; TTC chr2 60527933 60527954 60527938 60527933 -
agctgcgtggtggcctctccca

SEQ ID NO: 214675 - DNA, 22 bp, Artificial Sequence
  Synthetic oligonucleotide; CTG chr2 60527928 60527949 60527933 60527928 -
cgtggtggcctctcccagtcac

SEQ ID NO: 214676 - DNA, 22 bp, Artificial Sequence
  Synthetic oligonucleotide; CTC chr2 60527916 60527937 60527921 60527916 -
tcccagtcactccacaggctgc

SEQ ID NO: 214677 - DNA, 22 bp, Artificial Sequence
  Synthetic oligonucleotide; CTC chr2 60527914 60527935 60527919 60527914 -
ccagtcactccacaggctgccc

SEQ ID NO: 214678 - DNA, 22 bp, Artificial Sequence
  Synthetic oligonucleotide; CTC chr2 60527904 60527925 60527909 60527904 -
cacaggctgccctgacgctatt

SEQ ID NO: 214679 - DNA, 22 bp, Artificial Sequence
  Synthetic oligonucleotide; CTG chr2 60527895 60527916 60527900 60527895 -
ccctgacgctattaatatttgc

SEQ ID NO: 214680 - DNA, 22 bp, Artificial Sequence
  Synthetic oligonucleotide; CTG chr2 60527890 60527911 60527895 60527890 -
acgctattaatatttgctgaag

SEQ ID NO: 214681 - DNA, 22 bp, Artificial Sequence
  Synthetic oligonucleotide; CTA chr2 60527884 60527905 60527889 60527884 -
ttaatatttgctgaagcaagac

SEQ ID NO: 214682 - DNA, 22 bp, Artificial Sequence
  Synthetic oligonucleotide; TTA chr2 60527881 60527902 60527886 60527881 -
atatttgctgaagcaagacctg

SEQ ID NO: 214683 - DNA, 22 bp, Artificial Sequence
  Synthetic oligonucleotide; TTT chr2 60527875 60527896 60527880 60527875 -
gctgaagcaagacctgaggttc

SEQ ID NO: 214684 - DNA, 22 bp, Artificial Sequence
  Synthetic oligonucleotide; TTG chr2 60527874 60527895 60527879 60527874 -
ctgaagcaagacctgaggttcg

SEQ ID NO: 214685 - DNA, 22 bp, Artificial Sequence
  Synthetic oligonucleotide; CTG chr2 60527871 60527892 60527876 60527871 -
aagcaagacctgaggttcgttg

SEQ ID NO: 214686 - DNA, 22 bp, Artificial Sequence
  Synthetic oligonucleotide; CTG chr2 60527859 60527880 60527864 60527859 -
aggttcgttgcagatggattac

SEQ ID NO: 214687 - DNA, 22 bp, Artificial Sequence
  Synthetic oligonucleotide; TTC chr2 60527853 60527874 60527858 60527853 -
gttgcagatggattacacaatg

SEQ ID NO: 214688 - DNA, 22 bp, Artificial Sequence
  Synthetic oligonucleotide; TTG chr2 60527849 60527870 60527854 60527849 -
cagatggattacacaatgtatt

SEQ ID NO: 214689 - DNA, 22 bp, Artificial Sequence
  Synthetic oligonucleotide; TTA chr2 60527838 60527859 60527843 60527838 -
cacaatgtattccaaaaccaaa

SEQ ID NO: 214690 - DNA, 22 bp, Artificial Sequence
  Synthetic oligonucleotide; TTC chr2 60527826 60527847 60527831 60527826 -
caaaaccaaatgttactgtttt

SEQ ID NO: 214691 - DNA, 22 bp, Artificial Sequence
  Synthetic oligonucleotide; TTA chr2 60527811 60527832 60527816 60527811 -
ctgttttcctgtattctccatc

SEQ ID NO: 214692 - DNA, 22 bp, Artificial Sequence
  Synthetic oligonucleotide; CTG chr2 60527808 60527829 60527813 60527808 -
ttttcctgtattctccatcctt

SEQ ID NO: 214693 - DNA, 22 bp, Artificial Sequence
  Synthetic oligonucleotide; TTT chr2 60527805 60527826 60527810 60527805 -
tcctgtattctccatcctttca

SEQ ID NO: 214694 - DNA, 22 bp, Artificial Sequence
  Synthetic oligonucleotide; TTT chr2 60527804 60527825 60527809 60527804 -
cctgtattctccatcctttcaa

SEQ ID NO: 214695 - DNA, 22 bp, Artificial Sequence
  Synthetic oligonucleotide; TTC chr2 60527803 60527824 60527808 60527803 -
ctgtattctccatcctttcaaa

SEQ ID NO: 214696 - DNA, 22 bp, Artificial Sequence
  Synthetic oligonucleotide; CTG chr2 60527800 60527821 60527805 60527800 -
tattctccatcctttcaaattg

SEQ ID NO: 214697 - DNA, 22 bp, Artificial Sequence
  Synthetic oligonucleotide; TTC chr2 60527795 60527816 60527800 60527795 -
tccatcctttcaaattggccag

SEQ ID NO: 214698 - DNA, 22 bp, Artificial Sequence
  Synthetic oligonucleotide; CTC chr2 60527793 60527814 60527798 60527793 -
catcctttcaaattggccaggc

SEQ ID NO: 214699 - DNA, 22 bp, Artificial Sequence
  Synthetic oligonucleotide; CTT chr2 60527786 60527807 60527791 60527786 -
tcaaattggccaggctaacata

SEQ ID NO: 214700 - DNA, 22 bp, Artificial Sequence
  Synthetic oligonucleotide; TTT chr2 60527785 60527806 60527790 60527785 -
caaattggccaggctaacatag

SEQ ID NO: 214701 - DNA, 22 bp, Artificial Sequence
  Synthetic oligonucleotide; TTC chr2 60527784 60527805 60527789 60527784 -
aaattggccaggctaacataga

SEQ ID NO: 214702 - DNA, 22 bp, Artificial Sequence
  Synthetic oligonucleotide; TTG chr2 60527778 60527799 60527783 60527778 -
gccaggctaacatagacctcca

SEQ ID NO: 214703 - DNA, 22 bp, Artificial Sequence
  Synthetic oligonucleotide; CTA chr2 60527769 60527790 60527774 60527769 -
acatagacctccactgagagaa

SEQ ID NO: 214704 - DNA, 22 bp, Artificial Sequence
  Synthetic oligonucleotide; CTC chr2 60527758 60527779 60527763 60527758 -
cactgagagaatttcagaatca

SEQ ID NO: 214705 - DNA, 22 bp, Artificial Sequence
  Synthetic oligonucleotide; CTG chr2 60527753 60527774 60527758 60527753 -
agagaatttcagaatcatttgg

SEQ ID NO: 214706 - DNA, 22 bp, Artificial Sequence
  Synthetic oligonucleotide; TTT chr2 60527744 60527765 60527749 60527744 -
cagaatcatttggtagttgaga

SEQ ID NO: 214707 - DNA, 22 bp, Artificial Sequence
  Synthetic oligonucleotide; TTC chr2 60527743 60527764 60527748 60527743 -
agaatcatttggtagttgagaa

SEQ ID NO: 214708 - DNA, 22 bp, Artificial Sequence
  Synthetic oligonucleotide; TTT chr2 60527733 60527754 60527738 60527733 -
ggtagttgagaagcgcctactt

SEQ ID NO: 214709 - DNA, 22 bp, Artificial Sequence
  Synthetic oligonucleotide; TTG chr2 60527732 60527753 60527737 60527732 -
gtagttgagaagcgcctacttc

SEQ ID NO: 214710 - DNA, 22 bp, Artificial Sequence
  Synthetic oligonucleotide; TTG chr2 60527725 60527746 60527730 60527725 -
agaagcgcctacttcatgcgga

SEQ ID NO: 214711 - DNA, 22 bp, Artificial Sequence
  Synthetic oligonucleotide; CTA chr2 60527714 60527735 60527719 60527714 -
cttcatgcggaggccccgtggg

SEQ ID NO: 214712 - DNA, 22 bp, Artificial Sequence
  Synthetic oligonucleotide; CTT chr2 60527711 60527732 60527716 60527711 -
catgcggaggccccgtgggagg

SEQ ID NO: 214713 - DNA, 22 bp, Artificial Sequence
  Synthetic oligonucleotide; TTC chr2 60527710 60527731 60527715 60527710 -
atgcggaggccccgtgggagga

SEQ ID NO: 214714 - DNA, 22 bp, Artificial Sequence
  Synthetic oligonucleotide; TTG chr2 60527676 60527697 60527681 60527676 -
gcctcagcactggcgagtatcg

SEQ ID NO: 214715 - DNA, 22 bp, Artificial Sequence
  Synthetic oligonucleotide; CTC chr2 60527671 60527692 60527676 60527671 -
agcactggcgagtatcggatgg

SEQ ID NO: 214716 - DNA, 22 bp, Artificial Sequence
  Synthetic oligonucleotide; CTG chr2 60527664 60527685 60527669 60527664 -
gcgagtatcggatgggagctct

SEQ ID NO: 214717 - DNA, 22 bp, Artificial Sequence
  Synthetic oligonucleotide; CTC chr2 60527643 60527664 60527648 60527643 -
tgctcacttggtaagtccttct

SEQ ID NO: 214718 - DNA, 22 bp, Artificial Sequence
  Synthetic oligonucleotide; CTG chr2 60527641 60527662 60527646 60527641 -
ctcacttggtaagtccttctgc

SEQ ID NO: 214719 - DNA, 22 bp, Artificial Sequence
  Synthetic oligonucleotide; CTC chr2 60527638 60527659 60527643 60527638 -
acttggtaagtccttctgctag

SEQ ID NO: 214720 - DNA, 22 bp, Artificial Sequence
  Synthetic oligonucleotide; CTT chr2 60527634 60527655 60527639 60527634 -
ggtaagtccttctgctagaacc

SEQ ID NO: 214721 - DNA, 22 bp, Artificial Sequence
  Synthetic oligonucleotide; TTG chr2 60527633 60527654 60527638 60527633 -
gtaagtccttctgctagaacca

SEQ ID NO: 214722 - DNA, 22 bp, Artificial Sequence
  Synthetic oligonucleotide; CTT chr2 60527623 60527644 60527628 60527623 -
ctgctagaaccaagggaggctg

SEQ ID NO: 214723 - DNA, 22 bp, Artificial Sequence
  Synthetic oligonucleotide; TTC chr2 60527622 60527643 60527627 60527622 -
tgctagaaccaagggaggctgt

SEQ ID NO: 214724 - DNA, 22 bp, Artificial Sequence
  Synthetic oligonucleotide; CTG chr2 60527620 60527641 60527625 60527620 -
ctagaaccaagggaggctgttc

SEQ ID NO: 214725 - DNA, 22 bp, Artificial Sequence
  Synthetic oligonucleotide; CTA chr2 60527617 60527638 60527622 60527617 -
gaaccaagggaggctgttcaga

SEQ ID NO: 214726 - DNA, 22 bp, Artificial Sequence
  Synthetic oligonucleotide; CTG chr2 60527601 60527622 60527606 60527601 -
ttcagatccatcacaaagaagt

SEQ ID NO: 214727 - DNA, 22 bp, Artificial Sequence
  Synthetic oligonucleotide; TTC chr2 60527598 60527619 60527603 60527598 -
agatccatcacaaagaagttgt

SEQ ID NO: 214728 - DNA, 22 bp, Artificial Sequence
  Synthetic oligonucleotide; TTG chr2 60527577 60527598 60527582 60527577 -
tcggtcacatccaggttgtctt

SEQ ID NO: 214729 - DNA, 22 bp, Artificial Sequence
  Synthetic oligonucleotide; TTG chr2 60527559 60527580 60527564 60527559 -
tcttctgagtttgaggtgggat

SEQ ID NO: 214730 - DNA, 22 bp, Artificial Sequence
  Synthetic oligonucleotide; CTT chr2 60527555 60527576 60527560 60527555 -
ctgagtttgaggtgggatggag

SEQ ID NO: 214731 - DNA, 22 bp, Artificial Sequence
  Synthetic oligonucleotide; TTC chr2 60527554 60527575 60527559 60527554 -
tgagtttgaggtgggatggagg

SEQ ID NO: 214732 - DNA, 22 bp, Artificial Sequence
  Synthetic oligonucleotide; CTG chr2 60527552 60527573 60527557 60527552 -
agtttgaggtgggatggaggtg

SEQ ID NO: 214733 - DNA, 22 bp, Artificial Sequence
  Synthetic oligonucleotide; TTT chr2 60527547 60527568 60527552 60527547 -
gaggtgggatggaggtggctgc

SEQ ID NO: 214734 - DNA, 22 bp, Artificial Sequence
  Synthetic oligonucleotide; TTG chr2 60527546 60527567 60527551 60527546 -
aggtgggatggaggtggctgct

SEQ ID NO: 214735 - DNA, 22 bp, Artificial Sequence
  Synthetic oligonucleotide; CTG chr2 60527526 60527547 60527531 60527526 -
ctgagaatccatgtgggtcaag

SEQ ID NO: 214736 - DNA, 22 bp, Artificial Sequence
  Synthetic oligonucleotide; CTG chr2 60527523 60527544 60527528 60527523 -
agaatccatgtgggtcaagagc

SEQ ID NO: 214737 - DNA, 22 bp, Artificial Sequence
  Synthetic oligonucleotide; CTC chr2 60527499 60527520 60527504 60527499 -
caaagcttcacttttacttcgc

SEQ ID NO: 214738 - DNA, 22 bp, Artificial Sequence
  Synthetic oligonucleotide; CTT chr2 60527491 60527512 60527496 60527491 -
cacttttacttcgcactctgtc

SEQ ID NO: 214739 - DNA, 22 bp, Artificial Sequence
  Synthetic oligonucleotide; TTC chr2 60527490 60527511 60527495 60527490 -
acttttacttcgcactctgtcc

SEQ ID NO: 214740 - DNA, 22 bp, Artificial Sequence
  Synthetic oligonucleotide; CTT chr2 60527486 60527507 60527491 60527486 -
ttacttcgcactctgtcccggg

SEQ ID NO: 214741 - DNA, 22 bp, Artificial Sequence
  Synthetic oligonucleotide; TTT chr2 60527485 60527506 60527490 60527485 -
tacttcgcactctgtcccgggg

SEQ ID NO: 214742 - DNA, 22 bp, Artificial Sequence
  Synthetic oligonucleotide; TTT chr2 60527484 60527505 60527489 60527484 -
acttcgcactctgtcccggggc

SEQ ID NO: 214743 - DNA, 22 bp, Artificial Sequence
  Synthetic oligonucleotide; TTA chr2 60527483 60527504 60527488 60527483 -
cttcgcactctgtcccggggca

SEQ ID NO: 214744 - DNA, 22 bp, Artificial Sequence
  Synthetic oligonucleotide; CTT chr2 60527480 60527501 60527485 60527480 -
cgcactctgtcccggggcatgg

SEQ ID NO: 214745 - DNA, 22 bp, Artificial Sequence
  Synthetic oligonucleotide; TTC chr2 60527479 60527500 60527484 60527479 -
gcactctgtcccggggcatgga

SEQ ID NO: 214746 - DNA, 22 bp, Artificial Sequence
  Synthetic oligonucleotide; CTC chr2 60527473 60527494 60527478 60527473 -
tgtcccggggcatggacgtcct

SEQ ID NO: 214747 - DNA, 22 bp, Artificial Sequence
  Synthetic oligonucleotide; CTG chr2 60527471 60527492 60527476 60527471 -
tcccggggcatggacgtcctca

SEQ ID NO: 214748 - DNA, 22 bp, Artificial Sequence
  Synthetic oligonucleotide; CTC chr2 60527450 60527471 60527455 60527450 -
aatggaggtcatgcaagccctt

SEQ ID NO: 214749 - DNA, 22 bp, Artificial Sequence
  Synthetic oligonucleotide; CTT chr2 60527428 60527449 60527433 60527428 -
ccccctcaccccttctcttggc

SEQ ID NO: 214750 - DNA, 22 bp, Artificial Sequence
  Synthetic oligonucleotide; TTC chr2 60527427 60527448 60527432 60527427 -
cccctcaccccttctcttggcc

SEQ ID NO: 214751 - DNA, 22 bp, Artificial Sequence
  Synthetic oligonucleotide; CTC chr2 60527421 60527442 60527426 60527421 -
accccttctcttggccctcttc

SEQ ID NO: 214752 - DNA, 22 bp, Artificial Sequence
  Synthetic oligonucleotide; CTT chr2 60527414 60527435 60527419 60527414 -
ctcttggccctcttcattgtct

SEQ ID NO: 214753 - DNA, 22 bp, Artificial Sequence
  Synthetic oligonucleotide; TTC chr2 60527413 60527434 60527418 60527413 -
tcttggccctcttcattgtctc

SEQ ID NO: 214754 - DNA, 22 bp, Artificial Sequence
  Synthetic oligonucleotide; CTC chr2 60527411 60527432 60527416 60527411 -
ttggccctcttcattgtctcta

SEQ ID NO: 214755 - DNA, 22 bp, Artificial Sequence
  Synthetic oligonucleotide; CTT chr2 60527409 60527430 60527414 60527409 -
ggccctcttcattgtctctaca

SEQ ID NO: 214756 - DNA, 22 bp, Artificial Sequence
  Synthetic oligonucleotide; TTG chr2 60527408 60527429 60527413 60527408 -
gccctcttcattgtctctacat

SEQ ID NO: 214757 - DNA, 22 bp, Artificial Sequence
  Synthetic oligonucleotide; CTC chr2 60527402 60527423 60527407 60527402 -
ttcattgtctctacataccctt

SEQ ID NO: 214758 - DNA, 22 bp, Artificial Sequence
  Synthetic oligonucleotide; CTT chr2 60527400 60527421 60527405 60527400 -
cattgtctctacatacccttgg

SEQ ID NO: 214759 - DNA, 22 bp, Artificial Sequence
  Synthetic oligonucleotide; TTC chr2 60527399 60527420 60527404 60527399 -
attgtctctacatacccttggg

SEQ ID NO: 214760 - DNA, 22 bp, Artificial Sequence
  Synthetic oligonucleotide; TTG chr2 60527395 60527416 60527400 60527395 -
tctctacatacccttgggtcaa

SEQ ID NO: 214761 - DNA, 22 bp, Artificial Sequence
  Synthetic oligonucleotide; CTC chr2 60527391 60527412 60527396 60527391 -
tacatacccttgggtcaagagt

SEQ ID NO: 214762 - DNA, 22 bp, Artificial Sequence
  Synthetic oligonucleotide; CTA chr2 60527389 60527410 60527394 60527389 -
catacccttgggtcaagagtgt

SEQ ID NO: 214763 - DNA, 22 bp, Artificial Sequence
  Synthetic oligonucleotide; CTT chr2 60527380 60527401 60527385 60527380 -
gggtcaagagtgtagtggttct

SEQ ID NO: 214764 - DNA, 22 bp, Artificial Sequence
  Synthetic oligonucleotide; TTG chr2 60527379 60527400 60527384 60527379 -
ggtcaagagtgtagtggttctc

SEQ ID NO: 214765 - DNA, 22 bp, Artificial Sequence
  Synthetic oligonucleotide; TTC chr2 60527359 60527380 60527364 60527359 -
tcccttgtcaccctggaagaga

SEQ ID NO: 214766 - DNA, 22 bp, Artificial Sequence
  Synthetic oligonucleotide; CTC chr2 60527357 60527378 60527362 60527357 -
ccttgtcaccctggaagagaag

SEQ ID NO: 214767 - DNA, 22 bp, Artificial Sequence
  Synthetic oligonucleotide; CTT chr2 60527353 60527374 60527358 60527353 -
gtcaccctggaagagaagctct

SEQ ID NO: 214768 - DNA, 22 bp, Artificial Sequence
  Synthetic oligonucleotide; TTG chr2 60527352 60527373 60527357 60527352 -
tcaccctggaagagaagctctt

SEQ ID NO: 214769 - DNA, 22 bp, Artificial Sequence
  Synthetic oligonucleotide; CTG chr2 60527344 60527365 60527349 60527344 -
gaagagaagctcttagttttat

SEQ ID NO: 214770 - DNA, 22 bp, Artificial Sequence
  Synthetic oligonucleotide; CTC chr2 60527332 60527353 60527337 60527332 -
ttagttttatttgctgggtctc

SEQ ID NO: 214771 - DNA, 22 bp, Artificial Sequence
  Synthetic oligonucleotide; CTT chr2 60527330 60527351 60527335 60527330 -
agttttatttgctgggtctcct

SEQ ID NO: 214772 - DNA, 22 bp, Artificial Sequence
  Synthetic oligonucleotide; TTA chr2 60527329 60527350 60527334 60527329 -
gttttatttgctgggtctccta

SEQ ID NO: 214773 - DNA, 22 bp, Artificial Sequence
  Synthetic oligonucleotide; TTT chr2 60527325 60527346 60527330 60527325 -
tatttgctgggtctcctagact

SEQ ID NO: 214774 - DNA, 22 bp, Artificial Sequence
  Synthetic oligonucleotide; TTT chr2 60527324 60527345 60527329 60527324 -
atttgctgggtctcctagactg

SEQ ID NO: 214775 - DNA, 22 bp, Artificial Sequence
  Synthetic oligonucleotide; TTA chr2 60527323 60527344 60527328 60527323 -
tttgctgggtctcctagactga

SEQ ID NO: 214776 - DNA, 22 bp, Artificial Sequence
  Synthetic oligonucleotide; TTT chr2 60527320 60527341 60527325 60527320 -
gctgggtctcctagactgaaat

SEQ ID NO: 214777 - DNA, 22 bp, Artificial Sequence
  Synthetic oligonucleotide; TTG chr2 60527319 60527340 60527324 60527319 -
ctgggtctcctagactgaaatg

SEQ ID NO: 214778 - DNA, 22 bp, Artificial Sequence
  Synthetic oligonucleotide; CTG chr2 60527316 60527337 60527321 60527316 -
ggtctcctagactgaaatgata

SEQ ID NO: 214779 - DNA, 22 bp, Artificial Sequence
  Synthetic oligonucleotide; CTC chr2 60527310 60527331 60527315 60527310 -
ctagactgaaatgataaagctg

SEQ ID NO: 214780 - DNA, 22 bp, Artificial Sequence
  Synthetic oligonucleotide; CTA chr2 60527307 60527328 60527312 60527307 -
gactgaaatgataaagctgaaa

SEQ ID NO: 214781 - DNA, 22 bp, Artificial Sequence
  Synthetic oligonucleotide; CTG chr2 60527302 60527323 60527307 60527302 -
aaatgataaagctgaaatgata

SEQ ID NO: 214782 - DNA, 22 bp, Artificial Sequence
  Synthetic oligonucleotide; CTG chr2 60527288 60527309 60527293 60527288 -
aaatgataaaaggcgtatcatg

SEQ ID NO: 214783 - DNA, 22 bp, Artificial Sequence
  Synthetic oligonucleotide; CTT chr2 60527262 60527283 60527267 60527262 -
tagaacccttcttatttccctc

SEQ ID NO: 214784 - DNA, 22 bp, Artificial Sequence
  Synthetic oligonucleotide; TTT chr2 60527261 60527282 60527266 60527261 -
agaacccttcttatttccctcg

SEQ ID NO: 214785 - DNA, 22 bp, Artificial Sequence
  Synthetic oligonucleotide; TTA chr2 60527260 60527281 60527265 60527260 -
gaacccttcttatttccctcgc

SEQ ID NO: 214786 - DNA, 22 bp, Artificial Sequence
  Synthetic oligonucleotide; CTT chr2 60527252 60527273 60527257 60527252 -
cttatttccctcgctcgcaccc

SEQ ID NO: 214787 - DNA, 22 bp, Artificial Sequence
  Synthetic oligonucleotide; TTC chr2 60527251 60527272 60527256 60527251 -
ttatttccctcgctcgcacccc

SEQ ID NO: 214788 - DNA, 22 bp, Artificial Sequence
  Synthetic oligonucleotide; CTT chr2 60527249 60527270 60527254 60527249 -
atttccctcgctcgcaccccct

SEQ ID NO: 214789 - DNA, 22 bp, Artificial Sequence
  Synthetic oligonucleotide; TTA chr2 60527248 60527269 60527253 60527248 -
tttccctcgctcgcacccccta

SEQ ID NO: 214790 - DNA, 22 bp, Artificial Sequence
  Synthetic oligonucleotide; TTT chr2 60527245 60527266 60527250 60527245 -
ccctcgctcgcaccccctagtt

SEQ ID NO: 214791 - DNA, 22 bp, Artificial Sequence
  Synthetic oligonucleotide; TTC chr2 60527244 60527265 60527249 60527244 -
cctcgctcgcaccccctagttt

SEQ ID NO: 214792 - DNA, 22 bp, Artificial Sequence
  Synthetic oligonucleotide; CTC chr2 60527240 60527261 60527245 60527240 -
gctcgcaccccctagttttcct

SEQ ID NO: 214793 - DNA, 22 bp, Artificial Sequence
  Synthetic oligonucleotide; CTC chr2 60527236 60527257 60527241 60527236 -
gcaccccctagttttccttctc

SEQ ID NO: 214794 - DNA, 22 bp, Artificial Sequence
  Synthetic oligonucleotide; CTA chr2 60527226 60527247 60527231 60527226 -
gttttccttctcttcccttgaa

SEQ ID NO: 214795 - DNA, 22 bp, Artificial Sequence
  Synthetic oligonucleotide; TTT chr2 60527222 60527243 60527227 60527222 -
tccttctcttcccttgaaaatc

SEQ ID NO: 214796 - DNA, 22 bp, Artificial Sequence
  Synthetic oligonucleotide; TTT chr2 60527221 60527242 60527226 60527221 -
ccttctcttcccttgaaaatca

SEQ ID NO: 214797 - DNA, 22 bp, Artificial Sequence
  Synthetic oligonucleotide; TTC chr2 60527220 60527241 60527225 60527220 -
cttctcttcccttgaaaatcag

SEQ ID NO: 214798 - DNA, 22 bp, Artificial Sequence
  Synthetic oligonucleotide; CTT chr2 60527217 60527238 60527222 60527217 -
ctcttcccttgaaaatcagtga

SEQ ID NO: 214799 - DNA, 22 bp, Artificial Sequence
  Synthetic oligonucleotide; TTC chr2 60527216 60527237 60527221 60527216 -
tcttcccttgaaaatcagtgaa

SEQ ID NO: 214800 - DNA, 22 bp, Artificial Sequence
  Synthetic oligonucleotide; CTC chr2 60527214 60527235 60527219 60527214 -
ttcccttgaaaatcagtgaaaa

SEQ ID NO: 214801 - DNA, 22 bp, Artificial Sequence
  Synthetic oligonucleotide; CTT chr2 60527212 60527233 60527217 60527212 -
cccttgaaaatcagtgaaaatc

SEQ ID NO: 214802 - DNA, 22 bp, Artificial Sequence
  Synthetic oligonucleotide; TTC chr2 60527211 60527232 60527216 60527211 -
ccttgaaaatcagtgaaaatca

SEQ ID NO: 214803 - DNA, 22 bp, Artificial Sequence
  Synthetic oligonucleotide; CTT chr2 60527207 60527228 60527212 60527207 -
gaaaatcagtgaaaatcaggcc

SEQ ID NO: 214804 - DNA, 22 bp, Artificial Sequence
  Synthetic oligonucleotide; TTG chr2 60527206 60527227 60527211 60527206 -
aaaatcagtgaaaatcaggcca

SEQ ID NO: 214805 - DNA, 22 bp, Artificial Sequence
  Synthetic oligonucleotide; CTC chr2 60527178 60527199 60527183 60527178 -
tgatgatggccttttgtttctt

SEQ ID NO: 214806 - DNA, 22 bp, Artificial Sequence
  Synthetic oligonucleotide; CTG chr2 60527176 60527197 60527181 60527176 -
atgatggccttttgtttctttt

SEQ ID NO: 214807 - DNA, 22 bp, Artificial Sequence
  Synthetic oligonucleotide; CTT chr2 60527165 60527186 60527170 60527165 -
ttgtttctttttctttttctgt

SEQ ID NO: 214808 - DNA, 22 bp, Artificial Sequence
  Synthetic oligonucleotide; TTT chr2 60527164 60527185 60527169 60527164 -
tgtttctttttctttttctgtt

SEQ ID NO: 214809 - DNA, 22 bp, Artificial Sequence
  Synthetic oligonucleotide; TTT chr2 60527163 60527184 60527168 60527163 -
gtttctttttctttttctgttt

SEQ ID NO: 214810 - DNA, 22 bp, Artificial Sequence
  Synthetic oligonucleotide; TTG chr2 60527162 60527183 60527167 60527162 -
tttctttttctttttctgtttc

SEQ ID NO: 214811 - DNA, 22 bp, Artificial Sequence
  Synthetic oligonucleotide; TTT chr2 60527159 60527180 60527164 60527159 -
ctttttctttttctgtttctgc

SEQ ID NO: 214812 - DNA, 22 bp, Artificial Sequence
  Synthetic oligonucleotide; TTC chr2 60527158 60527179 60527163 60527158 -
tttttctttttctgtttctgcc

SEQ ID NO: 214813 - DNA, 22 bp, Artificial Sequence
  Synthetic oligonucleotide; CTT chr2 60527156 60527177 60527161 60527156 -
tttctttttctgtttctgcctt

SEQ ID NO: 214814 - DNA, 22 bp, Artificial Sequence
  Synthetic oligonucleotide; TTT chr2 60527155 60527176 60527160 60527155 -
ttctttttctgtttctgccttc

SEQ ID NO: 214815 - DNA, 22 bp, Artificial Sequence
  Synthetic oligonucleotide; TTT chr2 60527154 60527175 60527159 60527154 -
tctttttctgtttctgccttcg

SEQ ID NO: 214816 - DNA, 22 bp, Artificial Sequence
  Synthetic oligonucleotide; TTT chr2 60527153 60527174 60527158 60527153 -
ctttttctgtttctgccttcgt

SEQ ID NO: 214817 - DNA, 22 bp, Artificial Sequence
  Synthetic oligonucleotide; TTC chr2 60527152 60527173 60527157 60527152 -
tttttctgtttctgccttcgtt

SEQ ID NO: 214818 - DNA, 22 bp, Artificial Sequence
  Synthetic oligonucleotide; CTT chr2 60527150 60527171 60527155 60527150 -
tttctgtttctgccttcgttag

SEQ ID NO: 214819 - DNA, 22 bp, Artificial Sequence
  Synthetic oligonucleotide; TTT chr2 60527149 60527170 60527154 60527149 -
ttctgtttctgccttcgttagg

SEQ ID NO: 214820 - DNA, 22 bp, Artificial Sequence
  Synthetic oligonucleotide; TTT chr2 60527148 60527169 60527153 60527148 -
tctgtttctgccttcgttaggt

SEQ ID NO: 214821 - DNA, 22 bp, Artificial Sequence
  Synthetic oligonucleotide; TTT chr2 60527147 60527168 60527152 60527147 -
ctgtttctgccttcgttaggta

SEQ ID NO: 214822 - DNA, 22 bp, Artificial Sequence
  Synthetic oligonucleotide; TTC chr2 60527146 60527167 60527151 60527146 -
tgtttctgccttcgttaggtaa

SEQ ID NO: 214823 - DNA, 22 bp, Artificial Sequence
  Synthetic oligonucleotide; CTG chr2 60527144 60527165 60527149 60527144 -
tttctgccttcgttaggtaagc

SEQ ID NO: 214824 - DNA, 22 bp, Artificial Sequence
  Synthetic oligonucleotide; TTT chr2 60527141 60527162 60527146 60527141 -
ctgccttcgttaggtaagcaca

SEQ ID NO: 214825 - DNA, 22 bp, Artificial Sequence
  Synthetic oligonucleotide; TTC chr2 60527140 60527161 60527145 60527140 -
tgccttcgttaggtaagcacaa

SEQ ID NO: 214826 - DNA, 22 bp, Artificial Sequence
  Synthetic oligonucleotide; CTG chr2 60527138 60527159 60527143 60527138 -
ccttcgttaggtaagcacaaat

SEQ ID NO: 214827 - DNA, 22 bp, Artificial Sequence
  Synthetic oligonucleotide; CTT chr2 60527134 60527155 60527139 60527134 -
cgttaggtaagcacaaatttga

SEQ ID NO: 214828 - DNA, 22 bp, Artificial Sequence
  Synthetic oligonucleotide; TTC chr2 60527133 60527154 60527138 60527133 -
gttaggtaagcacaaatttgat

SEQ ID NO: 214829 - DNA, 22 bp, Artificial Sequence
  Synthetic oligonucleotide; TTA chr2 60527129 60527150 60527134 60527129 -
ggtaagcacaaatttgatgtcc

SEQ ID NO: 214830 - DNA, 22 bp, Artificial Sequence
  Synthetic oligonucleotide; TTT chr2 60527114 60527135 60527119 60527114 -
gatgtcccaagaggcaggccgg

SEQ ID NO: 214831 - DNA, 22 bp, Artificial Sequence
  Synthetic oligonucleotide; TTG chr2 60527113 60527134 60527118 60527113 -
atgtcccaagaggcaggccggt

SEQ ID NO: 214832 - DNA, 22 bp, Artificial Sequence
  Synthetic oligonucleotide; CTT chr2 60527084 60527105 60527089 60527084 -
caggccaagtgcctggatgtgg

SEQ ID NO: 214833 - DNA, 22 bp, Artificial Sequence
  Synthetic oligonucleotide; TTC chr2 60527083 60527104 60527088 60527083 -
aggccaagtgcctggatgtggc

SEQ ID NO: 214834 - DNA, 22 bp, Artificial Sequence
  Synthetic oligonucleotide; CTG chr2 60527069 60527090 60527074 60527069 -
gatgtggcaaagctacaataaa

SEQ ID NO: 214835 - DNA, 22 bp, Artificial Sequence
  Synthetic oligonucleotide; CTA chr2 60527054 60527075 60527059 60527054 -
caataaatatcgaatggtgaga

SEQ ID NO: 214836 - DNA, 22 bp, Artificial Sequence
  Synthetic oligonucleotide; TTT chr2 60527019 60527040 60527024 60527019 -
agcaaagccataaccggggaga

SEQ ID NO: 214837 - DNA, 22 bp, Artificial Sequence
  Synthetic oligonucleotide; TTA chr2 60527018 60527039 60527023 60527018 -
gcaaagccataaccggggagac

SEQ ID NO: 214838 - DNA, 22 bp, Artificial Sequence
  Synthetic oligonucleotide; CTC chr2 60526993 60527014 60526998 60526993 -
agaggggcagtggactggttaa

SEQ ID NO: 214839 - DNA, 22 bp, Artificial Sequence
  Synthetic oligonucleotide; CTG chr2 60526976 60526997 60526981 60526976 -
gttaagaggctgttggatgagc

SEQ ID NO: 214840 - DNA, 22 bp, Artificial Sequence
  Synthetic oligonucleotide; TTA chr2 60526972 60526993 60526977 60526972 -
agaggctgttggatgagccggg

SEQ ID NO: 214841 - DNA, 22 bp, Artificial Sequence
  Synthetic oligonucleotide; CTG chr2 60526964 60526985 60526969 60526964 -
ttggatgagccgggtagtattt

SEQ ID NO: 214842 - DNA, 22 bp, Artificial Sequence
  Synthetic oligonucleotide; TTG chr2 60526961 60526982 60526966 60526961 -
gatgagccgggtagtatttcta

SEQ ID NO: 214843 - DNA, 22 bp, Artificial Sequence
  Synthetic oligonucleotide; TTT chr2 60526942 60526963 60526947 60526942 -
ctacttcaacctgattgaaatg

SEQ ID NO: 214844 - DNA, 22 bp, Artificial Sequence
  Synthetic oligonucleotide; TTC chr2 60526941 60526962 60526946 60526941 -
tacttcaacctgattgaaatgt

SEQ ID NO: 214845 - DNA, 22 bp, Artificial Sequence
  Synthetic oligonucleotide; CTA chr2 60526939 60526960 60526944 60526939 -
cttcaacctgattgaaatgtcg

SEQ ID NO: 214846 - DNA, 22 bp, Artificial Sequence
  Synthetic oligonucleotide; CTT chr2 60526936 60526957 60526941 60526936 -
caacctgattgaaatgtcgact

SEQ ID NO: 214847 - DNA, 22 bp, Artificial Sequence
  Synthetic oligonucleotide; TTC chr2 60526935 60526956 60526940 60526935 -
aacctgattgaaatgtcgacta

SEQ ID NO: 214848 - DNA, 22 bp, Artificial Sequence
  Synthetic oligonucleotide; CTG chr2 60526929 60526950 60526934 60526929 -
attgaaatgtcgactaaaaatc

SEQ ID NO: 214849 - DNA, 22 bp, Artificial Sequence
  Synthetic oligonucleotide; TTG chr2 60526925 60526946 60526930 60526925 -
aaatgtcgactaaaaatcaatg

SEQ ID NO: 214850 - DNA, 22 bp, Artificial Sequence
  Synthetic oligonucleotide; CTA chr2 60526913 60526934 60526918 60526913 -
aaaatcaatgctgttgactagt

SEQ ID NO: 214851 - DNA, 22 bp, Artificial Sequence
  Synthetic oligonucleotide; CTG chr2 60526900 60526921 60526905 60526900 -
ttgactagtgataatttacaac

SEQ ID NO: 214852 - DNA, 22 bp, Artificial Sequence
  Synthetic oligonucleotide; TTG chr2 60526897 60526918 60526902 60526897 -
actagtgataatttacaacgtt

SEQ ID NO: 214853 - DNA, 22 bp, Artificial Sequence
  Synthetic oligonucleotide; CTA chr2 60526893 60526914 60526898 60526893 -
gtgataatttacaacgttcctg

SEQ ID NO: 214854 - DNA, 22 bp, Artificial Sequence
  Synthetic oligonucleotide; TTT chr2 60526883 60526904 60526888 60526883 -
acaacgttcctggtgctaagta

SEQ ID NO: 214855 - DNA, 22 bp, Artificial Sequence
  Synthetic oligonucleotide; TTA chr2 60526882 60526903 60526887 60526882 -
caacgttcctggtgctaagtag

SEQ ID NO: 214856 - DNA, 22 bp, Artificial Sequence
  Synthetic oligonucleotide; TTC chr2 60526874 60526895 60526879 60526874 -
ctggtgctaagtagttccccgc

SEQ ID NO: 214857 - DNA, 22 bp, Artificial Sequence
  Synthetic oligonucleotide; CTG chr2 60526871 60526892 60526876 60526871 -
gtgctaagtagttccccgctta

SEQ ID NO: 214858 - DNA, 22 bp, Artificial Sequence
  Synthetic oligonucleotide; CTA chr2 60526865 60526886 60526870 60526865 -
agtagttccccgcttaagaatg

SEQ ID NO: 214859 - DNA, 22 bp, Artificial Sequence
  Synthetic oligonucleotide; TTC chr2 60526857 60526878 60526862 60526857 -
cccgcttaagaatgcgttggct

SEQ ID NO: 214860 - DNA, 22 bp, Artificial Sequence
  Synthetic oligonucleotide; CTT chr2 60526850 60526871 60526855 60526850 -
aagaatgcgttggctgggcaga

SEQ ID NO: 214861 - DNA, 22 bp, Artificial Sequence
  Synthetic oligonucleotide; TTA chr2 60526849 60526870 60526854 60526849 -
agaatgcgttggctgggcagag

SEQ ID NO: 214862 - DNA, 22 bp, Artificial Sequence
  Synthetic oligonucleotide; TTG chr2 60526838 60526859 60526843 60526838 -
gctgggcagagattagcgcagg

SEQ ID NO: 214863 - DNA, 22 bp, Artificial Sequence
  Synthetic oligonucleotide; CTG chr2 60526834 60526855 60526839 60526834 -
ggcagagattagcgcagggagt

SEQ ID NO: 214864 - DNA, 22 bp, Artificial Sequence
  Synthetic oligonucleotide; TTA chr2 60526823 60526844 60526828 60526823 -
gcgcagggagttgtgtgtgtca

SEQ ID NO: 214865 - DNA, 22 bp, Artificial Sequence
  Synthetic oligonucleotide; TTG chr2 60526810 60526831 60526815 60526810 -
tgtgtgtcacaatgaatcagac

SEQ ID NO: 214866 - DNA, 22 bp, Artificial Sequence
  Synthetic oligonucleotide; TTA chr2 60526782 60526803 60526787 60526782 -
taggtcagccctttatttgttt

SEQ ID NO: 214867 - DNA, 22 bp, Artificial Sequence
  Synthetic oligonucleotide; CTT chr2 60526769 60526790 60526774 60526769 -
tatttgtttcatcatgactttt

SEQ ID NO: 214868 - DNA, 22 bp, Artificial Sequence
  Synthetic oligonucleotide; TTT chr2 60526768 60526789 60526773 60526768 -
atttgtttcatcatgactttta

SEQ ID NO: 214869 - DNA, 22 bp, Artificial Sequence
  Synthetic oligonucleotide; TTA chr2 60526767 60526788 60526772 60526767 -
tttgtttcatcatgacttttac

SEQ ID NO: 214870 - DNA, 22 bp, Artificial Sequence
  Synthetic oligonucleotide; TTT chr2 60526764 60526785 60526769 60526764 -
gtttcatcatgacttttacaca

SEQ ID NO: 214871 - DNA, 22 bp, Artificial Sequence
  Synthetic oligonucleotide; TTG chr2 60526763 60526784 60526768 60526763 -
tttcatcatgacttttacacag

SEQ ID NO: 214872 - DNA, 22 bp, Artificial Sequence
  Synthetic oligonucleotide; TTT chr2 60526760 60526781 60526765 60526760 -
catcatgacttttacacagttg

SEQ ID NO: 214873 - DNA, 22 bp, Artificial Sequence
  Synthetic oligonucleotide; TTC chr2 60526759 60526780 60526764 60526759 -
atcatgacttttacacagttgt

SEQ ID NO: 214874 - DNA, 22 bp, Artificial Sequence
  Synthetic oligonucleotide; CTT chr2 60526749 60526770 60526754 60526749 -
ttacacagttgtcatgtaattt

SEQ ID NO: 214875 - DNA, 22 bp, Artificial Sequence
  Synthetic oligonucleotide; TTT chr2 60526748 60526769 60526753 60526748 -
tacacagttgtcatgtaattta

SEQ ID NO: 214876 - DNA, 22 bp, Artificial Sequence
  Synthetic oligonucleotide; TTT chr2 60526747 60526768 60526752 60526747 -
acacagttgtcatgtaatttat

SEQ ID NO: 214877 - DNA, 22 bp, Artificial Sequence
  Synthetic oligonucleotide; TTA chr2 60526746 60526767 60526751 60526746 -
cacagttgtcatgtaatttatg

SEQ ID NO: 214878 - DNA, 22 bp, Artificial Sequence
  Synthetic oligonucleotide; TTG chr2 60526738 60526759 60526743 60526738 -
tcatgtaatttatggctgcttt

SEQ ID NO: 214879 - DNA, 22 bp, Artificial Sequence
  Synthetic oligonucleotide; TTT chr2 60526727 60526748 60526732 60526727 -
atggctgctttcacgttgtcaa

SEQ ID NO: 214880 - DNA, 22 bp, Artificial Sequence
  Synthetic oligonucleotide; TTA chr2 60526726 60526747 60526731 60526726 -
tggctgctttcacgttgtcaaa

SEQ ID NO: 214881 - DNA, 22 bp, Artificial Sequence
  Synthetic oligonucleotide; CTG chr2 60526720 60526741 60526725 60526720 -
ctttcacgttgtcaaacatttt

SEQ ID NO: 214882 - DNA, 22 bp, Artificial Sequence
  Synthetic oligonucleotide; CTT chr2 60526717 60526738 60526722 60526717 -
tcacgttgtcaaacattttcat

SEQ ID NO: 214883 - DNA, 22 bp, Artificial Sequence
  Synthetic oligonucleotide; TTT chr2 60526716 60526737 60526721 60526716 -
cacgttgtcaaacattttcatt

SEQ ID NO: 214884 - DNA, 22 bp, Artificial Sequence
  Synthetic oligonucleotide; TTC chr2 60526715 60526736 60526720 60526715 -
acgttgtcaaacattttcattg

SEQ ID NO: 214885 - DNA, 22 bp, Artificial Sequence
  Synthetic oligonucleotide; TTG chr2 60526709 60526730 60526714 60526709 -
tcaaacattttcattgcatctt

SEQ ID NO: 214886 - DNA, 22 bp, Artificial Sequence
  Synthetic oligonucleotide; TTT chr2 60526699 60526720 60526704 60526699 -
tcattgcatcttcttctttaac

SEQ ID NO: 214887 - DNA, 22 bp, Artificial Sequence
  Synthetic oligonucleotide; TTT chr2 60526698 60526719 60526703 60526698 -
cattgcatcttcttctttaaca

SEQ ID NO: 214888 - DNA, 22 bp, Artificial Sequence
  Synthetic oligonucleotide; TTC chr2 60526697 60526718 60526702 60526697 -
attgcatcttcttctttaacac

SEQ ID NO: 214889 - DNA, 22 bp, Artificial Sequence
  Synthetic oligonucleotide; TTG chr2 60526693 60526714 60526698 60526693 -
catcttcttctttaacaccctc

SEQ ID NO: 214890 - DNA, 22 bp, Artificial Sequence
  Synthetic oligonucleotide; CTT chr2 60526687 60526708 60526692 60526687 -
cttctttaacaccctcctgaca

SEQ ID NO: 214891 - DNA, 22 bp, Artificial Sequence
  Synthetic oligonucleotide; TTC chr2 60526686 60526707 60526691 60526686 -
ttctttaacaccctcctgacat

SEQ ID NO: 214892 - DNA, 22 bp, Artificial Sequence
  Synthetic oligonucleotide; CTT chr2 60526684 60526705 60526689 60526684 -
ctttaacaccctcctgacatag

SEQ ID NO: 214893 - DNA, 22 bp, Artificial Sequence
  Synthetic oligonucleotide; TTC chr2 60526683 60526704 60526688 60526683 -
tttaacaccctcctgacataga

SEQ ID NO: 214894 - DNA, 22 bp, Artificial Sequence
  Synthetic oligonucleotide; CTT chr2 60526681 60526702 60526686 60526681 -
taacaccctcctgacatagaca

SEQ ID NO: 214895 - DNA, 22 bp, Artificial Sequence
  Synthetic oligonucleotide; TTT chr2 60526680 60526701 60526685 60526680 -
aacaccctcctgacatagacac

SEQ ID NO: 214896 - DNA, 22 bp, Artificial Sequence
  Synthetic oligonucleotide; TTA chr2 60526679 60526700 60526684 60526679 -
acaccctcctgacatagacaca

SEQ ID NO: 214897 - DNA, 22 bp, Artificial Sequence
  Synthetic oligonucleotide; CTC chr2 60526671 60526692 60526676 60526671 -
ctgacatagacacactgcactt

SEQ ID NO: 214898 - DNA, 22 bp, Artificial Sequence
  Synthetic oligonucleotide; CTG chr2 60526668 60526689 60526673 60526668 -
acatagacacactgcacttgaa

SEQ ID NO: 214899 - DNA, 22 bp, Artificial Sequence
  Synthetic oligonucleotide; CTG chr2 60526654 60526675 60526659 60526654 -
cacttgaaggcttggtattgtt

SEQ ID NO: 214900 - DNA, 22 bp, Artificial Sequence
  Synthetic oligonucleotide; CTT chr2 60526649 60526670 60526654 60526649 -
gaaggcttggtattgtttcata

SEQ ID NO: 214901 - DNA, 22 bp, Artificial Sequence
  Synthetic oligonucleotide; TTG chr2 60526648 60526669 60526653 60526648 -
aaggcttggtattgtttcataa

SEQ ID NO: 214902 - DNA, 22 bp, Artificial Sequence
  Synthetic oligonucleotide; CTT chr2 60526641 60526662 60526646 60526641 -
ggtattgtttcataatccgaga

SEQ ID NO: 214903 - DNA, 22 bp, Artificial Sequence
  Synthetic oligonucleotide; TTG chr2 60526640 60526661 60526645 60526640 -
gtattgtttcataatccgagag

SEQ ID NO: 214904 - DNA, 22 bp, Artificial Sequence
  Synthetic oligonucleotide; TTG chr2 60526634 60526655 60526639 60526634 -
tttcataatccgagaggaggcc

SEQ ID NO: 214905 - DNA, 22 bp, Artificial Sequence
  Synthetic oligonucleotide; TTT chr2 60526631 60526652 60526636 60526631 -
cataatccgagaggaggcctat

SEQ ID NO: 214906 - DNA, 22 bp, Artificial Sequence
  Synthetic oligonucleotide; TTC chr2 60526630 60526651 60526635 60526630 -
ataatccgagaggaggcctata

SEQ ID NO: 214907 - DNA, 22 bp, Artificial Sequence
  Synthetic oligonucleotide; CTA chr2 60526610 60526631 60526615 60526610 -
taaaccatcaaattacactatc

SEQ ID NO: 214908 - DNA, 22 bp, Artificial Sequence
  Synthetic oligonucleotide; TTA chr2 60526595 60526616 60526600 60526595 -
cactatctttgggctaatctaa

SEQ ID NO: 214909 - DNA, 22 bp, Artificial Sequence
  Synthetic oligonucleotide; CTA chr2 60526590 60526611 60526595 60526590 -
tctttgggctaatctaaatgcg

SEQ ID NO: 214910 - DNA, 22 bp, Artificial Sequence
  Synthetic oligonucleotide; CTT chr2 60526586 60526607 60526591 60526586 -
tgggctaatctaaatgcgctgc

SEQ ID NO: 214911 - DNA, 22 bp, Artificial Sequence
  Synthetic oligonucleotide; TTT chr2 60526585 60526606 60526590 60526585 -
gggctaatctaaatgcgctgca

SEQ ID NO: 214912 - DNA, 22 bp, Artificial Sequence
  Synthetic oligonucleotide; TTG chr2 60526584 60526605 60526589 60526584 -
ggctaatctaaatgcgctgcag

SEQ ID NO: 214913 - DNA, 22 bp, Artificial Sequence
  Synthetic oligonucleotide; CTA chr2 60526579 60526600 60526584 60526579 -
atctaaatgcgctgcagattaa

SEQ ID NO: 214914 - DNA, 22 bp, Artificial Sequence
  Synthetic oligonucleotide; CTA chr2 60526574 60526595 60526579 60526574 -
aatgcgctgcagattaaaatca

SEQ ID NO: 214915 - DNA, 22 bp, Artificial Sequence
  Synthetic oligonucleotide; CTG chr2 60526565 60526586 60526570 60526565 -
cagattaaaatcagagctcatt

SEQ ID NO: 214916 - DNA, 22 bp, Artificial Sequence
  Synthetic oligonucleotide; TTA chr2 60526558 60526579 60526563 60526558 -
aaatcagagctcatttgtccct

SEQ ID NO: 214917 - DNA, 22 bp, Artificial Sequence
  Synthetic oligonucleotide; CTC chr2 60526546 60526567 60526551 60526546 -
atttgtccctgatgcaaattat

SEQ ID NO: 214918 - DNA, 22 bp, Artificial Sequence
  Synthetic oligonucleotide; TTT chr2 60526542 60526563 60526547 60526542 -
gtccctgatgcaaattattaag

SEQ ID NO: 214919 - DNA, 22 bp, Artificial Sequence
  Synthetic oligonucleotide; TTG chr2 60526541 60526562 60526546 60526541 -
tccctgatgcaaattattaagt

SEQ ID NO: 214920 - DNA, 22 bp, Artificial Sequence
  Synthetic oligonucleotide; CTG chr2 60526535 60526556 60526540 60526535 -
atgcaaattattaagttctaat

SEQ ID NO: 214921 - DNA, 22 bp, Artificial Sequence
  Synthetic oligonucleotide; TTA chr2 60526525 60526546 60526530 60526525 -
ttaagttctaattataaatacc

SEQ ID NO: 214922 - DNA, 22 bp, Artificial Sequence
  Synthetic oligonucleotide; TTA chr2 60526522 60526543 60526527 60526522 -
agttctaattataaatacccat

SEQ ID NO: 214923 - DNA, 22 bp, Artificial Sequence
  Synthetic oligonucleotide; TTC chr2 60526517 60526538 60526522 60526517 -
taattataaatacccatttaat

SEQ ID NO: 214924 - DNA, 22 bp, Artificial Sequence
  Synthetic oligonucleotide; CTA chr2 60526515 60526536 60526520 60526515 -
attataaatacccatttaatta

SEQ ID NO: 214925 - DNA, 22 bp, Artificial Sequence
  Synthetic oligonucleotide; TTA chr2 60526511 60526532 60526516 60526511 -
taaatacccatttaattacccg

SEQ ID NO: 214926 - DNA, 22 bp, Artificial Sequence
  Synthetic oligonucleotide; TTT chr2 60526498 60526519 60526503 60526498 -
aattacccgacacatttttatt

SEQ ID NO: 214927 - DNA, 22 bp, Artificial Sequence
  Synthetic oligonucleotide; TTA chr2 60526497 60526518 60526502 60526497 -
attacccgacacatttttattt

SEQ ID NO: 214928 - DNA, 22 bp, Artificial Sequence
  Synthetic oligonucleotide; TTA chr2 60526493 60526514 60526498 60526493 -
cccgacacatttttattttgcg

SEQ ID NO: 214929 - DNA, 22 bp, Artificial Sequence
  Synthetic oligonucleotide; TTT chr2 60526481 60526502 60526486 60526481 -
ttattttgcggacccttttgag

SEQ ID NO: 214930 - DNA, 22 bp, Artificial Sequence
  Synthetic oligonucleotide; TTT chr2 60526480 60526501 60526485 60526480 -
tattttgcggacccttttgagc

SEQ ID NO: 214931 - DNA, 22 bp, Artificial Sequence
  Synthetic oligonucleotide; TTT chr2 60526479 60526500 60526484 60526479 -
attttgcggacccttttgagca

SEQ ID NO: 214932 - DNA, 22 bp, Artificial Sequence
  Synthetic oligonucleotide; TTA chr2 60526478 60526499 60526483 60526478 -
ttttgcggacccttttgagcac

SEQ ID NO: 214933 - DNA, 22 bp, Artificial Sequence
  Synthetic oligonucleotide; TTT chr2 60526475 60526496 60526480 60526475 -
tgcggacccttttgagcactgc

SEQ ID NO: 214934 - DNA, 22 bp, Artificial Sequence
  Synthetic oligonucleotide; TTT chr2 60526474 60526495 60526479 60526474 -
gcggacccttttgagcactgct

SEQ ID NO: 214935 - DNA, 22 bp, Artificial Sequence
  Synthetic oligonucleotide; TTG chr2 60526473 60526494 60526478 60526473 -
cggacccttttgagcactgctg

SEQ ID NO: 214936 - DNA, 22 bp, Artificial Sequence
  Synthetic oligonucleotide; CTT chr2 60526464 60526485 60526469 60526464 -
ttgagcactgctgtctgcgatg

SEQ ID NO: 214937 - DNA, 22 bp, Artificial Sequence
  Synthetic oligonucleotide; TTT chr2 60526463 60526484 60526468 60526463 -
tgagcactgctgtctgcgatgc

SEQ ID NO: 214938 - DNA, 22 bp, Artificial Sequence
  Synthetic oligonucleotide; TTT chr2 60526462 60526483 60526467 60526462 -
gagcactgctgtctgcgatgca

SEQ ID NO: 214939 - DNA, 22 bp, Artificial Sequence
  Synthetic oligonucleotide; TTG chr2 60526461 60526482 60526466 60526461 -
agcactgctgtctgcgatgcag

SEQ ID NO: 214940 - DNA, 22 bp, Artificial Sequence
  Synthetic oligonucleotide; CTG chr2 60526454 60526475 60526459 60526454 -
ctgtctgcgatgcagagggggt

SEQ ID NO: 214941 - DNA, 22 bp, Artificial Sequence
  Synthetic oligonucleotide; CTG chr2 60526451 60526472 60526456 60526451 -
tctgcgatgcagagggggtggg

SEQ ID NO: 214942 - DNA, 22 bp, Artificial Sequence
  Synthetic oligonucleotide; CTG chr2 60526447 60526468 60526452 60526447 -
cgatgcagagggggtgggggga

SEQ ID NO: 214943 - DNA, 22 bp, Artificial Sequence
  Synthetic oligonucleotide; CTG chr2 60526405 60526426 60526410 60526405 -
cagtaattaatgtacacttccc

SEQ ID NO: 214944 - DNA, 22 bp, Artificial Sequence
  Synthetic oligonucleotide; TTA chr2 60526396 60526417 60526401 60526396 -
atgtacacttcccaaatggtaa

SEQ ID NO: 214945 - DNA, 22 bp, Artificial Sequence
  Synthetic oligonucleotide; CTT chr2 60526386 60526407 60526391 60526386 -
cccaaatggtaaaggataaaca

SEQ ID NO: 214946 - DNA, 22 bp, Artificial Sequence
  Synthetic oligonucleotide; TTC chr2 60526385 60526406 60526390 60526385 -
ccaaatggtaaaggataaacat

SEQ ID NO: 214947 - DNA, 22 bp, Artificial Sequence
  Synthetic oligonucleotide; CTG chr2 60526357 60526378 60526362 60526357 -
ctttgtttgtcttatttattta

SEQ ID NO: 214948 - DNA, 22 bp, Artificial Sequence
  Synthetic oligonucleotide; CTT chr2 60526354 60526375 60526359 60526354 -
tgtttgtcttatttatttattg

SEQ ID NO: 214949 - DNA, 22 bp, Artificial Sequence
  Synthetic oligonucleotide; TTT chr2 60526353 60526374 60526358 60526353 -
gtttgtcttatttatttattga

SEQ ID NO: 214950 - DNA, 22 bp, Artificial Sequence
  Synthetic oligonucleotide; TTG chr2 60526352 60526373 60526357 60526352 -
tttgtcttatttatttattgat

SEQ ID NO: 214951 - DNA, 22 bp, Artificial Sequence
  Synthetic oligonucleotide; TTT chr2 60526349 60526370 60526354 60526349 -
gtcttatttatttattgattag

SEQ ID NO: 214952 - DNA, 22 bp, Artificial Sequence
  Synthetic oligonucleotide; TTG chr2 60526348 60526369 60526353 60526348 -
tcttatttatttattgattaga

SEQ ID NO: 214953 - DNA, 22 bp, Artificial Sequence
  Synthetic oligonucleotide; CTT chr2 60526344 60526365 60526349 60526344 -
atttatttattgattagatgta

SEQ ID NO: 214954 - DNA, 22 bp, Artificial Sequence
  Synthetic oligonucleotide; TTA chr2 60526343 60526364 60526348 60526343 -
tttatttattgattagatgtat

SEQ ID NO: 214955 - DNA, 22 bp, Artificial Sequence
  Synthetic oligonucleotide; TTT chr2 60526340 60526361 60526345 60526340 -
atttattgattagatgtataga

SEQ ID NO: 214956 - DNA, 22 bp, Artificial Sequence
  Synthetic oligonucleotide; TTA chr2 60526339 60526360 60526344 60526339 -
tttattgattagatgtatagag

SEQ ID NO: 214957 - DNA, 22 bp, Artificial Sequence
  Synthetic oligonucleotide; TTT chr2 60526336 60526357 60526341 60526336 -
attgattagatgtatagagact

SEQ ID NO: 214958 - DNA, 22 bp, Artificial Sequence
  Synthetic oligonucleotide; TTA chr2 60526335 60526356 60526340 60526335 -
ttgattagatgtatagagactt

SEQ ID NO: 214959 - DNA, 22 bp, Artificial Sequence
  Synthetic oligonucleotide; TTG chr2 60526332 60526353 60526337 60526332 -
attagatgtatagagactttgg

SEQ ID NO: 214960 - DNA, 22 bp, Artificial Sequence
  Synthetic oligonucleotide; TTA chr2 60526328 60526349 60526333 60526328 -
gatgtatagagactttggcgtg

SEQ ID NO: 214961 - DNA, 22 bp, Artificial Sequence
  Synthetic oligonucleotide; CTT chr2 60526313 60526334 60526318 60526313 -
tggcgtgggcacaatctgaagt

SEQ ID NO: 214962 - DNA, 22 bp, Artificial Sequence
  Synthetic oligonucleotide; TTT chr2 60526312 60526333 60526317 60526312 -
ggcgtgggcacaatctgaagtt

SEQ ID NO: 214963 - DNA, 22 bp, Artificial Sequence
  Synthetic oligonucleotide; TTG chr2 60526311 60526332 60526316 60526311 -
gcgtgggcacaatctgaagttg

SEQ ID NO: 214964 - DNA, 22 bp, Artificial Sequence
  Synthetic oligonucleotide; CTG chr2 60526295 60526316 60526300 60526295 -
aagttgaaatccttttaaagat

SEQ ID NO: 214965 - DNA, 22 bp, Artificial Sequence
  Synthetic oligonucleotide; TTG chr2 60526289 60526310 60526294 60526289 -
aaatccttttaaagatgaaaac

SEQ ID NO: 214966 - DNA, 22 bp, Artificial Sequence
  Synthetic oligonucleotide; CTT chr2 60526281 60526302 60526286 60526281 -
ttaaagatgaaaactatttaaa

SEQ ID NO: 214967 - DNA, 22 bp, Artificial Sequence
  Synthetic oligonucleotide; TTT chr2 60526280 60526301 60526285 60526280 -
taaagatgaaaactatttaaaa

SEQ ID NO: 214968 - DNA, 22 bp, Artificial Sequence
  Synthetic oligonucleotide; TTT chr2 60526279 60526300 60526284 60526279 -
aaagatgaaaactatttaaaaa

SEQ ID NO: 214969 - DNA, 22 bp, Artificial Sequence
  Synthetic oligonucleotide; TTA chr2 60526278 60526299 60526283 60526278 -
aagatgaaaactatttaaaaat

SEQ ID NO: 214970 - DNA, 22 bp, Artificial Sequence
  Synthetic oligonucleotide; CTA chr2 60526265 60526286 60526270 60526265 -
tttaaaaatcttttggggaaga

SEQ ID NO: 214971 - DNA, 22 bp, Artificial Sequence
  Synthetic oligonucleotide; TTT chr2 60526262 60526283 60526267 60526262 -
aaaaatcttttggggaagaaag

SEQ ID NO: 214972 - DNA, 22 bp, Artificial Sequence
  Synthetic oligonucleotide; TTA chr2 60526261 60526282 60526266 60526261 -
aaaatcttttggggaagaaaga

SEQ ID NO: 214973 - DNA, 22 bp, Artificial Sequence
  Synthetic oligonucleotide; CTT chr2 60526253 60526274 60526258 60526253 -
ttggggaagaaagagcaaaata

SEQ ID NO: 214974 - DNA, 22 bp, Artificial Sequence
  Synthetic oligonucleotide; TTT chr2 60526252 60526273 60526257 60526252 -
tggggaagaaagagcaaaatat

SEQ ID NO: 214975 - DNA, 22 bp, Artificial Sequence
  Synthetic oligonucleotide; TTT chr2 60526251 60526272 60526256 60526251 -
ggggaagaaagagcaaaatata

SEQ ID NO: 214976 - DNA, 22 bp, Artificial Sequence
  Synthetic oligonucleotide; TTG chr2 60526250 60526271 60526255 60526250 -
gggaagaaagagcaaaatatag

SEQ ID NO: 214977 - DNA, 22 bp, Artificial Sequence
  Synthetic oligonucleotide; CTT chr2 60526214 60526235 60526219 60526214 -
tctgctagaacacatcatccca

SEQ ID NO: 214978 - DNA, 22 bp, Artificial Sequence
  Synthetic oligonucleotide; TTT chr2 60526213 60526234 60526218 60526213 -
ctgctagaacacatcatcccaa

SEQ ID NO: 214979 - DNA, 22 bp, Artificial Sequence
  Synthetic oligonucleotide; TTC chr2 60526212 60526233 60526217 60526212 -
tgctagaacacatcatcccaaa

SEQ ID NO: 214980 - DNA, 22 bp, Artificial Sequence
  Synthetic oligonucleotide; CTG chr2 60526210 60526231 60526215 60526210 -
ctagaacacatcatcccaaaat

SEQ ID NO: 214981 - DNA, 22 bp, Artificial Sequence
  Synthetic oligonucleotide; CTA chr2 60526207 60526228 60526212 60526207 -
gaacacatcatcccaaaatatg

SEQ ID NO: 214982 - DNA, 22 bp, Artificial Sequence
  Synthetic oligonucleotide; TTC chr2 60526179 60526200 60526184 60526179 -
tgaatttgatcaaatcaccagt

SEQ ID NO: 214983 - DNA, 22 bp, Artificial Sequence
  Synthetic oligonucleotide; CTG chr2 60526177 60526198 60526182 60526177 -
aatttgatcaaatcaccagttt

SEQ ID NO: 214984 - DNA, 22 bp, Artificial Sequence
  Synthetic oligonucleotide; TTT chr2 60526172 60526193 60526177 60526172 -
gatcaaatcaccagtttctgaa

SEQ ID NO: 214985 - DNA, 22 bp, Artificial Sequence
  Synthetic oligonucleotide; TTG chr2 60526171 60526192 60526176 60526171 -
atcaaatcaccagtttctgaat

SEQ ID NO: 214986 - DNA, 22 bp, Artificial Sequence
  Synthetic oligonucleotide; TTT chr2 60526155 60526176 60526160 60526155 -
ctgaatttgatcaaatctagat

SEQ ID NO: 214987 - DNA, 22 bp, Artificial Sequence
  Synthetic oligonucleotide; TTC chr2 60526154 60526175 60526159 60526154 -
tgaatttgatcaaatctagatt

SEQ ID NO: 214988 - DNA, 22 bp, Artificial Sequence
  Synthetic oligonucleotide; CTG chr2 60526152 60526173 60526157 60526152 -
aatttgatcaaatctagatttt

SEQ ID NO: 214989 - DNA, 22 bp, Artificial Sequence
  Synthetic oligonucleotide; TTT chr2 60526147 60526168 60526152 60526147 -
gatcaaatctagattttgcaga

SEQ ID NO: 214990 - DNA, 22 bp, Artificial Sequence
  Synthetic oligonucleotide; TTG chr2 60526146 60526167 60526151 60526146 -
atcaaatctagattttgcagaa

SEQ ID NO: 214991 - DNA, 22 bp, Artificial Sequence
  Synthetic oligonucleotide; CTA chr2 60526136 60526157 60526141 60526136 -
gattttgcagaagttcagggtg

SEQ ID NO: 214992 - DNA, 22 bp, Artificial Sequence
  Synthetic oligonucleotide; TTT chr2 60526131 60526152 60526136 60526131 -
tgcagaagttcagggtgagaga

SEQ ID NO: 214993 - DNA, 22 bp, Artificial Sequence
  Synthetic oligonucleotide; TTT chr2 60526130 60526151 60526135 60526130 -
gcagaagttcagggtgagagaa

SEQ ID NO: 214994 - DNA, 22 bp, Artificial Sequence
  Synthetic oligonucleotide; TTG chr2 60526129 60526150 60526134 60526129 -
cagaagttcagggtgagagaaa

SEQ ID NO: 214995 - DNA, 22 bp, Artificial Sequence
  Synthetic oligonucleotide; TTC chr2 60526120 60526141 60526125 60526120 -
agggtgagagaaaccatgcctg

SEQ ID NO: 214996 - DNA, 22 bp, Artificial Sequence
  Synthetic oligonucleotide; CTG chr2 60526098 60526119 60526103 60526098 -
ttttatatctagaaagtgaaat

SEQ ID NO: 214997 - DNA, 22 bp, Artificial Sequence
  Synthetic oligonucleotide; TTT chr2 60526095 60526116 60526100 60526095 -
tatatctagaaagtgaaatcat

SEQ ID NO: 214998 - DNA, 22 bp, Artificial Sequence
  Synthetic oligonucleotide; TTT chr2 60526094 60526115 60526099 60526094 -
atatctagaaagtgaaatcatt

SEQ ID NO: 214999 - DNA, 22 bp, Artificial Sequence
  Synthetic oligonucleotide; TTA chr2 60526093 60526114 60526098 60526093 -
tatctagaaagtgaaatcattg

SEQ ID NO: 215000 - DNA, 22 bp, Artificial Sequence
  Synthetic oligonucleotide; CTA chr2 60526087 60526108 60526092 60526087 -
gaaagtgaaatcattgttatag

SEQ ID NO: 215001 - DNA, 22 bp, Artificial Sequence
  Synthetic oligonucleotide; TTG chr2 60526071 60526092 60526076 60526071 -
ttatagaaaaaacctactgtgg

SEQ ID NO: 215002 - DNA, 22 bp, Artificial Sequence
  Synthetic oligonucleotide; TTA chr2 60526068 60526089 60526073 60526068 -
tagaaaaaacctactgtggtta

SEQ ID NO: 215003 - DNA, 22 bp, Artificial Sequence
  Synthetic oligonucleotide; CTA chr2 60526055 60526076 60526060 60526055 -
ctgtggttagaaaaaaaccaca

SEQ ID NO: 215004 - DNA, 22 bp, Artificial Sequence
  Synthetic oligonucleotide; CTG chr2 60526052 60526073 60526057 60526052 -
tggttagaaaaaaaccacattc

SEQ ID NO: 215005 - DNA, 22 bp, Artificial Sequence
  Synthetic oligonucleotide; TTA chr2 60526046 60526067 60526051 60526046 -
gaaaaaaaccacattctttttt

SEQ ID NO: 215006 - DNA, 22 bp, Artificial Sequence
  Synthetic oligonucleotide; TTC chr2 60526030 60526051 60526035 60526030 -
ttttttcccagccctgctgcca

SEQ ID NO: 215007 - DNA, 22 bp, Artificial Sequence
  Synthetic oligonucleotide; CTT chr2 60526028 60526049 60526033 60526028 -
ttttcccagccctgctgccatc

SEQ ID NO: 215008 - DNA, 22 bp, Artificial Sequence
  Synthetic oligonucleotide; TTT chr2 60526027 60526048 60526032 60526027 -
tttcccagccctgctgccatcc

SEQ ID NO: 215009 - DNA, 22 bp, Artificial Sequence
  Synthetic oligonucleotide; TTT chr2 60526026 60526047 60526031 60526026 -
ttcccagccctgctgccatcct

SEQ ID NO: 215010 - DNA, 22 bp, Artificial Sequence
  Synthetic oligonucleotide; TTT chr2 60526025 60526046 60526030 60526025 -
tcccagccctgctgccatcctc

SEQ ID NO: 215011 - DNA, 22 bp, Artificial Sequence
  Synthetic oligonucleotide; TTT chr2 60526024 60526045 60526029 60526024 -
cccagccctgctgccatcctct

SEQ ID NO: 215012 - DNA, 22 bp, Artificial Sequence
  Synthetic oligonucleotide; TTC chr2 60526023 60526044 60526028 60526023 -
ccagccctgctgccatcctcta

SEQ ID NO: 215013 - DNA, 22 bp, Artificial Sequence
  Synthetic oligonucleotide; CTG chr2 60526014 60526035 60526019 60526014 -
ctgccatcctctaccagaaaat

SEQ ID NO: 215014 - DNA, 22 bp, Artificial Sequence
  Synthetic oligonucleotide; CTG chr2 60526011 60526032 60526016 60526011 -
ccatcctctaccagaaaataac

SEQ ID NO: 215015 - DNA, 22 bp, Artificial Sequence
  Synthetic oligonucleotide; CTC chr2 60526003 60526024 60526008 60526003 -
taccagaaaataacagtatctg

SEQ ID NO: 215016 - DNA, 22 bp, Artificial Sequence
  Synthetic oligonucleotide; CTA chr2 60526001 60526022 60526006 60526001 -
ccagaaaataacagtatctgcc

SEQ ID NO: 215017 - DNA, 22 bp, Artificial Sequence
  Synthetic oligonucleotide; CTG chr2 60525981 60526002 60525986 60525981 -
cctgtagtatgaagaccttcca

SEQ ID NO: 215018 - DNA, 22 bp, Artificial Sequence
  Synthetic oligonucleotide; CTG chr2 60525977 60525998 60525982 60525977 -
tagtatgaagaccttccaattg

SEQ ID NO: 215019 - DNA, 22 bp, Artificial Sequence
  Synthetic oligonucleotide; CTT chr2 60525962 60525983 60525967 60525962 -
ccaattgagagcattatgataa

SEQ ID NO: 215020 - DNA, 22 bp, Artificial Sequence
  Synthetic oligonucleotide; TTC chr2 60525961 60525982 60525966 60525961 -
caattgagagcattatgataaa

SEQ ID NO: 215021 - DNA, 22 bp, Artificial Sequence
  Synthetic oligonucleotide; TTG chr2 60525955 60525976 60525960 60525955 -
agagcattatgataaactattt

SEQ ID NO: 215022 - DNA, 22 bp, Artificial Sequence
  Synthetic oligonucleotide; TTA chr2 60525946 60525967 60525951 60525946 -
tgataaactatttttgattacc

SEQ ID NO: 215023 - DNA, 22 bp, Artificial Sequence
  Synthetic oligonucleotide; CTA chr2 60525936 60525957 60525941 60525936 -
tttttgattaccaaacacgaat

SEQ ID NO: 215024 - DNA, 22 bp, Artificial Sequence
  Synthetic oligonucleotide; TTT chr2 60525933 60525954 60525938 60525933 -
ttgattaccaaacacgaatgaa

SEQ ID NO: 215025 - DNA, 22 bp, Artificial Sequence
  Synthetic oligonucleotide; TTT chr2 60525932 60525953 60525937 60525932 -
tgattaccaaacacgaatgaag

SEQ ID NO: 215026 - DNA, 22 bp, Artificial Sequence
  Synthetic oligonucleotide; TTT chr2 60525931 60525952 60525936 60525931 -
gattaccaaacacgaatgaagg

SEQ ID NO: 215027 - DNA, 22 bp, Artificial Sequence
  Synthetic oligonucleotide; TTG chr2 60525930 60525951 60525935 60525930 -
attaccaaacacgaatgaagga

SEQ ID NO: 215028 - DNA, 22 bp, Artificial Sequence
  Synthetic oligonucleotide; TTA chr2 60525926 60525947 60525931 60525926 -
ccaaacacgaatgaaggaagaa

SEQ ID NO: 215029 - DNA, 22 bp, Artificial Sequence
  Synthetic oligonucleotide; TTA chr2 60525888 60525909 60525893 60525888 -
gtaaaggccttccaagtagaca

SEQ ID NO: 215030 - DNA, 22 bp, Artificial Sequence
  Synthetic oligonucleotide; CTT chr2 60525877 60525898 60525882 60525877 -
ccaagtagacatttacccttct

SEQ ID NO: 215031 - DNA, 22 bp, Artificial Sequence
  Synthetic oligonucleotide; TTC chr2 60525876 60525897 60525881 60525876 -
caagtagacatttacccttctg

SEQ ID NO: 215032 - DNA, 22 bp, Artificial Sequence
  Synthetic oligonucleotide; TTT chr2 60525863 60525884 60525868 60525863 -
acccttctgtgaaagccatgga

SEQ ID NO: 215033 - DNA, 22 bp, Artificial Sequence
  Synthetic oligonucleotide; TTA chr2 60525862 60525883 60525867 60525862 -
cccttctgtgaaagccatggag

SEQ ID NO: 215034 - DNA, 22 bp, Artificial Sequence
  Synthetic oligonucleotide; CTT chr2 60525857 60525878 60525862 60525857 -
ctgtgaaagccatggagaaatt

SEQ ID NO: 215035 - DNA, 22 bp, Artificial Sequence
  Synthetic oligonucleotide; TTC chr2 60525856 60525877 60525861 60525856 -
tgtgaaagccatggagaaatta

SEQ ID NO: 215036 - DNA, 22 bp, Artificial Sequence
  Synthetic oligonucleotide; CTG chr2 60525854 60525875 60525859 60525854 -
tgaaagccatggagaaattacc

SEQ ID NO: 215037 - DNA, 22 bp, Artificial Sequence
  Synthetic oligonucleotide; TTA chr2 60525834 60525855 60525839 60525834 -
ccaagactggtttggggggagg

SEQ ID NO: 215038 - DNA, 22 bp, Artificial Sequence
  Synthetic oligonucleotide; CTG chr2 60525825 60525846 60525830 60525825 -
gtttggggggagggcatttaag

SEQ ID NO: 215039 - DNA, 22 bp, Artificial Sequence
  Synthetic oligonucleotide; TTT chr2 60525821 60525842 60525826 60525821 -
ggggggagggcatttaaggtct

SEQ ID NO: 215040 - DNA, 22 bp, Artificial Sequence
  Synthetic oligonucleotide; TTG chr2 60525820 60525841 60525825 60525820 -
gggggagggcatttaaggtctt

SEQ ID NO: 215041 - DNA, 22 bp, Artificial Sequence
  Synthetic oligonucleotide; TTT chr2 60525806 60525827 60525811 60525806 -
aaggtcttttgggcattacaga

SEQ ID NO: 215042 - DNA, 22 bp, Artificial Sequence
  Synthetic oligonucleotide; TTA chr2 60525805 60525826 60525810 60525805 -
aggtcttttgggcattacagat

SEQ ID NO: 215043 - DNA, 22 bp, Artificial Sequence
  Synthetic oligonucleotide; CTT chr2 60525798 60525819 60525803 60525798 -
ttgggcattacagattttccag

SEQ ID NO: 215044 - DNA, 22 bp, Artificial Sequence
  Synthetic oligonucleotide; TTT chr2 60525797 60525818 60525802 60525797 -
tgggcattacagattttccaga

SEQ ID NO: 215045 - DNA, 22 bp, Artificial Sequence
  Synthetic oligonucleotide; TTT chr2 60525796 60525817 60525801 60525796 -
gggcattacagattttccagaa

SEQ ID NO: 215046 - DNA, 22 bp, Artificial Sequence
  Synthetic oligonucleotide; TTG chr2 60525795 60525816 60525800 60525795 -
ggcattacagattttccagaac

SEQ ID NO: 215047 - DNA, 22 bp, Artificial Sequence
  Synthetic oligonucleotide; TTA chr2 60525788 60525809 60525793 60525788 -
cagattttccagaaccaaactt

SEQ ID NO: 215048 - DNA, 22 bp, Artificial Sequence
  Synthetic oligonucleotide; TTT chr2 60525781 60525802 60525786 60525781 -
tccagaaccaaactttgacttt

SEQ ID NO: 215049 - DNA, 22 bp, Artificial Sequence
  Synthetic oligonucleotide; TTT chr2 60525780 60525801 60525785 60525780 -
ccagaaccaaactttgactttt

SEQ ID NO: 215050 - DNA, 22 bp, Artificial Sequence
  Synthetic oligonucleotide; TTC chr2 60525779 60525800 60525784 60525779 -
cagaaccaaactttgactttta

SEQ ID NO: 215051 - DNA, 22 bp, Artificial Sequence
  Synthetic oligonucleotide; CTT chr2 60525766 60525787 60525771 60525766 -
tgacttttagtgttaacagaga

SEQ ID NO: 215052 - DNA, 22 bp, Artificial Sequence
  Synthetic oligonucleotide; TTT chr2 60525765 60525786 60525770 60525765 -
gacttttagtgttaacagagag

SEQ ID NO: 215053 - DNA, 22 bp, Artificial Sequence
  Synthetic oligonucleotide; TTG chr2 60525764 60525785 60525769 60525764 -
acttttagtgttaacagagaga

SEQ ID NO: 215054 - DNA, 22 bp, Artificial Sequence
  Synthetic oligonucleotide; CTT chr2 60525760 60525781 60525765 60525760 -
ttagtgttaacagagagacact

SEQ ID NO: 215055 - DNA, 22 bp, Artificial Sequence
  Synthetic oligonucleotide; TTT chr2 60525759 60525780 60525764 60525759 -
tagtgttaacagagagacactg

SEQ ID NO: 215056 - DNA, 22 bp, Artificial Sequence
  Synthetic oligonucleotide; TTT chr2 60525758 60525779 60525763 60525758 -
agtgttaacagagagacactga

SEQ ID NO: 215057 - DNA, 22 bp, Artificial Sequence
  Synthetic oligonucleotide; TTA chr2 60525757 60525778 60525762 60525757 -
gtgttaacagagagacactgat

SEQ ID NO: 215058 - DNA, 22 bp, Artificial Sequence
  Synthetic oligonucleotide; TTA chr2 60525751 60525772 60525756 60525751 -
acagagagacactgatctgaaa

SEQ ID NO: 215059 - DNA, 22 bp, Artificial Sequence
  Synthetic oligonucleotide; CTG chr2 60525737 60525758 60525742 60525737 -
atctgaaaaccaggacacctgg

SEQ ID NO: 215060 - DNA, 22 bp, Artificial Sequence
  Synthetic oligonucleotide; CTG chr2 60525732 60525753 60525737 60525732 -
aaaaccaggacacctgggttct

SEQ ID NO: 215061 - DNA, 22 bp, Artificial Sequence
  Synthetic oligonucleotide; CTG chr2 60525716 60525737 60525721 60525716 -
ggttctgacccttattgtatca

SEQ ID NO: 215062 - DNA, 22 bp, Artificial Sequence
  Synthetic oligonucleotide; TTC chr2 60525711 60525732 60525716 60525711 -
tgacccttattgtatcatgctg

SEQ ID NO: 215063 - DNA, 22 bp, Artificial Sequence
  Synthetic oligonucleotide; CTG chr2 60525709 60525730 60525714 60525709 -
acccttattgtatcatgctgtg

SEQ ID NO: 215064 - DNA, 22 bp, Artificial Sequence
  Synthetic oligonucleotide; CTT chr2 60525703 60525724 60525708 60525703 -
attgtatcatgctgtgagattt

SEQ ID NO: 215065 - DNA, 22 bp, Artificial Sequence
  Synthetic oligonucleotide; TTA chr2 60525702 60525723 60525707 60525702 -
ttgtatcatgctgtgagatttt

SEQ ID NO: 215066 - DNA, 22 bp, Artificial Sequence
  Synthetic oligonucleotide; TTG chr2 60525699 60525720 60525704 60525699 -
tatcatgctgtgagattttggg

SEQ ID NO: 215067 - DNA, 22 bp, Artificial Sequence
  Synthetic oligonucleotide; CTG chr2 60525689 60525710 60525694 60525689 -
tgagattttgggctcccttcac

SEQ ID NO: 215068 - DNA, 22 bp, Artificial Sequence
  Synthetic oligonucleotide; TTT chr2 60525681 60525702 60525686 60525681 -
tgggctcccttcacctgttagc

SEQ ID NO: 215069 - DNA, 22 bp, Artificial Sequence
  Synthetic oligonucleotide; TTT chr2 60525680 60525701 60525685 60525680 -
gggctcccttcacctgttagca

SEQ ID NO: 215070 - DNA, 22 bp, Artificial Sequence
  Synthetic oligonucleotide; TTG chr2 60525679 60525700 60525684 60525679 -
ggctcccttcacctgttagcat

SEQ ID NO: 215071 - DNA, 22 bp, Artificial Sequence
  Synthetic oligonucleotide; CTC chr2 60525674 60525695 60525679 60525674 -
ccttcacctgttagcatttgtt

SEQ ID NO: 215072 - DNA, 22 bp, Artificial Sequence
  Synthetic oligonucleotide; CTT chr2 60525670 60525691 60525675 60525670 -
cacctgttagcatttgtttcct

SEQ ID NO: 215073 - DNA, 22 bp, Artificial Sequence
  Synthetic oligonucleotide; TTC chr2 60525669 60525690 60525674 60525669 -
acctgttagcatttgtttcctt

SEQ ID NO: 215074 - DNA, 22 bp, Artificial Sequence
  Synthetic oligonucleotide; CTG chr2 60525664 60525685 60525669 60525664 -
ttagcatttgtttccttgtctt

SEQ ID NO: 215075 - DNA, 22 bp, Artificial Sequence
  Synthetic oligonucleotide; TTA chr2 60525661 60525682 60525666 60525661 -
gcatttgtttccttgtcttgta

SEQ ID NO: 215076 - DNA, 22 bp, Artificial Sequence
  Synthetic oligonucleotide; TTT chr2 60525655 60525676 60525660 60525655 -
gtttccttgtcttgtaaagtag

SEQ ID NO: 215077 - DNA, 22 bp, Artificial Sequence
  Synthetic oligonucleotide; TTG chr2 60525654 60525675 60525659 60525654 -
tttccttgtcttgtaaagtagg

SEQ ID NO: 215078 - DNA, 22 bp, Artificial Sequence
  Synthetic oligonucleotide; TTT chr2 60525651 60525672 60525656 60525651 -
ccttgtcttgtaaagtaggtaa

SEQ ID NO: 215079 - DNA, 22 bp, Artificial Sequence
  Synthetic oligonucleotide; TTC chr2 60525650 60525671 60525655 60525650 -
cttgtcttgtaaagtaggtaaa

SEQ ID NO: 215080 - DNA, 22 bp, Artificial Sequence
  Synthetic oligonucleotide; CTT chr2 60525647 60525668 60525652 60525647 -
gtcttgtaaagtaggtaaaata

SEQ ID NO: 215081 - DNA, 22 bp, Artificial Sequence
  Synthetic oligonucleotide; TTG chr2 60525646 60525667 60525651 60525646 -
tcttgtaaagtaggtaaaatag

SEQ ID NO: 215082 - DNA, 22 bp, Artificial Sequence
  Synthetic oligonucleotide; CTT chr2 60525642 60525663 60525647 60525642 -
gtaaagtaggtaaaatagatag

SEQ ID NO: 215083 - DNA, 22 bp, Artificial Sequence
  Synthetic oligonucleotide; TTG chr2 60525641 60525662 60525646 60525641 -
taaagtaggtaaaatagatagt

SEQ ID NO: 215084 - DNA, 22 bp, Artificial Sequence
  Synthetic oligonucleotide; TTT chr2 60525617 60525638 60525622 60525617 -
ggactgggtgggtctctaagtc

SEQ ID NO: 215085 - DNA, 22 bp, Artificial Sequence
  Synthetic oligonucleotide; TTG chr2 60525616 60525637 60525621 60525616 -
gactgggtgggtctctaagtcc

SEQ ID NO: 215086 - DNA, 22 bp, Artificial Sequence
  Synthetic oligonucleotide; CTG chr2 60525611 60525632 60525616 60525611 -
ggtgggtctctaagtccccatg

SEQ ID NO: 215087 - DNA, 22 bp, Artificial Sequence
  Synthetic oligonucleotide; CTC chr2 60525601 60525622 60525606 60525601 -
taagtccccatgatgttctagc

SEQ ID NO: 215088 - DNA, 22 bp, Artificial Sequence
  Synthetic oligonucleotide; CTA chr2 60525599 60525620 60525604 60525599 -
agtccccatgatgttctagcat

SEQ ID NO: 215089 - DNA, 22 bp, Artificial Sequence
  Synthetic oligonucleotide; TTC chr2 60525583 60525604 60525588 60525583 -
tagcatagtatgaacaccactg

SEQ ID NO: 215090 - DNA, 22 bp, Artificial Sequence
  Synthetic oligonucleotide; CTA chr2 60525581 60525602 60525586 60525581 -
gcatagtatgaacaccactgac

SEQ ID NO: 215091 - DNA, 22 bp, Artificial Sequence
  Synthetic oligonucleotide; CTG chr2 60525561 60525582 60525566 60525561 -
accagttttctccctgctattt

SEQ ID NO: 215092 - DNA, 22 bp, Artificial Sequence
  Synthetic oligonucleotide; TTT chr2 60525553 60525574 60525558 60525553 -
tctccctgctattttttggaat

SEQ ID NO: 215093 - DNA, 22 bp, Artificial Sequence
  Synthetic oligonucleotide; TTT chr2 60525552 60525573 60525557 60525552 -
ctccctgctattttttggaatc

SEQ ID NO: 215094 - DNA, 22 bp, Artificial Sequence
  Synthetic oligonucleotide; TTC chr2 60525551 60525572 60525556 60525551 -
tccctgctattttttggaatct

SEQ ID NO: 215095 - DNA, 22 bp, Artificial Sequence
  Synthetic oligonucleotide; CTC chr2 60525549 60525570 60525554 60525549 -
cctgctattttttggaatctag

SEQ ID NO: 215096 - DNA, 22 bp, Artificial Sequence
  Synthetic oligonucleotide; CTG chr2 60525545 60525566 60525550 60525545 -
ctattttttggaatctagttgc

SEQ ID NO: 215097 - DNA, 22 bp, Artificial Sequence
  Synthetic oligonucleotide; CTA chr2 60525542 60525563 60525547 60525542 -
ttttttggaatctagttgctga

SEQ ID NO: 215098 - DNA, 22 bp, Artificial Sequence
  Synthetic oligonucleotide; TTT chr2 60525539 60525560 60525544 60525539 -
tttggaatctagttgctgaatg

SEQ ID NO: 215099 - DNA, 22 bp, Artificial Sequence
  Synthetic oligonucleotide; TTT chr2 60525538 60525559 60525543 60525538 -
ttggaatctagttgctgaatgg

SEQ ID NO: 215100 - DNA, 22 bp, Artificial Sequence
  Synthetic oligonucleotide; TTT chr2 60525537 60525558 60525542 60525537 -
tggaatctagttgctgaatggg

SEQ ID NO: 215101 - DNA, 22 bp, Artificial Sequence
  Synthetic oligonucleotide; TTT chr2 60525536 60525557 60525541 60525536 -
ggaatctagttgctgaatgggg

SEQ ID NO: 215102 - DNA, 22 bp, Artificial Sequence
  Synthetic oligonucleotide; TTG chr2 60525535 60525556 60525540 60525535 -
gaatctagttgctgaatggggc

SEQ ID NO: 215103 - DNA, 22 bp, Artificial Sequence
  Synthetic oligonucleotide; CTA chr2 60525528 60525549 60525533 60525528 -
gttgctgaatggggctcacctg

SEQ ID NO: 215104 - DNA, 22 bp, Artificial Sequence
  Synthetic oligonucleotide; TTG chr2 60525524 60525545 60525529 60525524 -
ctgaatggggctcacctgcaaa

SEQ ID NO: 215105 - DNA, 22 bp, Artificial Sequence
  Synthetic oligonucleotide; CTG chr2 60525521 60525542 60525526 60525521 -
aatggggctcacctgcaaagac

SEQ ID NO: 215106 - DNA, 22 bp, Artificial Sequence
  Synthetic oligonucleotide; CTC chr2 60525511 60525532 60525516 60525511 -
acctgcaaagacagcagaatat

SEQ ID NO: 215107 - DNA, 22 bp, Artificial Sequence
  Synthetic oligonucleotide; CTG chr2 60525506 60525527 60525511 60525506 -
caaagacagcagaatattattt

SEQ ID NO: 215108 - DNA, 22 bp, Artificial Sequence
  Synthetic oligonucleotide; TTA chr2 60525487 60525508 60525492 60525487 -
ttttcttgatttgcctcaaaga

SEQ ID NO: 215109 - DNA, 22 bp, Artificial Sequence
  Synthetic oligonucleotide; TTT chr2 60525484 60525505 60525489 60525484 -
tcttgatttgcctcaaagatgg

SEQ ID NO: 215110 - DNA, 22 bp, Artificial Sequence
  Synthetic oligonucleotide; TTT chr2 60525483 60525504 60525488 60525483 -
cttgatttgcctcaaagatgga

SEQ ID NO: 215111 - DNA, 22 bp, Artificial Sequence
  Synthetic oligonucleotide; TTC chr2 60525482 60525503 60525487 60525482 -
ttgatttgcctcaaagatggaa

SEQ ID NO: 215112 - DNA, 22 bp, Artificial Sequence
  Synthetic oligonucleotide; CTT chr2 60525480 60525501 60525485 60525480 -
gatttgcctcaaagatggaagc

SEQ ID NO: 215113 - DNA, 22 bp, Artificial Sequence
  Synthetic oligonucleotide; TTG chr2 60525479 60525500 60525484 60525479 -
atttgcctcaaagatggaagct

SEQ ID NO: 215114 - DNA, 22 bp, Artificial Sequence
  Synthetic oligonucleotide; TTT chr2 60525475 60525496 60525480 60525475 -
gcctcaaagatggaagctatgg

SEQ ID NO: 215115 - DNA, 22 bp, Artificial Sequence
  Synthetic oligonucleotide; TTG chr2 60525474 60525495 60525479 60525474 -
cctcaaagatggaagctatggt

SEQ ID NO: 215116 - DNA, 22 bp, Artificial Sequence
  Synthetic oligonucleotide; CTC chr2 60525470 60525491 60525475 60525470 -
aaagatggaagctatggtggag

SEQ ID NO: 215117 - DNA, 22 bp, Artificial Sequence
  Synthetic oligonucleotide; CTA chr2 60525456 60525477 60525461 60525456 -
tggtggagattaaggcttggat

SEQ ID NO: 215118 - DNA, 22 bp, Artificial Sequence
  Synthetic oligonucleotide; TTA chr2 60525444 60525465 60525449 60525444 -
aggcttggattcgtgattcccc

SEQ ID NO: 215119 - DNA, 22 bp, Artificial Sequence
  Synthetic oligonucleotide; CTT chr2 60525438 60525459 60525443 60525438 -
ggattcgtgattccccaacaga

SEQ ID NO: 215120 - DNA, 22 bp, Artificial Sequence
  Synthetic oligonucleotide; TTG chr2 60525437 60525458 60525442 60525437 -
gattcgtgattccccaacagaa

SEQ ID NO: 215121 - DNA, 22 bp, Artificial Sequence
  Synthetic oligonucleotide; TTC chr2 60525432 60525453 60525437 60525432 -
gtgattccccaacagaaagctt

SEQ ID NO: 215122 - DNA, 22 bp, Artificial Sequence
  Synthetic oligonucleotide; TTC chr2 60525425 60525446 60525430 60525425 -
cccaacagaaagcttaaaggca

SEQ ID NO: 215123 - DNA, 22 bp, Artificial Sequence
  Synthetic oligonucleotide; CTT chr2 60525410 60525431 60525415 60525410 -
aaaggcatctttcaaattgctg

SEQ ID NO: 215124 - DNA, 22 bp, Artificial Sequence
  Synthetic oligonucleotide; TTA chr2 60525409 60525430 60525414 60525409 -
aaggcatctttcaaattgctgg

SEQ ID NO: 215125 - DNA, 22 bp, Artificial Sequence
  Synthetic oligonucleotide; CTT chr2 60525399 60525420 60525404 60525399 -
tcaaattgctggaagcaaaatt

SEQ ID NO: 215126 - DNA, 22 bp, Artificial Sequence
  Synthetic oligonucleotide; TTT chr2 60525398 60525419 60525403 60525398 -
caaattgctggaagcaaaattg

SEQ ID NO: 215127 - DNA, 22 bp, Artificial Sequence
  Synthetic oligonucleotide; TTC chr2 60525397 60525418 60525402 60525397 -
aaattgctggaagcaaaattga

SEQ ID NO: 215128 - DNA, 22 bp, Artificial Sequence
  Synthetic oligonucleotide; TTG chr2 60525391 60525412 60525396 60525391 -
ctggaagcaaaattgaagtgca

SEQ ID NO: 215129 - DNA, 22 bp, Artificial Sequence
  Synthetic oligonucleotide; CTG chr2 60525388 60525409 60525393 60525388 -
gaagcaaaattgaagtgcagta

SEQ ID NO: 215130 - DNA, 22 bp, Artificial Sequence
  Synthetic oligonucleotide; TTG chr2 60525376 60525397 60525381 60525376 -
aagtgcagtataatggaatggt

SEQ ID NO: 215131 - DNA, 22 bp, Artificial Sequence
  Synthetic oligonucleotide; TTC chr2 60525346 60525367 60525351 60525346 -
acagaagtttccagccttataa

SEQ ID NO: 215132 - DNA, 22 bp, Artificial Sequence
  Synthetic oligonucleotide; TTT chr2 60525336 60525357 60525341 60525336 -
ccagccttataagatttctcca

SEQ ID NO: 215133 - DNA, 22 bp, Artificial Sequence
  Synthetic oligonucleotide; TTC chr2 60525335 60525356 60525340 60525335 -
cagccttataagatttctccat

SEQ ID NO: 215134 - DNA, 22 bp, Artificial Sequence
  Synthetic oligonucleotide; CTT chr2 60525328 60525349 60525333 60525328 -
ataagatttctccatcttttaa

SEQ ID NO: 215135 - DNA, 22 bp, Artificial Sequence
  Synthetic oligonucleotide; TTA chr2 60525327 60525348 60525332 60525327 -
taagatttctccatcttttaat

SEQ ID NO: 215136 - DNA, 22 bp, Artificial Sequence
  Synthetic oligonucleotide; TTT chr2 60525319 60525340 60525324 60525319 -
ctccatcttttaattgttgcaa

SEQ ID NO: 215137 - DNA, 22 bp, Artificial Sequence
  Synthetic oligonucleotide; TTC chr2 60525318 60525339 60525323 60525318 -
tccatcttttaattgttgcaag

SEQ ID NO: 215138 - DNA, 22 bp, Artificial Sequence
  Synthetic oligonucleotide; CTC chr2 60525316 60525337 60525321 60525316 -
catcttttaattgttgcaagct

SEQ ID NO: 215139 - DNA, 22 bp, Artificial Sequence
  Synthetic oligonucleotide; CTT chr2 60525310 60525331 60525315 60525310 -
ttaattgttgcaagctgttttt

SEQ ID NO: 215140 - DNA, 22 bp, Artificial Sequence
  Synthetic oligonucleotide; TTT chr2 60525309 60525330 60525314 60525309 -
taattgttgcaagctgtttttt

SEQ ID NO: 215141 - DNA, 22 bp, Artificial Sequence
  Synthetic oligonucleotide; TTT chr2 60525308 60525329 60525313 60525308 -
aattgttgcaagctgttttttt

SEQ ID NO: 215142 - DNA, 22 bp, Artificial Sequence
  Synthetic oligonucleotide; TTA chr2 60525307 60525328 60525312 60525307 -
attgttgcaagctgtttttttt

SEQ ID NO: 215143 - DNA, 22 bp, Artificial Sequence
  Synthetic oligonucleotide; TTG chr2 60525303 60525324 60525308 60525303 -
ttgcaagctgttttttttgaaa

SEQ ID NO: 215144 - DNA, 22 bp, Artificial Sequence
  Synthetic oligonucleotide; TTG chr2 60525300 60525321 60525305 60525300 -
caagctgttttttttgaaaaac

SEQ ID NO: 215145 - DNA, 22 bp, Artificial Sequence
  Synthetic oligonucleotide; CTG chr2 60525293 60525314 60525298 60525293 -
ttttttttgaaaaactccaaag

SEQ ID NO: 215146 - DNA, 22 bp, Artificial Sequence
  Synthetic oligonucleotide; TTT chr2 60525290 60525311 60525295 60525290 -
tttttgaaaaactccaaagaat

SEQ ID NO: 215147 - DNA, 22 bp, Artificial Sequence
  Synthetic oligonucleotide; TTT chr2 60525289 60525310 60525294 60525289 -
ttttgaaaaactccaaagaatg

SEQ ID NO: 215148 - DNA, 22 bp, Artificial Sequence
  Synthetic oligonucleotide; TTT chr2 60525288 60525309 60525293 60525288 -
tttgaaaaactccaaagaatgt

SEQ ID NO: 215149 - DNA, 22 bp, Artificial Sequence
  Synthetic oligonucleotide; TTT chr2 60525287 60525308 60525292 60525287 -
ttgaaaaactccaaagaatgta

SEQ ID NO: 215150 - DNA, 22 bp, Artificial Sequence
  Synthetic oligonucleotide; TTT chr2 60525286 60525307 60525291 60525286 -
tgaaaaactccaaagaatgtaa

SEQ ID NO: 215151 - DNA, 22 bp, Artificial Sequence
  Synthetic oligonucleotide; TTT chr2 60525285 60525306 60525290 60525285 -
gaaaaactccaaagaatgtaat

SEQ ID NO: 215152 - DNA, 22 bp, Artificial Sequence
  Synthetic oligonucleotide; TTG chr2 60525284 60525305 60525289 60525284 -
aaaaactccaaagaatgtaatg

SEQ ID NO: 215153 - DNA, 22 bp, Artificial Sequence
  Synthetic oligonucleotide; CTC chr2 60525276 60525297 60525281 60525276 -
caaagaatgtaatgtgtatttt

SEQ ID NO: 215154 - DNA, 22 bp, Artificial Sequence
  Synthetic oligonucleotide; TTT chr2 60525255 60525276 60525260 60525255 -
tctccaagtttgcttttttggg

SEQ ID NO: 215155 - DNA, 22 bp, Artificial Sequence
  Synthetic oligonucleotide; TTT chr2 60525254 60525275 60525259 60525254 -
ctccaagtttgcttttttgggc

SEQ ID NO: 215156 - DNA, 22 bp, Artificial Sequence
  Synthetic oligonucleotide; TTC chr2 60525253 60525274 60525258 60525253 -
tccaagtttgcttttttgggca

SEQ ID NO: 215157 - DNA, 22 bp, Artificial Sequence
  Synthetic oligonucleotide; CTC chr2 60525251 60525272 60525256 60525251 -
caagtttgcttttttgggcaaa

SEQ ID NO: 215158 - DNA, 22 bp, Artificial Sequence
  Synthetic oligonucleotide; TTT chr2 60525244 60525265 60525249 60525244 -
gcttttttgggcaaatgtaact

SEQ ID NO: 215159 - DNA, 22 bp, Artificial Sequence
  Synthetic oligonucleotide; TTG chr2 60525243 60525264 60525248 60525243 -
cttttttgggcaaatgtaacta

SEQ ID NO: 215160 - DNA, 22 bp, Artificial Sequence
  Synthetic oligonucleotide; CTT chr2 60525240 60525261 60525245 60525240 -
ttttgggcaaatgtaactacat

SEQ ID NO: 215161 - DNA, 22 bp, Artificial Sequence
  Synthetic oligonucleotide; TTT chr2 60525239 60525260 60525244 60525239 -
tttgggcaaatgtaactacatc

SEQ ID NO: 215162 - DNA, 22 bp, Artificial Sequence
  Synthetic oligonucleotide; TTT chr2 60525238 60525259 60525243 60525238 -
ttgggcaaatgtaactacatca

SEQ ID NO: 215163 - DNA, 22 bp, Artificial Sequence
  Synthetic oligonucleotide; TTT chr2 60525237 60525258 60525242 60525237 -
tgggcaaatgtaactacatcaa

SEQ ID NO: 215164 - DNA, 22 bp, Artificial Sequence
  Synthetic oligonucleotide; TTT chr2 60525236 60525257 60525241 60525236 -
gggcaaatgtaactacatcaaa

SEQ ID NO: 215165 - DNA, 22 bp, Artificial Sequence
  Synthetic oligonucleotide; TTG chr2 60525235 60525256 60525240 60525235 -
ggcaaatgtaactacatcaaaa

SEQ ID NO: 215166 - DNA, 22 bp, Artificial Sequence
  Synthetic oligonucleotide; CTA chr2 60525221 60525242 60525226 60525221 -
catcaaaatagaagtacgtttt

SEQ ID NO: 215167 - DNA, 22 bp, Artificial Sequence
  Synthetic oligonucleotide; TTT chr2 60525200 60525221 60525205 60525200 -
ttgaaaaagaaatagttgaatt

SEQ ID NO: 215168 - DNA, 22 bp, Artificial Sequence
  Synthetic oligonucleotide; TTT chr2 60525199 60525220 60525204 60525199 -
tgaaaaagaaatagttgaattc

SEQ ID NO: 215169 - DNA, 22 bp, Artificial Sequence
  Synthetic oligonucleotide; TTT chr2 60525198 60525219 60525203 60525198 -
gaaaaagaaatagttgaattca

SEQ ID NO: 215170 - DNA, 22 bp, Artificial Sequence
  Synthetic oligonucleotide; TTG chr2 60525197 60525218 60525202 60525197 -
aaaaagaaatagttgaattcaa

SEQ ID NO: 215171 - DNA, 22 bp, Artificial Sequence
  Synthetic oligonucleotide; TTG chr2 60525182 60525203 60525187 60525182 -
aattcaaacaaccaggtatttt

SEQ ID NO: 215172 - DNA, 22 bp, Artificial Sequence
  Synthetic oligonucleotide; TTC chr2 60525177 60525198 60525182 60525177 -
aaacaaccaggtattttaaatt

SEQ ID NO: 215173 - DNA, 22 bp, Artificial Sequence
  Synthetic oligonucleotide; TTT chr2 60525161 60525182 60525166 60525161 -
taaattcaattaactgactgaa

SEQ ID NO: 215174 - DNA, 22 bp, Artificial Sequence
  Synthetic oligonucleotide; TTT chr2 60525160 60525181 60525165 60525160 -
aaattcaattaactgactgaat

SEQ ID NO: 215175 - DNA, 22 bp, Artificial Sequence
  Synthetic oligonucleotide; TTA chr2 60525159 60525180 60525164 60525159 -
aattcaattaactgactgaatt

SEQ ID NO: 215176 - DNA, 22 bp, Artificial Sequence
  Synthetic oligonucleotide; TTC chr2 60525154 60525175 60525159 60525154 -
aattaactgactgaattcagtg

SEQ ID NO: 215177 - DNA, 22 bp, Artificial Sequence
  Synthetic oligonucleotide; TTA chr2 60525149 60525170 60525154 60525149 -
actgactgaattcagtgatatt

SEQ ID NO: 215178 - DNA, 22 bp, Artificial Sequence
  Synthetic oligonucleotide; CTG chr2 60525145 60525166 60525150 60525145 -
actgaattcagtgatattttcc

SEQ ID NO: 215179 - DNA, 22 bp, Artificial Sequence
  Synthetic oligonucleotide; CTG chr2 60525141 60525162 60525146 60525141 -
aattcagtgatattttcctcct

SEQ ID NO: 215180 - DNA, 22 bp, Artificial Sequence
  Synthetic oligonucleotide; TTC chr2 60525136 60525157 60525141 60525136 -
agtgatattttcctccttcctc

SEQ ID NO: 215181 - DNA, 22 bp, Artificial Sequence
  Synthetic oligonucleotide; TTT chr2 60525126 60525147 60525131 60525126 -
tcctccttcctcctcccaaaag

SEQ ID NO: 215182 - DNA, 22 bp, Artificial Sequence
  Synthetic oligonucleotide; TTT chr2 60525125 60525146 60525130 60525125 -
cctccttcctcctcccaaaagc

SEQ ID NO: 215183 - DNA, 22 bp, Artificial Sequence
  Synthetic oligonucleotide; TTC chr2 60525124 60525145 60525129 60525124 -
ctccttcctcctcccaaaagct

SEQ ID NO: 215184 - DNA, 22 bp, Artificial Sequence
  Synthetic oligonucleotide; CTC chr2 60525121 60525142 60525126 60525121 -
cttcctcctcccaaaagctggt

SEQ ID NO: 215185 - DNA, 22 bp, Artificial Sequence
  Synthetic oligonucleotide; CTT chr2 60525118 60525139 60525123 60525118 -
cctcctcccaaaagctggtttc

SEQ ID NO: 215186 - DNA, 22 bp, Artificial Sequence
  Synthetic oligonucleotide; TTC chr2 60525117 60525138 60525122 60525117 -
ctcctcccaaaagctggtttct

SEQ ID NO: 215187 - DNA, 22 bp, Artificial Sequence
  Synthetic oligonucleotide; CTC chr2 60525114 60525135 60525119 60525114 -
ctcccaaaagctggtttctctg

SEQ ID NO: 215188 - DNA, 22 bp, Artificial Sequence
  Synthetic oligonucleotide; CTC chr2 60525111 60525132 60525116 60525111 -
ccaaaagctggtttctctgtat

SEQ ID NO: 215189 - DNA, 22 bp, Artificial Sequence
  Synthetic oligonucleotide; CTG chr2 60525101 60525122 60525106 60525101 -
gtttctctgtatggacatagcc

SEQ ID NO: 215190 - DNA, 22 bp, Artificial Sequence
  Synthetic oligonucleotide; TTT chr2 60525097 60525118 60525102 60525097 -
ctctgtatggacatagcctaca

SEQ ID NO: 215191 - DNA, 22 bp, Artificial Sequence
  Synthetic oligonucleotide; TTC chr2 60525096 60525117 60525101 60525096 -
tctgtatggacatagcctacat

SEQ ID NO: 215192 - DNA, 22 bp, Artificial Sequence
  Synthetic oligonucleotide; CTC chr2 60525094 60525115 60525099 60525094 -
tgtatggacatagcctacatat

SEQ ID NO: 215193 - DNA, 22 bp, Artificial Sequence
  Synthetic oligonucleotide; CTG chr2 60525092 60525113 60525097 60525092 -
tatggacatagcctacatatgc

SEQ ID NO: 215194 - DNA, 22 bp, Artificial Sequence
  Synthetic oligonucleotide; CTA chr2 60525077 60525098 60525082 60525077 -
catatgctgagtccctggagtt

SEQ ID NO: 215195 - DNA, 22 bp, Artificial Sequence
  Synthetic oligonucleotide; CTG chr2 60525068 60525089 60525073 60525068 -
agtccctggagttaggaatttt

SEQ ID NO: 215196 - DNA, 22 bp, Artificial Sequence
  Synthetic oligonucleotide; CTG chr2 60525060 60525081 60525065 60525060 -
gagttaggaatttttgcttgtt

SEQ ID NO: 215197 - DNA, 22 bp, Artificial Sequence
  Synthetic oligonucleotide; TTA chr2 60525054 60525075 60525059 60525054 -
ggaatttttgcttgttaaaggc

SEQ ID NO: 215198 - DNA, 22 bp, Artificial Sequence
  Synthetic oligonucleotide; TTT chr2 60525047 60525068 60525052 60525047 -
ttgcttgttaaaggcatccgat

SEQ ID NO: 215199 - DNA, 22 bp, Artificial Sequence
  Synthetic oligonucleotide; TTT chr2 60525046 60525067 60525051 60525046 -
tgcttgttaaaggcatccgatg

SEQ ID NO: 215200 - DNA, 22 bp, Artificial Sequence
  Synthetic oligonucleotide; TTT chr2 60525045 60525066 60525050 60525045 -
gcttgttaaaggcatccgatgc

SEQ ID NO: 215201 - DNA, 22 bp, Artificial Sequence
  Synthetic oligonucleotide; TTG chr2 60525044 60525065 60525049 60525044 -
cttgttaaaggcatccgatgca

SEQ ID NO: 215202 - DNA, 22 bp, Artificial Sequence
  Synthetic oligonucleotide; CTT chr2 60525041 60525062 60525046 60525041 -
gttaaaggcatccgatgcaaca

SEQ ID NO: 215203 - DNA, 22 bp, Artificial Sequence
  Synthetic oligonucleotide; TTG chr2 60525040 60525061 60525045 60525040 -
ttaaaggcatccgatgcaacat

SEQ ID NO: 215204 - DNA, 22 bp, Artificial Sequence
  Synthetic oligonucleotide; TTA chr2 60525037 60525058 60525042 60525037 -
aaggcatccgatgcaacatgtt

SEQ ID NO: 215205 - DNA, 22 bp, Artificial Sequence
  Synthetic oligonucleotide; TTT chr2 60525014 60525035 60525019 60525014 -
agaagaactctccctctgttag

SEQ ID NO: 215206 - DNA, 22 bp, Artificial Sequence
  Synthetic oligonucleotide; TTA chr2 60525013 60525034 60525018 60525013 -
gaagaactctccctctgttagt

SEQ ID NO: 215207 - DNA, 22 bp, Artificial Sequence
  Synthetic oligonucleotide; CTC chr2 60525004 60525025 60525009 60525004 -
tccctctgttagtgttgaagac

SEQ ID NO: 215208 - DNA, 22 bp, Artificial Sequence
  Synthetic oligonucleotide; CTC chr2 60525002 60525023 60525007 60525002 -
cctctgttagtgttgaagacag

SEQ ID NO: 215209 - DNA, 22 bp, Artificial Sequence
  Synthetic oligonucleotide; CTC chr2 60524998 60525019 60525003 60524998 -
tgttagtgttgaagacagcata

SEQ ID NO: 215210 - DNA, 22 bp, Artificial Sequence
  Synthetic oligonucleotide; CTG chr2 60524996 60525017 60525001 60524996 -
ttagtgttgaagacagcataaa

SEQ ID NO: 215211 - DNA, 22 bp, Artificial Sequence
  Synthetic oligonucleotide; TTA chr2 60524993 60525014 60524998 60524993 -
gtgttgaagacagcataaattg

SEQ ID NO: 215212 - DNA, 22 bp, Artificial Sequence
  Synthetic oligonucleotide; TTG chr2 60524987 60525008 60524992 60524987 -
aagacagcataaattgagggaa

SEQ ID NO: 215213 - DNA, 22 bp, Artificial Sequence
  Synthetic oligonucleotide; TTG chr2 60524971 60524992 60524976 60524971 -
agggaaaatgttctttttttat

SEQ ID NO: 215214 - DNA, 22 bp, Artificial Sequence
  Synthetic oligonucleotide; TTC chr2 60524958 60524979 60524963 60524958 -
tttttttattcatcatgtaggt

SEQ ID NO: 215215 - DNA, 22 bp, Artificial Sequence
  Synthetic oligonucleotide; CTT chr2 60524956 60524977 60524961 60524956 -
tttttattcatcatgtaggtaa

SEQ ID NO: 215216 - DNA, 22 bp, Artificial Sequence
  Synthetic oligonucleotide; TTT chr2 60524955 60524976 60524960 60524955 -
ttttattcatcatgtaggtaaa

SEQ ID NO: 215217 - DNA, 22 bp, Artificial Sequence
  Synthetic oligonucleotide; TTT chr2 60524954 60524975 60524959 60524954 -
tttattcatcatgtaggtaaaa

SEQ ID NO: 215218 - DNA, 22 bp, Artificial Sequence
  Synthetic oligonucleotide; TTT chr2 60524953 60524974 60524958 60524953 -
ttattcatcatgtaggtaaaag

SEQ ID NO: 215219 - DNA, 22 bp, Artificial Sequence
  Synthetic oligonucleotide; TTT chr2 60524952 60524973 60524957 60524952 -
tattcatcatgtaggtaaaagc

SEQ ID NO: 215220 - DNA, 22 bp, Artificial Sequence
  Synthetic oligonucleotide; TTT chr2 60524951 60524972 60524956 60524951 -
attcatcatgtaggtaaaagca

SEQ ID NO: 215221 - DNA, 22 bp, Artificial Sequence
  Synthetic oligonucleotide; TTA chr2 60524950 60524971 60524955 60524950 -
ttcatcatgtaggtaaaagcat

SEQ ID NO: 215222 - DNA, 22 bp, Artificial Sequence
  Synthetic oligonucleotide; TTC chr2 60524947 60524968 60524952 60524947 -
atcatgtaggtaaaagcatatg

SEQ ID NO: 215223 - DNA, 22 bp, Artificial Sequence
  Synthetic oligonucleotide; CTG chr2 60524920 60524941 60524925 60524920 -
ttctgggacatgcgatctttgc

SEQ ID NO: 215224 - DNA, 22 bp, Artificial Sequence
  Synthetic oligonucleotide; TTC chr2 60524917 60524938 60524922 60524917 -
tgggacatgcgatctttgcaat

SEQ ID NO: 215225 - DNA, 22 bp, Artificial Sequence
  Synthetic oligonucleotide; CTG chr2 60524915 60524936 60524920 60524915 -
ggacatgcgatctttgcaatcc

SEQ ID NO: 215226 - DNA, 22 bp, Artificial Sequence
  Synthetic oligonucleotide; CTT chr2 60524901 60524922 60524906 60524901 -
tgcaatccattttttaaacttg

SEQ ID NO: 215227 - DNA, 22 bp, Artificial Sequence
  Synthetic oligonucleotide; TTT chr2 60524900 60524921 60524905 60524900 -
gcaatccattttttaaacttgg

SEQ ID NO: 215228 - DNA, 22 bp, Artificial Sequence
  Synthetic oligonucleotide; TTG chr2 60524899 60524920 60524904 60524899 -
caatccattttttaaacttggt

SEQ ID NO: 215229 - DNA, 22 bp, Artificial Sequence
  Synthetic oligonucleotide; TTT chr2 60524889 60524910 60524894 60524889 -
tttaaacttggtgtttaccatt

SEQ ID NO: 215230 - DNA, 22 bp, Artificial Sequence
  Synthetic oligonucleotide; TTT chr2 60524888 60524909 60524893 60524888 -
ttaaacttggtgtttaccattg

SEQ ID NO: 215231 - DNA, 22 bp, Artificial Sequence
  Synthetic oligonucleotide; TTT chr2 60524887 60524908 60524892 60524887 -
taaacttggtgtttaccattgg

SEQ ID NO: 215232 - DNA, 22 bp, Artificial Sequence
  Synthetic oligonucleotide; TTT chr2 60524886 60524907 60524891 60524886 -
aaacttggtgtttaccattggc

SEQ ID NO: 215233 - DNA, 22 bp, Artificial Sequence
  Synthetic oligonucleotide; TTA chr2 60524885 60524906 60524890 60524885 -
aacttggtgtttaccattggct

SEQ ID NO: 215234 - DNA, 22 bp, Artificial Sequence
  Synthetic oligonucleotide; CTT chr2 60524880 60524901 60524885 60524880 -
ggtgtttaccattggcttttag

SEQ ID NO: 215235 - DNA, 22 bp, Artificial Sequence
  Synthetic oligonucleotide; TTG chr2 60524879 60524900 60524884 60524879 -
gtgtttaccattggcttttagc

SEQ ID NO: 215236 - DNA, 22 bp, Artificial Sequence
  Synthetic oligonucleotide; TTT chr2 60524873 60524894 60524878 60524873 -
accattggcttttagcacggat

SEQ ID NO: 215237 - DNA, 22 bp, Artificial Sequence
  Synthetic oligonucleotide; TTA chr2 60524872 60524893 60524877 60524872 -
ccattggcttttagcacggatg

SEQ ID NO: 215238 - DNA, 22 bp, Artificial Sequence
  Synthetic oligonucleotide; TTG chr2 60524866 60524887 60524871 60524866 -
gcttttagcacggatgtttctg

SEQ ID NO: 215239 - DNA, 22 bp, Artificial Sequence
  Synthetic oligonucleotide; CTT chr2 60524862 60524883 60524867 60524862 -
ttagcacggatgtttctgtttt

SEQ ID NO: 215240 - DNA, 22 bp, Artificial Sequence
  Synthetic oligonucleotide; TTT chr2 60524861 60524882 60524866 60524861 -
tagcacggatgtttctgttttc

SEQ ID NO: 215241 - DNA, 22 bp, Artificial Sequence
  Synthetic oligonucleotide; TTT chr2 60524860 60524881 60524865 60524860 -
agcacggatgtttctgttttcc

SEQ ID NO: 215242 - DNA, 22 bp, Artificial Sequence
  Synthetic oligonucleotide; TTA chr2 60524859 60524880 60524864 60524859 -
gcacggatgtttctgttttcca

SEQ ID NO: 215243 - DNA, 22 bp, Artificial Sequence
  Synthetic oligonucleotide; TTT chr2 60524847 60524868 60524852 60524847 -
ctgttttccacactgtccagca

SEQ ID NO: 215244 - DNA, 22 bp, Artificial Sequence
  Synthetic oligonucleotide; TTC chr2 60524846 60524867 60524851 60524846 -
tgttttccacactgtccagcaa

SEQ ID NO: 215245 - DNA, 22 bp, Artificial Sequence
  Synthetic oligonucleotide; CTG chr2 60524844 60524865 60524849 60524844 -
ttttccacactgtccagcaaat

SEQ ID NO: 215246 - DNA, 22 bp, Artificial Sequence
  Synthetic oligonucleotide; TTT chr2 60524841 60524862 60524846 60524841 -
tccacactgtccagcaaatacc

SEQ ID NO: 215247 - DNA, 22 bp, Artificial Sequence
  Synthetic oligonucleotide; TTT chr2 60524840 60524861 60524845 60524840 -
ccacactgtccagcaaatacca

SEQ ID NO: 215248 - DNA, 22 bp, Artificial Sequence
  Synthetic oligonucleotide; TTC chr2 60524839 60524860 60524844 60524839 -
cacactgtccagcaaataccat

SEQ ID NO: 215249 - DNA, 22 bp, Artificial Sequence
  Synthetic oligonucleotide; CTG chr2 60524832 60524853 60524837 60524832 -
tccagcaaataccatttatatg

SEQ ID NO: 215250 - DNA, 22 bp, Artificial Sequence
  Synthetic oligonucleotide; TTT chr2 60524815 60524836 60524820 60524815 -
atatgtggcattgaatgagata

SEQ ID NO: 215251 - DNA, 22 bp, Artificial Sequence
  Synthetic oligonucleotide; TTA chr2 60524814 60524835 60524819 60524814 -
tatgtggcattgaatgagatat

SEQ ID NO: 215252 - DNA, 22 bp, Artificial Sequence
  Synthetic oligonucleotide; TTG chr2 60524802 60524823 60524807 60524802 -
aatgagatatgaaatgttttca

SEQ ID NO: 215253 - DNA, 22 bp, Artificial Sequence
  Synthetic oligonucleotide; TTT chr2 60524783 60524804 60524788 60524783 -
tcagaagcatgctgaaaaaggg

SEQ ID NO: 215254 - DNA, 22 bp, Artificial Sequence
  Synthetic oligonucleotide; TTT chr2 60524782 60524803 60524787 60524782 -
cagaagcatgctgaaaaagggc

SEQ ID NO: 215255 - DNA, 22 bp, Artificial Sequence
  Synthetic oligonucleotide; TTC chr2 60524781 60524802 60524786 60524781 -
agaagcatgctgaaaaagggca

SEQ ID NO: 215256 - DNA, 22 bp, Artificial Sequence
  Synthetic oligonucleotide; CTG chr2 60524769 60524790 60524774 60524769 -
aaaaagggcattcaaagttatc

SEQ ID NO: 215257 - DNA, 22 bp, Artificial Sequence
  Synthetic oligonucleotide; TTC chr2 60524756 60524777 60524761 60524756 -
aaagttatcctttggataatga

SEQ ID NO: 215258 - DNA, 22 bp, Artificial Sequence
  Synthetic oligonucleotide; TTA chr2 60524749 60524770 60524754 60524749 -
tcctttggataatgatgatcta

SEQ ID NO: 215259 - DNA, 22 bp, Artificial Sequence
  Synthetic oligonucleotide; CTT chr2 60524744 60524765 60524749 60524744 -
tggataatgatgatctaaaact

SEQ ID NO: 215260 - DNA, 22 bp, Artificial Sequence
  Synthetic oligonucleotide; TTT chr2 60524743 60524764 60524748 60524743 -
ggataatgatgatctaaaactt

SEQ ID NO: 215261 - DNA, 22 bp, Artificial Sequence
  Synthetic oligonucleotide; TTG chr2 60524742 60524763 60524747 60524742 -
gataatgatgatctaaaacttt

SEQ ID NO: 215262 - DNA, 22 bp, Artificial Sequence
  Synthetic oligonucleotide; CTA chr2 60524727 60524748 60524732 60524727 -
aaactttcttttattatcccat

SEQ ID NO: 215263 - DNA, 22 bp, Artificial Sequence
  Synthetic oligonucleotide; CTT chr2 60524721 60524742 60524726 60524721 -
tcttttattatcccatgtgctc

SEQ ID NO: 215264 - DNA, 22 bp, Artificial Sequence
  Synthetic oligonucleotide; TTT chr2 60524720 60524741 60524725 60524720 -
cttttattatcccatgtgctca

SEQ ID NO: 215265 - DNA, 22 bp, Artificial Sequence
  Synthetic oligonucleotide; TTC chr2 60524719 60524740 60524724 60524719 -
ttttattatcccatgtgctcag

SEQ ID NO: 215266 - DNA, 22 bp, Artificial Sequence
  Synthetic oligonucleotide; CTT chr2 60524717 60524738 60524722 60524717 -
ttattatcccatgtgctcagag

SEQ ID NO: 215267 - DNA, 22 bp, Artificial Sequence
  Synthetic oligonucleotide; TTT chr2 60524716 60524737 60524721 60524716 -
tattatcccatgtgctcagagt

SEQ ID NO: 215268 - DNA, 22 bp, Artificial Sequence
  Synthetic oligonucleotide; TTT chr2 60524715 60524736 60524720 60524715 -
attatcccatgtgctcagagta

SEQ ID NO: 215269 - DNA, 22 bp, Artificial Sequence
  Synthetic oligonucleotide; TTA chr2 60524714 60524735 60524719 60524714 -
ttatcccatgtgctcagagtaa

SEQ ID NO: 215270 - DNA, 22 bp, Artificial Sequence
  Synthetic oligonucleotide; TTA chr2 60524711 60524732 60524716 60524711 -
tcccatgtgctcagagtaaggg

SEQ ID NO: 215271 - DNA, 22 bp, Artificial Sequence
  Synthetic oligonucleotide; CTC chr2 60524699 60524720 60524704 60524699 -
agagtaaggggcaaatgaatca

SEQ ID NO: 215272 - DNA, 22 bp, Artificial Sequence
  Synthetic oligonucleotide; TTG chr2 60524673 60524694 60524678 60524673 -
tgaaatatgtgttccttgtagg

SEQ ID NO: 215273 - DNA, 22 bp, Artificial Sequence
  Synthetic oligonucleotide; TTC chr2 60524659 60524680 60524664 60524659 -
cttgtaggacacaggcactctt

SEQ ID NO: 215274 - DNA, 22 bp, Artificial Sequence
  Synthetic oligonucleotide; CTT chr2 60524656 60524677 60524661 60524656 -
gtaggacacaggcactcttgag

SEQ ID NO: 215275 - DNA, 22 bp, Artificial Sequence
  Synthetic oligonucleotide; TTG chr2 60524655 60524676 60524660 60524655 -
taggacacaggcactcttgaga

SEQ ID NO: 215276 - DNA, 22 bp, Artificial Sequence
  Synthetic oligonucleotide; CTC chr2 60524639 60524660 60524644 60524639 -
ttgagatctatagcttcaataa

SEQ ID NO: 215277 - DNA, 22 bp, Artificial Sequence
  Synthetic oligonucleotide; CTT chr2 60524637 60524658 60524642 60524637 -
gagatctatagcttcaataaaa

SEQ ID NO: 215278 - DNA, 22 bp, Artificial Sequence
  Synthetic oligonucleotide; TTG chr2 60524636 60524657 60524641 60524636 -
agatctatagcttcaataaaaa

SEQ ID NO: 215279 - DNA, 22 bp, Artificial Sequence
  Synthetic oligonucleotide; CTA chr2 60524629 60524650 60524634 60524629 -
tagcttcaataaaaaggtaatt

SEQ ID NO: 215280 - DNA, 22 bp, Artificial Sequence
  Synthetic oligonucleotide; CTT chr2 60524623 60524644 60524628 60524623 -
caataaaaaggtaatttattta

SEQ ID NO: 215281 - DNA, 22 bp, Artificial Sequence
  Synthetic oligonucleotide; TTC chr2 60524622 60524643 60524627 60524622 -
aataaaaaggtaatttatttaa

SEQ ID NO: 215282 - DNA, 22 bp, Artificial Sequence
  Synthetic oligonucleotide; TTT chr2 60524606 60524627 60524611 60524606 -
atttaaattactgcctctttaa

SEQ ID NO: 215283 - DNA, 22 bp, Artificial Sequence
  Synthetic oligonucleotide; TTA chr2 60524605 60524626 60524610 60524605 -
tttaaattactgcctctttaat

SEQ ID NO: 215284 - DNA, 22 bp, Artificial Sequence
  Synthetic oligonucleotide; TTT chr2 60524602 60524623 60524607 60524602 -
aaattactgcctctttaattta

SEQ ID NO: 215285 - DNA, 22 bp, Artificial Sequence
  Synthetic oligonucleotide; TTA chr2 60524601 60524622 60524606 60524601 -
aattactgcctctttaatttat

SEQ ID NO: 215286 - DNA, 22 bp, Artificial Sequence
  Synthetic oligonucleotide; TTA chr2 60524596 60524617 60524601 60524596 -
ctgcctctttaatttataatgt

SEQ ID NO: 215287 - DNA, 22 bp, Artificial Sequence
  Synthetic oligonucleotide; CTG chr2 60524593 60524614 60524598 60524593 -
cctctttaatttataatgtttt

SEQ ID NO: 215288 - DNA, 22 bp, Artificial Sequence
  Synthetic oligonucleotide; CTC chr2 60524589 60524610 60524594 60524589 -
tttaatttataatgttttgggg

SEQ ID NO: 215289 - DNA, 22 bp, Artificial Sequence
  Synthetic oligonucleotide; CTT chr2 60524587 60524608 60524592 60524587 -
taatttataatgttttggggat

SEQ ID NO: 215290 - DNA, 22 bp, Artificial Sequence
  Synthetic oligonucleotide; TTT chr2 60524586 60524607 60524591 60524586 -
aatttataatgttttggggatt

SEQ ID NO: 215291 - DNA, 22 bp, Artificial Sequence
  Synthetic oligonucleotide; TTA chr2 60524585 60524606 60524590 60524585 -
atttataatgttttggggattt

SEQ ID NO: 215292 - DNA, 22 bp, Artificial Sequence
  Synthetic oligonucleotide; TTT chr2 60524581 60524602 60524586 60524581 -
ataatgttttggggatttttaa

SEQ ID NO: 215293 - DNA, 22 bp, Artificial Sequence
  Synthetic oligonucleotide; TTA chr2 60524580 60524601 60524585 60524580 -
taatgttttggggatttttaat

SEQ ID NO: 215294 - DNA, 22 bp, Artificial Sequence
  Synthetic oligonucleotide; TTT chr2 60524572 60524593 60524577 60524572 -
tggggatttttaataggcatgc

SEQ ID NO: 215295 - DNA, 22 bp, Artificial Sequence
  Synthetic oligonucleotide; TTT chr2 60524571 60524592 60524576 60524571 -
ggggatttttaataggcatgct

SEQ ID NO: 215296 - DNA, 22 bp, Artificial Sequence
  Synthetic oligonucleotide; TTG chr2 60524570 60524591 60524575 60524570 -
gggatttttaataggcatgctc

SEQ ID NO: 215297 - DNA, 22 bp, Artificial Sequence
  Synthetic oligonucleotide; TTT chr2 60524563 60524584 60524568 60524563 -
ttaataggcatgctctgtaagg

SEQ ID NO: 215298 - DNA, 22 bp, Artificial Sequence
  Synthetic oligonucleotide; TTT chr2 60524562 60524583 60524567 60524562 -
taataggcatgctctgtaaggg

SEQ ID NO: 215299 - DNA, 22 bp, Artificial Sequence
  Synthetic oligonucleotide; TTT chr2 60524561 60524582 60524566 60524561 -
aataggcatgctctgtaagggc

SEQ ID NO: 215300 - DNA, 22 bp, Artificial Sequence
  Synthetic oligonucleotide; TTA chr2 60524560 60524581 60524565 60524560 -
ataggcatgctctgtaagggca

SEQ ID NO: 215301 - DNA, 22 bp, Artificial Sequence
  Synthetic oligonucleotide; CTC chr2 60524548 60524569 60524553 60524548 -
tgtaagggcactggtaatcagc

SEQ ID NO: 215302 - DNA, 22 bp, Artificial Sequence
  Synthetic oligonucleotide; CTG chr2 60524546 60524567 60524551 60524546 -
taagggcactggtaatcagctg

SEQ ID NO: 215303 - DNA, 22 bp, Artificial Sequence
  Synthetic oligonucleotide; CTG chr2 60524535 60524556 60524540 60524535 -
gtaatcagctgtttctgatttt

SEQ ID NO: 215304 - DNA, 22 bp, Artificial Sequence
  Synthetic oligonucleotide; CTG chr2 60524524 60524545 60524529 60524524 -
tttctgattttgcatgctcttc

SEQ ID NO: 215305 - DNA, 22 bp, Artificial Sequence
  Synthetic oligonucleotide; TTT chr2 60524521 60524542 60524526 60524521 -
ctgattttgcatgctcttctat

SEQ ID NO: 215306 - DNA, 22 bp, Artificial Sequence
  Synthetic oligonucleotide; TTC chr2 60524520 60524541 60524525 60524520 -
tgattttgcatgctcttctatc

SEQ ID NO: 215307 - DNA, 22 bp, Artificial Sequence
  Synthetic oligonucleotide; CTG chr2 60524518 60524539 60524523 60524518 -
attttgcatgctcttctatctc

SEQ ID NO: 215308 - DNA, 22 bp, Artificial Sequence
  Synthetic oligonucleotide; TTT chr2 60524514 60524535 60524519 60524514 -
tgcatgctcttctatctctggt

SEQ ID NO: 215309 - DNA, 22 bp, Artificial Sequence
  Synthetic oligonucleotide; TTT chr2 60524513 60524534 60524518 60524513 -
gcatgctcttctatctctggta

SEQ ID NO: 215310 - DNA, 22 bp, Artificial Sequence
  Synthetic oligonucleotide; TTG chr2 60524512 60524533 60524517 60524512 -
catgctcttctatctctggtaa

SEQ ID NO: 215311 - DNA, 22 bp, Artificial Sequence
  Synthetic oligonucleotide; CTC chr2 60524505 60524526 60524510 60524505 -
ttctatctctggtaacaaaata

SEQ ID NO: 215312 - DNA, 22 bp, Artificial Sequence
  Synthetic oligonucleotide; CTT chr2 60524503 60524524 60524508 60524503 -
ctatctctggtaacaaaataaa

SEQ ID NO: 215313 - DNA, 22 bp, Artificial Sequence
  Synthetic oligonucleotide; TTC chr2 60524502 60524523 60524507 60524502 -
tatctctggtaacaaaataaaa

SEQ ID NO: 215314 - DNA, 22 bp, Artificial Sequence
  Synthetic oligonucleotide; CTA chr2 60524500 60524521 60524505 60524500 -
tctctggtaacaaaataaaatc

SEQ ID NO: 215315 - DNA, 22 bp, Artificial Sequence
  Synthetic oligonucleotide; CTC chr2 60524496 60524517 60524501 60524496 -
tggtaacaaaataaaatcttaa

SEQ ID NO: 215316 - DNA, 22 bp, Artificial Sequence
  Synthetic oligonucleotide; CTG chr2 60524494 60524515 60524499 60524494 -
gtaacaaaataaaatcttaaaa

SEQ ID NO: 215317 - DNA, 22 bp, Artificial Sequence
  Synthetic oligonucleotide; CTT chr2 60524476 60524497 60524481 60524476 -
aaaaaacaagaaaaaagaaaaa

SEQ ID NO: 215318 - DNA, 22 bp, Artificial Sequence
  Synthetic oligonucleotide; TTA chr2 60524475 60524496 60524480 60524475 -
aaaaacaagaaaaaagaaaaaa

SEQ ID NO: 215319 - DNA, 22 bp, Artificial Sequence
  Synthetic oligonucleotide; TTT chr2 60524421 60524442 60524426 60524421 -
agccctaacccaacccaaaagc

SEQ ID NO: 215320 - DNA, 22 bp, Artificial Sequence
  Synthetic oligonucleotide; TTA chr2 60524420 60524441 60524425 60524420 -
gccctaacccaacccaaaagca

SEQ ID NO: 215321 - DNA, 22 bp, Artificial Sequence
  Synthetic oligonucleotide; CTA chr2 60524414 60524435 60524419 60524414 -
acccaacccaaaagcaaataac

SEQ ID NO: 215322 - DNA, 22 bp, Artificial Sequence
  Synthetic oligonucleotide; CTC chr2 60524360 60524381 60524365 60524360 -
tactttccccttccattattac

SEQ ID NO: 215323 - DNA, 22 bp, Artificial Sequence
  Synthetic oligonucleotide; CTA chr2 60524358 60524379 60524363 60524358 -
ctttccccttccattattacct

SEQ ID NO: 215324 - DNA, 22 bp, Artificial Sequence
  Synthetic oligonucleotide; CTT chr2 60524355 60524376 60524360 60524355 -
tccccttccattattacctgaa

SEQ ID NO: 215325 - DNA, 22 bp, Artificial Sequence
  Synthetic oligonucleotide; TTT chr2 60524354 60524375 60524359 60524354 -
ccccttccattattacctgaaa

SEQ ID NO: 215326 - DNA, 22 bp, Artificial Sequence
  Synthetic oligonucleotide; TTC chr2 60524353 60524374 60524358 60524353 -
cccttccattattacctgaaat

SEQ ID NO: 215327 - DNA, 22 bp, Artificial Sequence
  Synthetic oligonucleotide; CTT chr2 60524348 60524369 60524353 60524348 -
ccattattacctgaaataaaag

SEQ ID NO: 215328 - DNA, 22 bp, Artificial Sequence
  Synthetic oligonucleotide; TTC chr2 60524347 60524368 60524352 60524347 -
cattattacctgaaataaaagc

SEQ ID NO: 215329 - DNA, 22 bp, Artificial Sequence
  Synthetic oligonucleotide; TTA chr2 60524342 60524363 60524347 60524342 -
ttacctgaaataaaagcatgat

SEQ ID NO: 215330 - DNA, 22 bp, Artificial Sequence
  Synthetic oligonucleotide; TTA chr2 60524339 60524360 60524344 60524339 -
cctgaaataaaagcatgataac

SEQ ID NO: 215331 - DNA, 22 bp, Artificial Sequence
  Synthetic oligonucleotide; CTG chr2 60524335 60524356 60524340 60524335 -
aaataaaagcatgataacattc

SEQ ID NO: 215332 - DNA, 22 bp, Artificial Sequence
  Synthetic oligonucleotide; TTC chr2 60524313 60524334 60524318 60524313 -
atgccagagataggtgacaaaa

SEQ ID NO: 215333 - DNA, 22 bp, Artificial Sequence
  Synthetic oligonucleotide; TTA chr2 60524288 60524309 60524293 60524288 -
tgtattcagacatgaagtttag

SEQ ID NO: 215334 - DNA, 22 bp, Artificial Sequence
  Synthetic oligonucleotide; TTC chr2 60524281 60524302 60524286 60524281 -
agacatgaagtttaggatttca

SEQ ID NO: 215335 - DNA, 22 bp, Artificial Sequence
  Synthetic oligonucleotide; TTT chr2 60524268 60524289 60524273 60524268 -
aggatttcatagcccaatgttc

SEQ ID NO: 215336 - DNA, 22 bp, Artificial Sequence
  Synthetic oligonucleotide; TTA chr2 60524267 60524288 60524272 60524267 -
ggatttcatagcccaatgttct

SEQ ID NO: 215337 - DNA, 22 bp, Artificial Sequence
  Synthetic oligonucleotide; TTT chr2 60524261 60524282 60524266 60524261 -
catagcccaatgttctctcttc

SEQ ID NO: 215338 - DNA, 22 bp, Artificial Sequence
  Synthetic oligonucleotide; TTC chr2 60524260 60524281 60524265 60524260 -
atagcccaatgttctctcttct

SEQ ID NO: 215339 - DNA, 22 bp, Artificial Sequence
  Synthetic oligonucleotide; TTC chr2 60524246 60524267 60524251 60524246 -
tctcttctcccccacctcttat

SEQ ID NO: 215340 - DNA, 22 bp, Artificial Sequence
  Synthetic oligonucleotide; CTC chr2 60524244 60524265 60524249 60524244 -
tcttctcccccacctcttattg

SEQ ID NO: 215341 - DNA, 22 bp, Artificial Sequence
  Synthetic oligonucleotide; CTC chr2 60524242 60524263 60524247 60524242 -
ttctcccccacctcttattgtg

SEQ ID NO: 215342 - DNA, 22 bp, Artificial Sequence
  Synthetic oligonucleotide; CTT chr2 60524240 60524261 60524245 60524240 -
ctcccccacctcttattgtgtt

SEQ ID NO: 215343 - DNA, 22 bp, Artificial Sequence
  Synthetic oligonucleotide; TTC chr2 60524239 60524260 60524244 60524239 -
tcccccacctcttattgtgttg

SEQ ID NO: 215344 - DNA, 22 bp, Artificial Sequence
  Synthetic oligonucleotide; CTC chr2 60524237 60524258 60524242 60524237 -
ccccacctcttattgtgttgtg

SEQ ID NO: 215345 - DNA, 22 bp, Artificial Sequence
  Synthetic oligonucleotide; CTC chr2 60524228 60524249 60524233 60524228 -
ttattgtgttgtgcaaatgtat

SEQ ID NO: 215346 - DNA, 22 bp, Artificial Sequence
  Synthetic oligonucleotide; CTT chr2 60524226 60524247 60524231 60524226 -
attgtgttgtgcaaatgtatca

SEQ ID NO: 215347 - DNA, 22 bp, Artificial Sequence
  Synthetic oligonucleotide; TTA chr2 60524225 60524246 60524230 60524225 -
ttgtgttgtgcaaatgtatcag

SEQ ID NO: 215348 - DNA, 22 bp, Artificial Sequence
  Synthetic oligonucleotide; TTG chr2 60524222 60524243 60524227 60524222 -
tgttgtgcaaatgtatcagccg

SEQ ID NO: 215349 - DNA, 22 bp, Artificial Sequence
  Synthetic oligonucleotide; TTG chr2 60524217 60524238 60524222 60524217 -
tgcaaatgtatcagccgttgta

SEQ ID NO: 215350 - DNA, 22 bp, Artificial Sequence
  Synthetic oligonucleotide; TTG chr2 60524197 60524218 60524202 60524197 -
tattgttaatgcatgataggaa

SEQ ID NO: 215351 - DNA, 22 bp, Artificial Sequence
  Synthetic oligonucleotide; TTG chr2 60524192 60524213 60524197 60524192 -
ttaatgcatgataggaagctgc

SEQ ID NO: 215352 - DNA, 22 bp, Artificial Sequence
  Synthetic oligonucleotide; TTA chr2 60524189 60524210 60524194 60524189 -
atgcatgataggaagctgccgc

SEQ ID NO: 215353 - DNA, 22 bp, Artificial Sequence
  Synthetic oligonucleotide; CTG chr2 60524171 60524192 60524176 60524171 -
ccgctaggacagtcttggctca

SEQ ID NO: 215354 - DNA, 22 bp, Artificial Sequence
  Synthetic oligonucleotide; CTA chr2 60524165 60524186 60524170 60524165 -
ggacagtcttggctcactaatg

SEQ ID NO: 215355 - DNA, 22 bp, Artificial Sequence
  Synthetic oligonucleotide; CTT chr2 60524155 60524176 60524160 60524155 -
ggctcactaatgcggtcagctg

SEQ ID NO: 215356 - DNA, 22 bp, Artificial Sequence
  Synthetic oligonucleotide; TTG chr2 60524154 60524175 60524159 60524154 -
gctcactaatgcggtcagctgt

SEQ ID NO: 215357 - DNA, 22 bp, Artificial Sequence
  Synthetic oligonucleotide; CTC chr2 60524150 60524171 60524155 60524150 -
actaatgcggtcagctgtgtca

SEQ ID NO: 215358 - DNA, 22 bp, Artificial Sequence
  Synthetic oligonucleotide; CTA chr2 60524146 60524167 60524151 60524146 -
atgcggtcagctgtgtcacaat

SEQ ID NO: 215359 - DNA, 22 bp, Artificial Sequence
  Synthetic oligonucleotide; CTG chr2 60524133 60524154 60524138 60524133 -
tgtcacaatgtgatatatagat

SEQ ID NO: 215360 - DNA, 22 bp, Artificial Sequence
  Synthetic oligonucleotide; TTA chr2 60524109 60524130 60524114 60524109 -
tatttaccatggcatattttgt

SEQ ID NO: 215361 - DNA, 22 bp, Artificial Sequence
  Synthetic oligonucleotide; TTT chr2 60524104 60524125 60524109 60524104 -
accatggcatattttgtttgcg

SEQ ID NO: 215362 - DNA, 22 bp, Artificial Sequence
  Synthetic oligonucleotide; TTA chr2 60524103 60524124 60524108 60524103 -
ccatggcatattttgtttgcga

SEQ ID NO: 215363 - DNA, 22 bp, Artificial Sequence
  Synthetic oligonucleotide; TTT chr2 60524090 60524111 60524095 60524090 -
tgtttgcgaaatgggagcggat

SEQ ID NO: 215364 - DNA, 22 bp, Artificial Sequence
  Synthetic oligonucleotide; TTT chr2 60524089 60524110 60524094 60524089 -
gtttgcgaaatgggagcggatg

SEQ ID NO: 215365 - DNA, 22 bp, Artificial Sequence
  Synthetic oligonucleotide; TTG chr2 60524088 60524109 60524093 60524088 -
tttgcgaaatgggagcggatga

SEQ ID NO: 215366 - DNA, 22 bp, Artificial Sequence
  Synthetic oligonucleotide; TTT chr2 60524085 60524106 60524090 60524085 -
gcgaaatgggagcggatgataa

SEQ ID NO: 215367 - DNA, 22 bp, Artificial Sequence
  Synthetic oligonucleotide; TTG chr2 60524084 60524105 60524089 60524084 -
cgaaatgggagcggatgataaa

SEQ ID NO: 215368 - DNA, 22 bp, Artificial Sequence
  Synthetic oligonucleotide; CTC chr2 60524049 60524070 60524054 60524049 -
cagttttcacactagttcctgt

SEQ ID NO: 215369 - DNA, 22 bp, Artificial Sequence
  Synthetic oligonucleotide; TTT chr2 60524043 60524064 60524048 60524043 -
tcacactagttcctgtggtccg

SEQ ID NO: 215370 - DNA, 22 bp, Artificial Sequence
  Synthetic oligonucleotide; TTT chr2 60524042 60524063 60524047 60524042 -
cacactagttcctgtggtccgg

SEQ ID NO: 215371 - DNA, 22 bp, Artificial Sequence
  Synthetic oligonucleotide; TTC chr2 60524041 60524062 60524046 60524041 -
acactagttcctgtggtccgga

SEQ ID NO: 215372 - DNA, 22 bp, Artificial Sequence
  Synthetic oligonucleotide; CTA chr2 60524035 60524056 60524040 60524035 -
gttcctgtggtccggagtctct

SEQ ID NO: 215373 - DNA, 22 bp, Artificial Sequence
  Synthetic oligonucleotide; TTC chr2 60524031 60524052 60524036 60524031 -
ctgtggtccggagtctctcaaa

SEQ ID NO: 215374 - DNA, 22 bp, Artificial Sequence
  Synthetic oligonucleotide; CTG chr2 60524028 60524049 60524033 60524028 -
tggtccggagtctctcaaacaa

SEQ ID NO: 215375 - DNA, 22 bp, Artificial Sequence
  Synthetic oligonucleotide; CTC chr2 60524014 60524035 60524019 60524014 -
tcaaacaataaagcacccctga

SEQ ID NO: 215376 - DNA, 22 bp, Artificial Sequence
  Synthetic oligonucleotide; CTC chr2 60524012 60524033 60524017 60524012 -
aaacaataaagcacccctgata

SEQ ID NO: 215377 - DNA, 22 bp, Artificial Sequence
  Synthetic oligonucleotide; CTG chr2 60523993 60524014 60523998 60523993 -
ataatggagaggtatttatggg

SEQ ID NO: 215378 - DNA, 22 bp, Artificial Sequence
  Synthetic oligonucleotide; TTT chr2 60523976 60523997 60523981 60523976 -
atgggaacataattgacttcaa

SEQ ID NO: 215379 - DNA, 22 bp, Artificial Sequence
  Synthetic oligonucleotide; TTA chr2 60523975 60523996 60523980 60523975 -
tgggaacataattgacttcaaa

SEQ ID NO: 215380 - DNA, 22 bp, Artificial Sequence
  Synthetic oligonucleotide; TTG chr2 60523961 60523982 60523966 60523961 -
acttcaaagttttagatctctg

SEQ ID NO: 215381 - DNA, 22 bp, Artificial Sequence
  Synthetic oligonucleotide; CTT chr2 60523957 60523978 60523962 60523957 -
caaagttttagatctctggctg

SEQ ID NO: 215382 - DNA, 22 bp, Artificial Sequence
  Synthetic oligonucleotide; TTC chr2 60523956 60523977 60523961 60523956 -
aaagttttagatctctggctga

SEQ ID NO: 215383 - DNA, 22 bp, Artificial Sequence
  Synthetic oligonucleotide; TTT chr2 60523949 60523970 60523954 60523949 -
tagatctctggctgaagtttaa

SEQ ID NO: 215384 - DNA, 22 bp, Artificial Sequence
  Synthetic oligonucleotide; TTT chr2 60523948 60523969 60523953 60523948 -
agatctctggctgaagtttaag

SEQ ID NO: 215385 - DNA, 22 bp, Artificial Sequence
  Synthetic oligonucleotide; TTA chr2 60523947 60523968 60523952 60523947 -
gatctctggctgaagtttaaga

SEQ ID NO: 215386 - DNA, 22 bp, Artificial Sequence
  Synthetic oligonucleotide; CTC chr2 60523941 60523962 60523946 60523941 -
tggctgaagtttaagatgggat

SEQ ID NO: 215387 - DNA, 22 bp, Artificial Sequence
  Synthetic oligonucleotide; CTG chr2 60523939 60523960 60523944 60523939 -
gctgaagtttaagatgggatag

SEQ ID NO: 215388 - DNA, 22 bp, Artificial Sequence
  Synthetic oligonucleotide; CTG chr2 60523935 60523956 60523940 60523935 -
aagtttaagatgggatagtcca

SEQ ID NO: 215389 - DNA, 22 bp, Artificial Sequence
  Synthetic oligonucleotide; TTT chr2 60523929 60523950 60523934 60523929 -
aagatgggatagtccattacat

SEQ ID NO: 215390 - DNA, 22 bp, Artificial Sequence
  Synthetic oligonucleotide; TTA chr2 60523928 60523949 60523933 60523928 -
agatgggatagtccattacatt

SEQ ID NO: 215391 - DNA, 22 bp, Artificial Sequence
  Synthetic oligonucleotide; TTA chr2 60523910 60523931 60523915 60523910 -
cattaatgtctgtgcttaaagc

SEQ ID NO: 215392 - DNA, 22 bp, Artificial Sequence
  Synthetic oligonucleotide; TTA chr2 60523905 60523926 60523910 60523905 -
atgtctgtgcttaaagctccta

SEQ ID NO: 215393 - DNA, 22 bp, Artificial Sequence
  Synthetic oligonucleotide; CTG chr2 60523898 60523919 60523903 60523898 -
tgcttaaagctcctatttggct

SEQ ID NO: 215394 - DNA, 22 bp, Artificial Sequence
  Synthetic oligonucleotide; CTT chr2 60523893 60523914 60523898 60523893 -
aaagctcctatttggcttaaat

SEQ ID NO: 215395 - DNA, 22 bp, Artificial Sequence
  Synthetic oligonucleotide; TTA chr2 60523892 60523913 60523897 60523892 -
aagctcctatttggcttaaata

SEQ ID NO: 215396 - DNA, 22 bp, Artificial Sequence
  Synthetic oligonucleotide; CTC chr2 60523886 60523907 60523891 60523886 -
ctatttggcttaaataaattat

SEQ ID NO: 215397 - DNA, 22 bp, Artificial Sequence
  Synthetic oligonucleotide; CTA chr2 60523883 60523904 60523888 60523883 -
tttggcttaaataaattattta

SEQ ID NO: 215398 - DNA, 22 bp, Artificial Sequence
  Synthetic oligonucleotide; TTT chr2 60523880 60523901 60523885 60523880 -
ggcttaaataaattatttaggg

SEQ ID NO: 215399 - DNA, 22 bp, Artificial Sequence
  Synthetic oligonucleotide; TTG chr2 60523879 60523900 60523884 60523879 -
gcttaaataaattatttagggt

SEQ ID NO: 215400 - DNA, 22 bp, Artificial Sequence
  Synthetic oligonucleotide; CTT chr2 60523875 60523896 60523880 60523875 -
aaataaattatttagggtttac

SEQ ID NO: 215401 - DNA, 22 bp, Artificial Sequence
  Synthetic oligonucleotide; TTA chr2 60523874 60523895 60523879 60523874 -
aataaattatttagggtttact

SEQ ID NO: 215402 - DNA, 22 bp, Artificial Sequence
  Synthetic oligonucleotide; TTA chr2 60523865 60523886 60523870 60523865 -
tttagggtttactgcttaaacc

SEQ ID NO: 215403 - DNA, 22 bp, Artificial Sequence
  Synthetic oligonucleotide; TTT chr2 60523862 60523883 60523867 60523862 -
agggtttactgcttaaaccttg

SEQ ID NO: 215404 - DNA, 22 bp, Artificial Sequence
  Synthetic oligonucleotide; TTA chr2 60523861 60523882 60523866 60523861 -
gggtttactgcttaaaccttgg

SEQ ID NO: 215405 - DNA, 22 bp, Artificial Sequence
  Synthetic oligonucleotide; TTT chr2 60523855 60523876 60523860 60523855 -
actgcttaaaccttggtcaatt

SEQ ID NO: 215406 - DNA, 22 bp, Artificial Sequence
  Synthetic oligonucleotide; TTA chr2 60523854 60523875 60523859 60523854 -
ctgcttaaaccttggtcaattc

SEQ ID NO: 215407 - DNA, 22 bp, Artificial Sequence
  Synthetic oligonucleotide; CTG chr2 60523851 60523872 60523856 60523851 -
cttaaaccttggtcaattcttg

SEQ ID NO: 215408 - DNA, 22 bp, Artificial Sequence
  Synthetic oligonucleotide; CTT chr2 60523848 60523869 60523853 60523848 -
aaaccttggtcaattcttgaac

SEQ ID NO: 215409 - DNA, 22 bp, Artificial Sequence
  Synthetic oligonucleotide; TTA chr2 60523847 60523868 60523852 60523847 -
aaccttggtcaattcttgaacg

SEQ ID NO: 215410 - DNA, 22 bp, Artificial Sequence
  Synthetic oligonucleotide; CTT chr2 60523841 60523862 60523846 60523841 -
ggtcaattcttgaacgtttggg

SEQ ID NO: 215411 - DNA, 22 bp, Artificial Sequence
  Synthetic oligonucleotide; TTG chr2 60523840 60523861 60523845 60523840 -
gtcaattcttgaacgtttgggc

SEQ ID NO: 215412 - DNA, 22 bp, Artificial Sequence
  Synthetic oligonucleotide; TTC chr2 60523832 60523853 60523837 60523832 -
ttgaacgtttgggctagttaag

SEQ ID NO: 215413 - DNA, 22 bp, Artificial Sequence
  Synthetic oligonucleotide; CTT chr2 60523830 60523851 60523835 60523830 -
gaacgtttgggctagttaagta

SEQ ID NO: 215414 - DNA, 22 bp, Artificial Sequence
  Synthetic oligonucleotide; TTG chr2 60523829 60523850 60523834 60523829 -
aacgtttgggctagttaagtaa

SEQ ID NO: 215415 - DNA, 22 bp, Artificial Sequence
  Synthetic oligonucleotide; TTT chr2 60523822 60523843 60523827 60523822 -
gggctagttaagtaattttcca

SEQ ID NO: 215416 - DNA, 22 bp, Artificial Sequence
  Synthetic oligonucleotide; TTG chr2 60523821 60523842 60523826 60523821 -
ggctagttaagtaattttccag

SEQ ID NO: 215417 - DNA, 22 bp, Artificial Sequence
  Synthetic oligonucleotide; CTA chr2 60523816 60523837 60523821 60523816 -
gttaagtaattttccagtgact

SEQ ID NO: 215418 - DNA, 22 bp, Artificial Sequence
  Synthetic oligonucleotide; TTA chr2 60523812 60523833 60523817 60523812 -
agtaattttccagtgactttct

SEQ ID NO: 215419 - DNA, 22 bp, Artificial Sequence
  Synthetic oligonucleotide; TTT chr2 60523804 60523825 60523809 60523804 -
tccagtgactttctgtgccttg

SEQ ID NO: 215420 - DNA, 22 bp, Artificial Sequence
  Synthetic oligonucleotide; TTT chr2 60523803 60523824 60523808 60523803 -
ccagtgactttctgtgccttgg

SEQ ID NO: 215421 - DNA, 22 bp, Artificial Sequence
  Synthetic oligonucleotide; TTC chr2 60523802 60523823 60523807 60523802 -
cagtgactttctgtgccttggt

SEQ ID NO: 215422 - DNA, 22 bp, Artificial Sequence
  Synthetic oligonucleotide; CTT chr2 60523793 60523814 60523798 60523793 -
tctgtgccttggtgattcattt

SEQ ID NO: 215423 - DNA, 22 bp, Artificial Sequence
  Synthetic oligonucleotide; TTT chr2 60523792 60523813 60523797 60523792 -
ctgtgccttggtgattcattta

SEQ ID NO: 215424 - DNA, 22 bp, Artificial Sequence
  Synthetic oligonucleotide; TTC chr2 60523791 60523812 60523796 60523791 -
tgtgccttggtgattcatttac

SEQ ID NO: 215425 - DNA, 22 bp, Artificial Sequence
  Synthetic oligonucleotide; CTG chr2 60523789 60523810 60523794 60523789 -
tgccttggtgattcatttactt

SEQ ID NO: 215426 - DNA, 22 bp, Artificial Sequence
  Synthetic oligonucleotide; CTT chr2 60523783 60523804 60523788 60523783 -
ggtgattcatttacttgattga

SEQ ID NO: 215427 - DNA, 22 bp, Artificial Sequence
  Synthetic oligonucleotide; TTG chr2 60523782 60523803 60523787 60523782 -
gtgattcatttacttgattgag

SEQ ID NO: 215428 - DNA, 22 bp, Artificial Sequence
  Synthetic oligonucleotide; TTC chr2 60523775 60523796 60523780 60523775 -
atttacttgattgagctcctgt

SEQ ID NO: 215429 - DNA, 22 bp, Artificial Sequence
  Synthetic oligonucleotide; TTT chr2 60523771 60523792 60523776 60523771 -
acttgattgagctcctgtgtgc

SEQ ID NO: 215430 - DNA, 22 bp, Artificial Sequence
  Synthetic oligonucleotide; TTA chr2 60523770 60523791 60523775 60523770 -
cttgattgagctcctgtgtgct

SEQ ID NO: 215431 - DNA, 22 bp, Artificial Sequence
  Synthetic oligonucleotide; CTT chr2 60523767 60523788 60523772 60523767 -
gattgagctcctgtgtgctcgt

SEQ ID NO: 215432 - DNA, 22 bp, Artificial Sequence
  Synthetic oligonucleotide; TTG chr2 60523766 60523787 60523771 60523766 -
attgagctcctgtgtgctcgta

SEQ ID NO: 215433 - DNA, 22 bp, Artificial Sequence
  Synthetic oligonucleotide; TTG chr2 60523762 60523783 60523767 60523762 -
agctcctgtgtgctcgtatgat

SEQ ID NO: 215434 - DNA, 22 bp, Artificial Sequence
  Synthetic oligonucleotide; CTC chr2 60523757 60523778 60523762 60523757 -
ctgtgtgctcgtatgatttcta

SEQ ID NO: 215435 - DNA, 22 bp, Artificial Sequence
  Synthetic oligonucleotide; CTG chr2 60523754 60523775 60523759 60523754 -
tgtgctcgtatgatttctaaat

SEQ ID NO: 215436 - DNA, 22 bp, Artificial Sequence
  Synthetic oligonucleotide; CTC chr2 60523747 60523768 60523752 60523747 -
gtatgatttctaaatgtatttc

SEQ ID NO: 215437 - DNA, 22 bp, Artificial Sequence
  Synthetic oligonucleotide; TTT chr2 60523738 60523759 60523743 60523738 -
ctaaatgtatttctcaagtttt

SEQ ID NO: 215438 - DNA, 22 bp, Artificial Sequence
  Synthetic oligonucleotide; TTC chr2 60523737 60523758 60523742 60523737 -
taaatgtatttctcaagttttg

SEQ ID NO: 215439 - DNA, 22 bp, Artificial Sequence
  Synthetic oligonucleotide; CTA chr2 60523735 60523756 60523740 60523735 -
aatgtatttctcaagttttgcc

SEQ ID NO: 215440 - DNA, 22 bp, Artificial Sequence
  Synthetic oligonucleotide; TTT chr2 60523726 60523747 60523731 60523726 -
ctcaagttttgcctggcaatga

SEQ ID NO: 215441 - DNA, 22 bp, Artificial Sequence
  Synthetic oligonucleotide; TTC chr2 60523725 60523746 60523730 60523725 -
tcaagttttgcctggcaatgaa

SEQ ID NO: 215442 - DNA, 22 bp, Artificial Sequence
  Synthetic oligonucleotide; CTC chr2 60523723 60523744 60523728 60523723 -
aagttttgcctggcaatgaatg

SEQ ID NO: 215443 - DNA, 22 bp, Artificial Sequence
  Synthetic oligonucleotide; TTT chr2 60523717 60523738 60523722 60523717 -
tgcctggcaatgaatgattttg

SEQ ID NO: 215444 - DNA, 22 bp, Artificial Sequence
  Synthetic oligonucleotide; TTT chr2 60523716 60523737 60523721 60523716 -
gcctggcaatgaatgattttgc

SEQ ID NO: 215445 - DNA, 22 bp, Artificial Sequence
  Synthetic oligonucleotide; TTG chr2 60523715 60523736 60523720 60523715 -
cctggcaatgaatgattttgct

SEQ ID NO: 215446 - DNA, 22 bp, Artificial Sequence
  Synthetic oligonucleotide; CTG chr2 60523711 60523732 60523716 60523711 -
gcaatgaatgattttgcttact

SEQ ID NO: 215447 - DNA, 22 bp, Artificial Sequence
  Synthetic oligonucleotide; TTT chr2 60523697 60523718 60523702 60523697 -
tgcttactggagtcttgtgtgg

SEQ ID NO: 215448 - DNA, 22 bp, Artificial Sequence
  Synthetic oligonucleotide; TTT chr2 60523696 60523717 60523701 60523696 -
gcttactggagtcttgtgtggt

SEQ ID NO: 215449 - DNA, 22 bp, Artificial Sequence
  Synthetic oligonucleotide; TTG chr2 60523695 60523716 60523700 60523695 -
cttactggagtcttgtgtggta

SEQ ID NO: 215450 - DNA, 22 bp, Artificial Sequence
  Synthetic oligonucleotide; CTT chr2 60523692 60523713 60523697 60523692 -
actggagtcttgtgtggtacac

SEQ ID NO: 215451 - DNA, 22 bp, Artificial Sequence
  Synthetic oligonucleotide; TTA chr2 60523691 60523712 60523696 60523691 -
ctggagtcttgtgtggtacacc

SEQ ID NO: 215452 - DNA, 22 bp, Artificial Sequence
  Synthetic oligonucleotide; CTG chr2 60523688 60523709 60523693 60523688 -
gagtcttgtgtggtacacctat

SEQ ID NO: 215453 - DNA, 22 bp, Artificial Sequence
  Synthetic oligonucleotide; CTT chr2 60523681 60523702 60523686 60523681 -
gtgtggtacacctataaaaggc

SEQ ID NO: 215454 - DNA, 22 bp, Artificial Sequence
  Synthetic oligonucleotide; TTG chr2 60523680 60523701 60523685 60523680 -
tgtggtacacctataaaaggct

SEQ ID NO: 215455 - DNA, 22 bp, Artificial Sequence
  Synthetic oligonucleotide; CTA chr2 60523667 60523688 60523672 60523667 -
taaaaggcttattaactctttt

SEQ ID NO: 215456 - DNA, 22 bp, Artificial Sequence
  Synthetic oligonucleotide; CTT chr2 60523657 60523678 60523662 60523657 -
attaactctttttgaaaaaaaa

SEQ ID NO: 215457 - DNA, 22 bp, Artificial Sequence
  Synthetic oligonucleotide; TTA chr2 60523656 60523677 60523661 60523656 -
ttaactctttttgaaaaaaaaa

SEQ ID NO: 215458 - DNA, 22 bp, Artificial Sequence
  Synthetic oligonucleotide; TTA chr2 60523653 60523674 60523658 60523653 -
actctttttgaaaaaaaaaaaa

SEQ ID NO: 215459 - DNA, 22 bp, Artificial Sequence
  Synthetic oligonucleotide; CTC chr2 60523649 60523670 60523654 60523649 -
tttttgaaaaaaaaaaaaatcc

SEQ ID NO: 215460 - DNA, 22 bp, Artificial Sequence
  Synthetic oligonucleotide; CTT chr2 60523647 60523668 60523652 60523647 -
tttgaaaaaaaaaaaaatcccc

SEQ ID NO: 215461 - DNA, 22 bp, Artificial Sequence
  Synthetic oligonucleotide; TTT chr2 60523646 60523667 60523651 60523646 -
ttgaaaaaaaaaaaaatcccca

SEQ ID NO: 215462 - DNA, 22 bp, Artificial Sequence
  Synthetic oligonucleotide; TTT chr2 60523645 60523666 60523650 60523645 -
tgaaaaaaaaaaaaatccccaa

SEQ ID NO: 215463 - DNA, 22 bp, Artificial Sequence
  Synthetic oligonucleotide; TTT chr2 60523644 60523665 60523649 60523644 -
gaaaaaaaaaaaaatccccaaa

SEQ ID NO: 215464 - DNA, 22 bp, Artificial Sequence
  Synthetic oligonucleotide; TTG chr2 60523643 60523664 60523648 60523643 -
aaaaaaaaaaaaatccccaaac

SEQ ID NO: 215465 - DNA, 22 bp, Artificial Sequence
  Synthetic oligonucleotide; CTG chr2 60523609 60523630 60523614 60523609 -
tcatcataagataaagcatata

SEQ ID NO: 215466 - DNA, 22 bp, Artificial Sequence
  Synthetic oligonucleotide; CTA chr2 60523573 60523594 60523578 60523573 -
tatacacacatacatatgtaca

SEQ ID NO: 215467 - DNA, 22 bp, Artificial Sequence
  Synthetic oligonucleotide; CTA chr2 60523546 60523567 60523551 60523546 -
catatatacatacgtatatgca

SEQ ID NO: 215468 - DNA, 22 bp, Artificial Sequence
  Synthetic oligonucleotide; TTG chr2 60523502 60523523 60523507 60523502 -
tgtgcctgtgtgtgtgtagaaa

SEQ ID NO: 215469 - DNA, 22 bp, Artificial Sequence
  Synthetic oligonucleotide; CTG chr2 60523494 60523515 60523499 60523494 -
tgtgtgtgtagaaagggagaga

SEQ ID NO: 215470 - DNA, 22 bp, Artificial Sequence
  Synthetic oligonucleotide; CTT chr2 60523453 60523474 60523458 60523453 -
tagaattcaccatgattccatc

SEQ ID NO: 215471 - DNA, 22 bp, Artificial Sequence
  Synthetic oligonucleotide; TTT chr2 60523452 60523473 60523457 60523452 -
agaattcaccatgattccatca

SEQ ID NO: 215472 - DNA, 22 bp, Artificial Sequence
  Synthetic oligonucleotide; TTA chr2 60523451 60523472 60523456 60523451 -
gaattcaccatgattccatcaa

SEQ ID NO: 215473 - DNA, 22 bp, Artificial Sequence
  Synthetic oligonucleotide; TTC chr2 60523445 60523466 60523450 60523445 -
accatgattccatcaaatcaat

SEQ ID NO: 215474 - DNA, 22 bp, Artificial Sequence
  Synthetic oligonucleotide; TTC chr2 60523435 60523456 60523440 60523435 -
catcaaatcaatatagaagttt

SEQ ID NO: 215475 - DNA, 22 bp, Artificial Sequence
  Synthetic oligonucleotide; TTT chr2 60523413 60523434 60523418 60523413 -
ttgaaagctatccatgtagaaa

SEQ ID NO: 215476 - DNA, 22 bp, Artificial Sequence
  Synthetic oligonucleotide; TTT chr2 60523412 60523433 60523417 60523412 -
tgaaagctatccatgtagaaac

SEQ ID NO: 215477 - DNA, 22 bp, Artificial Sequence
  Synthetic oligonucleotide; TTT chr2 60523411 60523432 60523416 60523411 -
gaaagctatccatgtagaaacc

SEQ ID NO: 215478 - DNA, 22 bp, Artificial Sequence
  Synthetic oligonucleotide; TTG chr2 60523410 60523431 60523415 60523410 -
aaagctatccatgtagaaacca

SEQ ID NO: 215479 - DNA, 22 bp, Artificial Sequence
  Synthetic oligonucleotide; CTA chr2 60523403 60523424 60523408 60523403 -
tccatgtagaaaccacttttca

SEQ ID NO: 215480 - DNA, 22 bp, Artificial Sequence
  Synthetic oligonucleotide; CTT chr2 60523385 60523406 60523390 60523385 -
ttcatcaaaatctgacttaagc

SEQ ID NO: 215481 - DNA, 22 bp, Artificial Sequence
  Synthetic oligonucleotide; TTT chr2 60523384 60523405 60523389 60523384 -
tcatcaaaatctgacttaagca

SEQ ID NO: 215482 - DNA, 22 bp, Artificial Sequence
  Synthetic oligonucleotide; TTT chr2 60523383 60523404 60523388 60523383 -
catcaaaatctgacttaagcaa

SEQ ID NO: 215483 - DNA, 22 bp, Artificial Sequence
  Synthetic oligonucleotide; TTC chr2 60523382 60523403 60523387 60523382 -
atcaaaatctgacttaagcaaa

SEQ ID NO: 215484 - DNA, 22 bp, Artificial Sequence
  Synthetic oligonucleotide; CTG chr2 60523371 60523392 60523376 60523371 -
acttaagcaaattatctccata

SEQ ID NO: 215485 - DNA, 22 bp, Artificial Sequence
  Synthetic oligonucleotide; CTT chr2 60523367 60523388 60523372 60523367 -
aagcaaattatctccatactat

SEQ ID NO: 215486 - DNA, 22 bp, Artificial Sequence
  Synthetic oligonucleotide; TTA chr2 60523366 60523387 60523371 60523366 -
agcaaattatctccatactatt

SEQ ID NO: 215487 - DNA, 22 bp, Artificial Sequence
  Synthetic oligonucleotide; TTA chr2 60523357 60523378 60523362 60523357 -
tctccatactatttatctgaaa

SEQ ID NO: 215488 - DNA, 22 bp, Artificial Sequence
  Synthetic oligonucleotide; CTC chr2 60523353 60523374 60523358 60523353 -
catactatttatctgaaagtct

SEQ ID NO: 215489 - DNA, 22 bp, Artificial Sequence
  Synthetic oligonucleotide; CTA chr2 60523346 60523367 60523351 60523346 -
tttatctgaaagtctgttgttc

SEQ ID NO: 215490 - DNA, 22 bp, Artificial Sequence
  Synthetic oligonucleotide; TTT chr2 60523343 60523364 60523348 60523343 -
atctgaaagtctgttgttcaca

SEQ ID NO: 215491 - DNA, 22 bp, Artificial Sequence
  Synthetic oligonucleotide; TTA chr2 60523342 60523363 60523347 60523342 -
tctgaaagtctgttgttcacat

SEQ ID NO: 215492 - DNA, 22 bp, Artificial Sequence
  Synthetic oligonucleotide; CTG chr2 60523338 60523359 60523343 60523338 -
aaagtctgttgttcacatagcg

SEQ ID NO: 215493 - DNA, 22 bp, Artificial Sequence
  Synthetic oligonucleotide; CTG chr2 60523330 60523351 60523335 60523330 -
ttgttcacatagcgctggattg

SEQ ID NO: 215494 - DNA, 22 bp, Artificial Sequence
  Synthetic oligonucleotide; TTG chr2 60523327 60523348 60523332 60523327 -
ttcacatagcgctggattgagg

SEQ ID NO: 215495 - DNA, 22 bp, Artificial Sequence
  Synthetic oligonucleotide; TTC chr2 60523324 60523345 60523329 60523324 -
acatagcgctggattgaggatc

SEQ ID NO: 215496 - DNA, 22 bp, Artificial Sequence
  Synthetic oligonucleotide; CTG chr2 60523313 60523334 60523318 60523313 -
gattgaggatcatagtggcaaa

SEQ ID NO: 215497 - DNA, 22 bp, Artificial Sequence
  Synthetic oligonucleotide; TTG chr2 60523308 60523329 60523313 60523308 -
aggatcatagtggcaaatttag

SEQ ID NO: 215498 - DNA, 22 bp, Artificial Sequence
  Synthetic oligonucleotide; TTT chr2 60523288 60523309 60523293 60523288 -
aggagcaacagtcccaagcagg

SEQ ID NO: 215499 - DNA, 22 bp, Artificial Sequence
  Synthetic oligonucleotide; TTA chr2 60523287 60523308 60523292 60523287 -
ggagcaacagtcccaagcagga

SEQ ID NO: 215500 - DNA, 22 bp, Artificial Sequence
  Synthetic oligonucleotide; CTG chr2 60523259 60523280 60523264 60523259 -
gatggcaggctgtcctttgtgc

SEQ ID NO: 215501 - DNA, 22 bp, Artificial Sequence
  Synthetic oligonucleotide; CTG chr2 60523247 60523268 60523252 60523247 -
tcctttgtgcctcccctgagtt

SEQ ID NO: 215502 - DNA, 22 bp, Artificial Sequence
  Synthetic oligonucleotide; CTT chr2 60523242 60523263 60523247 60523242 -
tgtgcctcccctgagttgagaa

SEQ ID NO: 215503 - DNA, 22 bp, Artificial Sequence
  Synthetic oligonucleotide; TTT chr2 60523241 60523262 60523246 60523241 -
gtgcctcccctgagttgagaag

SEQ ID NO: 215504 - DNA, 22 bp, Artificial Sequence
  Synthetic oligonucleotide; TTG chr2 60523240 60523261 60523245 60523240 -
tgcctcccctgagttgagaaga

SEQ ID NO: 215505 - DNA, 22 bp, Artificial Sequence
  Synthetic oligonucleotide; CTC chr2 60523234 60523255 60523239 60523234 -
ccctgagttgagaagactggtg

SEQ ID NO: 215506 - DNA, 22 bp, Artificial Sequence
  Synthetic oligonucleotide; CTG chr2 60523229 60523250 60523234 60523229 -
agttgagaagactggtgtttat

SEQ ID NO: 215507 - DNA, 22 bp, Artificial Sequence
  Synthetic oligonucleotide; TTG chr2 60523224 60523245 60523229 60523224 -
agaagactggtgtttattcttt

SEQ ID NO: 215508 - DNA, 22 bp, Artificial Sequence
  Synthetic oligonucleotide; CTG chr2 60523215 60523236 60523220 60523215 -
gtgtttattctttctctaggtt

SEQ ID NO: 215509 - DNA, 22 bp, Artificial Sequence
  Synthetic oligonucleotide; TTT chr2 60523209 60523230 60523214 60523209 -
attctttctctaggttgcaaca

SEQ ID NO: 215510 - DNA, 22 bp, Artificial Sequence
  Synthetic oligonucleotide; TTA chr2 60523208 60523229 60523213 60523208 -
ttctttctctaggttgcaacac

SEQ ID NO: 215511 - DNA, 22 bp, Artificial Sequence
  Synthetic oligonucleotide; TTC chr2 60523205 60523226 60523210 60523205 -
tttctctaggttgcaacacgtg

SEQ ID NO: 215512 - DNA, 22 bp, Artificial Sequence
  Synthetic oligonucleotide; CTT chr2 60523203 60523224 60523208 60523203 -
tctctaggttgcaacacgtgtt

SEQ ID NO: 215513 - DNA, 22 bp, Artificial Sequence
  Synthetic oligonucleotide; TTT chr2 60523202 60523223 60523207 60523202 -
ctctaggttgcaacacgtgttg

SEQ ID NO: 215514 - DNA, 22 bp, Artificial Sequence
  Synthetic oligonucleotide; TTC chr2 60523201 60523222 60523206 60523201 -
tctaggttgcaacacgtgttgc

SEQ ID NO: 215515 - DNA, 22 bp, Artificial Sequence
  Synthetic oligonucleotide; CTC chr2 60523199 60523220 60523204 60523199 -
taggttgcaacacgtgttgcct

SEQ ID NO: 215516 - DNA, 22 bp, Artificial Sequence
  Synthetic oligonucleotide; CTA chr2 60523197 60523218 60523202 60523197 -
ggttgcaacacgtgttgccttg

SEQ ID NO: 215517 - DNA, 22 bp, Artificial Sequence
  Synthetic oligonucleotide; TTG chr2 60523192 60523213 60523197 60523192 -
caacacgtgttgccttgaaatc

SEQ ID NO: 215518 - DNA, 22 bp, Artificial Sequence
  Synthetic oligonucleotide; TTG chr2 60523180 60523201 60523185 60523180 -
ccttgaaatctcccttctttac

SEQ ID NO: 215519 - DNA, 22 bp, Artificial Sequence
  Synthetic oligonucleotide; CTT chr2 60523176 60523197 60523181 60523176 -
gaaatctcccttctttacggtt

SEQ ID NO: 215520 - DNA, 22 bp, Artificial Sequence
  Synthetic oligonucleotide; TTG chr2 60523175 60523196 60523180 60523175 -
aaatctcccttctttacggttc

SEQ ID NO: 215521 - DNA, 22 bp, Artificial Sequence
  Synthetic oligonucleotide; CTC chr2 60523168 60523189 60523173 60523168 -
ccttctttacggttctgccatg

SEQ ID NO: 215522 - DNA, 22 bp, Artificial Sequence
  Synthetic oligonucleotide; CTT chr2 60523164 60523185 60523169 60523164 -
ctttacggttctgccatgagtg

SEQ ID NO: 215523 - DNA, 22 bp, Artificial Sequence
  Synthetic oligonucleotide; TTC chr2 60523163 60523184 60523168 60523163 -
tttacggttctgccatgagtgt

SEQ ID NO: 215524 - DNA, 22 bp, Artificial Sequence
  Synthetic oligonucleotide; CTT chr2 60523161 60523182 60523166 60523161 -
tacggttctgccatgagtgtat

SEQ ID NO: 215525 - DNA, 22 bp, Artificial Sequence
  Synthetic oligonucleotide; TTT chr2 60523160 60523181 60523165 60523160 -
acggttctgccatgagtgtatt

SEQ ID NO: 215526 - DNA, 22 bp, Artificial Sequence
  Synthetic oligonucleotide; TTA chr2 60523159 60523180 60523164 60523159 -
cggttctgccatgagtgtattt

SEQ ID NO: 215527 - DNA, 22 bp, Artificial Sequence
  Synthetic oligonucleotide; TTC chr2 60523153 60523174 60523158 60523153 -
tgccatgagtgtattttctgtg

SEQ ID NO: 215528 - DNA, 22 bp, Artificial Sequence
  Synthetic oligonucleotide; CTG chr2 60523151 60523172 60523156 60523151 -
ccatgagtgtattttctgtgac

SEQ ID NO: 215529 - DNA, 22 bp, Artificial Sequence
  Synthetic oligonucleotide; TTT chr2 60523137 60523158 60523142 60523137 -
tctgtgacctgcctctgcatct

SEQ ID NO: 215530 - DNA, 22 bp, Artificial Sequence
  Synthetic oligonucleotide; TTT chr2 60523136 60523157 60523141 60523136 -
ctgtgacctgcctctgcatctg

SEQ ID NO: 215531 - DNA, 22 bp, Artificial Sequence
  Synthetic oligonucleotide; TTC chr2 60523135 60523156 60523140 60523135 -
tgtgacctgcctctgcatctgg

SEQ ID NO: 215532 - DNA, 22 bp, Artificial Sequence
  Synthetic oligonucleotide; CTG chr2 60523133 60523154 60523138 60523133 -
tgacctgcctctgcatctggtt

SEQ ID NO: 215533 - DNA, 22 bp, Artificial Sequence
  Synthetic oligonucleotide; CTG chr2 60523126 60523147 60523131 60523126 -
cctctgcatctggttaaatgga

SEQ ID NO: 215534 - DNA, 22 bp, Artificial Sequence
  Synthetic oligonucleotide; CTC chr2 60523122 60523143 60523127 60523122 -
tgcatctggttaaatggacttc

SEQ ID NO: 215535 - DNA, 22 bp, Artificial Sequence
  Synthetic oligonucleotide; CTG chr2 60523120 60523141 60523125 60523120 -
catctggttaaatggacttcag

SEQ ID NO: 215536 - DNA, 22 bp, Artificial Sequence
  Synthetic oligonucleotide; CTG chr2 60523114 60523135 60523119 60523114 -
gttaaatggacttcagtaatct

SEQ ID NO: 215537 - DNA, 22 bp, Artificial Sequence
  Synthetic oligonucleotide; TTA chr2 60523110 60523131 60523115 60523110 -
aatggacttcagtaatctgtac

SEQ ID NO: 215538 - DNA, 22 bp, Artificial Sequence
  Synthetic oligonucleotide; CTT chr2 60523101 60523122 60523106 60523101 -
cagtaatctgtacacagttact

SEQ ID NO: 215539 - DNA, 22 bp, Artificial Sequence
  Synthetic oligonucleotide; TTC chr2 60523100 60523121 60523105 60523100 -
agtaatctgtacacagttactt

SEQ ID NO: 215540 - DNA, 22 bp, Artificial Sequence
  Synthetic oligonucleotide; CTG chr2 60523091 60523112 60523096 60523091 -
tacacagttacttcttacttat

SEQ ID NO: 215541 - DNA, 22 bp, Artificial Sequence
  Synthetic oligonucleotide; TTA chr2 60523081 60523102 60523086 60523081 -
cttcttacttattttatatcct

SEQ ID NO: 215542 - DNA, 22 bp, Artificial Sequence
  Synthetic oligonucleotide; CTT chr2 60523078 60523099 60523083 60523078 -
cttacttattttatatcctgaa

SEQ ID NO: 215543 - DNA, 22 bp, Artificial Sequence
  Synthetic oligonucleotide; TTC chr2 60523077 60523098 60523082 60523077 -
ttacttattttatatcctgaaa

SEQ ID NO: 215544 - DNA, 22 bp, Artificial Sequence
  Synthetic oligonucleotide; CTT chr2 60523075 60523096 60523080 60523075 -
acttattttatatcctgaaaga

SEQ ID NO: 215545 - DNA, 22 bp, Artificial Sequence
  Synthetic oligonucleotide; TTA chr2 60523074 60523095 60523079 60523074 -
cttattttatatcctgaaagat

SEQ ID NO: 215546 - DNA, 22 bp, Artificial Sequence
  Synthetic oligonucleotide; CTT chr2 60523071 60523092 60523076 60523071 -
attttatatcctgaaagatatt

SEQ ID NO: 215547 - DNA, 22 bp, Artificial Sequence
  Synthetic oligonucleotide; TTA chr2 60523070 60523091 60523075 60523070 -
ttttatatcctgaaagatatta

SEQ ID NO: 215548 - DNA, 22 bp, Artificial Sequence
  Synthetic oligonucleotide; TTT chr2 60523067 60523088 60523072 60523067 -
tatatcctgaaagatattaagt

SEQ ID NO: 215549 - DNA, 22 bp, Artificial Sequence
  Synthetic oligonucleotide; TTT chr2 60523066 60523087 60523071 60523066 -
atatcctgaaagatattaagtc

SEQ ID NO: 215550 - DNA, 22 bp, Artificial Sequence
  Synthetic oligonucleotide; TTA chr2 60523065 60523086 60523070 60523065 -
tatcctgaaagatattaagtcc

SEQ ID NO: 215551 - DNA, 22 bp, Artificial Sequence
  Synthetic oligonucleotide; CTG chr2 60523058 60523079 60523063 60523058 -
aaagatattaagtccaacaagc

SEQ ID NO: 215552 - DNA, 22 bp, Artificial Sequence
  Synthetic oligonucleotide; TTA chr2 60523048 60523069 60523053 60523048 -
agtccaacaagcttttacccac

SEQ ID NO: 215553 - DNA, 22 bp, Artificial Sequence
  Synthetic oligonucleotide; CTT chr2 60523034 60523055 60523039 60523034 -
ttacccacagagtctacagaga

SEQ ID NO: 215554 - DNA, 22 bp, Artificial Sequence
  Synthetic oligonucleotide; TTT chr2 60523033 60523054 60523038 60523033 -
tacccacagagtctacagagaa

SEQ ID NO: 215555 - DNA, 22 bp, Artificial Sequence
  Synthetic oligonucleotide; TTT chr2 60523032 60523053 60523037 60523032 -
acccacagagtctacagagaaa

SEQ ID NO: 215556 - DNA, 22 bp, Artificial Sequence
  Synthetic oligonucleotide; TTA chr2 60523031 60523052 60523036 60523031 -
cccacagagtctacagagaaaa

SEQ ID NO: 215557 - DNA, 22 bp, Artificial Sequence
  Synthetic oligonucleotide; CTA chr2 60523018 60523039 60523023 60523018 -
cagagaaaacggccaggcaatt

SEQ ID NO: 215558 - DNA, 22 bp, Artificial Sequence
  Synthetic oligonucleotide; TTT chr2 60522995 60523016 60523000 60522995 -
ttgtttcaatctctgtgtctct

SEQ ID NO: 215559 - DNA, 22 bp, Artificial Sequence
  Synthetic oligonucleotide; TTT chr2 60522994 60523015 60522999 60522994 -
tgtttcaatctctgtgtctctc

SEQ ID NO: 215560 - DNA, 22 bp, Artificial Sequence
  Synthetic oligonucleotide; TTT chr2 60522993 60523014 60522998 60522993 -
gtttcaatctctgtgtctctct

SEQ ID NO: 215561 - DNA, 22 bp, Artificial Sequence
  Synthetic oligonucleotide; TTG chr2 60522992 60523013 60522997 60522992 -
tttcaatctctgtgtctctctg

SEQ ID NO: 215562 - DNA, 22 bp, Artificial Sequence
  Synthetic oligonucleotide; TTT chr2 60522989 60523010 60522994 60522989 -
caatctctgtgtctctctggag

SEQ ID NO: 215563 - DNA, 22 bp, Artificial Sequence
  Synthetic oligonucleotide; TTC chr2 60522988 60523009 60522993 60522988 -
aatctctgtgtctctctggagc

SEQ ID NO: 215564 - DNA, 22 bp, Artificial Sequence
  Synthetic oligonucleotide; CTC chr2 60522982 60523003 60522987 60522982 -
tgtgtctctctggagcactagt

SEQ ID NO: 215565 - DNA, 22 bp, Artificial Sequence
  Synthetic oligonucleotide; CTG chr2 60522980 60523001 60522985 60522980 -
tgtctctctggagcactagttc

SEQ ID NO: 215566 - DNA, 22 bp, Artificial Sequence
  Synthetic oligonucleotide; CTC chr2 60522974 60522995 60522979 60522974 -
tctggagcactagttccagagg

SEQ ID NO: 215567 - DNA, 22 bp, Artificial Sequence
  Synthetic oligonucleotide; CTC chr2 60522972 60522993 60522977 60522972 -
tggagcactagttccagaggct

SEQ ID NO: 215568 - DNA, 22 bp, Artificial Sequence
  Synthetic oligonucleotide; CTG chr2 60522970 60522991 60522975 60522970 -
gagcactagttccagaggctga

SEQ ID NO: 215569 - DNA, 22 bp, Artificial Sequence
  Synthetic oligonucleotide; CTA chr2 60522962 60522983 60522967 60522962 -
gttccagaggctgatcaatagg

SEQ ID NO: 215570 - DNA, 22 bp, Artificial Sequence
  Synthetic oligonucleotide; TTC chr2 60522958 60522979 60522963 60522958 -
cagaggctgatcaataggtttt

SEQ ID NO: 215571 - DNA, 22 bp, Artificial Sequence
  Synthetic oligonucleotide; CTG chr2 60522949 60522970 60522954 60522949 -
atcaataggttttattgtagac

SEQ ID NO: 215572 - DNA, 22 bp, Artificial Sequence
  Synthetic oligonucleotide; TTT chr2 60522937 60522958 60522942 60522937 -
tattgtagacctcactgtctct

SEQ ID NO: 215573 - DNA, 22 bp, Artificial Sequence
  Synthetic oligonucleotide; TTT chr2 60522936 60522957 60522941 60522936 -
attgtagacctcactgtctcta

SEQ ID NO: 215574 - DNA, 22 bp, Artificial Sequence
  Synthetic oligonucleotide; TTA chr2 60522935 60522956 60522940 60522935 -
ttgtagacctcactgtctctaa

SEQ ID NO: 215575 - DNA, 22 bp, Artificial Sequence
  Synthetic oligonucleotide; TTG chr2 60522932 60522953 60522937 60522932 -
tagacctcactgtctctaaaag

SEQ ID NO: 215576 - DNA, 22 bp, Artificial Sequence
  Synthetic oligonucleotide; CTC chr2 60522924 60522945 60522929 60522924 -
actgtctctaaaagcattttga

SEQ ID NO: 215577 - DNA, 22 bp, Artificial Sequence
  Synthetic oligonucleotide; CTG chr2 60522920 60522941 60522925 60522920 -
tctctaaaagcattttgacctt

SEQ ID NO: 215578 - DNA, 22 bp, Artificial Sequence
  Synthetic oligonucleotide; CTC chr2 60522916 60522937 60522921 60522916 -
taaaagcattttgaccttatcc

SEQ ID NO: 215579 - DNA, 22 bp, Artificial Sequence
  Synthetic oligonucleotide; CTA chr2 60522914 60522935 60522919 60522914 -
aaagcattttgaccttatcctg

SEQ ID NO: 215580 - DNA, 22 bp, Artificial Sequence
  Synthetic oligonucleotide; TTT chr2 60522905 60522926 60522910 60522905 -
tgaccttatcctgtctaaaaat

SEQ ID NO: 215581 - DNA, 22 bp, Artificial Sequence
  Synthetic oligonucleotide; TTT chr2 60522904 60522925 60522909 60522904 -
gaccttatcctgtctaaaaata

SEQ ID NO: 215582 - DNA, 22 bp, Artificial Sequence
  Synthetic oligonucleotide; TTG chr2 60522903 60522924 60522908 60522903 -
accttatcctgtctaaaaatag

SEQ ID NO: 215583 - DNA, 22 bp, Artificial Sequence
  Synthetic oligonucleotide; CTT chr2 60522898 60522919 60522903 60522898 -
atcctgtctaaaaatagtattt

SEQ ID NO: 215584 - DNA, 22 bp, Artificial Sequence
  Synthetic oligonucleotide; TTA chr2 60522897 60522918 60522902 60522897 -
tcctgtctaaaaatagtatttg

SEQ ID NO: 215585 - DNA, 22 bp, Artificial Sequence
  Synthetic oligonucleotide; CTG chr2 60522892 60522913 60522897 60522892 -
tctaaaaatagtatttgctctt

SEQ ID NO: 215586 - DNA, 22 bp, Artificial Sequence
  Synthetic oligonucleotide; CTA chr2 60522888 60522909 60522893 60522888 -
aaaatagtatttgctcttgcct

SEQ ID NO: 215587 - DNA, 22 bp, Artificial Sequence
  Synthetic oligonucleotide; TTT chr2 60522876 60522897 60522881 60522876 -
gctcttgcctgcagaaccttga

SEQ ID NO: 215588 - DNA, 22 bp, Artificial Sequence
  Synthetic oligonucleotide; TTG chr2 60522875 60522896 60522880 60522875 -
ctcttgcctgcagaaccttgac

SEQ ID NO: 215589 - DNA, 22 bp, Artificial Sequence
  Synthetic oligonucleotide; CTC chr2 60522872 60522893 60522877 60522872 -
ttgcctgcagaaccttgacctg

SEQ ID NO: 215590 - DNA, 22 bp, Artificial Sequence
  Synthetic oligonucleotide; CTT chr2 60522870 60522891 60522875 60522870 -
gcctgcagaaccttgacctgtg

SEQ ID NO: 215591 - DNA, 22 bp, Artificial Sequence
  Synthetic oligonucleotide; TTG chr2 60522869 60522890 60522874 60522869 -
cctgcagaaccttgacctgtga

SEQ ID NO: 215592 - DNA, 22 bp, Artificial Sequence
  Synthetic oligonucleotide; CTG chr2 60522865 60522886 60522870 60522865 -
cagaaccttgacctgtgaaaac

SEQ ID NO: 215593 - DNA, 22 bp, Artificial Sequence
  Synthetic oligonucleotide; CTT chr2 60522856 60522877 60522861 60522856 -
gacctgtgaaaacccatttgga

SEQ ID NO: 215594 - DNA, 22 bp, Artificial Sequence
  Synthetic oligonucleotide; TTG chr2 60522855 60522876 60522860 60522855 -
acctgtgaaaacccatttggaa

SEQ ID NO: 215595 - DNA, 22 bp, Artificial Sequence
  Synthetic oligonucleotide; CTG chr2 60522850 60522871 60522855 60522850 -
tgaaaacccatttggaacataa

SEQ ID NO: 215596 - DNA, 22 bp, Artificial Sequence
  Synthetic oligonucleotide; TTT chr2 60522837 60522858 60522842 60522837 -
ggaacataactgacatatctag

SEQ ID NO: 215597 - DNA, 22 bp, Artificial Sequence
  Synthetic oligonucleotide; TTG chr2 60522836 60522857 60522841 60522836 -
gaacataactgacatatctagt

SEQ ID NO: 215598 - DNA, 22 bp, Artificial Sequence
  Synthetic oligonucleotide; CTG chr2 60522825 60522846 60522830 60522825 -
acatatctagtcagctgtatat

SEQ ID NO: 215599 - DNA, 22 bp, Artificial Sequence
  Synthetic oligonucleotide; CTA chr2 60522816 60522837 60522821 60522816 -
gtcagctgtatatccaagacat

SEQ ID NO: 215600 - DNA, 22 bp, Artificial Sequence
  Synthetic oligonucleotide; CTG chr2 60522808 60522829 60522813 60522808 -
tatatccaagacatgctctgtg

SEQ ID NO: 215601 - DNA, 22 bp, Artificial Sequence
  Synthetic oligonucleotide; CTC chr2 60522790 60522811 60522795 60522790 -
tgtgaatgaattctgtgcagaa

SEQ ID NO: 215602 - DNA, 22 bp, Artificial Sequence
  Synthetic oligonucleotide; CTG chr2 60522788 60522809 60522793 60522788 -
tgaatgaattctgtgcagaacc

SEQ ID NO: 215603 - DNA, 22 bp, Artificial Sequence
  Synthetic oligonucleotide; TTC chr2 60522777 60522798 60522782 60522777 -
tgtgcagaaccgtccaggagaa

SEQ ID NO: 215604 - DNA, 22 bp, Artificial Sequence
  Synthetic oligonucleotide; CTG chr2 60522775 60522796 60522780 60522775 -
tgcagaaccgtccaggagaaca

SEQ ID NO: 215605 - DNA, 22 bp, Artificial Sequence
  Synthetic oligonucleotide; CTT chr2 60522750 60522771 60522755 60522750 -
tcttccaagacaaatgaattcc

SEQ ID NO: 215606 - DNA, 22 bp, Artificial Sequence
  Synthetic oligonucleotide; TTT chr2 60522749 60522770 60522754 60522749 -
cttccaagacaaatgaattcca

SEQ ID NO: 215607 - DNA, 22 bp, Artificial Sequence
  Synthetic oligonucleotide; TTC chr2 60522748 60522769 60522753 60522748 -
ttccaagacaaatgaattccag

SEQ ID NO: 215608 - DNA, 22 bp, Artificial Sequence
  Synthetic oligonucleotide; CTT chr2 60522746 60522767 60522751 60522746 -
ccaagacaaatgaattccagtt

SEQ ID NO: 215609 - DNA, 22 bp, Artificial Sequence
  Synthetic oligonucleotide; TTC chr2 60522745 60522766 60522750 60522745 -
caagacaaatgaattccagttc

SEQ ID NO: 215610 - DNA, 22 bp, Artificial Sequence
  Synthetic oligonucleotide; TTC chr2 60522729 60522750 60522734 60522729 -
cagttctgaacactgggagtgc

SEQ ID NO: 215611 - DNA, 22 bp, Artificial Sequence
  Synthetic oligonucleotide; TTC chr2 60522723 60522744 60522728 60522723 -
tgaacactgggagtgcacctgc

SEQ ID NO: 215612 - DNA, 22 bp, Artificial Sequence
  Synthetic oligonucleotide; CTG chr2 60522721 60522742 60522726 60522721 -
aacactgggagtgcacctgctt

SEQ ID NO: 215613 - DNA, 22 bp, Artificial Sequence
  Synthetic oligonucleotide; CTG chr2 60522714 60522735 60522719 60522714 -
ggagtgcacctgcttgtcggat

SEQ ID NO: 215614 - DNA, 22 bp, Artificial Sequence
  Synthetic oligonucleotide; CTG chr2 60522702 60522723 60522707 60522702 -
cttgtcggatgtggtgatgggc

SEQ ID NO: 215615 - DNA, 22 bp, Artificial Sequence
  Synthetic oligonucleotide; CTT chr2 60522699 60522720 60522704 60522699 -
gtcggatgtggtgatgggccac

SEQ ID NO: 215616 - DNA, 22 bp, Artificial Sequence
  Synthetic oligonucleotide; TTG chr2 60522698 60522719 60522703 60522698 -
tcggatgtggtgatgggccaca

SEQ ID NO: 215617 - DNA, 22 bp, Artificial Sequence
  Synthetic oligonucleotide; CTC chr2 60522654 60522675 60522659 60522654 -
agggcctgtggggcagtcgatg

SEQ ID NO: 215618 - DNA, 22 bp, Artificial Sequence
  Synthetic oligonucleotide; CTG chr2 60522646 60522667 60522651 60522646 -
tggggcagtcgatgtgggagga

SEQ ID NO: 215619 - DNA, 22 bp, Artificial Sequence
  Synthetic oligonucleotide; CTG chr2 60522621 60522642 60522626 60522621 -
tcacagagactctcagagggtg

SEQ ID NO: 215620 - DNA, 22 bp, Artificial Sequence
  Synthetic oligonucleotide; CTC chr2 60522609 60522630 60522614 60522609 -
tcagagggtgcattcagccctg

SEQ ID NO: 215621 - DNA, 22 bp, Artificial Sequence
  Synthetic oligonucleotide; CTC chr2 60522607 60522628 60522612 60522607 -
agagggtgcattcagccctgaa

SEQ ID NO: 215622 - DNA, 22 bp, Artificial Sequence
  Synthetic oligonucleotide; TTC chr2 60522594 60522615 60522599 60522594 -
agccctgaacagggcaaaggac

SEQ ID NO: 215623 - DNA, 22 bp, Artificial Sequence
  Synthetic oligonucleotide; CTG chr2 60522587 60522608 60522592 60522587 -
aacagggcaaaggactgcaagg

SEQ ID NO: 215624 - DNA, 22 bp, Artificial Sequence
  Synthetic oligonucleotide; CTG chr2 60522570 60522591 60522575 60522570 -
caaggggcaggagcttgggctg

SEQ ID NO: 215625 - DNA, 22 bp, Artificial Sequence
  Synthetic oligonucleotide; CTT chr2 60522554 60522575 60522559 60522554 -
gggctgacatgcaaggtggctt

SEQ ID NO: 215626 - DNA, 22 bp, Artificial Sequence
  Synthetic oligonucleotide; TTG chr2 60522553 60522574 60522558 60522553 -
ggctgacatgcaaggtggcttt

SEQ ID NO: 215627 - DNA, 22 bp, Artificial Sequence
  Synthetic oligonucleotide; CTG chr2 60522548 60522569 60522553 60522548 -
acatgcaaggtggctttacaca

SEQ ID NO: 215628 - DNA, 22 bp, Artificial Sequence
  Synthetic oligonucleotide; CTT chr2 60522532 60522553 60522537 60522532 -
tacacaaggccctttttagaga

SEQ ID NO: 215629 - DNA, 22 bp, Artificial Sequence
  Synthetic oligonucleotide; TTT chr2 60522531 60522552 60522536 60522531 -
acacaaggccctttttagagag

SEQ ID NO: 215630 - DNA, 22 bp, Artificial Sequence
  Synthetic oligonucleotide; TTA chr2 60522530 60522551 60522535 60522530 -
cacaaggccctttttagagagt

SEQ ID NO: 215631 - DNA, 22 bp, Artificial Sequence
  Synthetic oligonucleotide; CTT chr2 60522518 60522539 60522523 60522518 -
tttagagagtgtgattctctga

SEQ ID NO: 215632 - DNA, 22 bp, Artificial Sequence
  Synthetic oligonucleotide; TTT chr2 60522517 60522538 60522522 60522517 -
ttagagagtgtgattctctgaa

SEQ ID NO: 215633 - DNA, 22 bp, Artificial Sequence
  Synthetic oligonucleotide; TTT chr2 60522516 60522537 60522521 60522516 -
tagagagtgtgattctctgaag

SEQ ID NO: 215634 - DNA, 22 bp, Artificial Sequence
  Synthetic oligonucleotide; TTT chr2 60522515 60522536 60522520 60522515 -
agagagtgtgattctctgaagc

SEQ ID NO: 215635 - DNA, 22 bp, Artificial Sequence
  Synthetic oligonucleotide; TTA chr2 60522514 60522535 60522519 60522514 -
gagagtgtgattctctgaagct

SEQ ID NO: 215636 - DNA, 22 bp, Artificial Sequence
  Synthetic oligonucleotide; TTC chr2 60522501 60522522 60522506 60522501 -
tctgaagcttttcttggcagct

SEQ ID NO: 215637 - DNA, 22 bp, Artificial Sequence
  Synthetic oligonucleotide; CTC chr2 60522499 60522520 60522504 60522499 -
tgaagcttttcttggcagcttc

SEQ ID NO: 215638 - DNA, 22 bp, Artificial Sequence
  Synthetic oligonucleotide; CTG chr2 60522497 60522518 60522502 60522497 -
aagcttttcttggcagcttcag

SEQ ID NO: 215639 - DNA, 22 bp, Artificial Sequence
  Synthetic oligonucleotide; CTT chr2 60522491 60522512 60522496 60522491 -
ttcttggcagcttcagtcttga

SEQ ID NO: 215640 - DNA, 22 bp, Artificial Sequence
  Synthetic oligonucleotide; TTT chr2 60522490 60522511 60522495 60522490 -
tcttggcagcttcagtcttgaa

SEQ ID NO: 215641 - DNA, 22 bp, Artificial Sequence
  Synthetic oligonucleotide; TTT chr2 60522489 60522510 60522494 60522489 -
cttggcagcttcagtcttgaac

SEQ ID NO: 215642 - DNA, 22 bp, Artificial Sequence
  Synthetic oligonucleotide; TTC chr2 60522488 60522509 60522493 60522488 -
ttggcagcttcagtcttgaacc

SEQ ID NO: 215643 - DNA, 22 bp, Artificial Sequence
  Synthetic oligonucleotide; CTT chr2 60522486 60522507 60522491 60522486 -
ggcagcttcagtcttgaacctc

SEQ ID NO: 215644 - DNA, 22 bp, Artificial Sequence
  Synthetic oligonucleotide; TTG chr2 60522485 60522506 60522490 60522485 -
gcagcttcagtcttgaacctca

SEQ ID NO: 215645 - DNA, 22 bp, Artificial Sequence
  Synthetic oligonucleotide; CTT chr2 60522478 60522499 60522483 60522478 -
cagtcttgaacctcactggaag

SEQ ID NO: 215646 - DNA, 22 bp, Artificial Sequence
  Synthetic oligonucleotide; TTC chr2 60522477 60522498 60522482 60522477 -
agtcttgaacctcactggaagg

SEQ ID NO: 215647 - DNA, 22 bp, Artificial Sequence
  Synthetic oligonucleotide; CTT chr2 60522471 60522492 60522476 60522471 -
gaacctcactggaagggatcct

SEQ ID NO: 215648 - DNA, 22 bp, Artificial Sequence
  Synthetic oligonucleotide; TTG chr2 60522470 60522491 60522475 60522470 -
aacctcactggaagggatcctc

SEQ ID NO: 215649 - DNA, 22 bp, Artificial Sequence
  Synthetic oligonucleotide; CTC chr2 60522464 60522485 60522469 60522464 -
actggaagggatcctccaaaac

SEQ ID NO: 215650 - DNA, 22 bp, Artificial Sequence
  Synthetic oligonucleotide; CTG chr2 60522460 60522481 60522465 60522460 -
gaagggatcctccaaaacatga

SEQ ID NO: 215651 - DNA, 22 bp, Artificial Sequence
  Synthetic oligonucleotide; CTC chr2 60522448 60522469 60522453 60522448 -
caaaacatgacccagatggaaa

SEQ ID NO: 215652 - DNA, 22 bp, Artificial Sequence
  Synthetic oligonucleotide; TTT chr2 60522417 60522438 60522422 60522417 -
ctgagtttaaaataactcccct

SEQ ID NO: 215653 - DNA, 22 bp, Artificial Sequence
  Synthetic oligonucleotide; TTC chr2 60522416 60522437 60522421 60522416 -
tgagtttaaaataactccccta

SEQ ID NO: 215654 - DNA, 22 bp, Artificial Sequence
  Synthetic oligonucleotide; CTG chr2 60522414 60522435 60522419 60522414 -
agtttaaaataactcccctatt

SEQ ID NO: 215655 - DNA, 22 bp, Artificial Sequence
  Synthetic oligonucleotide; TTT chr2 60522409 60522430 60522414 60522409 -
aaaataactcccctatttggta

SEQ ID NO: 215656 - DNA, 22 bp, Artificial Sequence
  Synthetic oligonucleotide; TTA chr2 60522408 60522429 60522413 60522408 -
aaataactcccctatttggtaa

SEQ ID NO: 215657 - DNA, 22 bp, Artificial Sequence
  Synthetic oligonucleotide; CTC chr2 60522399 60522420 60522404 60522399 -
ccctatttggtaatacgggact

SEQ ID NO: 215658 - DNA, 22 bp, Artificial Sequence
  Synthetic oligonucleotide; CTA chr2 60522394 60522415 60522399 60522394 -
tttggtaatacgggactttatt

SEQ ID NO: 215659 - DNA, 22 bp, Artificial Sequence
  Synthetic oligonucleotide; TTT chr2 60522391 60522412 60522396 60522391 -
ggtaatacgggactttatttgt

SEQ ID NO: 215660 - DNA, 22 bp, Artificial Sequence
  Synthetic oligonucleotide; TTG chr2 60522390 60522411 60522395 60522390 -
gtaatacgggactttatttgtg

SEQ ID NO: 215661 - DNA, 22 bp, Artificial Sequence
  Synthetic oligonucleotide; CTT chr2 60522376 60522397 60522381 60522376 -
tatttgtgactttattattttt

SEQ ID NO: 215662 - DNA, 22 bp, Artificial Sequence
  Synthetic oligonucleotide; TTT chr2 60522375 60522396 60522380 60522375 -
atttgtgactttattattttta

SEQ ID NO: 215663 - DNA, 22 bp, Artificial Sequence
  Synthetic oligonucleotide; TTA chr2 60522374 60522395 60522379 60522374 -
tttgtgactttattatttttag

SEQ ID NO: 215664 - DNA, 22 bp, Artificial Sequence
  Synthetic oligonucleotide; TTT chr2 60522371 60522392 60522376 60522371 -
gtgactttattatttttaggtg

SEQ ID NO: 215665 - DNA, 22 bp, Artificial Sequence
  Synthetic oligonucleotide; TTG chr2 60522370 60522391 60522375 60522370 -
tgactttattatttttaggtgt

SEQ ID NO: 215666 - DNA, 22 bp, Artificial Sequence
  Synthetic oligonucleotide; CTT chr2 60522364 60522385 60522369 60522364 -
tattatttttaggtgtgataat

SEQ ID NO: 215667 - DNA, 22 bp, Artificial Sequence
  Synthetic oligonucleotide; TTT chr2 60522363 60522384 60522368 60522363 -
attatttttaggtgtgataatg

SEQ ID NO: 215668 - DNA, 22 bp, Artificial Sequence
  Synthetic oligonucleotide; TTA chr2 60522362 60522383 60522367 60522362 -
ttatttttaggtgtgataatgg

SEQ ID NO: 215669 - DNA, 22 bp, Artificial Sequence
  Synthetic oligonucleotide; TTA chr2 60522359 60522380 60522364 60522359 -
tttttaggtgtgataatggttt

SEQ ID NO: 215670 - DNA, 22 bp, Artificial Sequence
  Synthetic oligonucleotide; TTT chr2 60522356 60522377 60522361 60522356 -
ttaggtgtgataatggttttgc

SEQ ID NO: 215671 - DNA, 22 bp, Artificial Sequence
  Synthetic oligonucleotide; TTT chr2 60522355 60522376 60522360 60522355 -
taggtgtgataatggttttgca

SEQ ID NO: 215672 - DNA, 22 bp, Artificial Sequence
  Synthetic oligonucleotide; TTT chr2 60522354 60522375 60522359 60522354 -
aggtgtgataatggttttgcag

SEQ ID NO: 215673 - DNA, 22 bp, Artificial Sequence
  Synthetic oligonucleotide; TTA chr2 60522353 60522374 60522358 60522353 -
ggtgtgataatggttttgcagt

SEQ ID NO: 215674 - DNA, 22 bp, Artificial Sequence
  Synthetic oligonucleotide; TTT chr2 60522337 60522358 60522342 60522337 -
tgcagttgtatttaaaagaaaa

SEQ ID NO: 215675 - DNA, 22 bp, Artificial Sequence
  Synthetic oligonucleotide; TTT chr2 60522336 60522357 60522341 60522336 -
gcagttgtatttaaaagaaaaa

SEQ ID NO: 215676 - DNA, 22 bp, Artificial Sequence
  Synthetic oligonucleotide; TTG chr2 60522335 60522356 60522340 60522335 -
cagttgtatttaaaagaaaaaa

SEQ ID NO: 215677 - DNA, 22 bp, Artificial Sequence
  Synthetic oligonucleotide; TTG chr2 60522329 60522350 60522334 60522329 -
tatttaaaagaaaaaaaacgag

SEQ ID NO: 215678 - DNA, 22 bp, Artificial Sequence
  Synthetic oligonucleotide; TTT chr2 60522324 60522345 60522329 60522324 -
aaaagaaaaaaaacgagttcct

SEQ ID NO: 215679 - DNA, 22 bp, Artificial Sequence
  Synthetic oligonucleotide; TTA chr2 60522323 60522344 60522328 60522323 -
aaagaaaaaaaacgagttccta

SEQ ID NO: 215680 - DNA, 22 bp, Artificial Sequence
  Synthetic oligonucleotide; TTC chr2 60522304 60522325 60522309 60522304 -
ctatgtttaaaaaatacataca

SEQ ID NO: 215681 - DNA, 22 bp, Artificial Sequence
  Synthetic oligonucleotide; CTA chr2 60522301 60522322 60522306 60522301 -
tgtttaaaaaatacatacagag

SEQ ID NO: 215682 - DNA, 22 bp, Artificial Sequence
  Synthetic oligonucleotide; TTT chr2 60522296 60522317 60522301 60522296 -
aaaaaatacatacagaggtgtt

SEQ ID NO: 215683 - DNA, 22 bp, Artificial Sequence
  Synthetic oligonucleotide; TTA chr2 60522295 60522316 60522300 60522295 -
aaaaatacatacagaggtgttt

SEQ ID NO: 215684 - DNA, 22 bp, Artificial Sequence
  Synthetic oligonucleotide; TTT chr2 60522273 60522294 60522278 60522273 -
actgatgaaatgatatgacgtc

SEQ ID NO: 215685 - DNA, 22 bp, Artificial Sequence
  Synthetic oligonucleotide; TTA chr2 60522272 60522293 60522277 60522272 -
ctgatgaaatgatatgacgtct

SEQ ID NO: 215686 - DNA, 22 bp, Artificial Sequence
  Synthetic oligonucleotide; CTG chr2 60522269 60522290 60522274 60522269 -
atgaaatgatatgacgtctggg

SEQ ID NO: 215687 - DNA, 22 bp, Artificial Sequence
  Synthetic oligonucleotide; CTG chr2 60522249 60522270 60522254 60522249 -
ggatcaacttaaataataaaat

SEQ ID NO: 215688 - DNA, 22 bp, Artificial Sequence
  Synthetic oligonucleotide; CTT chr2 60522239 60522260 60522244 60522239 -
aaataataaaatgggctaggga

SEQ ID NO: 215689 - DNA, 22 bp, Artificial Sequence
  Synthetic oligonucleotide; TTA chr2 60522238 60522259 60522243 60522238 -
aataataaaatgggctagggag

SEQ ID NO: 215690 - DNA, 22 bp, Artificial Sequence
  Synthetic oligonucleotide; CTA chr2 60522221 60522242 60522226 60522221 -
gggaggcgatagggttacagaa

SEQ ID NO: 215691 - DNA, 22 bp, Artificial Sequence
  Synthetic oligonucleotide; TTA chr2 60522204 60522225 60522209 60522204 -
cagaagacaagaatgactgtga

SEQ ID NO: 215692 - DNA, 22 bp, Artificial Sequence
  Synthetic oligonucleotide; CTG chr2 60522185 60522206 60522190 60522185 -
tgagctgtggtggttggagctg

SEQ ID NO: 215693 - DNA, 22 bp, Artificial Sequence
  Synthetic oligonucleotide; CTG chr2 60522178 60522199 60522183 60522178 -
tggtggttggagctggaagatg

SEQ ID NO: 215694 - DNA, 22 bp, Artificial Sequence
  Synthetic oligonucleotide; TTG chr2 60522169 60522190 60522174 60522169 -
gagctggaagatgtggacttgg

SEQ ID NO: 215695 - DNA, 22 bp, Artificial Sequence
  Synthetic oligonucleotide; CTG chr2 60522163 60522184 60522168 60522163 -
gaagatgtggacttggggactg

SEQ ID NO: 215696 - DNA, 22 bp, Artificial Sequence
  Synthetic oligonucleotide; CTT chr2 60522149 60522170 60522154 60522149 -
ggggactgatttataacattct

SEQ ID NO: 215697 - DNA, 22 bp, Artificial Sequence
  Synthetic oligonucleotide; TTG chr2 60522148 60522169 60522153 60522148 -
gggactgatttataacattctc

SEQ ID NO: 215698 - DNA, 22 bp, Artificial Sequence
  Synthetic oligonucleotide; CTG chr2 60522141 60522162 60522146 60522141 -
atttataacattctctctactt

SEQ ID NO: 215699 - DNA, 22 bp, Artificial Sequence
  Synthetic oligonucleotide; TTT chr2 60522137 60522158 60522142 60522137 -
ataacattctctctacttttgt

SEQ ID NO: 215700 - DNA, 22 bp, Artificial Sequence
  Synthetic oligonucleotide; TTA chr2 60522136 60522157 60522141 60522136 -
taacattctctctacttttgta

SEQ ID NO: 215701 - DNA, 22 bp, Artificial Sequence
  Synthetic oligonucleotide; TTC chr2 60522128 60522149 60522133 60522128 -
tctctacttttgtagtatttga

SEQ ID NO: 215702 - DNA, 22 bp, Artificial Sequence
  Synthetic oligonucleotide; CTC chr2 60522126 60522147 60522131 60522126 -
tctacttttgtagtatttgaga

SEQ ID NO: 215703 - DNA, 22 bp, Artificial Sequence
  Synthetic oligonucleotide; CTC chr2 60522124 60522145 60522129 60522124 -
tacttttgtagtatttgagatt

SEQ ID NO: 215704 - DNA, 22 bp, Artificial Sequence
  Synthetic oligonucleotide; CTA chr2 60522122 60522143 60522127 60522122 -
cttttgtagtatttgagatttt

SEQ ID NO: 215705 - DNA, 22 bp, Artificial Sequence
  Synthetic oligonucleotide; CTT chr2 60522119 60522140 60522124 60522119 -
ttgtagtatttgagatttttcc

SEQ ID NO: 215706 - DNA, 22 bp, Artificial Sequence
  Synthetic oligonucleotide; TTT chr2 60522118 60522139 60522123 60522118 -
tgtagtatttgagatttttcca

SEQ ID NO: 215707 - DNA, 22 bp, Artificial Sequence
  Synthetic oligonucleotide; TTT chr2 60522117 60522138 60522122 60522117 -
gtagtatttgagatttttccag

SEQ ID NO: 215708 - DNA, 22 bp, Artificial Sequence
  Synthetic oligonucleotide; TTG chr2 60522116 60522137 60522121 60522116 -
tagtatttgagatttttccaga

SEQ ID NO: 215709 - DNA, 22 bp, Artificial Sequence
  Synthetic oligonucleotide; TTT chr2 60522108 60522129 60522113 60522108 -
gagatttttccagaaaataaag

SEQ ID NO: 215710 - DNA, 22 bp, Artificial Sequence
  Synthetic oligonucleotide; TTG chr2 60522107 60522128 60522112 60522107 -
agatttttccagaaaataaagg

SEQ ID NO: 215711 - DNA, 22 bp, Artificial Sequence
  Synthetic oligonucleotide; TTT chr2 60522101 60522122 60522106 60522101 -
ttccagaaaataaaggtattgc

SEQ ID NO: 215712 - DNA, 22 bp, Artificial Sequence
  Synthetic oligonucleotide; TTT chr2 60522100 60522121 60522105 60522100 -
tccagaaaataaaggtattgcc

SEQ ID NO: 215713 - DNA, 22 bp, Artificial Sequence
  Synthetic oligonucleotide; TTT chr2 60522099 60522120 60522104 60522099 -
ccagaaaataaaggtattgcct

SEQ ID NO: 215714 - DNA, 22 bp, Artificial Sequence
  Synthetic oligonucleotide; TTC chr2 60522098 60522119 60522103 60522098 -
cagaaaataaaggtattgcctg

SEQ ID NO: 215715 - DNA, 22 bp, Artificial Sequence
  Synthetic oligonucleotide; TTG chr2 60522080 60522101 60522085 60522080 -
cctgactggtggagagcagtat

SEQ ID NO: 215716 - DNA, 22 bp, Artificial Sequence
  Synthetic oligonucleotide; CTG chr2 60522076 60522097 60522081 60522076 -
actggtggagagcagtatggcc

SEQ ID NO: 215717 - DNA, 22 bp, Artificial Sequence
  Synthetic oligonucleotide; CTG chr2 60522072 60522093 60522077 60522072 -
gtggagagcagtatggccttgt

SEQ ID NO: 215718 - DNA, 22 bp, Artificial Sequence
  Synthetic oligonucleotide; CTT chr2 60522052 60522073 60522057 60522052 -
gtttagtcggtgttgtttcttc

SEQ ID NO: 215719 - DNA, 22 bp, Artificial Sequence
  Synthetic oligonucleotide; TTG chr2 60522051 60522072 60522056 60522051 -
tttagtcggtgttgtttcttca

SEQ ID NO: 215720 - DNA, 22 bp, Artificial Sequence
  Synthetic oligonucleotide; TTT chr2 60522048 60522069 60522053 60522048 -
agtcggtgttgtttcttcacca

SEQ ID NO: 215721 - DNA, 22 bp, Artificial Sequence
  Synthetic oligonucleotide; TTA chr2 60522047 60522068 60522052 60522047 -
gtcggtgttgtttcttcaccaa

SEQ ID NO: 215722 - DNA, 22 bp, Artificial Sequence
  Synthetic oligonucleotide; TTG chr2 60522037 60522058 60522042 60522037 -
tttcttcaccaagggtttggct

SEQ ID NO: 215723 - DNA, 22 bp, Artificial Sequence
  Synthetic oligonucleotide; TTT chr2 60522034 60522055 60522039 60522034 -
cttcaccaagggtttggctcag

SEQ ID NO: 215724 - DNA, 22 bp, Artificial Sequence
  Synthetic oligonucleotide; TTC chr2 60522033 60522054 60522038 60522033 -
ttcaccaagggtttggctcaga

SEQ ID NO: 215725 - DNA, 22 bp, Artificial Sequence
  Synthetic oligonucleotide; CTT chr2 60522031 60522052 60522036 60522031 -
caccaagggtttggctcagagg

SEQ ID NO: 215726 - DNA, 22 bp, Artificial Sequence
  Synthetic oligonucleotide; TTC chr2 60522030 60522051 60522035 60522030 -
accaagggtttggctcagaggt

SEQ ID NO: 215727 - DNA, 22 bp, Artificial Sequence
  Synthetic oligonucleotide; TTT chr2 60522019 60522040 60522024 60522019 -
ggctcagaggtagcaaggggac

SEQ ID NO: 215728 - DNA, 22 bp, Artificial Sequence
  Synthetic oligonucleotide; TTG chr2 60522018 60522039 60522023 60522018 -
gctcagaggtagcaaggggaca

SEQ ID NO: 215729 - DNA, 22 bp, Artificial Sequence
  Synthetic oligonucleotide; CTC chr2 60522014 60522035 60522019 60522014 -
agaggtagcaaggggacaagtg

SEQ ID NO: 215730 - DNA, 22 bp, Artificial Sequence
  Synthetic oligonucleotide; CTA chr2 60521987 60522008 60521992 60521987 -
tgggcaagaaagtacctgtgag

SEQ ID NO: 215731 - DNA, 22 bp, Artificial Sequence
  Synthetic oligonucleotide; CTG chr2 60521969 60521990 60521974 60521969 -
tgagctcaagtcttgtatctgg

SEQ ID NO: 215732 - DNA, 22 bp, Artificial Sequence
  Synthetic oligonucleotide; CTC chr2 60521962 60521983 60521967 60521962 -
aagtcttgtatctgggaagttc

SEQ ID NO: 215733 - DNA, 22 bp, Artificial Sequence
  Synthetic oligonucleotide; CTT chr2 60521955 60521976 60521960 60521955 -
gtatctgggaagttcattgtga

SEQ ID NO: 215734 - DNA, 22 bp, Artificial Sequence
  Synthetic oligonucleotide; TTG chr2 60521954 60521975 60521959 60521954 -
tatctgggaagttcattgtgaa

SEQ ID NO: 215735 - DNA, 22 bp, Artificial Sequence
  Synthetic oligonucleotide; CTG chr2 60521948 60521969 60521953 60521948 -
ggaagttcattgtgaaggggtc

SEQ ID NO: 215736 - DNA, 22 bp, Artificial Sequence
  Synthetic oligonucleotide; TTC chr2 60521940 60521961 60521945 60521940 -
attgtgaaggggtcatttaagg

SEQ ID NO: 215737 - DNA, 22 bp, Artificial Sequence
  Synthetic oligonucleotide; TTG chr2 60521936 60521957 60521941 60521936 -
tgaaggggtcatttaagggtct

SEQ ID NO: 215738 - DNA, 22 bp, Artificial Sequence
  Synthetic oligonucleotide; TTT chr2 60521922 60521943 60521927 60521922 -
aagggtctgtactgtgcactgt

SEQ ID NO: 215739 - DNA, 22 bp, Artificial Sequence
  Synthetic oligonucleotide; TTA chr2 60521921 60521942 60521926 60521921 -
agggtctgtactgtgcactgtc

SEQ ID NO: 215740 - DNA, 22 bp, Artificial Sequence
  Synthetic oligonucleotide; CTG chr2 60521913 60521934 60521918 60521913 -
tactgtgcactgtcccccattc

SEQ ID NO: 215741 - DNA, 22 bp, Artificial Sequence
  Synthetic oligonucleotide; CTG chr2 60521908 60521929 60521913 60521908 -
tgcactgtcccccattctcctg

SEQ ID NO: 215742 - DNA, 22 bp, Artificial Sequence
  Synthetic oligonucleotide; CTG chr2 60521901 60521922 60521906 60521901 -
tcccccattctcctggaagaac

SEQ ID NO: 215743 - DNA, 22 bp, Artificial Sequence
  Synthetic oligonucleotide; TTC chr2 60521891 60521912 60521896 60521891 -
tcctggaagaacagagatccct

SEQ ID NO: 215744 - DNA, 22 bp, Artificial Sequence
  Synthetic oligonucleotide; CTC chr2 60521889 60521910 60521894 60521889 -
ctggaagaacagagatcccttg

SEQ ID NO: 215745 - DNA, 22 bp, Artificial Sequence
  Synthetic oligonucleotide; CTG chr2 60521886 60521907 60521891 60521886 -
gaagaacagagatcccttgtct

SEQ ID NO: 215746 - DNA, 22 bp, Artificial Sequence
  Synthetic oligonucleotide; CTT chr2 60521868 60521889 60521873 60521868 -
gtctttttcagtgcatgaggca

SEQ ID NO: 215747 - DNA, 22 bp, Artificial Sequence
  Synthetic oligonucleotide; TTG chr2 60521867 60521888 60521872 60521867 -
tctttttcagtgcatgaggcag

SEQ ID NO: 215748 - DNA, 22 bp, Artificial Sequence
  Synthetic oligonucleotide; CTT chr2 60521863 60521884 60521868 60521863 -
tttcagtgcatgaggcagagtc

SEQ ID NO: 215749 - DNA, 22 bp, Artificial Sequence
  Synthetic oligonucleotide; TTT chr2 60521862 60521883 60521867 60521862 -
ttcagtgcatgaggcagagtca

SEQ ID NO: 215750 - DNA, 22 bp, Artificial Sequence
  Synthetic oligonucleotide; TTT chr2 60521861 60521882 60521866 60521861 -
tcagtgcatgaggcagagtcag

SEQ ID NO: 215751 - DNA, 22 bp, Artificial Sequence
  Synthetic oligonucleotide; TTT chr2 60521860 60521881 60521865 60521860 -
cagtgcatgaggcagagtcaga

SEQ ID NO: 215752 - DNA, 22 bp, Artificial Sequence
  Synthetic oligonucleotide; TTC chr2 60521859 60521880 60521864 60521859 -
agtgcatgaggcagagtcagat

SEQ ID NO: 215753 - DNA, 22 bp, Artificial Sequence
  Synthetic oligonucleotide; TTT chr2 60521828 60521849 60521833 60521828 -
gcttgagtttcagcacaggtgc

SEQ ID NO: 215754 - DNA, 22 bp, Artificial Sequence
  Synthetic oligonucleotide; TTG chr2 60521827 60521848 60521832 60521827 -
cttgagtttcagcacaggtgcc

SEQ ID NO: 215755 - DNA, 22 bp, Artificial Sequence
  Synthetic oligonucleotide; CTT chr2 60521824 60521845 60521829 60521824 -
gagtttcagcacaggtgcctct

SEQ ID NO: 215756 - DNA, 22 bp, Artificial Sequence
  Synthetic oligonucleotide; TTG chr2 60521823 60521844 60521828 60521823 -
agtttcagcacaggtgcctctg

SEQ ID NO: 215757 - DNA, 22 bp, Artificial Sequence
  Synthetic oligonucleotide; TTT chr2 60521818 60521839 60521823 60521818 -
cagcacaggtgcctctgtgcct

SEQ ID NO: 215758 - DNA, 22 bp, Artificial Sequence
  Synthetic oligonucleotide; TTC chr2 60521817 60521838 60521822 60521817 -
agcacaggtgcctctgtgcctc

SEQ ID NO: 215759 - DNA, 22 bp, Artificial Sequence
  Synthetic oligonucleotide; CTC chr2 60521803 60521824 60521808 60521803 -
tgtgcctcgtggtgagggtcag

SEQ ID NO: 215760 - DNA, 22 bp, Artificial Sequence
  Synthetic oligonucleotide; CTG chr2 60521801 60521822 60521806 60521801 -
tgcctcgtggtgagggtcagga

SEQ ID NO: 215761 - DNA, 22 bp, Artificial Sequence
  Synthetic oligonucleotide; CTC chr2 60521795 60521816 60521800 60521795 -
gtggtgagggtcaggaagaagc

SEQ ID NO: 215762 - DNA, 22 bp, Artificial Sequence
  Synthetic oligonucleotide; CTG chr2 60521768 60521789 60521773 60521768 -
ggacgtgctcacgtggctggta

SEQ ID NO: 215763 - DNA, 22 bp, Artificial Sequence
  Synthetic oligonucleotide; CTC chr2 60521758 60521779 60521763 60521758 -
acgtggctggtagtgttatgaa

SEQ ID NO: 215764 - DNA, 22 bp, Artificial Sequence
  Synthetic oligonucleotide; CTG chr2 60521749 60521770 60521754 60521749 -
gtagtgttatgaagacaaggct

SEQ ID NO: 215765 - DNA, 22 bp, Artificial Sequence
  Synthetic oligonucleotide; TTA chr2 60521740 60521761 60521745 60521740 -
tgaagacaaggctttgggacct

SEQ ID NO: 215766 - DNA, 22 bp, Artificial Sequence
  Synthetic oligonucleotide; CTT chr2 60521726 60521747 60521731 60521726 -
tgggacctttctttggccattt

SEQ ID NO: 215767 - DNA, 22 bp, Artificial Sequence
  Synthetic oligonucleotide; TTT chr2 60521725 60521746 60521730 60521725 -
gggacctttctttggccatttg

SEQ ID NO: 215768 - DNA, 22 bp, Artificial Sequence
  Synthetic oligonucleotide; TTG chr2 60521724 60521745 60521729 60521724 -
ggacctttctttggccatttga

SEQ ID NO: 215769 - DNA, 22 bp, Artificial Sequence
  Synthetic oligonucleotide; CTT chr2 60521717 60521738 60521722 60521717 -
tctttggccatttgagccctgg

SEQ ID NO: 215770 - DNA, 22 bp, Artificial Sequence
  Synthetic oligonucleotide; TTT chr2 60521716 60521737 60521721 60521716 -
ctttggccatttgagccctggc

SEQ ID NO: 215771 - DNA, 22 bp, Artificial Sequence
  Synthetic oligonucleotide; TTC chr2 60521715 60521736 60521720 60521715 -
tttggccatttgagccctggct

SEQ ID NO: 215772 - DNA, 22 bp, Artificial Sequence
  Synthetic oligonucleotide; CTT chr2 60521713 60521734 60521718 60521713 -
tggccatttgagccctggctat

SEQ ID NO: 215773 - DNA, 22 bp, Artificial Sequence
  Synthetic oligonucleotide; TTT chr2 60521712 60521733 60521717 60521712 -
ggccatttgagccctggctatt

SEQ ID NO: 215774 - DNA, 22 bp, Artificial Sequence
  Synthetic oligonucleotide; TTG chr2 60521711 60521732 60521716 60521711 -
gccatttgagccctggctatta

SEQ ID NO: 215775 - DNA, 22 bp, Artificial Sequence
  Synthetic oligonucleotide; TTT chr2 60521704 60521725 60521709 60521704 -
gagccctggctattagagaaag

SEQ ID NO: 215776 - DNA, 22 bp, Artificial Sequence
  Synthetic oligonucleotide; TTG chr2 60521703 60521724 60521708 60521703 -
agccctggctattagagaaaga

SEQ ID NO: 215777 - DNA, 22 bp, Artificial Sequence
  Synthetic oligonucleotide; CTG chr2 60521696 60521717 60521701 60521696 -
gctattagagaaagatgatttg

SEQ ID NO: 215778 - DNA, 22 bp, Artificial Sequence
  Synthetic oligonucleotide; CTA chr2 60521692 60521713 60521697 60521692 -
ttagagaaagatgatttgcctg

SEQ ID NO: 215779 - DNA, 22 bp, Artificial Sequence
  Synthetic oligonucleotide; TTA chr2 60521689 60521710 60521694 60521689 -
gagaaagatgatttgcctgaga

SEQ ID NO: 215780 - DNA, 22 bp, Artificial Sequence
  Synthetic oligonucleotide; TTT chr2 60521675 60521696 60521680 60521675 -
gcctgagaggagattgaccaca

SEQ ID NO: 215781 - DNA, 22 bp, Artificial Sequence
  Synthetic oligonucleotide; TTG chr2 60521674 60521695 60521679 60521674 -
cctgagaggagattgaccacac

SEQ ID NO: 215782 - DNA, 22 bp, Artificial Sequence
  Synthetic oligonucleotide; CTG chr2 60521670 60521691 60521675 60521670 -
agaggagattgaccacactctc

SEQ ID NO: 215783 - DNA, 22 bp, Artificial Sequence
  Synthetic oligonucleotide; TTG chr2 60521659 60521680 60521664 60521659 -
accacactctcagaaagaaggg

SEQ ID NO: 215784 - DNA, 22 bp, Artificial Sequence
  Synthetic oligonucleotide; CTC chr2 60521650 60521671 60521655 60521650 -
tcagaaagaaggggacaaagaa

SEQ ID NO: 215785 - DNA, 22 bp, Artificial Sequence
  Synthetic oligonucleotide; CTC chr2 60521648 60521669 60521653 60521648 -
agaaagaaggggacaaagaaca

SEQ ID NO: 215786 - DNA, 22 bp, Artificial Sequence
  Synthetic oligonucleotide; TTA chr2 60521614 60521635 60521619 60521614 -
agcagccttccctttaagggag

SEQ ID NO: 215787 - DNA, 22 bp, Artificial Sequence
  Synthetic oligonucleotide; CTT chr2 60521605 60521626 60521610 60521605 -
ccctttaagggaggactggggc

SEQ ID NO: 215788 - DNA, 22 bp, Artificial Sequence
  Synthetic oligonucleotide; TTC chr2 60521604 60521625 60521609 60521604 -
cctttaagggaggactggggca

SEQ ID NO: 215789 - DNA, 22 bp, Artificial Sequence
  Synthetic oligonucleotide; CTT chr2 60521600 60521621 60521605 60521600 -
taagggaggactggggcacaag

SEQ ID NO: 215790 - DNA, 22 bp, Artificial Sequence
  Synthetic oligonucleotide; TTT chr2 60521599 60521620 60521604 60521599 -
aagggaggactggggcacaaga

SEQ ID NO: 215791 - DNA, 22 bp, Artificial Sequence
  Synthetic oligonucleotide; TTA chr2 60521598 60521619 60521603 60521598 -
agggaggactggggcacaagat

SEQ ID NO: 215792 - DNA, 22 bp, Artificial Sequence
  Synthetic oligonucleotide; CTG chr2 60521587 60521608 60521592 60521587 -
gggcacaagatggaagatgaaa

SEQ ID NO: 215793 - DNA, 22 bp, Artificial Sequence
  Synthetic oligonucleotide; TTG chr2 60521546 60521567 60521551 60521546 -
cagagctggaaaggggaatttt

SEQ ID NO: 215794 - DNA, 22 bp, Artificial Sequence
  Synthetic oligonucleotide; CTG chr2 60521538 60521559 60521543 60521538 -
gaaaggggaattttgttcttct

SEQ ID NO: 215795 - DNA, 22 bp, Artificial Sequence
  Synthetic oligonucleotide; TTT chr2 60521525 60521546 60521530 60521525 -
tgttcttctagatagcaaaagc

SEQ ID NO: 215796 - DNA, 22 bp, Artificial Sequence
  Synthetic oligonucleotide; TTT chr2 60521524 60521545 60521529 60521524 -
gttcttctagatagcaaaagcc

SEQ ID NO: 215797 - DNA, 22 bp, Artificial Sequence
  Synthetic oligonucleotide; TTG chr2 60521523 60521544 60521528 60521523 -
ttcttctagatagcaaaagcca

SEQ ID NO: 215798 - DNA, 22 bp, Artificial Sequence
  Synthetic oligonucleotide; TTC chr2 60521520 60521541 60521525 60521520 -
ttctagatagcaaaagccagga

SEQ ID NO: 215799 - DNA, 22 bp, Artificial Sequence
  Synthetic oligonucleotide; CTT chr2 60521518 60521539 60521523 60521518 -
ctagatagcaaaagccaggact

SEQ ID NO: 215800 - DNA, 22 bp, Artificial Sequence
  Synthetic oligonucleotide; TTC chr2 60521517 60521538 60521522 60521517 -
tagatagcaaaagccaggactg

SEQ ID NO: 215801 - DNA, 22 bp, Artificial Sequence
  Synthetic oligonucleotide; CTA chr2 60521515 60521536 60521520 60521515 -
gatagcaaaagccaggactgtc

SEQ ID NO: 215802 - DNA, 22 bp, Artificial Sequence
  Synthetic oligonucleotide; CTG chr2 60521495 60521516 60521500 60521495 -
tcgctgtgtgacttgaaagcta

SEQ ID NO: 215803 - DNA, 22 bp, Artificial Sequence
  Synthetic oligonucleotide; CTG chr2 60521489 60521510 60521494 60521489 -
tgtgacttgaaagctaggtcac

SEQ ID NO: 215804 - DNA, 22 bp, Artificial Sequence
  Synthetic oligonucleotide; CTT chr2 60521481 60521502 60521486 60521481 -
gaaagctaggtcactggtgggc

SEQ ID NO: 215805 - DNA, 22 bp, Artificial Sequence
  Synthetic oligonucleotide; TTG chr2 60521480 60521501 60521485 60521480 -
aaagctaggtcactggtgggct

SEQ ID NO: 215806 - DNA, 22 bp, Artificial Sequence
  Synthetic oligonucleotide; CTA chr2 60521473 60521494 60521478 60521473 -
ggtcactggtgggcttcgtgca

SEQ ID NO: 215807 - DNA, 22 bp, Artificial Sequence
  Synthetic oligonucleotide; CTG chr2 60521465 60521486 60521470 60521465 -
gtgggcttcgtgcagcccgtca

SEQ ID NO: 215808 - DNA, 22 bp, Artificial Sequence
  Synthetic oligonucleotide; CTT chr2 60521457 60521478 60521462 60521457 -
cgtgcagcccgtcacaggggag

SEQ ID NO: 215809 - DNA, 22 bp, Artificial Sequence
  Synthetic oligonucleotide; TTC chr2 60521456 60521477 60521461 60521456 -
gtgcagcccgtcacaggggagc

SEQ ID NO: 215810 - DNA, 22 bp, Artificial Sequence
  Synthetic oligonucleotide; CTC chr2 60521421 60521442 60521426 60521421 -
gtctctgccgtatctgctgcct

SEQ ID NO: 215811 - DNA, 22 bp, Artificial Sequence
  Synthetic oligonucleotide; CTC chr2 60521416 60521437 60521421 60521416 -
tgccgtatctgctgcctggaag

SEQ ID NO: 215812 - DNA, 22 bp, Artificial Sequence
  Synthetic oligonucleotide; CTG chr2 60521414 60521435 60521419 60521414 -
ccgtatctgctgcctggaagct

SEQ ID NO: 215813 - DNA, 22 bp, Artificial Sequence
  Synthetic oligonucleotide; CTG chr2 60521405 60521426 60521410 60521405 -
ctgcctggaagctgagactggc

SEQ ID NO: 215814 - DNA, 22 bp, Artificial Sequence
  Synthetic oligonucleotide; CTG chr2 60521402 60521423 60521407 60521402 -
cctggaagctgagactggccta

SEQ ID NO: 215815 - DNA, 22 bp, Artificial Sequence
  Synthetic oligonucleotide; CTG chr2 60521398 60521419 60521403 60521398 -
gaagctgagactggcctaacca

SEQ ID NO: 215816 - DNA, 22 bp, Artificial Sequence
  Synthetic oligonucleotide; CTG chr2 60521391 60521412 60521396 60521391 -
agactggcctaaccacatcaca

SEQ ID NO: 215817 - DNA, 22 bp, Artificial Sequence
  Synthetic oligonucleotide; CTG chr2 60521385 60521406 60521390 60521385 -
gcctaaccacatcacaccattc

SEQ ID NO: 215818 - DNA, 22 bp, Artificial Sequence
  Synthetic oligonucleotide; CTA chr2 60521380 60521401 60521385 60521380 -
accacatcacaccattcccaga

SEQ ID NO: 215819 - DNA, 22 bp, Artificial Sequence
  Synthetic oligonucleotide; TTC chr2 60521363 60521384 60521368 60521363 -
ccagacccaggcccaggcccag

SEQ ID NO: 215820 - DNA, 22 bp, Artificial Sequence
  Synthetic oligonucleotide; CTC chr2 60521328 60521349 60521333 60521328 -
tggttttacaaaatgtccgctc

SEQ ID NO: 215821 - DNA, 22 bp, Artificial Sequence
  Synthetic oligonucleotide; CTG chr2 60521326 60521347 60521331 60521326 -
gttttacaaaatgtccgctctc

SEQ ID NO: 215822 - DNA, 22 bp, Artificial Sequence
  Synthetic oligonucleotide; TTT chr2 60521322 60521343 60521327 60521322 -
tacaaaatgtccgctctctctc

SEQ ID NO: 215823 - DNA, 22 bp, Artificial Sequence
  Synthetic oligonucleotide; TTT chr2 60521321 60521342 60521326 60521321 -
acaaaatgtccgctctctctcg

SEQ ID NO: 215824 - DNA, 22 bp, Artificial Sequence
  Synthetic oligonucleotide; TTA chr2 60521320 60521341 60521325 60521320 -
caaaatgtccgctctctctcgc

SEQ ID NO: 215825 - DNA, 22 bp, Artificial Sequence
  Synthetic oligonucleotide; CTC chr2 60521306 60521327 60521311 60521306 -
tctctcgcttcacacagaggct

SEQ ID NO: 215826 - DNA, 22 bp, Artificial Sequence
  Synthetic oligonucleotide; CTC chr2 60521304 60521325 60521309 60521304 -
tctcgcttcacacagaggctat

SEQ ID NO: 215827 - DNA, 22 bp, Artificial Sequence
  Synthetic oligonucleotide; CTC chr2 60521302 60521323 60521307 60521302 -
tcgcttcacacagaggctatta

SEQ ID NO: 215828 - DNA, 22 bp, Artificial Sequence
  Synthetic oligonucleotide; CTC chr2 60521300 60521321 60521305 60521300 -
gcttcacacagaggctattatt

SEQ ID NO: 215829 - DNA, 22 bp, Artificial Sequence
  Synthetic oligonucleotide; CTT chr2 60521296 60521317 60521301 60521296 -
cacacagaggctattattagca

SEQ ID NO: 215830 - DNA, 22 bp, Artificial Sequence
  Synthetic oligonucleotide; TTC chr2 60521295 60521316 60521300 60521295 -
acacagaggctattattagcaa

SEQ ID NO: 215831 - DNA, 22 bp, Artificial Sequence
  Synthetic oligonucleotide; CTA chr2 60521283 60521304 60521288 60521283 -
ttattagcaagtgtcactcagt

SEQ ID NO: 215832 - DNA, 22 bp, Artificial Sequence
  Synthetic oligonucleotide; TTA chr2 60521280 60521301 60521285 60521280 -
ttagcaagtgtcactcagttat

SEQ ID NO: 215833 - DNA, 22 bp, Artificial Sequence
  Synthetic oligonucleotide; TTA chr2 60521277 60521298 60521282 60521277 -
gcaagtgtcactcagttatctg

SEQ ID NO: 215834 - DNA, 22 bp, Artificial Sequence
  Synthetic oligonucleotide; CTC chr2 60521264 60521285 60521269 60521264 -
agttatctgagagtggcgcttt

SEQ ID NO: 215835 - DNA, 22 bp, Artificial Sequence
  Synthetic oligonucleotide; TTA chr2 60521259 60521280 60521264 60521259 -
tctgagagtggcgcttttagct

SEQ ID NO: 215836 - DNA, 22 bp, Artificial Sequence
  Synthetic oligonucleotide; CTG chr2 60521255 60521276 60521260 60521255 -
agagtggcgcttttagctgcca

SEQ ID NO: 215837 - DNA, 22 bp, Artificial Sequence
  Synthetic oligonucleotide; CTT chr2 60521243 60521264 60521248 60521243 -
ttagctgccatctaagtgcctg

SEQ ID NO: 215838 - DNA, 22 bp, Artificial Sequence
  Synthetic oligonucleotide; TTT chr2 60521242 60521263 60521247 60521242 -
tagctgccatctaagtgcctga

SEQ ID NO: 215839 - DNA, 22 bp, Artificial Sequence
  Synthetic oligonucleotide; TTT chr2 60521241 60521262 60521246 60521241 -
agctgccatctaagtgcctgat

SEQ ID NO: 215840 - DNA, 22 bp, Artificial Sequence
  Synthetic oligonucleotide; TTA chr2 60521240 60521261 60521245 60521240 -
gctgccatctaagtgcctgata

SEQ ID NO: 215841 - DNA, 22 bp, Artificial Sequence
  Synthetic oligonucleotide; CTG chr2 60521236 60521257 60521241 60521236 -
ccatctaagtgcctgatacttg

SEQ ID NO: 215842 - DNA, 22 bp, Artificial Sequence
  Synthetic oligonucleotide; CTA chr2 60521229 60521250 60521234 60521229 -
agtgcctgatacttgggtttac

SEQ ID NO: 215843 - DNA, 22 bp, Artificial Sequence
  Synthetic oligonucleotide; CTG chr2 60521221 60521242 60521226 60521221 -
atacttgggtttacagcagatt

SEQ ID NO: 215844 - DNA, 22 bp, Artificial Sequence
  Synthetic oligonucleotide; CTT chr2 60521215 60521236 60521220 60521215 -
gggtttacagcagattaaatta

SEQ ID NO: 215845 - DNA, 22 bp, Artificial Sequence
  Synthetic oligonucleotide; TTG chr2 60521214 60521235 60521219 60521214 -
ggtttacagcagattaaattaa

SEQ ID NO: 215846 - DNA, 22 bp, Artificial Sequence
  Synthetic oligonucleotide; TTT chr2 60521209 60521230 60521214 60521209 -
acagcagattaaattaaatttt

SEQ ID NO: 215847 - DNA, 22 bp, Artificial Sequence
  Synthetic oligonucleotide; TTA chr2 60521208 60521229 60521213 60521208 -
cagcagattaaattaaatttta

SEQ ID NO: 215848 - DNA, 22 bp, Artificial Sequence
  Synthetic oligonucleotide; TTA chr2 60521198 60521219 60521203 60521198 -
aattaaattttaggctggtttg

SEQ ID NO: 215849 - DNA, 22 bp, Artificial Sequence
  Synthetic oligonucleotide; TTA chr2 60521193 60521214 60521198 60521193 -
aattttaggctggtttggcttc

SEQ ID NO: 215850 - DNA, 22 bp, Artificial Sequence
  Synthetic oligonucleotide; TTT chr2 60521188 60521209 60521193 60521188 -
taggctggtttggcttcactgg

SEQ ID NO: 215851 - DNA, 22 bp, Artificial Sequence
  Synthetic oligonucleotide; TTT chr2 60521187 60521208 60521192 60521187 -
aggctggtttggcttcactggc

SEQ ID NO: 215852 - DNA, 22 bp, Artificial Sequence
  Synthetic oligonucleotide; TTA chr2 60521186 60521207 60521191 60521186 -
ggctggtttggcttcactggca

SEQ ID NO: 215853 - DNA, 22 bp, Artificial Sequence
  Synthetic oligonucleotide; CTG chr2 60521181 60521202 60521186 60521181 -
gtttggcttcactggcagtaga

SEQ ID NO: 215854 - DNA, 22 bp, Artificial Sequence
  Synthetic oligonucleotide; TTT chr2 60521177 60521198 60521182 60521177 -
ggcttcactggcagtagacaat

SEQ ID NO: 215855 - DNA, 22 bp, Artificial Sequence
  Synthetic oligonucleotide; TTG chr2 60521176 60521197 60521181 60521176 -
gcttcactggcagtagacaatg

SEQ ID NO: 215856 - DNA, 22 bp, Artificial Sequence
  Synthetic oligonucleotide; CTT chr2 60521172 60521193 60521177 60521172 -
cactggcagtagacaatggaag

SEQ ID NO: 215857 - DNA, 22 bp, Artificial Sequence
  Synthetic oligonucleotide; TTC chr2 60521171 60521192 60521176 60521171 -
actggcagtagacaatggaagg

SEQ ID NO: 215858 - DNA, 22 bp, Artificial Sequence
  Synthetic oligonucleotide; CTG chr2 60521167 60521188 60521172 60521167 -
gcagtagacaatggaaggcagc

SEQ ID NO: 215859 - DNA, 22 bp, Artificial Sequence
  Synthetic oligonucleotide; CTG chr2 60521143 60521164 60521148 60521143 -
ttgtagaaatgtaacctggcac

SEQ ID NO: 215860 - DNA, 22 bp, Artificial Sequence
  Synthetic oligonucleotide; TTG chr2 60521140 60521161 60521145 60521140 -
tagaaatgtaacctggcaccct

SEQ ID NO: 215861 - DNA, 22 bp, Artificial Sequence
  Synthetic oligonucleotide; CTG chr2 60521125 60521146 60521130 60521125 -
gcaccctcaaggatttgtgtga

SEQ ID NO: 215862 - DNA, 22 bp, Artificial Sequence
  Synthetic oligonucleotide; CTC chr2 60521117 60521138 60521122 60521117 -
aaggatttgtgtgagtgtgtgt

SEQ ID NO: 215863 - DNA, 22 bp, Artificial Sequence
  Synthetic oligonucleotide; TTT chr2 60521109 60521130 60521114 60521109 -
gtgtgagtgtgtgtgtgtgtgt

SEQ ID NO: 215864 - DNA, 22 bp, Artificial Sequence
  Synthetic oligonucleotide; TTG chr2 60521108 60521129 60521113 60521108 -
tgtgagtgtgtgtgtgtgtgtg

SEQ ID NO: 215865 - DNA, 22 bp, Artificial Sequence
  Synthetic oligonucleotide; CTG chr2 60521043 60521064 60521048 60521043 -
accactaggctacacttccttt

SEQ ID NO: 215866 - DNA, 22 bp, Artificial Sequence
  Synthetic oligonucleotide; CTA chr2 60521036 60521057 60521041 60521036 -
ggctacacttccttttcctttc

SEQ ID NO: 215867 - DNA, 22 bp, Artificial Sequence
  Synthetic oligonucleotide; CTA chr2 60521031 60521052 60521036 60521031 -
cacttccttttcctttcctctc

SEQ ID NO: 215868 - DNA, 22 bp, Artificial Sequence
  Synthetic oligonucleotide; CTT chr2 60521026 60521047 60521031 60521026 -
ccttttcctttcctctccattt

SEQ ID NO: 215869 - DNA, 22 bp, Artificial Sequence
  Synthetic oligonucleotide; TTC chr2 60521025 60521046 60521030 60521025 -
cttttcctttcctctccatttc

SEQ ID NO: 215870 - DNA, 22 bp, Artificial Sequence
  Synthetic oligonucleotide; CTT chr2 60521022 60521043 60521027 60521022 -
ttcctttcctctccatttcatc

SEQ ID NO: 215871 - DNA, 22 bp, Artificial Sequence
  Synthetic oligonucleotide; TTT chr2 60521021 60521042 60521026 60521021 -
tcctttcctctccatttcatcc

SEQ ID NO: 215872 - DNA, 22 bp, Artificial Sequence
  Synthetic oligonucleotide; TTT chr2 60521020 60521041 60521025 60521020 -
cctttcctctccatttcatccc

SEQ ID NO: 215873 - DNA, 22 bp, Artificial Sequence
  Synthetic oligonucleotide; TTC chr2 60521019 60521040 60521024 60521019 -
ctttcctctccatttcatccct

SEQ ID NO: 215874 - DNA, 22 bp, Artificial Sequence
  Synthetic oligonucleotide; CTT chr2 60521016 60521037 60521021 60521016 -
tcctctccatttcatccctttc

SEQ ID NO: 215875 - DNA, 22 bp, Artificial Sequence
  Synthetic oligonucleotide; TTT chr2 60521015 60521036 60521020 60521015 -
cctctccatttcatccctttcc

SEQ ID NO: 215876 - DNA, 22 bp, Artificial Sequence
  Synthetic oligonucleotide; TTC chr2 60521014 60521035 60521019 60521014 -
ctctccatttcatccctttcca

SEQ ID NO: 215877 - DNA, 22 bp, Artificial Sequence
  Synthetic oligonucleotide; CTC chr2 60521011 60521032 60521016 60521011 -
tccatttcatccctttccaaaa

SEQ ID NO: 215878 - DNA, 22 bp, Artificial Sequence
  Synthetic oligonucleotide; CTC chr2 60521009 60521030 60521014 60521009 -
catttcatccctttccaaaaag

SEQ ID NO: 215879 - DNA, 22 bp, Artificial Sequence
  Synthetic oligonucleotide; TTT chr2 60521004 60521025 60521009 60521004 -
catccctttccaaaaagtgttt

SEQ ID NO: 215880 - DNA, 22 bp, Artificial Sequence
  Synthetic oligonucleotide; TTC chr2 60521003 60521024 60521008 60521003 -
atccctttccaaaaagtgttta

SEQ ID NO: 215881 - DNA, 22 bp, Artificial Sequence
  Synthetic oligonucleotide; CTT chr2 60520996 60521017 60521001 60520996 -
tccaaaaagtgtttagacaaat

SEQ ID NO: 215882 - DNA, 22 bp, Artificial Sequence
  Synthetic oligonucleotide; TTT chr2 60520995 60521016 60521000 60520995 -
ccaaaaagtgtttagacaaata

SEQ ID NO: 215883 - DNA, 22 bp, Artificial Sequence
  Synthetic oligonucleotide; TTC chr2 60520994 60521015 60520999 60520994 -
caaaaagtgtttagacaaatag

SEQ ID NO: 215884 - DNA, 22 bp, Artificial Sequence
  Synthetic oligonucleotide; TTT chr2 60520982 60521003 60520987 60520982 -
agacaaatagtttcccagactt

SEQ ID NO: 215885 - DNA, 22 bp, Artificial Sequence
  Synthetic oligonucleotide; TTA chr2 60520981 60521002 60520986 60520981 -
gacaaatagtttcccagacttg

SEQ ID NO: 215886 - DNA, 22 bp, Artificial Sequence
  Synthetic oligonucleotide; TTT chr2 60520969 60520990 60520974 60520969 -
cccagacttggttttatcatgc

SEQ ID NO: 215887 - DNA, 22 bp, Artificial Sequence
  Synthetic oligonucleotide; TTC chr2 60520968 60520989 60520973 60520968 -
ccagacttggttttatcatgct

SEQ ID NO: 215888 - DNA, 22 bp, Artificial Sequence
  Synthetic oligonucleotide; CTT chr2 60520960 60520981 60520965 60520960 -
ggttttatcatgctgggttgac

SEQ ID NO: 215889 - DNA, 22 bp, Artificial Sequence
  Synthetic oligonucleotide; TTG chr2 60520959 60520980 60520964 60520959 -
gttttatcatgctgggttgaca

SEQ ID NO: 215890 - DNA, 22 bp, Artificial Sequence
  Synthetic oligonucleotide; TTT chr2 60520955 60520976 60520960 60520955 -
tatcatgctgggttgacaaagg

SEQ ID NO: 215891 - DNA, 22 bp, Artificial Sequence
  Synthetic oligonucleotide; TTT chr2 60520954 60520975 60520959 60520954 -
atcatgctgggttgacaaaggt

SEQ ID NO: 215892 - DNA, 22 bp, Artificial Sequence
  Synthetic oligonucleotide; TTA chr2 60520953 60520974 60520958 60520953 -
tcatgctgggttgacaaaggtt

SEQ ID NO: 215893 - DNA, 22 bp, Artificial Sequence
  Synthetic oligonucleotide; CTG chr2 60520945 60520966 60520950 60520945 -
ggttgacaaaggttgtgtacag

SEQ ID NO: 215894 - DNA, 22 bp, Artificial Sequence
  Synthetic oligonucleotide; TTG chr2 60520940 60520961 60520945 60520940 -
acaaaggttgtgtacagagctg

SEQ ID NO: 215895 - DNA, 22 bp, Artificial Sequence
  Synthetic oligonucleotide; TTG chr2 60520930 60520951 60520935 60520930 -
tgtacagagctggaataatttt

SEQ ID NO: 215896 - DNA, 22 bp, Artificial Sequence
  Synthetic oligonucleotide; CTG chr2 60520918 60520939 60520923 60520918 -
gaataattttttcttctttcta

SEQ ID NO: 215897 - DNA, 22 bp, Artificial Sequence
  Synthetic oligonucleotide; TTT chr2 60520909 60520930 60520914 60520909 -
tttcttctttctactgttggca

SEQ ID NO: 215898 - DNA, 22 bp, Artificial Sequence
  Synthetic oligonucleotide; TTT chr2 60520908 60520929 60520913 60520908 -
ttcttctttctactgttggcac

SEQ ID NO: 215899 - DNA, 22 bp, Artificial Sequence
  Synthetic oligonucleotide; TTT chr2 60520907 60520928 60520912 60520907 -
tcttctttctactgttggcaca

SEQ ID NO: 215900 - DNA, 22 bp, Artificial Sequence
  Synthetic oligonucleotide; TTT chr2 60520906 60520927 60520911 60520906 -
cttctttctactgttggcacat

SEQ ID NO: 215901 - DNA, 22 bp, Artificial Sequence
  Synthetic oligonucleotide; TTC chr2 60520905 60520926 60520910 60520905 -
ttctttctactgttggcacatc

SEQ ID NO: 215902 - DNA, 22 bp, Artificial Sequence
  Synthetic oligonucleotide; CTT chr2 60520903 60520924 60520908 60520903 -
ctttctactgttggcacatcaa

SEQ ID NO: 215903 - DNA, 22 bp, Artificial Sequence
  Synthetic oligonucleotide; TTC chr2 60520902 60520923 60520907 60520902 -
tttctactgttggcacatcaat

SEQ ID NO: 215904 - DNA, 22 bp, Artificial Sequence
  Synthetic oligonucleotide; CTT chr2 60520900 60520921 60520905 60520900 -
tctactgttggcacatcaatat

SEQ ID NO: 215905 - DNA, 22 bp, Artificial Sequence
  Synthetic oligonucleotide; TTT chr2 60520899 60520920 60520904 60520899 -
ctactgttggcacatcaatatc

SEQ ID NO: 215906 - DNA, 22 bp, Artificial Sequence
  Synthetic oligonucleotide; TTC chr2 60520898 60520919 60520903 60520898 -
tactgttggcacatcaatatct

SEQ ID NO: 215907 - DNA, 22 bp, Artificial Sequence
  Synthetic oligonucleotide; CTA chr2 60520896 60520917 60520901 60520896 -
ctgttggcacatcaatatcttt

SEQ ID NO: 215908 - DNA, 22 bp, Artificial Sequence
  Synthetic oligonucleotide; CTG chr2 60520893 60520914 60520898 60520893 -
ttggcacatcaatatctttttt

SEQ ID NO: 215909 - DNA, 22 bp, Artificial Sequence
  Synthetic oligonucleotide; TTG chr2 60520890 60520911 60520895 60520890 -
gcacatcaatatctttttttct

SEQ ID NO: 215910 - DNA, 22 bp, Artificial Sequence
  Synthetic oligonucleotide; CTT chr2 60520875 60520896 60520880 60520875 -
tttttctgcaaagaaggggcta

SEQ ID NO: 215911 - DNA, 22 bp, Artificial Sequence
  Synthetic oligonucleotide; TTT chr2 60520874 60520895 60520879 60520874 -
ttttctgcaaagaaggggctaa

SEQ ID NO: 215912 - DNA, 22 bp, Artificial Sequence
  Synthetic oligonucleotide; TTT chr2 60520873 60520894 60520878 60520873 -
tttctgcaaagaaggggctaag

SEQ ID NO: 215913 - DNA, 22 bp, Artificial Sequence
  Synthetic oligonucleotide; TTT chr2 60520872 60520893 60520877 60520872 -
ttctgcaaagaaggggctaagc

SEQ ID NO: 215914 - DNA, 22 bp, Artificial Sequence
  Synthetic oligonucleotide; TTT chr2 60520871 60520892 60520876 60520871 -
tctgcaaagaaggggctaagct

SEQ ID NO: 215915 - DNA, 22 bp, Artificial Sequence
  Synthetic oligonucleotide; TTT chr2 60520870 60520891 60520875 60520870 -
ctgcaaagaaggggctaagctt

SEQ ID NO: 215916 - DNA, 22 bp, Artificial Sequence
  Synthetic oligonucleotide; TTC chr2 60520869 60520890 60520874 60520869 -
tgcaaagaaggggctaagcttg

SEQ ID NO: 215917 - DNA, 22 bp, Artificial Sequence
  Synthetic oligonucleotide; CTG chr2 60520867 60520888 60520872 60520867 -
caaagaaggggctaagcttgca

SEQ ID NO: 215918 - DNA, 22 bp, Artificial Sequence
  Synthetic oligonucleotide; CTA chr2 60520853 60520874 60520858 60520853 -
agcttgcacgaaaacaccggtg

SEQ ID NO: 215919 - DNA, 22 bp, Artificial Sequence
  Synthetic oligonucleotide; CTT chr2 60520848 60520869 60520853 60520848 -
gcacgaaaacaccggtgggaac

SEQ ID NO: 215920 - DNA, 22 bp, Artificial Sequence
  Synthetic oligonucleotide; TTG chr2 60520847 60520868 60520852 60520847 -
cacgaaaacaccggtgggaacc

SEQ ID NO: 215921 - DNA, 22 bp, Artificial Sequence
  Synthetic oligonucleotide; CTG chr2 60520820 60520841 60520825 60520820 -
gagaagggcatgggtggttttt

SEQ ID NO: 215922 - DNA, 22 bp, Artificial Sequence
  Synthetic oligonucleotide; TTT chr2 60520800 60520821 60520805 60520800 -
ttggttcggttggtggctgatc

SEQ ID NO: 215923 - DNA, 22 bp, Artificial Sequence
  Synthetic oligonucleotide; TTT chr2 60520799 60520820 60520804 60520799 -
tggttcggttggtggctgatct

SEQ ID NO: 215924 - DNA, 22 bp, Artificial Sequence
  Synthetic oligonucleotide; TTT chr2 60520798 60520819 60520803 60520798 -
ggttcggttggtggctgatctg

SEQ ID NO: 215925 - DNA, 22 bp, Artificial Sequence
  Synthetic oligonucleotide; TTG chr2 60520797 60520818 60520802 60520797 -
gttcggttggtggctgatctga

SEQ ID NO: 215926 - DNA, 22 bp, Artificial Sequence
  Synthetic oligonucleotide; TTC chr2 60520793 60520814 60520798 60520793 -
ggttggtggctgatctgatggg

SEQ ID NO: 215927 - DNA, 22 bp, Artificial Sequence
  Synthetic oligonucleotide; TTG chr2 60520788 60520809 60520793 60520788 -
gtggctgatctgatgggtggta

SEQ ID NO: 215928 - DNA, 22 bp, Artificial Sequence
  Synthetic oligonucleotide; CTG chr2 60520781 60520802 60520786 60520781 -
atctgatgggtggtataggcag

SEQ ID NO: 215929 - DNA, 22 bp, Artificial Sequence
  Synthetic oligonucleotide; CTG chr2 60520776 60520797 60520781 60520776 -
atgggtggtataggcagaatgt

SEQ ID NO: 215930 - DNA, 22 bp, Artificial Sequence
  Synthetic oligonucleotide; CTG chr2 60520751 60520772 60520756 60520751 -
gctgccccttcagattcctgta

SEQ ID NO: 215931 - DNA, 22 bp, Artificial Sequence
  Synthetic oligonucleotide; CTG chr2 60520747 60520768 60520752 60520747 -
ccccttcagattcctgtagatt

SEQ ID NO: 215932 - DNA, 22 bp, Artificial Sequence
  Synthetic oligonucleotide; CTT chr2 60520741 60520762 60520746 60520741 -
cagattcctgtagattccgtag

SEQ ID NO: 215933 - DNA, 22 bp, Artificial Sequence
  Synthetic oligonucleotide; TTC chr2 60520740 60520761 60520745 60520740 -
agattcctgtagattccgtagg

SEQ ID NO: 215934 - DNA, 22 bp, Artificial Sequence
  Synthetic oligonucleotide; TTC chr2 60520734 60520755 60520739 60520734 -
ctgtagattccgtaggcgacca

SEQ ID NO: 215935 - DNA, 22 bp, Artificial Sequence
  Synthetic oligonucleotide; CTG chr2 60520731 60520752 60520736 60520731 -
tagattccgtaggcgaccaaca

SEQ ID NO: 215936 - DNA, 22 bp, Artificial Sequence
  Synthetic oligonucleotide; TTC chr2 60520724 60520745 60520729 60520724 -
cgtaggcgaccaacatggggtg

SEQ ID NO: 215937 - DNA, 22 bp, Artificial Sequence
  Synthetic oligonucleotide; CTG chr2 60520688 60520709 60520693 60520688 -
tctgctctttttgatgcaaata

SEQ ID NO: 215938 - DNA, 22 bp, Artificial Sequence
  Synthetic oligonucleotide; CTG chr2 60520684 60520705 60520689 60520684 -
ctctttttgatgcaaatatctt

SEQ ID NO: 215939 - DNA, 22 bp, Artificial Sequence
  Synthetic oligonucleotide; CTC chr2 60520681 60520702 60520686 60520681 -
tttttgatgcaaatatcttcac

SEQ ID NO: 215940 - DNA, 22 bp, Artificial Sequence
  Synthetic oligonucleotide; CTT chr2 60520679 60520700 60520684 60520679 -
tttgatgcaaatatcttcactc

SEQ ID NO: 215941 - DNA, 22 bp, Artificial Sequence
  Synthetic oligonucleotide; TTT chr2 60520678 60520699 60520683 60520678 -
ttgatgcaaatatcttcactct

SEQ ID NO: 215942 - DNA, 22 bp, Artificial Sequence
  Synthetic oligonucleotide; TTT chr2 60520677 60520698 60520682 60520677 -
tgatgcaaatatcttcactctc

SEQ ID NO: 215943 - DNA, 22 bp, Artificial Sequence
  Synthetic oligonucleotide; TTT chr2 60520676 60520697 60520681 60520676 -
gatgcaaatatcttcactctcc

SEQ ID NO: 215944 - DNA, 22 bp, Artificial Sequence
  Synthetic oligonucleotide; TTG chr2 60520675 60520696 60520680 60520675 -
atgcaaatatcttcactctcct

SEQ ID NO: 215945 - DNA, 22 bp, Artificial Sequence
  Synthetic oligonucleotide; CTT chr2 60520662 60520683 60520667 60520662 -
cactctccttggtgcttctgtg

SEQ ID NO: 215946 - DNA, 22 bp, Artificial Sequence
  Synthetic oligonucleotide; TTC chr2 60520661 60520682 60520666 60520661 -
actctccttggtgcttctgtgg

SEQ ID NO: 215947 - DNA, 22 bp, Artificial Sequence
  Synthetic oligonucleotide; CTC chr2 60520657 60520678 60520662 60520657 -
tccttggtgcttctgtggttgt

SEQ ID NO: 215948 - DNA, 22 bp, Artificial Sequence
  Synthetic oligonucleotide; CTC chr2 60520655 60520676 60520660 60520655 -
cttggtgcttctgtggttgtgc

SEQ ID NO: 215949 - DNA, 22 bp, Artificial Sequence
  Synthetic oligonucleotide; CTT chr2 60520652 60520673 60520657 60520652 -
ggtgcttctgtggttgtgccta

SEQ ID NO: 215950 - DNA, 22 bp, Artificial Sequence
  Synthetic oligonucleotide; TTG chr2 60520651 60520672 60520656 60520651 -
gtgcttctgtggttgtgcctat

SEQ ID NO: 215951 - DNA, 22 bp, Artificial Sequence
  Synthetic oligonucleotide; CTT chr2 60520645 60520666 60520650 60520645 -
ctgtggttgtgcctatgaattt

SEQ ID NO: 215952 - DNA, 22 bp, Artificial Sequence
  Synthetic oligonucleotide; TTC chr2 60520644 60520665 60520649 60520644 -
tgtggttgtgcctatgaattta

SEQ ID NO: 215953 - DNA, 22 bp, Artificial Sequence
  Synthetic oligonucleotide; CTG chr2 60520642 60520663 60520647 60520642 -
tggttgtgcctatgaatttagg

SEQ ID NO: 215954 - DNA, 22 bp, Artificial Sequence
  Synthetic oligonucleotide; TTG chr2 60520636 60520657 60520641 60520636 -
tgcctatgaatttaggacctta

SEQ ID NO: 215955 - DNA, 22 bp, Artificial Sequence
  Synthetic oligonucleotide; CTA chr2 60520630 60520651 60520635 60520630 -
tgaatttaggaccttatgcctc

SEQ ID NO: 215956 - DNA, 22 bp, Artificial Sequence
  Synthetic oligonucleotide; TTT chr2 60520623 60520644 60520628 60520623 -
aggaccttatgcctcatagtgt

SEQ ID NO: 215957 - DNA, 22 bp, Artificial Sequence
  Synthetic oligonucleotide; TTA chr2 60520622 60520643 60520627 60520622 -
ggaccttatgcctcatagtgtt

SEQ ID NO: 215958 - DNA, 22 bp, Artificial Sequence
  Synthetic oligonucleotide; CTT chr2 60520615 60520636 60520620 60520615 -
atgcctcatagtgttgagtcag

SEQ ID NO: 215959 - DNA, 22 bp, Artificial Sequence
  Synthetic oligonucleotide; TTA chr2 60520614 60520635 60520619 60520614 -
tgcctcatagtgttgagtcaga

SEQ ID NO: 215960 - DNA, 22 bp, Artificial Sequence
  Synthetic oligonucleotide; CTC chr2 60520608 60520629 60520613 60520608 -
atagtgttgagtcagagcaaaa

SEQ ID NO: 215961 - DNA, 22 bp, Artificial Sequence
  Synthetic oligonucleotide; TTG chr2 60520599 60520620 60520604 60520599 -
agtcagagcaaaacagtttaca

SEQ ID NO: 215962 - DNA, 22 bp, Artificial Sequence
  Synthetic oligonucleotide; TTT chr2 60520580 60520601 60520585 60520580 -
acatcaaaggccacttatttaa

SEQ ID NO: 215963 - DNA, 22 bp, Artificial Sequence
  Synthetic oligonucleotide; TTA chr2 60520579 60520600 60520584 60520579 -
catcaaaggccacttatttaat

SEQ ID NO: 215964 - DNA, 22 bp, Artificial Sequence
  Synthetic oligonucleotide; CTT chr2 60520564 60520585 60520569 60520564 -
atttaattttcctcagaaaact

SEQ ID NO: 215965 - DNA, 22 bp, Artificial Sequence
  Synthetic oligonucleotide; TTA chr2 60520563 60520584 60520568 60520563 -
tttaattttcctcagaaaactc

SEQ ID NO: 215966 - DNA, 22 bp, Artificial Sequence
  Synthetic oligonucleotide; TTT chr2 60520560 60520581 60520565 60520560 -
aattttcctcagaaaactctgt

SEQ ID NO: 215967 - DNA, 22 bp, Artificial Sequence
  Synthetic oligonucleotide; TTA chr2 60520559 60520580 60520564 60520559 -
attttcctcagaaaactctgtg

SEQ ID NO: 215968 - DNA, 22 bp, Artificial Sequence
  Synthetic oligonucleotide; TTT chr2 60520555 60520576 60520560 60520555 -
tcctcagaaaactctgtgagga

SEQ ID NO: 215969 - DNA, 22 bp, Artificial Sequence
  Synthetic oligonucleotide; TTT chr2 60520554 60520575 60520559 60520554 -
cctcagaaaactctgtgaggat

SEQ ID NO: 215970 - DNA, 22 bp, Artificial Sequence
  Synthetic oligonucleotide; TTC chr2 60520553 60520574 60520558 60520553 -
ctcagaaaactctgtgaggata

SEQ ID NO: 215971 - DNA, 22 bp, Artificial Sequence
  Synthetic oligonucleotide; CTC chr2 60520550 60520571 60520555 60520550 -
agaaaactctgtgaggataatt

SEQ ID NO: 215972 - DNA, 22 bp, Artificial Sequence
  Synthetic oligonucleotide; CTC chr2 60520541 60520562 60520546 60520541 -
tgtgaggataatttctccttct

SEQ ID NO: 215973 - DNA, 22 bp, Artificial Sequence
  Synthetic oligonucleotide; CTG chr2 60520539 60520560 60520544 60520539 -
tgaggataatttctccttctta

SEQ ID NO: 215974 - DNA, 22 bp, Artificial Sequence
  Synthetic oligonucleotide; TTT chr2 60520527 60520548 60520532 60520527 -
ctccttcttataaacggaatgc

SEQ ID NO: 215975 - DNA, 22 bp, Artificial Sequence
  Synthetic oligonucleotide; TTC chr2 60520526 60520547 60520531 60520526 -
tccttcttataaacggaatgcg

SEQ ID NO: 215976 - DNA, 22 bp, Artificial Sequence
  Synthetic oligonucleotide; CTC chr2 60520524 60520545 60520529 60520524 -
cttcttataaacggaatgcgaa

SEQ ID NO: 215977 - DNA, 22 bp, Artificial Sequence
  Synthetic oligonucleotide; CTT chr2 60520521 60520542 60520526 60520521 -
cttataaacggaatgcgaatgt

SEQ ID NO: 215978 - DNA, 22 bp, Artificial Sequence
  Synthetic oligonucleotide; TTC chr2 60520520 60520541 60520525 60520520 -
ttataaacggaatgcgaatgtg

SEQ ID NO: 215979 - DNA, 22 bp, Artificial Sequence
  Synthetic oligonucleotide; CTT chr2 60520518 60520539 60520523 60520518 -
ataaacggaatgcgaatgtgta

SEQ ID NO: 215980 - DNA, 22 bp, Artificial Sequence
  Synthetic oligonucleotide; TTA chr2 60520517 60520538 60520522 60520517 -
taaacggaatgcgaatgtgtac

SEQ ID NO: 215981 - DNA, 22 bp, Artificial Sequence
  Synthetic oligonucleotide; TTA chr2 60520479 60520500 60520484 60520479 -
tcccaccgaagggtgatgctct

SEQ ID NO: 215982 - DNA, 22 bp, Artificial Sequence
  Synthetic oligonucleotide; CTC chr2 60520458 60520479 60520463 60520458 -
tttacttttataatctagattt

SEQ ID NO: 215983 - DNA, 22 bp, Artificial Sequence
  Synthetic oligonucleotide; CTT chr2 60520456 60520477 60520461 60520456 -
tacttttataatctagatttta

SEQ ID NO: 215984 - DNA, 22 bp, Artificial Sequence
  Synthetic oligonucleotide; TTT chr2 60520455 60520476 60520460 60520455 -
acttttataatctagattttaa

SEQ ID NO: 215985 - DNA, 22 bp, Artificial Sequence
  Synthetic oligonucleotide; TTA chr2 60520454 60520475 60520459 60520454 -
cttttataatctagattttaaa

SEQ ID NO: 215986 - DNA, 22 bp, Artificial Sequence
  Synthetic oligonucleotide; CTT chr2 60520451 60520472 60520456 60520451 -
ttataatctagattttaaaaaa

SEQ ID NO: 215987 - DNA, 22 bp, Artificial Sequence
  Synthetic oligonucleotide; TTT chr2 60520450 60520471 60520455 60520450 -
tataatctagattttaaaaaat

SEQ ID NO: 215988 - DNA, 22 bp, Artificial Sequence
  Synthetic oligonucleotide; TTT chr2 60520449 60520470 60520454 60520449 -
ataatctagattttaaaaaatt

SEQ ID NO: 215989 - DNA, 22 bp, Artificial Sequence
  Synthetic oligonucleotide; TTA chr2 60520448 60520469 60520453 60520448 -
taatctagattttaaaaaattt

SEQ ID NO: 215990 - DNA, 22 bp, Artificial Sequence
  Synthetic oligonucleotide; CTA chr2 60520441 60520462 60520446 60520441 -
gattttaaaaaatttggtggca

SEQ ID NO: 215991 - DNA, 22 bp, Artificial Sequence
  Synthetic oligonucleotide; TTT chr2 60520436 60520457 60520441 60520436 -
taaaaaatttggtggcacttga

SEQ ID NO: 215992 - DNA, 22 bp, Artificial Sequence
  Synthetic oligonucleotide; TTT chr2 60520435 60520456 60520440 60520435 -
aaaaaatttggtggcacttgat

SEQ ID NO: 215993 - DNA, 22 bp, Artificial Sequence
  Synthetic oligonucleotide; TTA chr2 60520434 60520455 60520439 60520434 -
aaaaatttggtggcacttgatt

SEQ ID NO: 215994 - DNA, 22 bp, Artificial Sequence
  Synthetic oligonucleotide; TTT chr2 60520426 60520447 60520431 60520426 -
ggtggcacttgatttcaggtcc

SEQ ID NO: 215995 - DNA, 22 bp, Artificial Sequence
  Synthetic oligonucleotide; TTG chr2 60520425 60520446 60520430 60520425 -
gtggcacttgatttcaggtcct

SEQ ID NO: 215996 - DNA, 22 bp, Artificial Sequence
  Synthetic oligonucleotide; CTT chr2 60520416 60520437 60520421 60520416 -
gatttcaggtcctcagactcca

SEQ ID NO: 215997 - DNA, 22 bp, Artificial Sequence
  Synthetic oligonucleotide; TTG chr2 60520415 60520436 60520420 60520415 -
atttcaggtcctcagactccag

SEQ ID NO: 215998 - DNA, 22 bp, Artificial Sequence
  Synthetic oligonucleotide; TTT chr2 60520411 60520432 60520416 60520411 -
caggtcctcagactccagaatt

SEQ ID NO: 215999 - DNA, 22 bp, Artificial Sequence
  Synthetic oligonucleotide; TTC chr2 60520410 60520431 60520415 60520410 -
aggtcctcagactccagaattt

SEQ ID NO: 216000 - DNA, 22 bp, Artificial Sequence
  Synthetic oligonucleotide; CTC chr2 60520402 60520423 60520407 60520402 -
agactccagaatttatactcac

SEQ ID NO: 216001 - DNA, 22 bp, Artificial Sequence
  Synthetic oligonucleotide; CTC chr2 60520396 60520417 60520401 60520396 -
cagaatttatactcactgatta

SEQ ID NO: 216002 - DNA, 22 bp, Artificial Sequence
  Synthetic oligonucleotide; TTT chr2 60520388 60520409 60520393 60520388 -
atactcactgattagtaatgca

SEQ ID NO: 216003 - DNA, 22 bp, Artificial Sequence
  Synthetic oligonucleotide; TTA chr2 60520387 60520408 60520392 60520387 -
tactcactgattagtaatgcat

SEQ ID NO: 216004 - DNA, 22 bp, Artificial Sequence
  Synthetic oligonucleotide; CTC chr2 60520382 60520403 60520387 60520382 -
actgattagtaatgcattatgc

SEQ ID NO: 216005 - DNA, 22 bp, Artificial Sequence
  Synthetic oligonucleotide; CTG chr2 60520378 60520399 60520383 60520378 -
attagtaatgcattatgcaaat

SEQ ID NO: 216006 - DNA, 22 bp, Artificial Sequence
  Synthetic oligonucleotide; TTA chr2 60520374 60520395 60520379 60520374 -
gtaatgcattatgcaaataatt

SEQ ID NO: 216007 - DNA, 22 bp, Artificial Sequence
  Synthetic oligonucleotide; TTA chr2 60520363 60520384 60520368 60520363 -
tgcaaataattcagtttacata

SEQ ID NO: 216008 - DNA, 22 bp, Artificial Sequence
  Synthetic oligonucleotide; TTC chr2 60520351 60520372 60520356 60520351 -
agtttacatatccaaatactgt

SEQ ID NO: 216009 - DNA, 22 bp, Artificial Sequence
  Synthetic oligonucleotide; TTT chr2 60520346 60520367 60520351 60520346 -
acatatccaaatactgttttgc

SEQ ID NO: 216010 - DNA, 22 bp, Artificial Sequence
  Synthetic oligonucleotide; TTA chr2 60520345 60520366 60520350 60520345 -
catatccaaatactgttttgca

SEQ ID NO: 216011 - DNA, 22 bp, Artificial Sequence
  Synthetic oligonucleotide; CTG chr2 60520330 60520351 60520335 60520330 -
ttttgcatcattcacacctcat

SEQ ID NO: 216012 - DNA, 22 bp, Artificial Sequence
  Synthetic oligonucleotide; TTT chr2 60520327 60520348 60520332 60520327 -
tgcatcattcacacctcatgtc

SEQ ID NO: 216013 - DNA, 22 bp, Artificial Sequence
  Synthetic oligonucleotide; TTT chr2 60520326 60520347 60520331 60520326 -
gcatcattcacacctcatgtct

SEQ ID NO: 216014 - DNA, 22 bp, Artificial Sequence
  Synthetic oligonucleotide; TTG chr2 60520325 60520346 60520330 60520325 -
catcattcacacctcatgtctt

SEQ ID NO: 216015 - DNA, 22 bp, Artificial Sequence
  Synthetic oligonucleotide; TTC chr2 60520317 60520338 60520322 60520317 -
acacctcatgtcttgaaaaaaa

SEQ ID NO: 216016 - DNA, 22 bp, Artificial Sequence
  Synthetic oligonucleotide; CTC chr2 60520310 60520331 60520315 60520310 -
atgtcttgaaaaaaaaagtgaa

SEQ ID NO: 216017 - DNA, 22 bp, Artificial Sequence
  Synthetic oligonucleotide; CTT chr2 60520303 60520324 60520308 60520303 -
gaaaaaaaaagtgaaatgtttc

SEQ ID NO: 216018 - DNA, 22 bp, Artificial Sequence
  Synthetic oligonucleotide; TTG chr2 60520302 60520323 60520307 60520302 -
aaaaaaaaagtgaaatgtttcc

SEQ ID NO: 216019 - DNA, 22 bp, Artificial Sequence
  Synthetic oligonucleotide; TTT chr2 60520282 60520303 60520287 60520282 -
cctcaaaataaacaaaacctgc

SEQ ID NO: 216020 - DNA, 22 bp, Artificial Sequence
  Synthetic oligonucleotide; TTC chr2 60520281 60520302 60520286 60520281 -
ctcaaaataaacaaaacctgca

SEQ ID NO: 216021 - DNA, 22 bp, Artificial Sequence
  Synthetic oligonucleotide; CTC chr2 60520278 60520299 60520283 60520278 -
aaaataaacaaaacctgcagaa

SEQ ID NO: 216022 - DNA, 22 bp, Artificial Sequence
  Synthetic oligonucleotide; CTG chr2 60520261 60520282 60520266 60520261 -
cagaagagtttattgtaagggt

SEQ ID NO: 216023 - DNA, 22 bp, Artificial Sequence
  Synthetic oligonucleotide; TTT chr2 60520250 60520271 60520255 60520250 -
attgtaagggtgaaaattaaag

SEQ ID NO: 216024 - DNA, 22 bp, Artificial Sequence
  Synthetic oligonucleotide; TTA chr2 60520249 60520270 60520254 60520249 -
ttgtaagggtgaaaattaaaga

SEQ ID NO: 216025 - DNA, 22 bp, Artificial Sequence
  Synthetic oligonucleotide; TTG chr2 60520246 60520267 60520251 60520246 -
taagggtgaaaattaaagagga

SEQ ID NO: 216026 - DNA, 22 bp, Artificial Sequence
  Synthetic oligonucleotide; TTA chr2 60520231 60520252 60520236 60520231 -
aagaggaacccatttgcctggg

SEQ ID NO: 216027 - DNA, 22 bp, Artificial Sequence
  Synthetic oligonucleotide; TTT chr2 60520216 60520237 60520221 60520216 -
gcctgggaacttttgaggaaaa

SEQ ID NO: 216028 - DNA, 22 bp, Artificial Sequence
  Synthetic oligonucleotide; TTG chr2 60520215 60520236 60520220 60520215 -
cctgggaacttttgaggaaaat

SEQ ID NO: 216029 - DNA, 22 bp, Artificial Sequence
  Synthetic oligonucleotide; CTG chr2 60520211 60520232 60520216 60520211 -
ggaacttttgaggaaaatttta

SEQ ID NO: 216030 - DNA, 22 bp, Artificial Sequence
  Synthetic oligonucleotide; CTT chr2 60520204 60520225 60520209 60520204 -
ttgaggaaaattttaatactcc

SEQ ID NO: 216031 - DNA, 22 bp, Artificial Sequence
  Synthetic oligonucleotide; TTT chr2 60520203 60520224 60520208 60520203 -
tgaggaaaattttaatactcct

SEQ ID NO: 216032 - DNA, 22 bp, Artificial Sequence
  Synthetic oligonucleotide; TTT chr2 60520202 60520223 60520207 60520202 -
gaggaaaattttaatactcctg

SEQ ID NO: 216033 - DNA, 22 bp, Artificial Sequence
  Synthetic oligonucleotide; TTG chr2 60520201 60520222 60520206 60520201 -
aggaaaattttaatactcctgc

SEQ ID NO: 216034 - DNA, 22 bp, Artificial Sequence
  Synthetic oligonucleotide; TTT chr2 60520191 60520212 60520196 60520191 -
taatactcctgcataaataatt

SEQ ID NO: 216035 - DNA, 22 bp, Artificial Sequence
  Synthetic oligonucleotide; TTT chr2 60520190 60520211 60520195 60520190 -
aatactcctgcataaataattt

SEQ ID NO: 216036 - DNA, 22 bp, Artificial Sequence
  Synthetic oligonucleotide; TTA chr2 60520189 60520210 60520194 60520189 -
atactcctgcataaataatttt

SEQ ID NO: 216037 - DNA, 22 bp, Artificial Sequence
  Synthetic oligonucleotide; CTC chr2 60520183 60520204 60520188 60520183 -
ctgcataaataattttgcaatt

SEQ ID NO: 216038 - DNA, 22 bp, Artificial Sequence
  Synthetic oligonucleotide; CTG chr2 60520180 60520201 60520185 60520180 -
cataaataattttgcaattatt

SEQ ID NO: 216039 - DNA, 22 bp, Artificial Sequence
  Synthetic oligonucleotide; TTT chr2 60520168 60520189 60520173 60520168 -
tgcaattatttttgattcctac

SEQ ID NO: 216040 - DNA, 22 bp, Artificial Sequence
  Synthetic oligonucleotide; TTT chr2 60520167 60520188 60520172 60520167 -
gcaattatttttgattcctacc

SEQ ID NO: 216041 - DNA, 22 bp, Artificial Sequence
  Synthetic oligonucleotide; TTG chr2 60520166 60520187 60520171 60520166 -
caattatttttgattcctacct

SEQ ID NO: 216042 - DNA, 22 bp, Artificial Sequence
  Synthetic oligonucleotide; TTA chr2 60520160 60520181 60520165 60520160 -
tttttgattcctacctaatcaa

SEQ ID NO: 216043 - DNA, 22 bp, Artificial Sequence
  Synthetic oligonucleotide; TTT chr2 60520157 60520178 60520162 60520157 -
ttgattcctacctaatcaatat

SEQ ID NO: 216044 - DNA, 22 bp, Artificial Sequence
  Synthetic oligonucleotide; TTT chr2 60520156 60520177 60520161 60520156 -
tgattcctacctaatcaatata

SEQ ID NO: 216045 - DNA, 22 bp, Artificial Sequence
  Synthetic oligonucleotide; TTT chr2 60520155 60520176 60520160 60520155 -
gattcctacctaatcaatatac

SEQ ID NO: 216046 - DNA, 22 bp, Artificial Sequence
  Synthetic oligonucleotide; TTG chr2 60520154 60520175 60520159 60520154 -
attcctacctaatcaatatacc

SEQ ID NO: 216047 - DNA, 22 bp, Artificial Sequence
  Synthetic oligonucleotide; TTC chr2 60520150 60520171 60520155 60520150 -
ctacctaatcaatataccttgc

SEQ ID NO: 216048 - DNA, 22 bp, Artificial Sequence
  Synthetic oligonucleotide; CTA chr2 60520147 60520168 60520152 60520147 -
cctaatcaatataccttgccac

SEQ ID NO: 216049 - DNA, 22 bp, Artificial Sequence
  Synthetic oligonucleotide; CTA chr2 60520143 60520164 60520148 60520143 -
atcaatataccttgccacgcaa

SEQ ID NO: 216050 - DNA, 22 bp, Artificial Sequence
  Synthetic oligonucleotide; CTT chr2 60520130 60520151 60520135 60520130 -
gccacgcaaggtatattctatt

SEQ ID NO: 216051 - DNA, 22 bp, Artificial Sequence
  Synthetic oligonucleotide; TTG chr2 60520129 60520150 60520134 60520129 -
ccacgcaaggtatattctatta

SEQ ID NO: 216052 - DNA, 22 bp, Artificial Sequence
  Synthetic oligonucleotide; TTC chr2 60520112 60520133 60520117 60520112 -
tattatctttggctttctgaat

SEQ ID NO: 216053 - DNA, 22 bp, Artificial Sequence
  Synthetic oligonucleotide; CTA chr2 60520110 60520131 60520115 60520110 -
ttatctttggctttctgaattt

SEQ ID NO: 216054 - DNA, 22 bp, Artificial Sequence
  Synthetic oligonucleotide; TTA chr2 60520107 60520128 60520112 60520107 -
tctttggctttctgaatttttc

SEQ ID NO: 216055 - DNA, 22 bp, Artificial Sequence
  Synthetic oligonucleotide; CTT chr2 60520103 60520124 60520108 60520103 -
tggctttctgaatttttcaatt

SEQ ID NO: 216056 - DNA, 22 bp, Artificial Sequence
  Synthetic oligonucleotide; TTT chr2 60520102 60520123 60520107 60520102 -
ggctttctgaatttttcaattt

SEQ ID NO: 216057 - DNA, 22 bp, Artificial Sequence
  Synthetic oligonucleotide; TTG chr2 60520101 60520122 60520106 60520101 -
gctttctgaatttttcaatttt

SEQ ID NO: 216058 - DNA, 22 bp, Artificial Sequence
  Synthetic oligonucleotide; CTT chr2 60520097 60520118 60520102 60520097 -
tctgaatttttcaattttcaga

SEQ ID NO: 216059 - DNA, 22 bp, Artificial Sequence
  Synthetic oligonucleotide; TTT chr2 60520096 60520117 60520101 60520096 -
ctgaatttttcaattttcagaa

SEQ ID NO: 216060 - DNA, 22 bp, Artificial Sequence
  Synthetic oligonucleotide; TTC chr2 60520095 60520116 60520100 60520095 -
tgaatttttcaattttcagaaa

SEQ ID NO: 216061 - DNA, 22 bp, Artificial Sequence
  Synthetic oligonucleotide; CTG chr2 60520093 60520114 60520098 60520093 -
aatttttcaattttcagaaaaa

SEQ ID NO: 216062 - DNA, 22 bp, Artificial Sequence
  Synthetic oligonucleotide; TTT chr2 60520088 60520109 60520093 60520088 -
ttcaattttcagaaaaagaagc

SEQ ID NO: 216063 - DNA, 22 bp, Artificial Sequence
  Synthetic oligonucleotide; TTT chr2 60520087 60520108 60520092 60520087 -
tcaattttcagaaaaagaagcc

SEQ ID NO: 216064 - DNA, 22 bp, Artificial Sequence
  Synthetic oligonucleotide; TTT chr2 60520086 60520107 60520091 60520086 -
caattttcagaaaaagaagcca

SEQ ID NO: 216065 - DNA, 22 bp, Artificial Sequence
  Synthetic oligonucleotide; TTC chr2 60520085 60520106 60520090 60520085 -
aattttcagaaaaagaagccat

SEQ ID NO: 216066 - DNA, 22 bp, Artificial Sequence
  Synthetic oligonucleotide; TTT chr2 60520080 60520101 60520085 60520080 -
tcagaaaaagaagccataatac

SEQ ID NO: 216067 - DNA, 22 bp, Artificial Sequence
  Synthetic oligonucleotide; TTT chr2 60520079 60520100 60520084 60520079 -
cagaaaaagaagccataatact

SEQ ID NO: 216068 - DNA, 22 bp, Artificial Sequence
  Synthetic oligonucleotide; TTC chr2 60520078 60520099 60520083 60520078 -
agaaaaagaagccataatacta

SEQ ID NO: 216069 - DNA, 22 bp, Artificial Sequence
  Synthetic oligonucleotide; CTA chr2 60520056 60520077 60520061 60520056 -
tatcatacacacatttgtgcat

SEQ ID NO: 216070 - DNA, 22 bp, Artificial Sequence
  Synthetic oligonucleotide; TTT chr2 60520040 60520061 60520045 60520040 -
gtgcataaatacacaggcataa

SEQ ID NO: 216071 - DNA, 22 bp, Artificial Sequence
  Synthetic oligonucleotide; TTG chr2 60520039 60520060 60520044 60520039 -
tgcataaatacacaggcataaa

SEQ ID NO: 216072 - DNA, 22 bp, Artificial Sequence
  Synthetic oligonucleotide; TTT chr2 60520008 60520029 60520013 60520008 -
aggccgaattatttgaagagga

SEQ ID NO: 216073 - DNA, 22 bp, Artificial Sequence
  Synthetic oligonucleotide; TTA chr2 60520007 60520028 60520012 60520007 -
ggccgaattatttgaagaggat

SEQ ID NO: 216074 - DNA, 22 bp, Artificial Sequence
  Synthetic oligonucleotide; TTA chr2 60519997 60520018 60520002 60519997 -
tttgaagaggatacaataattg

SEQ ID NO: 216075 - DNA, 22 bp, Artificial Sequence
  Synthetic oligonucleotide; TTT chr2 60519994 60520015 60519999 60519994 -
gaagaggatacaataattgctt

SEQ ID NO: 216076 - DNA, 22 bp, Artificial Sequence
  Synthetic oligonucleotide; TTG chr2 60519993 60520014 60519998 60519993 -
aagaggatacaataattgcttg

SEQ ID NO: 216077 - DNA, 22 bp, Artificial Sequence
  Synthetic oligonucleotide; TTG chr2 60519975 60519996 60519980 60519975 -
cttgccagtgacatgattctcc

SEQ ID NO: 216078 - DNA, 22 bp, Artificial Sequence
  Synthetic oligonucleotide; CTT chr2 60519972 60519993 60519977 60519972 -
gccagtgacatgattctcctgc

SEQ ID NO: 216079 - DNA, 22 bp, Artificial Sequence
  Synthetic oligonucleotide; TTG chr2 60519971 60519992 60519976 60519971 -
ccagtgacatgattctcctgcc

SEQ ID NO: 216080 - DNA, 22 bp, Artificial Sequence
  Synthetic oligonucleotide; TTC chr2 60519956 60519977 60519961 60519956 -
tcctgccagagagaggggagaa

SEQ ID NO: 216081 - DNA, 22 bp, Artificial Sequence
  Synthetic oligonucleotide; CTC chr2 60519954 60519975 60519959 60519954 -
ctgccagagagaggggagaata

SEQ ID NO: 216082 - DNA, 22 bp, Artificial Sequence
  Synthetic oligonucleotide; CTG chr2 60519951 60519972 60519956 60519951 -
ccagagagaggggagaataact

SEQ ID NO: 216083 - DNA, 22 bp, Artificial Sequence
  Synthetic oligonucleotide; CTA chr2 60519928 60519949 60519933 60519928 -
ggtgcaaacttttaacactcca

SEQ ID NO: 216084 - DNA, 22 bp, Artificial Sequence
  Synthetic oligonucleotide; CTT chr2 60519917 60519938 60519922 60519917 -
ttaacactccaagtctagagag

SEQ ID NO: 216085 - DNA, 22 bp, Artificial Sequence
  Synthetic oligonucleotide; TTT chr2 60519916 60519937 60519921 60519916 -
taacactccaagtctagagaga

SEQ ID NO: 216086 - DNA, 22 bp, Artificial Sequence
  Synthetic oligonucleotide; TTT chr2 60519915 60519936 60519920 60519915 -
aacactccaagtctagagagaa

SEQ ID NO: 216087 - DNA, 22 bp, Artificial Sequence
  Synthetic oligonucleotide; TTA chr2 60519914 60519935 60519919 60519914 -
acactccaagtctagagagaat

SEQ ID NO: 216088 - DNA, 22 bp, Artificial Sequence
  Synthetic oligonucleotide; CTC chr2 60519908 60519929 60519913 60519908 -
caagtctagagagaattatcca

SEQ ID NO: 216089 - DNA, 22 bp, Artificial Sequence
  Synthetic oligonucleotide; CTA chr2 60519900 60519921 60519905 60519900 -
gagagaattatccaagcatagc

SEQ ID NO: 216090 - DNA, 22 bp, Artificial Sequence
  Synthetic oligonucleotide; TTA chr2 60519890 60519911 60519895 60519890 -
tccaagcatagccatgaattcc

SEQ ID NO: 216091 - DNA, 22 bp, Artificial Sequence
  Synthetic oligonucleotide; TTC chr2 60519869 60519890 60519874 60519869 -
ctgagttatggattggcaaatg

SEQ ID NO: 216092 - DNA, 22 bp, Artificial Sequence
  Synthetic oligonucleotide; CTG chr2 60519866 60519887 60519871 60519866 -
agttatggattggcaaatgaca

SEQ ID NO: 216093 - DNA, 22 bp, Artificial Sequence
  Synthetic oligonucleotide; TTA chr2 60519861 60519882 60519866 60519861 -
tggattggcaaatgacaatgcc

SEQ ID NO: 216094 - DNA, 22 bp, Artificial Sequence
  Synthetic oligonucleotide; TTG chr2 60519854 60519875 60519859 60519854 -
gcaaatgacaatgcctatgaaa

SEQ ID NO: 216095 - DNA, 22 bp, Artificial Sequence
  Synthetic oligonucleotide; CTA chr2 60519837 60519858 60519842 60519837 -
tgaaaacgatctctttgtcttc

SEQ ID NO: 216096 - DNA, 22 bp, Artificial Sequence
  Synthetic oligonucleotide; CTC chr2 60519824 60519845 60519829 60519824 -
tttgtcttcactgagttttctt

SEQ ID NO: 216097 - DNA, 22 bp, Artificial Sequence
  Synthetic oligonucleotide; CTT chr2 60519822 60519843 60519827 60519822 -
tgtcttcactgagttttctttg

SEQ ID NO: 216098 - DNA, 22 bp, Artificial Sequence
  Synthetic oligonucleotide; TTT chr2 60519821 60519842 60519826 60519821 -
gtcttcactgagttttctttgt

SEQ ID NO: 216099 - DNA, 22 bp, Artificial Sequence
  Synthetic oligonucleotide; TTG chr2 60519820 60519841 60519825 60519820 -
tcttcactgagttttctttgtc

SEQ ID NO: 216100 - DNA, 22 bp, Artificial Sequence
  Synthetic oligonucleotide; CTT chr2 60519816 60519837 60519821 60519816 -
cactgagttttctttgtcattg

SEQ ID NO: 216101 - DNA, 22 bp, Artificial Sequence
  Synthetic oligonucleotide; TTC chr2 60519815 60519836 60519820 60519815 -
actgagttttctttgtcattgg

SEQ ID NO: 216102 - DNA, 22 bp, Artificial Sequence
  Synthetic oligonucleotide; CTG chr2 60519811 60519832 60519816 60519811 -
agttttctttgtcattggagta

SEQ ID NO: 216103 - DNA, 22 bp, Artificial Sequence
  Synthetic oligonucleotide; TTT chr2 60519806 60519827 60519811 60519806 -
tctttgtcattggagtaattta

SEQ ID NO: 216104 - DNA, 22 bp, Artificial Sequence
  Synthetic oligonucleotide; TTT chr2 60519805 60519826 60519810 60519805 -
ctttgtcattggagtaatttag

SEQ ID NO: 216105 - DNA, 22 bp, Artificial Sequence
  Synthetic oligonucleotide; TTC chr2 60519804 60519825 60519809 60519804 -
tttgtcattggagtaatttagg

SEQ ID NO: 216106 - DNA, 22 bp, Artificial Sequence
  Synthetic oligonucleotide; CTT chr2 60519802 60519823 60519807 60519802 -
tgtcattggagtaatttaggag

SEQ ID NO: 216107 - DNA, 22 bp, Artificial Sequence
  Synthetic oligonucleotide; TTT chr2 60519801 60519822 60519806 60519801 -
gtcattggagtaatttaggaga

SEQ ID NO: 216108 - DNA, 22 bp, Artificial Sequence
  Synthetic oligonucleotide; TTG chr2 60519800 60519821 60519805 60519800 -
tcattggagtaatttaggagaa

SEQ ID NO: 216109 - DNA, 22 bp, Artificial Sequence
  Synthetic oligonucleotide; TTG chr2 60519794 60519815 60519799 60519794 -
gagtaatttaggagaatacagg

SEQ ID NO: 216110 - DNA, 22 bp, Artificial Sequence
  Synthetic oligonucleotide; TTT chr2 60519785 60519806 60519790 60519785 -
aggagaatacaggatgtgactg

SEQ ID NO: 216111 - DNA, 22 bp, Artificial Sequence
  Synthetic oligonucleotide; TTA chr2 60519784 60519805 60519789 60519784 -
ggagaatacaggatgtgactgg

SEQ ID NO: 216112 - DNA, 22 bp, Artificial Sequence
  Synthetic oligonucleotide; CTG chr2 60519763 60519784 60519768 60519763 -
ggagccctttctgaataagcac

SEQ ID NO: 216113 - DNA, 22 bp, Artificial Sequence
  Synthetic oligonucleotide; CTT chr2 60519754 60519775 60519759 60519754 -
tctgaataagcacagtcccatg

SEQ ID NO: 216114 - DNA, 22 bp, Artificial Sequence
  Synthetic oligonucleotide; TTT chr2 60519753 60519774 60519758 60519753 -
ctgaataagcacagtcccatgc

SEQ ID NO: 216115 - DNA, 22 bp, Artificial Sequence
  Synthetic oligonucleotide; TTC chr2 60519752 60519773 60519757 60519752 -
tgaataagcacagtcccatgcc

SEQ ID NO: 216116 - DNA, 22 bp, Artificial Sequence
  Synthetic oligonucleotide; CTG chr2 60519750 60519771 60519755 60519750 -
aataagcacagtcccatgccca

SEQ ID NO: 216117 - DNA, 22 bp, Artificial Sequence
  Synthetic oligonucleotide; TTC chr2 60519719 60519740 60519724 60519719 -
ctaaaccagtggctcccagctg

SEQ ID NO: 216118 - DNA, 22 bp, Artificial Sequence
  Synthetic oligonucleotide; CTA chr2 60519716 60519737 60519721 60519716 -
aaccagtggctcccagctgcat

SEQ ID NO: 216119 - DNA, 22 bp, Artificial Sequence
  Synthetic oligonucleotide; CTC chr2 60519704 60519725 60519709 60519704 -
ccagctgcatgtgtcagaacag

SEQ ID NO: 216120 - DNA, 22 bp, Artificial Sequence
  Synthetic oligonucleotide; CTG chr2 60519697 60519718 60519702 60519697 -
catgtgtcagaacagaactggc

SEQ ID NO: 216121 - DNA, 22 bp, Artificial Sequence
  Synthetic oligonucleotide; CTG chr2 60519677 60519698 60519682 60519677 -
gcctcagaaatctacaagattc

SEQ ID NO: 216122 - DNA, 22 bp, Artificial Sequence
  Synthetic oligonucleotide; CTC chr2 60519672 60519693 60519677 60519672 -
agaaatctacaagattccagtg

SEQ ID NO: 216123 - DNA, 22 bp, Artificial Sequence
  Synthetic oligonucleotide; CTA chr2 60519663 60519684 60519668 60519663 -
caagattccagtggttccagcc

SEQ ID NO: 216124 - DNA, 22 bp, Artificial Sequence
  Synthetic oligonucleotide; TTC chr2 60519655 60519676 60519660 60519655 -
cagtggttccagcctcactttc

SEQ ID NO: 216125 - DNA, 22 bp, Artificial Sequence
  Synthetic oligonucleotide; TTC chr2 60519646 60519667 60519651 60519646 -
cagcctcactttctccagtggt

SEQ ID NO: 216126 - DNA, 22 bp, Artificial Sequence
  Synthetic oligonucleotide; CTC chr2 60519639 60519660 60519644 60519639 -
actttctccagtggtcaactta

SEQ ID NO: 216127 - DNA, 22 bp, Artificial Sequence
  Synthetic oligonucleotide; CTT chr2 60519635 60519656 60519640 60519635 -
tctccagtggtcaacttactgc

SEQ ID NO: 216128 - DNA, 22 bp, Artificial Sequence
  Synthetic oligonucleotide; TTT chr2 60519634 60519655 60519639 60519634 -
ctccagtggtcaacttactgct

SEQ ID NO: 216129 - DNA, 22 bp, Artificial Sequence
  Synthetic oligonucleotide; TTC chr2 60519633 60519654 60519638 60519633 -
tccagtggtcaacttactgctg

SEQ ID NO: 216130 - DNA, 22 bp, Artificial Sequence
  Synthetic oligonucleotide; CTC chr2 60519631 60519652 60519636 60519631 -
cagtggtcaacttactgctgtt

SEQ ID NO: 216131 - DNA, 22 bp, Artificial Sequence
  Synthetic oligonucleotide; CTT chr2 60519618 60519639 60519623 60519618 -
actgctgttgcaaagcacgtca

SEQ ID NO: 216132 - DNA, 22 bp, Artificial Sequence
  Synthetic oligonucleotide; TTA chr2 60519617 60519638 60519622 60519617 -
ctgctgttgcaaagcacgtcag

SEQ ID NO: 216133 - DNA, 22 bp, Artificial Sequence
  Synthetic oligonucleotide; CTG chr2 60519614 60519635 60519619 60519614 -
ctgttgcaaagcacgtcagatt

SEQ ID NO: 216134 - DNA, 22 bp, Artificial Sequence
  Synthetic oligonucleotide; CTG chr2 60519611 60519632 60519616 60519611 -
ttgcaaagcacgtcagatttca

SEQ ID NO: 216135 - DNA, 22 bp, Artificial Sequence
  Synthetic oligonucleotide; TTG chr2 60519608 60519629 60519613 60519608 -
caaagcacgtcagatttcagga

SEQ ID NO: 216136 - DNA, 22 bp, Artificial Sequence
  Synthetic oligonucleotide; TTT chr2 60519591 60519612 60519596 60519591 -
caggagcgatttctcttgtaag

SEQ ID NO: 216137 - DNA, 22 bp, Artificial Sequence
  Synthetic oligonucleotide; TTC chr2 60519590 60519611 60519595 60519590 -
aggagcgatttctcttgtaagg

SEQ ID NO: 216138 - DNA, 22 bp, Artificial Sequence
  Synthetic oligonucleotide; TTT chr2 60519579 60519600 60519584 60519579 -
ctcttgtaaggaaagaaggcag

SEQ ID NO: 216139 - DNA, 22 bp, Artificial Sequence
  Synthetic oligonucleotide; TTC chr2 60519578 60519599 60519583 60519578 -
tcttgtaaggaaagaaggcagg

SEQ ID NO: 216140 - DNA, 22 bp, Artificial Sequence
  Synthetic oligonucleotide; CTC chr2 60519576 60519597 60519581 60519576 -
ttgtaaggaaagaaggcaggca

SEQ ID NO: 216141 - DNA, 22 bp, Artificial Sequence
  Synthetic oligonucleotide; CTT chr2 60519574 60519595 60519579 60519574 -
gtaaggaaagaaggcaggcagg

SEQ ID NO: 216142 - DNA, 22 bp, Artificial Sequence
  Synthetic oligonucleotide; TTG chr2 60519573 60519594 60519578 60519573 -
taaggaaagaaggcaggcaggc

SEQ ID NO: 216143 - DNA, 22 bp, Artificial Sequence
  Synthetic oligonucleotide; CTT chr2 60519506 60519527 60519511 60519506 -
attttttctctgcagcatgagt

SEQ ID NO: 216144 - DNA, 22 bp, Artificial Sequence
  Synthetic oligonucleotide; TTA chr2 60519505 60519526 60519510 60519505 -
ttttttctctgcagcatgagtg

SEQ ID NO: 216145 - DNA, 22 bp, Artificial Sequence
  Synthetic oligonucleotide; TTT chr2 60519502 60519523 60519507 60519502 -
tttctctgcagcatgagtgcag

SEQ ID NO: 216146 - DNA, 22 bp, Artificial Sequence
  Synthetic oligonucleotide; TTT chr2 60519501 60519522 60519506 60519501 -
ttctctgcagcatgagtgcagt

SEQ ID NO: 216147 - DNA, 22 bp, Artificial Sequence
  Synthetic oligonucleotide; TTT chr2 60519500 60519521 60519505 60519500 -
tctctgcagcatgagtgcagtc

SEQ ID NO: 216148 - DNA, 22 bp, Artificial Sequence
  Synthetic oligonucleotide; TTT chr2 60519499 60519520 60519504 60519499 -
ctctgcagcatgagtgcagtca

SEQ ID NO: 216149 - DNA, 22 bp, Artificial Sequence
  Synthetic oligonucleotide; TTC chr2 60519498 60519519 60519503 60519498 -
tctgcagcatgagtgcagtcac

SEQ ID NO: 216150 - DNA, 22 bp, Artificial Sequence
  Synthetic oligonucleotide; CTC chr2 60519496 60519517 60519501 60519496 -
tgcagcatgagtgcagtcacct

SEQ ID NO: 216151 - DNA, 22 bp, Artificial Sequence
  Synthetic oligonucleotide; CTG chr2 60519494 60519515 60519499 60519494 -
cagcatgagtgcagtcaccttt

SEQ ID NO: 216152 - DNA, 22 bp, Artificial Sequence
  Synthetic oligonucleotide; CTT chr2 60519473 60519494 60519478 60519473 -
tttcctacgatgttccacaccc

SEQ ID NO: 216153 - DNA, 22 bp, Artificial Sequence
  Synthetic oligonucleotide; TTT chr2 60519472 60519493 60519477 60519472 -
ttcctacgatgttccacaccca

SEQ ID NO: 216154 - DNA, 22 bp, Artificial Sequence
  Synthetic oligonucleotide; TTT chr2 60519471 60519492 60519476 60519471 -
tcctacgatgttccacacccat

SEQ ID NO: 216155 - DNA, 22 bp, Artificial Sequence
  Synthetic oligonucleotide; TTT chr2 60519470 60519491 60519475 60519470 -
cctacgatgttccacacccatc

SEQ ID NO: 216156 - DNA, 22 bp, Artificial Sequence
  Synthetic oligonucleotide; TTC chr2 60519469 60519490 60519474 60519469 -
ctacgatgttccacacccatct

SEQ ID NO: 216157 - DNA, 22 bp, Artificial Sequence
  Synthetic oligonucleotide; CTA chr2 60519466 60519487 60519471 60519466 -
cgatgttccacacccatctctc

SEQ ID NO: 216158 - DNA, 22 bp, Artificial Sequence
  Synthetic oligonucleotide; TTC chr2 60519458 60519479 60519463 60519458 -
cacacccatctctccttacagg

SEQ ID NO: 216159 - DNA, 22 bp, Artificial Sequence
  Synthetic oligonucleotide; CTC chr2 60519446 60519467 60519451 60519446 -
tccttacaggttatagacacat

SEQ ID NO: 216160 - DNA, 22 bp, Artificial Sequence
  Synthetic oligonucleotide; CTC chr2 60519444 60519465 60519449 60519444 -
cttacaggttatagacacattt

SEQ ID NO: 216161 - DNA, 22 bp, Artificial Sequence
  Synthetic oligonucleotide; CTT chr2 60519441 60519462 60519446 60519441 -
acaggttatagacacatttttg

SEQ ID NO: 216162 - DNA, 22 bp, Artificial Sequence
  Synthetic oligonucleotide; TTA chr2 60519440 60519461 60519445 60519440 -
caggttatagacacatttttgg

SEQ ID NO: 216163 - DNA, 22 bp, Artificial Sequence
  Synthetic oligonucleotide; TTA chr2 60519433 60519454 60519438 60519433 -
tagacacatttttggcactgca

SEQ ID NO: 216164 - DNA, 22 bp, Artificial Sequence
  Synthetic oligonucleotide; TTT chr2 60519422 60519443 60519427 60519422 -
ttggcactgcataaagtaagcg

SEQ ID NO: 216165 - DNA, 22 bp, Artificial Sequence
  Synthetic oligonucleotide; TTT chr2 60519421 60519442 60519426 60519421 -
tggcactgcataaagtaagcgt

SEQ ID NO: 216166 - DNA, 22 bp, Artificial Sequence
  Synthetic oligonucleotide; TTT chr2 60519420 60519441 60519425 60519420 -
ggcactgcataaagtaagcgtt

SEQ ID NO: 216167 - DNA, 22 bp, Artificial Sequence
  Synthetic oligonucleotide; TTG chr2 60519419 60519440 60519424 60519419 -
gcactgcataaagtaagcgttc

SEQ ID NO: 216168 - DNA, 22 bp, Artificial Sequence
  Synthetic oligonucleotide; CTG chr2 60519413 60519434 60519418 60519413 -
cataaagtaagcgttccaacat

SEQ ID NO: 216169 - DNA, 22 bp, Artificial Sequence
  Synthetic oligonucleotide; TTC chr2 60519397 60519418 60519402 60519397 -
caacatgtttttaatctttaac

SEQ ID NO: 216170 - DNA, 22 bp, Artificial Sequence
  Synthetic oligonucleotide; TTT chr2 60519387 60519408 60519392 60519387 -
ttaatctttaactttcacatca

SEQ ID NO: 216171 - DNA, 22 bp, Artificial Sequence
  Synthetic oligonucleotide; TTT chr2 60519386 60519407 60519391 60519386 -
taatctttaactttcacatcat

SEQ ID NO: 216172 - DNA, 22 bp, Artificial Sequence
  Synthetic oligonucleotide; TTT chr2 60519385 60519406 60519390 60519385 -
aatctttaactttcacatcatt

SEQ ID NO: 216173 - DNA, 22 bp, Artificial Sequence
  Synthetic oligonucleotide; TTA chr2 60519384 60519405 60519389 60519384 -
atctttaactttcacatcatta

SEQ ID NO: 216174 - DNA, 22 bp, Artificial Sequence
  Synthetic oligonucleotide; CTT chr2 60519379 60519400 60519384 60519379 -
taactttcacatcattaaaaag

SEQ ID NO: 216175 - DNA, 22 bp, Artificial Sequence
  Synthetic oligonucleotide; TTT chr2 60519378 60519399 60519383 60519378 -
aactttcacatcattaaaaagc

SEQ ID NO: 216176 - DNA, 22 bp, Artificial Sequence
  Synthetic oligonucleotide; TTA chr2 60519377 60519398 60519382 60519377 -
actttcacatcattaaaaagct

SEQ ID NO: 216177 - DNA, 22 bp, Artificial Sequence
  Synthetic oligonucleotide; CTT chr2 60519373 60519394 60519378 60519373 -
tcacatcattaaaaagctgatg

SEQ ID NO: 216178 - DNA, 22 bp, Artificial Sequence
  Synthetic oligonucleotide; TTT chr2 60519372 60519393 60519377 60519372 -
cacatcattaaaaagctgatgt

SEQ ID NO: 216179 - DNA, 22 bp, Artificial Sequence
  Synthetic oligonucleotide; TTC chr2 60519371 60519392 60519376 60519371 -
acatcattaaaaagctgatgta

SEQ ID NO: 216180 - DNA, 22 bp, Artificial Sequence
  Synthetic oligonucleotide; TTA chr2 60519362 60519383 60519367 60519362 -
aaaagctgatgtactgactttc

SEQ ID NO: 216181 - DNA, 22 bp, Artificial Sequence
  Synthetic oligonucleotide; CTG chr2 60519354 60519375 60519359 60519354 -
atgtactgactttcagctgcct

SEQ ID NO: 216182 - DNA, 22 bp, Artificial Sequence
  Synthetic oligonucleotide; CTG chr2 60519346 60519367 60519351 60519346 -
actttcagctgcctggagatag

SEQ ID NO: 216183 - DNA, 22 bp, Artificial Sequence
  Synthetic oligonucleotide; CTT chr2 60519342 60519363 60519347 60519342 -
tcagctgcctggagatagttca

SEQ ID NO: 216184 - DNA, 22 bp, Artificial Sequence
  Synthetic oligonucleotide; TTT chr2 60519341 60519362 60519346 60519341 -
cagctgcctggagatagttcag

SEQ ID NO: 216185 - DNA, 22 bp, Artificial Sequence
  Synthetic oligonucleotide; TTC chr2 60519340 60519361 60519345 60519340 -
agctgcctggagatagttcagg

SEQ ID NO: 216186 - DNA, 22 bp, Artificial Sequence
  Synthetic oligonucleotide; CTG chr2 60519335 60519356 60519340 60519335 -
cctggagatagttcagggccca

SEQ ID NO: 216187 - DNA, 22 bp, Artificial Sequence
  Synthetic oligonucleotide; CTG chr2 60519331 60519352 60519336 60519331 -
gagatagttcagggcccagcac

SEQ ID NO: 216188 - DNA, 22 bp, Artificial Sequence
  Synthetic oligonucleotide; TTC chr2 60519321 60519342 60519326 60519321 -
agggcccagcacctgacaggtg

SEQ ID NO: 216189 - DNA, 22 bp, Artificial Sequence
  Synthetic oligonucleotide; CTG chr2 60519306 60519327 60519311 60519306 -
acaggtgtaatgttctgtgttt

SEQ ID NO: 216190 - DNA, 22 bp, Artificial Sequence
  Synthetic oligonucleotide; TTC chr2 60519291 60519312 60519296 60519291 -
tgtgttttatgtctctcaatat

SEQ ID NO: 216191 - DNA, 22 bp, Artificial Sequence
  Synthetic oligonucleotide; CTG chr2 60519289 60519310 60519294 60519289 -
tgttttatgtctctcaatatgg

SEQ ID NO: 216192 - DNA, 22 bp, Artificial Sequence
  Synthetic oligonucleotide; TTT chr2 60519284 60519305 60519289 60519284 -
tatgtctctcaatatggaggtt

SEQ ID NO: 216193 - DNA, 22 bp, Artificial Sequence
  Synthetic oligonucleotide; TTT chr2 60519283 60519304 60519288 60519283 -
atgtctctcaatatggaggtta

SEQ ID NO: 216194 - DNA, 22 bp, Artificial Sequence
  Synthetic oligonucleotide; TTA chr2 60519282 60519303 60519287 60519282 -
tgtctctcaatatggaggttat

SEQ ID NO: 216195 - DNA, 22 bp, Artificial Sequence
  Synthetic oligonucleotide; CTC chr2 60519276 60519297 60519281 60519276 -
tcaatatggaggttatagaatc

SEQ ID NO: 216196 - DNA, 22 bp, Artificial Sequence
  Synthetic oligonucleotide; CTC chr2 60519274 60519295 60519279 60519274 -
aatatggaggttatagaatcaa

SEQ ID NO: 216197 - DNA, 22 bp, Artificial Sequence
  Synthetic oligonucleotide; TTA chr2 60519261 60519282 60519266 60519261 -
tagaatcaaaaagaccgcaaaa

SEQ ID NO: 216198 - DNA, 22 bp, Artificial Sequence
  Synthetic oligonucleotide; CTT chr2 60519233 60519254 60519238 60519233 -
aaaggtgttgatacccatagac

SEQ ID NO: 216199 - DNA, 22 bp, Artificial Sequence
  Synthetic oligonucleotide; TTA chr2 60519232 60519253 60519237 60519232 -
aaggtgttgatacccatagaca

SEQ ID NO: 216200 - DNA, 22 bp, Artificial Sequence
  Synthetic oligonucleotide; TTG chr2 60519223 60519244 60519228 60519223 -
atacccatagacagagcatgca

SEQ ID NO: 216201 - DNA, 22 bp, Artificial Sequence
  Synthetic oligonucleotide; CTC chr2 60519193 60519214 60519198 60519193 -
aggttccctttcttgccccgct

SEQ ID NO: 216202 - DNA, 22 bp, Artificial Sequence
  Synthetic oligonucleotide; TTC chr2 60519187 60519208 60519192 60519187 -
cctttcttgccccgctttcaca

SEQ ID NO: 216203 - DNA, 22 bp, Artificial Sequence
  Synthetic oligonucleotide; CTT chr2 60519183 60519204 60519188 60519183 -
tcttgccccgctttcacaccta

SEQ ID NO: 216204 - DNA, 22 bp, Artificial Sequence
  Synthetic oligonucleotide; TTT chr2 60519182 60519203 60519187 60519182 -
cttgccccgctttcacacctat

SEQ ID NO: 216205 - DNA, 22 bp, Artificial Sequence
  Synthetic oligonucleotide; TTC chr2 60519181 60519202 60519186 60519181 -
ttgccccgctttcacacctatt

SEQ ID NO: 216206 - DNA, 22 bp, Artificial Sequence
  Synthetic oligonucleotide; CTT chr2 60519179 60519200 60519184 60519179 -
gccccgctttcacacctatttc

SEQ ID NO: 216207 - DNA, 22 bp, Artificial Sequence
  Synthetic oligonucleotide; TTG chr2 60519178 60519199 60519183 60519178 -
ccccgctttcacacctatttct

SEQ ID NO: 216208 - DNA, 22 bp, Artificial Sequence
  Synthetic oligonucleotide; CTT chr2 60519170 60519191 60519175 60519170 -
tcacacctatttctttttttgt

SEQ ID NO: 216209 - DNA, 22 bp, Artificial Sequence
  Synthetic oligonucleotide; TTT chr2 60519169 60519190 60519174 60519169 -
cacacctatttctttttttgta

SEQ ID NO: 216210 - DNA, 22 bp, Artificial Sequence
  Synthetic oligonucleotide; TTC chr2 60519168 60519189 60519173 60519168 -
acacctatttctttttttgtag

SEQ ID NO: 216211 - DNA, 22 bp, Artificial Sequence
  Synthetic oligonucleotide; CTA chr2 60519161 60519182 60519166 60519161 -
tttctttttttgtagcgcctgt

SEQ ID NO: 216212 - DNA, 22 bp, Artificial Sequence
  Synthetic oligonucleotide; TTT chr2 60519158 60519179 60519163 60519158 -
ctttttttgtagcgcctgtatt

SEQ ID NO: 216213 - DNA, 22 bp, Artificial Sequence
  Synthetic oligonucleotide; TTC chr2 60519157 60519178 60519162 60519157 -
tttttttgtagcgcctgtattt

SEQ ID NO: 216214 - DNA, 22 bp, Artificial Sequence
  Synthetic oligonucleotide; CTT chr2 60519155 60519176 60519160 60519155 -
tttttgtagcgcctgtatttga

SEQ ID NO: 216215 - DNA, 22 bp, Artificial Sequence
  Synthetic oligonucleotide; TTT chr2 60519154 60519175 60519159 60519154 -
ttttgtagcgcctgtatttgaa

SEQ ID NO: 216216 - DNA, 22 bp, Artificial Sequence
  Synthetic oligonucleotide; TTT chr2 60519153 60519174 60519158 60519153 -
tttgtagcgcctgtatttgaaa

SEQ ID NO: 216217 - DNA, 22 bp, Artificial Sequence
  Synthetic oligonucleotide; TTT chr2 60519152 60519173 60519157 60519152 -
ttgtagcgcctgtatttgaaag

SEQ ID NO: 216218 - DNA, 22 bp, Artificial Sequence
  Synthetic oligonucleotide; TTT chr2 60519151 60519172 60519156 60519151 -
tgtagcgcctgtatttgaaagg

SEQ ID NO: 216219 - DNA, 22 bp, Artificial Sequence
  Synthetic oligonucleotide; TTT chr2 60519150 60519171 60519155 60519150 -
gtagcgcctgtatttgaaaggg

SEQ ID NO: 216220 - DNA, 22 bp, Artificial Sequence
  Synthetic oligonucleotide; TTG chr2 60519149 60519170 60519154 60519149 -
tagcgcctgtatttgaaagggg

SEQ ID NO: 216221 - DNA, 22 bp, Artificial Sequence
  Synthetic oligonucleotide; CTG chr2 60519140 60519161 60519145 60519140 -
tatttgaaaggggttcctggtg

SEQ ID NO: 216222 - DNA, 22 bp, Artificial Sequence
  Synthetic oligonucleotide; TTT chr2 60519135 60519156 60519140 60519135 -
gaaaggggttcctggtgtactt

SEQ ID NO: 216223 - DNA, 22 bp, Artificial Sequence
  Synthetic oligonucleotide; TTG chr2 60519134 60519155 60519139 60519134 -
aaaggggttcctggtgtacttg

SEQ ID NO: 216224 - DNA, 22 bp, Artificial Sequence
  Synthetic oligonucleotide; TTC chr2 60519124 60519145 60519129 60519124 -
ctggtgtacttgggagaaaaga

SEQ ID NO: 216225 - DNA, 22 bp, Artificial Sequence
  Synthetic oligonucleotide; CTG chr2 60519121 60519142 60519126 60519121 -
gtgtacttgggagaaaagaagc

SEQ ID NO: 216226 - DNA, 22 bp, Artificial Sequence
  Synthetic oligonucleotide; CTT chr2 60519113 60519134 60519118 60519113 -
gggagaaaagaagcttcttggt

SEQ ID NO: 216227 - DNA, 22 bp, Artificial Sequence
  Synthetic oligonucleotide; TTG chr2 60519112 60519133 60519117 60519112 -
ggagaaaagaagcttcttggtt

SEQ ID NO: 216228 - DNA, 22 bp, Artificial Sequence
  Synthetic oligonucleotide; CTT chr2 60519097 60519118 60519102 60519097 -
cttggtttggtagtacctacca

SEQ ID NO: 216229 - DNA, 22 bp, Artificial Sequence
  Synthetic oligonucleotide; TTC chr2 60519096 60519117 60519101 60519096 -
ttggtttggtagtacctaccag

SEQ ID NO: 216230 - DNA, 22 bp, Artificial Sequence
  Synthetic oligonucleotide; CTT chr2 60519094 60519115 60519099 60519094 -
ggtttggtagtacctaccagag

SEQ ID NO: 216231 - DNA, 22 bp, Artificial Sequence
  Synthetic oligonucleotide; TTG chr2 60519093 60519114 60519098 60519093 -
gtttggtagtacctaccagaga

SEQ ID NO: 216232 - DNA, 22 bp, Artificial Sequence
  Synthetic oligonucleotide; TTT chr2 60519089 60519110 60519094 60519089 -
ggtagtacctaccagagactcc

SEQ ID NO: 216233 - DNA, 22 bp, Artificial Sequence
  Synthetic oligonucleotide; TTG chr2 60519088 60519109 60519093 60519088 -
gtagtacctaccagagactccc

SEQ ID NO: 216234 - DNA, 22 bp, Artificial Sequence
  Synthetic oligonucleotide; CTA chr2 60519078 60519099 60519083 60519078 -
ccagagactccctgtttcctgc

SEQ ID NO: 216235 - DNA, 22 bp, Artificial Sequence
  Synthetic oligonucleotide; CTC chr2 60519068 60519089 60519073 60519068 -
cctgtttcctgctggtatcagg

SEQ ID NO: 216236 - DNA, 22 bp, Artificial Sequence
  Synthetic oligonucleotide; CTG chr2 60519064 60519085 60519069 60519064 -
tttcctgctggtatcaggattg

SEQ ID NO: 216237 - DNA, 22 bp, Artificial Sequence
  Synthetic oligonucleotide; TTT chr2 60519061 60519082 60519066 60519061 -
cctgctggtatcaggattgaaa

SEQ ID NO: 216238 - DNA, 22 bp, Artificial Sequence
  Synthetic oligonucleotide; TTC chr2 60519060 60519081 60519065 60519060 -
ctgctggtatcaggattgaaaa

SEQ ID NO: 216239 - DNA, 22 bp, Artificial Sequence
  Synthetic oligonucleotide; CTG chr2 60519057 60519078 60519062 60519057 -
ctggtatcaggattgaaaaatc

SEQ ID NO: 216240 - DNA, 22 bp, Artificial Sequence
  Synthetic oligonucleotide; CTG chr2 60519054 60519075 60519059 60519054 -
gtatcaggattgaaaaatccca

SEQ ID NO: 216241 - DNA, 22 bp, Artificial Sequence
  Synthetic oligonucleotide; TTG chr2 60519042 60519063 60519047 60519042 -
aaaaatcccacttctgtccatt

SEQ ID NO: 216242 - DNA, 22 bp, Artificial Sequence
  Synthetic oligonucleotide; CTT chr2 60519029 60519050 60519034 60519029 -
ctgtccattttctctcaagagt

SEQ ID NO: 216243 - DNA, 22 bp, Artificial Sequence
  Synthetic oligonucleotide; TTC chr2 60519028 60519049 60519033 60519028 -
tgtccattttctctcaagagtt

SEQ ID NO: 216244 - DNA, 22 bp, Artificial Sequence
  Synthetic oligonucleotide; CTG chr2 60519026 60519047 60519031 60519026 -
tccattttctctcaagagttga

SEQ ID NO: 216245 - DNA, 22 bp, Artificial Sequence
  Synthetic oligonucleotide; TTT chr2 60519019 60519040 60519024 60519019 -
tctctcaagagttgagagatgt

SEQ ID NO: 216246 - DNA, 22 bp, Artificial Sequence
  Synthetic oligonucleotide; TTT chr2 60519018 60519039 60519023 60519018 -
ctctcaagagttgagagatgtg

SEQ ID NO: 216247 - DNA, 22 bp, Artificial Sequence
  Synthetic oligonucleotide; TTC chr2 60519017 60519038 60519022 60519017 -
tctcaagagttgagagatgtgt

SEQ ID NO: 216248 - DNA, 22 bp, Artificial Sequence
  Synthetic oligonucleotide; CTC chr2 60519015 60519036 60519020 60519015 -
tcaagagttgagagatgtgtgc

SEQ ID NO: 216249 - DNA, 22 bp, Artificial Sequence
  Synthetic oligonucleotide; CTC chr2 60519013 60519034 60519018 60519013 -
aagagttgagagatgtgtgcca

SEQ ID NO: 216250 - DNA, 22 bp, Artificial Sequence
  Synthetic oligonucleotide; TTG chr2 60519005 60519026 60519010 60519005 -
agagatgtgtgccatcgctctt

SEQ ID NO: 216251 - DNA, 22 bp, Artificial Sequence
  Synthetic oligonucleotide; CTC chr2 60518985 60519006 60518990 60518985 -
tttaaaagaaggaactctcctt

SEQ ID NO: 216252 - DNA, 22 bp, Artificial Sequence
  Synthetic oligonucleotide; CTT chr2 60518983 60519004 60518988 60518983 -
taaaagaaggaactctcctttt

SEQ ID NO: 216253 - DNA, 22 bp, Artificial Sequence
  Synthetic oligonucleotide; TTT chr2 60518982 60519003 60518987 60518982 -
aaaagaaggaactctccttttg

SEQ ID NO: 216254 - DNA, 22 bp, Artificial Sequence
  Synthetic oligonucleotide; TTA chr2 60518981 60519002 60518986 60518981 -
aaagaaggaactctccttttgc

SEQ ID NO: 216255 - DNA, 22 bp, Artificial Sequence
  Synthetic oligonucleotide; CTC chr2 60518968 60518989 60518973 60518968 -
tccttttgctgtggattgtagg

SEQ ID NO: 216256 - DNA, 22 bp, Artificial Sequence
  Synthetic oligonucleotide; CTC chr2 60518966 60518987 60518971 60518966 -
cttttgctgtggattgtaggga

SEQ ID NO: 216257 - DNA, 22 bp, Artificial Sequence
  Synthetic oligonucleotide; CTT chr2 60518963 60518984 60518968 60518963 -
ttgctgtggattgtagggagca

SEQ ID NO: 216258 - DNA, 22 bp, Artificial Sequence
  Synthetic oligonucleotide; TTT chr2 60518962 60518983 60518967 60518962 -
tgctgtggattgtagggagcag

SEQ ID NO: 216259 - DNA, 22 bp, Artificial Sequence
  Synthetic oligonucleotide; TTT chr2 60518961 60518982 60518966 60518961 -
gctgtggattgtagggagcaga

SEQ ID NO: 216260 - DNA, 22 bp, Artificial Sequence
  Synthetic oligonucleotide; TTG chr2 60518960 60518981 60518965 60518960 -
ctgtggattgtagggagcagat

SEQ ID NO: 216261 - DNA, 22 bp, Artificial Sequence
  Synthetic oligonucleotide; CTG chr2 60518957 60518978 60518962 60518957 -
tggattgtagggagcagatttg

SEQ ID NO: 216262 - DNA, 22 bp, Artificial Sequence
  Synthetic oligonucleotide; TTG chr2 60518950 60518971 60518955 60518950 -
tagggagcagatttggtgctta

SEQ ID NO: 216263 - DNA, 22 bp, Artificial Sequence
  Synthetic oligonucleotide; TTT chr2 60518936 60518957 60518941 60518936 -
ggtgcttactgtggcttcagga

SEQ ID NO: 216264 - DNA, 22 bp, Artificial Sequence
  Synthetic oligonucleotide; TTG chr2 60518935 60518956 60518940 60518935 -
gtgcttactgtggcttcaggac

SEQ ID NO: 216265 - DNA, 22 bp, Artificial Sequence
  Synthetic oligonucleotide; CTT chr2 60518929 60518950 60518934 60518929 -
actgtggcttcaggacccacct

SEQ ID NO: 216266 - DNA, 22 bp, Artificial Sequence
  Synthetic oligonucleotide; TTA chr2 60518928 60518949 60518933 60518928 -
ctgtggcttcaggacccacctt

SEQ ID NO: 216267 - DNA, 22 bp, Artificial Sequence
  Synthetic oligonucleotide; CTG chr2 60518925 60518946 60518930 60518925 -
tggcttcaggacccaccttgaa

SEQ ID NO: 216268 - DNA, 22 bp, Artificial Sequence
  Synthetic oligonucleotide; CTT chr2 60518919 60518940 60518924 60518919 -
caggacccaccttgaatgacag

SEQ ID NO: 216269 - DNA, 22 bp, Artificial Sequence
  Synthetic oligonucleotide; TTC chr2 60518918 60518939 60518923 60518918 -
aggacccaccttgaatgacaga

SEQ ID NO: 216270 - DNA, 22 bp, Artificial Sequence
  Synthetic oligonucleotide; CTT chr2 60518906 60518927 60518911 60518906 -
gaatgacagaatgtcagtaaca

SEQ ID NO: 216271 - DNA, 22 bp, Artificial Sequence
  Synthetic oligonucleotide; TTG chr2 60518905 60518926 60518910 60518905 -
aatgacagaatgtcagtaacaa

SEQ ID NO: 216272 - DNA, 22 bp, Artificial Sequence
  Synthetic oligonucleotide; CTG chr2 60518861 60518882 60518866 60518861 -
gtggtgaacgactgcctcttga

SEQ ID NO: 216273 - DNA, 22 bp, Artificial Sequence
  Synthetic oligonucleotide; CTG chr2 60518847 60518868 60518852 60518847 -
cctcttgatctttgcccatcga

SEQ ID NO: 216274 - DNA, 22 bp, Artificial Sequence
  Synthetic oligonucleotide; CTC chr2 60518843 60518864 60518848 60518843 -
ttgatctttgcccatcgagcaa

SEQ ID NO: 216275 - DNA, 22 bp, Artificial Sequence
  Synthetic oligonucleotide; CTT chr2 60518841 60518862 60518846 60518841 -
gatctttgcccatcgagcaaca

SEQ ID NO: 216276 - DNA, 22 bp, Artificial Sequence
  Synthetic oligonucleotide; TTG chr2 60518840 60518861 60518845 60518840 -
atctttgcccatcgagcaacac

SEQ ID NO: 216277 - DNA, 22 bp, Artificial Sequence
  Synthetic oligonucleotide; CTT chr2 60518835 60518856 60518840 60518835 -
tgcccatcgagcaacaccatgt

SEQ ID NO: 216278 - DNA, 22 bp, Artificial Sequence
  Synthetic oligonucleotide; TTT chr2 60518834 60518855 60518839 60518834 -
gcccatcgagcaacaccatgtg

SEQ ID NO: 216279 - DNA, 22 bp, Artificial Sequence
  Synthetic oligonucleotide; TTG chr2 60518833 60518854 60518838 60518833 -
cccatcgagcaacaccatgtgg

SEQ ID NO: 216280 - DNA, 22 bp, Artificial Sequence
  Synthetic oligonucleotide; CTT chr2 60518793 60518814 60518798 60518793 -
gacctgaacttgaacagtaatt

SEQ ID NO: 216281 - DNA, 22 bp, Artificial Sequence
  Synthetic oligonucleotide; TTG chr2 60518792 60518813 60518797 60518792 -
acctgaacttgaacagtaattg

SEQ ID NO: 216282 - DNA, 22 bp, Artificial Sequence
  Synthetic oligonucleotide; CTG chr2 60518787 60518808 60518792 60518787 -
aacttgaacagtaattgatgag

SEQ ID NO: 216283 - DNA, 22 bp, Artificial Sequence
  Synthetic oligonucleotide; CTT chr2 60518782 60518803 60518787 60518782 -
gaacagtaattgatgagtcctt

SEQ ID NO: 216284 - DNA, 22 bp, Artificial Sequence
  Synthetic oligonucleotide; TTG chr2 60518781 60518802 60518786 60518781 -
aacagtaattgatgagtcctta

SEQ ID NO: 216285 - DNA, 22 bp, Artificial Sequence
  Synthetic oligonucleotide; TTG chr2 60518770 60518791 60518775 60518770 -
atgagtccttaaaatccacgcc

SEQ ID NO: 216286 - DNA, 22 bp, Artificial Sequence
  Synthetic oligonucleotide; CTT chr2 60518760 60518781 60518765 60518760 -
aaaatccacgcccggcccccag

SEQ ID NO: 216287 - DNA, 22 bp, Artificial Sequence
  Synthetic oligonucleotide; TTA chr2 60518759 60518780 60518764 60518759 -
aaatccacgcccggcccccagg

SEQ ID NO: 216288 - DNA, 22 bp, Artificial Sequence
  Synthetic oligonucleotide; CTT chr2 60518729 60518750 60518734 60518729 -
ggggcaccccatcccacgttct

SEQ ID NO: 216289 - DNA, 22 bp, Artificial Sequence
  Synthetic oligonucleotide; TTG chr2 60518728 60518749 60518733 60518728 -
gggcaccccatcccacgttctg

SEQ ID NO: 216290 - DNA, 22 bp, Artificial Sequence
  Synthetic oligonucleotide; TTC chr2 60518708 60518729 60518713 60518708 -
tgattctggatggacttttaag

SEQ ID NO: 216291 - DNA, 22 bp, Artificial Sequence
  Synthetic oligonucleotide; CTG chr2 60518706 60518727 60518711 60518706 -
attctggatggacttttaagtg

SEQ ID NO: 216292 - DNA, 22 bp, Artificial Sequence
  Synthetic oligonucleotide; TTC chr2 60518702 60518723 60518707 60518702 -
tggatggacttttaagtgaact

SEQ ID NO: 216293 - DNA, 22 bp, Artificial Sequence
  Synthetic oligonucleotide; CTG chr2 60518700 60518721 60518705 60518700 -
gatggacttttaagtgaactct

SEQ ID NO: 216294 - DNA, 22 bp, Artificial Sequence
  Synthetic oligonucleotide; CTT chr2 60518691 60518712 60518696 60518691 -
ttaagtgaactctgatgatgag

SEQ ID NO: 216295 - DNA, 22 bp, Artificial Sequence
  Synthetic oligonucleotide; TTT chr2 60518690 60518711 60518695 60518690 -
taagtgaactctgatgatgagt

SEQ ID NO: 216296 - DNA, 22 bp, Artificial Sequence
  Synthetic oligonucleotide; TTT chr2 60518689 60518710 60518694 60518689 -
aagtgaactctgatgatgagta

SEQ ID NO: 216297 - DNA, 22 bp, Artificial Sequence
  Synthetic oligonucleotide; TTA chr2 60518688 60518709 60518693 60518688 -
agtgaactctgatgatgagtag

SEQ ID NO: 216298 - DNA, 22 bp, Artificial Sequence
  Synthetic oligonucleotide; CTC chr2 60518679 60518700 60518684 60518679 -
tgatgatgagtaggctcttaaa

SEQ ID NO: 216299 - DNA, 22 bp, Artificial Sequence
  Synthetic oligonucleotide; CTG chr2 60518677 60518698 60518682 60518677 -
atgatgagtaggctcttaaaac

SEQ ID NO: 216300 - DNA, 22 bp, Artificial Sequence
  Synthetic oligonucleotide; CTC chr2 60518662 60518683 60518667 60518662 -
ttaaaactctttctcaacgttc

SEQ ID NO: 216301 - DNA, 22 bp, Artificial Sequence
  Synthetic oligonucleotide; CTT chr2 60518660 60518681 60518665 60518660 -
aaaactctttctcaacgttctc

SEQ ID NO: 216302 - DNA, 22 bp, Artificial Sequence
  Synthetic oligonucleotide; TTA chr2 60518659 60518680 60518664 60518659 -
aaactctttctcaacgttctct

SEQ ID NO: 216303 - DNA, 22 bp, Artificial Sequence
  Synthetic oligonucleotide; CTC chr2 60518653 60518674 60518658 60518653 -
tttctcaacgttctctgctggg

SEQ ID NO: 216304 - DNA, 22 bp, Artificial Sequence
  Synthetic oligonucleotide; CTT chr2 60518651 60518672 60518656 60518651 -
tctcaacgttctctgctgggtt

SEQ ID NO: 216305 - DNA, 22 bp, Artificial Sequence
  Synthetic oligonucleotide; TTT chr2 60518650 60518671 60518655 60518650 -
ctcaacgttctctgctgggttt

SEQ ID NO: 216306 - DNA, 22 bp, Artificial Sequence
  Synthetic oligonucleotide; TTC chr2 60518649 60518670 60518654 60518649 -
tcaacgttctctgctgggtttg

SEQ ID NO: 216307 - DNA, 22 bp, Artificial Sequence
  Synthetic oligonucleotide; CTC chr2 60518647 60518668 60518652 60518647 -
aacgttctctgctgggtttgtg

SEQ ID NO: 216308 - DNA, 22 bp, Artificial Sequence
  Synthetic oligonucleotide; TTC chr2 60518640 60518661 60518645 60518640 -
tctgctgggtttgtgtgtcacc

SEQ ID NO: 216309 - DNA, 22 bp, Artificial Sequence
  Synthetic oligonucleotide; CTC chr2 60518638 60518659 60518643 60518638 -
tgctgggtttgtgtgtcacctc

SEQ ID NO: 216310 - DNA, 22 bp, Artificial Sequence
  Synthetic oligonucleotide; CTG chr2 60518636 60518657 60518641 60518636 -
ctgggtttgtgtgtcacctccc

SEQ ID NO: 216311 - DNA, 22 bp, Artificial Sequence
  Synthetic oligonucleotide; CTG chr2 60518633 60518654 60518638 60518633 -
ggtttgtgtgtcacctcccatg

SEQ ID NO: 216312 - DNA, 22 bp, Artificial Sequence
  Synthetic oligonucleotide; TTT chr2 60518628 60518649 60518633 60518628 -
gtgtgtcacctcccatgccctc

SEQ ID NO: 216313 - DNA, 22 bp, Artificial Sequence
  Synthetic oligonucleotide; TTG chr2 60518627 60518648 60518632 60518627 -
tgtgtcacctcccatgccctct

SEQ ID NO: 216314 - DNA, 22 bp, Artificial Sequence
  Synthetic oligonucleotide; CTC chr2 60518616 60518637 60518621 60518616 -
ccatgccctctctggtgtgtgg

SEQ ID NO: 216315 - DNA, 22 bp, Artificial Sequence
  Synthetic oligonucleotide; CTC chr2 60518606 60518627 60518611 60518606 -
tctggtgtgtggtgattctcag

SEQ ID NO: 216316 - DNA, 22 bp, Artificial Sequence
  Synthetic oligonucleotide; CTC chr2 60518604 60518625 60518609 60518604 -
tggtgtgtggtgattctcagat

SEQ ID NO: 216317 - DNA, 22 bp, Artificial Sequence
  Synthetic oligonucleotide; CTG chr2 60518602 60518623 60518607 60518602 -
gtgtgtggtgattctcagatct

SEQ ID NO: 216318 - DNA, 22 bp, Artificial Sequence
  Synthetic oligonucleotide; TTC chr2 60518588 60518609 60518593 60518588 -
tcagatctagagcaatgcttcc

SEQ ID NO: 216319 - DNA, 22 bp, Artificial Sequence
  Synthetic oligonucleotide; CTC chr2 60518586 60518607 60518591 60518586 -
agatctagagcaatgcttcctg

SEQ ID NO: 216320 - DNA, 22 bp, Artificial Sequence
  Synthetic oligonucleotide; CTA chr2 60518579 60518600 60518584 60518579 -
gagcaatgcttcctgccttgtc

SEQ ID NO: 216321 - DNA, 22 bp, Artificial Sequence
  Synthetic oligonucleotide; CTT chr2 60518568 60518589 60518573 60518568 -
cctgccttgtccccccatgcct

SEQ ID NO: 216322 - DNA, 22 bp, Artificial Sequence
  Synthetic oligonucleotide; TTC chr2 60518567 60518588 60518572 60518567 -
ctgccttgtccccccatgcctt

SEQ ID NO: 216323 - DNA, 22 bp, Artificial Sequence
  Synthetic oligonucleotide; CTG chr2 60518564 60518585 60518569 60518564 -
ccttgtccccccatgcctttgc

SEQ ID NO: 216324 - DNA, 22 bp, Artificial Sequence
  Synthetic oligonucleotide; CTT chr2 60518560 60518581 60518565 60518560 -
gtccccccatgcctttgcgtgt

SEQ ID NO: 216325 - DNA, 22 bp, Artificial Sequence
  Synthetic oligonucleotide; TTG chr2 60518559 60518580 60518564 60518559 -
tccccccatgcctttgcgtgtg

SEQ ID NO: 216326 - DNA, 22 bp, Artificial Sequence
  Synthetic oligonucleotide; CTT chr2 60518545 60518566 60518550 60518545 -
tgcgtgtgggaagctaaaattc

SEQ ID NO: 216327 - DNA, 22 bp, Artificial Sequence
  Synthetic oligonucleotide; TTT chr2 60518544 60518565 60518549 60518544 -
gcgtgtgggaagctaaaattca

SEQ ID NO: 216328 - DNA, 22 bp, Artificial Sequence
  Synthetic oligonucleotide; TTG chr2 60518543 60518564 60518548 60518543 -
cgtgtgggaagctaaaattcac

SEQ ID NO: 216329 - DNA, 22 bp, Artificial Sequence
  Synthetic oligonucleotide; CTA chr2 60518529 60518550 60518534 60518529 -
aaattcacatgtgcgatgccct

SEQ ID NO: 216330 - DNA, 22 bp, Artificial Sequence
  Synthetic oligonucleotide; TTC chr2 60518523 60518544 60518528 60518523 -
acatgtgcgatgccctcccatg

SEQ ID NO: 216331 - DNA, 22 bp, Artificial Sequence
  Synthetic oligonucleotide; CTC chr2 60518506 60518527 60518511 60518506 -
ccatgtgccatttttacctggt

SEQ ID NO: 216332 - DNA, 22 bp, Artificial Sequence
  Synthetic oligonucleotide; TTT chr2 60518493 60518514 60518498 60518493 -
ttacctggtcccttctgctcac

SEQ ID NO: 216333 - DNA, 22 bp, Artificial Sequence
  Synthetic oligonucleotide; TTT chr2 60518492 60518513 60518497 60518492 -
tacctggtcccttctgctcact

SEQ ID NO: 216334 - DNA, 22 bp, Artificial Sequence
  Synthetic oligonucleotide; TTT chr2 60518491 60518512 60518496 60518491 -
acctggtcccttctgctcactc

SEQ ID NO: 216335 - DNA, 22 bp, Artificial Sequence
  Synthetic oligonucleotide; TTA chr2 60518490 60518511 60518495 60518490 -
cctggtcccttctgctcactct

SEQ ID NO: 216336 - DNA, 22 bp, Artificial Sequence
  Synthetic oligonucleotide; CTG chr2 60518486 60518507 60518491 60518486 -
gtcccttctgctcactctttat

SEQ ID NO: 216337 - DNA, 22 bp, Artificial Sequence
  Synthetic oligonucleotide; CTT chr2 60518479 60518500 60518484 60518479 -
ctgctcactctttattcatatt

SEQ ID NO: 216338 - DNA, 22 bp, Artificial Sequence
  Synthetic oligonucleotide; TTC chr2 60518478 60518499 60518483 60518478 -
tgctcactctttattcatattt

SEQ ID NO: 216339 - DNA, 22 bp, Artificial Sequence
  Synthetic oligonucleotide; CTG chr2 60518476 60518497 60518481 60518476 -
ctcactctttattcatatttaa

SEQ ID NO: 216340 - DNA, 22 bp, Artificial Sequence
  Synthetic oligonucleotide; CTC chr2 60518473 60518494 60518478 60518473 -
actctttattcatatttaaatg

SEQ ID NO: 216341 - DNA, 22 bp, Artificial Sequence
  Synthetic oligonucleotide; CTC chr2 60518469 60518490 60518474 60518469 -
tttattcatatttaaatgcagg

SEQ ID NO: 216342 - DNA, 22 bp, Artificial Sequence
  Synthetic oligonucleotide; CTT chr2 60518467 60518488 60518472 60518467 -
tattcatatttaaatgcaggtg

SEQ ID NO: 216343 - DNA, 22 bp, Artificial Sequence
  Synthetic oligonucleotide; TTT chr2 60518466 60518487 60518471 60518466 -
attcatatttaaatgcaggtga

SEQ ID NO: 216344 - DNA, 22 bp, Artificial Sequence
  Synthetic oligonucleotide; TTA chr2 60518465 60518486 60518470 60518465 -
ttcatatttaaatgcaggtgag

SEQ ID NO: 216345 - DNA, 22 bp, Artificial Sequence
  Synthetic oligonucleotide; TTC chr2 60518462 60518483 60518467 60518462 -
atatttaaatgcaggtgagttg

SEQ ID NO: 216346 - DNA, 22 bp, Artificial Sequence
  Synthetic oligonucleotide; TTT chr2 60518456 60518477 60518461 60518456 -
aaatgcaggtgagttggaatgt

SEQ ID NO: 216347 - DNA, 22 bp, Artificial Sequence
  Synthetic oligonucleotide; TTA chr2 60518455 60518476 60518460 60518455 -
aatgcaggtgagttggaatgtc

SEQ ID NO: 216348 - DNA, 22 bp, Artificial Sequence
  Synthetic oligonucleotide; TTG chr2 60518440 60518461 60518445 60518440 -
gaatgtcatcttacaggcataa

SEQ ID NO: 216349 - DNA, 22 bp, Artificial Sequence
  Synthetic oligonucleotide; CTT chr2 60518428 60518449 60518433 60518428 -
acaggcataatcctgaatctgc

SEQ ID NO: 216350 - DNA, 22 bp, Artificial Sequence
  Synthetic oligonucleotide; TTA chr2 60518427 60518448 60518432 60518427 -
caggcataatcctgaatctgct

SEQ ID NO: 216351 - DNA, 22 bp, Artificial Sequence
  Synthetic oligonucleotide; CTG chr2 60518413 60518434 60518418 60518413 -
aatctgctctatcgcagacatt

SEQ ID NO: 216352 - DNA, 22 bp, Artificial Sequence
  Synthetic oligonucleotide; CTG chr2 60518407 60518428 60518412 60518407 -
ctctatcgcagacattttaaaa

SEQ ID NO: 216353 - DNA, 22 bp, Artificial Sequence
  Synthetic oligonucleotide; CTC chr2 60518404 60518425 60518409 60518404 -
tatcgcagacattttaaaacta

SEQ ID NO: 216354 - DNA, 22 bp, Artificial Sequence
  Synthetic oligonucleotide; CTA chr2 60518402 60518423 60518407 60518402 -
tcgcagacattttaaaactaaa

SEQ ID NO: 216355 - DNA, 22 bp, Artificial Sequence
  Synthetic oligonucleotide; TTT chr2 60518390 60518411 60518395 60518390 -
taaaactaaattaaatgttagt

SEQ ID NO: 216356 - DNA, 22 bp, Artificial Sequence
  Synthetic oligonucleotide; TTT chr2 60518389 60518410 60518394 60518389 -
aaaactaaattaaatgttagta

SEQ ID NO: 216357 - DNA, 22 bp, Artificial Sequence
  Synthetic oligonucleotide; TTA chr2 60518388 60518409 60518393 60518388 -
aaactaaattaaatgttagtac

SEQ ID NO: 216358 - DNA, 22 bp, Artificial Sequence
  Synthetic oligonucleotide; CTA chr2 60518382 60518403 60518387 60518382 -
aattaaatgttagtactaagta

SEQ ID NO: 216359 - DNA, 22 bp, Artificial Sequence
  Synthetic oligonucleotide; TTA chr2 60518377 60518398 60518382 60518377 -
aatgttagtactaagtagtagc

SEQ ID NO: 216360 - DNA, 22 bp, Artificial Sequence
  Synthetic oligonucleotide; TTA chr2 60518370 60518391 60518375 60518370 -
gtactaagtagtagccaaattc

SEQ ID NO: 216361 - DNA, 22 bp, Artificial Sequence
  Synthetic oligonucleotide; CTA chr2 60518364 60518385 60518369 60518364 -
agtagtagccaaattctctgag

SEQ ID NO: 216362 - DNA, 22 bp, Artificial Sequence
  Synthetic oligonucleotide; TTC chr2 60518348 60518369 60518353 60518348 -
tctgagtctgcttcatgacagg

SEQ ID NO: 216363 - DNA, 22 bp, Artificial Sequence
  Synthetic oligonucleotide; CTC chr2 60518346 60518367 60518351 60518346 -
tgagtctgcttcatgacaggct

SEQ ID NO: 216364 - DNA, 22 bp, Artificial Sequence
  Synthetic oligonucleotide; CTG chr2 60518344 60518365 60518349 60518344 -
agtctgcttcatgacaggctgt

SEQ ID NO: 216365 - DNA, 22 bp, Artificial Sequence
  Synthetic oligonucleotide; CTG chr2 60518338 60518359 60518343 60518338 -
cttcatgacaggctgtaacaca

SEQ ID NO: 216366 - DNA, 22 bp, Artificial Sequence
  Synthetic oligonucleotide; CTT chr2 60518335 60518356 60518340 60518335 -
catgacaggctgtaacacactg

SEQ ID NO: 216367 - DNA, 22 bp, Artificial Sequence
  Synthetic oligonucleotide; TTC chr2 60518334 60518355 60518339 60518334 -
atgacaggctgtaacacactgg

SEQ ID NO: 216368 - DNA, 22 bp, Artificial Sequence
  Synthetic oligonucleotide; CTG chr2 60518323 60518344 60518328 60518323 -
taacacactggtatggaacggt

SEQ ID NO: 216369 - DNA, 22 bp, Artificial Sequence
  Synthetic oligonucleotide; CTG chr2 60518313 60518334 60518318 60518313 -
gtatggaacggtaggtctaatc

SEQ ID NO: 216370 - DNA, 22 bp, Artificial Sequence
  Synthetic oligonucleotide; CTA chr2 60518294 60518315 60518299 60518294 -
atcctgtgactcctttatctat

SEQ ID NO: 216371 - DNA, 22 bp, Artificial Sequence
  Synthetic oligonucleotide; CTG chr2 60518288 60518309 60518293 60518288 -
tgactcctttatctatgatgtt

SEQ ID NO: 216372 - DNA, 22 bp, Artificial Sequence
  Synthetic oligonucleotide; CTC chr2 60518282 60518303 60518287 60518282 -
ctttatctatgatgttttatgt

SEQ ID NO: 216373 - DNA, 22 bp, Artificial Sequence
  Synthetic oligonucleotide; CTT chr2 60518279 60518300 60518284 60518279 -
tatctatgatgttttatgtatt

SEQ ID NO: 216374 - DNA, 22 bp, Artificial Sequence
  Synthetic oligonucleotide; TTT chr2 60518278 60518299 60518283 60518278 -
atctatgatgttttatgtatta

SEQ ID NO: 216375 - DNA, 22 bp, Artificial Sequence
  Synthetic oligonucleotide; TTA chr2 60518277 60518298 60518282 60518277 -
tctatgatgttttatgtattat

SEQ ID NO: 216376 - DNA, 22 bp, Artificial Sequence
  Synthetic oligonucleotide; CTA chr2 60518273 60518294 60518278 60518273 -
tgatgttttatgtattatgaga

SEQ ID NO: 216377 - DNA, 22 bp, Artificial Sequence
  Synthetic oligonucleotide; TTT chr2 60518265 60518286 60518270 60518265 -
tatgtattatgagagctcagca

SEQ ID NO: 216378 - DNA, 22 bp, Artificial Sequence
  Synthetic oligonucleotide; TTT chr2 60518264 60518285 60518269 60518264 -
atgtattatgagagctcagcag

SEQ ID NO: 216379 - DNA, 22 bp, Artificial Sequence
  Synthetic oligonucleotide; TTA chr2 60518263 60518284 60518268 60518263 -
tgtattatgagagctcagcaga

SEQ ID NO: 216380 - DNA, 22 bp, Artificial Sequence
  Synthetic oligonucleotide; TTA chr2 60518256 60518277 60518261 60518256 -
tgagagctcagcagatgttgac

SEQ ID NO: 216381 - DNA, 22 bp, Artificial Sequence
  Synthetic oligonucleotide; CTC chr2 60518247 60518268 60518252 60518247 -
agcagatgttgacagagggaat

SEQ ID NO: 216382 - DNA, 22 bp, Artificial Sequence
  Synthetic oligonucleotide; TTG chr2 60518236 60518257 60518241 60518236 -
acagagggaatgagacaagatg

SEQ ID NO: 216383 - DNA, 22 bp, Artificial Sequence
  Synthetic oligonucleotide; TTT chr2 60518210 60518231 60518215 60518210 -
taggtctaggtttgatagataa

SEQ ID NO: 216384 - DNA, 22 bp, Artificial Sequence
  Synthetic oligonucleotide; TTT chr2 60518209 60518230 60518214 60518209 -
aggtctaggtttgatagataaa

SEQ ID NO: 216385 - DNA, 22 bp, Artificial Sequence
  Synthetic oligonucleotide; TTA chr2 60518208 60518229 60518213 60518208 -
ggtctaggtttgatagataaaa

SEQ ID NO: 216386 - DNA, 22 bp, Artificial Sequence
  Synthetic oligonucleotide; CTA chr2 60518202 60518223 60518207 60518202 -
ggtttgatagataaaaaactgg

SEQ ID NO: 216387 - DNA, 22 bp, Artificial Sequence
  Synthetic oligonucleotide; TTT chr2 60518197 60518218 60518202 60518197 -
gatagataaaaaactgggccaa

SEQ ID NO: 216388 - DNA, 22 bp, Artificial Sequence
  Synthetic oligonucleotide; TTG chr2 60518196 60518217 60518201 60518196 -
atagataaaaaactgggccaaa

SEQ ID NO: 216389 - DNA, 22 bp, Artificial Sequence
  Synthetic oligonucleotide; CTG chr2 60518181 60518202 60518186 60518181 -
ggccaaattttatattttcttt

SEQ ID NO: 216390 - DNA, 22 bp, Artificial Sequence
  Synthetic oligonucleotide; TTT chr2 60518171 60518192 60518176 60518171 -
tatattttctttgaaaagatag

SEQ ID NO: 216391 - DNA, 22 bp, Artificial Sequence
  Synthetic oligonucleotide; TTT chr2 60518170 60518191 60518175 60518170 -
atattttctttgaaaagatagc

SEQ ID NO: 216392 - DNA, 22 bp, Artificial Sequence
  Synthetic oligonucleotide; TTA chr2 60518169 60518190 60518174 60518169 -
tattttctttgaaaagatagct

SEQ ID NO: 216393 - DNA, 22 bp, Artificial Sequence
  Synthetic oligonucleotide; TTT chr2 60518164 60518185 60518169 60518164 -
tctttgaaaagatagctaaatc

SEQ ID NO: 216394 - DNA, 22 bp, Artificial Sequence
  Synthetic oligonucleotide; TTT chr2 60518163 60518184 60518168 60518163 -
ctttgaaaagatagctaaatct

SEQ ID NO: 216395 - DNA, 22 bp, Artificial Sequence
  Synthetic oligonucleotide; TTC chr2 60518162 60518183 60518167 60518162 -
tttgaaaagatagctaaatctc

SEQ ID NO: 216396 - DNA, 22 bp, Artificial Sequence
  Synthetic oligonucleotide; CTT chr2 60518160 60518181 60518165 60518160 -
tgaaaagatagctaaatctcag

SEQ ID NO: 216397 - DNA, 22 bp, Artificial Sequence
  Synthetic oligonucleotide; TTT chr2 60518159 60518180 60518164 60518159 -
gaaaagatagctaaatctcagc

SEQ ID NO: 216398 - DNA, 22 bp, Artificial Sequence
  Synthetic oligonucleotide; TTG chr2 60518158 60518179 60518163 60518158 -
aaaagatagctaaatctcagca

SEQ ID NO: 216399 - DNA, 22 bp, Artificial Sequence
  Synthetic oligonucleotide; CTA chr2 60518146 60518167 60518151 60518146 -
aatctcagcaattattttattt

SEQ ID NO: 216400 - DNA, 22 bp, Artificial Sequence
  Synthetic oligonucleotide; CTC chr2 60518140 60518161 60518145 60518140 -
agcaattattttattttattta

SEQ ID NO: 216401 - DNA, 22 bp, Artificial Sequence
  Synthetic oligonucleotide; TTA chr2 60518132 60518153 60518137 60518132 -
ttttattttatttattaagctt

SEQ ID NO: 216402 - DNA, 22 bp, Artificial Sequence
  Synthetic oligonucleotide; TTT chr2 60518129 60518150 60518134 60518129 -
tattttatttattaagcttttt

SEQ ID NO: 216403 - DNA, 22 bp, Artificial Sequence
  Synthetic oligonucleotide; TTT chr2 60518128 60518149 60518133 60518128 -
attttatttattaagctttttg

SEQ ID NO: 216404 - DNA, 22 bp, Artificial Sequence
  Synthetic oligonucleotide; TTA chr2 60518127 60518148 60518132 60518127 -
ttttatttattaagctttttgt

SEQ ID NO: 216405 - DNA, 22 bp, Artificial Sequence
  Synthetic oligonucleotide; TTT chr2 60518124 60518145 60518129 60518124 -
tatttattaagctttttgtaga

SEQ ID NO: 216406 - DNA, 22 bp, Artificial Sequence
  Synthetic oligonucleotide; TTT chr2 60518123 60518144 60518128 60518123 -
atttattaagctttttgtagag

SEQ ID NO: 216407 - DNA, 22 bp, Artificial Sequence
  Synthetic oligonucleotide; TTA chr2 60518122 60518143 60518127 60518122 -
tttattaagctttttgtagaga

SEQ ID NO: 216408 - DNA, 22 bp, Artificial Sequence
  Synthetic oligonucleotide; TTT chr2 60518119 60518140 60518124 60518119 -
attaagctttttgtagagacag

SEQ ID NO: 216409 - DNA, 22 bp, Artificial Sequence
  Synthetic oligonucleotide; TTA chr2 60518118 60518139 60518123 60518118 -
ttaagctttttgtagagacagg

SEQ ID NO: 216410 - DNA, 22 bp, Artificial Sequence
  Synthetic oligonucleotide; TTA chr2 60518115 60518136 60518120 60518115 -
agctttttgtagagacagggtt

SEQ ID NO: 216411 - DNA, 22 bp, Artificial Sequence
  Synthetic oligonucleotide; CTT chr2 60518110 60518131 60518115 60518110 -
tttgtagagacagggttttgct

SEQ ID NO: 216412 - DNA, 22 bp, Artificial Sequence
  Synthetic oligonucleotide; TTT chr2 60518109 60518130 60518114 60518109 -
ttgtagagacagggttttgcta

SEQ ID NO: 216413 - DNA, 22 bp, Artificial Sequence
  Synthetic oligonucleotide; TTT chr2 60518108 60518129 60518113 60518108 -
tgtagagacagggttttgctat

SEQ ID NO: 216414 - DNA, 22 bp, Artificial Sequence
  Synthetic oligonucleotide; TTT chr2 60518107 60518128 60518112 60518107 -
gtagagacagggttttgctatg

SEQ ID NO: 216415 - DNA, 22 bp, Artificial Sequence
  Synthetic oligonucleotide; TTG chr2 60518106 60518127 60518111 60518106 -
tagagacagggttttgctatgt

SEQ ID NO: 216416 - DNA, 22 bp, Artificial Sequence
  Synthetic oligonucleotide; TTT chr2 60518092 60518113 60518097 60518092 -
tgctatgttgcccaggctggtc

SEQ ID NO: 216417 - DNA, 22 bp, Artificial Sequence
  Synthetic oligonucleotide; TTT chr2 60518091 60518112 60518096 60518091 -
gctatgttgcccaggctggtct

SEQ ID NO: 216418 - DNA, 22 bp, Artificial Sequence
  Synthetic oligonucleotide; TTG chr2 60518090 60518111 60518095 60518090 -
ctatgttgcccaggctggtctt

SEQ ID NO: 216419 - DNA, 22 bp, Artificial Sequence
  Synthetic oligonucleotide; CTA chr2 60518087 60518108 60518092 60518087 -
tgttgcccaggctggtcttgaa

SEQ ID NO: 216420 - DNA, 22 bp, Artificial Sequence
  Synthetic oligonucleotide; TTG chr2 60518082 60518103 60518087 60518082 -
cccaggctggtcttgaactcct

SEQ ID NO: 216421 - DNA, 22 bp, Artificial Sequence
  Synthetic oligonucleotide; CTG chr2 60518073 60518094 60518078 60518073 -
gtcttgaactcctagcttcaag

SEQ ID NO: 216422 - DNA, 22 bp, Artificial Sequence
  Synthetic oligonucleotide; CTT chr2 60518068 60518089 60518073 60518068 -
gaactcctagcttcaagcaatc

SEQ ID NO: 216423 - DNA, 22 bp, Artificial Sequence
  Synthetic oligonucleotide; TTG chr2 60518067 60518088 60518072 60518067 -
aactcctagcttcaagcaatct

SEQ ID NO: 216424 - DNA, 22 bp, Artificial Sequence
  Synthetic oligonucleotide; CTC chr2 60518062 60518083 60518067 60518062 -
ctagcttcaagcaatcttccct

SEQ ID NO: 216425 - DNA, 22 bp, Artificial Sequence
  Synthetic oligonucleotide; CTA chr2 60518059 60518080 60518064 60518059 -
gcttcaagcaatcttccctctg

SEQ ID NO: 216426 - DNA, 22 bp, Artificial Sequence
  Synthetic oligonucleotide; CTT chr2 60518055 60518076 60518060 60518055 -
caagcaatcttccctctgtggc

SEQ ID NO: 216427 - DNA, 22 bp, Artificial Sequence
  Synthetic oligonucleotide; TTC chr2 60518054 60518075 60518059 60518054 -
aagcaatcttccctctgtggcc

SEQ ID NO: 216428 - DNA, 22 bp, Artificial Sequence
  Synthetic oligonucleotide; CTT chr2 60518044 60518065 60518049 60518044 -
ccctctgtggccttccaaattt

SEQ ID NO: 216429 - DNA, 22 bp, Artificial Sequence
  Synthetic oligonucleotide; TTC chr2 60518043 60518064 60518048 60518043 -
cctctgtggccttccaaatttc

SEQ ID NO: 216430 - DNA, 22 bp, Artificial Sequence
  Synthetic oligonucleotide; CTC chr2 60518039 60518060 60518044 60518039 -
tgtggccttccaaatttctgag

SEQ ID NO: 216431 - DNA, 22 bp, Artificial Sequence
  Synthetic oligonucleotide; CTG chr2 60518037 60518058 60518042 60518037 -
tggccttccaaatttctgagat

SEQ ID NO: 216432 - DNA, 22 bp, Artificial Sequence
  Synthetic oligonucleotide; CTT chr2 60518030 60518051 60518035 60518030 -
ccaaatttctgagattataggc

SEQ ID NO: 216433 - DNA, 22 bp, Artificial Sequence
  Synthetic oligonucleotide; TTC chr2 60518029 60518050 60518034 60518029 -
caaatttctgagattataggca

SEQ ID NO: 216434 - DNA, 22 bp, Artificial Sequence
  Synthetic oligonucleotide; TTT chr2 60518022 60518043 60518027 60518022 -
ctgagattataggcataagcaa

SEQ ID NO: 216435 - DNA, 22 bp, Artificial Sequence
  Synthetic oligonucleotide; TTC chr2 60518021 60518042 60518026 60518021 -
tgagattataggcataagcaaa

SEQ ID NO: 216436 - DNA, 22 bp, Artificial Sequence
  Synthetic oligonucleotide; CTG chr2 60518019 60518040 60518024 60518019 -
agattataggcataagcaaatg

SEQ ID NO: 216437 - DNA, 22 bp, Artificial Sequence
  Synthetic oligonucleotide; TTA chr2 60518013 60518034 60518018 60518013 -
taggcataagcaaatgcctctg

SEQ ID NO: 216438 - DNA, 22 bp, Artificial Sequence
  Synthetic oligonucleotide; CTC chr2 60517993 60518014 60517998 60517993 -
tggccttcaagtaattaattta

SEQ ID NO: 216439 - DNA, 22 bp, Artificial Sequence
  Synthetic oligonucleotide; CTG chr2 60517991 60518012 60517996 60517991 -
gccttcaagtaattaatttaaa

SEQ ID NO: 216440 - DNA, 22 bp, Artificial Sequence
  Synthetic oligonucleotide; CTT chr2 60517986 60518007 60517991 60517986 -
caagtaattaatttaaagtctt

SEQ ID NO: 216441 - DNA, 22 bp, Artificial Sequence
  Synthetic oligonucleotide; TTC chr2 60517985 60518006 60517990 60517985 -
aagtaattaatttaaagtcttt

SEQ ID NO: 216442 - DNA, 22 bp, Artificial Sequence
  Synthetic oligonucleotide; TTA chr2 60517976 60517997 60517981 60517976 -
atttaaagtcttttaaaaattt

SEQ ID NO: 216443 - DNA, 22 bp, Artificial Sequence
  Synthetic oligonucleotide; TTT chr2 60517972 60517993 60517977 60517972 -
aaagtcttttaaaaattttctc

SEQ ID NO: 216444 - DNA, 22 bp, Artificial Sequence
  Synthetic oligonucleotide; TTA chr2 60517971 60517992 60517976 60517971 -
aagtcttttaaaaattttctct

SEQ ID NO: 216445 - DNA, 22 bp, Artificial Sequence
  Synthetic oligonucleotide; CTT chr2 60517964 60517985 60517969 60517964 -
ttaaaaattttctctcctcccc

SEQ ID NO: 216446 - DNA, 22 bp, Artificial Sequence
  Synthetic oligonucleotide; TTT chr2 60517963 60517984 60517968 60517963 -
taaaaattttctctcctcccct

SEQ ID NO: 216447 - DNA, 22 bp, Artificial Sequence
  Synthetic oligonucleotide; TTT chr2 60517962 60517983 60517967 60517962 -
aaaaattttctctcctccccta

SEQ ID NO: 216448 - DNA, 22 bp, Artificial Sequence
  Synthetic oligonucleotide; TTA chr2 60517961 60517982 60517966 60517961 -
aaaattttctctcctcccctaa

SEQ ID NO: 216449 - DNA, 22 bp, Artificial Sequence
  Synthetic oligonucleotide; TTT chr2 60517954 60517975 60517959 60517954 -
tctctcctcccctaaaattggg

SEQ ID NO: 216450 - DNA, 22 bp, Artificial Sequence
  Synthetic oligonucleotide; TTT chr2 60517953 60517974 60517958 60517953 -
ctctcctcccctaaaattgggt

SEQ ID NO: 216451 - DNA, 22 bp, Artificial Sequence
  Synthetic oligonucleotide; TTC chr2 60517952 60517973 60517957 60517952 -
tctcctcccctaaaattgggtt

SEQ ID NO: 216452 - DNA, 22 bp, Artificial Sequence
  Synthetic oligonucleotide; CTC chr2 60517950 60517971 60517955 60517950 -
tcctcccctaaaattgggtttt

SEQ ID NO: 216453 - DNA, 22 bp, Artificial Sequence
  Synthetic oligonucleotide; CTC chr2 60517948 60517969 60517953 60517948 -
ctcccctaaaattgggttttag

SEQ ID NO: 216454 - DNA, 22 bp, Artificial Sequence
  Synthetic oligonucleotide; CTC chr2 60517945 60517966 60517950 60517945 -
ccctaaaattgggttttagagt

SEQ ID NO: 216455 - DNA, 22 bp, Artificial Sequence
  Synthetic oligonucleotide; CTA chr2 60517940 60517961 60517945 60517940 -
aaattgggttttagagtaaggt

SEQ ID NO: 216456 - DNA, 22 bp, Artificial Sequence
  Synthetic oligonucleotide; TTG chr2 60517934 60517955 60517939 60517934 -
ggttttagagtaaggttcttgt

SEQ ID NO: 216457 - DNA, 22 bp, Artificial Sequence
  Synthetic oligonucleotide; TTT chr2 60517929 60517950 60517934 60517929 -
tagagtaaggttcttgttcctc

SEQ ID NO: 216458 - DNA, 22 bp, Artificial Sequence
  Synthetic oligonucleotide; TTT chr2 60517928 60517949 60517933 60517928 -
agagtaaggttcttgttcctct

SEQ ID NO: 216459 - DNA, 22 bp, Artificial Sequence
  Synthetic oligonucleotide; TTA chr2 60517927 60517948 60517932 60517927 -
gagtaaggttcttgttcctcta

SEQ ID NO: 216460 - DNA, 22 bp, Artificial Sequence
  Synthetic oligonucleotide; TTC chr2 60517916 60517937 60517921 60517916 -
ttgttcctctagtcgacaagag

SEQ ID NO: 216461 - DNA, 22 bp, Artificial Sequence
  Synthetic oligonucleotide; CTT chr2 60517914 60517935 60517919 60517914 -
gttcctctagtcgacaagagtt

SEQ ID NO: 216462 - DNA, 22 bp, Artificial Sequence
  Synthetic oligonucleotide; TTG chr2 60517913 60517934 60517918 60517913 -
ttcctctagtcgacaagagttt

SEQ ID NO: 216463 - DNA, 22 bp, Artificial Sequence
  Synthetic oligonucleotide; TTC chr2 60517910 60517931 60517915 60517910 -
ctctagtcgacaagagtttctg

SEQ ID NO: 216464 - DNA, 22 bp, Artificial Sequence
  Synthetic oligonucleotide; CTC chr2 60517907 60517928 60517912 60517907 -
tagtcgacaagagtttctgagg

SEQ ID NO: 216465 - DNA, 22 bp, Artificial Sequence
  Synthetic oligonucleotide; CTA chr2 60517905 60517926 60517910 60517905 -
gtcgacaagagtttctgaggaa

SEQ ID NO: 216466 - DNA, 22 bp, Artificial Sequence
  Synthetic oligonucleotide; TTT chr2 60517891 60517912 60517896 60517891 -
ctgaggaatcatagaagaaagc

SEQ ID NO: 216467 - DNA, 22 bp, Artificial Sequence
  Synthetic oligonucleotide; TTC chr2 60517890 60517911 60517895 60517890 -
tgaggaatcatagaagaaagca

SEQ ID NO: 216468 - DNA, 22 bp, Artificial Sequence
  Synthetic oligonucleotide; CTG chr2 60517888 60517909 60517893 60517888 -
aggaatcatagaagaaagcaca

SEQ ID NO: 216469 - DNA, 22 bp, Artificial Sequence
  Synthetic oligonucleotide; CTC chr2 60517862 60517883 60517867 60517862 -
tttgagcatagatagtttcctt

SEQ ID NO: 216470 - DNA, 22 bp, Artificial Sequence
  Synthetic oligonucleotide; CTT chr2 60517860 60517881 60517865 60517860 -
tgagcatagatagtttccttcg

SEQ ID NO: 216471 - DNA, 22 bp, Artificial Sequence
  Synthetic oligonucleotide; TTT chr2 60517859 60517880 60517864 60517859 -
gagcatagatagtttccttcgt

SEQ ID NO: 216472 - DNA, 22 bp, Artificial Sequence
  Synthetic oligonucleotide; TTG chr2 60517858 60517879 60517863 60517858 -
agcatagatagtttccttcgtg

SEQ ID NO: 216473 - DNA, 22 bp, Artificial Sequence
  Synthetic oligonucleotide; TTT chr2 60517844 60517865 60517849 60517844 -
ccttcgtggaaagccaaagtga

SEQ ID NO: 216474 - DNA, 22 bp, Artificial Sequence
  Synthetic oligonucleotide; TTC chr2 60517843 60517864 60517848 60517843 -
cttcgtggaaagccaaagtgaa

SEQ ID NO: 216475 - DNA, 22 bp, Artificial Sequence
  Synthetic oligonucleotide; CTT chr2 60517840 60517861 60517845 60517840 -
cgtggaaagccaaagtgaatac

SEQ ID NO: 216476 - DNA, 22 bp, Artificial Sequence
  Synthetic oligonucleotide; TTC chr2 60517839 60517860 60517844 60517839 -
gtggaaagccaaagtgaatact

SEQ ID NO: 216477 - DNA, 22 bp, Artificial Sequence
  Synthetic oligonucleotide; CTT chr2 60517816 60517837 60517821 60517816 -
attgagcatcttctatgtagac

SEQ ID NO: 216478 - DNA, 22 bp, Artificial Sequence
  Synthetic oligonucleotide; TTA chr2 60517815 60517836 60517820 60517815 -
ttgagcatcttctatgtagaca

SEQ ID NO: 216479 - DNA, 22 bp, Artificial Sequence
  Synthetic oligonucleotide; TTG chr2 60517812 60517833 60517817 60517812 -
agcatcttctatgtagacatag

SEQ ID NO: 216480 - DNA, 22 bp, Artificial Sequence
  Synthetic oligonucleotide; CTT chr2 60517804 60517825 60517809 60517804 -
ctatgtagacatagacttgtga

SEQ ID NO: 216481 - DNA, 22 bp, Artificial Sequence
  Synthetic oligonucleotide; TTC chr2 60517803 60517824 60517808 60517803 -
tatgtagacatagacttgtgaa

SEQ ID NO: 216482 - DNA, 22 bp, Artificial Sequence
  Synthetic oligonucleotide; CTA chr2 60517801 60517822 60517806 60517801 -
tgtagacatagacttgtgaagt

SEQ ID NO: 216483 - DNA, 22 bp, Artificial Sequence
  Synthetic oligonucleotide; CTT chr2 60517786 60517807 60517791 60517786 -
gtgaagtcatatcattaaccct

SEQ ID NO: 216484 - DNA, 22 bp, Artificial Sequence
  Synthetic oligonucleotide; TTG chr2 60517785 60517806 60517790 60517785 -
tgaagtcatatcattaaccctg

SEQ ID NO: 216485 - DNA, 22 bp, Artificial Sequence
  Synthetic oligonucleotide; TTA chr2 60517769 60517790 60517774 60517769 -
accctgtcattttacagatgag

SEQ ID NO: 216486 - DNA, 22 bp, Artificial Sequence
  Synthetic oligonucleotide; CTG chr2 60517763 60517784 60517768 60517763 -
tcattttacagatgagaaaggt

SEQ ID NO: 216487 - DNA, 22 bp, Artificial Sequence
  Synthetic oligonucleotide; TTT chr2 60517757 60517778 60517762 60517757 -
tacagatgagaaaggttgaggc

SEQ ID NO: 216488 - DNA, 22 bp, Artificial Sequence
  Synthetic oligonucleotide; TTT chr2 60517756 60517777 60517761 60517756 -
acagatgagaaaggttgaggct

SEQ ID NO: 216489 - DNA, 22 bp, Artificial Sequence
  Synthetic oligonucleotide; TTA chr2 60517755 60517776 60517760 60517755 -
cagatgagaaaggttgaggcta

SEQ ID NO: 216490 - DNA, 22 bp, Artificial Sequence
  Synthetic oligonucleotide; TTG chr2 60517739 60517760 60517744 60517739 -
aggctaagaggggagtgagtgc

SEQ ID NO: 216491 - DNA, 22 bp, Artificial Sequence
  Synthetic oligonucleotide; CTA chr2 60517733 60517754 60517738 60517733 -
agaggggagtgagtgccagagt

SEQ ID NO: 216492 - DNA, 22 bp, Artificial Sequence
  Synthetic oligonucleotide; CTA chr2 60517708 60517729 60517713 60517708 -
cttgctaggcagtggtagactt

SEQ ID NO: 216493 - DNA, 22 bp, Artificial Sequence
  Synthetic oligonucleotide; CTT chr2 60517705 60517726 60517710 60517705 -
gctaggcagtggtagacttggc

SEQ ID NO: 216494 - DNA, 22 bp, Artificial Sequence
  Synthetic oligonucleotide; TTG chr2 60517704 60517725 60517709 60517704 -
ctaggcagtggtagacttggcc

SEQ ID NO: 216495 - DNA, 22 bp, Artificial Sequence
  Synthetic oligonucleotide; CTA chr2 60517701 60517722 60517706 60517701 -
ggcagtggtagacttggcccag

SEQ ID NO: 216496 - DNA, 22 bp, Artificial Sequence
  Synthetic oligonucleotide; CTT chr2 60517686 60517707 60517691 60517686 -
ggcccagagcctggggcttccc

SEQ ID NO: 216497 - DNA, 22 bp, Artificial Sequence
  Synthetic oligonucleotide; TTG chr2 60517685 60517706 60517690 60517685 -
gcccagagcctggggcttccca

SEQ ID NO: 216498 - DNA, 22 bp, Artificial Sequence
  Synthetic oligonucleotide; CTG chr2 60517673 60517694 60517678 60517673 -
gggcttcccactttcattcctg

SEQ ID NO: 216499 - DNA, 22 bp, Artificial Sequence
  Synthetic oligonucleotide; CTT chr2 60517667 60517688 60517672 60517667 -
cccactttcattcctggctgac

SEQ ID NO: 216500 - DNA, 22 bp, Artificial Sequence
  Synthetic oligonucleotide; TTC chr2 60517666 60517687 60517671 60517666 -
ccactttcattcctggctgact

SEQ ID NO: 216501 - DNA, 22 bp, Artificial Sequence
  Synthetic oligonucleotide; CTT chr2 60517660 60517681 60517665 60517660 -
tcattcctggctgactgtacca

SEQ ID NO: 216502 - DNA, 22 bp, Artificial Sequence
  Synthetic oligonucleotide; TTT chr2 60517659 60517680 60517664 60517659 -
cattcctggctgactgtaccaa

SEQ ID NO: 216503 - DNA, 22 bp, Artificial Sequence
  Synthetic oligonucleotide; TTC chr2 60517658 60517679 60517663 60517658 -
attcctggctgactgtaccaat

SEQ ID NO: 216504 - DNA, 22 bp, Artificial Sequence
  Synthetic oligonucleotide; TTC chr2 60517654 60517675 60517659 60517654 -
ctggctgactgtaccaatcgca

SEQ ID NO: 216505 - DNA, 22 bp, Artificial Sequence
  Synthetic oligonucleotide; CTG chr2 60517651 60517672 60517656 60517651 -
gctgactgtaccaatcgcacat

SEQ ID NO: 216506 - DNA, 22 bp, Artificial Sequence
  Synthetic oligonucleotide; CTG chr2 60517647 60517668 60517652 60517647 -
actgtaccaatcgcacatggcc

SEQ ID NO: 216507 - DNA, 22 bp, Artificial Sequence
  Synthetic oligonucleotide; CTG chr2 60517643 60517664 60517648 60517643 -
taccaatcgcacatggcctctc

SEQ ID NO: 216508 - DNA, 22 bp, Artificial Sequence
  Synthetic oligonucleotide; CTC chr2 60517623 60517644 60517628 60517623 -
tccatggccagcaggagccaga

SEQ ID NO: 216509 - DNA, 22 bp, Artificial Sequence
  Synthetic oligonucleotide; CTC chr2 60517621 60517642 60517626 60517621 -
catggccagcaggagccagagg

SEQ ID NO: 216510 - DNA, 22 bp, Artificial Sequence
  Synthetic oligonucleotide; CTT chr2 60517583 60517604 60517588 60517583 -
tgcagaggaacttgcacccacg

SEQ ID NO: 216511 - DNA, 22 bp, Artificial Sequence
  Synthetic oligonucleotide; TTT chr2 60517582 60517603 60517587 60517582 -
gcagaggaacttgcacccacgc

SEQ ID NO: 216512 - DNA, 22 bp, Artificial Sequence
  Synthetic oligonucleotide; TTG chr2 60517581 60517602 60517586 60517581 -
cagaggaacttgcacccacgct

SEQ ID NO: 216513 - DNA, 22 bp, Artificial Sequence
  Synthetic oligonucleotide; CTT chr2 60517570 60517591 60517575 60517570 -
gcacccacgcttttatcggtga

SEQ ID NO: 216514 - DNA, 22 bp, Artificial Sequence
  Synthetic oligonucleotide; TTG chr2 60517569 60517590 60517574 60517569 -
cacccacgcttttatcggtgat

SEQ ID NO: 216515 - DNA, 22 bp, Artificial Sequence
  Synthetic oligonucleotide; CTT chr2 60517558 60517579 60517563 60517558 -
ttatcggtgatggctggaatgc

SEQ ID NO: 216516 - DNA, 22 bp, Artificial Sequence
  Synthetic oligonucleotide; TTT chr2 60517557 60517578 60517562 60517557 -
tatcggtgatggctggaatgct

SEQ ID NO: 216517 - DNA, 22 bp, Artificial Sequence
  Synthetic oligonucleotide; TTT chr2 60517556 60517577 60517561 60517556 -
atcggtgatggctggaatgctt

SEQ ID NO: 216518 - DNA, 22 bp, Artificial Sequence
  Synthetic oligonucleotide; TTA chr2 60517555 60517576 60517560 60517555 -
tcggtgatggctggaatgcttt

SEQ ID NO: 216519 - DNA, 22 bp, Artificial Sequence
  Synthetic oligonucleotide; CTG chr2 60517542 60517563 60517547 60517542 -
gaatgcttttcttaactggagc

SEQ ID NO: 216520 - DNA, 22 bp, Artificial Sequence
  Synthetic oligonucleotide; CTT chr2 60517534 60517555 60517539 60517534 -
ttcttaactggagctttgttga

SEQ ID NO: 216521 - DNA, 22 bp, Artificial Sequence
  Synthetic oligonucleotide; TTT chr2 60517533 60517554 60517538 60517533 -
tcttaactggagctttgttgaa

SEQ ID NO: 216522 - DNA, 22 bp, Artificial Sequence
  Synthetic oligonucleotide; TTT chr2 60517532 60517553 60517537 60517532 -
cttaactggagctttgttgaag

SEQ ID NO: 216523 - DNA, 22 bp, Artificial Sequence
  Synthetic oligonucleotide; TTC chr2 60517531 60517552 60517536 60517531 -
ttaactggagctttgttgaaga

SEQ ID NO: 216524 - DNA, 22 bp, Artificial Sequence
  Synthetic oligonucleotide; CTT chr2 60517529 60517550 60517534 60517529 -
aactggagctttgttgaagagc

SEQ ID NO: 216525 - DNA, 22 bp, Artificial Sequence
  Synthetic oligonucleotide; TTA chr2 60517528 60517549 60517533 60517528 -
actggagctttgttgaagagcc

SEQ ID NO: 216526 - DNA, 22 bp, Artificial Sequence
  Synthetic oligonucleotide; CTG chr2 60517524 60517545 60517529 60517524 -
gagctttgttgaagagcctggt

SEQ ID NO: 216527 - DNA, 22 bp, Artificial Sequence
  Synthetic oligonucleotide; CTT chr2 60517518 60517539 60517523 60517518 -
tgttgaagagcctggtgctttt

SEQ ID NO: 216528 - DNA, 22 bp, Artificial Sequence
  Synthetic oligonucleotide; TTT chr2 60517517 60517538 60517522 60517517 -
gttgaagagcctggtgcttttg

SEQ ID NO: 216529 - DNA, 22 bp, Artificial Sequence
  Synthetic oligonucleotide; TTG chr2 60517516 60517537 60517521 60517516 -
ttgaagagcctggtgcttttgt

SEQ ID NO: 216530 - DNA, 22 bp, Artificial Sequence
  Synthetic oligonucleotide; TTG chr2 60517513 60517534 60517518 60517513 -
aagagcctggtgcttttgtggc

SEQ ID NO: 216531 - DNA, 22 bp, Artificial Sequence
  Synthetic oligonucleotide; CTG chr2 60517504 60517525 60517509 60517504 -
gtgcttttgtggcagtgctaac

SEQ ID NO: 216532 - DNA, 22 bp, Artificial Sequence
  Synthetic oligonucleotide; CTT chr2 60517498 60517519 60517503 60517498 -
ttgtggcagtgctaacctgggg

SEQ ID NO: 216533 - DNA, 22 bp, Artificial Sequence
  Synthetic oligonucleotide; TTT chr2 60517497 60517518 60517502 60517497 -
tgtggcagtgctaacctgggga

SEQ ID NO: 216534 - DNA, 22 bp, Artificial Sequence
  Synthetic oligonucleotide; TTT chr2 60517496 60517517 60517501 60517496 -
gtggcagtgctaacctggggag

SEQ ID NO: 216535 - DNA, 22 bp, Artificial Sequence
  Synthetic oligonucleotide; TTG chr2 60517495 60517516 60517500 60517495 -
tggcagtgctaacctggggagc

SEQ ID NO: 216536 - DNA, 22 bp, Artificial Sequence
  Synthetic oligonucleotide; CTA chr2 60517484 60517505 60517489 60517484 -
acctggggagcccatggtaaaa

SEQ ID NO: 216537 - DNA, 22 bp, Artificial Sequence
  Synthetic oligonucleotide; CTG chr2 60517479 60517500 60517484 60517479 -
gggagcccatggtaaaacccaa

SEQ ID NO: 216538 - DNA, 22 bp, Artificial Sequence
  Synthetic oligonucleotide; CTG chr2 60517430 60517451 60517435 60517430 -
tgctgttgcagagaatggtcct

SEQ ID NO: 216539 - DNA, 22 bp, Artificial Sequence
  Synthetic oligonucleotide; CTG chr2 60517425 60517446 60517430 60517425 -
ttgcagagaatggtcctttgcc

SEQ ID NO: 216540 - DNA, 22 bp, Artificial Sequence
  Synthetic oligonucleotide; TTG chr2 60517422 60517443 60517427 60517422 -
cagagaatggtcctttgccctt

SEQ ID NO: 216541 - DNA, 22 bp, Artificial Sequence
  Synthetic oligonucleotide; CTT chr2 60517407 60517428 60517412 60517407 -
tgccctttcttcttgccttgtt

SEQ ID NO: 216542 - DNA, 22 bp, Artificial Sequence
  Synthetic oligonucleotide; TTT chr2 60517406 60517427 60517411 60517406 -
gccctttcttcttgccttgttc

SEQ ID NO: 216543 - DNA, 22 bp, Artificial Sequence
  Synthetic oligonucleotide; TTG chr2 60517405 60517426 60517410 60517405 -
ccctttcttcttgccttgttcc

SEQ ID NO: 216544 - DNA, 22 bp, Artificial Sequence
  Synthetic oligonucleotide; CTT chr2 60517400 60517421 60517405 60517400 -
tcttcttgccttgttcctttcc

SEQ ID NO: 216545 - DNA, 22 bp, Artificial Sequence
  Synthetic oligonucleotide; TTT chr2 60517399 60517420 60517404 60517399 -
cttcttgccttgttcctttccc

SEQ ID NO: 216546 - DNA, 22 bp, Artificial Sequence
  Synthetic oligonucleotide; TTC chr2 60517398 60517419 60517403 60517398 -
ttcttgccttgttcctttccct

SEQ ID NO: 216547 - DNA, 22 bp, Artificial Sequence
  Synthetic oligonucleotide; CTT chr2 60517396 60517417 60517401 60517396 -
cttgccttgttcctttccctgt

SEQ ID NO: 216548 - DNA, 22 bp, Artificial Sequence
  Synthetic oligonucleotide; TTC chr2 60517395 60517416 60517400 60517395 -
ttgccttgttcctttccctgtt

SEQ ID NO: 216549 - DNA, 22 bp, Artificial Sequence
  Synthetic oligonucleotide; CTT chr2 60517393 60517414 60517398 60517393 -
gccttgttcctttccctgtttt

SEQ ID NO: 216550 - DNA, 22 bp, Artificial Sequence
  Synthetic oligonucleotide; TTG chr2 60517392 60517413 60517397 60517392 -
ccttgttcctttccctgttttc

SEQ ID NO: 216551 - DNA, 22 bp, Artificial Sequence
  Synthetic oligonucleotide; CTT chr2 60517388 60517409 60517393 60517388 -
gttcctttccctgttttctctg

SEQ ID NO: 216552 - DNA, 22 bp, Artificial Sequence
  Synthetic oligonucleotide; TTG chr2 60517387 60517408 60517392 60517387 -
ttcctttccctgttttctctgc

SEQ ID NO: 216553 - DNA, 22 bp, Artificial Sequence
  Synthetic oligonucleotide; TTC chr2 60517384 60517405 60517389 60517384 -
ctttccctgttttctctgccct

SEQ ID NO: 216554 - DNA, 22 bp, Artificial Sequence
  Synthetic oligonucleotide; CTT chr2 60517381 60517402 60517386 60517381 -
tccctgttttctctgccctttt

SEQ ID NO: 216555 - DNA, 22 bp, Artificial Sequence
  Synthetic oligonucleotide; TTT chr2 60517380 60517401 60517385 60517380 -
ccctgttttctctgcccttttt

SEQ ID NO: 216556 - DNA, 22 bp, Artificial Sequence
  Synthetic oligonucleotide; TTC chr2 60517379 60517400 60517384 60517379 -
cctgttttctctgccctttttc

SEQ ID NO: 216557 - DNA, 22 bp, Artificial Sequence
  Synthetic oligonucleotide; CTG chr2 60517375 60517396 60517380 60517375 -
ttttctctgccctttttcgggg

SEQ ID NO: 216558 - DNA, 22 bp, Artificial Sequence
  Synthetic oligonucleotide; TTT chr2 60517372 60517393 60517377 60517372 -
tctctgccctttttcggggctg

SEQ ID NO: 216559 - DNA, 22 bp, Artificial Sequence
  Synthetic oligonucleotide; TTT chr2 60517371 60517392 60517376 60517371 -
ctctgccctttttcggggctgg

SEQ ID NO: 216560 - DNA, 22 bp, Artificial Sequence
  Synthetic oligonucleotide; TTC chr2 60517370 60517391 60517375 60517370 -
tctgccctttttcggggctggt

SEQ ID NO: 216561 - DNA, 22 bp, Artificial Sequence
  Synthetic oligonucleotide; CTC chr2 60517368 60517389 60517373 60517368 -
tgccctttttcggggctggtct

SEQ ID NO: 216562 - DNA, 22 bp, Artificial Sequence
  Synthetic oligonucleotide; CTG chr2 60517366 60517387 60517371 60517366 -
ccctttttcggggctggtcttc

SEQ ID NO: 216563 - DNA, 22 bp, Artificial Sequence
  Synthetic oligonucleotide; CTT chr2 60517361 60517382 60517366 60517361 -
tttcggggctggtcttcctacc

SEQ ID NO: 216564 - DNA, 22 bp, Artificial Sequence
  Synthetic oligonucleotide; TTT chr2 60517360 60517381 60517365 60517360 -
ttcggggctggtcttcctacca

SEQ ID NO: 216565 - DNA, 22 bp, Artificial Sequence
  Synthetic oligonucleotide; TTT chr2 60517359 60517380 60517364 60517359 -
tcggggctggtcttcctaccac

SEQ ID NO: 216566 - DNA, 22 bp, Artificial Sequence
  Synthetic oligonucleotide; TTT chr2 60517358 60517379 60517363 60517358 -
cggggctggtcttcctaccacc

SEQ ID NO: 216567 - DNA, 22 bp, Artificial Sequence
  Synthetic oligonucleotide; TTC chr2 60517357 60517378 60517362 60517357 -
ggggctggtcttcctaccacct

SEQ ID NO: 216568 - DNA, 22 bp, Artificial Sequence
  Synthetic oligonucleotide; CTG chr2 60517350 60517371 60517355 60517350 -
gtcttcctaccacctttcctgc

SEQ ID NO: 216569 - DNA, 22 bp, Artificial Sequence
  Synthetic oligonucleotide; CTT chr2 60517345 60517366 60517350 60517345 -
cctaccacctttcctgctaggg

SEQ ID NO: 216570 - DNA, 22 bp, Artificial Sequence
  Synthetic oligonucleotide; TTC chr2 60517344 60517365 60517349 60517344 -
ctaccacctttcctgctagggc

SEQ ID NO: 216571 - DNA, 22 bp, Artificial Sequence
  Synthetic oligonucleotide; CTA chr2 60517341 60517362 60517346 60517341 -
ccacctttcctgctagggctcc

SEQ ID NO: 216572 - DNA, 22 bp, Artificial Sequence
  Synthetic oligonucleotide; CTT chr2 60517334 60517355 60517339 60517334 -
tcctgctagggctcccaaagtg

SEQ ID NO: 216573 - DNA, 22 bp, Artificial Sequence
  Synthetic oligonucleotide; TTT chr2 60517333 60517354 60517338 60517333 -
cctgctagggctcccaaagtgt

SEQ ID NO: 216574 - DNA, 22 bp, Artificial Sequence
  Synthetic oligonucleotide; TTC chr2 60517332 60517353 60517337 60517332 -
ctgctagggctcccaaagtgtg

SEQ ID NO: 216575 - DNA, 22 bp, Artificial Sequence
  Synthetic oligonucleotide; CTG chr2 60517329 60517350 60517334 60517329 -
ctagggctcccaaagtgtggcc

SEQ ID NO: 216576 - DNA, 22 bp, Artificial Sequence
  Synthetic oligonucleotide; CTA chr2 60517326 60517347 60517331 60517326 -
gggctcccaaagtgtggccctt

SEQ ID NO: 216577 - DNA, 22 bp, Artificial Sequence
  Synthetic oligonucleotide; CTC chr2 60517320 60517341 60517325 60517320 -
ccaaagtgtggcccttctgggg

SEQ ID NO: 216578 - DNA, 22 bp, Artificial Sequence
  Synthetic oligonucleotide; CTT chr2 60517304 60517325 60517309 60517304 -
ctggggtttacatggtgtgccc

SEQ ID NO: 216579 - DNA, 22 bp, Artificial Sequence
  Synthetic oligonucleotide; TTC chr2 60517303 60517324 60517308 60517303 -
tggggtttacatggtgtgccca

SEQ ID NO: 216580 - DNA, 22 bp, Artificial Sequence
  Synthetic oligonucleotide; CTG chr2 60517301 60517322 60517306 60517301 -
gggtttacatggtgtgcccagg

SEQ ID NO: 216581 - DNA, 22 bp, Artificial Sequence
  Synthetic oligonucleotide; TTT chr2 60517295 60517316 60517300 60517295 -
acatggtgtgcccagggaatag

SEQ ID NO: 216582 - DNA, 22 bp, Artificial Sequence
  Synthetic oligonucleotide; TTA chr2 60517294 60517315 60517299 60517294 -
catggtgtgcccagggaatagc

SEQ ID NO: 216583 - DNA, 22 bp, Artificial Sequence
  Synthetic oligonucleotide; CTT chr2 60517270 60517291 60517275 60517270 -
ggcttttttattcagataactg

SEQ ID NO: 216584 - DNA, 22 bp, Artificial Sequence
  Synthetic oligonucleotide; TTG chr2 60517269 60517290 60517274 60517269 -
gcttttttattcagataactgg

SEQ ID NO: 216585 - DNA, 22 bp, Artificial Sequence
  Synthetic oligonucleotide; CTT chr2 60517265 60517286 60517270 60517265 -
ttttattcagataactggagat

SEQ ID NO: 216586 - DNA, 22 bp, Artificial Sequence
  Synthetic oligonucleotide; TTT chr2 60517264 60517285 60517269 60517264 -
tttattcagataactggagata

SEQ ID NO: 216587 - DNA, 22 bp, Artificial Sequence
  Synthetic oligonucleotide; TTT chr2 60517263 60517284 60517268 60517263 -
ttattcagataactggagataa

SEQ ID NO: 216588 - DNA, 22 bp, Artificial Sequence
  Synthetic oligonucleotide; TTT chr2 60517262 60517283 60517267 60517262 -
tattcagataactggagataat

SEQ ID NO: 216589 - DNA, 22 bp, Artificial Sequence
  Synthetic oligonucleotide; TTT chr2 60517261 60517282 60517266 60517261 -
attcagataactggagataatg

SEQ ID NO: 216590 - DNA, 22 bp, Artificial Sequence
  Synthetic oligonucleotide; TTA chr2 60517260 60517281 60517265 60517260 -
ttcagataactggagataatgg

SEQ ID NO: 216591 - DNA, 22 bp, Artificial Sequence
  Synthetic oligonucleotide; TTC chr2 60517257 60517278 60517262 60517257 -
agataactggagataatggagt

SEQ ID NO: 216592 - DNA, 22 bp, Artificial Sequence
  Synthetic oligonucleotide; CTG chr2 60517248 60517269 60517253 60517248 -
gagataatggagtagatggagt

SEQ ID NO: 216593 - DNA, 22 bp, Artificial Sequence
  Synthetic oligonucleotide; TTG chr2 60517224 60517245 60517229 60517224 -
gggtggtgaaggaacgtgtacc

SEQ ID NO: 216594 - DNA, 22 bp, Artificial Sequence
  Synthetic oligonucleotide; CTC chr2 60517199 60517220 60517204 60517199 -
tcaggggcagatggccctccag

SEQ ID NO: 216595 - DNA, 22 bp, Artificial Sequence
  Synthetic oligonucleotide; CTC chr2 60517197 60517218 60517202 60517197 -
aggggcagatggccctccagaa

SEQ ID NO: 216596 - DNA, 22 bp, Artificial Sequence
  Synthetic oligonucleotide; CTC chr2 60517180 60517201 60517185 60517180 -
cagaattggccagcccaacctc

SEQ ID NO: 216597 - DNA, 22 bp, Artificial Sequence
  Synthetic oligonucleotide; TTG chr2 60517172 60517193 60517177 60517172 -
gccagcccaacctcttcctcac

SEQ ID NO: 216598 - DNA, 22 bp, Artificial Sequence
  Synthetic oligonucleotide; CTC chr2 60517158 60517179 60517163 60517158 -
ttcctcaccaccctagttctat

SEQ ID NO: 216599 - DNA, 22 bp, Artificial Sequence
  Synthetic oligonucleotide; CTT chr2 60517156 60517177 60517161 60517156 -
cctcaccaccctagttctattt

SEQ ID NO: 216600 - DNA, 22 bp, Artificial Sequence
  Synthetic oligonucleotide; TTC chr2 60517155 60517176 60517160 60517155 -
ctcaccaccctagttctatttt

SEQ ID NO: 216601 - DNA, 22 bp, Artificial Sequence
  Synthetic oligonucleotide; CTC chr2 60517152 60517173 60517157 60517152 -
accaccctagttctatttttaa

SEQ ID NO: 216602 - DNA, 22 bp, Artificial Sequence
  Synthetic oligonucleotide; CTA chr2 60517143 60517164 60517148 60517143 -
gttctatttttaaagacacctc

SEQ ID NO: 216603 - DNA, 22 bp, Artificial Sequence
  Synthetic oligonucleotide; TTC chr2 60517139 60517160 60517144 60517139 -
tatttttaaagacacctctcaa

SEQ ID NO: 216604 - DNA, 22 bp, Artificial Sequence
  Synthetic oligonucleotide; CTA chr2 60517137 60517158 60517142 60517137 -
tttttaaagacacctctcaatc

SEQ ID NO: 216605 - DNA, 22 bp, Artificial Sequence
  Synthetic oligonucleotide; TTT chr2 60517134 60517155 60517139 60517134 -
ttaaagacacctctcaatcgca

SEQ ID NO: 216606 - DNA, 22 bp, Artificial Sequence
  Synthetic oligonucleotide; TTT chr2 60517133 60517154 60517138 60517133 -
taaagacacctctcaatcgcag

SEQ ID NO: 216607 - DNA, 22 bp, Artificial Sequence
  Synthetic oligonucleotide; TTT chr2 60517132 60517153 60517137 60517132 -
aaagacacctctcaatcgcagg

SEQ ID NO: 216608 - DNA, 22 bp, Artificial Sequence
  Synthetic oligonucleotide; TTA chr2 60517131 60517152 60517136 60517131 -
aagacacctctcaatcgcagga

SEQ ID NO: 216609 - DNA, 22 bp, Artificial Sequence
  Synthetic oligonucleotide; CTC chr2 60517121 60517142 60517126 60517121 -
tcaatcgcaggaaatccttcct

SEQ ID NO: 216610 - DNA, 22 bp, Artificial Sequence
  Synthetic oligonucleotide; CTC chr2 60517119 60517140 60517124 60517119 -
aatcgcaggaaatccttccttt

SEQ ID NO: 216611 - DNA, 22 bp, Artificial Sequence
  Synthetic oligonucleotide; CTT chr2 60517102 60517123 60517107 60517102 -
ccttttgtctaccttcgatccc

SEQ ID NO: 216612 - DNA, 22 bp, Artificial Sequence
  Synthetic oligonucleotide; TTC chr2 60517101 60517122 60517106 60517101 -
cttttgtctaccttcgatccct

SEQ ID NO: 216613 - DNA, 22 bp, Artificial Sequence
  Synthetic oligonucleotide; CTT chr2 60517098 60517119 60517103 60517098 -
ttgtctaccttcgatcccttat

SEQ ID NO: 216614 - DNA, 22 bp, Artificial Sequence
  Synthetic oligonucleotide; TTT chr2 60517097 60517118 60517102 60517097 -
tgtctaccttcgatcccttatg

SEQ ID NO: 216615 - DNA, 22 bp, Artificial Sequence
  Synthetic oligonucleotide; TTT chr2 60517096 60517117 60517101 60517096 -
gtctaccttcgatcccttatgc

SEQ ID NO: 216616 - DNA, 22 bp, Artificial Sequence
  Synthetic oligonucleotide; TTG chr2 60517095 60517116 60517100 60517095 -
tctaccttcgatcccttatgct

SEQ ID NO: 216617 - DNA, 22 bp, Artificial Sequence
  Synthetic oligonucleotide; CTA chr2 60517091 60517112 60517096 60517091 -
ccttcgatcccttatgcttcat

SEQ ID NO: 216618 - DNA, 22 bp, Artificial Sequence
  Synthetic oligonucleotide; CTT chr2 60517087 60517108 60517092 60517087 -
cgatcccttatgcttcatttta

SEQ ID NO: 216619 - DNA, 22 bp, Artificial Sequence
  Synthetic oligonucleotide; TTC chr2 60517086 60517107 60517091 60517086 -
gatcccttatgcttcattttaa

SEQ ID NO: 216620 - DNA, 22 bp, Artificial Sequence
  Synthetic oligonucleotide; CTT chr2 60517078 60517099 60517083 60517078 -
atgcttcattttaaacccattt

SEQ ID NO: 216621 - DNA, 22 bp, Artificial Sequence
  Synthetic oligonucleotide; TTA chr2 60517077 60517098 60517082 60517077 -
tgcttcattttaaacccatttc

SEQ ID NO: 216622 - DNA, 22 bp, Artificial Sequence
  Synthetic oligonucleotide; CTT chr2 60517072 60517093 60517077 60517072 -
cattttaaacccatttcctctt

SEQ ID NO: 216623 - DNA, 22 bp, Artificial Sequence
  Synthetic oligonucleotide; TTC chr2 60517071 60517092 60517076 60517071 -
attttaaacccatttcctcttc

SEQ ID NO: 216624 - DNA, 22 bp, Artificial Sequence
  Synthetic oligonucleotide; TTT chr2 60517067 60517088 60517072 60517067 -
taaacccatttcctcttcattc

SEQ ID NO: 216625 - DNA, 22 bp, Artificial Sequence
  Synthetic oligonucleotide; TTT chr2 60517066 60517087 60517071 60517066 -
aaacccatttcctcttcattcc

SEQ ID NO: 216626 - DNA, 22 bp, Artificial Sequence
  Synthetic oligonucleotide; TTA chr2 60517065 60517086 60517070 60517065 -
aacccatttcctcttcattcca

SEQ ID NO: 216627 - DNA, 22 bp, Artificial Sequence
  Synthetic oligonucleotide; TTT chr2 60517056 60517077 60517061 60517056 -
cctcttcattccagagacgaca

SEQ ID NO: 216628 - DNA, 22 bp, Artificial Sequence
  Synthetic oligonucleotide; TTC chr2 60517055 60517076 60517060 60517055 -
ctcttcattccagagacgacaa

SEQ ID NO: 216629 - DNA, 22 bp, Artificial Sequence
  Synthetic oligonucleotide; CTC chr2 60517052 60517073 60517057 60517052 -
ttcattccagagacgacaaagt

SEQ ID NO: 216630 - DNA, 22 bp, Artificial Sequence
  Synthetic oligonucleotide; CTT chr2 60517050 60517071 60517055 60517050 -
cattccagagacgacaaagtat

SEQ ID NO: 216631 - DNA, 22 bp, Artificial Sequence
  Synthetic oligonucleotide; TTC chr2 60517049 60517070 60517054 60517049 -
attccagagacgacaaagtatc

SEQ ID NO: 216632 - DNA, 22 bp, Artificial Sequence
  Synthetic oligonucleotide; TTC chr2 60517045 60517066 60517050 60517045 -
cagagacgacaaagtatctcat

SEQ ID NO: 216633 - DNA, 22 bp, Artificial Sequence
  Synthetic oligonucleotide; CTC chr2 60517025 60517046 60517030 60517025 -
atcaccagctttgggctgaaat

SEQ ID NO: 216634 - DNA, 22 bp, Artificial Sequence
  Synthetic oligonucleotide; CTT chr2 60517014 60517035 60517019 60517014 -
tgggctgaaatgcttcatattt

SEQ ID NO: 216635 - DNA, 22 bp, Artificial Sequence
  Synthetic oligonucleotide; TTT chr2 60517013 60517034 60517018 60517013 -
gggctgaaatgcttcatatttt

SEQ ID NO: 216636 - DNA, 22 bp, Artificial Sequence
  Synthetic oligonucleotide; TTG chr2 60517012 60517033 60517017 60517012 -
ggctgaaatgcttcatatttta

SEQ ID NO: 216637 - DNA, 22 bp, Artificial Sequence
  Synthetic oligonucleotide; CTG chr2 60517007 60517028 60517012 60517007 -
aaatgcttcatattttacattc

SEQ ID NO: 216638 - DNA, 22 bp, Artificial Sequence
  Synthetic oligonucleotide; CTT chr2 60516999 60517020 60517004 60516999 -
catattttacattcttcattcc

SEQ ID NO: 216639 - DNA, 22 bp, Artificial Sequence
  Synthetic oligonucleotide; TTC chr2 60516998 60517019 60517003 60516998 -
atattttacattcttcattcca

SEQ ID NO: 216640 - DNA, 22 bp, Artificial Sequence
  Synthetic oligonucleotide; TTT chr2 60516992 60517013 60516997 60516992 -
tacattcttcattccattctcc

SEQ ID NO: 216641 - DNA, 22 bp, Artificial Sequence
  Synthetic oligonucleotide; TTT chr2 60516991 60517012 60516996 60516991 -
acattcttcattccattctccg

SEQ ID NO: 216642 - DNA, 22 bp, Artificial Sequence
  Synthetic oligonucleotide; TTA chr2 60516990 60517011 60516995 60516990 -
cattcttcattccattctccgc

SEQ ID NO: 216643 - DNA, 22 bp, Artificial Sequence
  Synthetic oligonucleotide; TTC chr2 60516985 60517006 60516990 60516985 -
ttcattccattctccgccactt

SEQ ID NO: 216644 - DNA, 22 bp, Artificial Sequence
  Synthetic oligonucleotide; CTT chr2 60516983 60517004 60516988 60516983 -
cattccattctccgccacttct

SEQ ID NO: 216645 - DNA, 22 bp, Artificial Sequence
  Synthetic oligonucleotide; TTC chr2 60516982 60517003 60516987 60516982 -
attccattctccgccacttctt

SEQ ID NO: 216646 - DNA, 22 bp, Artificial Sequence
  Synthetic oligonucleotide; TTC chr2 60516978 60516999 60516983 60516978 -
cattctccgccacttcttcttc

SEQ ID NO: 216647 - DNA, 22 bp, Artificial Sequence
  Synthetic oligonucleotide; TTC chr2 60516973 60516994 60516978 60516973 -
tccgccacttcttcttcctaaa

SEQ ID NO: 216648 - DNA, 22 bp, Artificial Sequence
  Synthetic oligonucleotide; CTC chr2 60516971 60516992 60516976 60516971 -
cgccacttcttcttcctaaata

SEQ ID NO: 216649 - DNA, 22 bp, Artificial Sequence
  Synthetic oligonucleotide; CTT chr2 60516963 60516984 60516968 60516963 -
cttcttcctaaataatctcttt

SEQ ID NO: 216650 - DNA, 22 bp, Artificial Sequence
  Synthetic oligonucleotide; TTC chr2 60516962 60516983 60516967 60516962 -
ttcttcctaaataatctctttc

SEQ ID NO: 216651 - DNA, 22 bp, Artificial Sequence
  Synthetic oligonucleotide; CTT chr2 60516960 60516981 60516965 60516960 -
cttcctaaataatctctttcct

SEQ ID NO: 216652 - DNA, 22 bp, Artificial Sequence
  Synthetic oligonucleotide; TTC chr2 60516959 60516980 60516964 60516959 -
ttcctaaataatctctttcctg

SEQ ID NO: 216653 - DNA, 22 bp, Artificial Sequence
  Synthetic oligonucleotide; CTT chr2 60516957 60516978 60516962 60516957 -
cctaaataatctctttcctgaa

SEQ ID NO: 216654 - DNA, 22 bp, Artificial Sequence
  Synthetic oligonucleotide; TTC chr2 60516956 60516977 60516961 60516956 -
ctaaataatctctttcctgaac

SEQ ID NO: 216655 - DNA, 22 bp, Artificial Sequence
  Synthetic oligonucleotide; CTA chr2 60516953 60516974 60516958 60516953 -
aataatctctttcctgaacctg

SEQ ID NO: 216656 - DNA, 22 bp, Artificial Sequence
  Synthetic oligonucleotide; CTC chr2 60516944 60516965 60516949 60516944 -
tttcctgaacctgaactcatgg

SEQ ID NO: 216657 - DNA, 22 bp, Artificial Sequence
  Synthetic oligonucleotide; CTT chr2 60516942 60516963 60516947 60516942 -
tcctgaacctgaactcatggat

SEQ ID NO: 216658 - DNA, 22 bp, Artificial Sequence
  Synthetic oligonucleotide; TTT chr2 60516941 60516962 60516946 60516941 -
cctgaacctgaactcatggatc

SEQ ID NO: 216659 - DNA, 22 bp, Artificial Sequence
  Synthetic oligonucleotide; TTC chr2 60516940 60516961 60516945 60516940 -
ctgaacctgaactcatggatct

SEQ ID NO: 216660 - DNA, 22 bp, Artificial Sequence
  Synthetic oligonucleotide; CTG chr2 60516937 60516958 60516942 60516937 -
aacctgaactcatggatctatt

SEQ ID NO: 216661 - DNA, 22 bp, Artificial Sequence
  Synthetic oligonucleotide; CTG chr2 60516931 60516952 60516936 60516931 -
aactcatggatctattatcttg

SEQ ID NO: 216662 - DNA, 22 bp, Artificial Sequence
  Synthetic oligonucleotide; CTC chr2 60516926 60516947 60516931 60516926 -
atggatctattatcttgtaacc

SEQ ID NO: 216663 - DNA, 22 bp, Artificial Sequence
  Synthetic oligonucleotide; CTA chr2 60516917 60516938 60516922 60516917 -
ttatcttgtaacccatttattg

SEQ ID NO: 216664 - DNA, 22 bp, Artificial Sequence
  Synthetic oligonucleotide; TTA chr2 60516914 60516935 60516919 60516914 -
tcttgtaacccatttattgttt

SEQ ID NO: 216665 - DNA, 22 bp, Artificial Sequence
  Synthetic oligonucleotide; CTT chr2 60516910 60516931 60516915 60516910 -
gtaacccatttattgtttctat

SEQ ID NO: 216666 - DNA, 22 bp, Artificial Sequence
  Synthetic oligonucleotide; TTG chr2 60516909 60516930 60516914 60516909 -
taacccatttattgtttctatg

SEQ ID NO: 216667 - DNA, 22 bp, Artificial Sequence
  Synthetic oligonucleotide; TTT chr2 60516899 60516920 60516904 60516899 -
attgtttctatgcctctcttta

SEQ ID NO: 216668 - DNA, 22 bp, Artificial Sequence
  Synthetic oligonucleotide; TTA chr2 60516898 60516919 60516903 60516898 -
ttgtttctatgcctctctttag

SEQ ID NO: 216669 - DNA, 22 bp, Artificial Sequence
  Synthetic oligonucleotide; TTG chr2 60516895 60516916 60516900 60516895 -
tttctatgcctctctttagaat

SEQ ID NO: 216670 - DNA, 22 bp, Artificial Sequence
  Synthetic oligonucleotide; TTT chr2 60516892 60516913 60516897 60516892 -
ctatgcctctctttagaatctg

SEQ ID NO: 216671 - DNA, 22 bp, Artificial Sequence
  Synthetic oligonucleotide; TTC chr2 60516891 60516912 60516896 60516891 -
tatgcctctctttagaatctgc

SEQ ID NO: 216672 - DNA, 22 bp, Artificial Sequence
  Synthetic oligonucleotide; CTA chr2 60516889 60516910 60516894 60516889 -
tgcctctctttagaatctgctg

SEQ ID NO: 216673 - DNA, 22 bp, Artificial Sequence
  Synthetic oligonucleotide; CTC chr2 60516883 60516904 60516888 60516883 -
tctttagaatctgctggttttc

SEQ ID NO: 216674 - DNA, 22 bp, Artificial Sequence
  Synthetic oligonucleotide; CTC chr2 60516881 60516902 60516886 60516881 -
tttagaatctgctggttttcca

SEQ ID NO: 216675 - DNA, 22 bp, Artificial Sequence
  Synthetic oligonucleotide; CTT chr2 60516879 60516900 60516884 60516879 -
tagaatctgctggttttccagc

SEQ ID NO: 216676 - DNA, 22 bp, Artificial Sequence
  Synthetic oligonucleotide; TTT chr2 60516878 60516899 60516883 60516878 -
agaatctgctggttttccagct

SEQ ID NO: 216677 - DNA, 22 bp, Artificial Sequence
  Synthetic oligonucleotide; TTA chr2 60516877 60516898 60516882 60516877 -
gaatctgctggttttccagctc

SEQ ID NO: 216678 - DNA, 22 bp, Artificial Sequence
  Synthetic oligonucleotide; CTG chr2 60516870 60516891 60516875 60516870 -
ctggttttccagctcttttact

SEQ ID NO: 216679 - DNA, 22 bp, Artificial Sequence
  Synthetic oligonucleotide; CTG chr2 60516867 60516888 60516872 60516867 -
gttttccagctcttttactcaa

SEQ ID NO: 216680 - DNA, 22 bp, Artificial Sequence
  Synthetic oligonucleotide; TTT chr2 60516863 60516884 60516868 60516863 -
tccagctcttttactcaaacat

SEQ ID NO: 216681 - DNA, 22 bp, Artificial Sequence
  Synthetic oligonucleotide; TTT chr2 60516862 60516883 60516867 60516862 -
ccagctcttttactcaaacatt

SEQ ID NO: 216682 - DNA, 22 bp, Artificial Sequence
  Synthetic oligonucleotide; TTC chr2 60516861 60516882 60516866 60516861 -
cagctcttttactcaaacatta

SEQ ID NO: 216683 - DNA, 22 bp, Artificial Sequence
  Synthetic oligonucleotide; CTC chr2 60516855 60516876 60516860 60516855 -
ttttactcaaacattagtctga

SEQ ID NO: 216684 - DNA, 22 bp, Artificial Sequence
  Synthetic oligonucleotide; CTT chr2 60516853 60516874 60516858 60516853 -
ttactcaaacattagtctgata

SEQ ID NO: 216685 - DNA, 22 bp, Artificial Sequence
  Synthetic oligonucleotide; TTT chr2 60516852 60516873 60516857 60516852 -
tactcaaacattagtctgataa

SEQ ID NO: 216686 - DNA, 22 bp, Artificial Sequence
  Synthetic oligonucleotide; TTT chr2 60516851 60516872 60516856 60516851 -
actcaaacattagtctgataac

SEQ ID NO: 216687 - DNA, 22 bp, Artificial Sequence
  Synthetic oligonucleotide; TTA chr2 60516850 60516871 60516855 60516850 -
ctcaaacattagtctgataact

SEQ ID NO: 216688 - DNA, 22 bp, Artificial Sequence
  Synthetic oligonucleotide; CTC chr2 60516847 60516868 60516852 60516847 -
aaacattagtctgataactaca

SEQ ID NO: 216689 - DNA, 22 bp, Artificial Sequence
  Synthetic oligonucleotide; TTA chr2 60516839 60516860 60516844 60516839 -
gtctgataactacagagtccaa

SEQ ID NO: 216690 - DNA, 22 bp, Artificial Sequence
  Synthetic oligonucleotide; CTG chr2 60516834 60516855 60516839 60516834 -
ataactacagagtccaatggca

SEQ ID NO: 216691 - DNA, 22 bp, Artificial Sequence
  Synthetic oligonucleotide; CTA chr2 60516827 60516848 60516832 60516827 -
cagagtccaatggcaagatatc

SEQ ID NO: 216692 - DNA, 22 bp, Artificial Sequence
  Synthetic oligonucleotide; CTT chr2 60516803 60516824 60516808 60516803 -
agtgttttccacattctttagt

SEQ ID NO: 216693 - DNA, 22 bp, Artificial Sequence
  Synthetic oligonucleotide; TTA chr2 60516802 60516823 60516807 60516802 -
gtgttttccacattctttagtc

SEQ ID NO: 216694 - DNA, 22 bp, Artificial Sequence
  Synthetic oligonucleotide; TTT chr2 60516796 60516817 60516801 60516796 -
tccacattctttagtcttatgt

SEQ ID NO: 216695 - DNA, 22 bp, Artificial Sequence
  Synthetic oligonucleotide; TTT chr2 60516795 60516816 60516800 60516795 -
ccacattctttagtcttatgtc

SEQ ID NO: 216696 - DNA, 22 bp, Artificial Sequence
  Synthetic oligonucleotide; TTC chr2 60516794 60516815 60516799 60516794 -
cacattctttagtcttatgtct

SEQ ID NO: 216697 - DNA, 22 bp, Artificial Sequence
  Synthetic oligonucleotide; TTC chr2 60516787 60516808 60516792 60516787 -
tttagtcttatgtctgcactct

SEQ ID NO: 216698 - DNA, 22 bp, Artificial Sequence
  Synthetic oligonucleotide; CTT chr2 60516785 60516806 60516790 60516785 -
tagtcttatgtctgcactctta

SEQ ID NO: 216699 - DNA, 22 bp, Artificial Sequence
  Synthetic oligonucleotide; TTT chr2 60516784 60516805 60516789 60516784 -
agtcttatgtctgcactcttat

SEQ ID NO: 216700 - DNA, 22 bp, Artificial Sequence
  Synthetic oligonucleotide; TTA chr2 60516783 60516804 60516788 60516783 -
gtcttatgtctgcactcttatg

SEQ ID NO: 216701 - DNA, 22 bp, Artificial Sequence
  Synthetic oligonucleotide; CTT chr2 60516778 60516799 60516783 60516778 -
atgtctgcactcttatgtcctg

SEQ ID NO: 216702 - DNA, 22 bp, Artificial Sequence
  Synthetic oligonucleotide; TTA chr2 60516777 60516798 60516782 60516777 -
tgtctgcactcttatgtcctgc

SEQ ID NO: 216703 - DNA, 22 bp, Artificial Sequence
  Synthetic oligonucleotide; CTG chr2 60516771 60516792 60516776 60516771 -
cactcttatgtcctgcttgctt

SEQ ID NO: 216704 - DNA, 22 bp, Artificial Sequence
  Synthetic oligonucleotide; CTC chr2 60516766 60516787 60516771 60516766 -
ttatgtcctgcttgctttttta

SEQ ID NO: 216705 - DNA, 22 bp, Artificial Sequence
  Synthetic oligonucleotide; CTT chr2 60516764 60516785 60516769 60516764 -
atgtcctgcttgcttttttaaa

SEQ ID NO: 216706 - DNA, 22 bp, Artificial Sequence
  Synthetic oligonucleotide; TTA chr2 60516763 60516784 60516768 60516763 -
tgtcctgcttgcttttttaaaa

SEQ ID NO: 216707 - DNA, 22 bp, Artificial Sequence
  Synthetic oligonucleotide; CTG chr2 60516756 60516777 60516761 60516756 -
cttgcttttttaaaaaccagtg

SEQ ID NO: 216708 - DNA, 22 bp, Artificial Sequence
  Synthetic oligonucleotide; CTT chr2 60516753 60516774 60516758 60516753 -
gcttttttaaaaaccagtgctt

SEQ ID NO: 216709 - DNA, 22 bp, Artificial Sequence
  Synthetic oligonucleotide; TTG chr2 60516752 60516773 60516757 60516752 -
cttttttaaaaaccagtgcttc

SEQ ID NO: 216710 - DNA, 22 bp, Artificial Sequence
  Synthetic oligonucleotide; CTT chr2 60516749 60516770 60516754 60516749 -
ttttaaaaaccagtgcttcatt

SEQ ID NO: 216711 - DNA, 22 bp, Artificial Sequence
  Synthetic oligonucleotide; TTT chr2 60516748 60516769 60516753 60516748 -
tttaaaaaccagtgcttcattg

SEQ ID NO: 216712 - DNA, 22 bp, Artificial Sequence
  Synthetic oligonucleotide; TTT chr2 60516747 60516768 60516752 60516747 -
ttaaaaaccagtgcttcattga

SEQ ID NO: 216713 - DNA, 22 bp, Artificial Sequence
  Synthetic oligonucleotide; TTT chr2 60516746 60516767 60516751 60516746 -
taaaaaccagtgcttcattgat

SEQ ID NO: 216714 - DNA, 22 bp, Artificial Sequence
  Synthetic oligonucleotide; TTT chr2 60516745 60516766 60516750 60516745 -
aaaaaccagtgcttcattgatg

SEQ ID NO: 216715 - DNA, 22 bp, Artificial Sequence
  Synthetic oligonucleotide; TTA chr2 60516744 60516765 60516749 60516744 -
aaaaccagtgcttcattgatga

SEQ ID NO: 216716 - DNA, 22 bp, Artificial Sequence
  Synthetic oligonucleotide; CTT chr2 60516731 60516752 60516736 60516731 -
cattgatgactcatgctcagct

SEQ ID NO: 216717 - DNA, 22 bp, Artificial Sequence
  Synthetic oligonucleotide; TTC chr2 60516730 60516751 60516735 60516730 -
attgatgactcatgctcagctt

SEQ ID NO: 216718 - DNA, 22 bp, Artificial Sequence
  Synthetic oligonucleotide; TTG chr2 60516726 60516747 60516731 60516726 -
atgactcatgctcagcttggtg

SEQ ID NO: 216719 - DNA, 22 bp, Artificial Sequence
  Synthetic oligonucleotide; CTC chr2 60516719 60516740 60516724 60516719 -
atgctcagcttggtgtccacta

SEQ ID NO: 216720 - DNA, 22 bp, Artificial Sequence
  Synthetic oligonucleotide; CTC chr2 60516713 60516734 60516718 60516713 -
agcttggtgtccactaggaatg

SEQ ID NO: 216721 - DNA, 22 bp, Artificial Sequence
  Synthetic oligonucleotide; CTT chr2 60516708 60516729 60516713 60516708 -
ggtgtccactaggaatgctaga

SEQ ID NO: 216722 - DNA, 22 bp, Artificial Sequence
  Synthetic oligonucleotide; TTG chr2 60516707 60516728 60516712 60516707 -
gtgtccactaggaatgctagat

SEQ ID NO: 216723 - DNA, 22 bp, Artificial Sequence
  Synthetic oligonucleotide; CTA chr2 60516697 60516718 60516702 60516697 -
ggaatgctagatctttgtcagc

SEQ ID NO: 216724 - DNA, 22 bp, Artificial Sequence
  Synthetic oligonucleotide; CTA chr2 60516688 60516709 60516693 60516688 -
gatctttgtcagccatctttga

SEQ ID NO: 216725 - DNA, 22 bp, Artificial Sequence
  Synthetic oligonucleotide; CTT chr2 60516682 60516703 60516687 60516682 -
tgtcagccatctttgagggcag

SEQ ID NO: 216726 - DNA, 22 bp, Artificial Sequence
  Synthetic oligonucleotide; TTT chr2 60516681 60516702 60516686 60516681 -
gtcagccatctttgagggcagt

SEQ ID NO: 216727 - DNA, 22 bp, Artificial Sequence
  Synthetic oligonucleotide; TTG chr2 60516680 60516701 60516685 60516680 -
tcagccatctttgagggcagtt

SEQ ID NO: 216728 - DNA, 22 bp, Artificial Sequence
  Synthetic oligonucleotide; CTT chr2 60516669 60516690 60516674 60516669 -
tgagggcagttaaactttcact

SEQ ID NO: 216729 - DNA, 22 bp, Artificial Sequence
  Synthetic oligonucleotide; TTT chr2 60516668 60516689 60516673 60516668 -
gagggcagttaaactttcactc

SEQ ID NO: 216730 - DNA, 22 bp, Artificial Sequence
  Synthetic oligonucleotide; TTG chr2 60516667 60516688 60516672 60516667 -
agggcagttaaactttcactcc

SEQ ID NO: 216731 - DNA, 22 bp, Artificial Sequence
  Synthetic oligonucleotide; TTA chr2 60516657 60516678 60516662 60516657 -
aactttcactcccagttgtcct

SEQ ID NO: 216732 - DNA, 22 bp, Artificial Sequence
  Synthetic oligonucleotide; CTT chr2 60516652 60516673 60516657 60516652 -
tcactcccagttgtcctgatgc

SEQ ID NO: 216733 - DNA, 22 bp, Artificial Sequence
  Synthetic oligonucleotide; TTT chr2 60516651 60516672 60516656 60516651 -
cactcccagttgtcctgatgcc

SEQ ID NO: 216734 - DNA, 22 bp, Artificial Sequence
  Synthetic oligonucleotide; TTC chr2 60516650 60516671 60516655 60516650 -
actcccagttgtcctgatgcca

SEQ ID NO: 216735 - DNA, 22 bp, Artificial Sequence
  Synthetic oligonucleotide; CTC chr2 60516646 60516667 60516651 60516646 -
ccagttgtcctgatgccacatt

SEQ ID NO: 216736 - DNA, 22 bp, Artificial Sequence
  Synthetic oligonucleotide; TTG chr2 60516639 60516660 60516644 60516639 -
tcctgatgccacatttctccca

SEQ ID NO: 216737 - DNA, 22 bp, Artificial Sequence
  Synthetic oligonucleotide; CTG chr2 60516634 60516655 60516639 60516634 -
atgccacatttctcccatccca

SEQ ID NO: 216738 - DNA, 22 bp, Artificial Sequence
  Synthetic oligonucleotide; TTT chr2 60516623 60516644 60516628 60516623 -
ctcccatcccaggtgcccctct

SEQ ID NO: 216739 - DNA, 22 bp, Artificial Sequence
  Synthetic oligonucleotide; TTC chr2 60516622 60516643 60516627 60516622 -
tcccatcccaggtgcccctctc

SEQ ID NO: 216740 - DNA, 22 bp, Artificial Sequence
  Synthetic oligonucleotide; CTC chr2 60516620 60516641 60516625 60516620 -
ccatcccaggtgcccctctctg

SEQ ID NO: 216741 - DNA, 22 bp, Artificial Sequence
  Synthetic oligonucleotide; CTC chr2 60516602 60516623 60516607 60516602 -
tctgtccttgtccatattgagc

SEQ ID NO: 216742 - DNA, 22 bp, Artificial Sequence
  Synthetic oligonucleotide; CTC chr2 60516600 60516621 60516605 60516600 -
tgtccttgtccatattgagctt

SEQ ID NO: 216743 - DNA, 22 bp, Artificial Sequence
  Synthetic oligonucleotide; CTG chr2 60516598 60516619 60516603 60516598 -
tccttgtccatattgagcttag

SEQ ID NO: 216744 - DNA, 22 bp, Artificial Sequence
  Synthetic oligonucleotide; CTT chr2 60516593 60516614 60516598 60516593 -
gtccatattgagcttagctctc

SEQ ID NO: 216745 - DNA, 22 bp, Artificial Sequence
  Synthetic oligonucleotide; TTG chr2 60516592 60516613 60516597 60516592 -
tccatattgagcttagctctcc

SEQ ID NO: 216746 - DNA, 22 bp, Artificial Sequence
  Synthetic oligonucleotide; TTG chr2 60516583 60516604 60516588 60516583 -
agcttagctctccactcctgac

SEQ ID NO: 216747 - DNA, 22 bp, Artificial Sequence
  Synthetic oligonucleotide; CTT chr2 60516578 60516599 60516583 60516578 -
agctctccactcctgacacgag

SEQ ID NO: 216748 - DNA, 22 bp, Artificial Sequence
  Synthetic oligonucleotide; TTA chr2 60516577 60516598 60516582 60516577 -
gctctccactcctgacacgagt

SEQ ID NO: 216749 - DNA, 22 bp, Artificial Sequence
  Synthetic oligonucleotide; CTC chr2 60516573 60516594 60516578 60516573 -
tccactcctgacacgagttccc

SEQ ID NO: 216750 - DNA, 22 bp, Artificial Sequence
  Synthetic oligonucleotide; CTC chr2 60516571 60516592 60516576 60516571 -
cactcctgacacgagttccctg

SEQ ID NO: 216751 - DNA, 22 bp, Artificial Sequence
  Synthetic oligonucleotide; CTC chr2 60516566 60516587 60516571 60516566 -
ctgacacgagttccctgacttc

SEQ ID NO: 216752 - DNA, 22 bp, Artificial Sequence
  Synthetic oligonucleotide; CTG chr2 60516563 60516584 60516568 60516563 -
acacgagttccctgacttcctc

SEQ ID NO: 216753 - DNA, 22 bp, Artificial Sequence
  Synthetic oligonucleotide; TTC chr2 60516553 60516574 60516558 60516553 -
cctgacttcctctccacttccc

SEQ ID NO: 216754 - DNA, 22 bp, Artificial Sequence
  Synthetic oligonucleotide; CTG chr2 60516549 60516570 60516554 60516549 -
acttcctctccacttccccgga

SEQ ID NO: 216755 - DNA, 22 bp, Artificial Sequence
  Synthetic oligonucleotide; CTT chr2 60516545 60516566 60516550 60516545 -
cctctccacttccccggatgac

SEQ ID NO: 216756 - DNA, 22 bp, Artificial Sequence
  Synthetic oligonucleotide; TTC chr2 60516544 60516565 60516549 60516544 -
ctctccacttccccggatgacg

SEQ ID NO: 216757 - DNA, 22 bp, Artificial Sequence
  Synthetic oligonucleotide; CTC chr2 60516541 60516562 60516546 60516541 -
tccacttccccggatgacggtg

SEQ ID NO: 216758 - DNA, 22 bp, Artificial Sequence
  Synthetic oligonucleotide; CTC chr2 60516539 60516560 60516544 60516539 -
cacttccccggatgacggtgag

SEQ ID NO: 216759 - DNA, 22 bp, Artificial Sequence
  Synthetic oligonucleotide; CTT chr2 60516534 60516555 60516539 60516534 -
ccccggatgacggtgagttacg

SEQ ID NO: 216760 - DNA, 22 bp, Artificial Sequence
  Synthetic oligonucleotide; TTC chr2 60516533 60516554 60516538 60516533 -
cccggatgacggtgagttacga

SEQ ID NO: 216761 - DNA, 22 bp, Artificial Sequence
  Synthetic oligonucleotide; TTA chr2 60516514 60516535 60516519 60516514 -
cgatcttgtctcctaaggtgcc

SEQ ID NO: 216762 - DNA, 22 bp, Artificial Sequence
  Synthetic oligonucleotide; CTT chr2 60516507 60516528 60516512 60516507 -
gtctcctaaggtgccccctccc

SEQ ID NO: 216763 - DNA, 22 bp, Artificial Sequence
  Synthetic oligonucleotide; TTG chr2 60516506 60516527 60516511 60516506 -
tctcctaaggtgccccctccct

SEQ ID NO: 216764 - DNA, 22 bp, Artificial Sequence
  Synthetic oligonucleotide; CTC chr2 60516502 60516523 60516507 60516502 -
ctaaggtgccccctccctcttg

SEQ ID NO: 216765 - DNA, 22 bp, Artificial Sequence
  Synthetic oligonucleotide; CTA chr2 60516499 60516520 60516504 60516499 -
aggtgccccctccctcttggct

SEQ ID NO: 216766 - DNA, 22 bp, Artificial Sequence
  Synthetic oligonucleotide; CTC chr2 60516487 60516508 60516492 60516487 -
cctcttggctcctctcccagtg

SEQ ID NO: 216767 - DNA, 22 bp, Artificial Sequence
  Synthetic oligonucleotide; CTC chr2 60516483 60516504 60516488 60516483 -
ttggctcctctcccagtgacga

SEQ ID NO: 216768 - DNA, 22 bp, Artificial Sequence
  Synthetic oligonucleotide; CTT chr2 60516481 60516502 60516486 60516481 -
ggctcctctcccagtgacgact

SEQ ID NO: 216769 - DNA, 22 bp, Artificial Sequence
  Synthetic oligonucleotide; TTG chr2 60516480 60516501 60516485 60516480 -
gctcctctcccagtgacgactt

SEQ ID NO: 216770 - DNA, 22 bp, Artificial Sequence
  Synthetic oligonucleotide; CTC chr2 60516476 60516497 60516481 60516476 -
ctctcccagtgacgacttcatg

SEQ ID NO: 216771 - DNA, 22 bp, Artificial Sequence
  Synthetic oligonucleotide; CTC chr2 60516473 60516494 60516478 60516473 -
tcccagtgacgacttcatggag

SEQ ID NO: 216772 - DNA, 22 bp, Artificial Sequence
  Synthetic oligonucleotide; CTC chr2 60516471 60516492 60516476 60516471 -
ccagtgacgacttcatggaggc

SEQ ID NO: 216773 - DNA, 22 bp, Artificial Sequence
  Synthetic oligonucleotide; CTT chr2 60516458 60516479 60516463 60516458 -
catggaggctgagaaatatagt

SEQ ID NO: 216774 - DNA, 22 bp, Artificial Sequence
  Synthetic oligonucleotide; TTC chr2 60516457 60516478 60516462 60516457 -
atggaggctgagaaatatagtg

SEQ ID NO: 216775 - DNA, 22 bp, Artificial Sequence
  Synthetic oligonucleotide; CTG chr2 60516447 60516468 60516452 60516447 -
agaaatatagtgagtggccttt

SEQ ID NO: 216776 - DNA, 22 bp, Artificial Sequence
  Synthetic oligonucleotide; CTT chr2 60516426 60516447 60516431 60516426 -
tcttgcctcacttactgctcgg

SEQ ID NO: 216777 - DNA, 22 bp, Artificial Sequence
  Synthetic oligonucleotide; TTT chr2 60516425 60516446 60516430 60516425 -
cttgcctcacttactgctcggt

SEQ ID NO: 216778 - DNA, 22 bp, Artificial Sequence
  Synthetic oligonucleotide; TTC chr2 60516424 60516445 60516429 60516424 -
ttgcctcacttactgctcggta

SEQ ID NO: 216779 - DNA, 22 bp, Artificial Sequence
  Synthetic oligonucleotide; CTT chr2 60516422 60516443 60516427 60516422 -
gcctcacttactgctcggtaag

SEQ ID NO: 216780 - DNA, 22 bp, Artificial Sequence
  Synthetic oligonucleotide; TTG chr2 60516421 60516442 60516426 60516421 -
cctcacttactgctcggtaagt

SEQ ID NO: 216781 - DNA, 22 bp, Artificial Sequence
  Synthetic oligonucleotide; CTC chr2 60516417 60516438 60516422 60516417 -
acttactgctcggtaagttagc

SEQ ID NO: 216782 - DNA, 22 bp, Artificial Sequence
  Synthetic oligonucleotide; CTT chr2 60516413 60516434 60516418 60516413 -
actgctcggtaagttagctcag

SEQ ID NO: 216783 - DNA, 22 bp, Artificial Sequence
  Synthetic oligonucleotide; TTA chr2 60516412 60516433 60516417 60516412 -
ctgctcggtaagttagctcagg

SEQ ID NO: 216784 - DNA, 22 bp, Artificial Sequence
  Synthetic oligonucleotide; CTG chr2 60516409 60516430 60516414 60516409 -
ctcggtaagttagctcaggggg

SEQ ID NO: 216785 - DNA, 22 bp, Artificial Sequence
  Synthetic oligonucleotide; CTC chr2 60516406 60516427 60516411 60516406 -
ggtaagttagctcagggggaga

SEQ ID NO: 216786 - DNA, 22 bp, Artificial Sequence
  Synthetic oligonucleotide; TTA chr2 60516397 60516418 60516402 60516397 -
gctcagggggagagctgttcat

SEQ ID NO: 216787 - DNA, 22 bp, Artificial Sequence
  Synthetic oligonucleotide; CTC chr2 60516393 60516414 60516398 60516393 -
agggggagagctgttcataact

SEQ ID NO: 216788 - DNA, 22 bp, Artificial Sequence
  Synthetic oligonucleotide; CTG chr2 60516380 60516401 60516385 60516380 -
ttcataactttgcactgacatc

SEQ ID NO: 216789 - DNA, 22 bp, Artificial Sequence
  Synthetic oligonucleotide; TTC chr2 60516377 60516398 60516382 60516377 -
ataactttgcactgacatctgg

SEQ ID NO: 216790 - DNA, 22 bp, Artificial Sequence
  Synthetic oligonucleotide; CTT chr2 60516370 60516391 60516375 60516370 -
tgcactgacatctggagaacaa

SEQ ID NO: 216791 - DNA, 22 bp, Artificial Sequence
  Synthetic oligonucleotide; TTT chr2 60516369 60516390 60516374 60516369 -
gcactgacatctggagaacaaa

SEQ ID NO: 216792 - DNA, 22 bp, Artificial Sequence
  Synthetic oligonucleotide; TTG chr2 60516368 60516389 60516373 60516368 -
cactgacatctggagaacaaag

SEQ ID NO: 216793 - DNA, 22 bp, Artificial Sequence
  Synthetic oligonucleotide; CTG chr2 60516363 60516384 60516368 60516363 -
acatctggagaacaaaggtttt

SEQ ID NO: 216794 - DNA, 22 bp, Artificial Sequence
  Synthetic oligonucleotide; CTG chr2 60516356 60516377 60516361 60516356 -
gagaacaaaggttttggaagag

SEQ ID NO: 216795 - DNA, 22 bp, Artificial Sequence
  Synthetic oligonucleotide; TTT chr2 60516342 60516363 60516347 60516342 -
tggaagagcggagcccagattc

SEQ ID NO: 216796 - DNA, 22 bp, Artificial Sequence
  Synthetic oligonucleotide; TTT chr2 60516341 60516362 60516346 60516341 -
ggaagagcggagcccagattcc

SEQ ID NO: 216797 - DNA, 22 bp, Artificial Sequence
  Synthetic oligonucleotide; TTG chr2 60516340 60516361 60516345 60516340 -
gaagagcggagcccagattccc

SEQ ID NO: 216798 - DNA, 22 bp, Artificial Sequence
  Synthetic oligonucleotide; TTC chr2 60516320 60516341 60516325 60516320 -
cctgtgagccagcagagccaag

SEQ ID NO: 216799 - DNA, 22 bp, Artificial Sequence
  Synthetic oligonucleotide; CTG chr2 60516316 60516337 60516321 60516316 -
tgagccagcagagccaagtctt

SEQ ID NO: 216800 - DNA, 22 bp, Artificial Sequence
  Synthetic oligonucleotide; CTT chr2 60516294 60516315 60516299 60516294 -
ttttgagtttccagcaaaacct

SEQ ID NO: 216801 - DNA, 22 bp, Artificial Sequence
  Synthetic oligonucleotide; TTT chr2 60516293 60516314 60516298 60516293 -
tttgagtttccagcaaaacctg

SEQ ID NO: 216802 - DNA, 22 bp, Artificial Sequence
  Synthetic oligonucleotide; TTT chr2 60516292 60516313 60516297 60516292 -
ttgagtttccagcaaaacctgt

SEQ ID NO: 216803 - DNA, 22 bp, Artificial Sequence
  Synthetic oligonucleotide; TTT chr2 60516291 60516312 60516296 60516291 -
tgagtttccagcaaaacctgtg

SEQ ID NO: 216804 - DNA, 22 bp, Artificial Sequence
  Synthetic oligonucleotide; TTT chr2 60516290 60516311 60516295 60516290 -
gagtttccagcaaaacctgtgt

SEQ ID NO: 216805 - DNA, 22 bp, Artificial Sequence
  Synthetic oligonucleotide; TTG chr2 60516289 60516310 60516294 60516289 -
agtttccagcaaaacctgtgtt

SEQ ID NO: 216806 - DNA, 22 bp, Artificial Sequence
  Synthetic oligonucleotide; TTT chr2 60516284 60516305 60516289 60516284 -
ccagcaaaacctgtgttttaat

SEQ ID NO: 216807 - DNA, 22 bp, Artificial Sequence
  Synthetic oligonucleotide; TTC chr2 60516283 60516304 60516288 60516283 -
cagcaaaacctgtgttttaata

SEQ ID NO: 216808 - DNA, 22 bp, Artificial Sequence
  Synthetic oligonucleotide; CTG chr2 60516271 60516292 60516276 60516271 -
tgttttaataataggagtgggt

SEQ ID NO: 216809 - DNA, 22 bp, Artificial Sequence
  Synthetic oligonucleotide; TTT chr2 60516266 60516287 60516271 60516266 -
taataataggagtgggtcattg

SEQ ID NO: 216810 - DNA, 22 bp, Artificial Sequence
  Synthetic oligonucleotide; TTT chr2 60516265 60516286 60516270 60516265 -
aataataggagtgggtcattgt

SEQ ID NO: 216811 - DNA, 22 bp, Artificial Sequence
  Synthetic oligonucleotide; TTA chr2 60516264 60516285 60516269 60516264 -
ataataggagtgggtcattgtg

SEQ ID NO: 216812 - DNA, 22 bp, Artificial Sequence
  Synthetic oligonucleotide; TTG chr2 60516244 60516265 60516249 60516244 -
tgtttaatagtacaacaaaacc

SEQ ID NO: 216813 - DNA, 22 bp, Artificial Sequence
  Synthetic oligonucleotide; TTT chr2 60516239 60516260 60516244 60516239 -
aatagtacaacaaaacctaagt

SEQ ID NO: 216814 - DNA, 22 bp, Artificial Sequence
  Synthetic oligonucleotide; TTA chr2 60516238 60516259 60516243 60516238 -
atagtacaacaaaacctaagtg

SEQ ID NO: 216815 - DNA, 22 bp, Artificial Sequence
  Synthetic oligonucleotide; CTA chr2 60516220 60516241 60516225 60516220 -
agtgcacataataagcacatct

SEQ ID NO: 216816 - DNA, 22 bp, Artificial Sequence
  Synthetic oligonucleotide; CTT chr2 60516197 60516218 60516202 60516197 -
ttctgtgtgctggggtgaggag

SEQ ID NO: 216817 - DNA, 22 bp, Artificial Sequence
  Synthetic oligonucleotide; TTT chr2 60516196 60516217 60516201 60516196 -
tctgtgtgctggggtgaggaga

SEQ ID NO: 216818 - DNA, 22 bp, Artificial Sequence
  Synthetic oligonucleotide; TTT chr2 60516195 60516216 60516200 60516195 -
ctgtgtgctggggtgaggagag

SEQ ID NO: 216819 - DNA, 22 bp, Artificial Sequence
  Synthetic oligonucleotide; TTC chr2 60516194 60516215 60516199 60516194 -
tgtgtgctggggtgaggagagg

SEQ ID NO: 216820 - DNA, 22 bp, Artificial Sequence
  Synthetic oligonucleotide; CTG chr2 60516192 60516213 60516197 60516192 -
tgtgctggggtgaggagaggtg

SEQ ID NO: 216821 - DNA, 22 bp, Artificial Sequence
  Synthetic oligonucleotide; CTG chr2 60516185 60516206 60516190 60516185 -
gggtgaggagaggtgacagtga

SEQ ID NO: 216822 - DNA, 22 bp, Artificial Sequence
  Synthetic oligonucleotide; TTA chr2 60516136 60516157 60516141 60516136 -
cagacatgggaaagcatcttag

SEQ ID NO: 216823 - DNA, 22 bp, Artificial Sequence
  Synthetic oligonucleotide; CTT chr2 60516116 60516137 60516121 60516116 -
agagcacccaaagctggcatga

SEQ ID NO: 216824 - DNA, 22 bp, Artificial Sequence
  Synthetic oligonucleotide; TTA chr2 60516115 60516136 60516120 60516115 -
gagcacccaaagctggcatgag

SEQ ID NO: 216825 - DNA, 22 bp, Artificial Sequence
  Synthetic oligonucleotide; CTG chr2 60516100 60516121 60516105 60516100 -
gcatgagtcatcacaggcttat

SEQ ID NO: 216826 - DNA, 22 bp, Artificial Sequence
  Synthetic oligonucleotide; CTT chr2 60516080 60516101 60516085 60516080 -
atggccacaaggctagattttc

SEQ ID NO: 216827 - DNA, 22 bp, Artificial Sequence
  Synthetic oligonucleotide; TTA chr2 60516079 60516100 60516084 60516079 -
tggccacaaggctagattttca

SEQ ID NO: 216828 - DNA, 22 bp, Artificial Sequence
  Synthetic oligonucleotide; CTA chr2 60516065 60516086 60516070 60516065 -
gattttcaatccctgcttccct

SEQ ID NO: 216829 - DNA, 22 bp, Artificial Sequence
  Synthetic oligonucleotide; TTT chr2 60516060 60516081 60516065 60516060 -
tcaatccctgcttccctttttc

SEQ ID NO: 216830 - DNA, 22 bp, Artificial Sequence
  Synthetic oligonucleotide; TTT chr2 60516059 60516080 60516064 60516059 -
caatccctgcttccctttttca

SEQ ID NO: 216831 - DNA, 22 bp, Artificial Sequence
  Synthetic oligonucleotide; TTC chr2 60516058 60516079 60516063 60516058 -
aatccctgcttccctttttcat

SEQ ID NO: 216832 - DNA, 22 bp, Artificial Sequence
  Synthetic oligonucleotide; CTG chr2 60516050 60516071 60516055 60516050 -
cttccctttttcataacccagt

SEQ ID NO: 216833 - DNA, 22 bp, Artificial Sequence
  Synthetic oligonucleotide; CTT chr2 60516047 60516068 60516052 60516047 -
ccctttttcataacccagttca

SEQ ID NO: 216834 - DNA, 22 bp, Artificial Sequence
  Synthetic oligonucleotide; TTC chr2 60516046 60516067 60516051 60516046 -
cctttttcataacccagttcaa

SEQ ID NO: 216835 - DNA, 22 bp, Artificial Sequence
  Synthetic oligonucleotide; CTT chr2 60516042 60516063 60516047 60516042 -
tttcataacccagttcaatgaa

SEQ ID NO: 216836 - DNA, 22 bp, Artificial Sequence
  Synthetic oligonucleotide; TTT chr2 60516041 60516062 60516046 60516041 -
ttcataacccagttcaatgaag

SEQ ID NO: 216837 - DNA, 22 bp, Artificial Sequence
  Synthetic oligonucleotide; TTT chr2 60516040 60516061 60516045 60516040 -
tcataacccagttcaatgaaga

SEQ ID NO: 216838 - DNA, 22 bp, Artificial Sequence
  Synthetic oligonucleotide; TTT chr2 60516039 60516060 60516044 60516039 -
cataacccagttcaatgaagac

SEQ ID NO: 216839 - DNA, 22 bp, Artificial Sequence
  Synthetic oligonucleotide; TTC chr2 60516038 60516059 60516043 60516038 -
ataacccagttcaatgaagaca

SEQ ID NO: 216840 - DNA, 22 bp, Artificial Sequence
  Synthetic oligonucleotide; TTC chr2 60516026 60516047 60516031 60516026 -
aatgaagacataattgaagtgg

SEQ ID NO: 216841 - DNA, 22 bp, Artificial Sequence
  Synthetic oligonucleotide; TTG chr2 60516010 60516031 60516015 60516010 -
aagtggtgagaagaggggccac

SEQ ID NO: 216842 - DNA, 22 bp, Artificial Sequence
  Synthetic oligonucleotide; CTT chr2 60515981 60516002 60515986 60515981 -
cagactccagggtatttgtatt

SEQ ID NO: 216843 - DNA, 22 bp, Artificial Sequence
  Synthetic oligonucleotide; TTC chr2 60515980 60516001 60515985 60515980 -
agactccagggtatttgtattc

SEQ ID NO: 216844 - DNA, 22 bp, Artificial Sequence
  Synthetic oligonucleotide; CTC chr2 60515974 60515995 60515979 60515974 -
cagggtatttgtattccaggac

SEQ ID NO: 216845 - DNA, 22 bp, Artificial Sequence
  Synthetic oligonucleotide; TTT chr2 60515964 60515985 60515969 60515964 -
gtattccaggacccctccgtgg

SEQ ID NO: 216846 - DNA, 22 bp, Artificial Sequence
  Synthetic oligonucleotide; TTG chr2 60515963 60515984 60515968 60515963 -
tattccaggacccctccgtggg

SEQ ID NO: 216847 - DNA, 22 bp, Artificial Sequence
  Synthetic oligonucleotide; TTC chr2 60515958 60515979 60515963 60515958 -
caggacccctccgtgggtgttg

SEQ ID NO: 216848 - DNA, 22 bp, Artificial Sequence
  Synthetic oligonucleotide; CTC chr2 60515947 60515968 60515952 60515947 -
cgtgggtgttggcccagcggtg

SEQ ID NO: 216849 - DNA, 22 bp, Artificial Sequence
  Synthetic oligonucleotide; TTG chr2 60515936 60515957 60515941 60515936 -
gcccagcggtgcccagagaata

SEQ ID NO: 216850 - DNA, 22 bp, Artificial Sequence
  Synthetic oligonucleotide; TTC chr2 60515911 60515932 60515916 60515911 -
ccttattggatctttctcgaat

SEQ ID NO: 216851 - DNA, 22 bp, Artificial Sequence
  Synthetic oligonucleotide; CTT chr2 60515907 60515928 60515912 60515907 -
attggatctttctcgaattgac

SEQ ID NO: 216852 - DNA, 22 bp, Artificial Sequence
  Synthetic oligonucleotide; TTA chr2 60515906 60515927 60515911 60515906 -
ttggatctttctcgaattgact

SEQ ID NO: 216853 - DNA, 22 bp, Artificial Sequence
  Synthetic oligonucleotide; TTG chr2 60515903 60515924 60515908 60515903 -
gatctttctcgaattgacttgt

SEQ ID NO: 216854 - DNA, 22 bp, Artificial Sequence
  Synthetic oligonucleotide; CTT chr2 60515897 60515918 60515902 60515897 -
tctcgaattgacttgttcactt

SEQ ID NO: 216855 - DNA, 22 bp, Artificial Sequence
  Synthetic oligonucleotide; TTT chr2 60515896 60515917 60515901 60515896 -
ctcgaattgacttgttcacttc

SEQ ID NO: 216856 - DNA, 22 bp, Artificial Sequence
  Synthetic oligonucleotide; TTC chr2 60515895 60515916 60515900 60515895 -
tcgaattgacttgttcacttcc

SEQ ID NO: 216857 - DNA, 22 bp, Artificial Sequence
  Synthetic oligonucleotide; CTC chr2 60515893 60515914 60515898 60515893 -
gaattgacttgttcacttcctg

SEQ ID NO: 216858 - DNA, 22 bp, Artificial Sequence
  Synthetic oligonucleotide; TTG chr2 60515887 60515908 60515892 60515887 -
acttgttcacttcctgttcagc

SEQ ID NO: 216859 - DNA, 22 bp, Artificial Sequence
  Synthetic oligonucleotide; CTT chr2 60515883 60515904 60515888 60515883 -
gttcacttcctgttcagcgcag

SEQ ID NO: 216860 - DNA, 22 bp, Artificial Sequence
  Synthetic oligonucleotide; TTG chr2 60515882 60515903 60515887 60515882 -
ttcacttcctgttcagcgcagc

SEQ ID NO: 216861 - DNA, 22 bp, Artificial Sequence
  Synthetic oligonucleotide; TTC chr2 60515879 60515900 60515884 60515879 -
acttcctgttcagcgcagcctg

SEQ ID NO: 216862 - DNA, 22 bp, Artificial Sequence
  Synthetic oligonucleotide; CTT chr2 60515875 60515896 60515880 60515875 -
cctgttcagcgcagcctggtgg

SEQ ID NO: 216863 - DNA, 22 bp, Artificial Sequence
  Synthetic oligonucleotide; TTC chr2 60515874 60515895 60515879 60515874 -
ctgttcagcgcagcctggtggt

SEQ ID NO: 216864 - DNA, 22 bp, Artificial Sequence
  Synthetic oligonucleotide; CTG chr2 60515871 60515892 60515876 60515871 -
ttcagcgcagcctggtggtgac

SEQ ID NO: 216865 - DNA, 22 bp, Artificial Sequence
  Synthetic oligonucleotide; TTC chr2 60515868 60515889 60515873 60515868 -
agcgcagcctggtggtgactcg

SEQ ID NO: 216866 - DNA, 22 bp, Artificial Sequence
  Synthetic oligonucleotide; CTG chr2 60515857 60515878 60515862 60515857 -
gtggtgactcggtaatccccac

SEQ ID NO: 216867 - DNA, 22 bp, Artificial Sequence
  Synthetic oligonucleotide; CTC chr2 60515847 60515868 60515852 60515847 -
ggtaatccccacagtaagacct

SEQ ID NO: 216868 - DNA, 22 bp, Artificial Sequence
  Synthetic oligonucleotide; CTC chr2 60515824 60515845 60515829 60515824 -
acagtgggttgagtggcctggg

SEQ ID NO: 216869 - DNA, 22 bp, Artificial Sequence
  Synthetic oligonucleotide; TTG chr2 60515813 60515834 60515818 60515813 -
agtggcctgggagctcaagtca

SEQ ID NO: 216870 - DNA, 22 bp, Artificial Sequence
  Synthetic oligonucleotide; CTG chr2 60515804 60515825 60515809 60515804 -
ggagctcaagtcaggggcagaa

SEQ ID NO: 216871 - DNA, 22 bp, Artificial Sequence
  Synthetic oligonucleotide; CTC chr2 60515797 60515818 60515802 60515797 -
aagtcaggggcagaaatgggga

SEQ ID NO: 216872 - DNA, 22 bp, Artificial Sequence
  Synthetic oligonucleotide; CTG chr2 60515770 60515791 60515775 60515770 -
gaaagttgggtgatcaagagtc

SEQ ID NO: 216873 - DNA, 22 bp, Artificial Sequence
  Synthetic oligonucleotide; TTG chr2 60515762 60515783 60515767 60515762 -
ggtgatcaagagtcatttggaa

SEQ ID NO: 216874 - DNA, 22 bp, Artificial Sequence
  Synthetic oligonucleotide; TTT chr2 60515744 60515765 60515749 60515744 -
ggaagcccccatgtctgtgtca

SEQ ID NO: 216875 - DNA, 22 bp, Artificial Sequence
  Synthetic oligonucleotide; TTG chr2 60515743 60515764 60515748 60515743 -
gaagcccccatgtctgtgtcag

SEQ ID NO: 216876 - DNA, 22 bp, Artificial Sequence
  Synthetic oligonucleotide; CTG chr2 60515727 60515748 60515732 60515727 -
tgtcagtccactcacatctctg

SEQ ID NO: 216877 - DNA, 22 bp, Artificial Sequence
  Synthetic oligonucleotide; CTC chr2 60515714 60515735 60515719 60515714 -
acatctctgtccgccacccacc

SEQ ID NO: 216878 - DNA, 22 bp, Artificial Sequence
  Synthetic oligonucleotide; CTC chr2 60515707 60515728 60515712 60515707 -
tgtccgccacccaccaccactt

SEQ ID NO: 216879 - DNA, 22 bp, Artificial Sequence
  Synthetic oligonucleotide; CTG chr2 60515705 60515726 60515710 60515705 -
tccgccacccaccaccactttc

SEQ ID NO: 216880 - DNA, 22 bp, Artificial Sequence
  Synthetic oligonucleotide; CTT chr2 60515685 60515706 60515690 60515685 -
tctccctgcctgaaagcactgg

SEQ ID NO: 216881 - DNA, 22 bp, Artificial Sequence
  Synthetic oligonucleotide; TTT chr2 60515684 60515705 60515689 60515684 -
ctccctgcctgaaagcactggg

SEQ ID NO: 216882 - DNA, 22 bp, Artificial Sequence
  Synthetic oligonucleotide; TTC chr2 60515683 60515704 60515688 60515683 -
tccctgcctgaaagcactgggc

SEQ ID NO: 216883 - DNA, 22 bp, Artificial Sequence
  Synthetic oligonucleotide; CTC chr2 60515681 60515702 60515686 60515681 -
cctgcctgaaagcactgggctg

SEQ ID NO: 216884 - DNA, 22 bp, Artificial Sequence
  Synthetic oligonucleotide; CTG chr2 60515677 60515698 60515682 60515677 -
cctgaaagcactgggctgtgtt

SEQ ID NO: 216885 - DNA, 22 bp, Artificial Sequence
  Synthetic oligonucleotide; CTG chr2 60515673 60515694 60515678 60515673 -
aaagcactgggctgtgtttcag

SEQ ID NO: 216886 - DNA, 22 bp, Artificial Sequence
  Synthetic oligonucleotide; CTG chr2 60515664 60515685 60515669 60515664 -
ggctgtgtttcagagaggtagc

SEQ ID NO: 216887 - DNA, 22 bp, Artificial Sequence
  Synthetic oligonucleotide; CTG chr2 60515659 60515680 60515664 60515659 -
tgtttcagagaggtagctgggt

SEQ ID NO: 216888 - DNA, 22 bp, Artificial Sequence
  Synthetic oligonucleotide; TTT chr2 60515654 60515675 60515659 60515654 -
cagagaggtagctgggtcccac

SEQ ID NO: 216889 - DNA, 22 bp, Artificial Sequence
  Synthetic oligonucleotide; TTC chr2 60515653 60515674 60515658 60515653 -
agagaggtagctgggtcccaca

SEQ ID NO: 216890 - DNA, 22 bp, Artificial Sequence
  Synthetic oligonucleotide; CTG chr2 60515640 60515661 60515645 60515640 -
ggtcccacagatatttatggag

SEQ ID NO: 216891 - DNA, 22 bp, Artificial Sequence
  Synthetic oligonucleotide; TTT chr2 60515624 60515645 60515629 60515624 -
atggagggcttgtttctgtatc

SEQ ID NO: 216892 - DNA, 22 bp, Artificial Sequence
  Synthetic oligonucleotide; TTA chr2 60515623 60515644 60515628 60515623 -
tggagggcttgtttctgtatct

SEQ ID NO: 216893 - DNA, 22 bp, Artificial Sequence
  Synthetic oligonucleotide; CTT chr2 60515613 60515634 60515618 60515613 -
gtttctgtatctccttctagtg

SEQ ID NO: 216894 - DNA, 22 bp, Artificial Sequence
  Synthetic oligonucleotide; TTG chr2 60515612 60515633 60515617 60515612 -
tttctgtatctccttctagtgg

SEQ ID NO: 216895 - DNA, 22 bp, Artificial Sequence
  Synthetic oligonucleotide; TTT chr2 60515609 60515630 60515614 60515609 -
ctgtatctccttctagtgggct

SEQ ID NO: 216896 - DNA, 22 bp, Artificial Sequence
  Synthetic oligonucleotide; TTC chr2 60515608 60515629 60515613 60515608 -
tgtatctccttctagtgggctg

SEQ ID NO: 216897 - DNA, 22 bp, Artificial Sequence
  Synthetic oligonucleotide; CTG chr2 60515606 60515627 60515611 60515606 -
tatctccttctagtgggctgga

SEQ ID NO: 216898 - DNA, 22 bp, Artificial Sequence
  Synthetic oligonucleotide; CTC chr2 60515600 60515621 60515605 60515600 -
cttctagtgggctggacctccc

SEQ ID NO: 216899 - DNA, 22 bp, Artificial Sequence
  Synthetic oligonucleotide; CTT chr2 60515597 60515618 60515602 60515597 -
ctagtgggctggacctccccag

SEQ ID NO: 216900 - DNA, 22 bp, Artificial Sequence
  Synthetic oligonucleotide; TTC chr2 60515596 60515617 60515601 60515596 -
tagtgggctggacctccccagg

SEQ ID NO: 216901 - DNA, 22 bp, Artificial Sequence
  Synthetic oligonucleotide; CTA chr2 60515594 60515615 60515599 60515594 -
gtgggctggacctccccaggcc

SEQ ID NO: 216902 - DNA, 22 bp, Artificial Sequence
  Synthetic oligonucleotide; CTG chr2 60515586 60515607 60515591 60515586 -
gacctccccaggccatttttct

SEQ ID NO: 216903 - DNA, 22 bp, Artificial Sequence
  Synthetic oligonucleotide; CTC chr2 60515580 60515601 60515585 60515580 -
cccaggccatttttctaggtaa

SEQ ID NO: 216904 - DNA, 22 bp, Artificial Sequence
  Synthetic oligonucleotide; TTT chr2 60515568 60515589 60515573 60515568 -
ttctaggtaactaggaaggcct

SEQ ID NO: 216905 - DNA, 22 bp, Artificial Sequence
  Synthetic oligonucleotide; TTT chr2 60515567 60515588 60515572 60515567 -
tctaggtaactaggaaggcctg

SEQ ID NO: 216906 - DNA, 22 bp, Artificial Sequence
  Synthetic oligonucleotide; TTT chr2 60515566 60515587 60515571 60515566 -
ctaggtaactaggaaggcctga

SEQ ID NO: 216907 - DNA, 22 bp, Artificial Sequence
  Synthetic oligonucleotide; TTC chr2 60515565 60515586 60515570 60515565 -
taggtaactaggaaggcctgac

SEQ ID NO: 216908 - DNA, 22 bp, Artificial Sequence
  Synthetic oligonucleotide; CTA chr2 60515563 60515584 60515568 60515563 -
ggtaactaggaaggcctgactc

SEQ ID NO: 216909 - DNA, 22 bp, Artificial Sequence
  Synthetic oligonucleotide; CTA chr2 60515555 60515576 60515560 60515555 -
ggaaggcctgactctgtcagca

SEQ ID NO: 216910 - DNA, 22 bp, Artificial Sequence
  Synthetic oligonucleotide; CTG chr2 60515545 60515566 60515550 60515545 -
actctgtcagcaacttggcttt

SEQ ID NO: 216911 - DNA, 22 bp, Artificial Sequence
  Synthetic oligonucleotide; CTC chr2 60515541 60515562 60515546 60515541 -
tgtcagcaacttggctttcttt

SEQ ID NO: 216912 - DNA, 22 bp, Artificial Sequence
  Synthetic oligonucleotide; CTG chr2 60515539 60515560 60515544 60515539 -
tcagcaacttggctttctttgg

SEQ ID NO: 216913 - DNA, 22 bp, Artificial Sequence
  Synthetic oligonucleotide; CTT chr2 60515529 60515550 60515534 60515529 -
ggctttctttggaggaggtgtc

SEQ ID NO: 216914 - DNA, 22 bp, Artificial Sequence
  Synthetic oligonucleotide; TTG chr2 60515528 60515549 60515533 60515528 -
gctttctttggaggaggtgtca

SEQ ID NO: 216915 - DNA, 22 bp, Artificial Sequence
  Synthetic oligonucleotide; CTT chr2 60515524 60515545 60515529 60515524 -
tctttggaggaggtgtcactct

SEQ ID NO: 216916 - DNA, 22 bp, Artificial Sequence
  Synthetic oligonucleotide; TTT chr2 60515523 60515544 60515528 60515523 -
ctttggaggaggtgtcactctg

SEQ ID NO: 216917 - DNA, 22 bp, Artificial Sequence
  Synthetic oligonucleotide; TTC chr2 60515522 60515543 60515527 60515522 -
tttggaggaggtgtcactctgg

SEQ ID NO: 216918 - DNA, 22 bp, Artificial Sequence
  Synthetic oligonucleotide; CTT chr2 60515520 60515541 60515525 60515520 -
tggaggaggtgtcactctggga

SEQ ID NO: 216919 - DNA, 22 bp, Artificial Sequence
  Synthetic oligonucleotide; TTT chr2 60515519 60515540 60515524 60515519 -
ggaggaggtgtcactctgggat

SEQ ID NO: 216920 - DNA, 22 bp, Artificial Sequence
  Synthetic oligonucleotide; TTG chr2 60515518 60515539 60515523 60515518 -
gaggaggtgtcactctgggatt

SEQ ID NO: 216921 - DNA, 22 bp, Artificial Sequence
  Synthetic oligonucleotide; CTC chr2 60515503 60515524 60515508 60515503 -
tgggattagttaaaaggggatc

SEQ ID NO: 216922 - DNA, 22 bp, Artificial Sequence
  Synthetic oligonucleotide; CTG chr2 60515501 60515522 60515506 60515501 -
ggattagttaaaaggggatcag

SEQ ID NO: 216923 - DNA, 22 bp, Artificial Sequence
  Synthetic oligonucleotide; TTA chr2 60515495 60515516 60515500 60515495 -
gttaaaaggggatcagtggtat

SEQ ID NO: 216924 - DNA, 22 bp, Artificial Sequence
  Synthetic oligonucleotide; TTA chr2 60515491 60515512 60515496 60515491 -
aaaggggatcagtggtattcac

SEQ ID NO: 216925 - DNA, 22 bp, Artificial Sequence
  Synthetic oligonucleotide; TTC chr2 60515471 60515492 60515476 60515471 -
acattggctcgtgggtgtattt

SEQ ID NO: 216926 - DNA, 22 bp, Artificial Sequence
  Synthetic oligonucleotide; TTG chr2 60515465 60515486 60515470 60515465 -
gctcgtgggtgtattttctcct

SEQ ID NO: 216927 - DNA, 22 bp, Artificial Sequence
  Synthetic oligonucleotide; CTC chr2 60515461 60515482 60515466 60515461 -
gtgggtgtattttctcctcctc

SEQ ID NO: 216928 - DNA, 22 bp, Artificial Sequence
  Synthetic oligonucleotide; TTT chr2 60515449 60515470 60515454 60515449 -
tctcctcctcaaattataacct

SEQ ID NO: 216929 - DNA, 22 bp, Artificial Sequence
  Synthetic oligonucleotide; TTT chr2 60515448 60515469 60515453 60515448 -
ctcctcctcaaattataacctt

SEQ ID NO: 216930 - DNA, 22 bp, Artificial Sequence
  Synthetic oligonucleotide; TTC chr2 60515447 60515468 60515452 60515447 -
tcctcctcaaattataaccttt

SEQ ID NO: 216931 - DNA, 22 bp, Artificial Sequence
  Synthetic oligonucleotide; CTC chr2 60515445 60515466 60515450 60515445 -
ctcctcaaattataaccttttg

SEQ ID NO: 216932 - DNA, 22 bp, Artificial Sequence
  Synthetic oligonucleotide; CTC chr2 60515442 60515463 60515447 60515442 -
ctcaaattataaccttttggag

SEQ ID NO: 216933 - DNA, 22 bp, Artificial Sequence
  Synthetic oligonucleotide; CTC chr2 60515439 60515460 60515444 60515439 -
aaattataaccttttggagggc

SEQ ID NO: 216934 - DNA, 22 bp, Artificial Sequence
  Synthetic oligonucleotide; TTA chr2 60515433 60515454 60515438 60515433 -
taaccttttggagggcaggagt

SEQ ID NO: 216935 - DNA, 22 bp, Artificial Sequence
  Synthetic oligonucleotide; CTT chr2 60515426 60515447 60515431 60515426 -
ttggagggcaggagtcatgttt

SEQ ID NO: 216936 - DNA, 22 bp, Artificial Sequence
  Synthetic oligonucleotide; TTT chr2 60515425 60515446 60515430 60515425 -
tggagggcaggagtcatgtttt

SEQ ID NO: 216937 - DNA, 22 bp, Artificial Sequence
  Synthetic oligonucleotide; TTT chr2 60515424 60515445 60515429 60515424 -
ggagggcaggagtcatgtttta

SEQ ID NO: 216938 - DNA, 22 bp, Artificial Sequence
  Synthetic oligonucleotide; TTG chr2 60515423 60515444 60515428 60515423 -
gagggcaggagtcatgttttat

SEQ ID NO: 216939 - DNA, 22 bp, Artificial Sequence
  Synthetic oligonucleotide; TTT chr2 60515404 60515425 60515409 60515404 -
tattttttgtgccttcttggtg

SEQ ID NO: 216940 - DNA, 22 bp, Artificial Sequence
  Synthetic oligonucleotide; TTT chr2 60515403 60515424 60515408 60515403 -
attttttgtgccttcttggtgc

SEQ ID NO: 216941 - DNA, 22 bp, Artificial Sequence
  Synthetic oligonucleotide; TTA chr2 60515402 60515423 60515407 60515402 -
ttttttgtgccttcttggtgcc

SEQ ID NO: 216942 - DNA, 22 bp, Artificial Sequence
  Synthetic oligonucleotide; TTT chr2 60515399 60515420 60515404 60515399 -
tttgtgccttcttggtgcctaa

SEQ ID NO: 216943 - DNA, 22 bp, Artificial Sequence
  Synthetic oligonucleotide; TTT chr2 60515398 60515419 60515403 60515398 -
ttgtgccttcttggtgcctaac

SEQ ID NO: 216944 - DNA, 22 bp, Artificial Sequence
  Synthetic oligonucleotide; TTT chr2 60515397 60515418 60515402 60515397 -
tgtgccttcttggtgcctaaca

SEQ ID NO: 216945 - DNA, 22 bp, Artificial Sequence
  Synthetic oligonucleotide; TTT chr2 60515396 60515417 60515401 60515396 -
gtgccttcttggtgcctaacat

SEQ ID NO: 216946 - DNA, 22 bp, Artificial Sequence
  Synthetic oligonucleotide; TTG chr2 60515395 60515416 60515400 60515395 -
tgccttcttggtgcctaacata

SEQ ID NO: 216947 - DNA, 22 bp, Artificial Sequence
  Synthetic oligonucleotide; CTT chr2 60515389 60515410 60515394 60515389 -
cttggtgcctaacataatgctg

SEQ ID NO: 216948 - DNA, 22 bp, Artificial Sequence
  Synthetic oligonucleotide; TTC chr2 60515388 60515409 60515393 60515388 -
ttggtgcctaacataatgctgg

SEQ ID NO: 216949 - DNA, 22 bp, Artificial Sequence
  Synthetic oligonucleotide; CTT chr2 60515386 60515407 60515391 60515386 -
ggtgcctaacataatgctggtt

SEQ ID NO: 216950 - DNA, 22 bp, Artificial Sequence
  Synthetic oligonucleotide; TTG chr2 60515385 60515406 60515390 60515385 -
gtgcctaacataatgctggttc

SEQ ID NO: 216951 - DNA, 22 bp, Artificial Sequence
  Synthetic oligonucleotide; CTA chr2 60515378 60515399 60515383 60515378 -
acataatgctggttcatatgta

SEQ ID NO: 216952 - DNA, 22 bp, Artificial Sequence
  Synthetic oligonucleotide; CTG chr2 60515367 60515388 60515372 60515367 -
gttcatatgtagtatttaatct

SEQ ID NO: 216953 - DNA, 22 bp, Artificial Sequence
  Synthetic oligonucleotide; TTC chr2 60515363 60515384 60515368 60515363 -
atatgtagtatttaatctgtac

SEQ ID NO: 216954 - DNA, 22 bp, Artificial Sequence
  Synthetic oligonucleotide; TTT chr2 60515350 60515371 60515355 60515350 -
aatctgtactttgctcacgctg

SEQ ID NO: 216955 - DNA, 22 bp, Artificial Sequence
  Synthetic oligonucleotide; TTA chr2 60515349 60515370 60515354 60515349 -
atctgtactttgctcacgctgc

SEQ ID NO: 216956 - DNA, 22 bp, Artificial Sequence
  Synthetic oligonucleotide; CTG chr2 60515344 60515365 60515349 60515344 -
tactttgctcacgctgcttgat

SEQ ID NO: 216957 - DNA, 22 bp, Artificial Sequence
  Synthetic oligonucleotide; CTT chr2 60515339 60515360 60515344 60515339 -
tgctcacgctgcttgattgaac

SEQ ID NO: 216958 - DNA, 22 bp, Artificial Sequence
  Synthetic oligonucleotide; TTT chr2 60515338 60515359 60515343 60515338 -
gctcacgctgcttgattgaaca

SEQ ID NO: 216959 - DNA, 22 bp, Artificial Sequence
  Synthetic oligonucleotide; TTG chr2 60515337 60515358 60515342 60515337 -
ctcacgctgcttgattgaacag

SEQ ID NO: 216960 - DNA, 22 bp, Artificial Sequence
  Synthetic oligonucleotide; CTC chr2 60515334 60515355 60515339 60515334 -
acgctgcttgattgaacagaga

SEQ ID NO: 216961 - DNA, 22 bp, Artificial Sequence
  Synthetic oligonucleotide; CTG chr2 60515328 60515349 60515333 60515328 -
cttgattgaacagagaaagacc

SEQ ID NO: 216962 - DNA, 22 bp, Artificial Sequence
  Synthetic oligonucleotide; CTT chr2 60515325 60515346 60515330 60515325 -
gattgaacagagaaagaccggg

SEQ ID NO: 216963 - DNA, 22 bp, Artificial Sequence
  Synthetic oligonucleotide; TTG chr2 60515324 60515345 60515329 60515324 -
attgaacagagaaagaccgggc

SEQ ID NO: 216964 - DNA, 22 bp, Artificial Sequence
  Synthetic oligonucleotide; TTG chr2 60515320 60515341 60515325 60515320 -
aacagagaaagaccgggctttg

SEQ ID NO: 216965 - DNA, 22 bp, Artificial Sequence
  Synthetic oligonucleotide; CTT chr2 60515300 60515321 60515305 60515300 -
tgaatggatccccagctccctg

SEQ ID NO: 216966 - DNA, 22 bp, Artificial Sequence
  Synthetic oligonucleotide; TTT chr2 60515299 60515320 60515304 60515299 -
gaatggatccccagctccctgt

SEQ ID NO: 216967 - DNA, 22 bp, Artificial Sequence
  Synthetic oligonucleotide; TTG chr2 60515298 60515319 60515303 60515298 -
aatggatccccagctccctgtc

SEQ ID NO: 216968 - DNA, 22 bp, Artificial Sequence
  Synthetic oligonucleotide; CTC chr2 60515282 60515303 60515287 60515282 -
cctgtccagggaaggtgtgagg

SEQ ID NO: 216969 - DNA, 22 bp, Artificial Sequence
  Synthetic oligonucleotide; CTG chr2 60515278 60515299 60515283 60515278 -
tccagggaaggtgtgaggctgg

SEQ ID NO: 216970 - DNA, 22 bp, Artificial Sequence
  Synthetic oligonucleotide; CTG chr2 60515257 60515278 60515262 60515257 -
ggcaagtttatttcccccttcc

SEQ ID NO: 216971 - DNA, 22 bp, Artificial Sequence
  Synthetic oligonucleotide; TTT chr2 60515248 60515269 60515253 60515248 -
atttcccccttcctccctgggg

SEQ ID NO: 216972 - DNA, 22 bp, Artificial Sequence
  Synthetic oligonucleotide; TTA chr2 60515247 60515268 60515252 60515247 -
tttcccccttcctccctgggga

SEQ ID NO: 216973 - DNA, 22 bp, Artificial Sequence
  Synthetic oligonucleotide; TTT chr2 60515244 60515265 60515249 60515244 -
cccccttcctccctggggagaa

SEQ ID NO: 216974 - DNA, 22 bp, Artificial Sequence
  Synthetic oligonucleotide; TTC chr2 60515243 60515264 60515248 60515243 -
ccccttcctccctggggagaaa

SEQ ID NO: 216975 - DNA, 22 bp, Artificial Sequence
  Synthetic oligonucleotide; CTT chr2 60515237 60515258 60515242 60515237 -
cctccctggggagaaagtgaaa

SEQ ID NO: 216976 - DNA, 22 bp, Artificial Sequence
  Synthetic oligonucleotide; TTC chr2 60515236 60515257 60515241 60515236 -
ctccctggggagaaagtgaaaa

SEQ ID NO: 216977 - DNA, 22 bp, Artificial Sequence
  Synthetic oligonucleotide; CTC chr2 60515233 60515254 60515238 60515233 -
cctggggagaaagtgaaaaagt

SEQ ID NO: 216978 - DNA, 22 bp, Artificial Sequence
  Synthetic oligonucleotide; CTG chr2 60515229 60515250 60515234 60515229 -
gggagaaagtgaaaaagtgaaa

SEQ ID NO: 216979 - DNA, 22 bp, Artificial Sequence
  Synthetic oligonucleotide; CTG chr2 60515201 60515222 60515206 60515201 -
gggttgggatagctggtggtgt

SEQ ID NO: 216980 - DNA, 22 bp, Artificial Sequence
  Synthetic oligonucleotide; TTG chr2 60515195 60515216 60515200 60515195 -
ggatagctggtggtgtctttgt

SEQ ID NO: 216981 - DNA, 22 bp, Artificial Sequence
  Synthetic oligonucleotide; CTG chr2 60515186 60515207 60515191 60515186 -
gtggtgtctttgtggctttcac

SEQ ID NO: 216982 - DNA, 22 bp, Artificial Sequence
  Synthetic oligonucleotide; CTT chr2 60515176 60515197 60515181 60515176 -
tgtggctttcaccccatggtca

SEQ ID NO: 216983 - DNA, 22 bp, Artificial Sequence
  Synthetic oligonucleotide; TTT chr2 60515175 60515196 60515180 60515175 -
gtggctttcaccccatggtcaa

SEQ ID NO: 216984 - DNA, 22 bp, Artificial Sequence
  Synthetic oligonucleotide; TTG chr2 60515174 60515195 60515179 60515174 -
tggctttcaccccatggtcaag

SEQ ID NO: 216985 - DNA, 22 bp, Artificial Sequence
  Synthetic oligonucleotide; CTT chr2 60515168 60515189 60515173 60515168 -
tcaccccatggtcaagcagtga

SEQ ID NO: 216986 - DNA, 22 bp, Artificial Sequence
  Synthetic oligonucleotide; TTT chr2 60515167 60515188 60515172 60515167 -
caccccatggtcaagcagtgaa

SEQ ID NO: 216987 - DNA, 22 bp, Artificial Sequence
  Synthetic oligonucleotide; TTC chr2 60515166 60515187 60515171 60515166 -
accccatggtcaagcagtgaac

SEQ ID NO: 216988 - DNA, 22 bp, Artificial Sequence
  Synthetic oligonucleotide; CTC chr2 60515142 60515163 60515147 60515142 -
tgcttgcagattctgtctcgct

SEQ ID NO: 216989 - DNA, 22 bp, Artificial Sequence
  Synthetic oligonucleotide; CTG chr2 60515140 60515161 60515145 60515140 -
cttgcagattctgtctcgctca

SEQ ID NO: 216990 - DNA, 22 bp, Artificial Sequence
  Synthetic oligonucleotide; CTT chr2 60515137 60515158 60515142 60515137 -
gcagattctgtctcgctcacct

SEQ ID NO: 216991 - DNA, 22 bp, Artificial Sequence
  Synthetic oligonucleotide; TTG chr2 60515136 60515157 60515141 60515136 -
cagattctgtctcgctcacctg

SEQ ID NO: 216992 - DNA, 22 bp, Artificial Sequence
  Synthetic oligonucleotide; TTC chr2 60515129 60515150 60515134 60515129 -
tgtctcgctcacctggaagcca

SEQ ID NO: 216993 - DNA, 22 bp, Artificial Sequence
  Synthetic oligonucleotide; CTG chr2 60515127 60515148 60515132 60515127 -
tctcgctcacctggaagccagt

SEQ ID NO: 216994 - DNA, 22 bp, Artificial Sequence
  Synthetic oligonucleotide; CTC chr2 60515123 60515144 60515128 60515123 -
gctcacctggaagccagtgttg

SEQ ID NO: 216995 - DNA, 22 bp, Artificial Sequence
  Synthetic oligonucleotide; CTC chr2 60515119 60515140 60515124 60515119 -
acctggaagccagtgttgggga

SEQ ID NO: 216996 - DNA, 22 bp, Artificial Sequence
  Synthetic oligonucleotide; CTG chr2 60515114 60515135 60515119 60515114 -
gaagccagtgttggggaaggag

SEQ ID NO: 216997 - DNA, 22 bp, Artificial Sequence
  Synthetic oligonucleotide; TTG chr2 60515101 60515122 60515106 60515101 -
gggaaggagcacgtgggggagg

SEQ ID NO: 216998 - DNA, 22 bp, Artificial Sequence
  Synthetic oligonucleotide; CTT chr2 60515073 60515094 60515078 60515073 -
aggtctgggcaacactttggag

SEQ ID NO: 216999 - DNA, 22 bp, Artificial Sequence
  Synthetic oligonucleotide; TTA chr2 60515072 60515093 60515077 60515072 -
ggtctgggcaacactttggagt

SEQ ID NO: 217000 - DNA, 22 bp, Artificial Sequence
  Synthetic oligonucleotide; CTG chr2 60515066 60515087 60515071 60515066 -
ggcaacactttggagttagggg

SEQ ID NO: 217001 - DNA, 22 bp, Artificial Sequence
  Synthetic oligonucleotide; CTT chr2 60515056 60515077 60515061 60515056 -
tggagttagggggtcccctgga

SEQ ID NO: 217002 - DNA, 22 bp, Artificial Sequence
  Synthetic oligonucleotide; TTT chr2 60515055 60515076 60515060 60515055 -
ggagttagggggtcccctggag

SEQ ID NO: 217003 - DNA, 22 bp, Artificial Sequence
  Synthetic oligonucleotide; TTG chr2 60515054 60515075 60515059 60515054 -
gagttagggggtcccctggagg

SEQ ID NO: 217004 - DNA, 22 bp, Artificial Sequence
  Synthetic oligonucleotide; TTA chr2 60515048 60515069 60515053 60515048 -
gggggtcccctggaggtgtggg

SEQ ID NO: 217005 - DNA, 22 bp, Artificial Sequence
  Synthetic oligonucleotide; CTG chr2 60515036 60515057 60515041 60515036 -
gaggtgtgggaagctggtagtg

SEQ ID NO: 217006 - DNA, 22 bp, Artificial Sequence
  Synthetic oligonucleotide; CTG chr2 60515020 60515041 60515025 60515020 -
gtagtggcattctggaaacaag

SEQ ID NO: 217007 - DNA, 22 bp, Artificial Sequence
  Synthetic oligonucleotide; TTC chr2 60515008 60515029 60515013 60515008 -
tggaaacaagctagagcctgtc

SEQ ID NO: 217008 - DNA, 22 bp, Artificial Sequence
  Synthetic oligonucleotide; CTG chr2 60515006 60515027 60515011 60515006 -
gaaacaagctagagcctgtctc

SEQ ID NO: 217009 - DNA, 22 bp, Artificial Sequence
  Synthetic oligonucleotide; CTA chr2 60514995 60515016 60515000 60514995 -
gagcctgtctcaccagagggag

SEQ ID NO: 217010 - DNA, 22 bp, Artificial Sequence
  Synthetic oligonucleotide; CTG chr2 60514988 60515009 60514993 60514988 -
tctcaccagagggagaacggct

SEQ ID NO: 217011 - DNA, 22 bp, Artificial Sequence
  Synthetic oligonucleotide; CTC chr2 60514984 60515005 60514989 60514984 -
accagagggagaacggctgagt

SEQ ID NO: 217012 - DNA, 22 bp, Artificial Sequence
  Synthetic oligonucleotide; CTG chr2 60514965 60514986 60514970 60514965 -
agttcggaagggactggggcct

SEQ ID NO: 217013 - DNA, 22 bp, Artificial Sequence
  Synthetic oligonucleotide; TTC chr2 60514960 60514981 60514965 60514960 -
ggaagggactggggcctgcttt

SEQ ID NO: 217014 - DNA, 22 bp, Artificial Sequence
  Synthetic oligonucleotide; CTG chr2 60514949 60514970 60514954 60514949 -
gggcctgctttcctttgggtgg

SEQ ID NO: 217015 - DNA, 22 bp, Artificial Sequence
  Synthetic oligonucleotide; CTG chr2 60514942 60514963 60514947 60514942 -
ctttcctttgggtggctttgac

SEQ ID NO: 217016 - DNA, 22 bp, Artificial Sequence
  Synthetic oligonucleotide; CTT chr2 60514939 60514960 60514944 60514939 -
tcctttgggtggctttgactgg

SEQ ID NO: 217017 - DNA, 22 bp, Artificial Sequence
  Synthetic oligonucleotide; TTT chr2 60514938 60514959 60514943 60514938 -
cctttgggtggctttgactggc

SEQ ID NO: 217018 - DNA, 22 bp, Artificial Sequence
  Synthetic oligonucleotide; TTC chr2 60514937 60514958 60514942 60514937 -
ctttgggtggctttgactggct

SEQ ID NO: 217019 - DNA, 22 bp, Artificial Sequence
  Synthetic oligonucleotide; CTT chr2 60514934 60514955 60514939 60514934 -
tgggtggctttgactggctctt

SEQ ID NO: 217020 - DNA, 22 bp, Artificial Sequence
  Synthetic oligonucleotide; TTT chr2 60514933 60514954 60514938 60514933 -
gggtggctttgactggctcttg

SEQ ID NO: 217021 - DNA, 22 bp, Artificial Sequence
  Synthetic oligonucleotide; TTG chr2 60514932 60514953 60514937 60514932 -
ggtggctttgactggctcttgg

SEQ ID NO: 217022 - DNA, 22 bp, Artificial Sequence
  Synthetic oligonucleotide; CTT chr2 60514924 60514945 60514929 60514924 -
tgactggctcttggatgagttt

SEQ ID NO: 217023 - DNA, 22 bp, Artificial Sequence
  Synthetic oligonucleotide; TTT chr2 60514923 60514944 60514928 60514923 -
gactggctcttggatgagttta

SEQ ID NO: 217024 - DNA, 22 bp, Artificial Sequence
  Synthetic oligonucleotide; TTG chr2 60514922 60514943 60514927 60514922 -
actggctcttggatgagtttaa

SEQ ID NO: 217025 - DNA, 22 bp, Artificial Sequence
  Synthetic oligonucleotide; CTG chr2 60514918 60514939 60514923 60514918 -
gctcttggatgagtttaaaagg

SEQ ID NO: 217026 - DNA, 22 bp, Artificial Sequence
  Synthetic oligonucleotide; CTC chr2 60514914 60514935 60514919 60514914 -
ttggatgagtttaaaaggtgat

SEQ ID NO: 217027 - DNA, 22 bp, Artificial Sequence
  Synthetic oligonucleotide; CTT chr2 60514912 60514933 60514917 60514912 -
ggatgagtttaaaaggtgattc

SEQ ID NO: 217028 - DNA, 22 bp, Artificial Sequence
  Synthetic oligonucleotide; TTG chr2 60514911 60514932 60514916 60514911 -
gatgagtttaaaaggtgattct

SEQ ID NO: 217029 - DNA, 22 bp, Artificial Sequence
  Synthetic oligonucleotide; TTT chr2 60514902 60514923 60514907 60514902 -
aaaaggtgattctctctctctc

SEQ ID NO: 217030 - DNA, 22 bp, Artificial Sequence
  Synthetic oligonucleotide; TTA chr2 60514901 60514922 60514906 60514901 -
aaaggtgattctctctctctct

SEQ ID NO: 217031 - DNA, 22 bp, Artificial Sequence
  Synthetic oligonucleotide; TTC chr2 60514890 60514911 60514895 60514890 -
tctctctctctctgtctctctt

SEQ ID NO: 217032 - DNA, 22 bp, Artificial Sequence
  Synthetic oligonucleotide; CTC chr2 60514888 60514909 60514893 60514888 -
tctctctctctgtctctctttt

SEQ ID NO: 217033 - DNA, 22 bp, Artificial Sequence
  Synthetic oligonucleotide; CTC chr2 60514886 60514907 60514891 60514886 -
tctctctctgtctctcttttct

SEQ ID NO: 217034 - DNA, 22 bp, Artificial Sequence
  Synthetic oligonucleotide; CTC chr2 60514884 60514905 60514889 60514884 -
tctctctgtctctcttttcttt

SEQ ID NO: 217035 - DNA, 22 bp, Artificial Sequence
  Synthetic oligonucleotide; CTC chr2 60514882 60514903 60514887 60514882 -
tctctgtctctcttttcttttt

SEQ ID NO: 217036 - DNA, 22 bp, Artificial Sequence
  Synthetic oligonucleotide; CTC chr2 60514880 60514901 60514885 60514880 -
tctgtctctcttttcttttttt

SEQ ID NO: 217037 - DNA, 22 bp, Artificial Sequence
  Synthetic oligonucleotide; CTC chr2 60514878 60514899 60514883 60514878 -
tgtctctcttttcttttttttt

SEQ ID NO: 217038 - DNA, 22 bp, Artificial Sequence
  Synthetic oligonucleotide; CTG chr2 60514876 60514897 60514881 60514876 -
tctctcttttcttttttttttt

SEQ ID NO: 217039 - DNA, 22 bp, Artificial Sequence
  Synthetic oligonucleotide; CTC chr2 60514872 60514893 60514877 60514872 -
tcttttctttttttttttttct

SEQ ID NO: 217040 - DNA, 22 bp, Artificial Sequence
  Synthetic oligonucleotide; CTC chr2 60514870 60514891 60514875 60514870 -
ttttctttttttttttttcttt

SEQ ID NO: 217041 - DNA, 22 bp, Artificial Sequence
  Synthetic oligonucleotide; CTT chr2 60514868 60514889 60514873 60514868 -
ttctttttttttttttcttttt

SEQ ID NO: 217042 - DNA, 22 bp, Artificial Sequence
  Synthetic oligonucleotide; TTT chr2 60514867 60514888 60514872 60514867 -
tctttttttttttttctttttt

SEQ ID NO: 217043 - DNA, 22 bp, Artificial Sequence
  Synthetic oligonucleotide; TTT chr2 60514866 60514887 60514871 60514866 -
ctttttttttttttcttttttc

SEQ ID NO: 217044 - DNA, 22 bp, Artificial Sequence
  Synthetic oligonucleotide; TTC chr2 60514865 60514886 60514870 60514865 -
tttttttttttttcttttttct

SEQ ID NO: 217045 - DNA, 22 bp, Artificial Sequence
  Synthetic oligonucleotide; CTT chr2 60514863 60514884 60514868 60514863 -
tttttttttttcttttttctgt

SEQ ID NO: 217046 - DNA, 22 bp, Artificial Sequence
  Synthetic oligonucleotide; TTT chr2 60514862 60514883 60514867 60514862 -
ttttttttttcttttttctgtt

SEQ ID NO: 217047 - DNA, 22 bp, Artificial Sequence
  Synthetic oligonucleotide; TTT chr2 60514861 60514882 60514866 60514861 -
tttttttttcttttttctgttt

SEQ ID NO: 217048 - DNA, 22 bp, Artificial Sequence
  Synthetic oligonucleotide; TTT chr2 60514860 60514881 60514865 60514860 -
ttttttttcttttttctgtttt

SEQ ID NO: 217049 - DNA, 22 bp, Artificial Sequence
  Synthetic oligonucleotide; TTT chr2 60514859 60514880 60514864 60514859 -
tttttttcttttttctgtttta

SEQ ID NO: 217050 - DNA, 22 bp, Artificial Sequence
  Synthetic oligonucleotide; TTT chr2 60514858 60514879 60514863 60514858 -
ttttttcttttttctgttttag

SEQ ID NO: 217051 - DNA, 22 bp, Artificial Sequence
  Synthetic oligonucleotide; TTT chr2 60514857 60514878 60514862 60514857 -
tttttcttttttctgttttagt

SEQ ID NO: 217052 - DNA, 22 bp, Artificial Sequence
  Synthetic oligonucleotide; TTT chr2 60514856 60514877 60514861 60514856 -
ttttcttttttctgttttagtg

SEQ ID NO: 217053 - DNA, 22 bp, Artificial Sequence
  Synthetic oligonucleotide; TTT chr2 60514855 60514876 60514860 60514855 -
tttcttttttctgttttagtgt

SEQ ID NO: 217054 - DNA, 22 bp, Artificial Sequence
  Synthetic oligonucleotide; TTT chr2 60514854 60514875 60514859 60514854 -
ttcttttttctgttttagtgta

SEQ ID NO: 217055 - DNA, 22 bp, Artificial Sequence
  Synthetic oligonucleotide; TTT chr2 60514853 60514874 60514858 60514853 -
tcttttttctgttttagtgtat

SEQ ID NO: 217056 - DNA, 22 bp, Artificial Sequence
  Synthetic oligonucleotide; TTT chr2 60514852 60514873 60514857 60514852 -
cttttttctgttttagtgtatg

SEQ ID NO: 217057 - DNA, 22 bp, Artificial Sequence
  Synthetic oligonucleotide; TTC chr2 60514851 60514872 60514856 60514851 -
ttttttctgttttagtgtatgt

SEQ ID NO: 217058 - DNA, 22 bp, Artificial Sequence
  Synthetic oligonucleotide; CTT chr2 60514849 60514870 60514854 60514849 -
ttttctgttttagtgtatgtgt

SEQ ID NO: 217059 - DNA, 22 bp, Artificial Sequence
  Synthetic oligonucleotide; TTT chr2 60514848 60514869 60514853 60514848 -
tttctgttttagtgtatgtgta

SEQ ID NO: 217060 - DNA, 22 bp, Artificial Sequence
  Synthetic oligonucleotide; TTT chr2 60514847 60514868 60514852 60514847 -
ttctgttttagtgtatgtgtat

SEQ ID NO: 217061 - DNA, 22 bp, Artificial Sequence
  Synthetic oligonucleotide; TTT chr2 60514846 60514867 60514851 60514846 -
tctgttttagtgtatgtgtatg

SEQ ID NO: 217062 - DNA, 22 bp, Artificial Sequence
  Synthetic oligonucleotide; TTT chr2 60514845 60514866 60514850 60514845 -
ctgttttagtgtatgtgtatgc

SEQ ID NO: 217063 - DNA, 22 bp, Artificial Sequence
  Synthetic oligonucleotide; TTC chr2 60514844 60514865 60514849 60514844 -
tgttttagtgtatgtgtatgca

SEQ ID NO: 217064 - DNA, 22 bp, Artificial Sequence
  Synthetic oligonucleotide; CTG chr2 60514842 60514863 60514847 60514842 -
ttttagtgtatgtgtatgcaag

SEQ ID NO: 217065 - DNA, 22 bp, Artificial Sequence
  Synthetic oligonucleotide; TTT chr2 60514839 60514860 60514844 60514839 -
tagtgtatgtgtatgcaagacc

SEQ ID NO: 217066 - DNA, 22 bp, Artificial Sequence
  Synthetic oligonucleotide; TTT chr2 60514838 60514859 60514843 60514838 -
agtgtatgtgtatgcaagacct

SEQ ID NO: 217067 - DNA, 22 bp, Artificial Sequence
  Synthetic oligonucleotide; TTA chr2 60514837 60514858 60514842 60514837 -
gtgtatgtgtatgcaagacctt

SEQ ID NO: 217068 - DNA, 22 bp, Artificial Sequence
  Synthetic oligonucleotide; CTT chr2 60514815 60514836 60514820 60514815 -
tgatatttgagtagggaaatcc

SEQ ID NO: 217069 - DNA, 22 bp, Artificial Sequence
  Synthetic oligonucleotide; TTT chr2 60514814 60514835 60514819 60514814 -
gatatttgagtagggaaatcct

SEQ ID NO: 217070 - DNA, 22 bp, Artificial Sequence
  Synthetic oligonucleotide; TTG chr2 60514813 60514834 60514818 60514813 -
atatttgagtagggaaatcctc

SEQ ID NO: 217071 - DNA, 22 bp, Artificial Sequence
  Synthetic oligonucleotide; TTT chr2 60514807 60514828 60514812 60514807 -
gagtagggaaatcctctcttat

SEQ ID NO: 217072 - DNA, 22 bp, Artificial Sequence
  Synthetic oligonucleotide; TTG chr2 60514806 60514827 60514811 60514806 -
agtagggaaatcctctcttatc

SEQ ID NO: 217073 - DNA, 22 bp, Artificial Sequence
  Synthetic oligonucleotide; CTC chr2 60514791 60514812 60514796 60514791 -
tcttatcaatggaattcacagc

SEQ ID NO: 217074 - DNA, 22 bp, Artificial Sequence
  Synthetic oligonucleotide; CTC chr2 60514789 60514810 60514794 60514789 -
ttatcaatggaattcacagcct

SEQ ID NO: 217075 - DNA, 22 bp, Artificial Sequence
  Synthetic oligonucleotide; CTT chr2 60514787 60514808 60514792 60514787 -
atcaatggaattcacagcctct

SEQ ID NO: 217076 - DNA, 22 bp, Artificial Sequence
  Synthetic oligonucleotide; TTA chr2 60514786 60514807 60514791 60514786 -
tcaatggaattcacagcctctt

SEQ ID NO: 217077 - DNA, 22 bp, Artificial Sequence
  Synthetic oligonucleotide; TTC chr2 60514774 60514795 60514779 60514774 -
acagcctcttatggtgccttac

SEQ ID NO: 217078 - DNA, 22 bp, Artificial Sequence
  Synthetic oligonucleotide; CTC chr2 60514766 60514787 60514771 60514766 -
ttatggtgccttaccctttcat

SEQ ID NO: 217079 - DNA, 22 bp, Artificial Sequence
  Synthetic oligonucleotide; CTT chr2 60514764 60514785 60514769 60514764 -
atggtgccttaccctttcattg

SEQ ID NO: 217080 - DNA, 22 bp, Artificial Sequence
  Synthetic oligonucleotide; TTA chr2 60514763 60514784 60514768 60514763 -
tggtgccttaccctttcattgt

SEQ ID NO: 217081 - DNA, 22 bp, Artificial Sequence
  Synthetic oligonucleotide; CTT chr2 60514754 60514775 60514759 60514754 -
accctttcattgtgttgtaaag

SEQ ID NO: 217082 - DNA, 22 bp, Artificial Sequence
  Synthetic oligonucleotide; TTA chr2 60514753 60514774 60514758 60514753 -
ccctttcattgtgttgtaaaga

SEQ ID NO: 217083 - DNA, 22 bp, Artificial Sequence
  Synthetic oligonucleotide; CTT chr2 60514748 60514769 60514753 60514748 -
tcattgtgttgtaaagacagtc

SEQ ID NO: 217084 - DNA, 22 bp, Artificial Sequence
  Synthetic oligonucleotide; TTT chr2 60514747 60514768 60514752 60514747 -
cattgtgttgtaaagacagtca

SEQ ID NO: 217085 - DNA, 22 bp, Artificial Sequence
  Synthetic oligonucleotide; TTC chr2 60514746 60514767 60514751 60514746 -
attgtgttgtaaagacagtcag

SEQ ID NO: 217086 - DNA, 22 bp, Artificial Sequence
  Synthetic oligonucleotide; TTG chr2 60514742 60514763 60514747 60514742 -
tgttgtaaagacagtcagacca

SEQ ID NO: 217087 - DNA, 22 bp, Artificial Sequence
  Synthetic oligonucleotide; TTG chr2 60514737 60514758 60514742 60514737 -
taaagacagtcagaccaactag

SEQ ID NO: 217088 - DNA, 22 bp, Artificial Sequence
  Synthetic oligonucleotide; CTA chr2 60514716 60514737 60514721 60514716 -
gatttatttgcacaactctgat

SEQ ID NO: 217089 - DNA, 22 bp, Artificial Sequence
  Synthetic oligonucleotide; TTT chr2 60514711 60514732 60514716 60514711 -
atttgcacaactctgatttttt

SEQ ID NO: 217090 - DNA, 22 bp, Artificial Sequence
  Synthetic oligonucleotide; TTA chr2 60514710 60514731 60514715 60514710 -
tttgcacaactctgattttttt

SEQ ID NO: 217091 - DNA, 22 bp, Artificial Sequence
  Synthetic oligonucleotide; TTT chr2 60514707 60514728 60514712 60514707 -
gcacaactctgatttttttcct

SEQ ID NO: 217092 - DNA, 22 bp, Artificial Sequence
  Synthetic oligonucleotide; TTG chr2 60514706 60514727 60514711 60514706 -
cacaactctgatttttttccta

SEQ ID NO: 217093 - DNA, 22 bp, Artificial Sequence
  Synthetic oligonucleotide; CTC chr2 60514698 60514719 60514703 60514698 -
tgatttttttcctaagaaactc

SEQ ID NO: 217094 - DNA, 22 bp, Artificial Sequence
  Synthetic oligonucleotide; CTG chr2 60514696 60514717 60514701 60514696 -
atttttttcctaagaaactccc

SEQ ID NO: 217095 - DNA, 22 bp, Artificial Sequence
  Synthetic oligonucleotide; TTT chr2 60514692 60514713 60514697 60514692 -
ttttcctaagaaactcccccac

SEQ ID NO: 217096 - DNA, 22 bp, Artificial Sequence
  Synthetic oligonucleotide; TTT chr2 60514691 60514712 60514696 60514691 -
tttcctaagaaactcccccacc

SEQ ID NO: 217097 - DNA, 22 bp, Artificial Sequence
  Synthetic oligonucleotide; TTT chr2 60514690 60514711 60514695 60514690 -
ttcctaagaaactcccccaccc

SEQ ID NO: 217098 - DNA, 22 bp, Artificial Sequence
  Synthetic oligonucleotide; TTT chr2 60514689 60514710 60514694 60514689 -
tcctaagaaactcccccaccca

SEQ ID NO: 217099 - DNA, 22 bp, Artificial Sequence
  Synthetic oligonucleotide; TTT chr2 60514688 60514709 60514693 60514688 -
cctaagaaactcccccacccaa

SEQ ID NO: 217100 - DNA, 22 bp, Artificial Sequence
  Synthetic oligonucleotide; TTC chr2 60514687 60514708 60514692 60514687 -
ctaagaaactcccccacccaat

SEQ ID NO: 217101 - DNA, 22 bp, Artificial Sequence
  Synthetic oligonucleotide; CTA chr2 60514684 60514705 60514689 60514684 -
agaaactcccccacccaattta

SEQ ID NO: 217102 - DNA, 22 bp, Artificial Sequence
  Synthetic oligonucleotide; CTC chr2 60514676 60514697 60514681 60514676 -
ccccacccaatttaattttttt

SEQ ID NO: 217103 - DNA, 22 bp, Artificial Sequence
  Synthetic oligonucleotide; TTT chr2 60514663 60514684 60514668 60514663 -
aatttttttttttttttgagat

SEQ ID NO: 217104 - DNA, 22 bp, Artificial Sequence
  Synthetic oligonucleotide; TTA chr2 60514662 60514683 60514667 60514662 -
atttttttttttttttgagatg

SEQ ID NO: 217105 - DNA, 22 bp, Artificial Sequence
  Synthetic oligonucleotide; TTT chr2 60514658 60514679 60514663 60514658 -
ttttttttttttgagatggagt

SEQ ID NO: 217106 - DNA, 22 bp, Artificial Sequence
  Synthetic oligonucleotide; TTT chr2 60514657 60514678 60514662 60514657 -
tttttttttttgagatggagtc

SEQ ID NO: 217107 - DNA, 22 bp, Artificial Sequence
  Synthetic oligonucleotide; TTT chr2 60514656 60514677 60514661 60514656 -
ttttttttttgagatggagtct

SEQ ID NO: 217108 - DNA, 22 bp, Artificial Sequence
  Synthetic oligonucleotide; TTT chr2 60514655 60514676 60514660 60514655 -
tttttttttgagatggagtctc

SEQ ID NO: 217109 - DNA, 22 bp, Artificial Sequence
  Synthetic oligonucleotide; TTT chr2 60514654 60514675 60514659 60514654 -
ttttttttgagatggagtctcg

SEQ ID NO: 217110 - DNA, 22 bp, Artificial Sequence
  Synthetic oligonucleotide; TTT chr2 60514653 60514674 60514658 60514653 -
tttttttgagatggagtctcgc

SEQ ID NO: 217111 - DNA, 22 bp, Artificial Sequence
  Synthetic oligonucleotide; TTT chr2 60514652 60514673 60514657 60514652 -
ttttttgagatggagtctcgct

SEQ ID NO: 217112 - DNA, 22 bp, Artificial Sequence
  Synthetic oligonucleotide; TTT chr2 60514651 60514672 60514656 60514651 -
tttttgagatggagtctcgctc

SEQ ID NO: 217113 - DNA, 22 bp, Artificial Sequence
  Synthetic oligonucleotide; TTT chr2 60514650 60514671 60514655 60514650 -
ttttgagatggagtctcgctct

SEQ ID NO: 217114 - DNA, 22 bp, Artificial Sequence
  Synthetic oligonucleotide; TTT chr2 60514649 60514670 60514654 60514649 -
tttgagatggagtctcgctctg

SEQ ID NO: 217115 - DNA, 22 bp, Artificial Sequence
  Synthetic oligonucleotide; TTT chr2 60514648 60514669 60514653 60514648 -
ttgagatggagtctcgctctgt

SEQ ID NO: 217116 - DNA, 22 bp, Artificial Sequence
  Synthetic oligonucleotide; TTT chr2 60514647 60514668 60514652 60514647 -
tgagatggagtctcgctctgtc

SEQ ID NO: 217117 - DNA, 22 bp, Artificial Sequence
  Synthetic oligonucleotide; TTT chr2 60514646 60514667 60514651 60514646 -
gagatggagtctcgctctgtcg

SEQ ID NO: 217118 - DNA, 22 bp, Artificial Sequence
  Synthetic oligonucleotide; TTG chr2 60514645 60514666 60514650 60514645 -
agatggagtctcgctctgtcgc

SEQ ID NO: 217119 - DNA, 22 bp, Artificial Sequence
  Synthetic oligonucleotide; CTC chr2 60514633 60514654 60514638 60514633 -
gctctgtcgcccaggctggagt

SEQ ID NO: 217120 - DNA, 22 bp, Artificial Sequence
  Synthetic oligonucleotide; CTC chr2 60514629 60514650 60514634 60514629 -
tgtcgcccaggctggagtgcag

SEQ ID NO: 217121 - DNA, 22 bp, Artificial Sequence
  Synthetic oligonucleotide; CTG chr2 60514627 60514648 60514632 60514627 -
tcgcccaggctggagtgcagtg

SEQ ID NO: 217122 - DNA, 22 bp, Artificial Sequence
  Synthetic oligonucleotide; CTG chr2 60514615 60514636 60514620 60514615 -
gagtgcagtgctacgatctcgg

SEQ ID NO: 217123 - DNA, 22 bp, Artificial Sequence
  Synthetic oligonucleotide; CTA chr2 60514602 60514623 60514607 60514602 -
cgatctcggctcattgcagcct

SEQ ID NO: 217124 - DNA, 22 bp, Artificial Sequence
  Synthetic oligonucleotide; CTC chr2 60514595 60514616 60514600 60514595 -
ggctcattgcagcctccgcctc

SEQ ID NO: 217125 - DNA, 22 bp, Artificial Sequence
  Synthetic oligonucleotide; CTC chr2 60514590 60514611 60514595 60514590 -
attgcagcctccgcctcccagg

SEQ ID NO: 217126 - DNA, 22 bp, Artificial Sequence
  Synthetic oligonucleotide; TTG chr2 60514586 60514607 60514591 60514586 -
cagcctccgcctcccaggttca

SEQ ID NO: 217127 - DNA, 22 bp, Artificial Sequence
  Synthetic oligonucleotide; CTC chr2 60514579 60514600 60514584 60514579 -
cgcctcccaggttcaagtgatt

SEQ ID NO: 217128 - DNA, 22 bp, Artificial Sequence
  Synthetic oligonucleotide; CTC chr2 60514573 60514594 60514578 60514573 -
ccaggttcaagtgattctcctg

SEQ ID NO: 217129 - DNA, 22 bp, Artificial Sequence
  Synthetic oligonucleotide; TTC chr2 60514565 60514586 60514570 60514565 -
aagtgattctcctgcctcagcc

SEQ ID NO: 217130 - DNA, 22 bp, Artificial Sequence
  Synthetic oligonucleotide; TTC chr2 60514556 60514577 60514561 60514556 -
tcctgcctcagcctcccaagta

SEQ ID NO: 217131 - DNA, 22 bp, Artificial Sequence
  Synthetic oligonucleotide; CTC chr2 60514554 60514575 60514559 60514554 -
ctgcctcagcctcccaagtagc

SEQ ID NO: 217132 - DNA, 22 bp, Artificial Sequence
  Synthetic oligonucleotide; CTG chr2 60514551 60514572 60514556 60514551 -
cctcagcctcccaagtagctgg

SEQ ID NO: 217133 - DNA, 22 bp, Artificial Sequence
  Synthetic oligonucleotide; CTC chr2 60514547 60514568 60514552 60514547 -
agcctcccaagtagctgggatt

SEQ ID NO: 217134 - DNA, 22 bp, Artificial Sequence
  Synthetic oligonucleotide; CTC chr2 60514541 60514562 60514546 60514541 -
ccaagtagctgggattataggt

SEQ ID NO: 217135 - DNA, 22 bp, Artificial Sequence
  Synthetic oligonucleotide; CTG chr2 60514530 60514551 60514535 60514530 -
ggattataggtgcatgccatca

SEQ ID NO: 217136 - DNA, 22 bp, Artificial Sequence
  Synthetic oligonucleotide; TTA chr2 60514524 60514545 60514529 60514524 -
taggtgcatgccatcacacctg

SEQ ID NO: 217137 - DNA, 22 bp, Artificial Sequence
  Synthetic oligonucleotide; CTG chr2 60514502 60514523 60514507 60514502 -
gctgattttttttttttttttt

SEQ ID NO: 217138 - DNA, 22 bp, Artificial Sequence
  Synthetic oligonucleotide; CTG chr2 60514498 60514519 60514503 60514498 -
attttttttttttttttttttt

SEQ ID NO: 217139 - DNA, 22 bp, Artificial Sequence
  Synthetic oligonucleotide; TTT chr2 60514494 60514515 60514499 60514494 -
ttttttttttttttttttttaa

SEQ ID NO: 217140 - DNA, 22 bp, Artificial Sequence
  Synthetic oligonucleotide; TTT chr2 60514493 60514514 60514498 60514493 -
tttttttttttttttttttaag

SEQ ID NO: 217141 - DNA, 22 bp, Artificial Sequence
  Synthetic oligonucleotide; TTT chr2 60514492 60514513 60514497 60514492 -
ttttttttttttttttttaagt

SEQ ID NO: 217142 - DNA, 22 bp, Artificial Sequence
  Synthetic oligonucleotide; TTT chr2 60514491 60514512 60514496 60514491 -
tttttttttttttttttaagta

SEQ ID NO: 217143 - DNA, 22 bp, Artificial Sequence
  Synthetic oligonucleotide; TTT chr2 60514490 60514511 60514495 60514490 -
ttttttttttttttttaagtag

SEQ ID NO: 217144 - DNA, 22 bp, Artificial Sequence
  Synthetic oligonucleotide; TTT chr2 60514489 60514510 60514494 60514489 -
tttttttttttttttaagtaga

SEQ ID NO: 217145 - DNA, 22 bp, Artificial Sequence
  Synthetic oligonucleotide; TTT chr2 60514488 60514509 60514493 60514488 -
ttttttttttttttaagtagag

SEQ ID NO: 217146 - DNA, 22 bp, Artificial Sequence
  Synthetic oligonucleotide; TTT chr2 60514487 60514508 60514492 60514487 -
tttttttttttttaagtagaga

SEQ ID NO: 217147 - DNA, 22 bp, Artificial Sequence
  Synthetic oligonucleotide; TTT chr2 60514486 60514507 60514491 60514486 -
ttttttttttttaagtagagat

SEQ ID NO: 217148 - DNA, 22 bp, Artificial Sequence
  Synthetic oligonucleotide; TTT chr2 60514485 60514506 60514490 60514485 -
tttttttttttaagtagagatg

SEQ ID NO: 217149 - DNA, 22 bp, Artificial Sequence
  Synthetic oligonucleotide; TTT chr2 60514484 60514505 60514489 60514484 -
ttttttttttaagtagagatgg

SEQ ID NO: 217150 - DNA, 22 bp, Artificial Sequence
  Synthetic oligonucleotide; TTT chr2 60514483 60514504 60514488 60514483 -
tttttttttaagtagagatggg

SEQ ID NO: 217151 - DNA, 22 bp, Artificial Sequence
  Synthetic oligonucleotide; TTT chr2 60514482 60514503 60514487 60514482 -
ttttttttaagtagagatgggg

SEQ ID NO: 217152 - DNA, 22 bp, Artificial Sequence
  Synthetic oligonucleotide; TTT chr2 60514481 60514502 60514486 60514481 -
tttttttaagtagagatggggt

SEQ ID NO: 217153 - DNA, 22 bp, Artificial Sequence
  Synthetic oligonucleotide; TTT chr2 60514480 60514501 60514485 60514480 -
ttttttaagtagagatggggtt

SEQ ID NO: 217154 - DNA, 22 bp, Artificial Sequence
  Synthetic oligonucleotide; TTT chr2 60514479 60514500 60514484 60514479 -
tttttaagtagagatggggttt

SEQ ID NO: 217155 - DNA, 22 bp, Artificial Sequence
  Synthetic oligonucleotide; TTT chr2 60514478 60514499 60514483 60514478 -
ttttaagtagagatggggtttc

SEQ ID NO: 217156 - DNA, 22 bp, Artificial Sequence
  Synthetic oligonucleotide; TTT chr2 60514477 60514498 60514482 60514477 -
tttaagtagagatggggtttca

SEQ ID NO: 217157 - DNA, 22 bp, Artificial Sequence
  Synthetic oligonucleotide; TTT chr2 60514476 60514497 60514481 60514476 -
ttaagtagagatggggtttcac

SEQ ID NO: 217158 - DNA, 22 bp, Artificial Sequence
  Synthetic oligonucleotide; TTT chr2 60514475 60514496 60514480 60514475 -
taagtagagatggggtttcacc

SEQ ID NO: 217159 - DNA, 22 bp, Artificial Sequence
  Synthetic oligonucleotide; TTT chr2 60514474 60514495 60514479 60514474 -
aagtagagatggggtttcacca

SEQ ID NO: 217160 - DNA, 22 bp, Artificial Sequence
  Synthetic oligonucleotide; TTA chr2 60514473 60514494 60514478 60514473 -
agtagagatggggtttcaccat

SEQ ID NO: 217161 - DNA, 22 bp, Artificial Sequence
  Synthetic oligonucleotide; TTT chr2 60514457 60514478 60514462 60514457 -
caccatgttggctaggctggtc

SEQ ID NO: 217162 - DNA, 22 bp, Artificial Sequence
  Synthetic oligonucleotide; TTC chr2 60514456 60514477 60514461 60514456 -
accatgttggctaggctggtct

SEQ ID NO: 217163 - DNA, 22 bp, Artificial Sequence
  Synthetic oligonucleotide; TTG chr2 60514447 60514468 60514452 60514447 -
gctaggctggtcttgaactcct

SEQ ID NO: 217164 - DNA, 22 bp, Artificial Sequence
  Synthetic oligonucleotide; CTA chr2 60514443 60514464 60514448 60514443 -
ggctggtcttgaactcctgacc

SEQ ID NO: 217165 - DNA, 22 bp, Artificial Sequence
  Synthetic oligonucleotide; CTG chr2 60514438 60514459 60514443 60514438 -
gtcttgaactcctgacctcagg

SEQ ID NO: 217166 - DNA, 22 bp, Artificial Sequence
  Synthetic oligonucleotide; CTT chr2 60514433 60514454 60514438 60514433 -
gaactcctgacctcaggtgacc

SEQ ID NO: 217167 - DNA, 22 bp, Artificial Sequence
  Synthetic oligonucleotide; TTG chr2 60514432 60514453 60514437 60514432 -
aactcctgacctcaggtgaccc

SEQ ID NO: 217168 - DNA, 22 bp, Artificial Sequence
  Synthetic oligonucleotide; CTC chr2 60514427 60514448 60514432 60514427 -
ctgacctcaggtgacccacacg

SEQ ID NO: 217169 - DNA, 22 bp, Artificial Sequence
  Synthetic oligonucleotide; CTG chr2 60514424 60514445 60514429 60514424 -
acctcaggtgacccacacgcct

SEQ ID NO: 217170 - DNA, 22 bp, Artificial Sequence
  Synthetic oligonucleotide; CTC chr2 60514419 60514440 60514424 60514419 -
aggtgacccacacgcctcggcc

SEQ ID NO: 217171 - DNA, 22 bp, Artificial Sequence
  Synthetic oligonucleotide; CTC chr2 60514401 60514422 60514406 60514401 -
ggcctcccaaaatgctgagatt

SEQ ID NO: 217172 - DNA, 22 bp, Artificial Sequence
  Synthetic oligonucleotide; CTC chr2 60514395 60514416 60514400 60514395 -
ccaaaatgctgagattacaggt

SEQ ID NO: 217173 - DNA, 22 bp, Artificial Sequence
  Synthetic oligonucleotide; CTG chr2 60514384 60514405 60514389 60514384 -
agattacaggtgtgagccaccg

SEQ ID NO: 217174 - DNA, 22 bp, Artificial Sequence
  Synthetic oligonucleotide; TTA chr2 60514378 60514399 60514383 60514378 -
caggtgtgagccaccgcacctg

SEQ ID NO: 217175 - DNA, 22 bp, Artificial Sequence
  Synthetic oligonucleotide; CTG chr2 60514356 60514377 60514361 60514356 -
gctatttaattctattttcaga

SEQ ID NO: 217176 - DNA, 22 bp, Artificial Sequence
  Synthetic oligonucleotide; CTA chr2 60514352 60514373 60514357 60514352 -
tttaattctattttcagatggc

SEQ ID NO: 217177 - DNA, 22 bp, Artificial Sequence
  Synthetic oligonucleotide; TTT chr2 60514349 60514370 60514354 60514349 -
aattctattttcagatggcttg

SEQ ID NO: 217178 - DNA, 22 bp, Artificial Sequence
  Synthetic oligonucleotide; TTA chr2 60514348 60514369 60514353 60514348 -
attctattttcagatggcttgt

SEQ ID NO: 217179 - DNA, 22 bp, Artificial Sequence
  Synthetic oligonucleotide; TTC chr2 60514344 60514365 60514349 60514344 -
tattttcagatggcttgttctc

SEQ ID NO: 217180 - DNA, 22 bp, Artificial Sequence
  Synthetic oligonucleotide; CTA chr2 60514342 60514363 60514347 60514342 -
ttttcagatggcttgttctcca

SEQ ID NO: 217181 - DNA, 22 bp, Artificial Sequence
  Synthetic oligonucleotide; TTT chr2 60514339 60514360 60514344 60514339 -
tcagatggcttgttctccaagt

SEQ ID NO: 217182 - DNA, 22 bp, Artificial Sequence
  Synthetic oligonucleotide; TTT chr2 60514338 60514359 60514343 60514338 -
cagatggcttgttctccaagtc

SEQ ID NO: 217183 - DNA, 22 bp, Artificial Sequence
  Synthetic oligonucleotide; TTC chr2 60514337 60514358 60514342 60514337 -
agatggcttgttctccaagtct

SEQ ID NO: 217184 - DNA, 22 bp, Artificial Sequence
  Synthetic oligonucleotide; CTT chr2 60514328 60514349 60514333 60514328 -
gttctccaagtcttgggactgc

SEQ ID NO: 217185 - DNA, 22 bp, Artificial Sequence
  Synthetic oligonucleotide; TTG chr2 60514327 60514348 60514332 60514327 -
ttctccaagtcttgggactgcc

SEQ ID NO: 217186 - DNA, 22 bp, Artificial Sequence
  Synthetic oligonucleotide; TTC chr2 60514324 60514345 60514329 60514324 -
tccaagtcttgggactgcccag

SEQ ID NO: 217187 - DNA, 22 bp, Artificial Sequence
  Synthetic oligonucleotide; CTC chr2 60514322 60514343 60514327 60514322 -
caagtcttgggactgcccagaa

SEQ ID NO: 217188 - DNA, 22 bp, Artificial Sequence
  Synthetic oligonucleotide; CTT chr2 60514314 60514335 60514319 60514314 -
gggactgcccagaaatgggttg

SEQ ID NO: 217189 - DNA, 22 bp, Artificial Sequence
  Synthetic oligonucleotide; TTG chr2 60514313 60514334 60514318 60514313 -
ggactgcccagaaatgggttgc

SEQ ID NO: 217190 - DNA, 22 bp, Artificial Sequence
  Synthetic oligonucleotide; CTG chr2 60514307 60514328 60514312 60514307 -
cccagaaatgggttgcctggta

SEQ ID NO: 217191 - DNA, 22 bp, Artificial Sequence
  Synthetic oligonucleotide; TTG chr2 60514292 60514313 60514297 60514292 -
cctggtagggctcatggctcag

SEQ ID NO: 217192 - DNA, 22 bp, Artificial Sequence
  Synthetic oligonucleotide; CTG chr2 60514288 60514309 60514293 60514288 -
gtagggctcatggctcagcact

SEQ ID NO: 217193 - DNA, 22 bp, Artificial Sequence
  Synthetic oligonucleotide; CTC chr2 60514279 60514300 60514284 60514279 -
atggctcagcactgcgatccca

SEQ ID NO: 217194 - DNA, 22 bp, Artificial Sequence
  Synthetic oligonucleotide; CTC chr2 60514272 60514293 60514277 60514272 -
agcactgcgatcccaccagtgg

SEQ ID NO: 217195 - DNA, 22 bp, Artificial Sequence
  Synthetic oligonucleotide; CTG chr2 60514265 60514286 60514270 60514265 -
cgatcccaccagtggccggggt

SEQ ID NO: 217196 - DNA, 22 bp, Artificial Sequence
  Synthetic oligonucleotide; TTC chr2 60514239 60514260 60514244 60514239 -
cttagccttctagttcagttgt

SEQ ID NO: 217197 - DNA, 22 bp, Artificial Sequence
  Synthetic oligonucleotide; CTT chr2 60514236 60514257 60514241 60514236 -
agccttctagttcagttgtggc

SEQ ID NO: 217198 - DNA, 22 bp, Artificial Sequence
  Synthetic oligonucleotide; TTA chr2 60514235 60514256 60514240 60514235 -
gccttctagttcagttgtggcc

SEQ ID NO: 217199 - DNA, 22 bp, Artificial Sequence
  Synthetic oligonucleotide; CTT chr2 60514230 60514251 60514235 60514230 -
ctagttcagttgtggcccttct

SEQ ID NO: 217200 - DNA, 22 bp, Artificial Sequence
  Synthetic oligonucleotide; TTC chr2 60514229 60514250 60514234 60514229 -
tagttcagttgtggcccttctg

SEQ ID NO: 217201 - DNA, 22 bp, Artificial Sequence
  Synthetic oligonucleotide; CTA chr2 60514227 60514248 60514232 60514227 -
gttcagttgtggcccttctggg

SEQ ID NO: 217202 - DNA, 22 bp, Artificial Sequence
  Synthetic oligonucleotide; TTC chr2 60514223 60514244 60514228 60514223 -
agttgtggcccttctgggcttc

SEQ ID NO: 217203 - DNA, 22 bp, Artificial Sequence
  Synthetic oligonucleotide; TTG chr2 60514218 60514239 60514223 60514218 -
tggcccttctgggcttcctttg

SEQ ID NO: 217204 - DNA, 22 bp, Artificial Sequence
  Synthetic oligonucleotide; CTT chr2 60514210 60514231 60514215 60514210 -
ctgggcttcctttgctaccagt

SEQ ID NO: 217205 - DNA, 22 bp, Artificial Sequence
  Synthetic oligonucleotide; TTC chr2 60514209 60514230 60514214 60514209 -
tgggcttcctttgctaccagtt

SEQ ID NO: 217206 - DNA, 22 bp, Artificial Sequence
  Synthetic oligonucleotide; CTG chr2 60514207 60514228 60514212 60514207 -
ggcttcctttgctaccagtttc

SEQ ID NO: 217207 - DNA, 22 bp, Artificial Sequence
  Synthetic oligonucleotide; CTT chr2 60514202 60514223 60514207 60514202 -
cctttgctaccagtttccacca

SEQ ID NO: 217208 - DNA, 22 bp, Artificial Sequence
  Synthetic oligonucleotide; TTC chr2 60514201 60514222 60514206 60514201 -
ctttgctaccagtttccaccac

SEQ ID NO: 217209 - DNA, 22 bp, Artificial Sequence
  Synthetic oligonucleotide; CTT chr2 60514198 60514219 60514203 60514198 -
tgctaccagtttccaccacatg

SEQ ID NO: 217210 - DNA, 22 bp, Artificial Sequence
  Synthetic oligonucleotide; TTT chr2 60514197 60514218 60514202 60514197 -
gctaccagtttccaccacatgg

SEQ ID NO: 217211 - DNA, 22 bp, Artificial Sequence
  Synthetic oligonucleotide; TTG chr2 60514196 60514217 60514201 60514196 -
ctaccagtttccaccacatggc

SEQ ID NO: 217212 - DNA, 22 bp, Artificial Sequence
  Synthetic oligonucleotide; CTA chr2 60514193 60514214 60514198 60514193 -
ccagtttccaccacatggctgg

SEQ ID NO: 217213 - DNA, 22 bp, Artificial Sequence
  Synthetic oligonucleotide; TTT chr2 60514186 60514207 60514191 60514186 -
ccaccacatggctggaggtagc

SEQ ID NO: 217214 - DNA, 22 bp, Artificial Sequence
  Synthetic oligonucleotide; TTC chr2 60514185 60514206 60514190 60514185 -
caccacatggctggaggtagcc

SEQ ID NO: 217215 - DNA, 22 bp, Artificial Sequence
  Synthetic oligonucleotide; CTG chr2 60514172 60514193 60514177 60514172 -
gaggtagcccagcctggaagcc

SEQ ID NO: 217216 - DNA, 22 bp, Artificial Sequence
  Synthetic oligonucleotide; CTG chr2 60514156 60514177 60514161 60514156 -
gaagcctctcagagctccagcc

SEQ ID NO: 217217 - DNA, 22 bp, Artificial Sequence
  Synthetic oligonucleotide; CTC chr2 60514148 60514169 60514153 60514148 -
tcagagctccagcctggaagcc

SEQ ID NO: 217218 - DNA, 22 bp, Artificial Sequence
  Synthetic oligonucleotide; CTC chr2 60514146 60514167 60514151 60514146 -
agagctccagcctggaagcctc

SEQ ID NO: 217219 - DNA, 22 bp, Artificial Sequence
  Synthetic oligonucleotide; CTC chr2 60514139 60514160 60514144 60514139 -
cagcctggaagcctctcagaga

SEQ ID NO: 217220 - DNA, 22 bp, Artificial Sequence
  Synthetic oligonucleotide; CTG chr2 60514132 60514153 60514137 60514132 -
gaagcctctcagagagtgcttg

SEQ ID NO: 217221 - DNA, 22 bp, Artificial Sequence
  Synthetic oligonucleotide; CTC chr2 60514124 60514145 60514129 60514124 -
tcagagagtgcttggagcactg

SEQ ID NO: 217222 - DNA, 22 bp, Artificial Sequence
  Synthetic oligonucleotide; CTC chr2 60514122 60514143 60514127 60514122 -
agagagtgcttggagcactgct

SEQ ID NO: 217223 - DNA, 22 bp, Artificial Sequence
  Synthetic oligonucleotide; CTT chr2 60514111 60514132 60514116 60514111 -
ggagcactgctagctgcacgtg

SEQ ID NO: 217224 - DNA, 22 bp, Artificial Sequence
  Synthetic oligonucleotide; TTG chr2 60514110 60514131 60514115 60514110 -
gagcactgctagctgcacgtgc

SEQ ID NO: 217225 - DNA, 22 bp, Artificial Sequence
  Synthetic oligonucleotide; CTG chr2 60514102 60514123 60514107 60514102 -
ctagctgcacgtgctctcagga

SEQ ID NO: 217226 - DNA, 22 bp, Artificial Sequence
  Synthetic oligonucleotide; CTA chr2 60514099 60514120 60514104 60514099 -
gctgcacgtgctctcaggaaag

SEQ ID NO: 217227 - DNA, 22 bp, Artificial Sequence
  Synthetic oligonucleotide; CTG chr2 60514095 60514116 60514100 60514095 -
cacgtgctctcaggaaagtcca

SEQ ID NO: 217228 - DNA, 22 bp, Artificial Sequence
  Synthetic oligonucleotide; CTC chr2 60514086 60514107 60514091 60514086 -
tcaggaaagtccacaaggagat

SEQ ID NO: 217229 - DNA, 22 bp, Artificial Sequence
  Synthetic oligonucleotide; CTC chr2 60514084 60514105 60514089 60514084 -
aggaaagtccacaaggagatgg

SEQ ID NO: 217230 - DNA, 22 bp, Artificial Sequence
  Synthetic oligonucleotide; CTG chr2 60514059 60514080 60514064 60514059 -
gtgtggctcagagtccttgtgt

SEQ ID NO: 217231 - DNA, 22 bp, Artificial Sequence
  Synthetic oligonucleotide; CTC chr2 60514050 60514071 60514055 60514050 -
agagtccttgtgtgctgcctca

SEQ ID NO: 217232 - DNA, 22 bp, Artificial Sequence
  Synthetic oligonucleotide; CTT chr2 60514041 60514062 60514046 60514041 -
gtgtgctgcctcagcccatgcc

SEQ ID NO: 217233 - DNA, 22 bp, Artificial Sequence
  Synthetic oligonucleotide; TTG chr2 60514040 60514061 60514045 60514040 -
tgtgctgcctcagcccatgcca

SEQ ID NO: 217234 - DNA, 22 bp, Artificial Sequence
  Synthetic oligonucleotide; CTG chr2 60514033 60514054 60514038 60514033 -
cctcagcccatgccaggccacc

SEQ ID NO: 217235 - DNA, 22 bp, Artificial Sequence
  Synthetic oligonucleotide; CTC chr2 60514029 60514050 60514034 60514029 -
agcccatgccaggccacctgtg

SEQ ID NO: 217236 - DNA, 22 bp, Artificial Sequence
  Synthetic oligonucleotide; CTG chr2 60514009 60514030 60514014 60514009 -
tggctgtctgccctcaagtctg

SEQ ID NO: 217237 - DNA, 22 bp, Artificial Sequence
  Synthetic oligonucleotide; CTG chr2 60514003 60514024 60514008 60514003 -
tctgccctcaagtctgtccttc

SEQ ID NO: 217238 - DNA, 22 bp, Artificial Sequence
  Synthetic oligonucleotide; CTG chr2 60513999 60514020 60514004 60513999 -
ccctcaagtctgtccttctctg

SEQ ID NO: 217239 - DNA, 22 bp, Artificial Sequence
  Synthetic oligonucleotide; CTC chr2 60513994 60514015 60513999 60513994 -
aagtctgtccttctctgaggat

SEQ ID NO: 217240 - DNA, 22 bp, Artificial Sequence
  Synthetic oligonucleotide; CTG chr2 60513987 60514008 60513992 60513987 -
tccttctctgaggatttaggac

SEQ ID NO: 217241 - DNA, 22 bp, Artificial Sequence
  Synthetic oligonucleotide; CTT chr2 60513982 60514003 60513987 60513982 -
ctctgaggatttaggactgtga

SEQ ID NO: 217242 - DNA, 22 bp, Artificial Sequence
  Synthetic oligonucleotide; TTC chr2 60513981 60514002 60513986 60513981 -
tctgaggatttaggactgtgaa

SEQ ID NO: 217243 - DNA, 22 bp, Artificial Sequence
  Synthetic oligonucleotide; CTC chr2 60513979 60514000 60513984 60513979 -
tgaggatttaggactgtgaacc

SEQ ID NO: 217244 - DNA, 22 bp, Artificial Sequence
  Synthetic oligonucleotide; CTG chr2 60513977 60513998 60513982 60513977 -
aggatttaggactgtgaaccta

SEQ ID NO: 217245 - DNA, 22 bp, Artificial Sequence
  Synthetic oligonucleotide; TTT chr2 60513970 60513991 60513975 60513970 -
aggactgtgaacctagagaatt

SEQ ID NO: 217246 - DNA, 22 bp, Artificial Sequence
  Synthetic oligonucleotide; TTA chr2 60513969 60513990 60513974 60513969 -
ggactgtgaacctagagaattc

SEQ ID NO: 217247 - DNA, 22 bp, Artificial Sequence
  Synthetic oligonucleotide; CTG chr2 60513963 60513984 60513968 60513963 -
tgaacctagagaattcaaagta

SEQ ID NO: 217248 - DNA, 22 bp, Artificial Sequence
  Synthetic oligonucleotide; CTA chr2 60513955 60513976 60513960 60513955 -
gagaattcaaagtagtggaact

SEQ ID NO: 217249 - DNA, 22 bp, Artificial Sequence
  Synthetic oligonucleotide; TTC chr2 60513947 60513968 60513952 60513947 -
aaagtagtggaactagaatcca

SEQ ID NO: 217250 - DNA, 22 bp, Artificial Sequence
  Synthetic oligonucleotide; CTA chr2 60513932 60513953 60513937 60513932 -
gaatccaggtctcgactcaatc

SEQ ID NO: 217251 - DNA, 22 bp, Artificial Sequence
  Synthetic oligonucleotide; CTC chr2 60513919 60513940 60513924 60513919 -
gactcaatccagggagttttgc

SEQ ID NO: 217252 - DNA, 22 bp, Artificial Sequence
  Synthetic oligonucleotide; CTC chr2 60513914 60513935 60513919 60513914 -
aatccagggagttttgctcacc

SEQ ID NO: 217253 - DNA, 22 bp, Artificial Sequence
  Synthetic oligonucleotide; TTT chr2 60513900 60513921 60513905 60513900 -
tgctcaccacaagccaggaaca

SEQ ID NO: 217254 - DNA, 22 bp, Artificial Sequence
  Synthetic oligonucleotide; TTT chr2 60513899 60513920 60513904 60513899 -
gctcaccacaagccaggaacag

SEQ ID NO: 217255 - DNA, 22 bp, Artificial Sequence
  Synthetic oligonucleotide; TTG chr2 60513898 60513919 60513903 60513898 -
ctcaccacaagccaggaacagc

SEQ ID NO: 217256 - DNA, 22 bp, Artificial Sequence
  Synthetic oligonucleotide; CTC chr2 60513895 60513916 60513900 60513895 -
accacaagccaggaacagcttc

SEQ ID NO: 217257 - DNA, 22 bp, Artificial Sequence
  Synthetic oligonucleotide; CTT chr2 60513874 60513895 60513879 60513874 -
ctcttcatggaggtgcctgtct

SEQ ID NO: 217258 - DNA, 22 bp, Artificial Sequence
  Synthetic oligonucleotide; TTC chr2 60513873 60513894 60513878 60513873 -
tcttcatggaggtgcctgtctg

SEQ ID NO: 217259 - DNA, 22 bp, Artificial Sequence
  Synthetic oligonucleotide; CTC chr2 60513871 60513892 60513876 60513871 -
ttcatggaggtgcctgtctgga

SEQ ID NO: 217260 - DNA, 22 bp, Artificial Sequence
  Synthetic oligonucleotide; CTT chr2 60513869 60513890 60513874 60513869 -
catggaggtgcctgtctggaag

SEQ ID NO: 217261 - DNA, 22 bp, Artificial Sequence
  Synthetic oligonucleotide; TTC chr2 60513868 60513889 60513873 60513868 -
atggaggtgcctgtctggaagg

SEQ ID NO: 217262 - DNA, 22 bp, Artificial Sequence
  Synthetic oligonucleotide; CTG chr2 60513855 60513876 60513860 60513855 -
tctggaaggcagagaatctctg

SEQ ID NO: 217263 - DNA, 22 bp, Artificial Sequence
  Synthetic oligonucleotide; CTG chr2 60513851 60513872 60513856 60513851 -
gaaggcagagaatctctggctt

SEQ ID NO: 217264 - DNA, 22 bp, Artificial Sequence
  Synthetic oligonucleotide; CTC chr2 60513835 60513856 60513840 60513835 -
tggcttgttgagaagagagagt

SEQ ID NO: 217265 - DNA, 22 bp, Artificial Sequence
  Synthetic oligonucleotide; CTG chr2 60513833 60513854 60513838 60513833 -
gcttgttgagaagagagagtct

SEQ ID NO: 217266 - DNA, 22 bp, Artificial Sequence
  Synthetic oligonucleotide; CTT chr2 60513829 60513850 60513834 60513829 -
gttgagaagagagagtctgccc

SEQ ID NO: 217267 - DNA, 22 bp, Artificial Sequence
  Synthetic oligonucleotide; TTG chr2 60513828 60513849 60513833 60513828 -
ttgagaagagagagtctgccct

SEQ ID NO: 217268 - DNA, 22 bp, Artificial Sequence
  Synthetic oligonucleotide; TTG chr2 60513825 60513846 60513830 60513825 -
agaagagagagtctgcccttca

SEQ ID NO: 217269 - DNA, 22 bp, Artificial Sequence
  Synthetic oligonucleotide; CTG chr2 60513810 60513831 60513815 60513810 -
cccttcagactgcaaggtgttc

SEQ ID NO: 217270 - DNA, 22 bp, Artificial Sequence
  Synthetic oligonucleotide; CTT chr2 60513805 60513826 60513810 60513805 -
cagactgcaaggtgttcactgc

SEQ ID NO: 217271 - DNA, 22 bp, Artificial Sequence
  Synthetic oligonucleotide; TTC chr2 60513804 60513825 60513809 60513804 -
agactgcaaggtgttcactgca

SEQ ID NO: 217272 - DNA, 22 bp, Artificial Sequence
  Synthetic oligonucleotide; CTG chr2 60513798 60513819 60513803 60513798 -
caaggtgttcactgcataggac

SEQ ID NO: 217273 - DNA, 22 bp, Artificial Sequence
  Synthetic oligonucleotide; TTC chr2 60513788 60513809 60513793 60513788 -
actgcataggacccttcgtagg

SEQ ID NO: 217274 - DNA, 22 bp, Artificial Sequence
  Synthetic oligonucleotide; CTG chr2 60513784 60513805 60513789 60513784 -
cataggacccttcgtaggtgct

SEQ ID NO: 217275 - DNA, 22 bp, Artificial Sequence
  Synthetic oligonucleotide; CTT chr2 60513772 60513793 60513777 60513772 -
cgtaggtgctgacccagctgtg

SEQ ID NO: 217276 - DNA, 22 bp, Artificial Sequence
  Synthetic oligonucleotide; TTC chr2 60513771 60513792 60513776 60513771 -
gtaggtgctgacccagctgtgc

SEQ ID NO: 217277 - DNA, 22 bp, Artificial Sequence
  Synthetic oligonucleotide; CTG chr2 60513761 60513782 60513766 60513761 -
acccagctgtgcccagtgctag

SEQ ID NO: 217278 - DNA, 22 bp, Artificial Sequence
  Synthetic oligonucleotide; CTG chr2 60513752 60513773 60513757 60513752 -
tgcccagtgctagagctaggac

SEQ ID NO: 217279 - DNA, 22 bp, Artificial Sequence
  Synthetic oligonucleotide; CTA chr2 60513740 60513761 60513745 60513740 -
gagctaggactcagttctattt

SEQ ID NO: 217280 - DNA, 22 bp, Artificial Sequence
  Synthetic oligonucleotide; CTA chr2 60513734 60513755 60513739 60513734 -
ggactcagttctattttcccag

SEQ ID NO: 217281 - DNA, 22 bp, Artificial Sequence
  Synthetic oligonucleotide; CTC chr2 60513728 60513749 60513733 60513728 -
agttctattttcccagagagtg

SEQ ID NO: 217282 - DNA, 22 bp, Artificial Sequence
  Synthetic oligonucleotide; TTC chr2 60513723 60513744 60513728 60513723 -
tattttcccagagagtggtgtg

SEQ ID NO: 217283 - DNA, 22 bp, Artificial Sequence
  Synthetic oligonucleotide; CTA chr2 60513721 60513742 60513726 60513721 -
ttttcccagagagtggtgtgat

SEQ ID NO: 217284 - DNA, 22 bp, Artificial Sequence
  Synthetic oligonucleotide; TTT chr2 60513718 60513739 60513723 60513718 -
tcccagagagtggtgtgatggg

SEQ ID NO: 217285 - DNA, 22 bp, Artificial Sequence
  Synthetic oligonucleotide; TTT chr2 60513717 60513738 60513722 60513717 -
cccagagagtggtgtgatggga

SEQ ID NO: 217286 - DNA, 22 bp, Artificial Sequence
  Synthetic oligonucleotide; TTC chr2 60513716 60513737 60513721 60513716 -
ccagagagtggtgtgatgggag

SEQ ID NO: 217287 - DNA, 22 bp, Artificial Sequence
  Synthetic oligonucleotide; CTA chr2 60513690 60513711 60513695 60513690 -
tttctttttcttttttcagtcc

SEQ ID NO: 217288 - DNA, 22 bp, Artificial Sequence
  Synthetic oligonucleotide; TTT chr2 60513687 60513708 60513692 60513687 -
ctttttcttttttcagtcctga

SEQ ID NO: 217289 - DNA, 22 bp, Artificial Sequence
  Synthetic oligonucleotide; TTC chr2 60513686 60513707 60513691 60513686 -
tttttcttttttcagtcctgat

SEQ ID NO: 217290 - DNA, 22 bp, Artificial Sequence
  Synthetic oligonucleotide; CTT chr2 60513684 60513705 60513689 60513684 -
tttcttttttcagtcctgatca

SEQ ID NO: 217291 - DNA, 22 bp, Artificial Sequence
  Synthetic oligonucleotide; TTT chr2 60513683 60513704 60513688 60513683 -
ttcttttttcagtcctgatcag

SEQ ID NO: 217292 - DNA, 22 bp, Artificial Sequence
  Synthetic oligonucleotide; TTT chr2 60513682 60513703 60513687 60513682 -
tcttttttcagtcctgatcagg

SEQ ID NO: 217293 - DNA, 22 bp, Artificial Sequence
  Synthetic oligonucleotide; TTT chr2 60513681 60513702 60513686 60513681 -
cttttttcagtcctgatcaggg

SEQ ID NO: 217294 - DNA, 22 bp, Artificial Sequence
  Synthetic oligonucleotide; TTC chr2 60513680 60513701 60513685 60513680 -
ttttttcagtcctgatcaggga

SEQ ID NO: 217295 - DNA, 22 bp, Artificial Sequence
  Synthetic oligonucleotide; CTT chr2 60513678 60513699 60513683 60513678 -
ttttcagtcctgatcagggatg

SEQ ID NO: 217296 - DNA, 22 bp, Artificial Sequence
  Synthetic oligonucleotide; TTT chr2 60513677 60513698 60513682 60513677 -
tttcagtcctgatcagggatga

SEQ ID NO: 217297 - DNA, 22 bp, Artificial Sequence
  Synthetic oligonucleotide; TTT chr2 60513676 60513697 60513681 60513676 -
ttcagtcctgatcagggatgag

SEQ ID NO: 217298 - DNA, 22 bp, Artificial Sequence
  Synthetic oligonucleotide; TTT chr2 60513675 60513696 60513680 60513675 -
tcagtcctgatcagggatgagt

SEQ ID NO: 217299 - DNA, 22 bp, Artificial Sequence
  Synthetic oligonucleotide; TTT chr2 60513674 60513695 60513679 60513674 -
cagtcctgatcagggatgagtc

SEQ ID NO: 217300 - DNA, 22 bp, Artificial Sequence
  Synthetic oligonucleotide; TTC chr2 60513673 60513694 60513678 60513673 -
agtcctgatcagggatgagtcc

SEQ ID NO: 217301 - DNA, 22 bp, Artificial Sequence
  Synthetic oligonucleotide; CTG chr2 60513666 60513687 60513671 60513666 -
atcagggatgagtccgtgctgt

SEQ ID NO: 217302 - DNA, 22 bp, Artificial Sequence
  Synthetic oligonucleotide; CTG chr2 60513645 60513666 60513650 60513645 -
ttgggtttattcatttacttta

SEQ ID NO: 217303 - DNA, 22 bp, Artificial Sequence
  Synthetic oligonucleotide; TTG chr2 60513642 60513663 60513647 60513642 -
ggtttattcatttactttagcg

SEQ ID NO: 217304 - DNA, 22 bp, Artificial Sequence
  Synthetic oligonucleotide; TTT chr2 60513637 60513658 60513642 60513637 -
attcatttactttagcgtgtga

SEQ ID NO: 217305 - DNA, 22 bp, Artificial Sequence
  Synthetic oligonucleotide; TTA chr2 60513636 60513657 60513641 60513636 -
ttcatttactttagcgtgtgag

SEQ ID NO: 217306 - DNA, 22 bp, Artificial Sequence
  Synthetic oligonucleotide; TTC chr2 60513633 60513654 60513638 60513633 -
atttactttagcgtgtgagtgg

SEQ ID NO: 217307 - DNA, 22 bp, Artificial Sequence
  Synthetic oligonucleotide; TTT chr2 60513629 60513650 60513634 60513629 -
actttagcgtgtgagtggggag

SEQ ID NO: 217308 - DNA, 22 bp, Artificial Sequence
  Synthetic oligonucleotide; TTA chr2 60513628 60513649 60513633 60513628 -
ctttagcgtgtgagtggggaga

SEQ ID NO: 217309 - DNA, 22 bp, Artificial Sequence
  Synthetic oligonucleotide; CTT chr2 60513625 60513646 60513630 60513625 -
tagcgtgtgagtggggagatgg

SEQ ID NO: 217310 - DNA, 22 bp, Artificial Sequence
  Synthetic oligonucleotide; TTT chr2 60513624 60513645 60513629 60513624 -
agcgtgtgagtggggagatgga

SEQ ID NO: 217311 - DNA, 22 bp, Artificial Sequence
  Synthetic oligonucleotide; TTA chr2 60513623 60513644 60513628 60513623 -
gcgtgtgagtggggagatggat

SEQ ID NO: 217312 - DNA, 22 bp, Artificial Sequence
  Synthetic oligonucleotide; TTA chr2 60513599 60513620 60513604 60513599 -
ggcagcaggcccttggaagggt

SEQ ID NO: 217313 - DNA, 22 bp, Artificial Sequence
  Synthetic oligonucleotide; CTT chr2 60513585 60513606 60513590 60513585 -
ggaagggtgggaagattcagaa

SEQ ID NO: 217314 - DNA, 22 bp, Artificial Sequence
  Synthetic oligonucleotide; TTG chr2 60513584 60513605 60513589 60513584 -
gaagggtgggaagattcagaag

SEQ ID NO: 217315 - DNA, 22 bp, Artificial Sequence
  Synthetic oligonucleotide; TTC chr2 60513567 60513588 60513572 60513567 -
agaagagagagggcaggactgg

SEQ ID NO: 217316 - DNA, 22 bp, Artificial Sequence
  Synthetic oligonucleotide; CTG chr2 60513546 60513567 60513551 60513546 -
ggaagatccagacaggacatga

SEQ ID NO: 217317 - DNA, 22 bp, Artificial Sequence
  Synthetic oligonucleotide; TTT chr2 60513518 60513539 60513523 60513518 -
gctccacaaagagagaagcagc

SEQ ID NO: 217318 - DNA, 22 bp, Artificial Sequence
  Synthetic oligonucleotide; TTG chr2 60513517 60513538 60513522 60513517 -
ctccacaaagagagaagcagca

SEQ ID NO: 217319 - DNA, 22 bp, Artificial Sequence
  Synthetic oligonucleotide; CTC chr2 60513514 60513535 60513519 60513514 -
cacaaagagagaagcagcagga

SEQ ID NO: 217320 - DNA, 22 bp, Artificial Sequence
  Synthetic oligonucleotide; TTC chr2 60513488 60513509 60513493 60513488 -
tggctagaggctaacccaacac

SEQ ID NO: 217321 - DNA, 22 bp, Artificial Sequence
  Synthetic oligonucleotide; CTG chr2 60513486 60513507 60513491 60513486 -
gctagaggctaacccaacaccc

SEQ ID NO: 217322 - DNA, 22 bp, Artificial Sequence
  Synthetic oligonucleotide; CTA chr2 60513482 60513503 60513487 60513482 -
gaggctaacccaacacccacac

SEQ ID NO: 217323 - DNA, 22 bp, Artificial Sequence
  Synthetic oligonucleotide; CTA chr2 60513475 60513496 60513480 60513475 -
acccaacacccacacctgccaa

SEQ ID NO: 217324 - DNA, 22 bp, Artificial Sequence
  Synthetic oligonucleotide; CTG chr2 60513457 60513478 60513462 60513457 -
ccaaaggggttcccatggggtg

SEQ ID NO: 217325 - DNA, 22 bp, Artificial Sequence
  Synthetic oligonucleotide; TTC chr2 60513445 60513466 60513450 60513445 -
ccatggggtggctggcttgagg

SEQ ID NO: 217326 - DNA, 22 bp, Artificial Sequence
  Synthetic oligonucleotide; CTG chr2 60513431 60513452 60513436 60513431 -
gcttgaggggatctgggcgctg

SEQ ID NO: 217327 - DNA, 22 bp, Artificial Sequence
  Synthetic oligonucleotide; CTT chr2 60513427 60513448 60513432 60513427 -
gaggggatctgggcgctggttt

SEQ ID NO: 217328 - DNA, 22 bp, Artificial Sequence
  Synthetic oligonucleotide; TTG chr2 60513426 60513447 60513431 60513426 -
aggggatctgggcgctggtttc

SEQ ID NO: 217329 - DNA, 22 bp, Artificial Sequence
  Synthetic oligonucleotide; CTG chr2 60513416 60513437 60513421 60513416 -
ggcgctggtttctgctgtggac

SEQ ID NO: 217330 - DNA, 22 bp, Artificial Sequence
  Synthetic oligonucleotide; CTG chr2 60513409 60513430 60513414 60513409 -
gtttctgctgtggacagcctca

SEQ ID NO: 217331 - DNA, 22 bp, Artificial Sequence
  Synthetic oligonucleotide; TTT chr2 60513405 60513426 60513410 60513405 -
ctgctgtggacagcctcaagtg

SEQ ID NO: 217332 - DNA, 22 bp, Artificial Sequence
  Synthetic oligonucleotide; TTC chr2 60513404 60513425 60513409 60513404 -
tgctgtggacagcctcaagtgg

SEQ ID NO: 217333 - DNA, 22 bp, Artificial Sequence
  Synthetic oligonucleotide; CTG chr2 60513402 60513423 60513407 60513402 -
ctgtggacagcctcaagtgggg

SEQ ID NO: 217334 - DNA, 22 bp, Artificial Sequence
  Synthetic oligonucleotide; CTG chr2 60513399 60513420 60513404 60513399 -
tggacagcctcaagtggggcgt

SEQ ID NO: 217335 - DNA, 22 bp, Artificial Sequence
  Synthetic oligonucleotide; CTC chr2 60513388 60513409 60513393 60513388 -
aagtggggcgtggaggcagcat

SEQ ID NO: 217336 - DNA, 22 bp, Artificial Sequence
  Synthetic oligonucleotide; CTC chr2 60513363 60513384 60513368 60513363 -
cagaagcacccggcagatggct

SEQ ID NO: 217337 - DNA, 22 bp, Artificial Sequence
  Synthetic oligonucleotide; CTC chr2 60513340 60513361 60513345 60513340 -
ctgagggagcagggactccttc

SEQ ID NO: 217338 - DNA, 22 bp, Artificial Sequence
  Synthetic oligonucleotide; CTG chr2 60513337 60513358 60513342 60513337 -
agggagcagggactccttctag

SEQ ID NO: 217339 - DNA, 22 bp, Artificial Sequence
  Synthetic oligonucleotide; CTC chr2 60513322 60513343 60513327 60513322 -
cttctagtgccactcctgggac

SEQ ID NO: 217340 - DNA, 22 bp, Artificial Sequence
  Synthetic oligonucleotide; CTT chr2 60513319 60513340 60513324 60513319 -
ctagtgccactcctgggactaa

SEQ ID NO: 217341 - DNA, 22 bp, Artificial Sequence
  Synthetic oligonucleotide; TTC chr2 60513318 60513339 60513323 60513318 -
tagtgccactcctgggactaaa

SEQ ID NO: 217342 - DNA, 22 bp, Artificial Sequence
  Synthetic oligonucleotide; CTA chr2 60513316 60513337 60513321 60513316 -
gtgccactcctgggactaaatt

SEQ ID NO: 217343 - DNA, 22 bp, Artificial Sequence
  Synthetic oligonucleotide; CTC chr2 60513307 60513328 60513312 60513307 -
ctgggactaaattccttgtccc

SEQ ID NO: 217344 - DNA, 22 bp, Artificial Sequence
  Synthetic oligonucleotide; CTG chr2 60513304 60513325 60513309 60513304 -
ggactaaattccttgtcccctc

SEQ ID NO: 217345 - DNA, 22 bp, Artificial Sequence
  Synthetic oligonucleotide; CTA chr2 60513298 60513319 60513303 60513298 -
aattccttgtcccctccttgtc

SEQ ID NO: 217346 - DNA, 22 bp, Artificial Sequence
  Synthetic oligonucleotide; TTC chr2 60513293 60513314 60513298 60513293 -
cttgtcccctccttgtctcata

SEQ ID NO: 217347 - DNA, 22 bp, Artificial Sequence
  Synthetic oligonucleotide; CTT chr2 60513290 60513311 60513295 60513290 -
gtcccctccttgtctcatattt

SEQ ID NO: 217348 - DNA, 22 bp, Artificial Sequence
  Synthetic oligonucleotide; TTG chr2 60513289 60513310 60513294 60513289 -
tcccctccttgtctcatattta

SEQ ID NO: 217349 - DNA, 22 bp, Artificial Sequence
  Synthetic oligonucleotide; CTC chr2 60513282 60513303 60513287 60513282 -
cttgtctcatatttagcatctt

SEQ ID NO: 217350 - DNA, 22 bp, Artificial Sequence
  Synthetic oligonucleotide; CTT chr2 60513279 60513300 60513284 60513279 -
gtctcatatttagcatcttgga

SEQ ID NO: 217351 - DNA, 22 bp, Artificial Sequence
  Synthetic oligonucleotide; TTG chr2 60513278 60513299 60513283 60513278 -
tctcatatttagcatcttggag

SEQ ID NO: 217352 - DNA, 22 bp, Artificial Sequence
  Synthetic oligonucleotide; CTC chr2 60513274 60513295 60513279 60513274 -
atatttagcatcttggagccgt

SEQ ID NO: 217353 - DNA, 22 bp, Artificial Sequence
  Synthetic oligonucleotide; TTT chr2 60513268 60513289 60513273 60513268 -
agcatcttggagccgtgtcagc

SEQ ID NO: 217354 - DNA, 22 bp, Artificial Sequence
  Synthetic oligonucleotide; TTA chr2 60513267 60513288 60513272 60513267 -
gcatcttggagccgtgtcagct

SEQ ID NO: 217355 - DNA, 22 bp, Artificial Sequence
  Synthetic oligonucleotide; CTT chr2 60513260 60513281 60513265 60513260 -
ggagccgtgtcagctgcagaga

SEQ ID NO: 217356 - DNA, 22 bp, Artificial Sequence
  Synthetic oligonucleotide; TTG chr2 60513259 60513280 60513264 60513259 -
gagccgtgtcagctgcagagac

SEQ ID NO: 217357 - DNA, 22 bp, Artificial Sequence
  Synthetic oligonucleotide; CTG chr2 60513244 60513265 60513249 60513244 -
cagagactggagtccggggcat

SEQ ID NO: 217358 - DNA, 22 bp, Artificial Sequence
  Synthetic oligonucleotide; CTG chr2 60513235 60513256 60513240 60513235 -
gagtccggggcatgatggggat

SEQ ID NO: 217359 - DNA, 22 bp, Artificial Sequence
  Synthetic oligonucleotide; CTG chr2 60513206 60513227 60513211 60513206 -
aaacctagtgagagtcatcctg

SEQ ID NO: 217360 - DNA, 22 bp, Artificial Sequence
  Synthetic oligonucleotide; CTA chr2 60513199 60513220 60513204 60513199 -
gtgagagtcatcctgactctgg

SEQ ID NO: 217361 - DNA, 22 bp, Artificial Sequence
  Synthetic oligonucleotide; CTG chr2 60513184 60513205 60513189 60513184 -
actctggggaagagccgctcaa

SEQ ID NO: 217362 - DNA, 22 bp, Artificial Sequence
  Synthetic oligonucleotide; CTC chr2 60513180 60513201 60513185 60513180 -
tggggaagagccgctcaaagat

SEQ ID NO: 217363 - DNA, 22 bp, Artificial Sequence
  Synthetic oligonucleotide; CTG chr2 60513178 60513199 60513183 60513178 -
gggaagagccgctcaaagatga

SEQ ID NO: 217364 - DNA, 22 bp, Artificial Sequence
  Synthetic oligonucleotide; CTC chr2 60513164 60513185 60513169 60513164 -
aaagatgagaaagataaagtaa

SEQ ID NO: 217365 - DNA, 22 bp, Artificial Sequence
  Synthetic oligonucleotide; TTT chr2 60513139 60513160 60513144 60513139 -
gccacccccaacccctcacagg

SEQ ID NO: 217366 - DNA, 22 bp, Artificial Sequence
  Synthetic oligonucleotide; TTG chr2 60513138 60513159 60513143 60513138 -
ccacccccaacccctcacaggc

SEQ ID NO: 217367 - DNA, 22 bp, Artificial Sequence
  Synthetic oligonucleotide; CTC chr2 60513122 60513143 60513127 60513122 -
acaggctagactatccatggat

SEQ ID NO: 217368 - DNA, 22 bp, Artificial Sequence
  Synthetic oligonucleotide; CTA chr2 60513114 60513135 60513119 60513114 -
gactatccatggatttcagtgg

SEQ ID NO: 217369 - DNA, 22 bp, Artificial Sequence
  Synthetic oligonucleotide; CTA chr2 60513109 60513130 60513114 60513109 -
tccatggatttcagtggggtgg

SEQ ID NO: 217370 - DNA, 22 bp, Artificial Sequence
  Synthetic oligonucleotide; TTT chr2 60513098 60513119 60513103 60513098 -
cagtggggtggtgagtcctcat

SEQ ID NO: 217371 - DNA, 22 bp, Artificial Sequence
  Synthetic oligonucleotide; TTC chr2 60513097 60513118 60513102 60513097 -
agtggggtggtgagtcctcatg

SEQ ID NO: 217372 - DNA, 22 bp, Artificial Sequence
  Synthetic oligonucleotide; CTC chr2 60513078 60513099 60513083 60513078 -
atgatccctgaacctctcctca

SEQ ID NO: 217373 - DNA, 22 bp, Artificial Sequence
  Synthetic oligonucleotide; CTG chr2 60513068 60513089 60513073 60513068 -
aacctctcctcaaatggtgact

SEQ ID NO: 217374 - DNA, 22 bp, Artificial Sequence
  Synthetic oligonucleotide; CTC chr2 60513062 60513083 60513067 60513062 -
tcctcaaatggtgactgttctg

SEQ ID NO: 217375 - DNA, 22 bp, Artificial Sequence
  Synthetic oligonucleotide; CTC chr2 60513060 60513081 60513065 60513060 -
ctcaaatggtgactgttctggg

SEQ ID NO: 217376 - DNA, 22 bp, Artificial Sequence
  Synthetic oligonucleotide; CTC chr2 60513057 60513078 60513062 60513057 -
aaatggtgactgttctgggggt

SEQ ID NO: 217377 - DNA, 22 bp, Artificial Sequence
  Synthetic oligonucleotide; CTG chr2 60513045 60513066 60513050 60513045 -
ttctgggggtcctttctctgcc

SEQ ID NO: 217378 - DNA, 22 bp, Artificial Sequence
  Synthetic oligonucleotide; TTC chr2 60513042 60513063 60513047 60513042 -
tgggggtcctttctctgccttt

SEQ ID NO: 217379 - DNA, 22 bp, Artificial Sequence
  Synthetic oligonucleotide; CTG chr2 60513040 60513061 60513045 60513040 -
ggggtcctttctctgcctttct

SEQ ID NO: 217380 - DNA, 22 bp, Artificial Sequence
  Synthetic oligonucleotide; CTT chr2 60513031 60513052 60513036 60513031 -
tctctgcctttctcagggggta

SEQ ID NO: 217381 - DNA, 22 bp, Artificial Sequence
  Synthetic oligonucleotide; TTT chr2 60513030 60513051 60513035 60513030 -
ctctgcctttctcagggggtaa

SEQ ID NO: 217382 - DNA, 22 bp, Artificial Sequence
  Synthetic oligonucleotide; TTC chr2 60513029 60513050 60513034 60513029 -
tctgcctttctcagggggtaac

SEQ ID NO: 217383 - DNA, 22 bp, Artificial Sequence
  Synthetic oligonucleotide; CTC chr2 60513027 60513048 60513032 60513027 -
tgcctttctcagggggtaacca

SEQ ID NO: 217384 - DNA, 22 bp, Artificial Sequence
  Synthetic oligonucleotide; CTG chr2 60513025 60513046 60513030 60513025 -
cctttctcagggggtaaccaga

SEQ ID NO: 217385 - DNA, 22 bp, Artificial Sequence
  Synthetic oligonucleotide; CTT chr2 60513021 60513042 60513026 60513021 -
tctcagggggtaaccagaggtg

SEQ ID NO: 217386 - DNA, 22 bp, Artificial Sequence
  Synthetic oligonucleotide; TTT chr2 60513020 60513041 60513025 60513020 -
ctcagggggtaaccagaggtgg

SEQ ID NO: 217387 - DNA, 22 bp, Artificial Sequence
  Synthetic oligonucleotide; TTC chr2 60513019 60513040 60513024 60513019 -
tcagggggtaaccagaggtggt

SEQ ID NO: 217388 - DNA, 22 bp, Artificial Sequence
  Synthetic oligonucleotide; CTC chr2 60513017 60513038 60513022 60513017 -
agggggtaaccagaggtggtgg

SEQ ID NO: 217389 - DNA, 22 bp, Artificial Sequence
  Synthetic oligonucleotide; CTG chr2 60512983 60513004 60512988 60512983 -
tgactcgtcagctgttgctctg

SEQ ID NO: 217390 - DNA, 22 bp, Artificial Sequence
  Synthetic oligonucleotide; CTC chr2 60512977 60512998 60512982 60512977 -
gtcagctgttgctctgtgtgtt

SEQ ID NO: 217391 - DNA, 22 bp, Artificial Sequence
  Synthetic oligonucleotide; CTG chr2 60512969 60512990 60512974 60512969 -
ttgctctgtgtgttcatttttg

SEQ ID NO: 217392 - DNA, 22 bp, Artificial Sequence
  Synthetic oligonucleotide; TTG chr2 60512966 60512987 60512971 60512966 -
ctctgtgtgttcatttttgaga

SEQ ID NO: 217393 - DNA, 22 bp, Artificial Sequence
  Synthetic oligonucleotide; CTC chr2 60512963 60512984 60512968 60512963 -
tgtgtgttcatttttgagaaaa

SEQ ID NO: 217394 - DNA, 22 bp, Artificial Sequence
  Synthetic oligonucleotide; CTG chr2 60512961 60512982 60512966 60512961 -
tgtgttcatttttgagaaaatg

SEQ ID NO: 217395 - DNA, 22 bp, Artificial Sequence
  Synthetic oligonucleotide; TTC chr2 60512954 60512975 60512959 60512954 -
atttttgagaaaatgttaatct

SEQ ID NO: 217396 - DNA, 22 bp, Artificial Sequence
  Synthetic oligonucleotide; TTT chr2 60512950 60512971 60512955 60512950 -
ttgagaaaatgttaatctctga

SEQ ID NO: 217397 - DNA, 22 bp, Artificial Sequence
  Synthetic oligonucleotide; TTT chr2 60512949 60512970 60512954 60512949 -
tgagaaaatgttaatctctgag

SEQ ID NO: 217398 - DNA, 22 bp, Artificial Sequence
  Synthetic oligonucleotide; TTT chr2 60512948 60512969 60512953 60512948 -
gagaaaatgttaatctctgaga

SEQ ID NO: 217399 - DNA, 22 bp, Artificial Sequence
  Synthetic oligonucleotide; TTG chr2 60512947 60512968 60512952 60512947 -
agaaaatgttaatctctgagac

SEQ ID NO: 217400 - DNA, 22 bp, Artificial Sequence
  Synthetic oligonucleotide; TTA chr2 60512936 60512957 60512941 60512936 -
atctctgagacgtctaagaggt

SEQ ID NO: 217401 - DNA, 22 bp, Artificial Sequence
  Synthetic oligonucleotide; CTC chr2 60512931 60512952 60512936 60512931 -
tgagacgtctaagaggtgaaac

SEQ ID NO: 217402 - DNA, 22 bp, Artificial Sequence
  Synthetic oligonucleotide; CTG chr2 60512929 60512950 60512934 60512929 -
agacgtctaagaggtgaaactc

SEQ ID NO: 217403 - DNA, 22 bp, Artificial Sequence
  Synthetic oligonucleotide; CTA chr2 60512920 60512941 60512925 60512920 -
agaggtgaaactcctttctctg

SEQ ID NO: 217404 - DNA, 22 bp, Artificial Sequence
  Synthetic oligonucleotide; CTC chr2 60512907 60512928 60512912 60512907 -
ctttctctgtgtctcctccaaa

SEQ ID NO: 217405 - DNA, 22 bp, Artificial Sequence
  Synthetic oligonucleotide; CTT chr2 60512904 60512925 60512909 60512904 -
tctctgtgtctcctccaaatgg

SEQ ID NO: 217406 - DNA, 22 bp, Artificial Sequence
  Synthetic oligonucleotide; TTT chr2 60512903 60512924 60512908 60512903 -
ctctgtgtctcctccaaatgga

SEQ ID NO: 217407 - DNA, 22 bp, Artificial Sequence
  Synthetic oligonucleotide; TTC chr2 60512902 60512923 60512907 60512902 -
tctgtgtctcctccaaatggat

SEQ ID NO: 217408 - DNA, 22 bp, Artificial Sequence
  Synthetic oligonucleotide; CTC chr2 60512900 60512921 60512905 60512900 -
tgtgtctcctccaaatggatgc

SEQ ID NO: 217409 - DNA, 22 bp, Artificial Sequence
  Synthetic oligonucleotide; CTG chr2 60512898 60512919 60512903 60512898 -
tgtctcctccaaatggatgcca

SEQ ID NO: 217410 - DNA, 22 bp, Artificial Sequence
  Synthetic oligonucleotide; CTC chr2 60512892 60512913 60512897 60512892 -
ctccaaatggatgccatgtggg

SEQ ID NO: 217411 - DNA, 22 bp, Artificial Sequence
  Synthetic oligonucleotide; CTC chr2 60512889 60512910 60512894 60512889 -
caaatggatgccatgtgggtgg

SEQ ID NO: 217412 - DNA, 22 bp, Artificial Sequence
  Synthetic oligonucleotide; TTG chr2 60512855 60512876 60512860 60512855 -
ggtttattcatttactttaggt

SEQ ID NO: 217413 - DNA, 22 bp, Artificial Sequence
  Synthetic oligonucleotide; TTT chr2 60512850 60512871 60512855 60512850 -
attcatttactttaggtgtgta

SEQ ID NO: 217414 - DNA, 22 bp, Artificial Sequence
  Synthetic oligonucleotide; TTA chr2 60512849 60512870 60512854 60512849 -
ttcatttactttaggtgtgtat

SEQ ID NO: 217415 - DNA, 22 bp, Artificial Sequence
  Synthetic oligonucleotide; TTC chr2 60512846 60512867 60512851 60512846 -
atttactttaggtgtgtattgt

SEQ ID NO: 217416 - DNA, 22 bp, Artificial Sequence
  Synthetic oligonucleotide; TTT chr2 60512842 60512863 60512847 60512842 -
actttaggtgtgtattgtagta

SEQ ID NO: 217417 - DNA, 22 bp, Artificial Sequence
  Synthetic oligonucleotide; TTA chr2 60512841 60512862 60512846 60512841 -
ctttaggtgtgtattgtagtaa

SEQ ID NO: 217418 - DNA, 22 bp, Artificial Sequence
  Synthetic oligonucleotide; CTT chr2 60512838 60512859 60512843 60512838 -
taggtgtgtattgtagtaaaac

SEQ ID NO: 217419 - DNA, 22 bp, Artificial Sequence
  Synthetic oligonucleotide; TTT chr2 60512837 60512858 60512842 60512837 -
aggtgtgtattgtagtaaaacc

SEQ ID NO: 217420 - DNA, 22 bp, Artificial Sequence
  Synthetic oligonucleotide; TTA chr2 60512836 60512857 60512841 60512836 -
ggtgtgtattgtagtaaaacct

SEQ ID NO: 217421 - DNA, 22 bp, Artificial Sequence
  Synthetic oligonucleotide; TTG chr2 60512825 60512846 60512830 60512825 -
tagtaaaacctgcttgttctcc

SEQ ID NO: 217422 - DNA, 22 bp, Artificial Sequence
  Synthetic oligonucleotide; CTG chr2 60512813 60512834 60512818 60512813 -
cttgttctcctatccgtcatca

SEQ ID NO: 217423 - DNA, 22 bp, Artificial Sequence
  Synthetic oligonucleotide; CTT chr2 60512810 60512831 60512815 60512810 -
gttctcctatccgtcatcagag

SEQ ID NO: 217424 - DNA, 22 bp, Artificial Sequence
  Synthetic oligonucleotide; TTG chr2 60512809 60512830 60512814 60512809 -
ttctcctatccgtcatcagagg

SEQ ID NO: 217425 - DNA, 22 bp, Artificial Sequence
  Synthetic oligonucleotide; TTC chr2 60512806 60512827 60512811 60512806 -
tcctatccgtcatcagaggtga

SEQ ID NO: 217426 - DNA, 22 bp, Artificial Sequence
  Synthetic oligonucleotide; CTC chr2 60512804 60512825 60512809 60512804 -
ctatccgtcatcagaggtgact

SEQ ID NO: 217427 - DNA, 22 bp, Artificial Sequence
  Synthetic oligonucleotide; CTA chr2 60512801 60512822 60512806 60512801 -
tccgtcatcagaggtgactcat

SEQ ID NO: 217428 - DNA, 22 bp, Artificial Sequence
  Synthetic oligonucleotide; CTC chr2 60512781 60512802 60512786 60512781 -
atacttgagacactaaaagaga

SEQ ID NO: 217429 - DNA, 22 bp, Artificial Sequence
  Synthetic oligonucleotide; CTT chr2 60512775 60512796 60512780 60512775 -
gagacactaaaagagaataaac

SEQ ID NO: 217430 - DNA, 22 bp, Artificial Sequence
  Synthetic oligonucleotide; TTG chr2 60512774 60512795 60512779 60512774 -
agacactaaaagagaataaact

SEQ ID NO: 217431 - DNA, 22 bp, Artificial Sequence
  Synthetic oligonucleotide; CTA chr2 60512766 60512787 60512771 60512766 -
aaagagaataaactgtcttcat

SEQ ID NO: 217432 - DNA, 22 bp, Artificial Sequence
  Synthetic oligonucleotide; CTG chr2 60512751 60512772 60512756 60512751 -
tcttcataaggctgtgaacgtc

SEQ ID NO: 217433 - DNA, 22 bp, Artificial Sequence
  Synthetic oligonucleotide; CTT chr2 60512747 60512768 60512752 60512747 -
cataaggctgtgaacgtcgcca

SEQ ID NO: 217434 - DNA, 22 bp, Artificial Sequence
  Synthetic oligonucleotide; TTC chr2 60512746 60512767 60512751 60512746 -
ataaggctgtgaacgtcgccag

SEQ ID NO: 217435 - DNA, 22 bp, Artificial Sequence
  Synthetic oligonucleotide; CTG chr2 60512737 60512758 60512742 60512737 -
tgaacgtcgccagattatgaac

SEQ ID NO: 217436 - DNA, 22 bp, Artificial Sequence
  Synthetic oligonucleotide; TTA chr2 60512720 60512741 60512725 60512720 -
tgaaccaacttcaagtaacgta

SEQ ID NO: 217437 - DNA, 22 bp, Artificial Sequence
  Synthetic oligonucleotide; CTT chr2 60512709 60512730 60512714 60512709 -
caagtaacgtagggatgccttg

SEQ ID NO: 217438 - DNA, 22 bp, Artificial Sequence
  Synthetic oligonucleotide; TTC chr2 60512708 60512729 60512713 60512708 -
aagtaacgtagggatgccttga

SEQ ID NO: 217439 - DNA, 22 bp, Artificial Sequence
  Synthetic oligonucleotide; CTT chr2 60512688 60512709 60512693 60512688 -
gataattatattattgaaacca

SEQ ID NO: 217440 - DNA, 22 bp, Artificial Sequence
  Synthetic oligonucleotide; TTG chr2 60512687 60512708 60512692 60512687 -
ataattatattattgaaaccat

SEQ ID NO: 217441 - DNA, 22 bp, Artificial Sequence
  Synthetic oligonucleotide; TTA chr2 60512680 60512701 60512685 60512680 -
tattattgaaaccatctccaat

SEQ ID NO: 217442 - DNA, 22 bp, Artificial Sequence
  Synthetic oligonucleotide; TTA chr2 60512675 60512696 60512680 60512675 -
ttgaaaccatctccaattagat

SEQ ID NO: 217443 - DNA, 22 bp, Artificial Sequence
  Synthetic oligonucleotide; TTG chr2 60512672 60512693 60512677 60512672 -
aaaccatctccaattagatatg

SEQ ID NO: 217444 - DNA, 22 bp, Artificial Sequence
  Synthetic oligonucleotide; CTC chr2 60512662 60512683 60512667 60512662 -
caattagatatgcaaaatggag

SEQ ID NO: 217445 - DNA, 22 bp, Artificial Sequence
  Synthetic oligonucleotide; TTA chr2 60512656 60512677 60512661 60512656 -
gatatgcaaaatggagttgctg

SEQ ID NO: 217446 - DNA, 22 bp, Artificial Sequence
  Synthetic oligonucleotide; TTG chr2 60512637 60512658 60512642 60512637 -
ctgggggcttcagttttcttta

SEQ ID NO: 217447 - DNA, 22 bp, Artificial Sequence
  Synthetic oligonucleotide; CTG chr2 60512634 60512655 60512639 60512634 -
ggggcttcagttttctttagac

SEQ ID NO: 217448 - DNA, 22 bp, Artificial Sequence
  Synthetic oligonucleotide; CTT chr2 60512627 60512648 60512632 60512627 -
cagttttctttagaccaaataa

SEQ ID NO: 217449 - DNA, 22 bp, Artificial Sequence
  Synthetic oligonucleotide; TTC chr2 60512626 60512647 60512631 60512626 -
agttttctttagaccaaataat

SEQ ID NO: 217450 - DNA, 22 bp, Artificial Sequence
  Synthetic oligonucleotide; TTT chr2 60512621 60512642 60512626 60512621 -
tctttagaccaaataatttaga

SEQ ID NO: 217451 - DNA, 22 bp, Artificial Sequence
  Synthetic oligonucleotide; TTT chr2 60512620 60512641 60512625 60512620 -
ctttagaccaaataatttagag

SEQ ID NO: 217452 - DNA, 22 bp, Artificial Sequence
  Synthetic oligonucleotide; TTC chr2 60512619 60512640 60512624 60512619 -
tttagaccaaataatttagagc

SEQ ID NO: 217453 - DNA, 22 bp, Artificial Sequence
  Synthetic oligonucleotide; CTT chr2 60512617 60512638 60512622 60512617 -
tagaccaaataatttagagctg

SEQ ID NO: 217454 - DNA, 22 bp, Artificial Sequence
  Synthetic oligonucleotide; TTT chr2 60512616 60512637 60512621 60512616 -
agaccaaataatttagagctga

SEQ ID NO: 217455 - DNA, 22 bp, Artificial Sequence
  Synthetic oligonucleotide; TTA chr2 60512615 60512636 60512620 60512615 -
gaccaaataatttagagctgag

SEQ ID NO: 217456 - DNA, 22 bp, Artificial Sequence
  Synthetic oligonucleotide; TTT chr2 60512602 60512623 60512607 60512602 -
agagctgagaggagaggcagat

SEQ ID NO: 217457 - DNA, 22 bp, Artificial Sequence
  Synthetic oligonucleotide; TTA chr2 60512601 60512622 60512606 60512601 -
gagctgagaggagaggcagata

SEQ ID NO: 217458 - DNA, 22 bp, Artificial Sequence
  Synthetic oligonucleotide; CTG chr2 60512595 60512616 60512600 60512595 -
agaggagaggcagataccatct

SEQ ID NO: 217459 - DNA, 22 bp, Artificial Sequence
  Synthetic oligonucleotide; CTA chr2 60512572 60512593 60512577 60512572 -
gtctcactttttacaatttagc

SEQ ID NO: 217460 - DNA, 22 bp, Artificial Sequence
  Synthetic oligonucleotide; CTC chr2 60512567 60512588 60512572 60512567 -
actttttacaatttagcattgg

SEQ ID NO: 217461 - DNA, 22 bp, Artificial Sequence
  Synthetic oligonucleotide; CTT chr2 60512563 60512584 60512568 60512563 -
tttacaatttagcattggattt

SEQ ID NO: 217462 - DNA, 22 bp, Artificial Sequence
  Synthetic oligonucleotide; TTT chr2 60512562 60512583 60512567 60512562 -
ttacaatttagcattggatttg

SEQ ID NO: 217463 - DNA, 22 bp, Artificial Sequence
  Synthetic oligonucleotide; TTT chr2 60512561 60512582 60512566 60512561 -
tacaatttagcattggatttgt

SEQ ID NO: 217464 - DNA, 22 bp, Artificial Sequence
  Synthetic oligonucleotide; TTT chr2 60512560 60512581 60512565 60512560 -
acaatttagcattggatttgtt

SEQ ID NO: 217465 - DNA, 22 bp, Artificial Sequence
  Synthetic oligonucleotide; TTA chr2 60512559 60512580 60512564 60512559 -
caatttagcattggatttgttg

SEQ ID NO: 217466 - DNA, 22 bp, Artificial Sequence
  Synthetic oligonucleotide; TTT chr2 60512553 60512574 60512558 60512553 -
agcattggatttgttgagcatg

SEQ ID NO: 217467 - DNA, 22 bp, Artificial Sequence
  Synthetic oligonucleotide; TTA chr2 60512552 60512573 60512557 60512552 -
gcattggatttgttgagcatgt

SEQ ID NO: 217468 - DNA, 22 bp, Artificial Sequence
  Synthetic oligonucleotide; TTG chr2 60512546 60512567 60512551 60512546 -
gatttgttgagcatgtactctc

SEQ ID NO: 217469 - DNA, 22 bp, Artificial Sequence
  Synthetic oligonucleotide; TTT chr2 60512541 60512562 60512546 60512541 -
gttgagcatgtactctctgcag

SEQ ID NO: 217470 - DNA, 22 bp, Artificial Sequence
  Synthetic oligonucleotide; TTG chr2 60512540 60512561 60512545 60512540 -
ttgagcatgtactctctgcaga

SEQ ID NO: 217471 - DNA, 22 bp, Artificial Sequence
  Synthetic oligonucleotide; TTG chr2 60512537 60512558 60512542 60512537 -
agcatgtactctctgcagagca

SEQ ID NO: 217472 - DNA, 22 bp, Artificial Sequence
  Synthetic oligonucleotide; CTC chr2 60512526 60512547 60512531 60512526 -
tctgcagagcattgtgataggt

SEQ ID NO: 217473 - DNA, 22 bp, Artificial Sequence
  Synthetic oligonucleotide; CTC chr2 60512524 60512545 60512529 60512524 -
tgcagagcattgtgataggttc

SEQ ID NO: 217474 - DNA, 22 bp, Artificial Sequence
  Synthetic oligonucleotide; CTG chr2 60512522 60512543 60512527 60512522 -
cagagcattgtgataggttctg

SEQ ID NO: 217475 - DNA, 22 bp, Artificial Sequence
  Synthetic oligonucleotide; TTG chr2 60512512 60512533 60512517 60512512 -
tgataggttctgggttgggagg

SEQ ID NO: 217476 - DNA, 22 bp, Artificial Sequence
  Synthetic oligonucleotide; TTC chr2 60512502 60512523 60512507 60512502 -
tgggttgggaggggagccggga

SEQ ID NO: 217477 - DNA, 22 bp, Artificial Sequence
  Synthetic oligonucleotide; CTG chr2 60512500 60512521 60512505 60512500 -
ggttgggaggggagccgggaag

SEQ ID NO: 217478 - DNA, 22 bp, Artificial Sequence
  Synthetic oligonucleotide; TTG chr2 60512495 60512516 60512500 60512495 -
ggaggggagccgggaaggcaag

SEQ ID NO: 217479 - DNA, 22 bp, Artificial Sequence
  Synthetic oligonucleotide; CTC chr2 60512466 60512487 60512471 60512466 -
tctcaaagctgcctttctcatt

SEQ ID NO: 217480 - DNA, 22 bp, Artificial Sequence
  Synthetic oligonucleotide; CTC chr2 60512464 60512485 60512469 60512464 -
tcaaagctgcctttctcatttg

SEQ ID NO: 217481 - DNA, 22 bp, Artificial Sequence
  Synthetic oligonucleotide; CTC chr2 60512462 60512483 60512467 60512462 -
aaagctgcctttctcatttgag

SEQ ID NO: 217482 - DNA, 22 bp, Artificial Sequence
  Synthetic oligonucleotide; CTG chr2 60512455 60512476 60512460 60512455 -
cctttctcatttgagaggcgag

SEQ ID NO: 217483 - DNA, 22 bp, Artificial Sequence
  Synthetic oligonucleotide; CTT chr2 60512451 60512472 60512456 60512451 -
tctcatttgagaggcgagtgtg

SEQ ID NO: 217484 - DNA, 22 bp, Artificial Sequence
  Synthetic oligonucleotide; TTT chr2 60512450 60512471 60512455 60512450 -
ctcatttgagaggcgagtgtgt

SEQ ID NO: 217485 - DNA, 22 bp, Artificial Sequence
  Synthetic oligonucleotide; TTC chr2 60512449 60512470 60512454 60512449 -
tcatttgagaggcgagtgtgtg

SEQ ID NO: 217486 - DNA, 22 bp, Artificial Sequence
  Synthetic oligonucleotide; CTC chr2 60512447 60512468 60512452 60512447 -
atttgagaggcgagtgtgtgtg

SEQ ID NO: 217487 - DNA, 22 bp, Artificial Sequence
  Synthetic oligonucleotide; TTT chr2 60512443 60512464 60512448 60512443 -
gagaggcgagtgtgtgtggcac

SEQ ID NO: 217488 - DNA, 22 bp, Artificial Sequence
  Synthetic oligonucleotide; TTG chr2 60512442 60512463 60512447 60512442 -
agaggcgagtgtgtgtggcaca

SEQ ID NO: 217489 - DNA, 22 bp, Artificial Sequence
  Synthetic oligonucleotide; CTT chr2 60512393 60512414 60512398 60512393 -
tatacctgagagcaagatgtgc

SEQ ID NO: 217490 - DNA, 22 bp, Artificial Sequence
  Synthetic oligonucleotide; TTT chr2 60512392 60512413 60512397 60512392 -
atacctgagagcaagatgtgca

SEQ ID NO: 217491 - DNA, 22 bp, Artificial Sequence
  Synthetic oligonucleotide; TTA chr2 60512391 60512412 60512396 60512391 -
tacctgagagcaagatgtgcag

SEQ ID NO: 217492 - DNA, 22 bp, Artificial Sequence
  Synthetic oligonucleotide; CTG chr2 60512385 60512406 60512390 60512385 -
agagcaagatgtgcagccagga

SEQ ID NO: 217493 - DNA, 22 bp, Artificial Sequence
  Synthetic oligonucleotide; CTC chr2 60512357 60512378 60512362 60512357 -
aaggacacaggccaagggaggt

SEQ ID NO: 217494 - DNA, 22 bp, Artificial Sequence
  Synthetic oligonucleotide; CTT chr2 60512325 60512346 60512330 60512325 -
gcccaggccacccagttaccta

SEQ ID NO: 217495 - DNA, 22 bp, Artificial Sequence
  Synthetic oligonucleotide; TTG chr2 60512324 60512345 60512329 60512324 -
cccaggccacccagttacctag

SEQ ID NO: 217496 - DNA, 22 bp, Artificial Sequence
  Synthetic oligonucleotide; TTA chr2 60512307 60512328 60512312 60512307 -
cctagcacagctcagccacaag

SEQ ID NO: 217497 - DNA, 22 bp, Artificial Sequence
  Synthetic oligonucleotide; CTA chr2 60512303 60512324 60512308 60512303 -
gcacagctcagccacaagccca

SEQ ID NO: 217498 - DNA, 22 bp, Artificial Sequence
  Synthetic oligonucleotide; CTC chr2 60512294 60512315 60512299 60512294 -
agccacaagcccaaatgaatga

SEQ ID NO: 217499 - DNA, 22 bp, Artificial Sequence
  Synthetic oligonucleotide; TTC chr2 60512269 60512290 60512274 60512269 -
tgagttccacatcagcgcatcg

SEQ ID NO: 217500 - DNA, 22 bp, Artificial Sequence
  Synthetic oligonucleotide; CTG chr2 60512267 60512288 60512272 60512267 -
agttccacatcagcgcatcggg

SEQ ID NO: 217501 - DNA, 22 bp, Artificial Sequence
  Synthetic oligonucleotide; TTC chr2 60512262 60512283 60512267 60512262 -
cacatcagcgcatcgggcagcc

SEQ ID NO: 217502 - DNA, 22 bp, Artificial Sequence
  Synthetic oligonucleotide; TTC chr2 60512226 60512247 60512231 60512226 -
cacagtgacaggtggggctcta

SEQ ID NO: 217503 - DNA, 22 bp, Artificial Sequence
  Synthetic oligonucleotide; CTC chr2 60512206 60512227 60512211 60512206 -
taggtggcttcctttaaaacat

SEQ ID NO: 217504 - DNA, 22 bp, Artificial Sequence
  Synthetic oligonucleotide; CTA chr2 60512204 60512225 60512209 60512204 -
ggtggcttcctttaaaacatct

SEQ ID NO: 217505 - DNA, 22 bp, Artificial Sequence
  Synthetic oligonucleotide; CTT chr2 60512196 60512217 60512201 60512196 -
cctttaaaacatctgaggaaag

SEQ ID NO: 217506 - DNA, 22 bp, Artificial Sequence
  Synthetic oligonucleotide; TTC chr2 60512195 60512216 60512200 60512195 -
ctttaaaacatctgaggaaagc

SEQ ID NO: 217507 - DNA, 22 bp, Artificial Sequence
  Synthetic oligonucleotide; CTT chr2 60512192 60512213 60512197 60512192 -
taaaacatctgaggaaagcagg

SEQ ID NO: 217508 - DNA, 22 bp, Artificial Sequence
  Synthetic oligonucleotide; TTT chr2 60512191 60512212 60512196 60512191 -
aaaacatctgaggaaagcaggc

SEQ ID NO: 217509 - DNA, 22 bp, Artificial Sequence
  Synthetic oligonucleotide; TTA chr2 60512190 60512211 60512195 60512190 -
aaacatctgaggaaagcaggct

SEQ ID NO: 217510 - DNA, 22 bp, Artificial Sequence
  Synthetic oligonucleotide; CTG chr2 60512181 60512202 60512186 60512181 -
aggaaagcaggcttcctctctg

SEQ ID NO: 217511 - DNA, 22 bp, Artificial Sequence
  Synthetic oligonucleotide; CTT chr2 60512167 60512188 60512172 60512167 -
cctctctgactgctctccaggg

SEQ ID NO: 217512 - DNA, 22 bp, Artificial Sequence
  Synthetic oligonucleotide; TTC chr2 60512166 60512187 60512171 60512166 -
ctctctgactgctctccagggg

SEQ ID NO: 217513 - DNA, 22 bp, Artificial Sequence
  Synthetic oligonucleotide; CTC chr2 60512163 60512184 60512168 60512163 -
tctgactgctctccaggggtgg

SEQ ID NO: 217514 - DNA, 22 bp, Artificial Sequence
  Synthetic oligonucleotide; CTC chr2 60512161 60512182 60512166 60512161 -
tgactgctctccaggggtggtg

SEQ ID NO: 217515 - DNA, 22 bp, Artificial Sequence
  Synthetic oligonucleotide; CTG chr2 60512159 60512180 60512164 60512159 -
actgctctccaggggtggtgag

SEQ ID NO: 217516 - DNA, 22 bp, Artificial Sequence
  Synthetic oligonucleotide; CTG chr2 60512155 60512176 60512160 60512155 -
ctctccaggggtggtgagcaca

SEQ ID NO: 217517 - DNA, 22 bp, Artificial Sequence
  Synthetic oligonucleotide; CTC chr2 60512152 60512173 60512157 60512152 -
tccaggggtggtgagcacaggg

SEQ ID NO: 217518 - DNA, 22 bp, Artificial Sequence
  Synthetic oligonucleotide; CTC chr2 60512150 60512171 60512155 60512150 -
caggggtggtgagcacaggggt

SEQ ID NO: 217519 - DNA, 22 bp, Artificial Sequence
  Synthetic oligonucleotide; TTC chr2 60512126 60512147 60512131 60512126 -
atctgcagctccccagctccag

SEQ ID NO: 217520 - DNA, 22 bp, Artificial Sequence
  Synthetic oligonucleotide; CTG chr2 60512121 60512142 60512126 60512121 -
cagctccccagctccagtgctc

SEQ ID NO: 217521 - DNA, 22 bp, Artificial Sequence
  Synthetic oligonucleotide; CTC chr2 60512115 60512136 60512120 60512115 -
cccagctccagtgctccttagc

SEQ ID NO: 217522 - DNA, 22 bp, Artificial Sequence
  Synthetic oligonucleotide; CTC chr2 60512107 60512128 60512112 60512107 -
cagtgctccttagccttccaag

SEQ ID NO: 217523 - DNA, 22 bp, Artificial Sequence
  Synthetic oligonucleotide; CTC chr2 60512099 60512120 60512104 60512099 -
cttagccttccaagttgtttga

SEQ ID NO: 217524 - DNA, 22 bp, Artificial Sequence
  Synthetic oligonucleotide; CTT chr2 60512096 60512117 60512101 60512096 -
agccttccaagttgtttgaatt

SEQ ID NO: 217525 - DNA, 22 bp, Artificial Sequence
  Synthetic oligonucleotide; TTA chr2 60512095 60512116 60512100 60512095 -
gccttccaagttgtttgaatta

SEQ ID NO: 217526 - DNA, 22 bp, Artificial Sequence
  Synthetic oligonucleotide; CTT chr2 60512090 60512111 60512095 60512090 -
ccaagttgtttgaattaagttg

SEQ ID NO: 217527 - DNA, 22 bp, Artificial Sequence
  Synthetic oligonucleotide; TTC chr2 60512089 60512110 60512094 60512089 -
caagttgtttgaattaagttgc

SEQ ID NO: 217528 - DNA, 22 bp, Artificial Sequence
  Synthetic oligonucleotide; TTG chr2 60512082 60512103 60512087 60512082 -
tttgaattaagttgcaagccca

SEQ ID NO: 217529 - DNA, 22 bp, Artificial Sequence
  Synthetic oligonucleotide; TTT chr2 60512079 60512100 60512084 60512079 -
gaattaagttgcaagcccaggt

SEQ ID NO: 217530 - DNA, 22 bp, Artificial Sequence
  Synthetic oligonucleotide; TTG chr2 60512078 60512099 60512083 60512078 -
aattaagttgcaagcccaggtg

SEQ ID NO: 217531 - DNA, 22 bp, Artificial Sequence
  Synthetic oligonucleotide; TTA chr2 60512073 60512094 60512078 60512073 -
agttgcaagcccaggtggctgc

SEQ ID NO: 217532 - DNA, 22 bp, Artificial Sequence
  Synthetic oligonucleotide; TTG chr2 60512068 60512089 60512073 60512068 -
caagcccaggtggctgcacaca

SEQ ID NO: 217533 - DNA, 22 bp, Artificial Sequence
  Synthetic oligonucleotide; CTG chr2 60512052 60512073 60512057 60512052 -
cacacatattcattttggagtg

SEQ ID NO: 217534 - DNA, 22 bp, Artificial Sequence
  Synthetic oligonucleotide; TTC chr2 60512041 60512062 60512046 60512041 -
attttggagtgactgtgacact

SEQ ID NO: 217535 - DNA, 22 bp, Artificial Sequence
  Synthetic oligonucleotide; TTT chr2 60512037 60512058 60512042 60512037 -
tggagtgactgtgacacttgta

SEQ ID NO: 217536 - DNA, 22 bp, Artificial Sequence
  Synthetic oligonucleotide; TTT chr2 60512036 60512057 60512041 60512036 -
ggagtgactgtgacacttgtat

SEQ ID NO: 217537 - DNA, 22 bp, Artificial Sequence
  Synthetic oligonucleotide; TTG chr2 60512035 60512056 60512040 60512035 -
gagtgactgtgacacttgtatt

SEQ ID NO: 217538 - DNA, 22 bp, Artificial Sequence
  Synthetic oligonucleotide; CTG chr2 60512026 60512047 60512031 60512026 -
tgacacttgtatttcctgggaa

SEQ ID NO: 217539 - DNA, 22 bp, Artificial Sequence
  Synthetic oligonucleotide; CTT chr2 60512018 60512039 60512023 60512018 -
gtatttcctgggaagcgttact

SEQ ID NO: 217540 - DNA, 22 bp, Artificial Sequence
  Synthetic oligonucleotide; TTG chr2 60512017 60512038 60512022 60512017 -
tatttcctgggaagcgttacta

SEQ ID NO: 217541 - DNA, 22 bp, Artificial Sequence
  Synthetic oligonucleotide; TTT chr2 60512012 60512033 60512017 60512012 -
cctgggaagcgttactatgtct

SEQ ID NO: 217542 - DNA, 22 bp, Artificial Sequence
  Synthetic oligonucleotide; TTC chr2 60512011 60512032 60512016 60512011 -
ctgggaagcgttactatgtctt

SEQ ID NO: 217543 - DNA, 22 bp, Artificial Sequence
  Synthetic oligonucleotide; CTG chr2 60512008 60512029 60512013 60512008 -
ggaagcgttactatgtctttgg

SEQ ID NO: 217544 - DNA, 22 bp, Artificial Sequence
  Synthetic oligonucleotide; TTA chr2 60511998 60512019 60512003 60511998 -
ctatgtctttggccgagcaagt

SEQ ID NO: 217545 - DNA, 22 bp, Artificial Sequence
  Synthetic oligonucleotide; CTA chr2 60511995 60512016 60512000 60511995 -
tgtctttggccgagcaagtatt

SEQ ID NO: 217546 - DNA, 22 bp, Artificial Sequence
  Synthetic oligonucleotide; CTT chr2 60511989 60512010 60511994 60511989 -
tggccgagcaagtattacgcca

SEQ ID NO: 217547 - DNA, 22 bp, Artificial Sequence
  Synthetic oligonucleotide; TTT chr2 60511988 60512009 60511993 60511988 -
ggccgagcaagtattacgccat

SEQ ID NO: 217548 - DNA, 22 bp, Artificial Sequence
  Synthetic oligonucleotide; TTG chr2 60511987 60512008 60511992 60511987 -
gccgagcaagtattacgccatg

SEQ ID NO: 217549 - DNA, 22 bp, Artificial Sequence
  Synthetic oligonucleotide; TTA chr2 60511972 60511993 60511977 60511972 -
cgccatgagctggttccctttc

SEQ ID NO: 217550 - DNA, 22 bp, Artificial Sequence
  Synthetic oligonucleotide; CTG chr2 60511960 60511981 60511965 60511960 -
gttccctttcttttgcctttga

SEQ ID NO: 217551 - DNA, 22 bp, Artificial Sequence
  Synthetic oligonucleotide; TTC chr2 60511956 60511977 60511961 60511956 -
cctttcttttgcctttgaacac

SEQ ID NO: 217552 - DNA, 22 bp, Artificial Sequence
  Synthetic oligonucleotide; CTT chr2 60511952 60511973 60511957 60511952 -
tcttttgcctttgaacacctac

SEQ ID NO: 217553 - DNA, 22 bp, Artificial Sequence
  Synthetic oligonucleotide; TTT chr2 60511951 60511972 60511956 60511951 -
cttttgcctttgaacacctaca

SEQ ID NO: 217554 - DNA, 22 bp, Artificial Sequence
  Synthetic oligonucleotide; TTC chr2 60511950 60511971 60511955 60511950 -
ttttgcctttgaacacctacat

SEQ ID NO: 217555 - DNA, 22 bp, Artificial Sequence
  Synthetic oligonucleotide; CTT chr2 60511948 60511969 60511953 60511948 -
ttgcctttgaacacctacattg

SEQ ID NO: 217556 - DNA, 22 bp, Artificial Sequence
  Synthetic oligonucleotide; TTT chr2 60511947 60511968 60511952 60511947 -
tgcctttgaacacctacattgc

SEQ ID NO: 217557 - DNA, 22 bp, Artificial Sequence
  Synthetic oligonucleotide; TTT chr2 60511946 60511967 60511951 60511946 -
gcctttgaacacctacattgct

SEQ ID NO: 217558 - DNA, 22 bp, Artificial Sequence
  Synthetic oligonucleotide; TTG chr2 60511945 60511966 60511950 60511945 -
cctttgaacacctacattgctg

SEQ ID NO: 217559 - DNA, 22 bp, Artificial Sequence
  Synthetic oligonucleotide; CTT chr2 60511941 60511962 60511946 60511941 -
tgaacacctacattgctgggag

SEQ ID NO: 217560 - DNA, 22 bp, Artificial Sequence
  Synthetic oligonucleotide; TTT chr2 60511940 60511961 60511945 60511940 -
gaacacctacattgctgggagg

SEQ ID NO: 217561 - DNA, 22 bp, Artificial Sequence
  Synthetic oligonucleotide; TTG chr2 60511939 60511960 60511944 60511939 -
aacacctacattgctgggagga

SEQ ID NO: 217562 - DNA, 22 bp, Artificial Sequence
  Synthetic oligonucleotide; CTA chr2 60511931 60511952 60511936 60511931 -
cattgctgggaggataccttag

SEQ ID NO: 217563 - DNA, 22 bp, Artificial Sequence
  Synthetic oligonucleotide; TTG chr2 60511926 60511947 60511931 60511926 -
ctgggaggataccttagtgaga

SEQ ID NO: 217564 - DNA, 22 bp, Artificial Sequence
  Synthetic oligonucleotide; CTG chr2 60511923 60511944 60511928 60511923 -
ggaggataccttagtgagagtg

SEQ ID NO: 217565 - DNA, 22 bp, Artificial Sequence
  Synthetic oligonucleotide; CTT chr2 60511911 60511932 60511916 60511911 -
agtgagagtgcctgggccactg

SEQ ID NO: 217566 - DNA, 22 bp, Artificial Sequence
  Synthetic oligonucleotide; TTA chr2 60511910 60511931 60511915 60511910 -
gtgagagtgcctgggccactgg

SEQ ID NO: 217567 - DNA, 22 bp, Artificial Sequence
  Synthetic oligonucleotide; CTG chr2 60511897 60511918 60511902 60511897 -
ggccactgggcgtagcagagga

SEQ ID NO: 217568 - DNA, 22 bp, Artificial Sequence
  Synthetic oligonucleotide; CTG chr2 60511889 60511910 60511894 60511889 -
ggcgtagcagaggaagcacctc

SEQ ID NO: 217569 - DNA, 22 bp, Artificial Sequence
  Synthetic oligonucleotide; CTC chr2 60511867 60511888 60511872 60511867 -
atcattttactgatttatttga

SEQ ID NO: 217570 - DNA, 22 bp, Artificial Sequence
  Synthetic oligonucleotide; TTT chr2 60511860 60511881 60511865 60511860 -
tactgatttatttgaaagaaaa

SEQ ID NO: 217571 - DNA, 22 bp, Artificial Sequence
  Synthetic oligonucleotide; TTT chr2 60511859 60511880 60511864 60511859 -
actgatttatttgaaagaaaaa

SEQ ID NO: 217572 - DNA, 22 bp, Artificial Sequence
  Synthetic oligonucleotide; TTA chr2 60511858 60511879 60511863 60511858 -
ctgatttatttgaaagaaaaaa

SEQ ID NO: 217573 - DNA, 22 bp, Artificial Sequence
  Synthetic oligonucleotide; CTG chr2 60511855 60511876 60511860 60511855 -
atttatttgaaagaaaaaagct

SEQ ID NO: 217574 - DNA, 22 bp, Artificial Sequence
  Synthetic oligonucleotide; TTT chr2 60511851 60511872 60511856 60511851 -
atttgaaagaaaaaagctccct

SEQ ID NO: 217575 - DNA, 22 bp, Artificial Sequence
  Synthetic oligonucleotide; TTA chr2 60511850 60511871 60511855 60511850 -
tttgaaagaaaaaagctccctc

SEQ ID NO: 217576 - DNA, 22 bp, Artificial Sequence
  Synthetic oligonucleotide; TTT chr2 60511847 60511868 60511852 60511847 -
gaaagaaaaaagctccctccaa

SEQ ID NO: 217577 - DNA, 22 bp, Artificial Sequence
  Synthetic oligonucleotide; TTG chr2 60511846 60511867 60511851 60511846 -
aaagaaaaaagctccctccaac

SEQ ID NO: 217578 - DNA, 22 bp, Artificial Sequence
  Synthetic oligonucleotide; CTC chr2 60511832 60511853 60511837 60511832 -
cctccaacccttgccttcatag

SEQ ID NO: 217579 - DNA, 22 bp, Artificial Sequence
  Synthetic oligonucleotide; CTC chr2 60511828 60511849 60511833 60511828 -
caacccttgccttcatagaaac

SEQ ID NO: 217580 - DNA, 22 bp, Artificial Sequence
  Synthetic oligonucleotide; CTT chr2 60511820 60511841 60511825 60511820 -
gccttcatagaaacagagtgtt

SEQ ID NO: 217581 - DNA, 22 bp, Artificial Sequence
  Synthetic oligonucleotide; TTG chr2 60511819 60511840 60511824 60511819 -
ccttcatagaaacagagtgttg

SEQ ID NO: 217582 - DNA, 22 bp, Artificial Sequence
  Synthetic oligonucleotide; CTT chr2 60511815 60511836 60511820 60511815 -
catagaaacagagtgttgaaag

SEQ ID NO: 217583 - DNA, 22 bp, Artificial Sequence
  Synthetic oligonucleotide; TTC chr2 60511814 60511835 60511819 60511814 -
atagaaacagagtgttgaaagc

SEQ ID NO: 217584 - DNA, 22 bp, Artificial Sequence
  Synthetic oligonucleotide; TTG chr2 60511797 60511818 60511802 60511797 -
aaagcttggagaagaattaatg

SEQ ID NO: 217585 - DNA, 22 bp, Artificial Sequence
  Synthetic oligonucleotide; CTT chr2 60511790 60511811 60511795 60511790 -
ggagaagaattaatgactcccc

SEQ ID NO: 217586 - DNA, 22 bp, Artificial Sequence
  Synthetic oligonucleotide; TTG chr2 60511789 60511810 60511794 60511789 -
gagaagaattaatgactcccct

SEQ ID NO: 217587 - DNA, 22 bp, Artificial Sequence
  Synthetic oligonucleotide; TTA chr2 60511778 60511799 60511783 60511778 -
atgactcccctgccccttagtg

SEQ ID NO: 217588 - DNA, 22 bp, Artificial Sequence
  Synthetic oligonucleotide; CTC chr2 60511771 60511792 60511776 60511771 -
ccctgccccttagtgtcttaca

SEQ ID NO: 217589 - DNA, 22 bp, Artificial Sequence
  Synthetic oligonucleotide; CTG chr2 60511766 60511787 60511771 60511766 -
ccccttagtgtcttacatgact

SEQ ID NO: 217590 - DNA, 22 bp, Artificial Sequence
  Synthetic oligonucleotide; CTT chr2 60511760 60511781 60511765 60511760 -
agtgtcttacatgactagctgc

SEQ ID NO: 217591 - DNA, 22 bp, Artificial Sequence
  Synthetic oligonucleotide; TTA chr2 60511759 60511780 60511764 60511759 -
gtgtcttacatgactagctgct

SEQ ID NO: 217592 - DNA, 22 bp, Artificial Sequence
  Synthetic oligonucleotide; CTT chr2 60511752 60511773 60511757 60511752 -
acatgactagctgcttctttgc

SEQ ID NO: 217593 - DNA, 22 bp, Artificial Sequence
  Synthetic oligonucleotide; TTA chr2 60511751 60511772 60511756 60511751 -
catgactagctgcttctttgcc

SEQ ID NO: 217594 - DNA, 22 bp, Artificial Sequence
  Synthetic oligonucleotide; CTA chr2 60511743 60511764 60511748 60511743 -
gctgcttctttgcctactgcat

SEQ ID NO: 217595 - DNA, 22 bp, Artificial Sequence
  Synthetic oligonucleotide; CTG chr2 60511739 60511760 60511744 60511739 -
cttctttgcctactgcattttc

SEQ ID NO: 217596 - DNA, 22 bp, Artificial Sequence
  Synthetic oligonucleotide; CTT chr2 60511736 60511757 60511741 60511736 -
ctttgcctactgcattttcaac

SEQ ID NO: 217597 - DNA, 22 bp, Artificial Sequence
  Synthetic oligonucleotide; TTC chr2 60511735 60511756 60511740 60511735 -
tttgcctactgcattttcaact

SEQ ID NO: 217598 - DNA, 22 bp, Artificial Sequence
  Synthetic oligonucleotide; CTT chr2 60511733 60511754 60511738 60511733 -
tgcctactgcattttcaactta

SEQ ID NO: 217599 - DNA, 22 bp, Artificial Sequence
  Synthetic oligonucleotide; TTT chr2 60511732 60511753 60511737 60511732 -
gcctactgcattttcaacttat

SEQ ID NO: 217600 - DNA, 22 bp, Artificial Sequence
  Synthetic oligonucleotide; TTG chr2 60511731 60511752 60511736 60511731 -
cctactgcattttcaacttatt

SEQ ID NO: 217601 - DNA, 22 bp, Artificial Sequence
  Synthetic oligonucleotide; CTA chr2 60511727 60511748 60511732 60511727 -
ctgcattttcaacttatttcaa

SEQ ID NO: 217602 - DNA, 22 bp, Artificial Sequence
  Synthetic oligonucleotide; CTG chr2 60511724 60511745 60511729 60511724 -
cattttcaacttatttcaactt

SEQ ID NO: 217603 - DNA, 22 bp, Artificial Sequence
  Synthetic oligonucleotide; TTT chr2 60511719 60511740 60511724 60511719 -
tcaacttatttcaacttatttt

SEQ ID NO: 217604 - DNA, 22 bp, Artificial Sequence
  Synthetic oligonucleotide; TTT chr2 60511718 60511739 60511723 60511718 -
caacttatttcaacttattttc

SEQ ID NO: 217605 - DNA, 22 bp, Artificial Sequence
  Synthetic oligonucleotide; TTC chr2 60511717 60511738 60511722 60511717 -
aacttatttcaacttattttct

SEQ ID NO: 217606 - DNA, 22 bp, Artificial Sequence
  Synthetic oligonucleotide; CTT chr2 60511712 60511733 60511717 60511712 -
atttcaacttattttctgtggc

SEQ ID NO: 217607 - DNA, 22 bp, Artificial Sequence
  Synthetic oligonucleotide; TTA chr2 60511711 60511732 60511716 60511711 -
tttcaacttattttctgtggct

SEQ ID NO: 217608 - DNA, 22 bp, Artificial Sequence
  Synthetic oligonucleotide; TTT chr2 60511708 60511729 60511713 60511708 -
caacttattttctgtggcttgg

SEQ ID NO: 217609 - DNA, 22 bp, Artificial Sequence
  Synthetic oligonucleotide; TTC chr2 60511707 60511728 60511712 60511707 -
aacttattttctgtggcttgga

SEQ ID NO: 217610 - DNA, 22 bp, Artificial Sequence
  Synthetic oligonucleotide; CTT chr2 60511702 60511723 60511707 60511702 -
attttctgtggcttggaaaata

SEQ ID NO: 217611 - DNA, 22 bp, Artificial Sequence
  Synthetic oligonucleotide; TTA chr2 60511701 60511722 60511706 60511701 -
ttttctgtggcttggaaaatac

SEQ ID NO: 217612 - DNA, 22 bp, Artificial Sequence
  Synthetic oligonucleotide; TTT chr2 60511698 60511719 60511703 60511698 -
tctgtggcttggaaaatacgtt

SEQ ID NO: 217613 - DNA, 22 bp, Artificial Sequence
  Synthetic oligonucleotide; TTT chr2 60511697 60511718 60511702 60511697 -
ctgtggcttggaaaatacgttg

SEQ ID NO: 217614 - DNA, 22 bp, Artificial Sequence
  Synthetic oligonucleotide; TTC chr2 60511696 60511717 60511701 60511696 -
tgtggcttggaaaatacgttga

SEQ ID NO: 217615 - DNA, 22 bp, Artificial Sequence
  Synthetic oligonucleotide; CTG chr2 60511694 60511715 60511699 60511694 -
tggcttggaaaatacgttgact

SEQ ID NO: 217616 - DNA, 22 bp, Artificial Sequence
  Synthetic oligonucleotide; CTT chr2 60511688 60511709 60511693 60511688 -
ggaaaatacgttgactgagtga

SEQ ID NO: 217617 - DNA, 22 bp, Artificial Sequence
  Synthetic oligonucleotide; TTG chr2 60511687 60511708 60511692 60511687 -
gaaaatacgttgactgagtgat

SEQ ID NO: 217618 - DNA, 22 bp, Artificial Sequence
  Synthetic oligonucleotide; TTG chr2 60511675 60511696 60511680 60511675 -
actgagtgatgattgttttcat

SEQ ID NO: 217619 - DNA, 22 bp, Artificial Sequence
  Synthetic oligonucleotide; CTG chr2 60511671 60511692 60511676 60511671 -
agtgatgattgttttcatgaaa

SEQ ID NO: 217620 - DNA, 22 bp, Artificial Sequence
  Synthetic oligonucleotide; TTG chr2 60511660 60511681 60511665 60511660 -
ttttcatgaaatggtgcaacat

SEQ ID NO: 217621 - DNA, 22 bp, Artificial Sequence
  Synthetic oligonucleotide; TTT chr2 60511657 60511678 60511662 60511657 -
tcatgaaatggtgcaacatgta

SEQ ID NO: 217622 - DNA, 22 bp, Artificial Sequence
  Synthetic oligonucleotide; TTT chr2 60511656 60511677 60511661 60511656 -
catgaaatggtgcaacatgtaa

SEQ ID NO: 217623 - DNA, 22 bp, Artificial Sequence
  Synthetic oligonucleotide; TTC chr2 60511655 60511676 60511660 60511655 -
atgaaatggtgcaacatgtaaa

SEQ ID NO: 217624 - DNA, 22 bp, Artificial Sequence
  Synthetic oligonucleotide; TTG chr2 60511623 60511644 60511628 60511623 -
tcattaatagtgcagttatgta

SEQ ID NO: 217625 - DNA, 22 bp, Artificial Sequence
  Synthetic oligonucleotide; TTA chr2 60511617 60511638 60511622 60511617 -
atagtgcagttatgtagagtgt

SEQ ID NO: 217626 - DNA, 22 bp, Artificial Sequence
  Synthetic oligonucleotide; TTA chr2 60511605 60511626 60511610 60511605 -
tgtagagtgtagctctttgagt

SEQ ID NO: 217627 - DNA, 22 bp, Artificial Sequence
  Synthetic oligonucleotide; CTC chr2 60511590 60511611 60511595 60511590 -
tttgagtcttcagttttgaatc

SEQ ID NO: 217628 - DNA, 22 bp, Artificial Sequence
  Synthetic oligonucleotide; CTT chr2 60511588 60511609 60511593 60511588 -
tgagtcttcagttttgaatcag

SEQ ID NO: 217629 - DNA, 22 bp, Artificial Sequence
  Synthetic oligonucleotide; TTT chr2 60511587 60511608 60511592 60511587 -
gagtcttcagttttgaatcaga

SEQ ID NO: 217630 - DNA, 22 bp, Artificial Sequence
  Synthetic oligonucleotide; TTG chr2 60511586 60511607 60511591 60511586 -
agtcttcagttttgaatcagat

SEQ ID NO: 217631 - DNA, 22 bp, Artificial Sequence
  Synthetic oligonucleotide; CTT chr2 60511580 60511601 60511585 60511580 -
cagttttgaatcagattagcgc

SEQ ID NO: 217632 - DNA, 22 bp, Artificial Sequence
  Synthetic oligonucleotide; TTC chr2 60511579 60511600 60511584 60511579 -
agttttgaatcagattagcgct

SEQ ID NO: 217633 - DNA, 22 bp, Artificial Sequence
  Synthetic oligonucleotide; TTT chr2 60511574 60511595 60511579 60511574 -
tgaatcagattagcgctctgtt

SEQ ID NO: 217634 - DNA, 22 bp, Artificial Sequence
  Synthetic oligonucleotide; TTT chr2 60511573 60511594 60511578 60511573 -
gaatcagattagcgctctgtta

SEQ ID NO: 217635 - DNA, 22 bp, Artificial Sequence
  Synthetic oligonucleotide; TTG chr2 60511572 60511593 60511577 60511572 -
aatcagattagcgctctgttaa

SEQ ID NO: 217636 - DNA, 22 bp, Artificial Sequence
  Synthetic oligonucleotide; TTA chr2 60511562 60511583 60511567 60511562 -
gcgctctgttaacttaaaatag

SEQ ID NO: 217637 - DNA, 22 bp, Artificial Sequence
  Synthetic oligonucleotide; CTC chr2 60511556 60511577 60511561 60511556 -
tgttaacttaaaatagccccaa

SEQ ID NO: 217638 - DNA, 22 bp, Artificial Sequence
  Synthetic oligonucleotide; CTG chr2 60511554 60511575 60511559 60511554 -
ttaacttaaaatagccccaaaa

SEQ ID NO: 217639 - DNA, 22 bp, Artificial Sequence
  Synthetic oligonucleotide; TTA chr2 60511551 60511572 60511556 60511551 -
acttaaaatagccccaaaaaag

SEQ ID NO: 217640 - DNA, 22 bp, Artificial Sequence
  Synthetic oligonucleotide; CTT chr2 60511547 60511568 60511552 60511547 -
aaaatagccccaaaaaagaaga

SEQ ID NO: 217641 - DNA, 22 bp, Artificial Sequence
  Synthetic oligonucleotide; TTA chr2 60511546 60511567 60511551 60511546 -
aaatagccccaaaaaagaagaa

SEQ ID NO: 217642 - DNA, 22 bp, Artificial Sequence
  Synthetic oligonucleotide; CTG chr2 60511507 60511528 60511512 60511507 -
tcagaaatcagagggaaatatt

SEQ ID NO: 217643 - DNA, 22 bp, Artificial Sequence
  Synthetic oligonucleotide; TTA chr2 60511484 60511505 60511489 60511484 -
gcattatgaaacatggtaacaa

SEQ ID NO: 217644 - DNA, 22 bp, Artificial Sequence
  Synthetic oligonucleotide; TTA chr2 60511478 60511499 60511483 60511478 -
tgaaacatggtaacaagtggcc

SEQ ID NO: 217645 - DNA, 22 bp, Artificial Sequence
  Synthetic oligonucleotide; TTA chr2 60511452 60511473 60511457 60511452 -
gcactttatgtctgcatgaata

SEQ ID NO: 217646 - DNA, 22 bp, Artificial Sequence
  Synthetic oligonucleotide; CTT chr2 60511446 60511467 60511451 60511446 -
tatgtctgcatgaatagcatct

SEQ ID NO: 217647 - DNA, 22 bp, Artificial Sequence
  Synthetic oligonucleotide; TTT chr2 60511445 60511466 60511450 60511445 -
atgtctgcatgaatagcatctt

SEQ ID NO: 217648 - DNA, 22 bp, Artificial Sequence
  Synthetic oligonucleotide; TTA chr2 60511444 60511465 60511449 60511444 -
tgtctgcatgaatagcatcttt

SEQ ID NO: 217649 - DNA, 22 bp, Artificial Sequence
  Synthetic oligonucleotide; CTG chr2 60511438 60511459 60511443 60511438 -
catgaatagcatctttaagtgt

SEQ ID NO: 217650 - DNA, 22 bp, Artificial Sequence
  Synthetic oligonucleotide; CTT chr2 60511423 60511444 60511428 60511423 -
taagtgttttattggtaacgga

SEQ ID NO: 217651 - DNA, 22 bp, Artificial Sequence
  Synthetic oligonucleotide; TTT chr2 60511422 60511443 60511427 60511422 -
aagtgttttattggtaacggaa

SEQ ID NO: 217652 - DNA, 22 bp, Artificial Sequence
  Synthetic oligonucleotide; TTA chr2 60511421 60511442 60511426 60511421 -
agtgttttattggtaacggaaa

SEQ ID NO: 217653 - DNA, 22 bp, Artificial Sequence
  Synthetic oligonucleotide; TTT chr2 60511414 60511435 60511419 60511414 -
tattggtaacggaaaagagtgg

SEQ ID NO: 217654 - DNA, 22 bp, Artificial Sequence
  Synthetic oligonucleotide; TTT chr2 60511413 60511434 60511418 60511413 -
attggtaacggaaaagagtgga

SEQ ID NO: 217655 - DNA, 22 bp, Artificial Sequence
  Synthetic oligonucleotide; TTA chr2 60511412 60511433 60511417 60511412 -
ttggtaacggaaaagagtggag

SEQ ID NO: 217656 - DNA, 22 bp, Artificial Sequence
  Synthetic oligonucleotide; TTG chr2 60511409 60511430 60511414 60511409 -
gtaacggaaaagagtggagtca

SEQ ID NO: 217657 - DNA, 22 bp, Artificial Sequence
  Synthetic oligonucleotide; TTA chr2 60511372 60511393 60511377 60511372 -
cttcccaaattggcgagttctt

SEQ ID NO: 217658 - DNA, 22 bp, Artificial Sequence
  Synthetic oligonucleotide; CTT chr2 60511369 60511390 60511374 60511369 -
cccaaattggcgagttctttta

SEQ ID NO: 217659 - DNA, 22 bp, Artificial Sequence
  Synthetic oligonucleotide; TTC chr2 60511368 60511389 60511373 60511368 -
ccaaattggcgagttcttttaa

SEQ ID NO: 217660 - DNA, 22 bp, Artificial Sequence
  Synthetic oligonucleotide; TTG chr2 60511360 60511381 60511365 60511360 -
gcgagttcttttaattcagact

SEQ ID NO: 217661 - DNA, 22 bp, Artificial Sequence
  Synthetic oligonucleotide; TTC chr2 60511352 60511373 60511357 60511352 -
ttttaattcagacttctccttg

SEQ ID NO: 217662 - DNA, 22 bp, Artificial Sequence
  Synthetic oligonucleotide; CTT chr2 60511350 60511371 60511355 60511350 -
ttaattcagacttctccttgtt

SEQ ID NO: 217663 - DNA, 22 bp, Artificial Sequence
  Synthetic oligonucleotide; TTT chr2 60511349 60511370 60511354 60511349 -
taattcagacttctccttgtta

SEQ ID NO: 217664 - DNA, 22 bp, Artificial Sequence
  Synthetic oligonucleotide; TTT chr2 60511348 60511369 60511353 60511348 -
aattcagacttctccttgttat

SEQ ID NO: 217665 - DNA, 22 bp, Artificial Sequence
  Synthetic oligonucleotide; TTA chr2 60511347 60511368 60511352 60511347 -
attcagacttctccttgttatt

SEQ ID NO: 217666 - DNA, 22 bp, Artificial Sequence
  Synthetic oligonucleotide; TTC chr2 60511343 60511364 60511348 60511343 -
agacttctccttgttattgcct

SEQ ID NO: 217667 - DNA, 22 bp, Artificial Sequence
  Synthetic oligonucleotide; CTT chr2 60511337 60511358 60511342 60511337 -
ctccttgttattgcctactggg

SEQ ID NO: 217668 - DNA, 22 bp, Artificial Sequence
  Synthetic oligonucleotide; TTC chr2 60511336 60511357 60511341 60511336 -
tccttgttattgcctactgggg

SEQ ID NO: 217669 - DNA, 22 bp, Artificial Sequence
  Synthetic oligonucleotide; CTC chr2 60511334 60511355 60511339 60511334 -
cttgttattgcctactggggag

SEQ ID NO: 217670 - DNA, 22 bp, Artificial Sequence
  Synthetic oligonucleotide; CTT chr2 60511331 60511352 60511336 60511331 -
gttattgcctactggggagcac

SEQ ID NO: 217671 - DNA, 22 bp, Artificial Sequence
  Synthetic oligonucleotide; TTG chr2 60511330 60511351 60511335 60511330 -
ttattgcctactggggagcact

SEQ ID NO: 217672 - DNA, 22 bp, Artificial Sequence
  Synthetic oligonucleotide; TTA chr2 60511327 60511348 60511332 60511327 -
ttgcctactggggagcacttat

SEQ ID NO: 217673 - DNA, 22 bp, Artificial Sequence
  Synthetic oligonucleotide; TTG chr2 60511324 60511345 60511329 60511324 -
cctactggggagcacttattca

SEQ ID NO: 217674 - DNA, 22 bp, Artificial Sequence
  Synthetic oligonucleotide; CTA chr2 60511320 60511341 60511325 60511320 -
ctggggagcacttattcacctg

SEQ ID NO: 217675 - DNA, 22 bp, Artificial Sequence
  Synthetic oligonucleotide; CTG chr2 60511317 60511338 60511322 60511317 -
gggagcacttattcacctgtca

SEQ ID NO: 217676 - DNA, 22 bp, Artificial Sequence
  Synthetic oligonucleotide; CTT chr2 60511307 60511328 60511312 60511307 -
attcacctgtcaaattgtatgc

SEQ ID NO: 217677 - DNA, 22 bp, Artificial Sequence
  Synthetic oligonucleotide; TTA chr2 60511306 60511327 60511311 60511306 -
ttcacctgtcaaattgtatgct

SEQ ID NO: 217678 - DNA, 22 bp, Artificial Sequence
  Synthetic oligonucleotide; TTC chr2 60511303 60511324 60511308 60511303 -
acctgtcaaattgtatgctagg

SEQ ID NO: 217679 - DNA, 22 bp, Artificial Sequence
  Synthetic oligonucleotide; CTG chr2 60511298 60511319 60511303 60511298 -
tcaaattgtatgctagggtggg

SEQ ID NO: 217680 - DNA, 22 bp, Artificial Sequence
  Synthetic oligonucleotide; TTG chr2 60511290 60511311 60511295 60511290 -
tatgctagggtgggaaagggta

SEQ ID NO: 217681 - DNA, 22 bp, Artificial Sequence
  Synthetic oligonucleotide; CTA chr2 60511283 60511304 60511288 60511283 -
gggtgggaaagggtattttagc

SEQ ID NO: 217682 - DNA, 22 bp, Artificial Sequence
  Synthetic oligonucleotide; TTT chr2 60511265 60511286 60511270 60511265 -
tagcttttctggctgcatcccg

SEQ ID NO: 217683 - DNA, 22 bp, Artificial Sequence
  Synthetic oligonucleotide; TTT chr2 60511264 60511285 60511269 60511264 -
agcttttctggctgcatcccgg

SEQ ID NO: 217684 - DNA, 22 bp, Artificial Sequence
  Synthetic oligonucleotide; TTA chr2 60511263 60511284 60511268 60511263 -
gcttttctggctgcatcccggg

SEQ ID NO: 217685 - DNA, 22 bp, Artificial Sequence
  Synthetic oligonucleotide; CTT chr2 60511259 60511280 60511264 60511259 -
ttctggctgcatcccgggctct

SEQ ID NO: 217686 - DNA, 22 bp, Artificial Sequence
  Synthetic oligonucleotide; TTT chr2 60511258 60511279 60511263 60511258 -
tctggctgcatcccgggctctc

SEQ ID NO: 217687 - DNA, 22 bp, Artificial Sequence
  Synthetic oligonucleotide; TTT chr2 60511257 60511278 60511262 60511257 -
ctggctgcatcccgggctctca

SEQ ID NO: 217688 - DNA, 22 bp, Artificial Sequence
  Synthetic oligonucleotide; TTC chr2 60511256 60511277 60511261 60511256 -
tggctgcatcccgggctctcag

SEQ ID NO: 217689 - DNA, 22 bp, Artificial Sequence
  Synthetic oligonucleotide; CTG chr2 60511254 60511275 60511259 60511254 -
gctgcatcccgggctctcaggt

SEQ ID NO: 217690 - DNA, 22 bp, Artificial Sequence
  Synthetic oligonucleotide; CTG chr2 60511250 60511271 60511255 60511250 -
catcccgggctctcaggtagaa

SEQ ID NO: 217691 - DNA, 22 bp, Artificial Sequence
  Synthetic oligonucleotide; CTC chr2 60511238 60511259 60511243 60511238 -
tcaggtagaagggatttgtccc

SEQ ID NO: 217692 - DNA, 22 bp, Artificial Sequence
  Synthetic oligonucleotide; CTC chr2 60511236 60511257 60511241 60511236 -
aggtagaagggatttgtccctt

SEQ ID NO: 217693 - DNA, 22 bp, Artificial Sequence
  Synthetic oligonucleotide; TTT chr2 60511221 60511242 60511226 60511221 -
gtccctttgccatggcctcctt

SEQ ID NO: 217694 - DNA, 22 bp, Artificial Sequence
  Synthetic oligonucleotide; TTG chr2 60511220 60511241 60511225 60511220 -
tccctttgccatggcctccttc

SEQ ID NO: 217695 - DNA, 22 bp, Artificial Sequence
  Synthetic oligonucleotide; CTT chr2 60511214 60511235 60511219 60511214 -
tgccatggcctccttctctcct

SEQ ID NO: 217696 - DNA, 22 bp, Artificial Sequence
  Synthetic oligonucleotide; TTT chr2 60511213 60511234 60511218 60511213 -
gccatggcctccttctctcctg

SEQ ID NO: 217697 - DNA, 22 bp, Artificial Sequence
  Synthetic oligonucleotide; TTG chr2 60511212 60511233 60511217 60511212 -
ccatggcctccttctctcctgc

SEQ ID NO: 217698 - DNA, 22 bp, Artificial Sequence
  Synthetic oligonucleotide; CTC chr2 60511202 60511223 60511207 60511202 -
cttctctcctgccctccccagt

SEQ ID NO: 217699 - DNA, 22 bp, Artificial Sequence
  Synthetic oligonucleotide; CTT chr2 60511199 60511220 60511204 60511199 -
ctctcctgccctccccagtgcc

SEQ ID NO: 217700 - DNA, 22 bp, Artificial Sequence
  Synthetic oligonucleotide; TTC chr2 60511198 60511219 60511203 60511198 -
tctcctgccctccccagtgccc

SEQ ID NO: 217701 - DNA, 22 bp, Artificial Sequence
  Synthetic oligonucleotide; CTC chr2 60511196 60511217 60511201 60511196 -
tcctgccctccccagtgcccct

SEQ ID NO: 217702 - DNA, 22 bp, Artificial Sequence
  Synthetic oligonucleotide; CTC chr2 60511194 60511215 60511199 60511194 -
ctgccctccccagtgcccctgc

SEQ ID NO: 217703 - DNA, 22 bp, Artificial Sequence
  Synthetic oligonucleotide; CTG chr2 60511191 60511212 60511196 60511191 -
ccctccccagtgcccctgccag

SEQ ID NO: 217704 - DNA, 22 bp, Artificial Sequence
  Synthetic oligonucleotide; CTC chr2 60511186 60511207 60511191 60511186 -
cccagtgcccctgccaggagga

SEQ ID NO: 217705 - DNA, 22 bp, Artificial Sequence
  Synthetic oligonucleotide; CTG chr2 60511173 60511194 60511178 60511173 -
ccaggaggagggagaatctgaa

SEQ ID NO: 217706 - DNA, 22 bp, Artificial Sequence
  Synthetic oligonucleotide; CTG chr2 60511153 60511174 60511158 60511153 -
aaagcaagaatggagggagagt

SEQ ID NO: 217707 - DNA, 22 bp, Artificial Sequence
  Synthetic oligonucleotide; CTG chr2 60511112 60511133 60511117 60511112 -
ggatttgtgcctggccagtgcc

SEQ ID NO: 217708 - DNA, 22 bp, Artificial Sequence
  Synthetic oligonucleotide; TTT chr2 60511106 60511127 60511111 60511106 -
gtgcctggccagtgcccctgca

SEQ ID NO: 217709 - DNA, 22 bp, Artificial Sequence
  Synthetic oligonucleotide; TTG chr2 60511105 60511126 60511110 60511105 -
tgcctggccagtgcccctgcac

SEQ ID NO: 217710 - DNA, 22 bp, Artificial Sequence
  Synthetic oligonucleotide; CTG chr2 60511099 60511120 60511104 60511099 -
gccagtgcccctgcacagtatt

SEQ ID NO: 217711 - DNA, 22 bp, Artificial Sequence
  Synthetic oligonucleotide; CTG chr2 60511086 60511107 60511091 60511086 -
cacagtattggatatgagtatg

SEQ ID NO: 217712 - DNA, 22 bp, Artificial Sequence
  Synthetic oligonucleotide; TTG chr2 60511076 60511097 60511081 60511076 -
gatatgagtatgggcatctcag

SEQ ID NO: 217713 - DNA, 22 bp, Artificial Sequence
  Synthetic oligonucleotide; CTC chr2 60511056 60511077 60511061 60511056 -
agtgtgcctggaaacgcagttg

SEQ ID NO: 217714 - DNA, 22 bp, Artificial Sequence
  Synthetic oligonucleotide; CTG chr2 60511046 60511067 60511051 60511046 -
gaaacgcagttggctgcacagc

SEQ ID NO: 217715 - DNA, 22 bp, Artificial Sequence
  Synthetic oligonucleotide; TTG chr2 60511034 60511055 60511039 60511034 -
gctgcacagccccagtgggaag

SEQ ID NO: 217716 - DNA, 22 bp, Artificial Sequence
  Synthetic oligonucleotide; CTG chr2 60511030 60511051 60511035 60511030 -
cacagccccagtgggaagaact

SEQ ID NO: 217717 - DNA, 22 bp, Artificial Sequence
  Synthetic oligonucleotide; CTC chr2 60511007 60511028 60511012 60511007 -
tgaggaactgctggtggttggc

SEQ ID NO: 217718 - DNA, 22 bp, Artificial Sequence
  Synthetic oligonucleotide; CTG chr2 60511005 60511026 60511010 60511005 -
aggaactgctggtggttggctc

SEQ ID NO: 217719 - DNA, 22 bp, Artificial Sequence
  Synthetic oligonucleotide; CTG chr2 60510997 60511018 60511002 60510997 -
ctggtggttggctcttccccag

SEQ ID NO: 217720 - DNA, 22 bp, Artificial Sequence
  Synthetic oligonucleotide; CTG chr2 60510994 60511015 60510999 60510994 -
gtggttggctcttccccaggct

SEQ ID NO: 217721 - DNA, 22 bp, Artificial Sequence
  Synthetic oligonucleotide; TTG chr2 60510987 60511008 60510992 60510987 -
gctcttccccaggctctcagcc

SEQ ID NO: 217722 - DNA, 22 bp, Artificial Sequence
  Synthetic oligonucleotide; CTC chr2 60510983 60511004 60510988 60510983 -
ttccccaggctctcagcccctc

SEQ ID NO: 217723 - DNA, 22 bp, Artificial Sequence
  Synthetic oligonucleotide; CTT chr2 60510981 60511002 60510986 60510981 -
ccccaggctctcagcccctctt

SEQ ID NO: 217724 - DNA, 22 bp, Artificial Sequence
  Synthetic oligonucleotide; TTC chr2 60510980 60511001 60510985 60510980 -
cccaggctctcagcccctcttt

SEQ ID NO: 217725 - DNA, 22 bp, Artificial Sequence
  Synthetic oligonucleotide; CTC chr2 60510971 60510992 60510976 60510971 -
tcagcccctctttctagaggct

SEQ ID NO: 217726 - DNA, 22 bp, Artificial Sequence
  Synthetic oligonucleotide; CTC chr2 60510969 60510990 60510974 60510969 -
agcccctctttctagaggctcc

SEQ ID NO: 217727 - DNA, 22 bp, Artificial Sequence
  Synthetic oligonucleotide; CTC chr2 60510961 60510982 60510966 60510961 -
tttctagaggctccacctaagc

SEQ ID NO: 217728 - DNA, 22 bp, Artificial Sequence
  Synthetic oligonucleotide; CTT chr2 60510959 60510980 60510964 60510959 -
tctagaggctccacctaagcct

SEQ ID NO: 217729 - DNA, 22 bp, Artificial Sequence
  Synthetic oligonucleotide; TTT chr2 60510958 60510979 60510963 60510958 -
ctagaggctccacctaagcctt

SEQ ID NO: 217730 - DNA, 22 bp, Artificial Sequence
  Synthetic oligonucleotide; TTC chr2 60510957 60510978 60510962 60510957 -
tagaggctccacctaagcctta

SEQ ID NO: 217731 - DNA, 22 bp, Artificial Sequence
  Synthetic oligonucleotide; CTA chr2 60510955 60510976 60510960 60510955 -
gaggctccacctaagccttagg

SEQ ID NO: 217732 - DNA, 22 bp, Artificial Sequence
  Synthetic oligonucleotide; CTC chr2 60510948 60510969 60510953 60510948 -
cacctaagccttaggaaagact

SEQ ID NO: 217733 - DNA, 22 bp, Artificial Sequence
  Synthetic oligonucleotide; CTA chr2 60510942 60510963 60510947 60510942 -
agccttaggaaagactttcgtt

SEQ ID NO: 217734 - DNA, 22 bp, Artificial Sequence
  Synthetic oligonucleotide; CTT chr2 60510936 60510957 60510941 60510936 -
aggaaagactttcgtttggttt

SEQ ID NO: 217735 - DNA, 22 bp, Artificial Sequence
  Synthetic oligonucleotide; TTA chr2 60510935 60510956 60510940 60510935 -
ggaaagactttcgtttggtttt

SEQ ID NO: 217736 - DNA, 22 bp, Artificial Sequence
  Synthetic oligonucleotide; CTT chr2 60510925 60510946 60510930 60510925 -
tcgtttggttttaactggctcc

SEQ ID NO: 217737 - DNA, 22 bp, Artificial Sequence
  Synthetic oligonucleotide; TTT chr2 60510924 60510945 60510929 60510924 -
cgtttggttttaactggctcct

SEQ ID NO: 217738 - DNA, 22 bp, Artificial Sequence
  Synthetic oligonucleotide; TTC chr2 60510923 60510944 60510928 60510923 -
gtttggttttaactggctcctg

SEQ ID NO: 217739 - DNA, 22 bp, Artificial Sequence
  Synthetic oligonucleotide; TTT chr2 60510919 60510940 60510924 60510919 -
ggttttaactggctcctgtcaa

SEQ ID NO: 217740 - DNA, 22 bp, Artificial Sequence
  Synthetic oligonucleotide; TTG chr2 60510918 60510939 60510923 60510918 -
gttttaactggctcctgtcaag

SEQ ID NO: 217741 - DNA, 22 bp, Artificial Sequence
  Synthetic oligonucleotide; TTT chr2 60510914 60510935 60510919 60510914 -
taactggctcctgtcaagggtt

SEQ ID NO: 217742 - DNA, 22 bp, Artificial Sequence
  Synthetic oligonucleotide; TTT chr2 60510913 60510934 60510918 60510913 -
aactggctcctgtcaagggttc

SEQ ID NO: 217743 - DNA, 22 bp, Artificial Sequence
  Synthetic oligonucleotide; TTA chr2 60510912 60510933 60510917 60510912 -
actggctcctgtcaagggttcc

SEQ ID NO: 217744 - DNA, 22 bp, Artificial Sequence
  Synthetic oligonucleotide; CTG chr2 60510908 60510929 60510913 60510908 -
gctcctgtcaagggttccccca

SEQ ID NO: 217745 - DNA, 22 bp, Artificial Sequence
  Synthetic oligonucleotide; CTC chr2 60510904 60510925 60510909 60510904 -
ctgtcaagggttcccccaaacc

SEQ ID NO: 217746 - DNA, 22 bp, Artificial Sequence
  Synthetic oligonucleotide; CTG chr2 60510901 60510922 60510906 60510901 -
tcaagggttcccccaaaccagc

SEQ ID NO: 217747 - DNA, 22 bp, Artificial Sequence
  Synthetic oligonucleotide; TTC chr2 60510891 60510912 60510896 60510891 -
ccccaaaccagctcaacccctc

SEQ ID NO: 217748 - DNA, 22 bp, Artificial Sequence
  Synthetic oligonucleotide; CTC chr2 60510877 60510898 60510882 60510877 -
aacccctccatttacattataa

SEQ ID NO: 217749 - DNA, 22 bp, Artificial Sequence
  Synthetic oligonucleotide; CTC chr2 60510869 60510890 60510874 60510869 -
catttacattataatgcaaaag

SEQ ID NO: 217750 - DNA, 22 bp, Artificial Sequence
  Synthetic oligonucleotide; TTT chr2 60510864 60510885 60510869 60510864 -
acattataatgcaaaagctctt

SEQ ID NO: 217751 - DNA, 22 bp, Artificial Sequence
  Synthetic oligonucleotide; TTA chr2 60510863 60510884 60510868 60510863 -
cattataatgcaaaagctcttc

SEQ ID NO: 217752 - DNA, 22 bp, Artificial Sequence
  Synthetic oligonucleotide; TTA chr2 60510858 60510879 60510863 60510858 -
taatgcaaaagctcttccctgt

SEQ ID NO: 217753 - DNA, 22 bp, Artificial Sequence
  Synthetic oligonucleotide; CTC chr2 60510844 60510865 60510849 60510844 -
ttccctgtgggtctcagggcct

SEQ ID NO: 217754 - DNA, 22 bp, Artificial Sequence
  Synthetic oligonucleotide; CTT chr2 60510842 60510863 60510847 60510842 -
ccctgtgggtctcagggcctgt

SEQ ID NO: 217755 - DNA, 22 bp, Artificial Sequence
  Synthetic oligonucleotide; TTC chr2 60510841 60510862 60510846 60510841 -
cctgtgggtctcagggcctgtg

SEQ ID NO: 217756 - DNA, 22 bp, Artificial Sequence
  Synthetic oligonucleotide; CTG chr2 60510837 60510858 60510842 60510837 -
tgggtctcagggcctgtgggga

SEQ ID NO: 217757 - DNA, 22 bp, Artificial Sequence
  Synthetic oligonucleotide; CTC chr2 60510829 60510850 60510834 60510829 -
agggcctgtggggaaaatggaa

SEQ ID NO: 217758 - DNA, 22 bp, Artificial Sequence
  Synthetic oligonucleotide; CTG chr2 60510821 60510842 60510826 60510821 -
tggggaaaatggaatctggctc

SEQ ID NO: 217759 - DNA, 22 bp, Artificial Sequence
  Synthetic oligonucleotide; CTG chr2 60510803 60510824 60510808 60510803 -
gctcaaacccaagatccaaagc

SEQ ID NO: 217760 - DNA, 22 bp, Artificial Sequence
  Synthetic oligonucleotide; CTC chr2 60510799 60510820 60510804 60510799 -
aaacccaagatccaaagctaaa

SEQ ID NO: 217761 - DNA, 22 bp, Artificial Sequence
  Synthetic oligonucleotide; CTA chr2 60510779 60510800 60510784 60510779 -
aagtgcccccaggttgggctgc

SEQ ID NO: 217762 - DNA, 22 bp, Artificial Sequence
  Synthetic oligonucleotide; TTG chr2 60510763 60510784 60510768 60510763 -
ggctgcctgacagttttataga

SEQ ID NO: 217763 - DNA, 22 bp, Artificial Sequence
  Synthetic oligonucleotide; CTG chr2 60510758 60510779 60510763 60510758 -
cctgacagttttatagatatgg

SEQ ID NO: 217764 - DNA, 22 bp, Artificial Sequence
  Synthetic oligonucleotide; CTG chr2 60510754 60510775 60510759 60510754 -
acagttttatagatatggcatt

SEQ ID NO: 217765 - DNA, 22 bp, Artificial Sequence
  Synthetic oligonucleotide; TTT chr2 60510747 60510768 60510752 60510747 -
tatagatatggcattgagtggc

SEQ ID NO: 217766 - DNA, 22 bp, Artificial Sequence
  Synthetic oligonucleotide; TTT chr2 60510746 60510767 60510751 60510746 -
atagatatggcattgagtggcc

SEQ ID NO: 217767 - DNA, 22 bp, Artificial Sequence
  Synthetic oligonucleotide; TTA chr2 60510745 60510766 60510750 60510745 -
tagatatggcattgagtggcct

SEQ ID NO: 217768 - DNA, 22 bp, Artificial Sequence
  Synthetic oligonucleotide; TTG chr2 60510731 60510752 60510736 60510731 -
agtggcctcctggcagtttgga

SEQ ID NO: 217769 - DNA, 22 bp, Artificial Sequence
  Synthetic oligonucleotide; CTC chr2 60510722 60510743 60510727 60510722 -
ctggcagtttggaattgtgaag

SEQ ID NO: 217770 - DNA, 22 bp, Artificial Sequence
  Synthetic oligonucleotide; CTG chr2 60510719 60510740 60510724 60510719 -
gcagtttggaattgtgaaggtt

SEQ ID NO: 217771 - DNA, 22 bp, Artificial Sequence
  Synthetic oligonucleotide; TTT chr2 60510712 60510733 60510717 60510712 -
ggaattgtgaaggttcactcat

SEQ ID NO: 217772 - DNA, 22 bp, Artificial Sequence
  Synthetic oligonucleotide; TTG chr2 60510711 60510732 60510716 60510711 -
gaattgtgaaggttcactcatt

SEQ ID NO: 217773 - DNA, 22 bp, Artificial Sequence
  Synthetic oligonucleotide; TTG chr2 60510705 60510726 60510710 60510705 -
tgaaggttcactcattcatttt

SEQ ID NO: 217774 - DNA, 22 bp, Artificial Sequence
  Synthetic oligonucleotide; TTC chr2 60510696 60510717 60510701 60510696 -
actcattcatttttcaacaaat

SEQ ID NO: 217775 - DNA, 22 bp, Artificial Sequence
  Synthetic oligonucleotide; CTC chr2 60510692 60510713 60510697 60510692 -
attcatttttcaacaaatattt

SEQ ID NO: 217776 - DNA, 22 bp, Artificial Sequence
  Synthetic oligonucleotide; TTC chr2 60510688 60510709 60510693 60510688 -
atttttcaacaaatattttgaa

SEQ ID NO: 217777 - DNA, 22 bp, Artificial Sequence
  Synthetic oligonucleotide; TTT chr2 60510684 60510705 60510689 60510684 -
ttcaacaaatattttgaacacc

SEQ ID NO: 217778 - DNA, 22 bp, Artificial Sequence
  Synthetic oligonucleotide; TTT chr2 60510683 60510704 60510688 60510683 -
tcaacaaatattttgaacacct

SEQ ID NO: 217779 - DNA, 22 bp, Artificial Sequence
  Synthetic oligonucleotide; TTT chr2 60510682 60510703 60510687 60510682 -
caacaaatattttgaacacctg

SEQ ID NO: 217780 - DNA, 22 bp, Artificial Sequence
  Synthetic oligonucleotide; TTC chr2 60510681 60510702 60510686 60510681 -
aacaaatattttgaacacctgc

SEQ ID NO: 217781 - DNA, 22 bp, Artificial Sequence
  Synthetic oligonucleotide; TTT chr2 60510670 60510691 60510675 60510670 -
tgaacacctgccacatgctggg

SEQ ID NO: 217782 - DNA, 22 bp, Artificial Sequence
  Synthetic oligonucleotide; TTT chr2 60510669 60510690 60510674 60510669 -
gaacacctgccacatgctggga

SEQ ID NO: 217783 - DNA, 22 bp, Artificial Sequence
  Synthetic oligonucleotide; TTG chr2 60510668 60510689 60510673 60510668 -
aacacctgccacatgctgggaa

SEQ ID NO: 217784 - DNA, 22 bp, Artificial Sequence
  Synthetic oligonucleotide; CTG chr2 60510660 60510681 60510665 60510660 -
ccacatgctgggaacggttctt

SEQ ID NO: 217785 - DNA, 22 bp, Artificial Sequence
  Synthetic oligonucleotide; CTG chr2 60510650 60510671 60510655 60510650 -
ggaacggttcttggtgttgggc

SEQ ID NO: 217786 - DNA, 22 bp, Artificial Sequence
  Synthetic oligonucleotide; TTC chr2 60510640 60510661 60510645 60510640 -
ttggtgttgggcatagaaagcc

SEQ ID NO: 217787 - DNA, 22 bp, Artificial Sequence
  Synthetic oligonucleotide; CTT chr2 60510638 60510659 60510643 60510638 -
ggtgttgggcatagaaagcctt

SEQ ID NO: 217788 - DNA, 22 bp, Artificial Sequence
  Synthetic oligonucleotide; TTG chr2 60510637 60510658 60510642 60510637 -
gtgttgggcatagaaagcctta

SEQ ID NO: 217789 - DNA, 22 bp, Artificial Sequence
  Synthetic oligonucleotide; TTG chr2 60510631 60510652 60510636 60510631 -
ggcatagaaagccttaaaaact

SEQ ID NO: 217790 - DNA, 22 bp, Artificial Sequence
  Synthetic oligonucleotide; CTT chr2 60510616 60510637 60510621 60510616 -
aaaaactccctgctcttgtggc

SEQ ID NO: 217791 - DNA, 22 bp, Artificial Sequence
  Synthetic oligonucleotide; TTA chr2 60510615 60510636 60510620 60510615 -
aaaactccctgctcttgtggca

SEQ ID NO: 217792 - DNA, 22 bp, Artificial Sequence
  Synthetic oligonucleotide; CTC chr2 60510608 60510629 60510613 60510608 -
cctgctcttgtggcaccccctt

SEQ ID NO: 217793 - DNA, 22 bp, Artificial Sequence
  Synthetic oligonucleotide; CTG chr2 60510604 60510625 60510609 60510604 -
ctcttgtggcaccccctttcta

SEQ ID NO: 217794 - DNA, 22 bp, Artificial Sequence
  Synthetic oligonucleotide; CTC chr2 60510601 60510622 60510606 60510601 -
ttgtggcaccccctttctagct

SEQ ID NO: 217795 - DNA, 22 bp, Artificial Sequence
  Synthetic oligonucleotide; CTT chr2 60510599 60510620 60510604 60510599 -
gtggcaccccctttctagctgg

SEQ ID NO: 217796 - DNA, 22 bp, Artificial Sequence
  Synthetic oligonucleotide; TTG chr2 60510598 60510619 60510603 60510598 -
tggcaccccctttctagctggg

SEQ ID NO: 217797 - DNA, 22 bp, Artificial Sequence
  Synthetic oligonucleotide; CTT chr2 60510586 60510607 60510591 60510586 -
tctagctggggagagacagaag

SEQ ID NO: 217798 - DNA, 22 bp, Artificial Sequence
  Synthetic oligonucleotide; TTT chr2 60510585 60510606 60510590 60510585 -
ctagctggggagagacagaaga

SEQ ID NO: 217799 - DNA, 22 bp, Artificial Sequence
  Synthetic oligonucleotide; TTC chr2 60510584 60510605 60510589 60510584 -
tagctggggagagacagaagat

SEQ ID NO: 217800 - DNA, 22 bp, Artificial Sequence
  Synthetic oligonucleotide; CTA chr2 60510582 60510603 60510587 60510582 -
gctggggagagacagaagatgc

SEQ ID NO: 217801 - DNA, 22 bp, Artificial Sequence
  Synthetic oligonucleotide; CTG chr2 60510578 60510599 60510583 60510578 -
gggagagacagaagatgcacca

SEQ ID NO: 217802 - DNA, 22 bp, Artificial Sequence
  Synthetic oligonucleotide; TTA chr2 60510540 60510561 60510545 60510540 -
tatagtatggcaagagaagatc

SEQ ID NO: 217803 - DNA, 22 bp, Artificial Sequence
  Synthetic oligonucleotide; CTG chr2 60510512 60510533 60510517 60510512 -
cctgcacgaaaataaggtgggg

SEQ ID NO: 217804 - DNA, 22 bp, Artificial Sequence
  Synthetic oligonucleotide; CTG chr2 60510508 60510529 60510513 60510508 -
cacgaaaataaggtggggaaga

SEQ ID NO: 217805 - DNA, 22 bp, Artificial Sequence
  Synthetic oligonucleotide; CTT chr2 60510457 60510478 60510462 60510457 -
ttaaataggataattagggaag

SEQ ID NO: 217806 - DNA, 22 bp, Artificial Sequence
  Synthetic oligonucleotide; TTT chr2 60510456 60510477 60510461 60510456 -
taaataggataattagggaagg

SEQ ID NO: 217807 - DNA, 22 bp, Artificial Sequence
  Synthetic oligonucleotide; TTT chr2 60510455 60510476 60510460 60510455 -
aaataggataattagggaaggc

SEQ ID NO: 217808 - DNA, 22 bp, Artificial Sequence
  Synthetic oligonucleotide; TTA chr2 60510454 60510475 60510459 60510454 -
aataggataattagggaaggcc

SEQ ID NO: 217809 - DNA, 22 bp, Artificial Sequence
  Synthetic oligonucleotide; TTA chr2 60510441 60510462 60510446 60510441 -
gggaaggcccaatgagaagcaa

SEQ ID NO: 217810 - DNA, 22 bp, Artificial Sequence
  Synthetic oligonucleotide; CTC chr2 60510413 60510434 60510418 60510413 -
caaagaggtgaggaagttggcc

SEQ ID NO: 217811 - DNA, 22 bp, Artificial Sequence
  Synthetic oligonucleotide; TTG chr2 60510394 60510415 60510399 60510394 -
gccatgagaattttgagaagat

SEQ ID NO: 217812 - DNA, 22 bp, Artificial Sequence
  Synthetic oligonucleotide; TTT chr2 60510381 60510402 60510386 60510381 -
tgagaagatggttccaggaaga

SEQ ID NO: 217813 - DNA, 22 bp, Artificial Sequence
  Synthetic oligonucleotide; TTT chr2 60510380 60510401 60510385 60510380 -
gagaagatggttccaggaagag

SEQ ID NO: 217814 - DNA, 22 bp, Artificial Sequence
  Synthetic oligonucleotide; TTG chr2 60510379 60510400 60510384 60510379 -
agaagatggttccaggaagagt

SEQ ID NO: 217815 - DNA, 22 bp, Artificial Sequence
  Synthetic oligonucleotide; TTC chr2 60510367 60510388 60510372 60510367 -
caggaagagtgtgtagagagca

SEQ ID NO: 217816 - DNA, 22 bp, Artificial Sequence
  Synthetic oligonucleotide; CTT chr2 60510337 60510358 60510342 60510337 -
gtgtgtaatacgcctggctact

SEQ ID NO: 217817 - DNA, 22 bp, Artificial Sequence
  Synthetic oligonucleotide; TTG chr2 60510336 60510357 60510341 60510336 -
tgtgtaatacgcctggctactg

SEQ ID NO: 217818 - DNA, 22 bp, Artificial Sequence
  Synthetic oligonucleotide; CTG chr2 60510321 60510342 60510326 60510321 -
gctactggaggaggagcaaggg

SEQ ID NO: 217819 - DNA, 22 bp, Artificial Sequence
  Synthetic oligonucleotide; CTA chr2 60510317 60510338 60510322 60510317 -
ctggaggaggagcaaggggccc

SEQ ID NO: 217820 - DNA, 22 bp, Artificial Sequence
  Synthetic oligonucleotide; CTG chr2 60510314 60510335 60510319 60510314 -
gaggaggagcaaggggccctga

SEQ ID NO: 217821 - DNA, 22 bp, Artificial Sequence
  Synthetic oligonucleotide; CTG chr2 60510293 60510314 60510298 60510293 -
aggtcagagtggaaagagtgca

SEQ ID NO: 217822 - DNA, 22 bp, Artificial Sequence
  Synthetic oligonucleotide; CTG chr2 60510245 60510266 60510250 60510245 -
gctccttgaaggacgtagagca

SEQ ID NO: 217823 - DNA, 22 bp, Artificial Sequence
  Synthetic oligonucleotide; CTC chr2 60510241 60510262 60510246 60510241 -
cttgaaggacgtagagcaggga

SEQ ID NO: 217824 - DNA, 22 bp, Artificial Sequence
  Synthetic oligonucleotide; CTT chr2 60510238 60510259 60510243 60510238 -
gaaggacgtagagcagggattt

SEQ ID NO: 217825 - DNA, 22 bp, Artificial Sequence
  Synthetic oligonucleotide; TTG chr2 60510237 60510258 60510242 60510237 -
aaggacgtagagcagggatttt

SEQ ID NO: 217826 - DNA, 22 bp, Artificial Sequence
  Synthetic oligonucleotide; TTT chr2 60510216 60510237 60510221 60510216 -
ttggctctgactccaagggaga

SEQ ID NO: 217827 - DNA, 22 bp, Artificial Sequence
  Synthetic oligonucleotide; TTT chr2 60510215 60510236 60510220 60510215 -
tggctctgactccaagggagat

SEQ ID NO: 217828 - DNA, 22 bp, Artificial Sequence
  Synthetic oligonucleotide; TTT chr2 60510214 60510235 60510219 60510214 -
ggctctgactccaagggagatg

SEQ ID NO: 217829 - DNA, 22 bp, Artificial Sequence
  Synthetic oligonucleotide; TTG chr2 60510213 60510234 60510218 60510213 -
gctctgactccaagggagatgg

SEQ ID NO: 217830 - DNA, 22 bp, Artificial Sequence
  Synthetic oligonucleotide; CTC chr2 60510209 60510230 60510214 60510209 -
tgactccaagggagatggaagc

SEQ ID NO: 217831 - DNA, 22 bp, Artificial Sequence
  Synthetic oligonucleotide; CTG chr2 60510207 60510228 60510212 60510207 -
actccaagggagatggaagcca

SEQ ID NO: 217832 - DNA, 22 bp, Artificial Sequence
  Synthetic oligonucleotide; CTC chr2 60510203 60510224 60510208 60510203 -
caagggagatggaagccactgg

SEQ ID NO: 217833 - DNA, 22 bp, Artificial Sequence
  Synthetic oligonucleotide; CTG chr2 60510182 60510203 60510187 60510182 -
gaggagtgatgtcatatgactt

SEQ ID NO: 217834 - DNA, 22 bp, Artificial Sequence
  Synthetic oligonucleotide; CTT chr2 60510160 60510181 60510165 60510160 -
gcgcttccagagagtctcttgg

SEQ ID NO: 217835 - DNA, 22 bp, Artificial Sequence
  Synthetic oligonucleotide; TTG chr2 60510159 60510180 60510164 60510159 -
cgcttccagagagtctcttggg

SEQ ID NO: 217836 - DNA, 22 bp, Artificial Sequence
  Synthetic oligonucleotide; CTT chr2 60510154 60510175 60510159 60510154 -
ccagagagtctcttgggccgca

SEQ ID NO: 217837 - DNA, 22 bp, Artificial Sequence
  Synthetic oligonucleotide; TTC chr2 60510153 60510174 60510158 60510153 -
cagagagtctcttgggccgcat

SEQ ID NO: 217838 - DNA, 22 bp, Artificial Sequence
  Synthetic oligonucleotide; CTC chr2 60510142 60510163 60510147 60510142 -
ttgggccgcattttgagactca

SEQ ID NO: 217839 - DNA, 22 bp, Artificial Sequence
  Synthetic oligonucleotide; CTT chr2 60510140 60510161 60510145 60510140 -
gggccgcattttgagactcaag

SEQ ID NO: 217840 - DNA, 22 bp, Artificial Sequence
  Synthetic oligonucleotide; TTG chr2 60510139 60510160 60510144 60510139 -
ggccgcattttgagactcaagc

SEQ ID NO: 217841 - DNA, 22 bp, Artificial Sequence
  Synthetic oligonucleotide; TTT chr2 60510129 60510150 60510134 60510129 -
tgagactcaagcatgggaaagt

SEQ ID NO: 217842 - DNA, 22 bp, Artificial Sequence
  Synthetic oligonucleotide; TTT chr2 60510128 60510149 60510133 60510128 -
gagactcaagcatgggaaagtg

SEQ ID NO: 217843 - DNA, 22 bp, Artificial Sequence
  Synthetic oligonucleotide; TTG chr2 60510127 60510148 60510132 60510127 -
agactcaagcatgggaaagtga

SEQ ID NO: 217844 - DNA, 22 bp, Artificial Sequence
  Synthetic oligonucleotide; CTC chr2 60510121 60510142 60510126 60510121 -
aagcatgggaaagtgaggcaga

SEQ ID NO: 217845 - DNA, 22 bp, Artificial Sequence
  Synthetic oligonucleotide; TTT chr2 60510079 60510100 60510084 60510079 -
taggcaagtgatggtggcgtgg

SEQ ID NO: 217846 - DNA, 22 bp, Artificial Sequence
  Synthetic oligonucleotide; TTT chr2 60510078 60510099 60510083 60510078 -
aggcaagtgatggtggcgtgga

SEQ ID NO: 217847 - DNA, 22 bp, Artificial Sequence
  Synthetic oligonucleotide; TTA chr2 60510077 60510098 60510082 60510077 -
ggcaagtgatggtggcgtggac

SEQ ID NO: 217848 - DNA, 22 bp, Artificial Sequence
  Synthetic oligonucleotide; CTG chr2 60510026 60510047 60510031 60510026 -
gattctggacatacttcgaagg

SEQ ID NO: 217849 - DNA, 22 bp, Artificial Sequence
  Synthetic oligonucleotide; TTC chr2 60510021 60510042 60510026 60510021 -
tggacatacttcgaagggaaaa

SEQ ID NO: 217850 - DNA, 22 bp, Artificial Sequence
  Synthetic oligonucleotide; CTG chr2 60510019 60510040 60510024 60510019 -
gacatacttcgaagggaaaacc

SEQ ID NO: 217851 - DNA, 22 bp, Artificial Sequence
  Synthetic oligonucleotide; CTT chr2 60510010 60510031 60510015 60510010 -
cgaagggaaaaccggcaggatt

SEQ ID NO: 217852 - DNA, 22 bp, Artificial Sequence
  Synthetic oligonucleotide; TTC chr2 60510009 60510030 60510014 60510009 -
gaagggaaaaccggcaggattt

SEQ ID NO: 217853 - DNA, 22 bp, Artificial Sequence
  Synthetic oligonucleotide; TTT chr2 60509987 60510008 60509992 60509987 -
gctgactggtgggatgggttgt

SEQ ID NO: 217854 - DNA, 22 bp, Artificial Sequence
  Synthetic oligonucleotide; TTG chr2 60509986 60510007 60509991 60509986 -
ctgactggtgggatgggttgta

SEQ ID NO: 217855 - DNA, 22 bp, Artificial Sequence
  Synthetic oligonucleotide; CTG chr2 60509983 60510004 60509988 60509983 -
actggtgggatgggttgtatga

SEQ ID NO: 217856 - DNA, 22 bp, Artificial Sequence
  Synthetic oligonucleotide; CTG chr2 60509979 60510000 60509984 60509979 -
gtgggatgggttgtatgaaagg

SEQ ID NO: 217857 - DNA, 22 bp, Artificial Sequence
  Synthetic oligonucleotide; TTG chr2 60509966 60509987 60509971 60509966 -
tatgaaaggaagggaggagtca

SEQ ID NO: 217858 - DNA, 22 bp, Artificial Sequence
  Synthetic oligonucleotide; CTC chr2 60509919 60509940 60509924 60509919 -
ggtgactgggagaatagaattg

SEQ ID NO: 217859 - DNA, 22 bp, Artificial Sequence
  Synthetic oligonucleotide; CTG chr2 60509911 60509932 60509916 60509911 -
ggagaatagaattgctgtttat

SEQ ID NO: 217860 - DNA, 22 bp, Artificial Sequence
  Synthetic oligonucleotide; TTG chr2 60509897 60509918 60509902 60509897 -
ctgtttattgggatgggccaga

SEQ ID NO: 217861 - DNA, 22 bp, Artificial Sequence
  Synthetic oligonucleotide; CTG chr2 60509894 60509915 60509899 60509894 -
tttattgggatgggccagaaag

SEQ ID NO: 217862 - DNA, 22 bp, Artificial Sequence
  Synthetic oligonucleotide; TTT chr2 60509891 60509912 60509896 60509891 -
attgggatgggccagaaaggct

SEQ ID NO: 217863 - DNA, 22 bp, Artificial Sequence
  Synthetic oligonucleotide; TTA chr2 60509890 60509911 60509895 60509890 -
ttgggatgggccagaaaggctg

SEQ ID NO: 217864 - DNA, 22 bp, Artificial Sequence
  Synthetic oligonucleotide; TTG chr2 60509887 60509908 60509892 60509887 -
ggatgggccagaaaggctgtgg

SEQ ID NO: 217865 - DNA, 22 bp, Artificial Sequence
  Synthetic oligonucleotide; CTG chr2 60509868 60509889 60509873 60509868 -
tggaggtgctcagaggatgggt

SEQ ID NO: 217866 - DNA, 22 bp, Artificial Sequence
  Synthetic oligonucleotide; CTC chr2 60509857 60509878 60509862 60509857 -
agaggatgggtgtgtctggggc

SEQ ID NO: 217867 - DNA, 22 bp, Artificial Sequence
  Synthetic oligonucleotide; CTG chr2 60509839 60509860 60509844 60509839 -
gggctccttcaccacttcagga

SEQ ID NO: 217868 - DNA, 22 bp, Artificial Sequence
  Synthetic oligonucleotide; CTC chr2 60509833 60509854 60509838 60509833 -
cttcaccacttcaggacttcag

SEQ ID NO: 217869 - DNA, 22 bp, Artificial Sequence
  Synthetic oligonucleotide; CTT chr2 60509830 60509851 60509835 60509830 -
caccacttcaggacttcagtgg

SEQ ID NO: 217870 - DNA, 22 bp, Artificial Sequence
  Synthetic oligonucleotide; TTC chr2 60509829 60509850 60509834 60509829 -
accacttcaggacttcagtgga

SEQ ID NO: 217871 - DNA, 22 bp, Artificial Sequence
  Synthetic oligonucleotide; CTT chr2 60509822 60509843 60509827 60509822 -
caggacttcagtggatgctaga

SEQ ID NO: 217872 - DNA, 22 bp, Artificial Sequence
  Synthetic oligonucleotide; TTC chr2 60509821 60509842 60509826 60509821 -
aggacttcagtggatgctagac

SEQ ID NO: 217873 - DNA, 22 bp, Artificial Sequence
  Synthetic oligonucleotide; CTT chr2 60509814 60509835 60509819 60509814 -
cagtggatgctagactactgcc

SEQ ID NO: 217874 - DNA, 22 bp, Artificial Sequence
  Synthetic oligonucleotide; TTC chr2 60509813 60509834 60509818 60509813 -
agtggatgctagactactgccc

SEQ ID NO: 217875 - DNA, 22 bp, Artificial Sequence
  Synthetic oligonucleotide; CTA chr2 60509802 60509823 60509807 60509802 -
gactactgccctgttcaggaag

SEQ ID NO: 217876 - DNA, 22 bp, Artificial Sequence
  Synthetic oligonucleotide; CTA chr2 60509797 60509818 60509802 60509797 -
ctgccctgttcaggaagatcgt

SEQ ID NO: 217877 - DNA, 22 bp, Artificial Sequence
  Synthetic oligonucleotide; CTG chr2 60509794 60509815 60509799 60509794 -
ccctgttcaggaagatcgtgag

SEQ ID NO: 217878 - DNA, 22 bp, Artificial Sequence
  Synthetic oligonucleotide; CTG chr2 60509789 60509810 60509794 60509789 -
ttcaggaagatcgtgaggggaa

SEQ ID NO: 217879 - DNA, 22 bp, Artificial Sequence
  Synthetic oligonucleotide; TTC chr2 60509786 60509807 60509791 60509786 -
aggaagatcgtgaggggaaaga

SEQ ID NO: 217880 - DNA, 22 bp, Artificial Sequence
  Synthetic oligonucleotide; TTG chr2 60509747 60509768 60509752 60509747 -
tggctgttcggagagccccagt

SEQ ID NO: 217881 - DNA, 22 bp, Artificial Sequence
  Synthetic oligonucleotide; CTG chr2 60509741 60509762 60509746 60509741 -
ttcggagagccccagttgactg

SEQ ID NO: 217882 - DNA, 22 bp, Artificial Sequence
  Synthetic oligonucleotide; TTC chr2 60509738 60509759 60509743 60509738 -
ggagagccccagttgactgcct

SEQ ID NO: 217883 - DNA, 22 bp, Artificial Sequence
  Synthetic oligonucleotide; TTG chr2 60509723 60509744 60509728 60509723 -
actgcctatagctgagatgatt

SEQ ID NO: 217884 - DNA, 22 bp, Artificial Sequence
  Synthetic oligonucleotide; CTG chr2 60509719 60509740 60509724 60509719 -
cctatagctgagatgatttaag

SEQ ID NO: 217885 - DNA, 22 bp, Artificial Sequence
  Synthetic oligonucleotide; CTA chr2 60509715 60509736 60509720 60509715 -
tagctgagatgatttaagtcga

SEQ ID NO: 217886 - DNA, 22 bp, Artificial Sequence
  Synthetic oligonucleotide; CTG chr2 60509709 60509730 60509714 60509709 -
agatgatttaagtcgagttctt

SEQ ID NO: 217887 - DNA, 22 bp, Artificial Sequence
  Synthetic oligonucleotide; TTT chr2 60509700 60509721 60509705 60509700 -
aagtcgagttctttggggaggg

SEQ ID NO: 217888 - DNA, 22 bp, Artificial Sequence
  Synthetic oligonucleotide; TTA chr2 60509699 60509720 60509704 60509699 -
agtcgagttctttggggagggc

SEQ ID NO: 217889 - DNA, 22 bp, Artificial Sequence
  Synthetic oligonucleotide; TTC chr2 60509689 60509710 60509694 60509689 -
tttggggagggccaggtgtttt

SEQ ID NO: 217890 - DNA, 22 bp, Artificial Sequence
  Synthetic oligonucleotide; CTT chr2 60509687 60509708 60509692 60509687 -
tggggagggccaggtgtttttc

SEQ ID NO: 217891 - DNA, 22 bp, Artificial Sequence
  Synthetic oligonucleotide; TTT chr2 60509686 60509707 60509691 60509686 -
ggggagggccaggtgtttttct

SEQ ID NO: 217892 - DNA, 22 bp, Artificial Sequence
  Synthetic oligonucleotide; TTG chr2 60509685 60509706 60509690 60509685 -
gggagggccaggtgtttttctc

SEQ ID NO: 217893 - DNA, 22 bp, Artificial Sequence
  Synthetic oligonucleotide; TTT chr2 60509668 60509689 60509673 60509668 -
ttctcctcctcctaatcttttt

SEQ ID NO: 217894 - DNA, 22 bp, Artificial Sequence
  Synthetic oligonucleotide; TTT chr2 60509667 60509688 60509672 60509667 -
tctcctcctcctaatctttttg

SEQ ID NO: 217895 - DNA, 22 bp, Artificial Sequence
  Synthetic oligonucleotide; TTT chr2 60509666 60509687 60509671 60509666 -
ctcctcctcctaatctttttgt

SEQ ID NO: 217896 - DNA, 22 bp, Artificial Sequence
  Synthetic oligonucleotide; TTC chr2 60509665 60509686 60509670 60509665 -
tcctcctcctaatctttttgtt

SEQ ID NO: 217897 - DNA, 22 bp, Artificial Sequence
  Synthetic oligonucleotide; CTC chr2 60509663 60509684 60509668 60509663 -
ctcctcctaatctttttgttct

SEQ ID NO: 217898 - DNA, 22 bp, Artificial Sequence
  Synthetic oligonucleotide; CTC chr2 60509660 60509681 60509665 60509660 -
ctcctaatctttttgttctttt

SEQ ID NO: 217899 - DNA, 22 bp, Artificial Sequence
  Synthetic oligonucleotide; CTC chr2 60509657 60509678 60509662 60509657 -
ctaatctttttgttctttttcc

SEQ ID NO: 217900 - DNA, 22 bp, Artificial Sequence
  Synthetic oligonucleotide; CTA chr2 60509654 60509675 60509659 60509654 -
atctttttgttctttttccttc

SEQ ID NO: 217901 - DNA, 22 bp, Artificial Sequence
  Synthetic oligonucleotide; CTT chr2 60509649 60509670 60509654 60509649 -
tttgttctttttccttctctgt

SEQ ID NO: 217902 - DNA, 22 bp, Artificial Sequence
  Synthetic oligonucleotide; TTT chr2 60509648 60509669 60509653 60509648 -
ttgttctttttccttctctgtt

SEQ ID NO: 217903 - DNA, 22 bp, Artificial Sequence
  Synthetic oligonucleotide; TTT chr2 60509647 60509668 60509652 60509647 -
tgttctttttccttctctgttg

SEQ ID NO: 217904 - DNA, 22 bp, Artificial Sequence
  Synthetic oligonucleotide; TTT chr2 60509646 60509667 60509651 60509646 -
gttctttttccttctctgttgt

SEQ ID NO: 217905 - DNA, 22 bp, Artificial Sequence
  Synthetic oligonucleotide; TTG chr2 60509645 60509666 60509650 60509645 -
ttctttttccttctctgttgtt

SEQ ID NO: 217906 - DNA, 22 bp, Artificial Sequence
  Synthetic oligonucleotide; TTC chr2 60509642 60509663 60509647 60509642 -
tttttccttctctgttgttctt

SEQ ID NO: 217907 - DNA, 22 bp, Artificial Sequence
  Synthetic oligonucleotide; CTT chr2 60509640 60509661 60509645 60509640 -
tttccttctctgttgttcttta

SEQ ID NO: 217908 - DNA, 22 bp, Artificial Sequence
  Synthetic oligonucleotide; TTT chr2 60509639 60509660 60509644 60509639 -
ttccttctctgttgttctttag

SEQ ID NO: 217909 - DNA, 22 bp, Artificial Sequence
  Synthetic oligonucleotide; TTT chr2 60509638 60509659 60509643 60509638 -
tccttctctgttgttctttagc

SEQ ID NO: 217910 - DNA, 22 bp, Artificial Sequence
  Synthetic oligonucleotide; TTT chr2 60509637 60509658 60509642 60509637 -
ccttctctgttgttctttagct

SEQ ID NO: 217911 - DNA, 22 bp, Artificial Sequence
  Synthetic oligonucleotide; TTC chr2 60509636 60509657 60509641 60509636 -
cttctctgttgttctttagcta

SEQ ID NO: 217912 - DNA, 22 bp, Artificial Sequence
  Synthetic oligonucleotide; CTT chr2 60509633 60509654 60509638 60509633 -
ctctgttgttctttagctacca

SEQ ID NO: 217913 - DNA, 22 bp, Artificial Sequence
  Synthetic oligonucleotide; TTC chr2 60509632 60509653 60509637 60509632 -
tctgttgttctttagctaccaa

SEQ ID NO: 217914 - DNA, 22 bp, Artificial Sequence
  Synthetic oligonucleotide; CTC chr2 60509630 60509651 60509635 60509630 -
tgttgttctttagctaccaaag

SEQ ID NO: 217915 - DNA, 22 bp, Artificial Sequence
  Synthetic oligonucleotide; CTG chr2 60509628 60509649 60509633 60509628 -
ttgttctttagctaccaaagac

SEQ ID NO: 217916 - DNA, 22 bp, Artificial Sequence
  Synthetic oligonucleotide; TTG chr2 60509625 60509646 60509630 60509625 -
ttctttagctaccaaagacaac

SEQ ID NO: 217917 - DNA, 22 bp, Artificial Sequence
  Synthetic oligonucleotide; TTC chr2 60509622 60509643 60509627 60509622 -
tttagctaccaaagacaacttg

SEQ ID NO: 217918 - DNA, 22 bp, Artificial Sequence
  Synthetic oligonucleotide; CTT chr2 60509620 60509641 60509625 60509620 -
tagctaccaaagacaacttgat

SEQ ID NO: 217919 - DNA, 22 bp, Artificial Sequence
  Synthetic oligonucleotide; TTT chr2 60509619 60509640 60509624 60509619 -
agctaccaaagacaacttgatc

SEQ ID NO: 217920 - DNA, 22 bp, Artificial Sequence
  Synthetic oligonucleotide; TTA chr2 60509618 60509639 60509623 60509618 -
gctaccaaagacaacttgatct

SEQ ID NO: 217921 - DNA, 22 bp, Artificial Sequence
  Synthetic oligonucleotide; CTA chr2 60509614 60509635 60509619 60509614 -
ccaaagacaacttgatcttttg

SEQ ID NO: 217922 - DNA, 22 bp, Artificial Sequence
  Synthetic oligonucleotide; CTT chr2 60509601 60509622 60509606 60509601 -
gatcttttgatccagaaagatg

SEQ ID NO: 217923 - DNA, 22 bp, Artificial Sequence
  Synthetic oligonucleotide; TTG chr2 60509600 60509621 60509605 60509600 -
atcttttgatccagaaagatgc

SEQ ID NO: 217924 - DNA, 22 bp, Artificial Sequence
  Synthetic oligonucleotide; CTT chr2 60509595 60509616 60509600 60509595 -
ttgatccagaaagatgcgcttt

SEQ ID NO: 217925 - DNA, 22 bp, Artificial Sequence
  Synthetic oligonucleotide; TTT chr2 60509594 60509615 60509599 60509594 -
tgatccagaaagatgcgctttg

SEQ ID NO: 217926 - DNA, 22 bp, Artificial Sequence
  Synthetic oligonucleotide; TTT chr2 60509593 60509614 60509598 60509593 -
gatccagaaagatgcgctttgt

SEQ ID NO: 217927 - DNA, 22 bp, Artificial Sequence
  Synthetic oligonucleotide; TTG chr2 60509592 60509613 60509597 60509592 -
atccagaaagatgcgctttgtt

SEQ ID NO: 217928 - DNA, 22 bp, Artificial Sequence
  Synthetic oligonucleotide; CTT chr2 60509574 60509595 60509579 60509574 -
tgtttcttgcatttctttccct

SEQ ID NO: 217929 - DNA, 22 bp, Artificial Sequence
  Synthetic oligonucleotide; TTT chr2 60509573 60509594 60509578 60509573 -
gtttcttgcatttctttccctt

SEQ ID NO: 217930 - DNA, 22 bp, Artificial Sequence
  Synthetic oligonucleotide; TTG chr2 60509572 60509593 60509577 60509572 -
tttcttgcatttctttcccttc

SEQ ID NO: 217931 - DNA, 22 bp, Artificial Sequence
  Synthetic oligonucleotide; TTT chr2 60509569 60509590 60509574 60509569 -
cttgcatttctttcccttcgtt

SEQ ID NO: 217932 - DNA, 22 bp, Artificial Sequence
  Synthetic oligonucleotide; TTC chr2 60509568 60509589 60509573 60509568 -
ttgcatttctttcccttcgttt

SEQ ID NO: 217933 - DNA, 22 bp, Artificial Sequence
  Synthetic oligonucleotide; CTT chr2 60509566 60509587 60509571 60509566 -
gcatttctttcccttcgtttgt

SEQ ID NO: 217934 - DNA, 22 bp, Artificial Sequence
  Synthetic oligonucleotide; TTG chr2 60509565 60509586 60509570 60509565 -
catttctttcccttcgtttgtt

SEQ ID NO: 217935 - DNA, 22 bp, Artificial Sequence
  Synthetic oligonucleotide; TTT chr2 60509560 60509581 60509565 60509560 -
ctttcccttcgtttgttttctc

SEQ ID NO: 217936 - DNA, 22 bp, Artificial Sequence
  Synthetic oligonucleotide; TTC chr2 60509559 60509580 60509564 60509559 -
tttcccttcgtttgttttctca

SEQ ID NO: 217937 - DNA, 22 bp, Artificial Sequence
  Synthetic oligonucleotide; CTT chr2 60509557 60509578 60509562 60509557 -
tcccttcgtttgttttctcagg

SEQ ID NO: 217938 - DNA, 22 bp, Artificial Sequence
  Synthetic oligonucleotide; TTT chr2 60509556 60509577 60509561 60509556 -
cccttcgtttgttttctcaggt

SEQ ID NO: 217939 - DNA, 22 bp, Artificial Sequence
  Synthetic oligonucleotide; TTC chr2 60509555 60509576 60509560 60509555 -
ccttcgtttgttttctcaggtc

SEQ ID NO: 217940 - DNA, 22 bp, Artificial Sequence
  Synthetic oligonucleotide; CTT chr2 60509551 60509572 60509556 60509551 -
cgtttgttttctcaggtctcag

SEQ ID NO: 217941 - DNA, 22 bp, Artificial Sequence
  Synthetic oligonucleotide; TTC chr2 60509550 60509571 60509555 60509550 -
gtttgttttctcaggtctcagg

SEQ ID NO: 217942 - DNA, 22 bp, Artificial Sequence
  Synthetic oligonucleotide; TTT chr2 60509546 60509567 60509551 60509546 -
gttttctcaggtctcaggtaga

SEQ ID NO: 217943 - DNA, 22 bp, Artificial Sequence
  Synthetic oligonucleotide; TTG chr2 60509545 60509566 60509550 60509545 -
ttttctcaggtctcaggtagac

SEQ ID NO: 217944 - DNA, 22 bp, Artificial Sequence
  Synthetic oligonucleotide; TTT chr2 60509542 60509563 60509547 60509542 -
tctcaggtctcaggtagaccat

SEQ ID NO: 217945 - DNA, 22 bp, Artificial Sequence
  Synthetic oligonucleotide; TTT chr2 60509541 60509562 60509546 60509541 -
ctcaggtctcaggtagaccatc

SEQ ID NO: 217946 - DNA, 22 bp, Artificial Sequence
  Synthetic oligonucleotide; TTC chr2 60509540 60509561 60509545 60509540 -
tcaggtctcaggtagaccatcg

SEQ ID NO: 217947 - DNA, 22 bp, Artificial Sequence
  Synthetic oligonucleotide; CTC chr2 60509538 60509559 60509543 60509538 -
aggtctcaggtagaccatcgag

SEQ ID NO: 217948 - DNA, 22 bp, Artificial Sequence
  Synthetic oligonucleotide; CTC chr2 60509531 60509552 60509536 60509531 -
aggtagaccatcgagctgctgt

SEQ ID NO: 217949 - DNA, 22 bp, Artificial Sequence
  Synthetic oligonucleotide; CTG chr2 60509513 60509534 60509518 60509513 -
ctgttaattggtgatatttagg

SEQ ID NO: 217950 - DNA, 22 bp, Artificial Sequence
  Synthetic oligonucleotide; CTG chr2 60509510 60509531 60509515 60509510 -
ttaattggtgatatttaggaat

SEQ ID NO: 217951 - DNA, 22 bp, Artificial Sequence
  Synthetic oligonucleotide; TTA chr2 60509507 60509528 60509512 60509507 -
attggtgatatttaggaatggg

SEQ ID NO: 217952 - DNA, 22 bp, Artificial Sequence
  Synthetic oligonucleotide; TTG chr2 60509503 60509524 60509508 60509503 -
gtgatatttaggaatgggttgg

SEQ ID NO: 217953 - DNA, 22 bp, Artificial Sequence
  Synthetic oligonucleotide; TTT chr2 60509494 60509515 60509499 60509494 -
aggaatgggttggaagctgcat

SEQ ID NO: 217954 - DNA, 22 bp, Artificial Sequence
  Synthetic oligonucleotide; TTA chr2 60509493 60509514 60509498 60509493 -
ggaatgggttggaagctgcatc

SEQ ID NO: 217955 - DNA, 22 bp, Artificial Sequence
  Synthetic oligonucleotide; TTG chr2 60509482 60509503 60509487 60509482 -
gaagctgcatcttttcctggac

SEQ ID NO: 217956 - DNA, 22 bp, Artificial Sequence
  Synthetic oligonucleotide; CTG chr2 60509475 60509496 60509480 60509475 -
catcttttcctggacttctcag

SEQ ID NO: 217957 - DNA, 22 bp, Artificial Sequence
  Synthetic oligonucleotide; CTT chr2 60509469 60509490 60509474 60509469 -
ttcctggacttctcaggactct

SEQ ID NO: 217958 - DNA, 22 bp, Artificial Sequence
  Synthetic oligonucleotide; TTT chr2 60509468 60509489 60509473 60509468 -
tcctggacttctcaggactctc

SEQ ID NO: 217959 - DNA, 22 bp, Artificial Sequence
  Synthetic oligonucleotide; TTT chr2 60509467 60509488 60509472 60509467 -
cctggacttctcaggactctca

SEQ ID NO: 217960 - DNA, 22 bp, Artificial Sequence
  Synthetic oligonucleotide; TTC chr2 60509466 60509487 60509471 60509466 -
ctggacttctcaggactctcac

SEQ ID NO: 217961 - DNA, 22 bp, Artificial Sequence
  Synthetic oligonucleotide; CTG chr2 60509463 60509484 60509468 60509463 -
gacttctcaggactctcactgc

SEQ ID NO: 217962 - DNA, 22 bp, Artificial Sequence
  Synthetic oligonucleotide; CTT chr2 60509458 60509479 60509463 60509458 -
ctcaggactctcactgccacgt

SEQ ID NO: 217963 - DNA, 22 bp, Artificial Sequence
  Synthetic oligonucleotide; TTC chr2 60509457 60509478 60509462 60509457 -
tcaggactctcactgccacgtg

SEQ ID NO: 217964 - DNA, 22 bp, Artificial Sequence
  Synthetic oligonucleotide; CTC chr2 60509455 60509476 60509460 60509455 -
aggactctcactgccacgtgtc

SEQ ID NO: 217965 - DNA, 22 bp, Artificial Sequence
  Synthetic oligonucleotide; CTC chr2 60509448 60509469 60509453 60509448 -
tcactgccacgtgtcttgtgct

SEQ ID NO: 217966 - DNA, 22 bp, Artificial Sequence
  Synthetic oligonucleotide; CTC chr2 60509446 60509467 60509451 60509446 -
actgccacgtgtcttgtgcttc

SEQ ID NO: 217967 - DNA, 22 bp, Artificial Sequence
  Synthetic oligonucleotide; CTG chr2 60509442 60509463 60509447 60509442 -
ccacgtgtcttgtgcttccaca

SEQ ID NO: 217968 - DNA, 22 bp, Artificial Sequence
  Synthetic oligonucleotide; CTT chr2 60509431 60509452 60509436 60509431 -
gtgcttccacagaaccgttttc

SEQ ID NO: 217969 - DNA, 22 bp, Artificial Sequence
  Synthetic oligonucleotide; TTG chr2 60509430 60509451 60509435 60509430 -
tgcttccacagaaccgttttct

SEQ ID NO: 217970 - DNA, 22 bp, Artificial Sequence
  Synthetic oligonucleotide; CTT chr2 60509425 60509446 60509430 60509425 -
ccacagaaccgttttctgagac

SEQ ID NO: 217971 - DNA, 22 bp, Artificial Sequence
  Synthetic oligonucleotide; TTC chr2 60509424 60509445 60509429 60509424 -
cacagaaccgttttctgagacg

SEQ ID NO: 217972 - DNA, 22 bp, Artificial Sequence
  Synthetic oligonucleotide; TTT chr2 60509411 60509432 60509416 60509411 -
tctgagacgtccgtgtggctct

SEQ ID NO: 217973 - DNA, 22 bp, Artificial Sequence
  Synthetic oligonucleotide; TTT chr2 60509410 60509431 60509415 60509410 -
ctgagacgtccgtgtggctctg

SEQ ID NO: 217974 - DNA, 22 bp, Artificial Sequence
  Synthetic oligonucleotide; TTC chr2 60509409 60509430 60509414 60509409 -
tgagacgtccgtgtggctctgc

SEQ ID NO: 217975 - DNA, 22 bp, Artificial Sequence
  Synthetic oligonucleotide; CTG chr2 60509407 60509428 60509412 60509407 -
agacgtccgtgtggctctgctg

SEQ ID NO: 217976 - DNA, 22 bp, Artificial Sequence
  Synthetic oligonucleotide; CTC chr2 60509390 60509411 60509395 60509390 -
tgctgtgctcaggtccacggtt

SEQ ID NO: 217977 - DNA, 22 bp, Artificial Sequence
  Synthetic oligonucleotide; CTG chr2 60509388 60509409 60509393 60509388 -
ctgtgctcaggtccacggttag

SEQ ID NO: 217978 - DNA, 22 bp, Artificial Sequence
  Synthetic oligonucleotide; CTG chr2 60509385 60509406 60509390 60509385 -
tgctcaggtccacggttagccc

SEQ ID NO: 217979 - DNA, 22 bp, Artificial Sequence
  Synthetic oligonucleotide; CTC chr2 60509380 60509401 60509385 60509380 -
aggtccacggttagcccctggc

SEQ ID NO: 217980 - DNA, 22 bp, Artificial Sequence
  Synthetic oligonucleotide; TTA chr2 60509367 60509388 60509372 60509367 -
gcccctggcttggaatttcttc

SEQ ID NO: 217981 - DNA, 22 bp, Artificial Sequence
  Synthetic oligonucleotide; CTG chr2 60509360 60509381 60509365 60509360 -
gcttggaatttcttccggaaat

SEQ ID NO: 217982 - DNA, 22 bp, Artificial Sequence
  Synthetic oligonucleotide; CTT chr2 60509356 60509377 60509361 60509356 -
ggaatttcttccggaaatccgt

SEQ ID NO: 217983 - DNA, 22 bp, Artificial Sequence
  Synthetic oligonucleotide; TTG chr2 60509355 60509376 60509360 60509355 -
gaatttcttccggaaatccgtt

SEQ ID NO: 217984 - DNA, 22 bp, Artificial Sequence
  Synthetic oligonucleotide; TTT chr2 60509349 60509370 60509354 60509349 -
cttccggaaatccgttgtcctc

SEQ ID NO: 217985 - DNA, 22 bp, Artificial Sequence
  Synthetic oligonucleotide; TTC chr2 60509348 60509369 60509353 60509348 -
ttccggaaatccgttgtcctct

SEQ ID NO: 217986 - DNA, 22 bp, Artificial Sequence
  Synthetic oligonucleotide; CTT chr2 60509346 60509367 60509351 60509346 -
ccggaaatccgttgtcctcttt

SEQ ID NO: 217987 - DNA, 22 bp, Artificial Sequence
  Synthetic oligonucleotide; TTC chr2 60509345 60509366 60509350 60509345 -
cggaaatccgttgtcctctttt

SEQ ID NO: 217988 - DNA, 22 bp, Artificial Sequence
  Synthetic oligonucleotide; TTG chr2 60509332 60509353 60509337 60509332 -
tcctcttttccacaggttctcc

SEQ ID NO: 217989 - DNA, 22 bp, Artificial Sequence
  Synthetic oligonucleotide; CTC chr2 60509327 60509348 60509332 60509327 -
ttttccacaggttctcctcctc

SEQ ID NO: 217990 - DNA, 22 bp, Artificial Sequence
  Synthetic oligonucleotide; CTT chr2 60509325 60509346 60509330 60509325 -
ttccacaggttctcctcctccc

SEQ ID NO: 217991 - DNA, 22 bp, Artificial Sequence
  Synthetic oligonucleotide; TTT chr2 60509324 60509345 60509329 60509324 -
tccacaggttctcctcctccct

SEQ ID NO: 217992 - DNA, 22 bp, Artificial Sequence
  Synthetic oligonucleotide; TTT chr2 60509323 60509344 60509328 60509323 -
ccacaggttctcctcctccctt

SEQ ID NO: 217993 - DNA, 22 bp, Artificial Sequence
  Synthetic oligonucleotide; TTC chr2 60509322 60509343 60509327 60509322 -
cacaggttctcctcctcccttt

SEQ ID NO: 217994 - DNA, 22 bp, Artificial Sequence
  Synthetic oligonucleotide; TTC chr2 60509313 60509334 60509318 60509313 -
tcctcctccctttccccatttc

SEQ ID NO: 217995 - DNA, 22 bp, Artificial Sequence
  Synthetic oligonucleotide; CTC chr2 60509311 60509332 60509316 60509311 -
ctcctccctttccccatttctg

SEQ ID NO: 217996 - DNA, 22 bp, Artificial Sequence
  Synthetic oligonucleotide; CTC chr2 60509308 60509329 60509313 60509308 -
ctccctttccccatttctggaa

SEQ ID NO: 217997 - DNA, 22 bp, Artificial Sequence
  Synthetic oligonucleotide; CTC chr2 60509305 60509326 60509310 60509305 -
cctttccccatttctggaaaga

SEQ ID NO: 217998 - DNA, 22 bp, Artificial Sequence
  Synthetic oligonucleotide; CTT chr2 60509301 60509322 60509306 60509301 -
tccccatttctggaaagaagtg

SEQ ID NO: 217999 - DNA, 22 bp, Artificial Sequence
  Synthetic oligonucleotide; TTT chr2 60509300 60509321 60509305 60509300 -
ccccatttctggaaagaagtgg

SEQ ID NO: 218000 - DNA, 22 bp, Artificial Sequence
  Synthetic oligonucleotide; TTC chr2 60509299 60509320 60509304 60509299 -
cccatttctggaaagaagtggg

SEQ ID NO: 218001 - DNA, 22 bp, Artificial Sequence
  Synthetic oligonucleotide; TTT chr2 60509292 60509313 60509297 60509292 -
ctggaaagaagtgggctggcac

SEQ ID NO: 218002 - DNA, 22 bp, Artificial Sequence
  Synthetic oligonucleotide; TTC chr2 60509291 60509312 60509296 60509291 -
tggaaagaagtgggctggcaca

SEQ ID NO: 218003 - DNA, 22 bp, Artificial Sequence
  Synthetic oligonucleotide; CTG chr2 60509289 60509310 60509294 60509289 -
gaaagaagtgggctggcacata

SEQ ID NO: 218004 - DNA, 22 bp, Artificial Sequence
  Synthetic oligonucleotide; CTG chr2 60509274 60509295 60509279 60509274 -
gcacatagagcctttttccttg

SEQ ID NO: 218005 - DNA, 22 bp, Artificial Sequence
  Synthetic oligonucleotide; CTT chr2 60509260 60509281 60509265 60509260 -
tttccttgaaaggagagtgcag

SEQ ID NO: 218006 - DNA, 22 bp, Artificial Sequence
  Synthetic oligonucleotide; TTT chr2 60509259 60509280 60509264 60509259 -
ttccttgaaaggagagtgcaga

SEQ ID NO: 218007 - DNA, 22 bp, Artificial Sequence
  Synthetic oligonucleotide; TTT chr2 60509258 60509279 60509263 60509258 -
tccttgaaaggagagtgcagag

SEQ ID NO: 218008 - DNA, 22 bp, Artificial Sequence
  Synthetic oligonucleotide; TTT chr2 60509257 60509278 60509262 60509257 -
ccttgaaaggagagtgcagagc

SEQ ID NO: 218009 - DNA, 22 bp, Artificial Sequence
  Synthetic oligonucleotide; TTC chr2 60509256 60509277 60509261 60509256 -
cttgaaaggagagtgcagagcc

SEQ ID NO: 218010 - DNA, 22 bp, Artificial Sequence
  Synthetic oligonucleotide; CTT chr2 60509253 60509274 60509258 60509253 -
gaaaggagagtgcagagccctc

SEQ ID NO: 218011 - DNA, 22 bp, Artificial Sequence
  Synthetic oligonucleotide; TTG chr2 60509252 60509273 60509257 60509252 -
aaaggagagtgcagagccctct

SEQ ID NO: 218012 - DNA, 22 bp, Artificial Sequence
  Synthetic oligonucleotide; CTC chr2 60509231 60509252 60509236 60509231 -
taatggaaaagtaaaaaaattc

SEQ ID NO: 218013 - DNA, 22 bp, Artificial Sequence
  Synthetic oligonucleotide; CTA chr2 60509229 60509250 60509234 60509229 -
atggaaaagtaaaaaaattctt

SEQ ID NO: 218014 - DNA, 22 bp, Artificial Sequence
  Synthetic oligonucleotide; TTC chr2 60509209 60509230 60509214 60509209 -
ttggaatcctcataacatccaa

SEQ ID NO: 218015 - DNA, 22 bp, Artificial Sequence
  Synthetic oligonucleotide; CTT chr2 60509207 60509228 60509212 60509207 -
ggaatcctcataacatccaagc

SEQ ID NO: 218016 - DNA, 22 bp, Artificial Sequence
  Synthetic oligonucleotide; TTG chr2 60509206 60509227 60509211 60509206 -
gaatcctcataacatccaagcc

SEQ ID NO: 218017 - DNA, 22 bp, Artificial Sequence
  Synthetic oligonucleotide; CTC chr2 60509198 60509219 60509203 60509198 -
ataacatccaagccagccaaag

SEQ ID NO: 218018 - DNA, 22 bp, Artificial Sequence
  Synthetic oligonucleotide; CTG chr2 60509173 60509194 60509178 60509173 -
agaccaagtaaattattggggg

SEQ ID NO: 218019 - DNA, 22 bp, Artificial Sequence
  Synthetic oligonucleotide; TTA chr2 60509158 60509179 60509163 60509158 -
ttggggggtaatttgcaagggc

SEQ ID NO: 218020 - DNA, 22 bp, Artificial Sequence
  Synthetic oligonucleotide; TTG chr2 60509155 60509176 60509160 60509155 -
gggggtaatttgcaagggcctg

SEQ ID NO: 218021 - DNA, 22 bp, Artificial Sequence
  Synthetic oligonucleotide; TTT chr2 60509144 60509165 60509149 60509144 -
gcaagggcctgaatcaaacaaa

SEQ ID NO: 218022 - DNA, 22 bp, Artificial Sequence
  Synthetic oligonucleotide; TTG chr2 60509143 60509164 60509148 60509143 -
caagggcctgaatcaaacaaat

SEQ ID NO: 218023 - DNA, 22 bp, Artificial Sequence
  Synthetic oligonucleotide; CTG chr2 60509133 60509154 60509138 60509133 -
aatcaaacaaattgctttcttg

SEQ ID NO: 218024 - DNA, 22 bp, Artificial Sequence
  Synthetic oligonucleotide; TTG chr2 60509119 60509140 60509124 60509119 -
ctttcttgtttctcagcttgaa

SEQ ID NO: 218025 - DNA, 22 bp, Artificial Sequence
  Synthetic oligonucleotide; CTT chr2 60509116 60509137 60509121 60509116 -
tcttgtttctcagcttgaatct

SEQ ID NO: 218026 - DNA, 22 bp, Artificial Sequence
  Synthetic oligonucleotide; TTT chr2 60509115 60509136 60509120 60509115 -
cttgtttctcagcttgaatctt

SEQ ID NO: 218027 - DNA, 22 bp, Artificial Sequence
  Synthetic oligonucleotide; TTC chr2 60509114 60509135 60509119 60509114 -
ttgtttctcagcttgaatcttt

SEQ ID NO: 218028 - DNA, 22 bp, Artificial Sequence
  Synthetic oligonucleotide; CTT chr2 60509112 60509133 60509117 60509112 -
gtttctcagcttgaatctttag

SEQ ID NO: 218029 - DNA, 22 bp, Artificial Sequence
  Synthetic oligonucleotide; TTG chr2 60509111 60509132 60509116 60509111 -
tttctcagcttgaatctttaga

SEQ ID NO: 218030 - DNA, 22 bp, Artificial Sequence
  Synthetic oligonucleotide; TTT chr2 60509108 60509129 60509113 60509108 -
ctcagcttgaatctttagacca

SEQ ID NO: 218031 - DNA, 22 bp, Artificial Sequence
  Synthetic oligonucleotide; TTC chr2 60509107 60509128 60509112 60509107 -
tcagcttgaatctttagaccag

SEQ ID NO: 218032 - DNA, 22 bp, Artificial Sequence
  Synthetic oligonucleotide; CTC chr2 60509105 60509126 60509110 60509105 -
agcttgaatctttagaccagaa

SEQ ID NO: 218033 - DNA, 22 bp, Artificial Sequence
  Synthetic oligonucleotide; CTT chr2 60509100 60509121 60509105 60509100 -
gaatctttagaccagaagcctg

SEQ ID NO: 218034 - DNA, 22 bp, Artificial Sequence
  Synthetic oligonucleotide; TTG chr2 60509099 60509120 60509104 60509099 -
aatctttagaccagaagcctgt

SEQ ID NO: 218035 - DNA, 22 bp, Artificial Sequence
  Synthetic oligonucleotide; CTT chr2 60509093 60509114 60509098 60509093 -
tagaccagaagcctgtgatttc

SEQ ID NO: 218036 - DNA, 22 bp, Artificial Sequence
  Synthetic oligonucleotide; TTT chr2 60509092 60509113 60509097 60509092 -
agaccagaagcctgtgatttcg

SEQ ID NO: 218037 - DNA, 22 bp, Artificial Sequence
  Synthetic oligonucleotide; TTA chr2 60509091 60509112 60509096 60509091 -
gaccagaagcctgtgatttcgg

SEQ ID NO: 218038 - DNA, 22 bp, Artificial Sequence
  Synthetic oligonucleotide; CTG chr2 60509078 60509099 60509083 60509078 -
tgatttcggagtctgatgagaa

SEQ ID NO: 218039 - DNA, 22 bp, Artificial Sequence
  Synthetic oligonucleotide; TTT chr2 60509072 60509093 60509077 60509072 -
cggagtctgatgagaaataaga

SEQ ID NO: 218040 - DNA, 22 bp, Artificial Sequence
  Synthetic oligonucleotide; TTC chr2 60509071 60509092 60509076 60509071 -
ggagtctgatgagaaataagag

SEQ ID NO: 218041 - DNA, 22 bp, Artificial Sequence
  Synthetic oligonucleotide; CTG chr2 60509063 60509084 60509068 60509063 -
atgagaaataagagtcagtgtt

SEQ ID NO: 218042 - DNA, 22 bp, Artificial Sequence
  Synthetic oligonucleotide; TTT chr2 60509040 60509061 60509045 60509040 -
ctgtctgagccacttttctttg

SEQ ID NO: 218043 - DNA, 22 bp, Artificial Sequence
  Synthetic oligonucleotide; TTC chr2 60509039 60509060 60509044 60509039 -
tgtctgagccacttttctttgg

SEQ ID NO: 218044 - DNA, 22 bp, Artificial Sequence
  Synthetic oligonucleotide; CTG chr2 60509037 60509058 60509042 60509037 -
tctgagccacttttctttggag

SEQ ID NO: 218045 - DNA, 22 bp, Artificial Sequence
  Synthetic oligonucleotide; CTG chr2 60509033 60509054 60509038 60509033 -
agccacttttctttggaggagg

SEQ ID NO: 218046 - DNA, 22 bp, Artificial Sequence
  Synthetic oligonucleotide; CTT chr2 60509025 60509046 60509030 60509025 -
ttctttggaggaggtcctctag

SEQ ID NO: 218047 - DNA, 22 bp, Artificial Sequence
  Synthetic oligonucleotide; TTT chr2 60509024 60509045 60509029 60509024 -
tctttggaggaggtcctctagg

SEQ ID NO: 218048 - DNA, 22 bp, Artificial Sequence
  Synthetic oligonucleotide; TTT chr2 60509023 60509044 60509028 60509023 -
ctttggaggaggtcctctaggc

SEQ ID NO: 218049 - DNA, 22 bp, Artificial Sequence
  Synthetic oligonucleotide; TTC chr2 60509022 60509043 60509027 60509022 -
tttggaggaggtcctctaggct

SEQ ID NO: 218050 - DNA, 22 bp, Artificial Sequence
  Synthetic oligonucleotide; CTT chr2 60509020 60509041 60509025 60509020 -
tggaggaggtcctctaggcttt

SEQ ID NO: 218051 - DNA, 22 bp, Artificial Sequence
  Synthetic oligonucleotide; TTT chr2 60509019 60509040 60509024 60509019 -
ggaggaggtcctctaggcttta

SEQ ID NO: 218052 - DNA, 22 bp, Artificial Sequence
  Synthetic oligonucleotide; TTG chr2 60509018 60509039 60509023 60509018 -
gaggaggtcctctaggctttag

SEQ ID NO: 218053 - DNA, 22 bp, Artificial Sequence
  Synthetic oligonucleotide; CTC chr2 60509006 60509027 60509011 60509006 -
taggctttagcaatcacagaag

SEQ ID NO: 218054 - DNA, 22 bp, Artificial Sequence
  Synthetic oligonucleotide; CTA chr2 60509004 60509025 60509009 60509004 -
ggctttagcaatcacagaagaa

SEQ ID NO: 218055 - DNA, 22 bp, Artificial Sequence
  Synthetic oligonucleotide; CTT chr2 60508999 60509020 60509004 60508999 -
tagcaatcacagaagaaccagt

SEQ ID NO: 218056 - DNA, 22 bp, Artificial Sequence
  Synthetic oligonucleotide; TTT chr2 60508998 60509019 60509003 60508998 -
agcaatcacagaagaaccagtg

SEQ ID NO: 218057 - DNA, 22 bp, Artificial Sequence
  Synthetic oligonucleotide; TTA chr2 60508997 60509018 60509002 60508997 -
gcaatcacagaagaaccagtga

SEQ ID NO: 218058 - DNA, 22 bp, Artificial Sequence
  Synthetic oligonucleotide; TTC chr2 60508968 60508989 60508973 60508968 -
cttgtcataggagagctccttg

SEQ ID NO: 218059 - DNA, 22 bp, Artificial Sequence
  Synthetic oligonucleotide; CTT chr2 60508965 60508986 60508970 60508965 -
gtcataggagagctccttggtc

SEQ ID NO: 218060 - DNA, 22 bp, Artificial Sequence
  Synthetic oligonucleotide; TTG chr2 60508964 60508985 60508969 60508964 -
tcataggagagctccttggtcc

SEQ ID NO: 218061 - DNA, 22 bp, Artificial Sequence
  Synthetic oligonucleotide; CTC chr2 60508950 60508971 60508955 60508950 -
cttggtcctcaggattcaaaag

SEQ ID NO: 218062 - DNA, 22 bp, Artificial Sequence
  Synthetic oligonucleotide; CTT chr2 60508947 60508968 60508952 60508947 -
ggtcctcaggattcaaaagaca

SEQ ID NO: 218063 - DNA, 22 bp, Artificial Sequence
  Synthetic oligonucleotide; TTG chr2 60508946 60508967 60508951 60508946 -
gtcctcaggattcaaaagacac

SEQ ID NO: 218064 - DNA, 22 bp, Artificial Sequence
  Synthetic oligonucleotide; CTC chr2 60508940 60508961 60508945 60508940 -
aggattcaaaagacaccttaag

SEQ ID NO: 218065 - DNA, 22 bp, Artificial Sequence
  Synthetic oligonucleotide; TTC chr2 60508933 60508954 60508938 60508933 -
aaaagacaccttaagtagcagt

SEQ ID NO: 218066 - DNA, 22 bp, Artificial Sequence
  Synthetic oligonucleotide; CTT chr2 60508921 60508942 60508926 60508921 -
aagtagcagtgggtagggcgta

SEQ ID NO: 218067 - DNA, 22 bp, Artificial Sequence
  Synthetic oligonucleotide; TTA chr2 60508920 60508941 60508925 60508920 -
agtagcagtgggtagggcgtaa

SEQ ID NO: 218068 - DNA, 22 bp, Artificial Sequence
  Synthetic oligonucleotide; TTT chr2 60508894 60508915 60508899 60508894 -
aacatccctcaaggtaggcctt

SEQ ID NO: 218069 - DNA, 22 bp, Artificial Sequence
  Synthetic oligonucleotide; TTA chr2 60508893 60508914 60508898 60508893 -
acatccctcaaggtaggcctta

SEQ ID NO: 218070 - DNA, 22 bp, Artificial Sequence
  Synthetic oligonucleotide; CTC chr2 60508884 60508905 60508889 60508884 -
aaggtaggccttaggtttccct

SEQ ID NO: 218071 - DNA, 22 bp, Artificial Sequence
  Synthetic oligonucleotide; CTT chr2 60508872 60508893 60508877 60508872 -
aggtttccctctgtcccctcta

SEQ ID NO: 218072 - DNA, 22 bp, Artificial Sequence
  Synthetic oligonucleotide; TTA chr2 60508871 60508892 60508876 60508871 -
ggtttccctctgtcccctctat

SEQ ID NO: 218073 - DNA, 22 bp, Artificial Sequence
  Synthetic oligonucleotide; TTT chr2 60508866 60508887 60508871 60508866 -
ccctctgtcccctctatggtgc

SEQ ID NO: 218074 - DNA, 22 bp, Artificial Sequence
  Synthetic oligonucleotide; TTC chr2 60508865 60508886 60508870 60508865 -
cctctgtcccctctatggtgct

SEQ ID NO: 218075 - DNA, 22 bp, Artificial Sequence
  Synthetic oligonucleotide; CTC chr2 60508861 60508882 60508866 60508861 -
tgtcccctctatggtgctggct

SEQ ID NO: 218076 - DNA, 22 bp, Artificial Sequence
  Synthetic oligonucleotide; CTG chr2 60508859 60508880 60508864 60508859 -
tcccctctatggtgctggcttt

SEQ ID NO: 218077 - DNA, 22 bp, Artificial Sequence
  Synthetic oligonucleotide; CTC chr2 60508852 60508873 60508857 60508852 -
tatggtgctggctttgccacat

SEQ ID NO: 218078 - DNA, 22 bp, Artificial Sequence
  Synthetic oligonucleotide; CTA chr2 60508850 60508871 60508855 60508850 -
tggtgctggctttgccacatgt

SEQ ID NO: 218079 - DNA, 22 bp, Artificial Sequence
  Synthetic oligonucleotide; CTG chr2 60508842 60508863 60508847 60508842 -
gctttgccacatgtagaacaaa

SEQ ID NO: 218080 - DNA, 22 bp, Artificial Sequence
  Synthetic oligonucleotide; CTT chr2 60508838 60508859 60508843 60508838 -
tgccacatgtagaacaaactct

SEQ ID NO: 218081 - DNA, 22 bp, Artificial Sequence
  Synthetic oligonucleotide; TTT chr2 60508837 60508858 60508842 60508837 -
gccacatgtagaacaaactctt

SEQ ID NO: 218082 - DNA, 22 bp, Artificial Sequence
  Synthetic oligonucleotide; TTG chr2 60508836 60508857 60508841 60508836 -
ccacatgtagaacaaactcttc

SEQ ID NO: 218083 - DNA, 22 bp, Artificial Sequence
  Synthetic oligonucleotide; CTC chr2 60508817 60508838 60508822 60508817 -
ttctggaatcataggtaaccca

SEQ ID NO: 218084 - DNA, 22 bp, Artificial Sequence
  Synthetic oligonucleotide; CTT chr2 60508815 60508836 60508820 60508815 -
ctggaatcataggtaacccaag

SEQ ID NO: 218085 - DNA, 22 bp, Artificial Sequence
  Synthetic oligonucleotide; TTC chr2 60508814 60508835 60508819 60508814 -
tggaatcataggtaacccaagg

SEQ ID NO: 218086 - DNA, 22 bp, Artificial Sequence
  Synthetic oligonucleotide; CTG chr2 60508812 60508833 60508817 60508812 -
gaatcataggtaacccaagggg

SEQ ID NO: 218087 - DNA, 22 bp, Artificial Sequence
  Synthetic oligonucleotide; CTC chr2 60508784 60508805 60508789 60508784 -
agagaagagtccaggctgccag

SEQ ID NO: 218088 - DNA, 22 bp, Artificial Sequence
  Synthetic oligonucleotide; CTG chr2 60508766 60508787 60508771 60508766 -
ccagtgcaaaggtccagccctg

SEQ ID NO: 218089 - DNA, 22 bp, Artificial Sequence
  Synthetic oligonucleotide; CTG chr2 60508744 60508765 60508749 60508744 -
tcgccaaggagaccctcaggga

SEQ ID NO: 218090 - DNA, 22 bp, Artificial Sequence
  Synthetic oligonucleotide; CTC chr2 60508727 60508748 60508732 60508727 -
agggaaatgcacaggcctccag

SEQ ID NO: 218091 - DNA, 22 bp, Artificial Sequence
  Synthetic oligonucleotide; CTC chr2 60508708 60508729 60508713 60508708 -
cagctattcccacggcccctgt

SEQ ID NO: 218092 - DNA, 22 bp, Artificial Sequence
  Synthetic oligonucleotide; CTA chr2 60508702 60508723 60508707 60508702 -
ttcccacggcccctgtagctga

SEQ ID NO: 218093 - DNA, 22 bp, Artificial Sequence
  Synthetic oligonucleotide; TTC chr2 60508699 60508720 60508704 60508699 -
ccacggcccctgtagctgagcg

SEQ ID NO: 218094 - DNA, 22 bp, Artificial Sequence
  Synthetic oligonucleotide; CTG chr2 60508687 60508708 60508692 60508687 -
tagctgagcgccagcttcttcc

SEQ ID NO: 218095 - DNA, 22 bp, Artificial Sequence
  Synthetic oligonucleotide; CTG chr2 60508681 60508702 60508686 60508681 -
agcgccagcttcttcctgggcc

SEQ ID NO: 218096 - DNA, 22 bp, Artificial Sequence
  Synthetic oligonucleotide; CTT chr2 60508670 60508691 60508675 60508670 -
cttcctgggccaagctgaggct

SEQ ID NO: 218097 - DNA, 22 bp, Artificial Sequence
  Synthetic oligonucleotide; TTC chr2 60508669 60508690 60508674 60508669 -
ttcctgggccaagctgaggctg

SEQ ID NO: 218098 - DNA, 22 bp, Artificial Sequence
  Synthetic oligonucleotide; CTT chr2 60508667 60508688 60508672 60508667 -
cctgggccaagctgaggctgtt

SEQ ID NO: 218099 - DNA, 22 bp, Artificial Sequence
  Synthetic oligonucleotide; TTC chr2 60508666 60508687 60508671 60508666 -
ctgggccaagctgaggctgttt

SEQ ID NO: 218100 - DNA, 22 bp, Artificial Sequence
  Synthetic oligonucleotide; CTG chr2 60508663 60508684 60508668 60508663 -
ggccaagctgaggctgtttcct

SEQ ID NO: 218101 - DNA, 22 bp, Artificial Sequence
  Synthetic oligonucleotide; CTG chr2 60508653 60508674 60508658 60508653 -
aggctgtttcctgccgtgtcca

SEQ ID NO: 218102 - DNA, 22 bp, Artificial Sequence
  Synthetic oligonucleotide; CTG chr2 60508647 60508668 60508652 60508647 -
tttcctgccgtgtccattctcc

SEQ ID NO: 218103 - DNA, 22 bp, Artificial Sequence
  Synthetic oligonucleotide; TTT chr2 60508644 60508665 60508649 60508644 -
cctgccgtgtccattctcctag

SEQ ID NO: 218104 - DNA, 22 bp, Artificial Sequence
  Synthetic oligonucleotide; TTC chr2 60508643 60508664 60508648 60508643 -
ctgccgtgtccattctcctagc

SEQ ID NO: 218105 - DNA, 22 bp, Artificial Sequence
  Synthetic oligonucleotide; CTG chr2 60508640 60508661 60508645 60508640 -
ccgtgtccattctcctagcaac

SEQ ID NO: 218106 - DNA, 22 bp, Artificial Sequence
  Synthetic oligonucleotide; TTC chr2 60508628 60508649 60508633 60508628 -
tcctagcaacgcttctctttgg

SEQ ID NO: 218107 - DNA, 22 bp, Artificial Sequence
  Synthetic oligonucleotide; CTC chr2 60508626 60508647 60508631 60508626 -
ctagcaacgcttctctttggcc

SEQ ID NO: 218108 - DNA, 22 bp, Artificial Sequence
  Synthetic oligonucleotide; CTA chr2 60508623 60508644 60508628 60508623 -
gcaacgcttctctttggccagt

SEQ ID NO: 218109 - DNA, 22 bp, Artificial Sequence
  Synthetic oligonucleotide; CTT chr2 60508614 60508635 60508619 60508614 -
ctctttggccagtttgccatag

SEQ ID NO: 218110 - DNA, 22 bp, Artificial Sequence
  Synthetic oligonucleotide; TTC chr2 60508613 60508634 60508618 60508613 -
tctttggccagtttgccatagt

SEQ ID NO: 218111 - DNA, 22 bp, Artificial Sequence
  Synthetic oligonucleotide; CTC chr2 60508611 60508632 60508616 60508611 -
tttggccagtttgccatagtac

SEQ ID NO: 218112 - DNA, 22 bp, Artificial Sequence
  Synthetic oligonucleotide; CTT chr2 60508609 60508630 60508614 60508609 -
tggccagtttgccatagtacct

SEQ ID NO: 218113 - DNA, 22 bp, Artificial Sequence
  Synthetic oligonucleotide; TTT chr2 60508608 60508629 60508613 60508608 -
ggccagtttgccatagtacctg

SEQ ID NO: 218114 - DNA, 22 bp, Artificial Sequence
  Synthetic oligonucleotide; TTG chr2 60508607 60508628 60508612 60508607 -
gccagtttgccatagtacctga

SEQ ID NO: 218115 - DNA, 22 bp, Artificial Sequence
  Synthetic oligonucleotide; TTT chr2 60508599 60508620 60508604 60508599 -
gccatagtacctgaggtaagtt

SEQ ID NO: 218116 - DNA, 22 bp, Artificial Sequence
  Synthetic oligonucleotide; TTG chr2 60508598 60508619 60508603 60508598 -
ccatagtacctgaggtaagttt

SEQ ID NO: 218117 - DNA, 22 bp, Artificial Sequence
  Synthetic oligonucleotide; CTG chr2 60508586 60508607 60508591 60508586 -
aggtaagttttgtcctttgcct

SEQ ID NO: 218118 - DNA, 22 bp, Artificial Sequence
  Synthetic oligonucleotide; TTT chr2 60508576 60508597 60508581 60508576 -
tgtcctttgcctgccaaatgct

SEQ ID NO: 218119 - DNA, 22 bp, Artificial Sequence
  Synthetic oligonucleotide; TTT chr2 60508575 60508596 60508580 60508575 -
gtcctttgcctgccaaatgctt

SEQ ID NO: 218120 - DNA, 22 bp, Artificial Sequence
  Synthetic oligonucleotide; TTG chr2 60508574 60508595 60508579 60508574 -
tcctttgcctgccaaatgcttt

SEQ ID NO: 218121 - DNA, 22 bp, Artificial Sequence
  Synthetic oligonucleotide; CTT chr2 60508569 60508590 60508574 60508569 -
tgcctgccaaatgctttacatc

SEQ ID NO: 218122 - DNA, 22 bp, Artificial Sequence
  Synthetic oligonucleotide; TTT chr2 60508568 60508589 60508573 60508568 -
gcctgccaaatgctttacatcc

SEQ ID NO: 218123 - DNA, 22 bp, Artificial Sequence
  Synthetic oligonucleotide; TTG chr2 60508567 60508588 60508572 60508567 -
cctgccaaatgctttacatccc

SEQ ID NO: 218124 - DNA, 22 bp, Artificial Sequence
  Synthetic oligonucleotide; CTG chr2 60508563 60508584 60508568 60508563 -
ccaaatgctttacatcccggag

SEQ ID NO: 218125 - DNA, 22 bp, Artificial Sequence
  Synthetic oligonucleotide; CTT chr2 60508553 60508574 60508558 60508553 -
tacatcccggaggaaagcaaag

SEQ ID NO: 218126 - DNA, 22 bp, Artificial Sequence
  Synthetic oligonucleotide; TTT chr2 60508552 60508573 60508557 60508552 -
acatcccggaggaaagcaaagt

SEQ ID NO: 218127 - DNA, 22 bp, Artificial Sequence
  Synthetic oligonucleotide; TTA chr2 60508551 60508572 60508556 60508551 -
catcccggaggaaagcaaagtc

SEQ ID NO: 218128 - DNA, 22 bp, Artificial Sequence
  Synthetic oligonucleotide; CTC chr2 60508526 60508547 60508531 60508526 -
ttcagaacaggaaaagtccagt

SEQ ID NO: 218129 - DNA, 22 bp, Artificial Sequence
  Synthetic oligonucleotide; CTT chr2 60508524 60508545 60508529 60508524 -
cagaacaggaaaagtccagtgc

SEQ ID NO: 218130 - DNA, 22 bp, Artificial Sequence
  Synthetic oligonucleotide; TTC chr2 60508523 60508544 60508528 60508523 -
agaacaggaaaagtccagtgca

SEQ ID NO: 218131 - DNA, 22 bp, Artificial Sequence
  Synthetic oligonucleotide; TTC chr2 60508497 60508518 60508502 60508497 -
cacactgtgctattccagaacc

SEQ ID NO: 218132 - DNA, 22 bp, Artificial Sequence
  Synthetic oligonucleotide; CTG chr2 60508490 60508511 60508495 60508490 -
tgctattccagaacctcccagt

SEQ ID NO: 218133 - DNA, 22 bp, Artificial Sequence
  Synthetic oligonucleotide; CTA chr2 60508485 60508506 60508490 60508485 -
ttccagaacctcccagttgcat

SEQ ID NO: 218134 - DNA, 22 bp, Artificial Sequence
  Synthetic oligonucleotide; TTC chr2 60508482 60508503 60508487 60508482 -
cagaacctcccagttgcattcc

SEQ ID NO: 218135 - DNA, 22 bp, Artificial Sequence
  Synthetic oligonucleotide; CTC chr2 60508473 60508494 60508478 60508473 -
ccagttgcattcctttgccaac

SEQ ID NO: 218136 - DNA, 22 bp, Artificial Sequence
  Synthetic oligonucleotide; TTG chr2 60508466 60508487 60508471 60508466 -
cattcctttgccaactaggtaa

SEQ ID NO: 218137 - DNA, 22 bp, Artificial Sequence
  Synthetic oligonucleotide; TTC chr2 60508461 60508482 60508466 60508461 -
ctttgccaactaggtaatgtgc

SEQ ID NO: 218138 - DNA, 22 bp, Artificial Sequence
  Synthetic oligonucleotide; CTT chr2 60508458 60508479 60508463 60508458 -
tgccaactaggtaatgtgctag

SEQ ID NO: 218139 - DNA, 22 bp, Artificial Sequence
  Synthetic oligonucleotide; TTT chr2 60508457 60508478 60508462 60508457 -
gccaactaggtaatgtgctagg

SEQ ID NO: 218140 - DNA, 22 bp, Artificial Sequence
  Synthetic oligonucleotide; TTG chr2 60508456 60508477 60508461 60508456 -
ccaactaggtaatgtgctaggg

SEQ ID NO: 218141 - DNA, 22 bp, Artificial Sequence
  Synthetic oligonucleotide; CTA chr2 60508449 60508470 60508454 60508449 -
ggtaatgtgctagggatatttg

SEQ ID NO: 218142 - DNA, 22 bp, Artificial Sequence
  Synthetic oligonucleotide; CTA chr2 60508437 60508458 60508442 60508437 -
gggatatttgtctcgcagcaac

SEQ ID NO: 218143 - DNA, 22 bp, Artificial Sequence
  Synthetic oligonucleotide; TTT chr2 60508428 60508449 60508433 60508428 -
gtctcgcagcaactggcaaccc

SEQ ID NO: 218144 - DNA, 22 bp, Artificial Sequence
  Synthetic oligonucleotide; TTG chr2 60508427 60508448 60508432 60508427 -
tctcgcagcaactggcaacccc

SEQ ID NO: 218145 - DNA, 22 bp, Artificial Sequence
  Synthetic oligonucleotide; CTC chr2 60508423 60508444 60508428 60508423 -
gcagcaactggcaaccccctgt

SEQ ID NO: 218146 - DNA, 22 bp, Artificial Sequence
  Synthetic oligonucleotide; CTG chr2 60508413 60508434 60508418 60508413 -
gcaaccccctgtttgggtaaaa

SEQ ID NO: 218147 - DNA, 22 bp, Artificial Sequence
  Synthetic oligonucleotide; CTG chr2 60508402 60508423 60508407 60508402 -
tttgggtaaaagtcagactcag

SEQ ID NO: 218148 - DNA, 22 bp, Artificial Sequence
  Synthetic oligonucleotide; TTT chr2 60508399 60508420 60508404 60508399 -
gggtaaaagtcagactcaggga

SEQ ID NO: 218149 - DNA, 22 bp, Artificial Sequence
  Synthetic oligonucleotide; TTG chr2 60508398 60508419 60508403 60508398 -
ggtaaaagtcagactcagggac

SEQ ID NO: 218150 - DNA, 22 bp, Artificial Sequence
  Synthetic oligonucleotide; CTC chr2 60508382 60508403 60508387 60508382 -
agggacccggctgcagtgcttg

SEQ ID NO: 218151 - DNA, 22 bp, Artificial Sequence
  Synthetic oligonucleotide; CTG chr2 60508369 60508390 60508374 60508369 -
cagtgcttgctcctgtggcccc

SEQ ID NO: 218152 - DNA, 22 bp, Artificial Sequence
  Synthetic oligonucleotide; CTT chr2 60508361 60508382 60508366 60508361 -
gctcctgtggcccctgcaggga

SEQ ID NO: 218153 - DNA, 22 bp, Artificial Sequence
  Synthetic oligonucleotide; TTG chr2 60508360 60508381 60508365 60508360 -
ctcctgtggcccctgcagggag

SEQ ID NO: 218154 - DNA, 22 bp, Artificial Sequence
  Synthetic oligonucleotide; CTC chr2 60508357 60508378 60508362 60508357 -
ctgtggcccctgcagggagtgt

SEQ ID NO: 218155 - DNA, 22 bp, Artificial Sequence
  Synthetic oligonucleotide; CTG chr2 60508354 60508375 60508359 60508354 -
tggcccctgcagggagtgtggc

SEQ ID NO: 218156 - DNA, 22 bp, Artificial Sequence
  Synthetic oligonucleotide; CTG chr2 60508345 60508366 60508350 60508345 -
cagggagtgtggcctggggtgt

SEQ ID NO: 218157 - DNA, 22 bp, Artificial Sequence
  Synthetic oligonucleotide; CTG chr2 60508329 60508350 60508334 60508329 -
gggtgtaattctgcacacccag

SEQ ID NO: 218158 - DNA, 22 bp, Artificial Sequence
  Synthetic oligonucleotide; TTC chr2 60508318 60508339 60508323 60508318 -
tgcacacccaggaagcttctct

SEQ ID NO: 218159 - DNA, 22 bp, Artificial Sequence
  Synthetic oligonucleotide; CTG chr2 60508316 60508337 60508321 60508316 -
cacacccaggaagcttctctgt

SEQ ID NO: 218160 - DNA, 22 bp, Artificial Sequence
  Synthetic oligonucleotide; CTT chr2 60508300 60508321 60508305 60508300 -
ctctgtctcctctttcacatca

SEQ ID NO: 218161 - DNA, 22 bp, Artificial Sequence
  Synthetic oligonucleotide; TTC chr2 60508299 60508320 60508304 60508299 -
tctgtctcctctttcacatcag

SEQ ID NO: 218162 - DNA, 22 bp, Artificial Sequence
  Synthetic oligonucleotide; CTC chr2 60508297 60508318 60508302 60508297 -
tgtctcctctttcacatcaggc

SEQ ID NO: 218163 - DNA, 22 bp, Artificial Sequence
  Synthetic oligonucleotide; CTG chr2 60508295 60508316 60508300 60508295 -
tctcctctttcacatcaggcct

SEQ ID NO: 218164 - DNA, 22 bp, Artificial Sequence
  Synthetic oligonucleotide; CTC chr2 60508291 60508312 60508296 60508291 -
ctctttcacatcaggccttccc

SEQ ID NO: 218165 - DNA, 22 bp, Artificial Sequence
  Synthetic oligonucleotide; CTC chr2 60508288 60508309 60508293 60508288 -
tttcacatcaggccttccctgt

SEQ ID NO: 218166 - DNA, 22 bp, Artificial Sequence
  Synthetic oligonucleotide; CTT chr2 60508286 60508307 60508291 60508286 -
tcacatcaggccttccctgtgt

SEQ ID NO: 218167 - DNA, 22 bp, Artificial Sequence
  Synthetic oligonucleotide; TTT chr2 60508285 60508306 60508290 60508285 -
cacatcaggccttccctgtgtc

SEQ ID NO: 218168 - DNA, 22 bp, Artificial Sequence
  Synthetic oligonucleotide; TTC chr2 60508284 60508305 60508289 60508284 -
acatcaggccttccctgtgtcc

SEQ ID NO: 218169 - DNA, 22 bp, Artificial Sequence
  Synthetic oligonucleotide; CTT chr2 60508272 60508293 60508277 60508272 -
ccctgtgtcctgaaccaagtgt

SEQ ID NO: 218170 - DNA, 22 bp, Artificial Sequence
  Synthetic oligonucleotide; TTC chr2 60508271 60508292 60508276 60508271 -
cctgtgtcctgaaccaagtgtg

SEQ ID NO: 218171 - DNA, 22 bp, Artificial Sequence
  Synthetic oligonucleotide; CTG chr2 60508267 60508288 60508272 60508267 -
tgtcctgaaccaagtgtggatg

SEQ ID NO: 218172 - DNA, 22 bp, Artificial Sequence
  Synthetic oligonucleotide; CTG chr2 60508260 60508281 60508265 60508260 -
aaccaagtgtggatgagtttga

SEQ ID NO: 218173 - DNA, 22 bp, Artificial Sequence
  Synthetic oligonucleotide; TTT chr2 60508240 60508261 60508245 60508240 -
gagcttcctcctagtttttatt

SEQ ID NO: 218174 - DNA, 22 bp, Artificial Sequence
  Synthetic oligonucleotide; TTG chr2 60508239 60508260 60508244 60508239 -
agcttcctcctagtttttattt

SEQ ID NO: 218175 - DNA, 22 bp, Artificial Sequence
  Synthetic oligonucleotide; CTT chr2 60508234 60508255 60508239 60508234 -
cctcctagtttttatttgtgta

SEQ ID NO: 218176 - DNA, 22 bp, Artificial Sequence
  Synthetic oligonucleotide; TTC chr2 60508233 60508254 60508238 60508233 -
ctcctagtttttatttgtgtaa

SEQ ID NO: 218177 - DNA, 22 bp, Artificial Sequence
  Synthetic oligonucleotide; CTC chr2 60508230 60508251 60508235 60508230 -
ctagtttttatttgtgtaattt

SEQ ID NO: 218178 - DNA, 22 bp, Artificial Sequence
  Synthetic oligonucleotide; CTA chr2 60508227 60508248 60508232 60508227 -
gtttttatttgtgtaatttgtt

SEQ ID NO: 218179 - DNA, 22 bp, Artificial Sequence
  Synthetic oligonucleotide; TTT chr2 60508223 60508244 60508228 60508223 -
ttatttgtgtaatttgttgttg

SEQ ID NO: 218180 - DNA, 22 bp, Artificial Sequence
  Synthetic oligonucleotide; TTT chr2 60508222 60508243 60508227 60508222 -
tatttgtgtaatttgttgttgt

SEQ ID NO: 218181 - DNA, 22 bp, Artificial Sequence
  Synthetic oligonucleotide; TTT chr2 60508221 60508242 60508226 60508221 -
atttgtgtaatttgttgttgtt

SEQ ID NO: 218182 - DNA, 22 bp, Artificial Sequence
  Synthetic oligonucleotide; TTA chr2 60508220 60508241 60508225 60508220 -
tttgtgtaatttgttgttgttg

SEQ ID NO: 218183 - DNA, 22 bp, Artificial Sequence
  Synthetic oligonucleotide; TTT chr2 60508217 60508238 60508222 60508217 -
gtgtaatttgttgttgttgttg

SEQ ID NO: 218184 - DNA, 22 bp, Artificial Sequence
  Synthetic oligonucleotide; TTG chr2 60508216 60508237 60508221 60508216 -
tgtaatttgttgttgttgttgt

SEQ ID NO: 218185 - DNA, 22 bp, Artificial Sequence
  Synthetic oligonucleotide; TTT chr2 60508208 60508229 60508213 60508208 -
gttgttgttgttgttgtttggg

SEQ ID NO: 218186 - DNA, 22 bp, Artificial Sequence
  Synthetic oligonucleotide; TTG chr2 60508207 60508228 60508212 60508207 -
ttgttgttgttgttgtttgggg

SEQ ID NO: 218187 - DNA, 22 bp, Artificial Sequence
  Synthetic oligonucleotide; TTG chr2 60508204 60508225 60508209 60508204 -
ttgttgttgttgtttgggggtg

SEQ ID NO: 218188 - DNA, 22 bp, Artificial Sequence
  Synthetic oligonucleotide; TTG chr2 60508201 60508222 60508206 60508201 -
ttgttgttgtttgggggtgggg

SEQ ID NO: 218189 - DNA, 22 bp, Artificial Sequence
  Synthetic oligonucleotide; TTG chr2 60508198 60508219 60508203 60508198 -
ttgttgtttgggggtgggggta

SEQ ID NO: 218190 - DNA, 22 bp, Artificial Sequence
  Synthetic oligonucleotide; TTG chr2 60508195 60508216 60508200 60508195 -
ttgtttgggggtgggggtagac

SEQ ID NO: 218191 - DNA, 22 bp, Artificial Sequence
  Synthetic oligonucleotide; TTG chr2 60508192 60508213 60508197 60508192 -
tttgggggtgggggtagacagt

SEQ ID NO: 218192 - DNA, 22 bp, Artificial Sequence
  Synthetic oligonucleotide; TTT chr2 60508189 60508210 60508194 60508189 -
gggggtgggggtagacagtgct

SEQ ID NO: 218193 - DNA, 22 bp, Artificial Sequence
  Synthetic oligonucleotide; TTG chr2 60508188 60508209 60508193 60508188 -
ggggtgggggtagacagtgctg

SEQ ID NO: 218194 - DNA, 22 bp, Artificial Sequence
  Synthetic oligonucleotide; CTG chr2 60508166 60508187 60508171 60508166 -
ggcctgtcagaattttaggttg

SEQ ID NO: 218195 - DNA, 22 bp, Artificial Sequence
  Synthetic oligonucleotide; CTG chr2 60508160 60508181 60508165 60508160 -
tcagaattttaggttggttctt

SEQ ID NO: 218196 - DNA, 22 bp, Artificial Sequence
  Synthetic oligonucleotide; TTT chr2 60508151 60508172 60508156 60508151 -
taggttggttctttgagatgaa

SEQ ID NO: 218197 - DNA, 22 bp, Artificial Sequence
  Synthetic oligonucleotide; TTT chr2 60508150 60508171 60508155 60508150 -
aggttggttctttgagatgaat

SEQ ID NO: 218198 - DNA, 22 bp, Artificial Sequence
  Synthetic oligonucleotide; TTA chr2 60508149 60508170 60508154 60508149 -
ggttggttctttgagatgaata

SEQ ID NO: 218199 - DNA, 22 bp, Artificial Sequence
  Synthetic oligonucleotide; TTG chr2 60508144 60508165 60508149 60508144 -
gttctttgagatgaataactac

SEQ ID NO: 218200 - DNA, 22 bp, Artificial Sequence
  Synthetic oligonucleotide; TTC chr2 60508140 60508161 60508145 60508140 -
tttgagatgaataactacttag

SEQ ID NO: 218201 - DNA, 22 bp, Artificial Sequence
  Synthetic oligonucleotide; CTT chr2 60508138 60508159 60508143 60508138 -
tgagatgaataactacttagct

SEQ ID NO: 218202 - DNA, 22 bp, Artificial Sequence
  Synthetic oligonucleotide; TTT chr2 60508137 60508158 60508142 60508137 -
gagatgaataactacttagctg

SEQ ID NO: 218203 - DNA, 22 bp, Artificial Sequence
  Synthetic oligonucleotide; TTG chr2 60508136 60508157 60508141 60508136 -
agatgaataactacttagctgt

SEQ ID NO: 218204 - DNA, 22 bp, Artificial Sequence
  Synthetic oligonucleotide; CTA chr2 60508123 60508144 60508128 60508123 -
cttagctgttgctcaactactt

SEQ ID NO: 218205 - DNA, 22 bp, Artificial Sequence
  Synthetic oligonucleotide; CTT chr2 60508120 60508141 60508125 60508120 -
agctgttgctcaactacttttg

SEQ ID NO: 218206 - DNA, 22 bp, Artificial Sequence
  Synthetic oligonucleotide; TTA chr2 60508119 60508140 60508124 60508119 -
gctgttgctcaactacttttgt

SEQ ID NO: 218207 - DNA, 22 bp, Artificial Sequence
  Synthetic oligonucleotide; CTG chr2 60508115 60508136 60508120 60508115 -
ttgctcaactacttttgtttgt

SEQ ID NO: 218208 - DNA, 22 bp, Artificial Sequence
  Synthetic oligonucleotide; TTG chr2 60508112 60508133 60508117 60508112 -
ctcaactacttttgtttgtgaa

SEQ ID NO: 218209 - DNA, 22 bp, Artificial Sequence
  Synthetic oligonucleotide; CTC chr2 60508109 60508130 60508114 60508109 -
aactacttttgtttgtgaaaga

SEQ ID NO: 218210 - DNA, 22 bp, Artificial Sequence
  Synthetic oligonucleotide; CTA chr2 60508104 60508125 60508109 60508104 -
cttttgtttgtgaaagaaaggg

SEQ ID NO: 218211 - DNA, 22 bp, Artificial Sequence
  Synthetic oligonucleotide; CTT chr2 60508101 60508122 60508106 60508101 -
ttgtttgtgaaagaaagggcag

SEQ ID NO: 218212 - DNA, 22 bp, Artificial Sequence
  Synthetic oligonucleotide; TTT chr2 60508100 60508121 60508105 60508100 -
tgtttgtgaaagaaagggcagt

SEQ ID NO: 218213 - DNA, 22 bp, Artificial Sequence
  Synthetic oligonucleotide; TTT chr2 60508099 60508120 60508104 60508099 -
gtttgtgaaagaaagggcagta

SEQ ID NO: 218214 - DNA, 22 bp, Artificial Sequence
  Synthetic oligonucleotide; TTG chr2 60508098 60508119 60508103 60508098 -
tttgtgaaagaaagggcagtaa

SEQ ID NO: 218215 - DNA, 22 bp, Artificial Sequence
  Synthetic oligonucleotide; TTT chr2 60508095 60508116 60508100 60508095 -
gtgaaagaaagggcagtaagca

SEQ ID NO: 218216 - DNA, 22 bp, Artificial Sequence
  Synthetic oligonucleotide; TTG chr2 60508094 60508115 60508099 60508094 -
tgaaagaaagggcagtaagcac

SEQ ID NO: 218217 - DNA, 22 bp, Artificial Sequence
  Synthetic oligonucleotide; TTT chr2 60508054 60508075 60508059 60508054 -
caggtttattgtgatttctttt

SEQ ID NO: 218218 - DNA, 22 bp, Artificial Sequence
  Synthetic oligonucleotide; TTC chr2 60508053 60508074 60508058 60508053 -
aggtttattgtgatttcttttt

SEQ ID NO: 218219 - DNA, 22 bp, Artificial Sequence
  Synthetic oligonucleotide; TTT chr2 60508047 60508068 60508052 60508047 -
attgtgatttcttttttgtgtt

SEQ ID NO: 218220 - DNA, 22 bp, Artificial Sequence
  Synthetic oligonucleotide; TTA chr2 60508046 60508067 60508051 60508046 -
ttgtgatttcttttttgtgttt

SEQ ID NO: 218221 - DNA, 22 bp, Artificial Sequence
  Synthetic oligonucleotide; TTG chr2 60508043 60508064 60508048 60508043 -
tgatttcttttttgtgtttgca

SEQ ID NO: 218222 - DNA, 22 bp, Artificial Sequence
  Synthetic oligonucleotide; TTT chr2 60508037 60508058 60508042 60508037 -
cttttttgtgtttgcatctgtc

SEQ ID NO: 218223 - DNA, 22 bp, Artificial Sequence
  Synthetic oligonucleotide; TTC chr2 60508036 60508057 60508041 60508036 -
ttttttgtgtttgcatctgtcg

SEQ ID NO: 218224 - DNA, 22 bp, Artificial Sequence
  Synthetic oligonucleotide; CTT chr2 60508034 60508055 60508039 60508034 -
ttttgtgtttgcatctgtcgtg

SEQ ID NO: 218225 - DNA, 22 bp, Artificial Sequence
  Synthetic oligonucleotide; TTT chr2 60508033 60508054 60508038 60508033 -
tttgtgtttgcatctgtcgtgc

SEQ ID NO: 218226 - DNA, 22 bp, Artificial Sequence
  Synthetic oligonucleotide; TTT chr2 60508032 60508053 60508037 60508032 -
ttgtgtttgcatctgtcgtgct

SEQ ID NO: 218227 - DNA, 22 bp, Artificial Sequence
  Synthetic oligonucleotide; TTT chr2 60508031 60508052 60508036 60508031 -
tgtgtttgcatctgtcgtgctc

SEQ ID NO: 218228 - DNA, 22 bp, Artificial Sequence
  Synthetic oligonucleotide; TTT chr2 60508030 60508051 60508035 60508030 -
gtgtttgcatctgtcgtgctca

SEQ ID NO: 218229 - DNA, 22 bp, Artificial Sequence
  Synthetic oligonucleotide; TTG chr2 60508029 60508050 60508034 60508029 -
tgtttgcatctgtcgtgctcag

SEQ ID NO: 218230 - DNA, 22 bp, Artificial Sequence
  Synthetic oligonucleotide; TTT chr2 60508024 60508045 60508029 60508024 -
gcatctgtcgtgctcagttagg

SEQ ID NO: 218231 - DNA, 22 bp, Artificial Sequence
  Synthetic oligonucleotide; TTG chr2 60508023 60508044 60508028 60508023 -
catctgtcgtgctcagttaggg

SEQ ID NO: 218232 - DNA, 22 bp, Artificial Sequence
  Synthetic oligonucleotide; CTG chr2 60508017 60508038 60508022 60508017 -
tcgtgctcagttagggcattat

SEQ ID NO: 218233 - DNA, 22 bp, Artificial Sequence
  Synthetic oligonucleotide; CTC chr2 60508009 60508030 60508014 60508009 -
agttagggcattatccgtaacc

SEQ ID NO: 218234 - DNA, 22 bp, Artificial Sequence
  Synthetic oligonucleotide; TTA chr2 60508004 60508025 60508009 60508004 -
gggcattatccgtaaccccata

SEQ ID NO: 218235 - DNA, 22 bp, Artificial Sequence
  Synthetic oligonucleotide; TTA chr2 60507996 60508017 60508001 60507996 -
tccgtaaccccataggaaccaa

SEQ ID NO: 218236 - DNA, 22 bp, Artificial Sequence
  Synthetic oligonucleotide; TTT chr2 60507954 60507975 60507959 60507954 -
taaagctttagaaatctgcgtg

SEQ ID NO: 218237 - DNA, 22 bp, Artificial Sequence
  Synthetic oligonucleotide; TTT chr2 60507953 60507974 60507958 60507953 -
aaagctttagaaatctgcgtgt

SEQ ID NO: 218238 - DNA, 22 bp, Artificial Sequence
  Synthetic oligonucleotide; TTA chr2 60507952 60507973 60507957 60507952 -
aagctttagaaatctgcgtgtg

SEQ ID NO: 218239 - DNA, 22 bp, Artificial Sequence
  Synthetic oligonucleotide; CTT chr2 60507946 60507967 60507951 60507946 -
tagaaatctgcgtgtgtaatat

SEQ ID NO: 218240 - DNA, 22 bp, Artificial Sequence
  Synthetic oligonucleotide; TTT chr2 60507945 60507966 60507950 60507945 -
agaaatctgcgtgtgtaatatg

SEQ ID NO: 218241 - DNA, 22 bp, Artificial Sequence
  Synthetic oligonucleotide; TTA chr2 60507944 60507965 60507949 60507944 -
gaaatctgcgtgtgtaatatgt

SEQ ID NO: 218242 - DNA, 22 bp, Artificial Sequence
  Synthetic oligonucleotide; CTG chr2 60507936 60507957 60507941 60507936 -
cgtgtgtaatatgtcttttgtg

SEQ ID NO: 218243 - DNA, 22 bp, Artificial Sequence
  Synthetic oligonucleotide; CTT chr2 60507919 60507940 60507924 60507919 -
ttgtgaatttttttttgttctt

SEQ ID NO: 218244 - DNA, 22 bp, Artificial Sequence
  Synthetic oligonucleotide; TTT chr2 60507918 60507939 60507923 60507918 -
tgtgaatttttttttgttcttt

SEQ ID NO: 218245 - DNA, 22 bp, Artificial Sequence
  Synthetic oligonucleotide; TTT chr2 60507917 60507938 60507922 60507917 -
gtgaatttttttttgttctttt

SEQ ID NO: 218246 - DNA, 22 bp, Artificial Sequence
  Synthetic oligonucleotide; TTG chr2 60507916 60507937 60507921 60507916 -
tgaatttttttttgttcttttg

SEQ ID NO: 218247 - DNA, 22 bp, Artificial Sequence
  Synthetic oligonucleotide; TTT chr2 60507909 60507930 60507914 60507909 -
ttttttgttcttttgctttaga

SEQ ID NO: 218248 - DNA, 22 bp, Artificial Sequence
  Synthetic oligonucleotide; TTT chr2 60507908 60507929 60507913 60507908 -
tttttgttcttttgctttagaa

SEQ ID NO: 218249 - DNA, 22 bp, Artificial Sequence
  Synthetic oligonucleotide; TTT chr2 60507907 60507928 60507912 60507907 -
ttttgttcttttgctttagaaa

SEQ ID NO: 218250 - DNA, 22 bp, Artificial Sequence
  Synthetic oligonucleotide; TTT chr2 60507906 60507927 60507911 60507906 -
tttgttcttttgctttagaaac

SEQ ID NO: 218251 - DNA, 22 bp, Artificial Sequence
  Synthetic oligonucleotide; TTT chr2 60507905 60507926 60507910 60507905 -
ttgttcttttgctttagaaact

SEQ ID NO: 218252 - DNA, 22 bp, Artificial Sequence
  Synthetic oligonucleotide; TTT chr2 60507904 60507925 60507909 60507904 -
tgttcttttgctttagaaactg

SEQ ID NO: 218253 - DNA, 22 bp, Artificial Sequence
  Synthetic oligonucleotide; TTT chr2 60507903 60507924 60507908 60507903 -
gttcttttgctttagaaactgt

SEQ ID NO: 218254 - DNA, 22 bp, Artificial Sequence
  Synthetic oligonucleotide; TTG chr2 60507902 60507923 60507907 60507902 -
ttcttttgctttagaaactgta

SEQ ID NO: 218255 - DNA, 22 bp, Artificial Sequence
  Synthetic oligonucleotide; TTC chr2 60507899 60507920 60507904 60507899 -
ttttgctttagaaactgtaata

SEQ ID NO: 218256 - DNA, 22 bp, Artificial Sequence
  Synthetic oligonucleotide; CTT chr2 60507897 60507918 60507902 60507897 -
ttgctttagaaactgtaataat

SEQ ID NO: 218257 - DNA, 22 bp, Artificial Sequence
  Synthetic oligonucleotide; TTT chr2 60507896 60507917 60507901 60507896 -
tgctttagaaactgtaataata

SEQ ID NO: 218258 - DNA, 22 bp, Artificial Sequence
  Synthetic oligonucleotide; TTT chr2 60507895 60507916 60507900 60507895 -
gctttagaaactgtaataataa

SEQ ID NO: 218259 - DNA, 22 bp, Artificial Sequence
  Synthetic oligonucleotide; TTG chr2 60507894 60507915 60507899 60507894 -
ctttagaaactgtaataataat

SEQ ID NO: 218260 - DNA, 22 bp, Artificial Sequence
  Synthetic oligonucleotide; CTT chr2 60507891 60507912 60507896 60507891 -
tagaaactgtaataataatcca

SEQ ID NO: 218261 - DNA, 22 bp, Artificial Sequence
  Synthetic oligonucleotide; TTT chr2 60507890 60507911 60507895 60507890 -
agaaactgtaataataatccat

SEQ ID NO: 218262 - DNA, 22 bp, Artificial Sequence
  Synthetic oligonucleotide; TTA chr2 60507889 60507910 60507894 60507889 -
gaaactgtaataataatccata

SEQ ID NO: 218263 - DNA, 22 bp, Artificial Sequence
  Synthetic oligonucleotide; CTG chr2 60507882 60507903 60507887 60507882 -
taataataatccatagtaatta

SEQ ID NO: 218264 - DNA, 22 bp, Artificial Sequence
  Synthetic oligonucleotide; TTA chr2 60507860 60507881 60507865 60507860 -
tcccatagtatgctgtcctttg

SEQ ID NO: 218265 - DNA, 22 bp, Artificial Sequence
  Synthetic oligonucleotide; CTG chr2 60507845 60507866 60507850 60507845 -
tcctttgttacaggagcattgg

SEQ ID NO: 218266 - DNA, 22 bp, Artificial Sequence
  Synthetic oligonucleotide; CTT chr2 60507840 60507861 60507845 60507840 -
tgttacaggagcattggattac

SEQ ID NO: 218267 - DNA, 22 bp, Artificial Sequence
  Synthetic oligonucleotide; TTT chr2 60507839 60507860 60507844 60507839 -
gttacaggagcattggattact

SEQ ID NO: 218268 - DNA, 22 bp, Artificial Sequence
  Synthetic oligonucleotide; TTG chr2 60507838 60507859 60507843 60507838 -
ttacaggagcattggattactg

SEQ ID NO: 218269 - DNA, 22 bp, Artificial Sequence
  Synthetic oligonucleotide; TTA chr2 60507835 60507856 60507840 60507835 -
caggagcattggattactgtga

SEQ ID NO: 218270 - DNA, 22 bp, Artificial Sequence
  Synthetic oligonucleotide; TTG chr2 60507824 60507845 60507829 60507824 -
gattactgtgaagacgtgtcct

SEQ ID NO: 218271 - DNA, 22 bp, Artificial Sequence
  Synthetic oligonucleotide; TTA chr2 60507819 60507840 60507824 60507819 -
ctgtgaagacgtgtcctgtata

SEQ ID NO: 218272 - DNA, 22 bp, Artificial Sequence
  Synthetic oligonucleotide; CTG chr2 60507816 60507837 60507821 60507816 -
tgaagacgtgtcctgtatacag

SEQ ID NO: 218273 - DNA, 22 bp, Artificial Sequence
  Synthetic oligonucleotide; CTG chr2 60507801 60507822 60507806 60507801 -
tatacagtttcaacagcttgtt

SEQ ID NO: 218274 - DNA, 22 bp, Artificial Sequence
  Synthetic oligonucleotide; TTT chr2 60507791 60507812 60507796 60507791 -
caacagcttgtttttacttctt

SEQ ID NO: 218275 - DNA, 22 bp, Artificial Sequence
  Synthetic oligonucleotide; TTC chr2 60507790 60507811 60507795 60507790 -
aacagcttgtttttacttcttc

SEQ ID NO: 218276 - DNA, 22 bp, Artificial Sequence
  Synthetic oligonucleotide; CTT chr2 60507782 60507803 60507787 60507782 -
gtttttacttcttcccttctcc

SEQ ID NO: 218277 - DNA, 22 bp, Artificial Sequence
  Synthetic oligonucleotide; TTG chr2 60507781 60507802 60507786 60507781 -
tttttacttcttcccttctccc

SEQ ID NO: 218278 - DNA, 22 bp, Artificial Sequence
  Synthetic oligonucleotide; TTT chr2 60507778 60507799 60507783 60507778 -
ttacttcttcccttctccccgc

SEQ ID NO: 218279 - DNA, 22 bp, Artificial Sequence
  Synthetic oligonucleotide; TTT chr2 60507777 60507798 60507782 60507777 -
tacttcttcccttctccccgca

SEQ ID NO: 218280 - DNA, 22 bp, Artificial Sequence
  Synthetic oligonucleotide; TTT chr2 60507776 60507797 60507781 60507776 -
acttcttcccttctccccgcac

SEQ ID NO: 218281 - DNA, 22 bp, Artificial Sequence
  Synthetic oligonucleotide; TTA chr2 60507775 60507796 60507780 60507775 -
cttcttcccttctccccgcacc

SEQ ID NO: 218282 - DNA, 22 bp, Artificial Sequence
  Synthetic oligonucleotide; CTT chr2 60507772 60507793 60507777 60507772 -
cttcccttctccccgcacccgt

SEQ ID NO: 218283 - DNA, 22 bp, Artificial Sequence
  Synthetic oligonucleotide; TTC chr2 60507771 60507792 60507776 60507771 -
ttcccttctccccgcacccgtc

SEQ ID NO: 218284 - DNA, 22 bp, Artificial Sequence
  Synthetic oligonucleotide; CTT chr2 60507769 60507790 60507774 60507769 -
cccttctccccgcacccgtcgc

SEQ ID NO: 218285 - DNA, 22 bp, Artificial Sequence
  Synthetic oligonucleotide; TTC chr2 60507768 60507789 60507773 60507768 -
ccttctccccgcacccgtcgcc

SEQ ID NO: 218286 - DNA, 22 bp, Artificial Sequence
  Synthetic oligonucleotide; CTT chr2 60507764 60507785 60507769 60507764 -
ctccccgcacccgtcgcccccc

SEQ ID NO: 218287 - DNA, 22 bp, Artificial Sequence
  Synthetic oligonucleotide; TTC chr2 60507763 60507784 60507768 60507763 -
tccccgcacccgtcgcccccca

SEQ ID NO: 218288 - DNA, 22 bp, Artificial Sequence
  Synthetic oligonucleotide; CTC chr2 60507761 60507782 60507766 60507761 -
cccgcacccgtcgccccccacc

SEQ ID NO: 218289 - DNA, 22 bp, Artificial Sequence
  Synthetic oligonucleotide; CTT chr2 60507729 60507750 60507734 60507729 -
tctgtcttgtgctgtttggaag

SEQ ID NO: 218290 - DNA, 22 bp, Artificial Sequence
  Synthetic oligonucleotide; TTT chr2 60507728 60507749 60507733 60507728 -
ctgtcttgtgctgtttggaaga

SEQ ID NO: 218291 - DNA, 22 bp, Artificial Sequence
  Synthetic oligonucleotide; TTC chr2 60507727 60507748 60507732 60507727 -
tgtcttgtgctgtttggaagac

SEQ ID NO: 218292 - DNA, 22 bp, Artificial Sequence
  Synthetic oligonucleotide; CTG chr2 60507725 60507746 60507730 60507725 -
tcttgtgctgtttggaagacaa

SEQ ID NO: 218293 - DNA, 22 bp, Artificial Sequence
  Synthetic oligonucleotide; CTT chr2 60507721 60507742 60507726 60507721 -
gtgctgtttggaagacaatttc

SEQ ID NO: 218294 - DNA, 22 bp, Artificial Sequence
  Synthetic oligonucleotide; TTG chr2 60507720 60507741 60507725 60507720 -
tgctgtttggaagacaatttcc

SEQ ID NO: 218295 - DNA, 22 bp, Artificial Sequence
  Synthetic oligonucleotide; CTG chr2 60507715 60507736 60507720 60507715 -
tttggaagacaatttccacatt

SEQ ID NO: 218296 - DNA, 22 bp, Artificial Sequence
  Synthetic oligonucleotide; TTT chr2 60507712 60507733 60507717 60507712 -
ggaagacaatttccacatttct

SEQ ID NO: 218297 - DNA, 22 bp, Artificial Sequence
  Synthetic oligonucleotide; TTG chr2 60507711 60507732 60507716 60507711 -
gaagacaatttccacatttctg

SEQ ID NO: 218298 - DNA, 22 bp, Artificial Sequence
  Synthetic oligonucleotide; TTT chr2 60507700 60507721 60507705 60507700 -
ccacatttctgccatatgtctt

SEQ ID NO: 218299 - DNA, 22 bp, Artificial Sequence
  Synthetic oligonucleotide; TTC chr2 60507699 60507720 60507704 60507699 -
cacatttctgccatatgtctta

SEQ ID NO: 218300 - DNA, 22 bp, Artificial Sequence
  Synthetic oligonucleotide; TTT chr2 60507692 60507713 60507697 60507692 -
ctgccatatgtcttagaaaagc

SEQ ID NO: 218301 - DNA, 22 bp, Artificial Sequence
  Synthetic oligonucleotide; TTC chr2 60507691 60507712 60507696 60507691 -
tgccatatgtcttagaaaagct

SEQ ID NO: 218302 - DNA, 22 bp, Artificial Sequence
  Synthetic oligonucleotide; CTG chr2 60507689 60507710 60507694 60507689 -
ccatatgtcttagaaaagctgg

SEQ ID NO: 218303 - DNA, 22 bp, Artificial Sequence
  Synthetic oligonucleotide; CTT chr2 60507678 60507699 60507683 60507678 -
agaaaagctggggacttagaag

SEQ ID NO: 218304 - DNA, 22 bp, Artificial Sequence
  Synthetic oligonucleotide; TTA chr2 60507677 60507698 60507682 60507677 -
gaaaagctggggacttagaagc

SEQ ID NO: 218305 - DNA, 22 bp, Artificial Sequence
  Synthetic oligonucleotide; CTG chr2 60507668 60507689 60507673 60507668 -
gggacttagaagcagtagccga

SEQ ID NO: 218306 - DNA, 22 bp, Artificial Sequence
  Synthetic oligonucleotide; CTT chr2 60507661 60507682 60507666 60507661 -
agaagcagtagccgacttagga

SEQ ID NO: 218307 - DNA, 22 bp, Artificial Sequence
  Synthetic oligonucleotide; TTA chr2 60507660 60507681 60507665 60507660 -
gaagcagtagccgacttaggac

SEQ ID NO: 218308 - DNA, 22 bp, Artificial Sequence
  Synthetic oligonucleotide; CTT chr2 60507643 60507664 60507648 60507643 -
aggacagcaagctcagctcagg

SEQ ID NO: 218309 - DNA, 22 bp, Artificial Sequence
  Synthetic oligonucleotide; TTA chr2 60507642 60507663 60507647 60507642 -
ggacagcaagctcagctcaggt

SEQ ID NO: 218310 - DNA, 22 bp, Artificial Sequence
  Synthetic oligonucleotide; CTC chr2 60507629 60507650 60507634 60507629 -
agctcaggtgcggaggcagccc

SEQ ID NO: 218311 - DNA, 22 bp, Artificial Sequence
  Synthetic oligonucleotide; CTC chr2 60507624 60507645 60507629 60507624 -
aggtgcggaggcagccctgtgt

SEQ ID NO: 218312 - DNA, 22 bp, Artificial Sequence
  Synthetic oligonucleotide; CTG chr2 60507605 60507626 60507610 60507605 -
tgtaagagactctgttatgcag

SEQ ID NO: 218313 - DNA, 22 bp, Artificial Sequence
  Synthetic oligonucleotide; CTC chr2 60507593 60507614 60507598 60507593 -
tgttatgcagtgagctgttgaa

SEQ ID NO: 218314 - DNA, 22 bp, Artificial Sequence
  Synthetic oligonucleotide; CTG chr2 60507591 60507612 60507596 60507591 -
ttatgcagtgagctgttgaaac

SEQ ID NO: 218315 - DNA, 22 bp, Artificial Sequence
  Synthetic oligonucleotide; TTA chr2 60507588 60507609 60507593 60507588 -
tgcagtgagctgttgaaacagc

SEQ ID NO: 218316 - DNA, 22 bp, Artificial Sequence
  Synthetic oligonucleotide; CTG chr2 60507576 60507597 60507581 60507576 -
ttgaaacagctgcatgtggaaa

SEQ ID NO: 218317 - DNA, 22 bp, Artificial Sequence
  Synthetic oligonucleotide; TTG chr2 60507573 60507594 60507578 60507573 -
aaacagctgcatgtggaaacag

SEQ ID NO: 218318 - DNA, 22 bp, Artificial Sequence
  Synthetic oligonucleotide; CTG chr2 60507564 60507585 60507569 60507564 -
catgtggaaacagttcttcccc

SEQ ID NO: 218319 - DNA, 22 bp, Artificial Sequence
  Synthetic oligonucleotide; TTC chr2 60507548 60507569 60507553 60507548 -
ttccccttgcctgtcctcattt

SEQ ID NO: 218320 - DNA, 22 bp, Artificial Sequence
  Synthetic oligonucleotide; CTT chr2 60507546 60507567 60507551 60507546 -
ccccttgcctgtcctcatttct

SEQ ID NO: 218321 - DNA, 22 bp, Artificial Sequence
  Synthetic oligonucleotide; TTC chr2 60507545 60507566 60507550 60507545 -
cccttgcctgtcctcatttctt

SEQ ID NO: 218322 - DNA, 22 bp, Artificial Sequence
  Synthetic oligonucleotide; CTT chr2 60507540 60507561 60507545 60507540 -
gcctgtcctcatttcttgagag

SEQ ID NO: 218323 - DNA, 22 bp, Artificial Sequence
  Synthetic oligonucleotide; TTG chr2 60507539 60507560 60507544 60507539 -
cctgtcctcatttcttgagaga

SEQ ID NO: 218324 - DNA, 22 bp, Artificial Sequence
  Synthetic oligonucleotide; CTG chr2 60507535 60507556 60507540 60507535 -
tcctcatttcttgagagactcc

SEQ ID NO: 218325 - DNA, 22 bp, Artificial Sequence
  Synthetic oligonucleotide; CTC chr2 60507530 60507551 60507535 60507530 -
atttcttgagagactccaaaac

SEQ ID NO: 218326 - DNA, 22 bp, Artificial Sequence
  Synthetic oligonucleotide; TTT chr2 60507526 60507547 60507531 60507526 -
cttgagagactccaaaacatct

SEQ ID NO: 218327 - DNA, 22 bp, Artificial Sequence
  Synthetic oligonucleotide; TTC chr2 60507525 60507546 60507530 60507525 -
ttgagagactccaaaacatctg

SEQ ID NO: 218328 - DNA, 22 bp, Artificial Sequence
  Synthetic oligonucleotide; CTT chr2 60507523 60507544 60507528 60507523 -
gagagactccaaaacatctgaa

SEQ ID NO: 218329 - DNA, 22 bp, Artificial Sequence
  Synthetic oligonucleotide; TTG chr2 60507522 60507543 60507527 60507522 -
agagactccaaaacatctgaaa

SEQ ID NO: 218330 - DNA, 22 bp, Artificial Sequence
  Synthetic oligonucleotide; CTC chr2 60507514 60507535 60507519 60507514 -
caaaacatctgaaaatgtaaaa

SEQ ID NO: 218331 - DNA, 22 bp, Artificial Sequence
  Synthetic oligonucleotide; CTG chr2 60507503 60507524 60507508 60507503 -
aaaatgtaaaagcacttcacaa

SEQ ID NO: 218332 - DNA, 22 bp, Artificial Sequence
  Synthetic oligonucleotide; CTT chr2 60507486 60507507 60507491 60507486 -
cacaaggttttaacttttctgg

SEQ ID NO: 218333 - DNA, 22 bp, Artificial Sequence
  Synthetic oligonucleotide; TTC chr2 60507485 60507506 60507490 60507485 -
acaaggttttaacttttctggc

SEQ ID NO: 218334 - DNA, 22 bp, Artificial Sequence
  Synthetic oligonucleotide; TTT chr2 60507476 60507497 60507481 60507476 -
taacttttctggcttgaacgga

SEQ ID NO: 218335 - DNA, 22 bp, Artificial Sequence
  Synthetic oligonucleotide; TTT chr2 60507475 60507496 60507480 60507475 -
aacttttctggcttgaacggaa

SEQ ID NO: 218336 - DNA, 22 bp, Artificial Sequence
  Synthetic oligonucleotide; TTA chr2 60507474 60507495 60507479 60507474 -
acttttctggcttgaacggaag

SEQ ID NO: 218337 - DNA, 22 bp, Artificial Sequence
  Synthetic oligonucleotide; CTT chr2 60507470 60507491 60507475 60507470 -
ttctggcttgaacggaagcagc

SEQ ID NO: 218338 - DNA, 22 bp, Artificial Sequence
  Synthetic oligonucleotide; TTT chr2 60507469 60507490 60507474 60507469 -
tctggcttgaacggaagcagct

SEQ ID NO: 218339 - DNA, 22 bp, Artificial Sequence
  Synthetic oligonucleotide; TTT chr2 60507468 60507489 60507473 60507468 -
ctggcttgaacggaagcagctt

SEQ ID NO: 218340 - DNA, 22 bp, Artificial Sequence
  Synthetic oligonucleotide; TTC chr2 60507467 60507488 60507472 60507467 -
tggcttgaacggaagcagcttc

SEQ ID NO: 218341 - DNA, 22 bp, Artificial Sequence
  Synthetic oligonucleotide; CTG chr2 60507465 60507486 60507470 60507465 -
gcttgaacggaagcagcttcaa

SEQ ID NO: 218342 - DNA, 22 bp, Artificial Sequence
  Synthetic oligonucleotide; CTT chr2 60507461 60507482 60507466 60507461 -
gaacggaagcagcttcaagtca

SEQ ID NO: 218343 - DNA, 22 bp, Artificial Sequence
  Synthetic oligonucleotide; TTG chr2 60507460 60507481 60507465 60507460 -
aacggaagcagcttcaagtcaa

SEQ ID NO: 218344 - DNA, 22 bp, Artificial Sequence
  Synthetic oligonucleotide; CTT chr2 60507446 60507467 60507451 60507446 -
caagtcaacaagagcacaatag

SEQ ID NO: 218345 - DNA, 22 bp, Artificial Sequence
  Synthetic oligonucleotide; TTC chr2 60507445 60507466 60507450 60507445 -
aagtcaacaagagcacaatagt

SEQ ID NO: 218346 - DNA, 22 bp, Artificial Sequence
  Synthetic oligonucleotide; CTT chr2 60507420 60507441 60507425 60507420 -
tgtaggttttggacacagtttt

SEQ ID NO: 218347 - DNA, 22 bp, Artificial Sequence
  Synthetic oligonucleotide; TTT chr2 60507419 60507440 60507424 60507419 -
gtaggttttggacacagttttc

SEQ ID NO: 218348 - DNA, 22 bp, Artificial Sequence
  Synthetic oligonucleotide; TTG chr2 60507418 60507439 60507423 60507418 -
taggttttggacacagttttct

SEQ ID NO: 218349 - DNA, 22 bp, Artificial Sequence
  Synthetic oligonucleotide; TTT chr2 60507411 60507432 60507416 60507411 -
tggacacagttttctagctttt

SEQ ID NO: 218350 - DNA, 22 bp, Artificial Sequence
  Synthetic oligonucleotide; TTT chr2 60507410 60507431 60507415 60507410 -
ggacacagttttctagcttttc

SEQ ID NO: 218351 - DNA, 22 bp, Artificial Sequence
  Synthetic oligonucleotide; TTG chr2 60507409 60507430 60507414 60507409 -
gacacagttttctagcttttca

SEQ ID NO: 218352 - DNA, 22 bp, Artificial Sequence
  Synthetic oligonucleotide; TTT chr2 60507399 60507420 60507404 60507399 -
tctagcttttcaagaaaggcaa

SEQ ID NO: 218353 - DNA, 22 bp, Artificial Sequence
  Synthetic oligonucleotide; TTT chr2 60507398 60507419 60507403 60507398 -
ctagcttttcaagaaaggcaag

SEQ ID NO: 218354 - DNA, 22 bp, Artificial Sequence
  Synthetic oligonucleotide; TTC chr2 60507397 60507418 60507402 60507397 -
tagcttttcaagaaaggcaagg

SEQ ID NO: 218355 - DNA, 22 bp, Artificial Sequence
  Synthetic oligonucleotide; CTA chr2 60507395 60507416 60507400 60507395 -
gcttttcaagaaaggcaagggc

SEQ ID NO: 218356 - DNA, 22 bp, Artificial Sequence
  Synthetic oligonucleotide; CTT chr2 60507391 60507412 60507396 60507391 -
ttcaagaaaggcaagggccctc

SEQ ID NO: 218357 - DNA, 22 bp, Artificial Sequence
  Synthetic oligonucleotide; TTT chr2 60507390 60507411 60507395 60507390 -
tcaagaaaggcaagggccctcc

SEQ ID NO: 218358 - DNA, 22 bp, Artificial Sequence
  Synthetic oligonucleotide; TTT chr2 60507389 60507410 60507394 60507389 -
caagaaaggcaagggccctcct

SEQ ID NO: 218359 - DNA, 22 bp, Artificial Sequence
  Synthetic oligonucleotide; TTC chr2 60507388 60507409 60507393 60507388 -
aagaaaggcaagggccctcctt

SEQ ID NO: 218360 - DNA, 22 bp, Artificial Sequence
  Synthetic oligonucleotide; CTC chr2 60507369 60507390 60507374 60507369 -
cttccctccctcccttcccttc

SEQ ID NO: 218361 - DNA, 22 bp, Artificial Sequence
  Synthetic oligonucleotide; CTT chr2 60507366 60507387 60507371 60507366 -
ccctccctcccttcccttccct

SEQ ID NO: 218362 - DNA, 22 bp, Artificial Sequence
  Synthetic oligonucleotide; TTC chr2 60507365 60507386 60507370 60507365 -
cctccctcccttcccttccctt

SEQ ID NO: 218363 - DNA, 22 bp, Artificial Sequence
  Synthetic oligonucleotide; CTC chr2 60507361 60507382 60507366 60507361 -
cctcccttcccttcccttccct

SEQ ID NO: 218364 - DNA, 22 bp, Artificial Sequence
  Synthetic oligonucleotide; CTC chr2 60507357 60507378 60507362 60507357 -
ccttcccttcccttcccttccc

SEQ ID NO: 218365 - DNA, 22 bp, Artificial Sequence
  Synthetic oligonucleotide; CTT chr2 60507353 60507374 60507358 60507353 -
cccttcccttcccttcccttcc

SEQ ID NO: 218366 - DNA, 22 bp, Artificial Sequence
  Synthetic oligonucleotide; TTC chr2 60507352 60507373 60507357 60507352 -
ccttcccttcccttcccttccc

SEQ ID NO: 218367 - DNA, 22 bp, Artificial Sequence
  Synthetic oligonucleotide; CTT chr2 60507348 60507369 60507353 60507348 -
cccttcccttcccttcccttcc

SEQ ID NO: 218368 - DNA, 22 bp, Artificial Sequence
  Synthetic oligonucleotide; TTC chr2 60507347 60507368 60507352 60507347 -
ccttcccttcccttcccttccc

SEQ ID NO: 218369 - DNA, 22 bp, Artificial Sequence
  Synthetic oligonucleotide; CTT chr2 60507343 60507364 60507348 60507343 -
cccttcccttcccttcccttcc

SEQ ID NO: 218370 - DNA, 22 bp, Artificial Sequence
  Synthetic oligonucleotide; TTC chr2 60507342 60507363 60507347 60507342 -
ccttcccttcccttcccttccc

SEQ ID NO: 218371 - DNA, 22 bp, Artificial Sequence
  Synthetic oligonucleotide; CTT chr2 60507338 60507359 60507343 60507338 -
cccttcccttcccttcccttcc

SEQ ID NO: 218372 - DNA, 22 bp, Artificial Sequence
  Synthetic oligonucleotide; TTC chr2 60507337 60507358 60507342 60507337 -
ccttcccttcccttcccttccc

SEQ ID NO: 218373 - DNA, 22 bp, Artificial Sequence
  Synthetic oligonucleotide; CTT chr2 60507333 60507354 60507338 60507333 -
cccttcccttcccttcccttcc

SEQ ID NO: 218374 - DNA, 22 bp, Artificial Sequence
  Synthetic oligonucleotide; TTC chr2 60507332 60507353 60507337 60507332 -
ccttcccttcccttcccttccc

SEQ ID NO: 218375 - DNA, 22 bp, Artificial Sequence
  Synthetic oligonucleotide; CTT chr2 60507328 60507349 60507333 60507328 -
cccttcccttcccttcccttcc

SEQ ID NO: 218376 - DNA, 22 bp, Artificial Sequence
  Synthetic oligonucleotide; TTC chr2 60507327 60507348 60507332 60507327 -
ccttcccttcccttcccttccc

SEQ ID NO: 218377 - DNA, 22 bp, Artificial Sequence
  Synthetic oligonucleotide; CTT chr2 60507323 60507344 60507328 60507323 -
cccttcccttcccttcccttcc

SEQ ID NO: 218378 - DNA, 22 bp, Artificial Sequence
  Synthetic oligonucleotide; TTC chr2 60507322 60507343 60507327 60507322 -
ccttcccttcccttcccttccc

SEQ ID NO: 218379 - DNA, 22 bp, Artificial Sequence
  Synthetic oligonucleotide; CTT chr2 60507318 60507339 60507323 60507318 -
cccttcccttcccttcccttcc

SEQ ID NO: 218380 - DNA, 22 bp, Artificial Sequence
  Synthetic oligonucleotide; TTC chr2 60507317 60507338 60507322 60507317 -
ccttcccttcccttcccttccc

SEQ ID NO: 218381 - DNA, 22 bp, Artificial Sequence
  Synthetic oligonucleotide; CTT chr2 60507313 60507334 60507318 60507313 -
cccttcccttcccttcccctcc

SEQ ID NO: 218382 - DNA, 22 bp, Artificial Sequence
  Synthetic oligonucleotide; TTC chr2 60507312 60507333 60507317 60507312 -
ccttcccttcccttcccctccc

SEQ ID NO: 218383 - DNA, 22 bp, Artificial Sequence
  Synthetic oligonucleotide; CTT chr2 60507308 60507329 60507313 60507308 -
cccttcccttcccctcccctcc

SEQ ID NO: 218384 - DNA, 22 bp, Artificial Sequence
  Synthetic oligonucleotide; TTC chr2 60507307 60507328 60507312 60507307 -
ccttcccttcccctcccctccc

SEQ ID NO: 218385 - DNA, 22 bp, Artificial Sequence
  Synthetic oligonucleotide; CTT chr2 60507303 60507324 60507308 60507303 -
cccttcccctcccctcccctcc

SEQ ID NO: 218386 - DNA, 22 bp, Artificial Sequence
  Synthetic oligonucleotide; TTC chr2 60507302 60507323 60507307 60507302 -
ccttcccctcccctcccctccc

SEQ ID NO: 218387 - DNA, 22 bp, Artificial Sequence
  Synthetic oligonucleotide; CTT chr2 60507298 60507319 60507303 60507298 -
cccctcccctcccctcccctcc

SEQ ID NO: 218388 - DNA, 22 bp, Artificial Sequence
  Synthetic oligonucleotide; TTC chr2 60507297 60507318 60507302 60507297 -
ccctcccctcccctcccctccc

SEQ ID NO: 218389 - DNA, 22 bp, Artificial Sequence
  Synthetic oligonucleotide; CTC chr2 60507292 60507313 60507297 60507292 -
ccctcccctcccctcccctccc

SEQ ID NO: 218390 - DNA, 22 bp, Artificial Sequence
  Synthetic oligonucleotide; CTC chr2 60507287 60507308 60507292 60507287 -
ccctcccctcccctcccctccc

SEQ ID NO: 218391 - DNA, 22 bp, Artificial Sequence
  Synthetic oligonucleotide; CTC chr2 60507282 60507303 60507287 60507282 -
ccctcccctcccctcccctccc

SEQ ID NO: 218392 - DNA, 22 bp, Artificial Sequence
  Synthetic oligonucleotide; CTC chr2 60507277 60507298 60507282 60507277 -
ccctcccctcccctcccctccc

SEQ ID NO: 218393 - DNA, 22 bp, Artificial Sequence
  Synthetic oligonucleotide; CTC chr2 60507272 60507293 60507277 60507272 -
ccctcccctcccctcccctccc

SEQ ID NO: 218394 - DNA, 22 bp, Artificial Sequence
  Synthetic oligonucleotide; CTC chr2 60507267 60507288 60507272 60507267 -
ccctcccctcccctcccctccc

SEQ ID NO: 218395 - DNA, 22 bp, Artificial Sequence
  Synthetic oligonucleotide; CTC chr2 60507262 60507283 60507267 60507262 -
ccctcccctcccctcccctccc

SEQ ID NO: 218396 - DNA, 22 bp, Artificial Sequence
  Synthetic oligonucleotide; CTC chr2 60507257 60507278 60507262 60507257 -
ccctcccctcccctcccctccc

SEQ ID NO: 218397 - DNA, 22 bp, Artificial Sequence
  Synthetic oligonucleotide; CTC chr2 60507252 60507273 60507257 60507252 -
ccctcccctcccctcccctccc

SEQ ID NO: 218398 - DNA, 22 bp, Artificial Sequence
  Synthetic oligonucleotide; CTC chr2 60507247 60507268 60507252 60507247 -
ccctcccctcccctcccctccc

SEQ ID NO: 218399 - DNA, 22 bp, Artificial Sequence
  Synthetic oligonucleotide; CTC chr2 60507242 60507263 60507247 60507242 -
ccctcccctcccctcccctccc

SEQ ID NO: 218400 - DNA, 22 bp, Artificial Sequence
  Synthetic oligonucleotide; CTC chr2 60507237 60507258 60507242 60507237 -
ccctcccctcccctccctccct

SEQ ID NO: 218401 - DNA, 22 bp, Artificial Sequence
  Synthetic oligonucleotide; CTC chr2 60507232 60507253 60507237 60507232 -
ccctcccctccctccctccctt

SEQ ID NO: 218402 - DNA, 22 bp, Artificial Sequence
  Synthetic oligonucleotide; CTC chr2 60507227 60507248 60507232 60507227 -
ccctccctccctcccttccttc

SEQ ID NO: 218403 - DNA, 22 bp, Artificial Sequence
  Synthetic oligonucleotide; CTC chr2 60507222 60507243 60507227 60507222 -
cctccctcccttccttccttcc

SEQ ID NO: 218404 - DNA, 22 bp, Artificial Sequence
  Synthetic oligonucleotide; CTC chr2 60507218 60507239 60507223 60507218 -
cctcccttccttccttccttcc

SEQ ID NO: 218405 - DNA, 22 bp, Artificial Sequence
  Synthetic oligonucleotide; CTC chr2 60507214 60507235 60507219 60507214 -
ccttccttccttccttccttcc

SEQ ID NO: 218406 - DNA, 22 bp, Artificial Sequence
  Synthetic oligonucleotide; CTT chr2 60507210 60507231 60507215 60507210 -
ccttccttccttccttccttcc

SEQ ID NO: 218407 - DNA, 22 bp, Artificial Sequence
  Synthetic oligonucleotide; TTC chr2 60507209 60507230 60507214 60507209 -
cttccttccttccttccttcct

SEQ ID NO: 218408 - DNA, 22 bp, Artificial Sequence
  Synthetic oligonucleotide; CTT chr2 60507206 60507227 60507211 60507206 -
ccttccttccttccttcctttc

SEQ ID NO: 218409 - DNA, 22 bp, Artificial Sequence
  Synthetic oligonucleotide; TTC chr2 60507205 60507226 60507210 60507205 -
cttccttccttccttcctttct

SEQ ID NO: 218410 - DNA, 22 bp, Artificial Sequence
  Synthetic oligonucleotide; CTT chr2 60507202 60507223 60507207 60507202 -
ccttccttccttcctttcttcc

SEQ ID NO: 218411 - DNA, 22 bp, Artificial Sequence
  Synthetic oligonucleotide; TTC chr2 60507201 60507222 60507206 60507201 -
cttccttccttcctttcttcct

SEQ ID NO: 218412 - DNA, 22 bp, Artificial Sequence
  Synthetic oligonucleotide; CTT chr2 60507198 60507219 60507203 60507198 -
ccttccttcctttcttccttgt

SEQ ID NO: 218413 - DNA, 22 bp, Artificial Sequence
  Synthetic oligonucleotide; TTC chr2 60507197 60507218 60507202 60507197 -
cttccttcctttcttccttgtc

SEQ ID NO: 218414 - DNA, 22 bp, Artificial Sequence
  Synthetic oligonucleotide; CTT chr2 60507194 60507215 60507199 60507194 -
ccttcctttcttccttgtcttg

SEQ ID NO: 218415 - DNA, 22 bp, Artificial Sequence
  Synthetic oligonucleotide; TTC chr2 60507193 60507214 60507198 60507193 -
cttcctttcttccttgtcttgc

SEQ ID NO: 218416 - DNA, 22 bp, Artificial Sequence
  Synthetic oligonucleotide; CTT chr2 60507190 60507211 60507195 60507190 -
cctttcttccttgtcttgcttt

SEQ ID NO: 218417 - DNA, 22 bp, Artificial Sequence
  Synthetic oligonucleotide; TTC chr2 60507189 60507210 60507194 60507189 -
ctttcttccttgtcttgctttg

SEQ ID NO: 218418 - DNA, 22 bp, Artificial Sequence
  Synthetic oligonucleotide; CTT chr2 60507186 60507207 60507191 60507186 -
tcttccttgtcttgctttgcat

SEQ ID NO: 218419 - DNA, 22 bp, Artificial Sequence
  Synthetic oligonucleotide; TTT chr2 60507185 60507206 60507190 60507185 -
cttccttgtcttgctttgcatt

SEQ ID NO: 218420 - DNA, 22 bp, Artificial Sequence
  Synthetic oligonucleotide; TTC chr2 60507184 60507205 60507189 60507184 -
ttccttgtcttgctttgcattc

SEQ ID NO: 218421 - DNA, 22 bp, Artificial Sequence
  Synthetic oligonucleotide; CTT chr2 60507182 60507203 60507187 60507182 -
ccttgtcttgctttgcattctg

SEQ ID NO: 218422 - DNA, 22 bp, Artificial Sequence
  Synthetic oligonucleotide; TTC chr2 60507181 60507202 60507186 60507181 -
cttgtcttgctttgcattctgc

SEQ ID NO: 218423 - DNA, 22 bp, Artificial Sequence
  Synthetic oligonucleotide; CTT chr2 60507178 60507199 60507183 60507178 -
gtcttgctttgcattctgcaga

SEQ ID NO: 218424 - DNA, 22 bp, Artificial Sequence
  Synthetic oligonucleotide; TTG chr2 60507177 60507198 60507182 60507177 -
tcttgctttgcattctgcagag

SEQ ID NO: 218425 - DNA, 22 bp, Artificial Sequence
  Synthetic oligonucleotide; CTT chr2 60507173 60507194 60507178 60507173 -
gctttgcattctgcagagctag

SEQ ID NO: 218426 - DNA, 22 bp, Artificial Sequence
  Synthetic oligonucleotide; TTG chr2 60507172 60507193 60507177 60507172 -
ctttgcattctgcagagctaga

SEQ ID NO: 218427 - DNA, 22 bp, Artificial Sequence
  Synthetic oligonucleotide; CTT chr2 60507169 60507190 60507174 60507169 -
tgcattctgcagagctagaaga

SEQ ID NO: 218428 - DNA, 22 bp, Artificial Sequence
  Synthetic oligonucleotide; TTT chr2 60507168 60507189 60507173 60507168 -
gcattctgcagagctagaagag

SEQ ID NO: 218429 - DNA, 22 bp, Artificial Sequence
  Synthetic oligonucleotide; TTG chr2 60507167 60507188 60507172 60507167 -
cattctgcagagctagaagagc

SEQ ID NO: 218430 - DNA, 22 bp, Artificial Sequence
  Synthetic oligonucleotide; TTC chr2 60507162 60507183 60507167 60507162 -
tgcagagctagaagagcattta

SEQ ID NO: 218431 - DNA, 22 bp, Artificial Sequence
  Synthetic oligonucleotide; CTG chr2 60507160 60507181 60507165 60507160 -
cagagctagaagagcatttaat

SEQ ID NO: 218432 - DNA, 22 bp, Artificial Sequence
  Synthetic oligonucleotide; CTA chr2 60507152 60507173 60507157 60507152 -
gaagagcatttaatccttggcc

SEQ ID NO: 218433 - DNA, 22 bp, Artificial Sequence
  Synthetic oligonucleotide; TTT chr2 60507141 60507162 60507146 60507141 -
aatccttggccctctgtctgtt

SEQ ID NO: 218434 - DNA, 22 bp, Artificial Sequence
  Synthetic oligonucleotide; TTA chr2 60507140 60507161 60507145 60507140 -
atccttggccctctgtctgttg

SEQ ID NO: 218435 - DNA, 22 bp, Artificial Sequence
  Synthetic oligonucleotide; CTT chr2 60507134 60507155 60507139 60507134 -
ggccctctgtctgttgggatat

SEQ ID NO: 218436 - DNA, 22 bp, Artificial Sequence
  Synthetic oligonucleotide; TTG chr2 60507133 60507154 60507138 60507133 -
gccctctgtctgttgggatatt

SEQ ID NO: 218437 - DNA, 22 bp, Artificial Sequence
  Synthetic oligonucleotide; CTC chr2 60507127 60507148 60507132 60507127 -
tgtctgttgggatattatgttt

SEQ ID NO: 218438 - DNA, 22 bp, Artificial Sequence
  Synthetic oligonucleotide; CTG chr2 60507125 60507146 60507130 60507125 -
tctgttgggatattatgttttt

SEQ ID NO: 218439 - DNA, 22 bp, Artificial Sequence
  Synthetic oligonucleotide; CTG chr2 60507121 60507142 60507126 60507121 -
ttgggatattatgtttttttaa

SEQ ID NO: 218440 - DNA, 22 bp, Artificial Sequence
  Synthetic oligonucleotide; TTG chr2 60507118 60507139 60507123 60507118 -
ggatattatgtttttttaatag

SEQ ID NO: 218441 - DNA, 22 bp, Artificial Sequence
  Synthetic oligonucleotide; TTA chr2 60507110 60507131 60507115 60507110 -
tgtttttttaatagtgcttgtt

SEQ ID NO: 218442 - DNA, 22 bp, Artificial Sequence
  Synthetic oligonucleotide; TTT chr2 60507105 60507126 60507110 60507105 -
ttttaatagtgcttgtttatga

SEQ ID NO: 218443 - DNA, 22 bp, Artificial Sequence
  Synthetic oligonucleotide; TTT chr2 60507104 60507125 60507109 60507104 -
tttaatagtgcttgtttatgac

SEQ ID NO: 218444 - DNA, 22 bp, Artificial Sequence
  Synthetic oligonucleotide; TTT chr2 60507103 60507124 60507108 60507103 -
ttaatagtgcttgtttatgact

SEQ ID NO: 218445 - DNA, 22 bp, Artificial Sequence
  Synthetic oligonucleotide; TTT chr2 60507102 60507123 60507107 60507102 -
taatagtgcttgtttatgacta

SEQ ID NO: 218446 - DNA, 22 bp, Artificial Sequence
  Synthetic oligonucleotide; TTT chr2 60507101 60507122 60507106 60507101 -
aatagtgcttgtttatgactaa

SEQ ID NO: 218447 - DNA, 22 bp, Artificial Sequence
  Synthetic oligonucleotide; TTA chr2 60507100 60507121 60507105 60507100 -
atagtgcttgtttatgactaag

SEQ ID NO: 218448 - DNA, 22 bp, Artificial Sequence
  Synthetic oligonucleotide; CTT chr2 60507091 60507112 60507096 60507091 -
gtttatgactaaggtcaaagac

SEQ ID NO: 218449 - DNA, 22 bp, Artificial Sequence
  Synthetic oligonucleotide; TTG chr2 60507090 60507111 60507095 60507090 -
tttatgactaaggtcaaagaca

SEQ ID NO: 218450 - DNA, 22 bp, Artificial Sequence
  Synthetic oligonucleotide; TTT chr2 60507087 60507108 60507092 60507087 -
atgactaaggtcaaagacagta

SEQ ID NO: 218451 - DNA, 22 bp, Artificial Sequence
  Synthetic oligonucleotide; TTA chr2 60507086 60507107 60507091 60507086 -
tgactaaggtcaaagacagtat

SEQ ID NO: 218452 - DNA, 22 bp, Artificial Sequence
  Synthetic oligonucleotide; CTA chr2 60507080 60507101 60507085 60507080 -
aggtcaaagacagtatttcaga

SEQ ID NO: 218453 - DNA, 22 bp, Artificial Sequence
  Synthetic oligonucleotide; TTT chr2 60507062 60507083 60507067 60507062 -
cagaacaaaaattagagttagt

SEQ ID NO: 218454 - DNA, 22 bp, Artificial Sequence
  Synthetic oligonucleotide; TTC chr2 60507061 60507082 60507066 60507061 -
agaacaaaaattagagttagtt

SEQ ID NO: 218455 - DNA, 22 bp, Artificial Sequence
  Synthetic oligonucleotide; TTA chr2 60507048 60507069 60507053 60507048 -
gagttagttcataattgagtac

SEQ ID NO: 218456 - DNA, 22 bp, Artificial Sequence
  Synthetic oligonucleotide; TTA chr2 60507042 60507063 60507047 60507042 -
gttcataattgagtacatatgt

SEQ ID NO: 218457 - DNA, 22 bp, Artificial Sequence
  Synthetic oligonucleotide; TTC chr2 60507038 60507059 60507043 60507038 -
ataattgagtacatatgtacgt

SEQ ID NO: 218458 - DNA, 22 bp, Artificial Sequence
  Synthetic oligonucleotide; TTG chr2 60507031 60507052 60507036 60507031 -
agtacatatgtacgttactgtt

SEQ ID NO: 218459 - DNA, 22 bp, Artificial Sequence
  Synthetic oligonucleotide; TTA chr2 60507014 60507035 60507019 60507014 -
ctgtttatttttatagtttgct

SEQ ID NO: 218460 - DNA, 22 bp, Artificial Sequence
  Synthetic oligonucleotide; CTG chr2 60507011 60507032 60507016 60507011 -
tttatttttatagtttgctaat

SEQ ID NO: 218461 - DNA, 22 bp, Artificial Sequence
  Synthetic oligonucleotide; TTT chr2 60507008 60507029 60507013 60507008 -
atttttatagtttgctaattta

SEQ ID NO: 218462 - DNA, 22 bp, Artificial Sequence
  Synthetic oligonucleotide; TTA chr2 60507007 60507028 60507012 60507007 -
tttttatagtttgctaatttat

SEQ ID NO: 218463 - DNA, 22 bp, Artificial Sequence
  Synthetic oligonucleotide; TTT chr2 60507004 60507025 60507009 60507004 -
ttatagtttgctaatttatttt

SEQ ID NO: 218464 - DNA, 22 bp, Artificial Sequence
  Synthetic oligonucleotide; TTT chr2 60507003 60507024 60507008 60507003 -
tatagtttgctaatttattttt

SEQ ID NO: 218465 - DNA, 22 bp, Artificial Sequence
  Synthetic oligonucleotide; TTT chr2 60507002 60507023 60507007 60507002 -
atagtttgctaatttattttta

SEQ ID NO: 218466 - DNA, 22 bp, Artificial Sequence
  Synthetic oligonucleotide; TTA chr2 60507001 60507022 60507006 60507001 -
tagtttgctaatttatttttaa

SEQ ID NO: 218467 - DNA, 22 bp, Artificial Sequence
  Synthetic oligonucleotide; TTT chr2 60506995 60507016 60507000 60506995 -
gctaatttatttttaaacagct

SEQ ID NO: 218468 - DNA, 22 bp, Artificial Sequence
  Synthetic oligonucleotide; TTG chr2 60506994 60507015 60506999 60506994 -
ctaatttatttttaaacagctc

SEQ ID NO: 218469 - DNA, 22 bp, Artificial Sequence
  Synthetic oligonucleotide; CTA chr2 60506991 60507012 60506996 60506991 -
atttatttttaaacagctcagt

SEQ ID NO: 218470 - DNA, 22 bp, Artificial Sequence
  Synthetic oligonucleotide; TTT chr2 60506987 60507008 60506992 60506987 -
atttttaaacagctcagttacg

SEQ ID NO: 218471 - DNA, 22 bp, Artificial Sequence
  Synthetic oligonucleotide; TTA chr2 60506986 60507007 60506991 60506986 -
tttttaaacagctcagttacgc

SEQ ID NO: 218472 - DNA, 22 bp, Artificial Sequence
  Synthetic oligonucleotide; TTT chr2 60506983 60507004 60506988 60506983 -
ttaaacagctcagttacgccaa

SEQ ID NO: 218473 - DNA, 22 bp, Artificial Sequence
  Synthetic oligonucleotide; TTT chr2 60506982 60507003 60506987 60506982 -
taaacagctcagttacgccaac

SEQ ID NO: 218474 - DNA, 22 bp, Artificial Sequence
  Synthetic oligonucleotide; TTT chr2 60506981 60507002 60506986 60506981 -
aaacagctcagttacgccaaca

SEQ ID NO: 218475 - DNA, 22 bp, Artificial Sequence
  Synthetic oligonucleotide; TTA chr2 60506980 60507001 60506985 60506980 -
aacagctcagttacgccaacat

SEQ ID NO: 218476 - DNA, 22 bp, Artificial Sequence
  Synthetic oligonucleotide; CTC chr2 60506972 60506993 60506977 60506972 -
agttacgccaacatgtttatag

SEQ ID NO: 218477 - DNA, 22 bp, Artificial Sequence
  Synthetic oligonucleotide; TTA chr2 60506967 60506988 60506972 60506967 -
cgccaacatgtttatagctctg

SEQ ID NO: 218478 - DNA, 22 bp, Artificial Sequence
  Synthetic oligonucleotide; TTT chr2 60506954 60506975 60506959 60506954 -
atagctctgttcatcacatgcc

SEQ ID NO: 218479 - DNA, 22 bp, Artificial Sequence
  Synthetic oligonucleotide; TTA chr2 60506953 60506974 60506958 60506953 -
tagctctgttcatcacatgcct

SEQ ID NO: 218480 - DNA, 22 bp, Artificial Sequence
  Synthetic oligonucleotide; CTC chr2 60506947 60506968 60506952 60506947 -
tgttcatcacatgccttaccag

SEQ ID NO: 218481 - DNA, 22 bp, Artificial Sequence
  Synthetic oligonucleotide; CTG chr2 60506945 60506966 60506950 60506945 -
ttcatcacatgccttaccagtc

SEQ ID NO: 218482 - DNA, 22 bp, Artificial Sequence
  Synthetic oligonucleotide; TTC chr2 60506942 60506963 60506947 60506942 -
atcacatgccttaccagtcagg

SEQ ID NO: 218483 - DNA, 22 bp, Artificial Sequence
  Synthetic oligonucleotide; CTT chr2 60506930 60506951 60506935 60506930 -
accagtcagggtgttaaaaggc

SEQ ID NO: 218484 - DNA, 22 bp, Artificial Sequence
  Synthetic oligonucleotide; TTA chr2 60506929 60506950 60506934 60506929 -
ccagtcagggtgttaaaaggca

SEQ ID NO: 218485 - DNA, 22 bp, Artificial Sequence
  Synthetic oligonucleotide; TTA chr2 60506914 60506935 60506919 60506914 -
aaaggcacatgcttttcaatag

SEQ ID NO: 218486 - DNA, 22 bp, Artificial Sequence
  Synthetic oligonucleotide; CTT chr2 60506900 60506921 60506905 60506900 -
ttcaatagtttggatcccaagt

SEQ ID NO: 218487 - DNA, 22 bp, Artificial Sequence
  Synthetic oligonucleotide; TTT chr2 60506899 60506920 60506904 60506899 -
tcaatagtttggatcccaagtt

SEQ ID NO: 218488 - DNA, 22 bp, Artificial Sequence
  Synthetic oligonucleotide; TTT chr2 60506898 60506919 60506903 60506898 -
caatagtttggatcccaagtta

SEQ ID NO: 218489 - DNA, 22 bp, Artificial Sequence
  Synthetic oligonucleotide; TTC chr2 60506897 60506918 60506902 60506897 -
aatagtttggatcccaagttaa

SEQ ID NO: 218490 - DNA, 22 bp, Artificial Sequence
  Synthetic oligonucleotide; TTT chr2 60506889 60506910 60506894 60506889 -
ggatcccaagttaaattagata

SEQ ID NO: 218491 - DNA, 22 bp, Artificial Sequence
  Synthetic oligonucleotide; TTG chr2 60506888 60506909 60506893 60506888 -
gatcccaagttaaattagataa

SEQ ID NO: 218492 - DNA, 22 bp, Artificial Sequence
  Synthetic oligonucleotide; TTA chr2 60506876 60506897 60506881 60506876 -
aattagataatgccatcaggta

SEQ ID NO: 218493 - DNA, 22 bp, Artificial Sequence
  Synthetic oligonucleotide; TTA chr2 60506871 60506892 60506876 60506871 -
gataatgccatcaggtagcaat

SEQ ID NO: 218494 - DNA, 22 bp, Artificial Sequence
  Synthetic oligonucleotide; TTT chr2 60506847 60506868 60506852 60506847 -
aattacattaattgaatgttta

SEQ ID NO: 218495 - DNA, 22 bp, Artificial Sequence
  Synthetic oligonucleotide; TTA chr2 60506846 60506867 60506851 60506846 -
attacattaattgaatgtttag

SEQ ID NO: 218496 - DNA, 22 bp, Artificial Sequence
  Synthetic oligonucleotide; TTA chr2 60506842 60506863 60506847 60506842 -
cattaattgaatgtttaggcgg

SEQ ID NO: 218497 - DNA, 22 bp, Artificial Sequence
  Synthetic oligonucleotide; TTA chr2 60506837 60506858 60506842 60506837 -
attgaatgtttaggcggaaagg

SEQ ID NO: 218498 - DNA, 22 bp, Artificial Sequence
  Synthetic oligonucleotide; TTG chr2 60506833 60506854 60506838 60506833 -
aatgtttaggcggaaaggtagt

SEQ ID NO: 218499 - DNA, 22 bp, Artificial Sequence
  Synthetic oligonucleotide; TTT chr2 60506826 60506847 60506831 60506826 -
aggcggaaaggtagttttgcag

SEQ ID NO: 218500 - DNA, 22 bp, Artificial Sequence
  Synthetic oligonucleotide; TTA chr2 60506825 60506846 60506830 60506825 -
ggcggaaaggtagttttgcaga

SEQ ID NO: 218501 - DNA, 22 bp, Artificial Sequence
  Synthetic oligonucleotide; TTT chr2 60506809 60506830 60506814 60506809 -
tgcagaggctataatgaaatca

SEQ ID NO: 218502 - DNA, 22 bp, Artificial Sequence
  Synthetic oligonucleotide; TTT chr2 60506808 60506829 60506813 60506808 -
gcagaggctataatgaaatcac

SEQ ID NO: 218503 - DNA, 22 bp, Artificial Sequence
  Synthetic oligonucleotide; TTG chr2 60506807 60506828 60506812 60506807 -
cagaggctataatgaaatcaca

SEQ ID NO: 218504 - DNA, 22 bp, Artificial Sequence
  Synthetic oligonucleotide; CTA chr2 60506798 60506819 60506803 60506798 -
taatgaaatcacatttataagt

SEQ ID NO: 218505 - DNA, 22 bp, Artificial Sequence
  Synthetic oligonucleotide; TTT chr2 60506782 60506803 60506787 60506782 -
ataagtacccatgtataaatct

SEQ ID NO: 218506 - DNA, 22 bp, Artificial Sequence
  Synthetic oligonucleotide; TTA chr2 60506781 60506802 60506786 60506781 -
taagtacccatgtataaatctc

SEQ ID NO: 218507 - DNA, 22 bp, Artificial Sequence
  Synthetic oligonucleotide; CTC chr2 60506759 60506780 60506764 60506759 -
agcattatagacattatttgag

SEQ ID NO: 218508 - DNA, 22 bp, Artificial Sequence
  Synthetic oligonucleotide; TTA chr2 60506752 60506773 60506757 60506752 -
tagacattatttgaggttgctg

SEQ ID NO: 218509 - DNA, 22 bp, Artificial Sequence
  Synthetic oligonucleotide; TTA chr2 60506743 60506764 60506748 60506743 -
tttgaggttgctgacagaaaaa

SEQ ID NO: 218510 - DNA, 22 bp, Artificial Sequence
  Synthetic oligonucleotide; TTT chr2 60506740 60506761 60506745 60506740 -
gaggttgctgacagaaaaatgg

SEQ ID NO: 218511 - DNA, 22 bp, Artificial Sequence
  Synthetic oligonucleotide; TTG chr2 60506739 60506760 60506744 60506739 -
aggttgctgacagaaaaatgga

SEQ ID NO: 218512 - DNA, 22 bp, Artificial Sequence
  Synthetic oligonucleotide; TTG chr2 60506733 60506754 60506738 60506733 -
ctgacagaaaaatggatatata

SEQ ID NO: 218513 - DNA, 22 bp, Artificial Sequence
  Synthetic oligonucleotide; CTG chr2 60506730 60506751 60506735 60506730 -
acagaaaaatggatatatatca

SEQ ID NO: 218514 - DNA, 22 bp, Artificial Sequence
  Synthetic oligonucleotide; TTT chr2 60506701 60506722 60506706 60506701 -
aggaggaaacatgcggggggct

SEQ ID NO: 218515 - DNA, 22 bp, Artificial Sequence
  Synthetic oligonucleotide; TTA chr2 60506700 60506721 60506705 60506700 -
ggaggaaacatgcggggggctg

SEQ ID NO: 218516 - DNA, 22 bp, Artificial Sequence
  Synthetic oligonucleotide; CTG chr2 60506678 60506699 60506683 60506678 -
tcatcagtggtaaatgctgcct

SEQ ID NO: 218517 - DNA, 22 bp, Artificial Sequence
  Synthetic oligonucleotide; CTG chr2 60506659 60506680 60506664 60506659 -
ccttcgccatttaggagactgc

SEQ ID NO: 218518 - DNA, 22 bp, Artificial Sequence
  Synthetic oligonucleotide; CTT chr2 60506655 60506676 60506660 60506655 -
cgccatttaggagactgctggg

SEQ ID NO: 218519 - DNA, 22 bp, Artificial Sequence
  Synthetic oligonucleotide; TTC chr2 60506654 60506675 60506659 60506654 -
gccatttaggagactgctgggc

SEQ ID NO: 218520 - DNA, 22 bp, Artificial Sequence
  Synthetic oligonucleotide; TTT chr2 60506647 60506668 60506652 60506647 -
aggagactgctgggcacggtcg

SEQ ID NO: 218521 - DNA, 22 bp, Artificial Sequence
  Synthetic oligonucleotide; TTA chr2 60506646 60506667 60506651 60506646 -
ggagactgctgggcacggtcgt

SEQ ID NO: 218522 - DNA, 22 bp, Artificial Sequence
  Synthetic oligonucleotide; CTG chr2 60506638 60506659 60506643 60506638 -
ctgggcacggtcgttttcttag

SEQ ID NO: 218523 - DNA, 22 bp, Artificial Sequence
  Synthetic oligonucleotide; CTG chr2 60506635 60506656 60506640 60506635 -
ggcacggtcgttttcttagtga

SEQ ID NO: 218524 - DNA, 22 bp, Artificial Sequence
  Synthetic oligonucleotide; TTT chr2 60506622 60506643 60506627 60506622 -
tcttagtgagctgcctttatca

SEQ ID NO: 218525 - DNA, 22 bp, Artificial Sequence
  Synthetic oligonucleotide; TTT chr2 60506621 60506642 60506626 60506621 -
cttagtgagctgcctttatcat

SEQ ID NO: 218526 - DNA, 22 bp, Artificial Sequence
  Synthetic oligonucleotide; TTC chr2 60506620 60506641 60506625 60506620 -
ttagtgagctgcctttatcatt

SEQ ID NO: 218527 - DNA, 22 bp, Artificial Sequence
  Synthetic oligonucleotide; CTT chr2 60506618 60506639 60506623 60506618 -
agtgagctgcctttatcattag

SEQ ID NO: 218528 - DNA, 22 bp, Artificial Sequence
  Synthetic oligonucleotide; TTA chr2 60506617 60506638 60506622 60506617 -
gtgagctgcctttatcattagc

SEQ ID NO: 218529 - DNA, 22 bp, Artificial Sequence
  Synthetic oligonucleotide; CTG chr2 60506609 60506630 60506614 60506609 -
cctttatcattagccctctaag

SEQ ID NO: 218530 - DNA, 22 bp, Artificial Sequence
  Synthetic oligonucleotide; CTT chr2 60506605 60506626 60506610 60506605 -
tatcattagccctctaagcagc

SEQ ID NO: 218531 - DNA, 22 bp, Artificial Sequence
  Synthetic oligonucleotide; TTT chr2 60506604 60506625 60506609 60506604 -
atcattagccctctaagcagcc

SEQ ID NO: 218532 - DNA, 22 bp, Artificial Sequence
  Synthetic oligonucleotide; TTA chr2 60506603 60506624 60506608 60506603 -
tcattagccctctaagcagcca

SEQ ID NO: 218533 - DNA, 22 bp, Artificial Sequence
  Synthetic oligonucleotide; TTA chr2 60506597 60506618 60506602 60506597 -
gccctctaagcagccatgcaca

SEQ ID NO: 218534 - DNA, 22 bp, Artificial Sequence
  Synthetic oligonucleotide; CTC chr2 60506591 60506612 60506596 60506591 -
taagcagccatgcacaaaggca

SEQ ID NO: 218535 - DNA, 22 bp, Artificial Sequence
  Synthetic oligonucleotide; CTA chr2 60506589 60506610 60506594 60506589 -
agcagccatgcacaaaggcacg

SEQ ID NO: 218536 - DNA, 22 bp, Artificial Sequence
  Synthetic oligonucleotide; CTG chr2 60506558 60506579 60506563 60506558 -
tgttttgtatagccagggcttt

SEQ ID NO: 218537 - DNA, 22 bp, Artificial Sequence
  Synthetic oligonucleotide; TTT chr2 60506553 60506574 60506558 60506553 -
tgtatagccagggctttcctgg

SEQ ID NO: 218538 - DNA, 22 bp, Artificial Sequence
  Synthetic oligonucleotide; TTT chr2 60506552 60506573 60506557 60506552 -
gtatagccagggctttcctgga

SEQ ID NO: 218539 - DNA, 22 bp, Artificial Sequence
  Synthetic oligonucleotide; TTG chr2 60506551 60506572 60506556 60506551 -
tatagccagggctttcctggac

SEQ ID NO: 218540 - DNA, 22 bp, Artificial Sequence
  Synthetic oligonucleotide; CTT chr2 60506537 60506558 60506542 60506537 -
tcctggactcagcatgccagct

SEQ ID NO: 218541 - DNA, 22 bp, Artificial Sequence
  Synthetic oligonucleotide; TTT chr2 60506536 60506557 60506541 60506536 -
cctggactcagcatgccagctg

SEQ ID NO: 218542 - DNA, 22 bp, Artificial Sequence
  Synthetic oligonucleotide; TTC chr2 60506535 60506556 60506540 60506535 -
ctggactcagcatgccagctgg

SEQ ID NO: 218543 - DNA, 22 bp, Artificial Sequence
  Synthetic oligonucleotide; CTG chr2 60506532 60506553 60506537 60506532 -
gactcagcatgccagctggggc

SEQ ID NO: 218544 - DNA, 22 bp, Artificial Sequence
  Synthetic oligonucleotide; CTC chr2 60506527 60506548 60506532 60506527 -
agcatgccagctggggccggct

SEQ ID NO: 218545 - DNA, 22 bp, Artificial Sequence
  Synthetic oligonucleotide; CTG chr2 60506514 60506535 60506519 60506514 -
gggccggctcactgaggctgga

SEQ ID NO: 218546 - DNA, 22 bp, Artificial Sequence
  Synthetic oligonucleotide; CTC chr2 60506504 60506525 60506509 60506504 -
actgaggctggaaaaatgagat

SEQ ID NO: 218547 - DNA, 22 bp, Artificial Sequence
  Synthetic oligonucleotide; CTG chr2 60506500 60506521 60506505 60506500 -
aggctggaaaaatgagatacag

SEQ ID NO: 218548 - DNA, 22 bp, Artificial Sequence
  Synthetic oligonucleotide; CTG chr2 60506494 60506515 60506499 60506494 -
gaaaaatgagatacagtctagt

SEQ ID NO: 218549 - DNA, 22 bp, Artificial Sequence
  Synthetic oligonucleotide; CTA chr2 60506474 60506495 60506479 60506474 -
gtgaggtctttgtcaccttgga

SEQ ID NO: 218550 - DNA, 22 bp, Artificial Sequence
  Synthetic oligonucleotide; CTT chr2 60506464 60506485 60506469 60506464 -
tgtcaccttggagggtctgagg

SEQ ID NO: 218551 - DNA, 22 bp, Artificial Sequence
  Synthetic oligonucleotide; TTT chr2 60506463 60506484 60506468 60506463 -
gtcaccttggagggtctgagga

SEQ ID NO: 218552 - DNA, 22 bp, Artificial Sequence
  Synthetic oligonucleotide; TTG chr2 60506462 60506483 60506467 60506462 -
tcaccttggagggtctgaggac

SEQ ID NO: 218553 - DNA, 22 bp, Artificial Sequence
  Synthetic oligonucleotide; CTT chr2 60506455 60506476 60506460 60506455 -
ggagggtctgaggactggtgcg

SEQ ID NO: 218554 - DNA, 22 bp, Artificial Sequence
  Synthetic oligonucleotide; TTG chr2 60506454 60506475 60506459 60506454 -
gagggtctgaggactggtgcgc

SEQ ID NO: 218555 - DNA, 22 bp, Artificial Sequence
  Synthetic oligonucleotide; CTG chr2 60506445 60506466 60506450 60506445 -
aggactggtgcgctcgggttga

SEQ ID NO: 218556 - DNA, 22 bp, Artificial Sequence
  Synthetic oligonucleotide; CTG chr2 60506438 60506459 60506443 60506438 -
gtgcgctcgggttgacccatgt

SEQ ID NO: 218557 - DNA, 22 bp, Artificial Sequence
  Synthetic oligonucleotide; CTC chr2 60506430 60506451 60506435 60506430 -
gggttgacccatgtggcgtcct

SEQ ID NO: 218558 - DNA, 22 bp, Artificial Sequence
  Synthetic oligonucleotide; TTG chr2 60506424 60506445 60506429 60506424 -
acccatgtggcgtcctgagcca

SEQ ID NO: 218559 - DNA, 22 bp, Artificial Sequence
  Synthetic oligonucleotide; CTG chr2 60506407 60506428 60506412 60506407 -
agccagctctgtcctggatctg

SEQ ID NO: 218560 - DNA, 22 bp, Artificial Sequence
  Synthetic oligonucleotide; CTC chr2 60506398 60506419 60506403 60506398 -
tgtcctggatctgaggaacact

SEQ ID NO: 218561 - DNA, 22 bp, Artificial Sequence
  Synthetic oligonucleotide; CTG chr2 60506396 60506417 60506401 60506396 -
tcctggatctgaggaacactgt

SEQ ID NO: 218562 - DNA, 22 bp, Artificial Sequence
  Synthetic oligonucleotide; CTG chr2 60506391 60506412 60506396 60506391 -
gatctgaggaacactgtctgaa

SEQ ID NO: 218563 - DNA, 22 bp, Artificial Sequence
  Synthetic oligonucleotide; CTG chr2 60506385 60506406 60506390 60506385 -
aggaacactgtctgaagttttc

SEQ ID NO: 218564 - DNA, 22 bp, Artificial Sequence
  Synthetic oligonucleotide; CTG chr2 60506375 60506396 60506380 60506375 -
tctgaagttttccaggggtttg

SEQ ID NO: 218565 - DNA, 22 bp, Artificial Sequence
  Synthetic oligonucleotide; CTG chr2 60506371 60506392 60506376 60506371 -
aagttttccaggggtttgacag

SEQ ID NO: 218566 - DNA, 22 bp, Artificial Sequence
  Synthetic oligonucleotide; TTT chr2 60506365 60506386 60506370 60506365 -
tccaggggtttgacagaccaga

SEQ ID NO: 218567 - DNA, 22 bp, Artificial Sequence
  Synthetic oligonucleotide; TTT chr2 60506364 60506385 60506369 60506364 -
ccaggggtttgacagaccagaa

SEQ ID NO: 218568 - DNA, 22 bp, Artificial Sequence
  Synthetic oligonucleotide; TTC chr2 60506363 60506384 60506368 60506363 -
caggggtttgacagaccagaat

SEQ ID NO: 218569 - DNA, 22 bp, Artificial Sequence
  Synthetic oligonucleotide; TTT chr2 60506354 60506375 60506359 60506354 -
gacagaccagaatgggggccgc

SEQ ID NO: 218570 - DNA, 22 bp, Artificial Sequence
  Synthetic oligonucleotide; TTG chr2 60506353 60506374 60506358 60506353 -
acagaccagaatgggggccgct

SEQ ID NO: 218571 - DNA, 22 bp, Artificial Sequence
  Synthetic oligonucleotide; CTG chr2 60506330 60506351 60506335 60506330 -
gcagggcctggtggcattagat

SEQ ID NO: 218572 - DNA, 22 bp, Artificial Sequence
  Synthetic oligonucleotide; CTG chr2 60506320 60506341 60506325 60506320 -
gtggcattagatgtggcaagtc

SEQ ID NO: 218573 - DNA, 22 bp, Artificial Sequence
  Synthetic oligonucleotide; TTA chr2 60506311 60506332 60506316 60506311 -
gatgtggcaagtcagaccacag

SEQ ID NO: 218574 - DNA, 22 bp, Artificial Sequence
  Synthetic oligonucleotide; CTG chr2 60506286 60506307 60506291 60506286 -
gcctgtgaaggtgactcttcct

SEQ ID NO: 218575 - DNA, 22 bp, Artificial Sequence
  Synthetic oligonucleotide; CTG chr2 60506281 60506302 60506286 60506281 -
tgaaggtgactcttcctctgat

SEQ ID NO: 218576 - DNA, 22 bp, Artificial Sequence
  Synthetic oligonucleotide; CTC chr2 60506269 60506290 60506274 60506269 -
ttcctctgatgcagagagaatt

SEQ ID NO: 218577 - DNA, 22 bp, Artificial Sequence
  Synthetic oligonucleotide; CTT chr2 60506267 60506288 60506272 60506267 -
cctctgatgcagagagaattaa

SEQ ID NO: 218578 - DNA, 22 bp, Artificial Sequence
  Synthetic oligonucleotide; TTC chr2 60506266 60506287 60506271 60506266 -
ctctgatgcagagagaattaaa

SEQ ID NO: 218579 - DNA, 22 bp, Artificial Sequence
  Synthetic oligonucleotide; CTC chr2 60506263 60506284 60506268 60506263 -
tgatgcagagagaattaaatga

SEQ ID NO: 218580 - DNA, 22 bp, Artificial Sequence
  Synthetic oligonucleotide; CTG chr2 60506261 60506282 60506266 60506261 -
atgcagagagaattaaatgagg

SEQ ID NO: 218581 - DNA, 22 bp, Artificial Sequence
  Synthetic oligonucleotide; TTA chr2 60506246 60506267 60506251 60506246 -
aatgaggaggccagagccctag

SEQ ID NO: 218582 - DNA, 22 bp, Artificial Sequence
  Synthetic oligonucleotide; CTA chr2 60506225 60506246 60506230 60506225 -
gctgctgcctcccctccatgcc

SEQ ID NO: 218583 - DNA, 22 bp, Artificial Sequence
  Synthetic oligonucleotide; CTG chr2 60506221 60506242 60506226 60506221 -
ctgcctcccctccatgccctca

SEQ ID NO: 218584 - DNA, 22 bp, Artificial Sequence
  Synthetic oligonucleotide; CTG chr2 60506218 60506239 60506223 60506218 -
cctcccctccatgccctcagag

SEQ ID NO: 218585 - DNA, 22 bp, Artificial Sequence
  Synthetic oligonucleotide; CTC chr2 60506214 60506235 60506219 60506214 -
ccctccatgccctcagagaaag

SEQ ID NO: 218586 - DNA, 22 bp, Artificial Sequence
  Synthetic oligonucleotide; CTC chr2 60506209 60506230 60506214 60506209 -
catgccctcagagaaagtggga

SEQ ID NO: 218587 - DNA, 22 bp, Artificial Sequence
  Synthetic oligonucleotide; CTC chr2 60506200 60506221 60506205 60506200 -
agagaaagtgggagtgctggca

SEQ ID NO: 218588 - DNA, 22 bp, Artificial Sequence
  Synthetic oligonucleotide; CTG chr2 60506181 60506202 60506186 60506181 -
gcatttggctaacaggacaggc

SEQ ID NO: 218589 - DNA, 22 bp, Artificial Sequence
  Synthetic oligonucleotide; TTT chr2 60506175 60506196 60506180 60506175 -
ggctaacaggacaggctatttt

SEQ ID NO: 218590 - DNA, 22 bp, Artificial Sequence
  Synthetic oligonucleotide; TTG chr2 60506174 60506195 60506179 60506174 -
gctaacaggacaggctattttg

SEQ ID NO: 218591 - DNA, 22 bp, Artificial Sequence
  Synthetic oligonucleotide; CTA chr2 60506170 60506191 60506175 60506170 -
acaggacaggctattttgggcc

SEQ ID NO: 218592 - DNA, 22 bp, Artificial Sequence
  Synthetic oligonucleotide; CTA chr2 60506157 60506178 60506162 60506157 -
ttttgggcccaggtgttctttc

SEQ ID NO: 218593 - DNA, 22 bp, Artificial Sequence
  Synthetic oligonucleotide; TTT chr2 60506154 60506175 60506159 60506154 -
tgggcccaggtgttctttctga

SEQ ID NO: 218594 - DNA, 22 bp, Artificial Sequence
  Synthetic oligonucleotide; TTT chr2 60506153 60506174 60506158 60506153 -
gggcccaggtgttctttctgac

SEQ ID NO: 218595 - DNA, 22 bp, Artificial Sequence
  Synthetic oligonucleotide; TTG chr2 60506152 60506173 60506157 60506152 -
ggcccaggtgttctttctgacc

SEQ ID NO: 218596 - DNA, 22 bp, Artificial Sequence
  Synthetic oligonucleotide; TTC chr2 60506139 60506160 60506144 60506139 -
tttctgacctctctgtgatttc

SEQ ID NO: 218597 - DNA, 22 bp, Artificial Sequence
  Synthetic oligonucleotide; CTT chr2 60506137 60506158 60506142 60506137 -
tctgacctctctgtgatttcta

SEQ ID NO: 218598 - DNA, 22 bp, Artificial Sequence
  Synthetic oligonucleotide; TTT chr2 60506136 60506157 60506141 60506136 -
ctgacctctctgtgatttctat

SEQ ID NO: 218599 - DNA, 22 bp, Artificial Sequence
  Synthetic oligonucleotide; TTC chr2 60506135 60506156 60506140 60506135 -
tgacctctctgtgatttctatg

SEQ ID NO: 218600 - DNA, 22 bp, Artificial Sequence
  Synthetic oligonucleotide; CTG chr2 60506133 60506154 60506138 60506133 -
acctctctgtgatttctatggt

SEQ ID NO: 218601 - DNA, 22 bp, Artificial Sequence
  Synthetic oligonucleotide; CTC chr2 60506128 60506149 60506133 60506128 -
tctgtgatttctatggtgggtg

SEQ ID NO: 218602 - DNA, 22 bp, Artificial Sequence
  Synthetic oligonucleotide; CTC chr2 60506126 60506147 60506131 60506126 -
tgtgatttctatggtgggtgtc

SEQ ID NO: 218603 - DNA, 22 bp, Artificial Sequence
  Synthetic oligonucleotide; CTG chr2 60506124 60506145 60506129 60506124 -
tgatttctatggtgggtgtcaa

SEQ ID NO: 218604 - DNA, 22 bp, Artificial Sequence
  Synthetic oligonucleotide; TTT chr2 60506118 60506139 60506123 60506118 -
ctatggtgggtgtcaaaggatg

SEQ ID NO: 218605 - DNA, 22 bp, Artificial Sequence
  Synthetic oligonucleotide; TTC chr2 60506117 60506138 60506122 60506117 -
tatggtgggtgtcaaaggatgg

SEQ ID NO: 218606 - DNA, 22 bp, Artificial Sequence
  Synthetic oligonucleotide; CTA chr2 60506115 60506136 60506120 60506115 -
tggtgggtgtcaaaggatggct

SEQ ID NO: 218607 - DNA, 22 bp, Artificial Sequence
  Synthetic oligonucleotide; CTG chr2 60506092 60506113 60506097 60506092 -
ggaaaggggatttttaggtgtg

SEQ ID NO: 218608 - DNA, 22 bp, Artificial Sequence
  Synthetic oligonucleotide; TTT chr2 60506079 60506100 60506084 60506079 -
ttaggtgtgctaacatcccttg

SEQ ID NO: 218609 - DNA, 22 bp, Artificial Sequence
  Synthetic oligonucleotide; TTT chr2 60506078 60506099 60506083 60506078 -
taggtgtgctaacatcccttgc

SEQ ID NO: 218610 - DNA, 22 bp, Artificial Sequence
  Synthetic oligonucleotide; TTT chr2 60506077 60506098 60506082 60506077 -
aggtgtgctaacatcccttgcc

SEQ ID NO: 218611 - DNA, 22 bp, Artificial Sequence
  Synthetic oligonucleotide; TTA chr2 60506076 60506097 60506081 60506076 -
ggtgtgctaacatcccttgcct

SEQ ID NO: 218612 - DNA, 22 bp, Artificial Sequence
  Synthetic oligonucleotide; CTA chr2 60506067 60506088 60506072 60506067 -
acatcccttgcctatgagtgat

SEQ ID NO: 218613 - DNA, 22 bp, Artificial Sequence
  Synthetic oligonucleotide; CTT chr2 60506058 60506079 60506063 60506058 -
gcctatgagtgattcactatct

SEQ ID NO: 218614 - DNA, 22 bp, Artificial Sequence
  Synthetic oligonucleotide; TTG chr2 60506057 60506078 60506062 60506057 -
cctatgagtgattcactatctt

SEQ ID NO: 218615 - DNA, 22 bp, Artificial Sequence
  Synthetic oligonucleotide; CTA chr2 60506053 60506074 60506058 60506053 -
tgagtgattcactatcttctcg

SEQ ID NO: 218616 - DNA, 22 bp, Artificial Sequence
  Synthetic oligonucleotide; TTC chr2 60506043 60506064 60506048 60506043 -
actatcttctcgcaccatctgg

SEQ ID NO: 218617 - DNA, 22 bp, Artificial Sequence
  Synthetic oligonucleotide; CTA chr2 60506039 60506060 60506044 60506039 -
tcttctcgcaccatctggtttc

SEQ ID NO: 218618 - DNA, 22 bp, Artificial Sequence
  Synthetic oligonucleotide; CTT chr2 60506035 60506056 60506040 60506035 -
ctcgcaccatctggtttcaccc

SEQ ID NO: 218619 - DNA, 22 bp, Artificial Sequence
  Synthetic oligonucleotide; TTC chr2 60506034 60506055 60506039 60506034 -
tcgcaccatctggtttcacccg

SEQ ID NO: 218620 - DNA, 22 bp, Artificial Sequence
  Synthetic oligonucleotide; CTC chr2 60506032 60506053 60506037 60506032 -
gcaccatctggtttcacccggg

SEQ ID NO: 218621 - DNA, 22 bp, Artificial Sequence
  Synthetic oligonucleotide; CTG chr2 60506022 60506043 60506027 60506022 -
gtttcacccgggctgcaaagcc

SEQ ID NO: 218622 - DNA, 22 bp, Artificial Sequence
  Synthetic oligonucleotide; TTT chr2 60506018 60506039 60506023 60506018 -
cacccgggctgcaaagcctagt

SEQ ID NO: 218623 - DNA, 22 bp, Artificial Sequence
  Synthetic oligonucleotide; TTC chr2 60506017 60506038 60506022 60506017 -
acccgggctgcaaagcctagtg

SEQ ID NO: 218624 - DNA, 22 bp, Artificial Sequence
  Synthetic oligonucleotide; CTG chr2 60506007 60506028 60506012 60506007 -
caaagcctagtgtggtgtccca

SEQ ID NO: 218625 - DNA, 22 bp, Artificial Sequence
  Synthetic oligonucleotide; CTA chr2 60505998 60506019 60506003 60505998 -
gtgtggtgtcccataccctgca

SEQ ID NO: 218626 - DNA, 22 bp, Artificial Sequence
  Synthetic oligonucleotide; CTG chr2 60505978 60505999 60505983 60505978 -
caaagccctatttgggttattt

SEQ ID NO: 218627 - DNA, 22 bp, Artificial Sequence
  Synthetic oligonucleotide; CTA chr2 60505968 60505989 60505973 60505968 -
tttgggttatttaccaaatgcc

SEQ ID NO: 218628 - DNA, 22 bp, Artificial Sequence
  Synthetic oligonucleotide; TTT chr2 60505965 60505986 60505970 60505965 -
gggttatttaccaaatgccacc

SEQ ID NO: 218629 - DNA, 22 bp, Artificial Sequence
  Synthetic oligonucleotide; TTG chr2 60505964 60505985 60505969 60505964 -
ggttatttaccaaatgccacca

SEQ ID NO: 218630 - DNA, 22 bp, Artificial Sequence
  Synthetic oligonucleotide; TTA chr2 60505959 60505980 60505964 60505959 -
tttaccaaatgccaccatgcca

SEQ ID NO: 218631 - DNA, 22 bp, Artificial Sequence
  Synthetic oligonucleotide; TTT chr2 60505956 60505977 60505961 60505956 -
accaaatgccaccatgccatct

SEQ ID NO: 218632 - DNA, 22 bp, Artificial Sequence
  Synthetic oligonucleotide; TTA chr2 60505955 60505976 60505960 60505955 -
ccaaatgccaccatgccatctc

SEQ ID NO: 218633 - DNA, 22 bp, Artificial Sequence
  Synthetic oligonucleotide; CTC chr2 60505933 60505954 60505938 60505933 -
cacagcatctggcagacgaacc

SEQ ID NO: 218634 - DNA, 22 bp, Artificial Sequence
  Synthetic oligonucleotide; CTG chr2 60505922 60505943 60505927 60505922 -
gcagacgaaccaggtggggctg

SEQ ID NO: 218635 - DNA, 22 bp, Artificial Sequence
  Synthetic oligonucleotide; CTG chr2 60505900 60505921 60505905 60505900 -
ctattgcttctgggtatttacg

SEQ ID NO: 218636 - DNA, 22 bp, Artificial Sequence
  Synthetic oligonucleotide; CTA chr2 60505897 60505918 60505902 60505897 -
ttgcttctgggtatttacggga

SEQ ID NO: 218637 - DNA, 22 bp, Artificial Sequence
  Synthetic oligonucleotide; TTG chr2 60505894 60505915 60505899 60505894 -
cttctgggtatttacgggatgc

SEQ ID NO: 218638 - DNA, 22 bp, Artificial Sequence
  Synthetic oligonucleotide; CTT chr2 60505891 60505912 60505896 60505891 -
ctgggtatttacgggatgcaga

SEQ ID NO: 218639 - DNA, 22 bp, Artificial Sequence
  Synthetic oligonucleotide; TTC chr2 60505890 60505911 60505895 60505890 -
tgggtatttacgggatgcagat

SEQ ID NO: 218640 - DNA, 22 bp, Artificial Sequence
  Synthetic oligonucleotide; CTG chr2 60505888 60505909 60505893 60505888 -
ggtatttacgggatgcagattt

SEQ ID NO: 218641 - DNA, 22 bp, Artificial Sequence
  Synthetic oligonucleotide; TTT chr2 60505881 60505902 60505886 60505881 -
acgggatgcagatttttctgcc

SEQ ID NO: 218642 - DNA, 22 bp, Artificial Sequence
  Synthetic oligonucleotide; TTA chr2 60505880 60505901 60505885 60505880 -
cgggatgcagatttttctgccc

SEQ ID NO: 218643 - DNA, 22 bp, Artificial Sequence
  Synthetic oligonucleotide; TTT chr2 60505866 60505887 60505871 60505866 -
ttctgcccaccgttgttttggg

SEQ ID NO: 218644 - DNA, 22 bp, Artificial Sequence
  Synthetic oligonucleotide; TTT chr2 60505865 60505886 60505870 60505865 -
tctgcccaccgttgttttggga

SEQ ID NO: 218645 - DNA, 22 bp, Artificial Sequence
  Synthetic oligonucleotide; TTT chr2 60505864 60505885 60505869 60505864 -
ctgcccaccgttgttttgggag

SEQ ID NO: 218646 - DNA, 22 bp, Artificial Sequence
  Synthetic oligonucleotide; TTC chr2 60505863 60505884 60505868 60505863 -
tgcccaccgttgttttgggagg

SEQ ID NO: 218647 - DNA, 22 bp, Artificial Sequence
  Synthetic oligonucleotide; CTG chr2 60505861 60505882 60505866 60505861 -
cccaccgttgttttgggaggga

SEQ ID NO: 218648 - DNA, 22 bp, Artificial Sequence
  Synthetic oligonucleotide; TTG chr2 60505851 60505872 60505856 60505851 -
ttttgggagggatttccccctc

SEQ ID NO: 218649 - DNA, 22 bp, Artificial Sequence
  Synthetic oligonucleotide; TTT chr2 60505848 60505869 60505853 60505848 -
tgggagggatttccccctccct

SEQ ID NO: 218650 - DNA, 22 bp, Artificial Sequence
  Synthetic oligonucleotide; TTT chr2 60505847 60505868 60505852 60505847 -
gggagggatttccccctccctc

SEQ ID NO: 218651 - DNA, 22 bp, Artificial Sequence
  Synthetic oligonucleotide; TTG chr2 60505846 60505867 60505851 60505846 -
ggagggatttccccctccctca

SEQ ID NO: 218652 - DNA, 22 bp, Artificial Sequence
  Synthetic oligonucleotide; TTT chr2 60505836 60505857 60505841 60505836 -
ccccctccctcaggtagagttg

SEQ ID NO: 218653 - DNA, 22 bp, Artificial Sequence
  Synthetic oligonucleotide; TTC chr2 60505835 60505856 60505840 60505835 -
cccctccctcaggtagagttgt

SEQ ID NO: 218654 - DNA, 22 bp, Artificial Sequence
  Synthetic oligonucleotide; CTC chr2 60505829 60505850 60505834 60505829 -
cctcaggtagagttgttctcag

SEQ ID NO: 218655 - DNA, 22 bp, Artificial Sequence
  Synthetic oligonucleotide; CTC chr2 60505825 60505846 60505830 60505825 -
aggtagagttgttctcagagat

SEQ ID NO: 218656 - DNA, 22 bp, Artificial Sequence
  Synthetic oligonucleotide; TTG chr2 60505814 60505835 60505819 60505814 -
ttctcagagatatctgtaattg

SEQ ID NO: 218657 - DNA, 22 bp, Artificial Sequence
  Synthetic oligonucleotide; TTC chr2 60505811 60505832 60505816 60505811 -
tcagagatatctgtaattggcc

SEQ ID NO: 218658 - DNA, 22 bp, Artificial Sequence
  Synthetic oligonucleotide; CTC chr2 60505809 60505830 60505814 60505809 -
agagatatctgtaattggccct

SEQ ID NO: 218659 - DNA, 22 bp, Artificial Sequence
  Synthetic oligonucleotide; CTG chr2 60505798 60505819 60505803 60505798 -
taattggcccttcccatttaag

SEQ ID NO: 218660 - DNA, 22 bp, Artificial Sequence
  Synthetic oligonucleotide; TTG chr2 60505792 60505813 60505797 60505792 -
gcccttcccatttaagagtcag

SEQ ID NO: 218661 - DNA, 22 bp, Artificial Sequence
  Synthetic oligonucleotide; CTT chr2 60505786 60505807 60505791 60505786 -
cccatttaagagtcagccacga

SEQ ID NO: 218662 - DNA, 22 bp, Artificial Sequence
  Synthetic oligonucleotide; TTC chr2 60505785 60505806 60505790 60505785 -
ccatttaagagtcagccacgaa

SEQ ID NO: 218663 - DNA, 22 bp, Artificial Sequence
  Synthetic oligonucleotide; TTT chr2 60505779 60505800 60505784 60505779 -
aagagtcagccacgaatgattt

SEQ ID NO: 218664 - DNA, 22 bp, Artificial Sequence
  Synthetic oligonucleotide; TTA chr2 60505778 60505799 60505783 60505778 -
agagtcagccacgaatgattta

SEQ ID NO: 218665 - DNA, 22 bp, Artificial Sequence
  Synthetic oligonucleotide; TTT chr2 60505757 60505778 60505762 60505757 -
attctaaaatgatagacccagg

SEQ ID NO: 218666 - DNA, 22 bp, Artificial Sequence
  Synthetic oligonucleotide; TTA chr2 60505756 60505777 60505761 60505756 -
ttctaaaatgatagacccaggt

SEQ ID NO: 218667 - DNA, 22 bp, Artificial Sequence
  Synthetic oligonucleotide; TTC chr2 60505753 60505774 60505758 60505753 -
taaaatgatagacccaggtaga

SEQ ID NO: 218668 - DNA, 22 bp, Artificial Sequence
  Synthetic oligonucleotide; CTA chr2 60505751 60505772 60505756 60505751 -
aaatgatagacccaggtagaga

SEQ ID NO: 218669 - DNA, 22 bp, Artificial Sequence
  Synthetic oligonucleotide; TTA chr2 60505724 60505745 60505729 60505724 -
cccaccctccgtcacagagtgg

SEQ ID NO: 218670 - DNA, 22 bp, Artificial Sequence
  Synthetic oligonucleotide; CTC chr2 60505715 60505736 60505720 60505715 -
cgtcacagagtggccagctgtg

SEQ ID NO: 218671 - DNA, 22 bp, Artificial Sequence
  Synthetic oligonucleotide; CTG chr2 60505695 60505716 60505700 60505695 -
tgtcccctgcttccgggaggtg

SEQ ID NO: 218672 - DNA, 22 bp, Artificial Sequence
  Synthetic oligonucleotide; CTG chr2 60505686 60505707 60505691 60505686 -
cttccgggaggtgggaatgcat

SEQ ID NO: 218673 - DNA, 22 bp, Artificial Sequence
  Synthetic oligonucleotide; CTT chr2 60505683 60505704 60505688 60505683 -
ccgggaggtgggaatgcatgtg

SEQ ID NO: 218674 - DNA, 22 bp, Artificial Sequence
  Synthetic oligonucleotide; TTC chr2 60505682 60505703 60505687 60505682 -
cgggaggtgggaatgcatgtgg

SEQ ID NO: 218675 - DNA, 22 bp, Artificial Sequence
  Synthetic oligonucleotide; TTA chr2 60505649 60505670 60505654 60505649 -
tttcctaactctcttgctctgg

SEQ ID NO: 218676 - DNA, 22 bp, Artificial Sequence
  Synthetic oligonucleotide; TTT chr2 60505646 60505667 60505651 60505646 -
cctaactctcttgctctggcag

SEQ ID NO: 218677 - DNA, 22 bp, Artificial Sequence
  Synthetic oligonucleotide; TTC chr2 60505645 60505666 60505650 60505645 -
ctaactctcttgctctggcagc

SEQ ID NO: 218678 - DNA, 22 bp, Artificial Sequence
  Synthetic oligonucleotide; CTA chr2 60505642 60505663 60505647 60505642 -
actctcttgctctggcagcctg

SEQ ID NO: 218679 - DNA, 22 bp, Artificial Sequence
  Synthetic oligonucleotide; CTC chr2 60505638 60505659 60505643 60505638 -
tcttgctctggcagcctgaaga

SEQ ID NO: 218680 - DNA, 22 bp, Artificial Sequence
  Synthetic oligonucleotide; CTC chr2 60505636 60505657 60505641 60505636 -
ttgctctggcagcctgaagagc

SEQ ID NO: 218681 - DNA, 22 bp, Artificial Sequence
  Synthetic oligonucleotide; CTT chr2 60505634 60505655 60505639 60505634 -
gctctggcagcctgaagagctg

SEQ ID NO: 218682 - DNA, 22 bp, Artificial Sequence
  Synthetic oligonucleotide; TTG chr2 60505633 60505654 60505638 60505633 -
ctctggcagcctgaagagctgt

SEQ ID NO: 218683 - DNA, 22 bp, Artificial Sequence
  Synthetic oligonucleotide; CTC chr2 60505630 60505651 60505635 60505630 -
tggcagcctgaagagctgtctg

SEQ ID NO: 218684 - DNA, 22 bp, Artificial Sequence
  Synthetic oligonucleotide; CTG chr2 60505628 60505649 60505633 60505628 -
gcagcctgaagagctgtctgtg

SEQ ID NO: 218685 - DNA, 22 bp, Artificial Sequence
  Synthetic oligonucleotide; CTG chr2 60505620 60505641 60505625 60505620 -
aagagctgtctgtgccctgaac

SEQ ID NO: 218686 - DNA, 22 bp, Artificial Sequence
  Synthetic oligonucleotide; CTG chr2 60505612 60505633 60505617 60505612 -
tctgtgccctgaacaacagctt

SEQ ID NO: 218687 - DNA, 22 bp, Artificial Sequence
  Synthetic oligonucleotide; CTG chr2 60505608 60505629 60505613 60505608 -
tgccctgaacaacagcttaggg

SEQ ID NO: 218688 - DNA, 22 bp, Artificial Sequence
  Synthetic oligonucleotide; CTG chr2 60505601 60505622 60505606 60505601 -
aacaacagcttagggagctgga

SEQ ID NO: 218689 - DNA, 22 bp, Artificial Sequence
  Synthetic oligonucleotide; CTT chr2 60505590 60505611 60505595 60505590 -
agggagctggaggaaagagaag

SEQ ID NO: 218690 - DNA, 22 bp, Artificial Sequence
  Synthetic oligonucleotide; TTA chr2 60505589 60505610 60505594 60505589 -
gggagctggaggaaagagaagg

SEQ ID NO: 218691 - DNA, 22 bp, Artificial Sequence
  Synthetic oligonucleotide; CTG chr2 60505581 60505602 60505586 60505581 -
gaggaaagagaaggaggtatgc

SEQ ID NO: 218692 - DNA, 22 bp, Artificial Sequence
  Synthetic oligonucleotide; TTT chr2 60505555 60505576 60505560 60505555 -
gagggagagaggcccactgggt

SEQ ID NO: 218693 - DNA, 22 bp, Artificial Sequence
  Synthetic oligonucleotide; TTG chr2 60505554 60505575 60505559 60505554 -
agggagagaggcccactgggtt

SEQ ID NO: 218694 - DNA, 22 bp, Artificial Sequence
  Synthetic oligonucleotide; CTG chr2 60505536 60505557 60505541 60505536 -
ggttggacaagaaggtaaaaga

SEQ ID NO: 218695 - DNA, 22 bp, Artificial Sequence
  Synthetic oligonucleotide; TTG chr2 60505531 60505552 60505536 60505531 -
gacaagaaggtaaaagagggct

SEQ ID NO: 218696 - DNA, 22 bp, Artificial Sequence
  Synthetic oligonucleotide; CTG chr2 60505508 60505529 60505513 60505508 -
gtttggcccctaagggaaggac

SEQ ID NO: 218697 - DNA, 22 bp, Artificial Sequence
  Synthetic oligonucleotide; TTT chr2 60505504 60505525 60505509 60505504 -
ggcccctaagggaaggacagga

SEQ ID NO: 218698 - DNA, 22 bp, Artificial Sequence
  Synthetic oligonucleotide; TTG chr2 60505503 60505524 60505508 60505503 -
gcccctaagggaaggacaggaa

SEQ ID NO: 218699 - DNA, 22 bp, Artificial Sequence
  Synthetic oligonucleotide; CTA chr2 60505496 60505517 60505501 60505496 -
agggaaggacaggaaagcaccc

SEQ ID NO: 218700 - DNA, 22 bp, Artificial Sequence
  Synthetic oligonucleotide; CTT chr2 60505470 60505491 60505475 60505470 -
gttccctgtgtggatgcagtgt

SEQ ID NO: 218701 - DNA, 22 bp, Artificial Sequence
  Synthetic oligonucleotide; TTG chr2 60505469 60505490 60505474 60505469 -
ttccctgtgtggatgcagtgtt

SEQ ID NO: 218702 - DNA, 22 bp, Artificial Sequence
  Synthetic oligonucleotide; TTC chr2 60505466 60505487 60505471 60505466 -
cctgtgtggatgcagtgtttgt

SEQ ID NO: 218703 - DNA, 22 bp, Artificial Sequence
  Synthetic oligonucleotide; CTG chr2 60505462 60505483 60505467 60505462 -
tgtggatgcagtgtttgtccag

SEQ ID NO: 218704 - DNA, 22 bp, Artificial Sequence
  Synthetic oligonucleotide; TTT chr2 60505446 60505467 60505451 60505446 -
gtccagctgaaggcagcctcac

SEQ ID NO: 218705 - DNA, 22 bp, Artificial Sequence
  Synthetic oligonucleotide; TTG chr2 60505445 60505466 60505450 60505445 -
tccagctgaaggcagcctcact

SEQ ID NO: 218706 - DNA, 22 bp, Artificial Sequence
  Synthetic oligonucleotide; CTG chr2 60505437 60505458 60505442 60505437 -
aaggcagcctcactcggctgac

SEQ ID NO: 218707 - DNA, 22 bp, Artificial Sequence
  Synthetic oligonucleotide; CTC chr2 60505426 60505447 60505431 60505426 -
actcggctgactacctgatgag

SEQ ID NO: 218708 - DNA, 22 bp, Artificial Sequence
  Synthetic oligonucleotide; CTC chr2 60505422 60505443 60505427 60505422 -
ggctgactacctgatgagtgat

SEQ ID NO: 218709 - DNA, 22 bp, Artificial Sequence
  Synthetic oligonucleotide; CTG chr2 60505417 60505438 60505422 60505417 -
actacctgatgagtgattttcc

SEQ ID NO: 218710 - DNA, 22 bp, Artificial Sequence
  Synthetic oligonucleotide; CTA chr2 60505413 60505434 60505418 60505413 -
cctgatgagtgattttccccaa

SEQ ID NO: 218711 - DNA, 22 bp, Artificial Sequence
  Synthetic oligonucleotide; CTG chr2 60505409 60505430 60505414 60505409 -
atgagtgattttccccaagctg

SEQ ID NO: 218712 - DNA, 22 bp, Artificial Sequence
  Synthetic oligonucleotide; TTT chr2 60505398 60505419 60505403 60505398 -
tccccaagctgacagctgctcc

SEQ ID NO: 218713 - DNA, 22 bp, Artificial Sequence
  Synthetic oligonucleotide; TTT chr2 60505397 60505418 60505402 60505397 -
ccccaagctgacagctgctcca

SEQ ID NO: 218714 - DNA, 22 bp, Artificial Sequence
  Synthetic oligonucleotide; TTC chr2 60505396 60505417 60505401 60505396 -
cccaagctgacagctgctccaa

SEQ ID NO: 218715 - DNA, 22 bp, Artificial Sequence
  Synthetic oligonucleotide; CTG chr2 60505387 60505408 60505392 60505387 -
acagctgctccaacacatttca

SEQ ID NO: 218716 - DNA, 22 bp, Artificial Sequence
  Synthetic oligonucleotide; CTG chr2 60505380 60505401 60505385 60505380 -
ctccaacacatttcacctacaa

SEQ ID NO: 218717 - DNA, 22 bp, Artificial Sequence
  Synthetic oligonucleotide; CTC chr2 60505377 60505398 60505382 60505377 -
caacacatttcacctacaagtc

SEQ ID NO: 218718 - DNA, 22 bp, Artificial Sequence
  Synthetic oligonucleotide; TTT chr2 60505367 60505388 60505372 60505367 -
cacctacaagtcctgacaaagt

SEQ ID NO: 218719 - DNA, 22 bp, Artificial Sequence
  Synthetic oligonucleotide; TTC chr2 60505366 60505387 60505371 60505366 -
acctacaagtcctgacaaagtg

SEQ ID NO: 218720 - DNA, 22 bp, Artificial Sequence
  Synthetic oligonucleotide; CTA chr2 60505361 60505382 60505366 60505361 -
caagtcctgacaaagtggtgtg

SEQ ID NO: 218721 - DNA, 22 bp, Artificial Sequence
  Synthetic oligonucleotide; CTG chr2 60505352 60505373 60505357 60505352 -
acaaagtggtgtgttcttttgg

SEQ ID NO: 218722 - DNA, 22 bp, Artificial Sequence
  Synthetic oligonucleotide; TTC chr2 60505336 60505357 60505341 60505336 -
ttttggggctgttattactgca

SEQ ID NO: 218723 - DNA, 22 bp, Artificial Sequence
  Synthetic oligonucleotide; CTT chr2 60505334 60505355 60505339 60505334 -
ttggggctgttattactgcagc

SEQ ID NO: 218724 - DNA, 22 bp, Artificial Sequence
  Synthetic oligonucleotide; TTT chr2 60505333 60505354 60505338 60505333 -
tggggctgttattactgcagca

SEQ ID NO: 218725 - DNA, 22 bp, Artificial Sequence
  Synthetic oligonucleotide; TTT chr2 60505332 60505353 60505337 60505332 -
ggggctgttattactgcagcag

SEQ ID NO: 218726 - DNA, 22 bp, Artificial Sequence
  Synthetic oligonucleotide; TTG chr2 60505331 60505352 60505336 60505331 -
gggctgttattactgcagcagg

SEQ ID NO: 218727 - DNA, 22 bp, Artificial Sequence
  Synthetic oligonucleotide; CTG chr2 60505325 60505346 60505330 60505325 -
ttattactgcagcaggcatttg

SEQ ID NO: 218728 - DNA, 22 bp, Artificial Sequence
  Synthetic oligonucleotide; TTA chr2 60505322 60505343 60505327 60505322 -
ttactgcagcaggcatttggaa

SEQ ID NO: 218729 - DNA, 22 bp, Artificial Sequence
  Synthetic oligonucleotide; TTA chr2 60505319 60505340 60505324 60505319 -
ctgcagcaggcatttggaacaa

SEQ ID NO: 218730 - DNA, 22 bp, Artificial Sequence
  Synthetic oligonucleotide; CTG chr2 60505316 60505337 60505321 60505316 -
cagcaggcatttggaacaatct

SEQ ID NO: 218731 - DNA, 22 bp, Artificial Sequence
  Synthetic oligonucleotide; TTT chr2 60505304 60505325 60505309 60505304 -
ggaacaatctggaagaatgggg

SEQ ID NO: 218732 - DNA, 22 bp, Artificial Sequence
  Synthetic oligonucleotide; TTG chr2 60505303 60505324 60505308 60505303 -
gaacaatctggaagaatggggt

SEQ ID NO: 218733 - DNA, 22 bp, Artificial Sequence
  Synthetic oligonucleotide; CTG chr2 60505293 60505314 60505298 60505293 -
gaagaatggggtgccaaaggac

SEQ ID NO: 218734 - DNA, 22 bp, Artificial Sequence
  Synthetic oligonucleotide; CTT chr2 60505265 60505286 60505270 60505265 -
gaagccgtttctgagtatccgt

SEQ ID NO: 218735 - DNA, 22 bp, Artificial Sequence
  Synthetic oligonucleotide; TTG chr2 60505264 60505285 60505269 60505264 -
aagccgtttctgagtatccgtc

SEQ ID NO: 218736 - DNA, 22 bp, Artificial Sequence
  Synthetic oligonucleotide; TTT chr2 60505255 60505276 60505260 60505255 -
ctgagtatccgtcccttctttt

SEQ ID NO: 218737 - DNA, 22 bp, Artificial Sequence
  Synthetic oligonucleotide; TTC chr2 60505254 60505275 60505259 60505254 -
tgagtatccgtcccttcttttc

SEQ ID NO: 218738 - DNA, 22 bp, Artificial Sequence
  Synthetic oligonucleotide; CTG chr2 60505252 60505273 60505257 60505252 -
agtatccgtcccttcttttctc

SEQ ID NO: 218739 - DNA, 22 bp, Artificial Sequence
  Synthetic oligonucleotide; CTT chr2 60505238 60505259 60505243 60505238 -
cttttctctccgatcctctagc

SEQ ID NO: 218740 - DNA, 22 bp, Artificial Sequence
  Synthetic oligonucleotide; TTC chr2 60505237 60505258 60505242 60505237 -
ttttctctccgatcctctagct

SEQ ID NO: 218741 - DNA, 22 bp, Artificial Sequence
  Synthetic oligonucleotide; CTT chr2 60505235 60505256 60505240 60505235 -
ttctctccgatcctctagcttt

SEQ ID NO: 218742 - DNA, 22 bp, Artificial Sequence
  Synthetic oligonucleotide; TTT chr2 60505234 60505255 60505239 60505234 -
tctctccgatcctctagctttt

SEQ ID NO: 218743 - DNA, 22 bp, Artificial Sequence
  Synthetic oligonucleotide; TTT chr2 60505233 60505254 60505238 60505233 -
ctctccgatcctctagcttttt

SEQ ID NO: 218744 - DNA, 22 bp, Artificial Sequence
  Synthetic oligonucleotide; TTC chr2 60505232 60505253 60505237 60505232 -
tctccgatcctctagctttttt

SEQ ID NO: 218745 - DNA, 22 bp, Artificial Sequence
  Synthetic oligonucleotide; CTC chr2 60505230 60505251 60505235 60505230 -
tccgatcctctagcttttttgg

SEQ ID NO: 218746 - DNA, 22 bp, Artificial Sequence
  Synthetic oligonucleotide; CTC chr2 60505228 60505249 60505233 60505228 -
cgatcctctagcttttttggct

SEQ ID NO: 218747 - DNA, 22 bp, Artificial Sequence
  Synthetic oligonucleotide; CTC chr2 60505220 60505241 60505225 60505220 -
tagcttttttggcttatgaaaa

SEQ ID NO: 218748 - DNA, 22 bp, Artificial Sequence
  Synthetic oligonucleotide; CTA chr2 60505218 60505239 60505223 60505218 -
gcttttttggcttatgaaaaat

SEQ ID NO: 218749 - DNA, 22 bp, Artificial Sequence
  Synthetic oligonucleotide; CTT chr2 60505214 60505235 60505219 60505214 -
ttttggcttatgaaaaattggg

SEQ ID NO: 218750 - DNA, 22 bp, Artificial Sequence
  Synthetic oligonucleotide; TTT chr2 60505213 60505234 60505218 60505213 -
tttggcttatgaaaaattgggc

SEQ ID NO: 218751 - DNA, 22 bp, Artificial Sequence
  Synthetic oligonucleotide; TTT chr2 60505212 60505233 60505217 60505212 -
ttggcttatgaaaaattgggcc

SEQ ID NO: 218752 - DNA, 22 bp, Artificial Sequence
  Synthetic oligonucleotide; TTT chr2 60505211 60505232 60505216 60505211 -
tggcttatgaaaaattgggccc

SEQ ID NO: 218753 - DNA, 22 bp, Artificial Sequence
  Synthetic oligonucleotide; TTT chr2 60505210 60505231 60505215 60505210 -
ggcttatgaaaaattgggccca

SEQ ID NO: 218754 - DNA, 22 bp, Artificial Sequence
  Synthetic oligonucleotide; TTG chr2 60505209 60505230 60505214 60505209 -
gcttatgaaaaattgggcccat

SEQ ID NO: 218755 - DNA, 22 bp, Artificial Sequence
  Synthetic oligonucleotide; CTT chr2 60505205 60505226 60505210 60505205 -
atgaaaaattgggcccatccct

SEQ ID NO: 218756 - DNA, 22 bp, Artificial Sequence
  Synthetic oligonucleotide; TTA chr2 60505204 60505225 60505209 60505204 -
tgaaaaattgggcccatccctt

SEQ ID NO: 218757 - DNA, 22 bp, Artificial Sequence
  Synthetic oligonucleotide; TTG chr2 60505194 60505215 60505199 60505194 -
ggcccatccctttcgaatgtcc

SEQ ID NO: 218758 - DNA, 22 bp, Artificial Sequence
  Synthetic oligonucleotide; CTT chr2 60505182 60505203 60505187 60505182 -
tcgaatgtccattgtgctgtta

SEQ ID NO: 218759 - DNA, 22 bp, Artificial Sequence
  Synthetic oligonucleotide; TTT chr2 60505181 60505202 60505186 60505181 -
cgaatgtccattgtgctgttag

SEQ ID NO: 218760 - DNA, 22 bp, Artificial Sequence
  Synthetic oligonucleotide; TTC chr2 60505180 60505201 60505185 60505180 -
gaatgtccattgtgctgttagt

SEQ ID NO: 218761 - DNA, 22 bp, Artificial Sequence
  Synthetic oligonucleotide; TTG chr2 60505168 60505189 60505173 60505168 -
tgctgttagtaatgaggatacg

SEQ ID NO: 218762 - DNA, 22 bp, Artificial Sequence
  Synthetic oligonucleotide; CTG chr2 60505163 60505184 60505168 60505163 -
ttagtaatgaggatacggataa

SEQ ID NO: 218763 - DNA, 22 bp, Artificial Sequence
  Synthetic oligonucleotide; TTA chr2 60505160 60505181 60505165 60505160 -
gtaatgaggatacggataaaat

SEQ ID NO: 218764 - DNA, 22 bp, Artificial Sequence
  Synthetic oligonucleotide; TTT chr2 60505131 60505152 60505136 60505131 -
tttttttgagtaagccctttga

SEQ ID NO: 218765 - DNA, 22 bp, Artificial Sequence
  Synthetic oligonucleotide; TTT chr2 60505130 60505151 60505135 60505130 -
ttttttgagtaagccctttgag

SEQ ID NO: 218766 - DNA, 22 bp, Artificial Sequence
  Synthetic oligonucleotide; TTT chr2 60505129 60505150 60505134 60505129 -
tttttgagtaagccctttgagg

SEQ ID NO: 218767 - DNA, 22 bp, Artificial Sequence
  Synthetic oligonucleotide; TTT chr2 60505128 60505149 60505133 60505128 -
ttttgagtaagccctttgagga

SEQ ID NO: 218768 - DNA, 22 bp, Artificial Sequence
  Synthetic oligonucleotide; TTT chr2 60505127 60505148 60505132 60505127 -
tttgagtaagccctttgaggag

SEQ ID NO: 218769 - DNA, 22 bp, Artificial Sequence
  Synthetic oligonucleotide; TTT chr2 60505126 60505147 60505131 60505126 -
ttgagtaagccctttgaggagt

SEQ ID NO: 218770 - DNA, 22 bp, Artificial Sequence
  Synthetic oligonucleotide; TTT chr2 60505125 60505146 60505130 60505125 -
tgagtaagccctttgaggagta

SEQ ID NO: 218771 - DNA, 22 bp, Artificial Sequence
  Synthetic oligonucleotide; TTT chr2 60505124 60505145 60505129 60505124 -
gagtaagccctttgaggagtat

SEQ ID NO: 218772 - DNA, 22 bp, Artificial Sequence
  Synthetic oligonucleotide; TTG chr2 60505123 60505144 60505128 60505123 -
agtaagccctttgaggagtatt

SEQ ID NO: 218773 - DNA, 22 bp, Artificial Sequence
  Synthetic oligonucleotide; CTT chr2 60505112 60505133 60505117 60505112 -
tgaggagtattgtcaaattgag

SEQ ID NO: 218774 - DNA, 22 bp, Artificial Sequence
  Synthetic oligonucleotide; TTT chr2 60505111 60505132 60505116 60505111 -
gaggagtattgtcaaattgaga

SEQ ID NO: 218775 - DNA, 22 bp, Artificial Sequence
  Synthetic oligonucleotide; TTG chr2 60505110 60505131 60505115 60505110 -
aggagtattgtcaaattgagac

SEQ ID NO: 218776 - DNA, 22 bp, Artificial Sequence
  Synthetic oligonucleotide; TTG chr2 60505100 60505121 60505105 60505100 -
tcaaattgagactcacctcatg

SEQ ID NO: 218777 - DNA, 22 bp, Artificial Sequence
  Synthetic oligonucleotide; TTG chr2 60505092 60505113 60505097 60505092 -
agactcacctcatgagtaaccc

SEQ ID NO: 218778 - DNA, 22 bp, Artificial Sequence
  Synthetic oligonucleotide; CTC chr2 60505086 60505107 60505091 60505086 -
acctcatgagtaaccctgtgaa

SEQ ID NO: 218779 - DNA, 22 bp, Artificial Sequence
  Synthetic oligonucleotide; CTC chr2 60505081 60505102 60505086 60505081 -
atgagtaaccctgtgaagaggc

SEQ ID NO: 218780 - DNA, 22 bp, Artificial Sequence
  Synthetic oligonucleotide; CTG chr2 60505068 60505089 60505073 60505068 -
tgaagaggcaggagaaagggta

SEQ ID NO: 218781 - DNA, 22 bp, Artificial Sequence
  Synthetic oligonucleotide; TTG chr2 60505042 60505063 60505047 60505042 -
aagcttagagaggttaaatggc

SEQ ID NO: 218782 - DNA, 22 bp, Artificial Sequence
  Synthetic oligonucleotide; CTT chr2 60505036 60505057 60505041 60505036 -
agagaggttaaatggcaggtct

SEQ ID NO: 218783 - DNA, 22 bp, Artificial Sequence
  Synthetic oligonucleotide; TTA chr2 60505035 60505056 60505040 60505035 -
gagaggttaaatggcaggtctg

SEQ ID NO: 218784 - DNA, 22 bp, Artificial Sequence
  Synthetic oligonucleotide; TTA chr2 60505026 60505047 60505031 60505026 -
aatggcaggtctggtctcatgc

SEQ ID NO: 218785 - DNA, 22 bp, Artificial Sequence
  Synthetic oligonucleotide; CTG chr2 60505013 60505034 60505018 60505013 -
gtctcatgcagccgcaggggta

SEQ ID NO: 218786 - DNA, 22 bp, Artificial Sequence
  Synthetic oligonucleotide; CTC chr2 60505008 60505029 60505013 60505008 -
atgcagccgcaggggtagacta

SEQ ID NO: 218787 - DNA, 22 bp, Artificial Sequence
  Synthetic oligonucleotide; CTA chr2 60504986 60505007 60504991 60504986 -
gggattctgatccagaactcct

SEQ ID NO: 218788 - DNA, 22 bp, Artificial Sequence
  Synthetic oligonucleotide; TTC chr2 60504979 60505000 60504984 60504979 -
tgatccagaactccttatactt

SEQ ID NO: 218789 - DNA, 22 bp, Artificial Sequence
  Synthetic oligonucleotide; CTG chr2 60504977 60504998 60504982 60504977 -
atccagaactccttatacttct

SEQ ID NO: 218790 - DNA, 22 bp, Artificial Sequence
  Synthetic oligonucleotide; CTC chr2 60504966 60504987 60504971 60504966 -
cttatacttctgggtccacccc

SEQ ID NO: 218791 - DNA, 22 bp, Artificial Sequence
  Synthetic oligonucleotide; CTT chr2 60504963 60504984 60504968 60504963 -
atacttctgggtccaccccacg

SEQ ID NO: 218792 - DNA, 22 bp, Artificial Sequence
  Synthetic oligonucleotide; TTA chr2 60504962 60504983 60504967 60504962 -
tacttctgggtccaccccacgc

SEQ ID NO: 218793 - DNA, 22 bp, Artificial Sequence
  Synthetic oligonucleotide; CTT chr2 60504957 60504978 60504962 60504957 -
ctgggtccaccccacgcttcca

SEQ ID NO: 218794 - DNA, 22 bp, Artificial Sequence
  Synthetic oligonucleotide; TTC chr2 60504956 60504977 60504961 60504956 -
tgggtccaccccacgcttccac

SEQ ID NO: 218795 - DNA, 22 bp, Artificial Sequence
  Synthetic oligonucleotide; CTG chr2 60504954 60504975 60504959 60504954 -
ggtccaccccacgcttccacag

SEQ ID NO: 218796 - DNA, 22 bp, Artificial Sequence
  Synthetic oligonucleotide; CTT chr2 60504938 60504959 60504943 60504938 -
ccacagcctgcacacagggtag

SEQ ID NO: 218797 - DNA, 22 bp, Artificial Sequence
  Synthetic oligonucleotide; TTC chr2 60504937 60504958 60504942 60504937 -
cacagcctgcacacagggtagg

SEQ ID NO: 218798 - DNA, 22 bp, Artificial Sequence
  Synthetic oligonucleotide; CTG chr2 60504928 60504949 60504933 60504928 -
cacacagggtagggaagttgtg

SEQ ID NO: 218799 - DNA, 22 bp, Artificial Sequence
  Synthetic oligonucleotide; TTG chr2 60504908 60504929 60504913 60504908 -
tggcttgcagaaggctgttttt

SEQ ID NO: 218800 - DNA, 22 bp, Artificial Sequence
  Synthetic oligonucleotide; CTT chr2 60504902 60504923 60504907 60504902 -
gcagaaggctgtttttttgggg

SEQ ID NO: 218801 - DNA, 22 bp, Artificial Sequence
  Synthetic oligonucleotide; TTG chr2 60504901 60504922 60504906 60504901 -
cagaaggctgtttttttggggg

SEQ ID NO: 218802 - DNA, 22 bp, Artificial Sequence
  Synthetic oligonucleotide; CTG chr2 60504891 60504912 60504896 60504891 -
tttttttggggggacgctctgt

SEQ ID NO: 218803 - DNA, 22 bp, Artificial Sequence
  Synthetic oligonucleotide; TTT chr2 60504888 60504909 60504893 60504888 -
ttttggggggacgctctgtttt

SEQ ID NO: 218804 - DNA, 22 bp, Artificial Sequence
  Synthetic oligonucleotide; TTT chr2 60504887 60504908 60504892 60504887 -
tttggggggacgctctgtttta

SEQ ID NO: 218805 - DNA, 22 bp, Artificial Sequence
  Synthetic oligonucleotide; TTT chr2 60504886 60504907 60504891 60504886 -
ttggggggacgctctgttttaa

SEQ ID NO: 218806 - DNA, 22 bp, Artificial Sequence
  Synthetic oligonucleotide; TTT chr2 60504885 60504906 60504890 60504885 -
tggggggacgctctgttttaat

SEQ ID NO: 218807 - DNA, 22 bp, Artificial Sequence
  Synthetic oligonucleotide; TTT chr2 60504884 60504905 60504889 60504884 -
ggggggacgctctgttttaata

SEQ ID NO: 218808 - DNA, 22 bp, Artificial Sequence
  Synthetic oligonucleotide; TTG chr2 60504883 60504904 60504888 60504883 -
gggggacgctctgttttaatag

SEQ ID NO: 218809 - DNA, 22 bp, Artificial Sequence
  Synthetic oligonucleotide; CTC chr2 60504872 60504893 60504877 60504872 -
tgttttaatagtttggagcaag

SEQ ID NO: 218810 - DNA, 22 bp, Artificial Sequence
  Synthetic oligonucleotide; CTG chr2 60504870 60504891 60504875 60504870 -
ttttaatagtttggagcaagga

SEQ ID NO: 218811 - DNA, 22 bp, Artificial Sequence
  Synthetic oligonucleotide; TTT chr2 60504867 60504888 60504872 60504867 -
taatagtttggagcaaggaagc

SEQ ID NO: 218812 - DNA, 22 bp, Artificial Sequence
  Synthetic oligonucleotide; TTT chr2 60504866 60504887 60504871 60504866 -
aatagtttggagcaaggaagct

SEQ ID NO: 218813 - DNA, 22 bp, Artificial Sequence
  Synthetic oligonucleotide; TTA chr2 60504865 60504886 60504870 60504865 -
atagtttggagcaaggaagcta

SEQ ID NO: 218814 - DNA, 22 bp, Artificial Sequence
  Synthetic oligonucleotide; TTT chr2 60504858 60504879 60504863 60504858 -
ggagcaaggaagctagtggtgg

SEQ ID NO: 218815 - DNA, 22 bp, Artificial Sequence
  Synthetic oligonucleotide; TTG chr2 60504857 60504878 60504862 60504857 -
gagcaaggaagctagtggtggg

SEQ ID NO: 218816 - DNA, 22 bp, Artificial Sequence
  Synthetic oligonucleotide; CTA chr2 60504843 60504864 60504848 60504843 -
gtggtgggcgctcactggtagg

SEQ ID NO: 218817 - DNA, 22 bp, Artificial Sequence
  Synthetic oligonucleotide; CTC chr2 60504830 60504851 60504835 60504830 -
actggtaggggaggcatgtgat

SEQ ID NO: 218818 - DNA, 22 bp, Artificial Sequence
  Synthetic oligonucleotide; CTG chr2 60504826 60504847 60504831 60504826 -
gtaggggaggcatgtgatagga

SEQ ID NO: 218819 - DNA, 22 bp, Artificial Sequence
  Synthetic oligonucleotide; TTT chr2 60504796 60504817 60504801 60504796 -
gatcttttaagcattttcaggg

SEQ ID NO: 218820 - DNA, 22 bp, Artificial Sequence
  Synthetic oligonucleotide; TTG chr2 60504795 60504816 60504800 60504795 -
atcttttaagcattttcaggga

SEQ ID NO: 218821 - DNA, 22 bp, Artificial Sequence
  Synthetic oligonucleotide; CTT chr2 60504790 60504811 60504795 60504790 -
ttaagcattttcagggacagat

SEQ ID NO: 218822 - DNA, 22 bp, Artificial Sequence
  Synthetic oligonucleotide; TTT chr2 60504789 60504810 60504794 60504789 -
taagcattttcagggacagata

SEQ ID NO: 218823 - DNA, 22 bp, Artificial Sequence
  Synthetic oligonucleotide; TTT chr2 60504788 60504809 60504793 60504788 -
aagcattttcagggacagatat

SEQ ID NO: 218824 - DNA, 22 bp, Artificial Sequence
  Synthetic oligonucleotide; TTA chr2 60504787 60504808 60504792 60504787 -
agcattttcagggacagatatg

SEQ ID NO: 218825 - DNA, 22 bp, Artificial Sequence
  Synthetic oligonucleotide; TTT chr2 60504780 60504801 60504785 60504780 -
tcagggacagatatgtacctga

SEQ ID NO: 218826 - DNA, 22 bp, Artificial Sequence
  Synthetic oligonucleotide; TTT chr2 60504779 60504800 60504784 60504779 -
cagggacagatatgtacctgat

SEQ ID NO: 218827 - DNA, 22 bp, Artificial Sequence
  Synthetic oligonucleotide; TTC chr2 60504778 60504799 60504783 60504778 -
agggacagatatgtacctgata

SEQ ID NO: 218828 - DNA, 22 bp, Artificial Sequence
  Synthetic oligonucleotide; CTG chr2 60504759 60504780 60504764 60504759 -
atattccacctctctatataat

SEQ ID NO: 218829 - DNA, 22 bp, Artificial Sequence
  Synthetic oligonucleotide; TTC chr2 60504753 60504774 60504758 60504753 -
cacctctctatataatttcaag

SEQ ID NO: 218830 - DNA, 22 bp, Artificial Sequence
  Synthetic oligonucleotide; CTC chr2 60504747 60504768 60504752 60504747 -
tctatataatttcaagacttga

SEQ ID NO: 218831 - DNA, 22 bp, Artificial Sequence
  Synthetic oligonucleotide; CTC chr2 60504745 60504766 60504750 60504745 -
tatataatttcaagacttgatt

SEQ ID NO: 218832 - DNA, 22 bp, Artificial Sequence
  Synthetic oligonucleotide; CTA chr2 60504743 60504764 60504748 60504743 -
tataatttcaagacttgattgg

SEQ ID NO: 218833 - DNA, 22 bp, Artificial Sequence
  Synthetic oligonucleotide; TTT chr2 60504735 60504756 60504740 60504735 -
caagacttgattggcattgtcc

SEQ ID NO: 218834 - DNA, 22 bp, Artificial Sequence
  Synthetic oligonucleotide; TTC chr2 60504734 60504755 60504739 60504734 -
aagacttgattggcattgtccc

SEQ ID NO: 218835 - DNA, 22 bp, Artificial Sequence
  Synthetic oligonucleotide; CTT chr2 60504727 60504748 60504732 60504727 -
gattggcattgtccctaagcac

SEQ ID NO: 218836 - DNA, 22 bp, Artificial Sequence
  Synthetic oligonucleotide; TTG chr2 60504726 60504747 60504731 60504726 -
attggcattgtccctaagcacc

SEQ ID NO: 218837 - DNA, 22 bp, Artificial Sequence
  Synthetic oligonucleotide; TTG chr2 60504722 60504743 60504727 60504722 -
gcattgtccctaagcaccagta

SEQ ID NO: 218838 - DNA, 22 bp, Artificial Sequence
  Synthetic oligonucleotide; TTG chr2 60504716 60504737 60504721 60504716 -
tccctaagcaccagtagaaagc

SEQ ID NO: 218839 - DNA, 22 bp, Artificial Sequence
  Synthetic oligonucleotide; CTA chr2 60504710 60504731 60504715 60504710 -
agcaccagtagaaagcttgaag

SEQ ID NO: 218840 - DNA, 22 bp, Artificial Sequence
  Synthetic oligonucleotide; CTT chr2 60504692 60504713 60504697 60504692 -
gaagaagcttctcagtaaatac

SEQ ID NO: 218841 - DNA, 22 bp, Artificial Sequence
  Synthetic oligonucleotide; TTG chr2 60504691 60504712 60504696 60504691 -
aagaagcttctcagtaaataca

SEQ ID NO: 218842 - DNA, 22 bp, Artificial Sequence
  Synthetic oligonucleotide; CTT chr2 60504682 60504703 60504687 60504682 -
ctcagtaaatacatcagctgta

SEQ ID NO: 218843 - DNA, 22 bp, Artificial Sequence
  Synthetic oligonucleotide; TTC chr2 60504681 60504702 60504686 60504681 -
tcagtaaatacatcagctgtat

SEQ ID NO: 218844 - DNA, 22 bp, Artificial Sequence
  Synthetic oligonucleotide; CTC chr2 60504679 60504700 60504684 60504679 -
agtaaatacatcagctgtattt

SEQ ID NO: 218845 - DNA, 22 bp, Artificial Sequence
  Synthetic oligonucleotide; CTG chr2 60504662 60504683 60504667 60504662 -
tatttccaggtgagcagtacct

SEQ ID NO: 218846 - DNA, 22 bp, Artificial Sequence
  Synthetic oligonucleotide; TTT chr2 60504657 60504678 60504662 60504657 -
ccaggtgagcagtacctgctga

SEQ ID NO: 218847 - DNA, 22 bp, Artificial Sequence
  Synthetic oligonucleotide; TTC chr2 60504656 60504677 60504661 60504656 -
caggtgagcagtacctgctgaa

SEQ ID NO: 218848 - DNA, 22 bp, Artificial Sequence
  Synthetic oligonucleotide; CTG chr2 60504639 60504660 60504644 60504639 -
ctgaaatgctgagagaacgttc

SEQ ID NO: 218849 - DNA, 22 bp, Artificial Sequence
  Synthetic oligonucleotide; CTG chr2 60504636 60504657 60504641 60504636 -
aaatgctgagagaacgttctga

SEQ ID NO: 218850 - DNA, 22 bp, Artificial Sequence
  Synthetic oligonucleotide; CTG chr2 60504628 60504649 60504633 60504628 -
agagaacgttctgactaggagg

SEQ ID NO: 218851 - DNA, 22 bp, Artificial Sequence
  Synthetic oligonucleotide; TTC chr2 60504617 60504638 60504622 60504617 -
tgactaggagggcttgggggag

SEQ ID NO: 218852 - DNA, 22 bp, Artificial Sequence
  Synthetic oligonucleotide; CTG chr2 60504615 60504636 60504620 60504615 -
actaggagggcttgggggagac

SEQ ID NO: 218853 - DNA, 22 bp, Artificial Sequence
  Synthetic oligonucleotide; CTA chr2 60504611 60504632 60504616 60504611 -
ggagggcttgggggagacagag

SEQ ID NO: 218854 - DNA, 22 bp, Artificial Sequence
  Synthetic oligonucleotide; CTT chr2 60504602 60504623 60504607 60504602 -
gggggagacagagacagagttg

SEQ ID NO: 218855 - DNA, 22 bp, Artificial Sequence
  Synthetic oligonucleotide; TTG chr2 60504601 60504622 60504606 60504601 -
ggggagacagagacagagttgg

SEQ ID NO: 218856 - DNA, 22 bp, Artificial Sequence
  Synthetic oligonucleotide; TTG chr2 60504580 60504601 60504585 60504580 -
gctgtttcagcagactcattct

SEQ ID NO: 218857 - DNA, 22 bp, Artificial Sequence
  Synthetic oligonucleotide; CTG chr2 60504576 60504597 60504581 60504576 -
tttcagcagactcattctgcta

SEQ ID NO: 218858 - DNA, 22 bp, Artificial Sequence
  Synthetic oligonucleotide; TTT chr2 60504573 60504594 60504578 60504573 -
cagcagactcattctgctattt

SEQ ID NO: 218859 - DNA, 22 bp, Artificial Sequence
  Synthetic oligonucleotide; TTC chr2 60504572 60504593 60504577 60504572 -
agcagactcattctgctatttg

SEQ ID NO: 218860 - DNA, 22 bp, Artificial Sequence
  Synthetic oligonucleotide; CTC chr2 60504563 60504584 60504568 60504563 -
attctgctatttgctttttgcc

SEQ ID NO: 218861 - DNA, 22 bp, Artificial Sequence
  Synthetic oligonucleotide; TTC chr2 60504559 60504580 60504564 60504559 -
tgctatttgctttttgccttgg

SEQ ID NO: 218862 - DNA, 22 bp, Artificial Sequence
  Synthetic oligonucleotide; CTG chr2 60504557 60504578 60504562 60504557 -
ctatttgctttttgccttggag

SEQ ID NO: 218863 - DNA, 22 bp, Artificial Sequence
  Synthetic oligonucleotide; CTA chr2 60504554 60504575 60504559 60504554 -
tttgctttttgccttggagatt

SEQ ID NO: 218864 - DNA, 22 bp, Artificial Sequence
  Synthetic oligonucleotide; TTT chr2 60504551 60504572 60504556 60504551 -
gctttttgccttggagattatt

SEQ ID NO: 218865 - DNA, 22 bp, Artificial Sequence
  Synthetic oligonucleotide; TTG chr2 60504550 60504571 60504555 60504550 -
ctttttgccttggagattattt

SEQ ID NO: 218866 - DNA, 22 bp, Artificial Sequence
  Synthetic oligonucleotide; CTT chr2 60504547 60504568 60504552 60504547 -
tttgccttggagattatttttt

SEQ ID NO: 218867 - DNA, 22 bp, Artificial Sequence
  Synthetic oligonucleotide; TTT chr2 60504546 60504567 60504551 60504546 -
ttgccttggagattattttttc

SEQ ID NO: 218868 - DNA, 22 bp, Artificial Sequence
  Synthetic oligonucleotide; TTT chr2 60504545 60504566 60504550 60504545 -
tgccttggagattattttttct

SEQ ID NO: 218869 - DNA, 22 bp, Artificial Sequence
  Synthetic oligonucleotide; TTT chr2 60504544 60504565 60504549 60504544 -
gccttggagattattttttctg

SEQ ID NO: 218870 - DNA, 22 bp, Artificial Sequence
  Synthetic oligonucleotide; TTG chr2 60504543 60504564 60504548 60504543 -
ccttggagattattttttctgg

SEQ ID NO: 218871 - DNA, 22 bp, Artificial Sequence
  Synthetic oligonucleotide; CTT chr2 60504539 60504560 60504544 60504539 -
ggagattattttttctgggtgt

SEQ ID NO: 218872 - DNA, 22 bp, Artificial Sequence
  Synthetic oligonucleotide; TTG chr2 60504538 60504559 60504543 60504538 -
gagattattttttctgggtgtc

SEQ ID NO: 218873 - DNA, 22 bp, Artificial Sequence
  Synthetic oligonucleotide; TTA chr2 60504531 60504552 60504536 60504531 -
ttttttctgggtgtcccgatgc

SEQ ID NO: 218874 - DNA, 22 bp, Artificial Sequence
  Synthetic oligonucleotide; TTT chr2 60504528 60504549 60504533 60504528 -
tttctgggtgtcccgatgctga

SEQ ID NO: 218875 - DNA, 22 bp, Artificial Sequence
  Synthetic oligonucleotide; TTT chr2 60504527 60504548 60504532 60504527 -
ttctgggtgtcccgatgctgag

SEQ ID NO: 218876 - DNA, 22 bp, Artificial Sequence
  Synthetic oligonucleotide; TTT chr2 60504526 60504547 60504531 60504526 -
tctgggtgtcccgatgctgagc

SEQ ID NO: 218877 - DNA, 22 bp, Artificial Sequence
  Synthetic oligonucleotide; TTT chr2 60504525 60504546 60504530 60504525 -
ctgggtgtcccgatgctgagct

SEQ ID NO: 218878 - DNA, 22 bp, Artificial Sequence
  Synthetic oligonucleotide; TTC chr2 60504524 60504545 60504529 60504524 -
tgggtgtcccgatgctgagctc

SEQ ID NO: 218879 - DNA, 22 bp, Artificial Sequence
  Synthetic oligonucleotide; CTG chr2 60504522 60504543 60504527 60504522 -
ggtgtcccgatgctgagctccc

SEQ ID NO: 218880 - DNA, 22 bp, Artificial Sequence
  Synthetic oligonucleotide; CTG chr2 60504507 60504528 60504512 60504507 -
agctcccacttcaagaagaaca

SEQ ID NO: 218881 - DNA, 22 bp, Artificial Sequence
  Synthetic oligonucleotide; CTC chr2 60504502 60504523 60504507 60504502 -
ccacttcaagaagaacattggt

SEQ ID NO: 218882 - DNA, 22 bp, Artificial Sequence
  Synthetic oligonucleotide; CTT chr2 60504496 60504517 60504501 60504496 -
caagaagaacattggtataaat

SEQ ID NO: 218883 - DNA, 22 bp, Artificial Sequence
  Synthetic oligonucleotide; TTC chr2 60504495 60504516 60504500 60504495 -
aagaagaacattggtataaatt

SEQ ID NO: 218884 - DNA, 22 bp, Artificial Sequence
  Synthetic oligonucleotide; TTG chr2 60504482 60504503 60504487 60504482 -
gtataaatttacaaaccagaag

SEQ ID NO: 218885 - DNA, 22 bp, Artificial Sequence
  Synthetic oligonucleotide; TTT chr2 60504472 60504493 60504477 60504472 -
acaaaccagaagtagtcagagg

SEQ ID NO: 218886 - DNA, 22 bp, Artificial Sequence
  Synthetic oligonucleotide; TTA chr2 60504471 60504492 60504476 60504471 -
caaaccagaagtagtcagaggt

SEQ ID NO: 218887 - DNA, 22 bp, Artificial Sequence
  Synthetic oligonucleotide; TTG chr2 60504447 60504468 60504452 60504447 -
acttttttgttctgttattcct

SEQ ID NO: 218888 - DNA, 22 bp, Artificial Sequence
  Synthetic oligonucleotide; CTT chr2 60504443 60504464 60504448 60504443 -
ttttgttctgttattccttctt

SEQ ID NO: 218889 - DNA, 22 bp, Artificial Sequence
  Synthetic oligonucleotide; TTT chr2 60504442 60504463 60504447 60504442 -
tttgttctgttattccttcttt

SEQ ID NO: 218890 - DNA, 22 bp, Artificial Sequence
  Synthetic oligonucleotide; TTT chr2 60504441 60504462 60504446 60504441 -
ttgttctgttattccttctttg

SEQ ID NO: 218891 - DNA, 22 bp, Artificial Sequence
  Synthetic oligonucleotide; TTT chr2 60504440 60504461 60504445 60504440 -
tgttctgttattccttctttgg

SEQ ID NO: 218892 - DNA, 22 bp, Artificial Sequence
  Synthetic oligonucleotide; TTT chr2 60504439 60504460 60504444 60504439 -
gttctgttattccttctttggg

SEQ ID NO: 218893 - DNA, 22 bp, Artificial Sequence
  Synthetic oligonucleotide; TTG chr2 60504438 60504459 60504443 60504438 -
ttctgttattccttctttggga

SEQ ID NO: 218894 - DNA, 22 bp, Artificial Sequence
  Synthetic oligonucleotide; TTC chr2 60504435 60504456 60504440 60504435 -
tgttattccttctttgggagag

SEQ ID NO: 218895 - DNA, 22 bp, Artificial Sequence
  Synthetic oligonucleotide; CTG chr2 60504433 60504454 60504438 60504433 -
ttattccttctttgggagagca

SEQ ID NO: 218896 - DNA, 22 bp, Artificial Sequence
  Synthetic oligonucleotide; TTA chr2 60504430 60504451 60504435 60504430 -
ttccttctttgggagagcaggc

SEQ ID NO: 218897 - DNA, 22 bp, Artificial Sequence
  Synthetic oligonucleotide; TTC chr2 60504427 60504448 60504432 60504427 -
cttctttgggagagcaggctgg

SEQ ID NO: 218898 - DNA, 22 bp, Artificial Sequence
  Synthetic oligonucleotide; CTT chr2 60504424 60504445 60504429 60504424 -
ctttgggagagcaggctggcca

SEQ ID NO: 218899 - DNA, 22 bp, Artificial Sequence
  Synthetic oligonucleotide; TTC chr2 60504423 60504444 60504428 60504423 -
tttgggagagcaggctggccag

SEQ ID NO: 218900 - DNA, 22 bp, Artificial Sequence
  Synthetic oligonucleotide; CTT chr2 60504421 60504442 60504426 60504421 -
tgggagagcaggctggccagga

SEQ ID NO: 218901 - DNA, 22 bp, Artificial Sequence
  Synthetic oligonucleotide; TTT chr2 60504420 60504441 60504425 60504420 -
gggagagcaggctggccaggag

SEQ ID NO: 218902 - DNA, 22 bp, Artificial Sequence
  Synthetic oligonucleotide; TTG chr2 60504419 60504440 60504424 60504419 -
ggagagcaggctggccaggagg

SEQ ID NO: 218903 - DNA, 22 bp, Artificial Sequence
  Synthetic oligonucleotide; CTG chr2 60504406 60504427 60504411 60504406 -
gccaggaggaaggttcaagtgt

SEQ ID NO: 218904 - DNA, 22 bp, Artificial Sequence
  Synthetic oligonucleotide; TTC chr2 60504390 60504411 60504395 60504390 -
aagtgtgtcatatcctagcatt

SEQ ID NO: 218905 - DNA, 22 bp, Artificial Sequence
  Synthetic oligonucleotide; CTA chr2 60504373 60504394 60504378 60504373 -
gcattcagataggtggcctcct

SEQ ID NO: 218906 - DNA, 22 bp, Artificial Sequence
  Synthetic oligonucleotide; TTC chr2 60504367 60504388 60504372 60504367 -
agataggtggcctcctctgcct

SEQ ID NO: 218907 - DNA, 22 bp, Artificial Sequence
  Synthetic oligonucleotide; CTC chr2 60504353 60504374 60504358 60504353 -
ctctgccttttcagtgggtggc

SEQ ID NO: 218908 - DNA, 22 bp, Artificial Sequence
  Synthetic oligonucleotide; CTC chr2 60504350 60504371 60504355 60504350 -
tgccttttcagtgggtggctgg

SEQ ID NO: 218909 - DNA, 22 bp, Artificial Sequence
  Synthetic oligonucleotide; CTG chr2 60504348 60504369 60504353 60504348 -
ccttttcagtgggtggctgggc

SEQ ID NO: 218910 - DNA, 22 bp, Artificial Sequence
  Synthetic oligonucleotide; CTT chr2 60504344 60504365 60504349 60504344 -
ttcagtgggtggctgggctggg

SEQ ID NO: 218911 - DNA, 22 bp, Artificial Sequence
  Synthetic oligonucleotide; TTT chr2 60504343 60504364 60504348 60504343 -
tcagtgggtggctgggctgggt

SEQ ID NO: 218912 - DNA, 22 bp, Artificial Sequence
  Synthetic oligonucleotide; TTT chr2 60504342 60504363 60504347 60504342 -
cagtgggtggctgggctgggtg

SEQ ID NO: 218913 - DNA, 22 bp, Artificial Sequence
  Synthetic oligonucleotide; TTC chr2 60504341 60504362 60504346 60504341 -
agtgggtggctgggctgggtga

SEQ ID NO: 218914 - DNA, 22 bp, Artificial Sequence
  Synthetic oligonucleotide; CTG chr2 60504329 60504350 60504334 60504329 -
ggctgggtgaaatcttgcagtg

SEQ ID NO: 218915 - DNA, 22 bp, Artificial Sequence
  Synthetic oligonucleotide; CTG chr2 60504324 60504345 60504329 60504324 -
ggtgaaatcttgcagtgactaa

SEQ ID NO: 218916 - DNA, 22 bp, Artificial Sequence
  Synthetic oligonucleotide; CTT chr2 60504313 60504334 60504318 60504313 -
gcagtgactaagaaaggaaggg

SEQ ID NO: 218917 - DNA, 22 bp, Artificial Sequence
  Synthetic oligonucleotide; TTG chr2 60504312 60504333 60504317 60504312 -
cagtgactaagaaaggaagggt

SEQ ID NO: 218918 - DNA, 22 bp, Artificial Sequence
  Synthetic oligonucleotide; CTA chr2 60504303 60504324 60504308 60504303 -
agaaaggaagggtggacccagg

SEQ ID NO: 218919 - DNA, 22 bp, Artificial Sequence
  Synthetic oligonucleotide; CTG chr2 60504263 60504284 60504268 60504263 -
catcttcatcattgatcctgca

SEQ ID NO: 218920 - DNA, 22 bp, Artificial Sequence
  Synthetic oligonucleotide; CTT chr2 60504257 60504278 60504262 60504257 -
catcattgatcctgcatgcgtg

SEQ ID NO: 218921 - DNA, 22 bp, Artificial Sequence
  Synthetic oligonucleotide; TTC chr2 60504256 60504277 60504261 60504256 -
atcattgatcctgcatgcgtgc

SEQ ID NO: 218922 - DNA, 22 bp, Artificial Sequence
  Synthetic oligonucleotide; TTG chr2 60504249 60504270 60504254 60504249 -
atcctgcatgcgtgccggtagg

SEQ ID NO: 218923 - DNA, 22 bp, Artificial Sequence
  Synthetic oligonucleotide; CTG chr2 60504243 60504264 60504248 60504243 -
catgcgtgccggtaggcagcag

SEQ ID NO: 218924 - DNA, 22 bp, Artificial Sequence
  Synthetic oligonucleotide; TTC chr2 60504218 60504239 60504223 60504218 -
tggaattgctggggaaaccaca

SEQ ID NO: 218925 - DNA, 22 bp, Artificial Sequence
  Synthetic oligonucleotide; CTG chr2 60504216 60504237 60504221 60504216 -
gaattgctggggaaaccacagt

SEQ ID NO: 218926 - DNA, 22 bp, Artificial Sequence
  Synthetic oligonucleotide; TTG chr2 60504210 60504231 60504215 60504210 -
ctggggaaaccacagtgcagca

SEQ ID NO: 218927 - DNA, 22 bp, Artificial Sequence
  Synthetic oligonucleotide; CTG chr2 60504207 60504228 60504212 60504207 -
gggaaaccacagtgcagcatga

SEQ ID NO: 218928 - DNA, 22 bp, Artificial Sequence
  Synthetic oligonucleotide; CTG chr2 60504179 60504200 60504184 60504179 -
gggcctgctctcttgtgcccgg

SEQ ID NO: 218929 - DNA, 22 bp, Artificial Sequence
  Synthetic oligonucleotide; CTG chr2 60504172 60504193 60504177 60504172 -
ctctcttgtgcccggctgagca

SEQ ID NO: 218930 - DNA, 22 bp, Artificial Sequence
  Synthetic oligonucleotide; CTC chr2 60504169 60504190 60504174 60504169 -
tcttgtgcccggctgagcatct

SEQ ID NO: 218931 - DNA, 22 bp, Artificial Sequence
  Synthetic oligonucleotide; CTC chr2 60504167 60504188 60504172 60504167 -
ttgtgcccggctgagcatctct

SEQ ID NO: 218932 - DNA, 22 bp, Artificial Sequence
  Synthetic oligonucleotide; CTT chr2 60504165 60504186 60504170 60504165 -
gtgcccggctgagcatctctgt

SEQ ID NO: 218933 - DNA, 22 bp, Artificial Sequence
  Synthetic oligonucleotide; TTG chr2 60504164 60504185 60504169 60504164 -
tgcccggctgagcatctctgtt

SEQ ID NO: 218934 - DNA, 22 bp, Artificial Sequence
  Synthetic oligonucleotide; CTG chr2 60504154 60504175 60504159 60504154 -
agcatctctgttctgtttgggg

SEQ ID NO: 218935 - DNA, 22 bp, Artificial Sequence
  Synthetic oligonucleotide; CTC chr2 60504146 60504167 60504151 60504146 -
tgttctgtttggggagtcctgc

SEQ ID NO: 218936 - DNA, 22 bp, Artificial Sequence
  Synthetic oligonucleotide; CTG chr2 60504144 60504165 60504149 60504144 -
ttctgtttggggagtcctgcca

SEQ ID NO: 218937 - DNA, 22 bp, Artificial Sequence
  Synthetic oligonucleotide; TTC chr2 60504141 60504162 60504146 60504141 -
tgtttggggagtcctgccaggc

SEQ ID NO: 218938 - DNA, 22 bp, Artificial Sequence
  Synthetic oligonucleotide; CTG chr2 60504139 60504160 60504144 60504139 -
tttggggagtcctgccaggcaa

SEQ ID NO: 218939 - DNA, 22 bp, Artificial Sequence
  Synthetic oligonucleotide; TTT chr2 60504136 60504157 60504141 60504136 -
ggggagtcctgccaggcaagtg

SEQ ID NO: 218940 - DNA, 22 bp, Artificial Sequence
  Synthetic oligonucleotide; TTG chr2 60504135 60504156 60504140 60504135 -
gggagtcctgccaggcaagtgt

SEQ ID NO: 218941 - DNA, 22 bp, Artificial Sequence
  Synthetic oligonucleotide; CTG chr2 60504125 60504146 60504130 60504125 -
ccaggcaagtgtgagtcaaaga

SEQ ID NO: 218942 - DNA, 22 bp, Artificial Sequence
  Synthetic oligonucleotide; CTA chr2 60504087 60504108 60504092 60504087 -
tgtcatgggggcagtgtcggct

SEQ ID NO: 218943 - DNA, 22 bp, Artificial Sequence
  Synthetic oligonucleotide; CTG chr2 60504064 60504085 60504069 60504064 -
agtggtactcttcagagttctc

SEQ ID NO: 218944 - DNA, 22 bp, Artificial Sequence
  Synthetic oligonucleotide; CTC chr2 60504054 60504075 60504059 60504054 -
ttcagagttctcagaatgtgcc

SEQ ID NO: 218945 - DNA, 22 bp, Artificial Sequence
  Synthetic oligonucleotide; CTT chr2 60504052 60504073 60504057 60504052 -
cagagttctcagaatgtgccgc

SEQ ID NO: 218946 - DNA, 22 bp, Artificial Sequence
  Synthetic oligonucleotide; TTC chr2 60504051 60504072 60504056 60504051 -
agagttctcagaatgtgccgct

SEQ ID NO: 218947 - DNA, 22 bp, Artificial Sequence
  Synthetic oligonucleotide; TTC chr2 60504044 60504065 60504049 60504044 -
tcagaatgtgccgctcgaagcc

SEQ ID NO: 218948 - DNA, 22 bp, Artificial Sequence
  Synthetic oligonucleotide; CTC chr2 60504042 60504063 60504047 60504042 -
agaatgtgccgctcgaagccat

SEQ ID NO: 218949 - DNA, 22 bp, Artificial Sequence
  Synthetic oligonucleotide; CTC chr2 60504028 60504049 60504033 60504028 -
gaagccatgtaggcttccagca

SEQ ID NO: 218950 - DNA, 22 bp, Artificial Sequence
  Synthetic oligonucleotide; CTT chr2 60504012 60504033 60504017 60504012 -
ccagcaggcttctagcagatgg

SEQ ID NO: 218951 - DNA, 22 bp, Artificial Sequence
  Synthetic oligonucleotide; TTC chr2 60504011 60504032 60504016 60504011 -
cagcaggcttctagcagatggg

SEQ ID NO: 218952 - DNA, 22 bp, Artificial Sequence
  Synthetic oligonucleotide; CTT chr2 60504001 60504022 60504006 60504001 -
ctagcagatggggttttggctg

SEQ ID NO: 218953 - DNA, 22 bp, Artificial Sequence
  Synthetic oligonucleotide; TTC chr2 60504000 60504021 60504005 60504000 -
tagcagatggggttttggctgg

SEQ ID NO: 218954 - DNA, 22 bp, Artificial Sequence
  Synthetic oligonucleotide; CTA chr2 60503998 60504019 60504003 60503998 -
gcagatggggttttggctgggt

SEQ ID NO: 218955 - DNA, 22 bp, Artificial Sequence
  Synthetic oligonucleotide; TTT chr2 60503985 60504006 60503990 60503985 -
tggctgggttgggccttaatac

SEQ ID NO: 218956 - DNA, 22 bp, Artificial Sequence
  Synthetic oligonucleotide; TTT chr2 60503984 60504005 60503989 60503984 -
ggctgggttgggccttaatact

SEQ ID NO: 218957 - DNA, 22 bp, Artificial Sequence
  Synthetic oligonucleotide; TTG chr2 60503983 60504004 60503988 60503983 -
gctgggttgggccttaatactc

SEQ ID NO: 218958 - DNA, 22 bp, Artificial Sequence
  Synthetic oligonucleotide; CTG chr2 60503979 60504000 60503984 60503979 -
ggttgggccttaatactcagtg

SEQ ID NO: 218959 - DNA, 22 bp, Artificial Sequence
  Synthetic oligonucleotide; TTG chr2 60503974 60503995 60503979 60503974 -
ggccttaatactcagtgtcttt

SEQ ID NO: 218960 - DNA, 22 bp, Artificial Sequence
  Synthetic oligonucleotide; CTT chr2 60503968 60503989 60503973 60503968 -
aatactcagtgtctttcattcc

SEQ ID NO: 218961 - DNA, 22 bp, Artificial Sequence
  Synthetic oligonucleotide; TTA chr2 60503967 60503988 60503972 60503967 -
atactcagtgtctttcattccc

SEQ ID NO: 218962 - DNA, 22 bp, Artificial Sequence
  Synthetic oligonucleotide; CTC chr2 60503961 60503982 60503966 60503961 -
agtgtctttcattccctctctg

SEQ ID NO: 218963 - DNA, 22 bp, Artificial Sequence
  Synthetic oligonucleotide; CTT chr2 60503953 60503974 60503958 60503953 -
tcattccctctctgccccctcg

SEQ ID NO: 218964 - DNA, 22 bp, Artificial Sequence
  Synthetic oligonucleotide; TTT chr2 60503952 60503973 60503957 60503952 -
cattccctctctgccccctcgt

SEQ ID NO: 218965 - DNA, 22 bp, Artificial Sequence
  Synthetic oligonucleotide; TTC chr2 60503951 60503972 60503956 60503951 -
attccctctctgccccctcgtt

SEQ ID NO: 218966 - DNA, 22 bp, Artificial Sequence
  Synthetic oligonucleotide; TTC chr2 60503947 60503968 60503952 60503947 -
cctctctgccccctcgttcctt

SEQ ID NO: 218967 - DNA, 22 bp, Artificial Sequence
  Synthetic oligonucleotide; CTC chr2 60503943 60503964 60503948 60503943 -
tctgccccctcgttcctttcct

SEQ ID NO: 218968 - DNA, 22 bp, Artificial Sequence
  Synthetic oligonucleotide; CTC chr2 60503941 60503962 60503946 60503941 -
tgccccctcgttcctttcctgc

SEQ ID NO: 218969 - DNA, 22 bp, Artificial Sequence
  Synthetic oligonucleotide; CTG chr2 60503939 60503960 60503944 60503939 -
ccccctcgttcctttcctgcat

SEQ ID NO: 218970 - DNA, 22 bp, Artificial Sequence
  Synthetic oligonucleotide; CTC chr2 60503932 60503953 60503937 60503932 -
gttcctttcctgcatttcttgc

SEQ ID NO: 218971 - DNA, 22 bp, Artificial Sequence
  Synthetic oligonucleotide; TTC chr2 60503928 60503949 60503933 60503928 -
ctttcctgcatttcttgctttc

SEQ ID NO: 218972 - DNA, 22 bp, Artificial Sequence
  Synthetic oligonucleotide; CTT chr2 60503925 60503946 60503930 60503925 -
tcctgcatttcttgctttcttt

SEQ ID NO: 218973 - DNA, 22 bp, Artificial Sequence
  Synthetic oligonucleotide; TTT chr2 60503924 60503945 60503929 60503924 -
cctgcatttcttgctttctttt

SEQ ID NO: 218974 - DNA, 22 bp, Artificial Sequence
  Synthetic oligonucleotide; TTC chr2 60503923 60503944 60503928 60503923 -
ctgcatttcttgctttcttttt

SEQ ID NO: 218975 - DNA, 22 bp, Artificial Sequence
  Synthetic oligonucleotide; CTG chr2 60503920 60503941 60503925 60503920 -
catttcttgctttctttttttt

SEQ ID NO: 218976 - DNA, 22 bp, Artificial Sequence
  Synthetic oligonucleotide; TTT chr2 60503915 60503936 60503920 60503915 -
cttgctttcttttttttctaga

SEQ ID NO: 218977 - DNA, 22 bp, Artificial Sequence
  Synthetic oligonucleotide; TTC chr2 60503914 60503935 60503919 60503914 -
ttgctttcttttttttctagaa

SEQ ID NO: 218978 - DNA, 22 bp, Artificial Sequence
  Synthetic oligonucleotide; CTT chr2 60503912 60503933 60503917 60503912 -
gctttcttttttttctagaatc

SEQ ID NO: 218979 - DNA, 22 bp, Artificial Sequence
  Synthetic oligonucleotide; TTG chr2 60503911 60503932 60503916 60503911 -
ctttcttttttttctagaatca

SEQ ID NO: 218980 - DNA, 22 bp, Artificial Sequence
  Synthetic oligonucleotide; CTT chr2 60503908 60503929 60503913 60503908 -
tcttttttttctagaatcaacg

SEQ ID NO: 218981 - DNA, 22 bp, Artificial Sequence
  Synthetic oligonucleotide; TTT chr2 60503907 60503928 60503912 60503907 -
cttttttttctagaatcaacga

SEQ ID NO: 218982 - DNA, 22 bp, Artificial Sequence
  Synthetic oligonucleotide; TTC chr2 60503906 60503927 60503911 60503906 -
ttttttttctagaatcaacgaa

SEQ ID NO: 218983 - DNA, 22 bp, Artificial Sequence
  Synthetic oligonucleotide; CTT chr2 60503904 60503925 60503909 60503904 -
ttttttctagaatcaacgaagc

SEQ ID NO: 218984 - DNA, 22 bp, Artificial Sequence
  Synthetic oligonucleotide; TTT chr2 60503903 60503924 60503908 60503903 -
tttttctagaatcaacgaagca

SEQ ID NO: 218985 - DNA, 22 bp, Artificial Sequence
  Synthetic oligonucleotide; TTT chr2 60503902 60503923 60503907 60503902 -
ttttctagaatcaacgaagcag

SEQ ID NO: 218986 - DNA, 22 bp, Artificial Sequence
  Synthetic oligonucleotide; TTT chr2 60503901 60503922 60503906 60503901 -
tttctagaatcaacgaagcagc

SEQ ID NO: 218987 - DNA, 22 bp, Artificial Sequence
  Synthetic oligonucleotide; TTT chr2 60503900 60503921 60503905 60503900 -
ttctagaatcaacgaagcagcc

SEQ ID NO: 218988 - DNA, 22 bp, Artificial Sequence
  Synthetic oligonucleotide; TTT chr2 60503899 60503920 60503904 60503899 -
tctagaatcaacgaagcagcca

SEQ ID NO: 218989 - DNA, 22 bp, Artificial Sequence
  Synthetic oligonucleotide; TTT chr2 60503898 60503919 60503903 60503898 -
ctagaatcaacgaagcagccaa

SEQ ID NO: 218990 - DNA, 22 bp, Artificial Sequence
  Synthetic oligonucleotide; TTC chr2 60503897 60503918 60503902 60503897 -
tagaatcaacgaagcagccaat

SEQ ID NO: 218991 - DNA, 22 bp, Artificial Sequence
  Synthetic oligonucleotide; CTA chr2 60503895 60503916 60503900 60503895 -
gaatcaacgaagcagccaataa

SEQ ID NO: 218992 - DNA, 22 bp, Artificial Sequence
  Synthetic oligonucleotide; TTT chr2 60503866 60503887 60503871 60503866 -
tcaggaggtttagatgaatgtg

SEQ ID NO: 218993 - DNA, 22 bp, Artificial Sequence
  Synthetic oligonucleotide; TTT chr2 60503865 60503886 60503870 60503865 -
caggaggtttagatgaatgtga

SEQ ID NO: 218994 - DNA, 22 bp, Artificial Sequence
  Synthetic oligonucleotide; TTC chr2 60503864 60503885 60503869 60503864 -
aggaggtttagatgaatgtgaa

SEQ ID NO: 218995 - DNA, 22 bp, Artificial Sequence
  Synthetic oligonucleotide; TTT chr2 60503855 60503876 60503860 60503855 -
agatgaatgtgaattgctgttt

SEQ ID NO: 218996 - DNA, 22 bp, Artificial Sequence
  Synthetic oligonucleotide; TTA chr2 60503854 60503875 60503859 60503854 -
gatgaatgtgaattgctgttta

SEQ ID NO: 218997 - DNA, 22 bp, Artificial Sequence
  Synthetic oligonucleotide; TTG chr2 60503839 60503860 60503844 60503839 -
ctgtttaatataaaaattttat

SEQ ID NO: 218998 - DNA, 22 bp, Artificial Sequence
  Synthetic oligonucleotide; CTG chr2 60503836 60503857 60503841 60503836 -
tttaatataaaaattttattaa

SEQ ID NO: 218999 - DNA, 22 bp, Artificial Sequence
  Synthetic oligonucleotide; TTT chr2 60503833 60503854 60503838 60503833 -
aatataaaaattttattaaaat

SEQ ID NO: 219000 - DNA, 22 bp, Artificial Sequence
  Synthetic oligonucleotide; TTA chr2 60503832 60503853 60503837 60503832 -
atataaaaattttattaaaata

SEQ ID NO: 219001 - DNA, 22 bp, Artificial Sequence
  Synthetic oligonucleotide; TTT chr2 60503820 60503841 60503825 60503820 -
tattaaaataataaagctctga

SEQ ID NO: 219002 - DNA, 22 bp, Artificial Sequence
  Synthetic oligonucleotide; TTT chr2 60503819 60503840 60503824 60503819 -
attaaaataataaagctctgac

SEQ ID NO: 219003 - DNA, 22 bp, Artificial Sequence
  Synthetic oligonucleotide; TTA chr2 60503818 60503839 60503823 60503818 -
ttaaaataataaagctctgaca

SEQ ID NO: 219004 - DNA, 22 bp, Artificial Sequence
  Synthetic oligonucleotide; TTA chr2 60503815 60503836 60503820 60503815 -
aaataataaagctctgacaaaa

SEQ ID NO: 219005 - DNA, 22 bp, Artificial Sequence
  Synthetic oligonucleotide; CTC chr2 60503801 60503822 60503806 60503801 -
tgacaaaagatccagaatattg

SEQ ID NO: 219006 - DNA, 22 bp, Artificial Sequence
  Synthetic oligonucleotide; CTG chr2 60503799 60503820 60503804 60503799 -
acaaaagatccagaatattgtc

SEQ ID NO: 219007 - DNA, 22 bp, Artificial Sequence
  Synthetic oligonucleotide; TTG chr2 60503779 60503800 60503784 60503779 -
tcccttgcagtgggctttaggg

SEQ ID NO: 219008 - DNA, 22 bp, Artificial Sequence
  Synthetic oligonucleotide; CTT chr2 60503773 60503794 60503778 60503773 -
gcagtgggctttagggttgcat

SEQ ID NO: 219009 - DNA, 22 bp, Artificial Sequence
  Synthetic oligonucleotide; TTG chr2 60503772 60503793 60503777 60503772 -
cagtgggctttagggttgcatc

SEQ ID NO: 219010 - DNA, 22 bp, Artificial Sequence
  Synthetic oligonucleotide; CTT chr2 60503762 60503783 60503767 60503762 -
tagggttgcatcttggctccta

SEQ ID NO: 219011 - DNA, 22 bp, Artificial Sequence
  Synthetic oligonucleotide; TTT chr2 60503761 60503782 60503766 60503761 -
agggttgcatcttggctcctaa

SEQ ID NO: 219012 - DNA, 22 bp, Artificial Sequence
  Synthetic oligonucleotide; TTA chr2 60503760 60503781 60503765 60503760 -
gggttgcatcttggctcctaaa

SEQ ID NO: 219013 - DNA, 22 bp, Artificial Sequence
  Synthetic oligonucleotide; TTG chr2 60503754 60503775 60503759 60503754 -
catcttggctcctaaatcttct

SEQ ID NO: 219014 - DNA, 22 bp, Artificial Sequence
  Synthetic oligonucleotide; CTT chr2 60503748 60503769 60503753 60503748 -
ggctcctaaatcttctaggcgg

SEQ ID NO: 219015 - DNA, 22 bp, Artificial Sequence
  Synthetic oligonucleotide; TTG chr2 60503747 60503768 60503752 60503747 -
gctcctaaatcttctaggcggg

SEQ ID NO: 219016 - DNA, 22 bp, Artificial Sequence
  Synthetic oligonucleotide; CTC chr2 60503743 60503764 60503748 60503743 -
ctaaatcttctaggcgggttaa

SEQ ID NO: 219017 - DNA, 22 bp, Artificial Sequence
  Synthetic oligonucleotide; CTA chr2 60503740 60503761 60503745 60503740 -
aatcttctaggcgggttaaatt

SEQ ID NO: 219018 - DNA, 22 bp, Artificial Sequence
  Synthetic oligonucleotide; CTT chr2 60503734 60503755 60503739 60503734 -
ctaggcgggttaaattagtcct

SEQ ID NO: 219019 - DNA, 22 bp, Artificial Sequence
  Synthetic oligonucleotide; TTC chr2 60503733 60503754 60503738 60503733 -
taggcgggttaaattagtcctc

SEQ ID NO: 219020 - DNA, 22 bp, Artificial Sequence
  Synthetic oligonucleotide; CTA chr2 60503731 60503752 60503736 60503731 -
ggcgggttaaattagtcctcac

SEQ ID NO: 219021 - DNA, 22 bp, Artificial Sequence
  Synthetic oligonucleotide; TTA chr2 60503722 60503743 60503727 60503722 -
aattagtcctcacaaaatgtca

SEQ ID NO: 219022 - DNA, 22 bp, Artificial Sequence
  Synthetic oligonucleotide; TTA chr2 60503717 60503738 60503722 60503717 -
gtcctcacaaaatgtcacattt

SEQ ID NO: 219023 - DNA, 22 bp, Artificial Sequence
  Synthetic oligonucleotide; CTC chr2 60503711 60503732 60503716 60503711 -
acaaaatgtcacatttccctgg

SEQ ID NO: 219024 - DNA, 22 bp, Artificial Sequence
  Synthetic oligonucleotide; TTT chr2 60503695 60503716 60503700 60503695 -
ccctggcagctataggtttcca

SEQ ID NO: 219025 - DNA, 22 bp, Artificial Sequence
  Synthetic oligonucleotide; TTC chr2 60503694 60503715 60503699 60503694 -
cctggcagctataggtttccag

SEQ ID NO: 219026 - DNA, 22 bp, Artificial Sequence
  Synthetic oligonucleotide; CTG chr2 60503690 60503711 60503695 60503690 -
gcagctataggtttccaggagg

SEQ ID NO: 219027 - DNA, 22 bp, Artificial Sequence
  Synthetic oligonucleotide; CTA chr2 60503683 60503704 60503688 60503683 -
taggtttccaggagggtgaaca

SEQ ID NO: 219028 - DNA, 22 bp, Artificial Sequence
  Synthetic oligonucleotide; TTT chr2 60503676 60503697 60503681 60503676 -
ccaggagggtgaacaagggcca

SEQ ID NO: 219029 - DNA, 22 bp, Artificial Sequence
  Synthetic oligonucleotide; TTC chr2 60503675 60503696 60503680 60503675 -
caggagggtgaacaagggccat

SEQ ID NO: 219030 - DNA, 22 bp, Artificial Sequence
  Synthetic oligonucleotide; CTG chr2 60503650 60503671 60503655 60503650 -
ggtgtttgctgagggcttctca

SEQ ID NO: 219031 - DNA, 22 bp, Artificial Sequence
  Synthetic oligonucleotide; TTT chr2 60503643 60503664 60503648 60503643 -
gctgagggcttctcagtcctgg

SEQ ID NO: 219032 - DNA, 22 bp, Artificial Sequence
  Synthetic oligonucleotide; TTG chr2 60503642 60503663 60503647 60503642 -
ctgagggcttctcagtcctggg

SEQ ID NO: 219033 - DNA, 22 bp, Artificial Sequence
  Synthetic oligonucleotide; CTG chr2 60503639 60503660 60503644 60503639 -
agggcttctcagtcctgggtag

SEQ ID NO: 219034 - DNA, 22 bp, Artificial Sequence
  Synthetic oligonucleotide; CTT chr2 60503632 60503653 60503637 60503632 -
ctcagtcctgggtaggaactgc

SEQ ID NO: 219035 - DNA, 22 bp, Artificial Sequence
  Synthetic oligonucleotide; TTC chr2 60503631 60503652 60503636 60503631 -
tcagtcctgggtaggaactgct

SEQ ID NO: 219036 - DNA, 22 bp, Artificial Sequence
  Synthetic oligonucleotide; CTC chr2 60503629 60503650 60503634 60503629 -
agtcctgggtaggaactgctgg

SEQ ID NO: 219037 - DNA, 22 bp, Artificial Sequence
  Synthetic oligonucleotide; CTG chr2 60503622 60503643 60503627 60503622 -
ggtaggaactgctgggtgtgga

SEQ ID NO: 219038 - DNA, 22 bp, Artificial Sequence
  Synthetic oligonucleotide; CTG chr2 60503611 60503632 60503616 60503611 -
ctgggtgtggaaaccaccaagg

SEQ ID NO: 219039 - DNA, 22 bp, Artificial Sequence
  Synthetic oligonucleotide; CTG chr2 60503608 60503629 60503613 60503608 -
ggtgtggaaaccaccaaggctt

SEQ ID NO: 219040 - DNA, 22 bp, Artificial Sequence
  Synthetic oligonucleotide; CTT chr2 60503586 60503607 60503591 60503586 -
tgtaagcctgaaagagccactg

SEQ ID NO: 219041 - DNA, 22 bp, Artificial Sequence
  Synthetic oligonucleotide; TTT chr2 60503585 60503606 60503590 60503585 -
gtaagcctgaaagagccactgg

SEQ ID NO: 219042 - DNA, 22 bp, Artificial Sequence
  Synthetic oligonucleotide; TTG chr2 60503584 60503605 60503589 60503584 -
taagcctgaaagagccactggt

SEQ ID NO: 219043 - DNA, 22 bp, Artificial Sequence
  Synthetic oligonucleotide; CTG chr2 60503576 60503597 60503581 60503576 -
aaagagccactggtattgggag

SEQ ID NO: 219044 - DNA, 22 bp, Artificial Sequence
  Synthetic oligonucleotide; CTG chr2 60503564 60503585 60503569 60503564 -
gtattgggagcttggtctgcac

SEQ ID NO: 219045 - DNA, 22 bp, Artificial Sequence
  Synthetic oligonucleotide; TTG chr2 60503558 60503579 60503563 60503558 -
ggagcttggtctgcactcagac

SEQ ID NO: 219046 - DNA, 22 bp, Artificial Sequence
  Synthetic oligonucleotide; CTT chr2 60503551 60503572 60503556 60503551 -
ggtctgcactcagacctgagcg

SEQ ID NO: 219047 - DNA, 22 bp, Artificial Sequence
  Synthetic oligonucleotide; TTG chr2 60503550 60503571 60503555 60503550 -
gtctgcactcagacctgagcgc

SEQ ID NO: 219048 - DNA, 22 bp, Artificial Sequence
  Synthetic oligonucleotide; CTG chr2 60503545 60503566 60503550 60503545 -
cactcagacctgagcgccacac

SEQ ID NO: 219049 - DNA, 22 bp, Artificial Sequence
  Synthetic oligonucleotide; CTC chr2 60503540 60503561 60503545 60503540 -
agacctgagcgccacacattat

SEQ ID NO: 219050 - DNA, 22 bp, Artificial Sequence
  Synthetic oligonucleotide; CTG chr2 60503533 60503554 60503538 60503533 -
agcgccacacattattttccca

SEQ ID NO: 219051 - DNA, 22 bp, Artificial Sequence
  Synthetic oligonucleotide; TTA chr2 60503519 60503540 60503524 60503519 -
ttttcccagatttgggcaatct

SEQ ID NO: 219052 - DNA, 22 bp, Artificial Sequence
  Synthetic oligonucleotide; TTT chr2 60503516 60503537 60503521 60503516 -
tcccagatttgggcaatctaat

SEQ ID NO: 219053 - DNA, 22 bp, Artificial Sequence
  Synthetic oligonucleotide; TTT chr2 60503515 60503536 60503520 60503515 -
cccagatttgggcaatctaatg

SEQ ID NO: 219054 - DNA, 22 bp, Artificial Sequence
  Synthetic oligonucleotide; TTC chr2 60503514 60503535 60503519 60503514 -
ccagatttgggcaatctaatgg

SEQ ID NO: 219055 - DNA, 22 bp, Artificial Sequence
  Synthetic oligonucleotide; TTT chr2 60503506 60503527 60503511 60503506 -
gggcaatctaatggataggagg

SEQ ID NO: 219056 - DNA, 22 bp, Artificial Sequence
  Synthetic oligonucleotide; TTG chr2 60503505 60503526 60503510 60503505 -
ggcaatctaatggataggaggg

SEQ ID NO: 219057 - DNA, 22 bp, Artificial Sequence
  Synthetic oligonucleotide; CTA chr2 60503496 60503517 60503501 60503496 -
atggataggagggagggttatg

SEQ ID NO: 219058 - DNA, 22 bp, Artificial Sequence
  Synthetic oligonucleotide; TTA chr2 60503476 60503497 60503481 60503476 -
tgccccatctgtgaataggtgg

SEQ ID NO: 219059 - DNA, 22 bp, Artificial Sequence
  Synthetic oligonucleotide; CTG chr2 60503465 60503486 60503470 60503465 -
tgaataggtggaggagagggtc

SEQ ID NO: 219060 - DNA, 22 bp, Artificial Sequence
  Synthetic oligonucleotide; TTG chr2 60503431 60503452 60503436 60503431 -
ttgcagtgctcagaggaagcaa

SEQ ID NO: 219061 - DNA, 22 bp, Artificial Sequence
  Synthetic oligonucleotide; TTG chr2 60503428 60503449 60503433 60503428 -
cagtgctcagaggaagcaatag

SEQ ID NO: 219062 - DNA, 22 bp, Artificial Sequence
  Synthetic oligonucleotide; CTC chr2 60503420 60503441 60503425 60503420 -
agaggaagcaatagcctactgt

SEQ ID NO: 219063 - DNA, 22 bp, Artificial Sequence
  Synthetic oligonucleotide; CTA chr2 60503402 60503423 60503407 60503402 -
ctgtcttccagggacatgtctg

SEQ ID NO: 219064 - DNA, 22 bp, Artificial Sequence
  Synthetic oligonucleotide; CTG chr2 60503399 60503420 60503404 60503399 -
tcttccagggacatgtctggct

SEQ ID NO: 219065 - DNA, 22 bp, Artificial Sequence
  Synthetic oligonucleotide; CTT chr2 60503395 60503416 60503400 60503395 -
ccagggacatgtctggctcctg

SEQ ID NO: 219066 - DNA, 22 bp, Artificial Sequence
  Synthetic oligonucleotide; TTC chr2 60503394 60503415 60503399 60503394 -
cagggacatgtctggctcctgg

SEQ ID NO: 219067 - DNA, 22 bp, Artificial Sequence
  Synthetic oligonucleotide; CTG chr2 60503380 60503401 60503385 60503380 -
gctcctggaatgcctgtccagg

SEQ ID NO: 219068 - DNA, 22 bp, Artificial Sequence
  Synthetic oligonucleotide; CTC chr2 60503376 60503397 60503381 60503376 -
ctggaatgcctgtccaggctgc

SEQ ID NO: 219069 - DNA, 22 bp, Artificial Sequence
  Synthetic oligonucleotide; CTG chr2 60503373 60503394 60503378 60503373 -
gaatgcctgtccaggctgcggt

SEQ ID NO: 219070 - DNA, 22 bp, Artificial Sequence
  Synthetic oligonucleotide; CTG chr2 60503364 60503385 60503369 60503364 -
tccaggctgcggtgggtggcat

SEQ ID NO: 219071 - DNA, 22 bp, Artificial Sequence
  Synthetic oligonucleotide; CTG chr2 60503355 60503376 60503360 60503355 -
cggtgggtggcatgggtaaggg

SEQ ID NO: 219072 - DNA, 22 bp, Artificial Sequence
  Synthetic oligonucleotide; TTT chr2 60503330 60503351 60503335 60503330 -
ttaataaaaagtcacaatgcct

SEQ ID NO: 219073 - DNA, 22 bp, Artificial Sequence
  Synthetic oligonucleotide; TTT chr2 60503329 60503350 60503334 60503329 -
taataaaaagtcacaatgcctg

SEQ ID NO: 219074 - DNA, 22 bp, Artificial Sequence
  Synthetic oligonucleotide; TTT chr2 60503328 60503349 60503333 60503328 -
aataaaaagtcacaatgcctgg

SEQ ID NO: 219075 - DNA, 22 bp, Artificial Sequence
  Synthetic oligonucleotide; TTA chr2 60503327 60503348 60503332 60503327 -
ataaaaagtcacaatgcctgga

SEQ ID NO: 219076 - DNA, 22 bp, Artificial Sequence
  Synthetic oligonucleotide; CTG chr2 60503307 60503328 60503312 60503307 -
gagaagtgaggctccttgcagc

SEQ ID NO: 219077 - DNA, 22 bp, Artificial Sequence
  Synthetic oligonucleotide; CTC chr2 60503293 60503314 60503298 60503293 -
cttgcagccacctgccttttct

SEQ ID NO: 219078 - DNA, 22 bp, Artificial Sequence
  Synthetic oligonucleotide; CTT chr2 60503290 60503311 60503295 60503290 -
gcagccacctgccttttctgtc

SEQ ID NO: 219079 - DNA, 22 bp, Artificial Sequence
  Synthetic oligonucleotide; TTG chr2 60503289 60503310 60503294 60503289 -
cagccacctgccttttctgtct

SEQ ID NO: 219080 - DNA, 22 bp, Artificial Sequence
  Synthetic oligonucleotide; CTG chr2 60503279 60503300 60503284 60503279 -
ccttttctgtcttgggtctcct

SEQ ID NO: 219081 - DNA, 22 bp, Artificial Sequence
  Synthetic oligonucleotide; CTT chr2 60503275 60503296 60503280 60503275 -
ttctgtcttgggtctcctggtt

SEQ ID NO: 219082 - DNA, 22 bp, Artificial Sequence
  Synthetic oligonucleotide; TTT chr2 60503274 60503295 60503279 60503274 -
tctgtcttgggtctcctggttg

SEQ ID NO: 219083 - DNA, 22 bp, Artificial Sequence
  Synthetic oligonucleotide; TTT chr2 60503273 60503294 60503278 60503273 -
ctgtcttgggtctcctggttgg

SEQ ID NO: 219084 - DNA, 22 bp, Artificial Sequence
  Synthetic oligonucleotide; TTC chr2 60503272 60503293 60503277 60503272 -
tgtcttgggtctcctggttgga

SEQ ID NO: 219085 - DNA, 22 bp, Artificial Sequence
  Synthetic oligonucleotide; CTG chr2 60503270 60503291 60503275 60503270 -
tcttgggtctcctggttggacc

SEQ ID NO: 219086 - DNA, 22 bp, Artificial Sequence
  Synthetic oligonucleotide; CTT chr2 60503266 60503287 60503271 60503266 -
gggtctcctggttggaccccat

SEQ ID NO: 219087 - DNA, 22 bp, Artificial Sequence
  Synthetic oligonucleotide; TTG chr2 60503265 60503286 60503270 60503265 -
ggtctcctggttggaccccatt

SEQ ID NO: 219088 - DNA, 22 bp, Artificial Sequence
  Synthetic oligonucleotide; CTC chr2 60503259 60503280 60503264 60503259 -
ctggttggaccccattctggct

SEQ ID NO: 219089 - DNA, 22 bp, Artificial Sequence
  Synthetic oligonucleotide; CTG chr2 60503256 60503277 60503261 60503256 -
gttggaccccattctggctttc

SEQ ID NO: 219090 - DNA, 22 bp, Artificial Sequence
  Synthetic oligonucleotide; TTG chr2 60503252 60503273 60503257 60503252 -
gaccccattctggctttccacc

SEQ ID NO: 219091 - DNA, 22 bp, Artificial Sequence
  Synthetic oligonucleotide; TTC chr2 60503242 60503263 60503247 60503242 -
tggctttccacctggtcagagc

SEQ ID NO: 219092 - DNA, 22 bp, Artificial Sequence
  Synthetic oligonucleotide; CTG chr2 60503240 60503261 60503245 60503240 -
gctttccacctggtcagagcct

SEQ ID NO: 219093 - DNA, 22 bp, Artificial Sequence
  Synthetic oligonucleotide; CTT chr2 60503236 60503257 60503241 60503236 -
tccacctggtcagagcctcctg

SEQ ID NO: 219094 - DNA, 22 bp, Artificial Sequence
  Synthetic oligonucleotide; TTT chr2 60503235 60503256 60503240 60503235 -
ccacctggtcagagcctcctga

SEQ ID NO: 219095 - DNA, 22 bp, Artificial Sequence
  Synthetic oligonucleotide; TTC chr2 60503234 60503255 60503239 60503234 -
cacctggtcagagcctcctgag

SEQ ID NO: 219096 - DNA, 22 bp, Artificial Sequence
  Synthetic oligonucleotide; CTG chr2 60503228 60503249 60503233 60503228 -
gtcagagcctcctgaggctgca

SEQ ID NO: 219097 - DNA, 22 bp, Artificial Sequence
  Synthetic oligonucleotide; CTC chr2 60503217 60503238 60503222 60503217 -
ctgaggctgcagaatggggcta

SEQ ID NO: 219098 - DNA, 22 bp, Artificial Sequence
  Synthetic oligonucleotide; CTG chr2 60503214 60503235 60503219 60503214 -
aggctgcagaatggggctaaca

SEQ ID NO: 219099 - DNA, 22 bp, Artificial Sequence
  Synthetic oligonucleotide; CTG chr2 60503208 60503229 60503213 60503208 -
cagaatggggctaacatgatca

SEQ ID NO: 219100 - DNA, 22 bp, Artificial Sequence
  Synthetic oligonucleotide; CTA chr2 60503195 60503216 60503200 60503195 -
acatgatcaagggtgatgtggc

SEQ ID NO: 219101 - DNA, 22 bp, Artificial Sequence
  Synthetic oligonucleotide; CTT chr2 60503171 60503192 60503176 60503171 -
ctccatcttgggactaggagtg

SEQ ID NO: 219102 - DNA, 22 bp, Artificial Sequence
  Synthetic oligonucleotide; TTC chr2 60503170 60503191 60503175 60503170 -
tccatcttgggactaggagtga

SEQ ID NO: 219103 - DNA, 22 bp, Artificial Sequence
  Synthetic oligonucleotide; CTC chr2 60503168 60503189 60503173 60503168 -
catcttgggactaggagtgacc

SEQ ID NO: 219104 - DNA, 22 bp, Artificial Sequence
  Synthetic oligonucleotide; CTT chr2 60503162 60503183 60503167 60503162 -
gggactaggagtgaccaggttt

SEQ ID NO: 219105 - DNA, 22 bp, Artificial Sequence
  Synthetic oligonucleotide; TTG chr2 60503161 60503182 60503166 60503161 -
ggactaggagtgaccaggttta

SEQ ID NO: 219106 - DNA, 22 bp, Artificial Sequence
  Synthetic oligonucleotide; CTA chr2 60503155 60503176 60503160 60503155 -
ggagtgaccaggtttagagaag

SEQ ID NO: 219107 - DNA, 22 bp, Artificial Sequence
  Synthetic oligonucleotide; TTT chr2 60503140 60503161 60503145 60503140 -
agagaaggtggactcattcctg

SEQ ID NO: 219108 - DNA, 22 bp, Artificial Sequence
  Synthetic oligonucleotide; TTA chr2 60503139 60503160 60503144 60503139 -
gagaaggtggactcattcctgc

SEQ ID NO: 219109 - DNA, 22 bp, Artificial Sequence
  Synthetic oligonucleotide; CTC chr2 60503125 60503146 60503130 60503125 -
attcctgctcccattgccagga

SEQ ID NO: 219110 - DNA, 22 bp, Artificial Sequence
  Synthetic oligonucleotide; TTC chr2 60503121 60503142 60503126 60503121 -
ctgctcccattgccaggacaaa

SEQ ID NO: 219111 - DNA, 22 bp, Artificial Sequence
  Synthetic oligonucleotide; CTG chr2 60503118 60503139 60503123 60503118 -
ctcccattgccaggacaaatgc

SEQ ID NO: 219112 - DNA, 22 bp, Artificial Sequence
  Synthetic oligonucleotide; CTC chr2 60503115 60503136 60503120 60503115 -
ccattgccaggacaaatgcaga

SEQ ID NO: 219113 - DNA, 22 bp, Artificial Sequence
  Synthetic oligonucleotide; TTG chr2 60503109 60503130 60503114 60503109 -
ccaggacaaatgcagagtggat

SEQ ID NO: 219114 - DNA, 22 bp, Artificial Sequence
  Synthetic oligonucleotide; CTG chr2 60503084 60503105 60503089 60503084 -
ggtctgtcccttccacacagac

SEQ ID NO: 219115 - DNA, 22 bp, Artificial Sequence
  Synthetic oligonucleotide; CTG chr2 60503078 60503099 60503083 60503078 -
tcccttccacacagacaccttc

SEQ ID NO: 219116 - DNA, 22 bp, Artificial Sequence
  Synthetic oligonucleotide; CTT chr2 60503072 60503093 60503077 60503072 -
ccacacagacaccttcatttca

SEQ ID NO: 219117 - DNA, 22 bp, Artificial Sequence
  Synthetic oligonucleotide; TTC chr2 60503071 60503092 60503076 60503071 -
cacacagacaccttcatttcaa

SEQ ID NO: 219118 - DNA, 22 bp, Artificial Sequence
  Synthetic oligonucleotide; CTT chr2 60503057 60503078 60503062 60503057 -
catttcaacacattccgtgtgt

SEQ ID NO: 219119 - DNA, 22 bp, Artificial Sequence
  Synthetic oligonucleotide; TTC chr2 60503056 60503077 60503061 60503056 -
atttcaacacattccgtgtgta

SEQ ID NO: 219120 - DNA, 22 bp, Artificial Sequence
  Synthetic oligonucleotide; TTT chr2 60503052 60503073 60503057 60503052 -
caacacattccgtgtgtattaa

SEQ ID NO: 219121 - DNA, 22 bp, Artificial Sequence
  Synthetic oligonucleotide; TTC chr2 60503051 60503072 60503056 60503051 -
aacacattccgtgtgtattaag

SEQ ID NO: 219122 - DNA, 22 bp, Artificial Sequence
  Synthetic oligonucleotide; TTC chr2 60503042 60503063 60503047 60503042 -
cgtgtgtattaagatgacagac

SEQ ID NO: 219123 - DNA, 22 bp, Artificial Sequence
  Synthetic oligonucleotide; TTA chr2 60503031 60503052 60503036 60503031 -
agatgacagacacgttggtttt

SEQ ID NO: 219124 - DNA, 22 bp, Artificial Sequence
  Synthetic oligonucleotide; TTG chr2 60503014 60503035 60503019 60503014 -
gttttgctccaagccagtagcc

SEQ ID NO: 219125 - DNA, 22 bp, Artificial Sequence
  Synthetic oligonucleotide; TTT chr2 60503010 60503031 60503015 60503010 -
tgctccaagccagtagccatcc

SEQ ID NO: 219126 - DNA, 22 bp, Artificial Sequence
  Synthetic oligonucleotide; TTT chr2 60503009 60503030 60503014 60503009 -
gctccaagccagtagccatccc

SEQ ID NO: 219127 - DNA, 22 bp, Artificial Sequence
  Synthetic oligonucleotide; TTG chr2 60503008 60503029 60503013 60503008 -
ctccaagccagtagccatcccc

SEQ ID NO: 219128 - DNA, 22 bp, Artificial Sequence
  Synthetic oligonucleotide; CTC chr2 60503005 60503026 60503010 60503005 -
caagccagtagccatcccccta

SEQ ID NO: 219129 - DNA, 22 bp, Artificial Sequence
  Synthetic oligonucleotide; CTA chr2 60502983 60503004 60502988 60502983 -
gacagcccaggccttaaaagac

SEQ ID NO: 219130 - DNA, 22 bp, Artificial Sequence
  Synthetic oligonucleotide; CTT chr2 60502968 60502989 60502973 60502968 -
aaaagacaaggaggtgtttgga

SEQ ID NO: 219131 - DNA, 22 bp, Artificial Sequence
  Synthetic oligonucleotide; TTA chr2 60502967 60502988 60502972 60502967 -
aaagacaaggaggtgtttggac

SEQ ID NO: 219132 - DNA, 22 bp, Artificial Sequence
  Synthetic oligonucleotide; TTT chr2 60502949 60502970 60502954 60502949 -
ggacaagagcaagaaagaagtc

SEQ ID NO: 219133 - DNA, 22 bp, Artificial Sequence
  Synthetic oligonucleotide; TTG chr2 60502948 60502969 60502953 60502948 -
gacaagagcaagaaagaagtct

SEQ ID NO: 219134 - DNA, 22 bp, Artificial Sequence
  Synthetic oligonucleotide; CTG chr2 60502925 60502946 60502930 60502925 -
gctgtgtcttctgggagcccca

SEQ ID NO: 219135 - DNA, 22 bp, Artificial Sequence
  Synthetic oligonucleotide; CTG chr2 60502921 60502942 60502926 60502921 -
tgtcttctgggagccccagaca

SEQ ID NO: 219136 - DNA, 22 bp, Artificial Sequence
  Synthetic oligonucleotide; CTT chr2 60502915 60502936 60502920 60502915 -
ctgggagccccagacagaccag

SEQ ID NO: 219137 - DNA, 22 bp, Artificial Sequence
  Synthetic oligonucleotide; TTC chr2 60502914 60502935 60502919 60502914 -
tgggagccccagacagaccagt

SEQ ID NO: 219138 - DNA, 22 bp, Artificial Sequence
  Synthetic oligonucleotide; CTG chr2 60502912 60502933 60502917 60502912 -
ggagccccagacagaccagtgt

SEQ ID NO: 219139 - DNA, 22 bp, Artificial Sequence
  Synthetic oligonucleotide; TTC chr2 60502888 60502909 60502893 60502888 -
tttctcactggttcactccttc

SEQ ID NO: 219140 - DNA, 22 bp, Artificial Sequence
  Synthetic oligonucleotide; CTT chr2 60502886 60502907 60502891 60502886 -
tctcactggttcactccttccc

SEQ ID NO: 219141 - DNA, 22 bp, Artificial Sequence
  Synthetic oligonucleotide; TTT chr2 60502885 60502906 60502890 60502885 -
ctcactggttcactccttcccc

SEQ ID NO: 219142 - DNA, 22 bp, Artificial Sequence
  Synthetic oligonucleotide; TTC chr2 60502884 60502905 60502889 60502884 -
tcactggttcactccttcccca

SEQ ID NO: 219143 - DNA, 22 bp, Artificial Sequence
  Synthetic oligonucleotide; CTC chr2 60502882 60502903 60502887 60502882 -
actggttcactccttccccagc

SEQ ID NO: 219144 - DNA, 22 bp, Artificial Sequence
  Synthetic oligonucleotide; CTG chr2 60502878 60502899 60502883 60502878 -
gttcactccttccccagctcat

SEQ ID NO: 219145 - DNA, 22 bp, Artificial Sequence
  Synthetic oligonucleotide; TTC chr2 60502874 60502895 60502879 60502874 -
actccttccccagctcatttta

SEQ ID NO: 219146 - DNA, 22 bp, Artificial Sequence
  Synthetic oligonucleotide; CTC chr2 60502870 60502891 60502875 60502870 -
cttccccagctcattttaccca

SEQ ID NO: 219147 - DNA, 22 bp, Artificial Sequence
  Synthetic oligonucleotide; CTT chr2 60502867 60502888 60502872 60502867 -
ccccagctcattttacccactc

SEQ ID NO: 219148 - DNA, 22 bp, Artificial Sequence
  Synthetic oligonucleotide; TTC chr2 60502866 60502887 60502871 60502866 -
cccagctcattttacccactcg

SEQ ID NO: 219149 - DNA, 22 bp, Artificial Sequence
  Synthetic oligonucleotide; CTC chr2 60502858 60502879 60502863 60502858 -
attttacccactcgagacttga

SEQ ID NO: 219150 - DNA, 22 bp, Artificial Sequence
  Synthetic oligonucleotide; TTT chr2 60502854 60502875 60502859 60502854 -
tacccactcgagacttgattct

SEQ ID NO: 219151 - DNA, 22 bp, Artificial Sequence
  Synthetic oligonucleotide; TTT chr2 60502853 60502874 60502858 60502853 -
acccactcgagacttgattctc

SEQ ID NO: 219152 - DNA, 22 bp, Artificial Sequence
  Synthetic oligonucleotide; TTA chr2 60502852 60502873 60502857 60502852 -
cccactcgagacttgattctct

SEQ ID NO: 219153 - DNA, 22 bp, Artificial Sequence
  Synthetic oligonucleotide; CTC chr2 60502845 60502866 60502850 60502845 -
gagacttgattctcttagagat

SEQ ID NO: 219154 - DNA, 22 bp, Artificial Sequence
  Synthetic oligonucleotide; CTT chr2 60502838 60502859 60502843 60502838 -
gattctcttagagattaagtac

SEQ ID NO: 219155 - DNA, 22 bp, Artificial Sequence
  Synthetic oligonucleotide; TTG chr2 60502837 60502858 60502842 60502837 -
attctcttagagattaagtacc

SEQ ID NO: 219156 - DNA, 22 bp, Artificial Sequence
  Synthetic oligonucleotide; TTC chr2 60502833 60502854 60502838 60502833 -
tcttagagattaagtacctccc

SEQ ID NO: 219157 - DNA, 22 bp, Artificial Sequence
  Synthetic oligonucleotide; CTC chr2 60502831 60502852 60502836 60502831 -
ttagagattaagtacctcccct

SEQ ID NO: 219158 - DNA, 22 bp, Artificial Sequence
  Synthetic oligonucleotide; CTT chr2 60502829 60502850 60502834 60502829 -
agagattaagtacctcccctgg

SEQ ID NO: 219159 - DNA, 22 bp, Artificial Sequence
  Synthetic oligonucleotide; TTA chr2 60502828 60502849 60502833 60502828 -
gagattaagtacctcccctggt

SEQ ID NO: 219160 - DNA, 22 bp, Artificial Sequence
  Synthetic oligonucleotide; TTA chr2 60502821 60502842 60502826 60502821 -
agtacctcccctggtcacatag

SEQ ID NO: 219161 - DNA, 22 bp, Artificial Sequence
  Synthetic oligonucleotide; CTC chr2 60502813 60502834 60502818 60502813 -
ccctggtcacatagtttctggg

SEQ ID NO: 219162 - DNA, 22 bp, Artificial Sequence
  Synthetic oligonucleotide; CTG chr2 60502808 60502829 60502813 60502808 -
gtcacatagtttctgggtgaca

SEQ ID NO: 219163 - DNA, 22 bp, Artificial Sequence
  Synthetic oligonucleotide; TTT chr2 60502796 60502817 60502801 60502796 -
ctgggtgacaggactagaattt

SEQ ID NO: 219164 - DNA, 22 bp, Artificial Sequence
  Synthetic oligonucleotide; TTC chr2 60502795 60502816 60502800 60502795 -
tgggtgacaggactagaattta

SEQ ID NO: 219165 - DNA, 22 bp, Artificial Sequence
  Synthetic oligonucleotide; CTG chr2 60502793 60502814 60502798 60502793 -
ggtgacaggactagaatttatt

SEQ ID NO: 219166 - DNA, 22 bp, Artificial Sequence
  Synthetic oligonucleotide; CTA chr2 60502780 60502801 60502785 60502780 -
gaatttatttcttttgatcacc

SEQ ID NO: 219167 - DNA, 22 bp, Artificial Sequence
  Synthetic oligonucleotide; TTT chr2 60502774 60502795 60502779 60502774 -
atttcttttgatcaccaattga

SEQ ID NO: 219168 - DNA, 22 bp, Artificial Sequence
  Synthetic oligonucleotide; TTA chr2 60502773 60502794 60502778 60502773 -
tttcttttgatcaccaattgag

SEQ ID NO: 219169 - DNA, 22 bp, Artificial Sequence
  Synthetic oligonucleotide; TTT chr2 60502770 60502791 60502775 60502770 -
cttttgatcaccaattgagtgc

SEQ ID NO: 219170 - DNA, 22 bp, Artificial Sequence
  Synthetic oligonucleotide; TTC chr2 60502769 60502790 60502774 60502769 -
ttttgatcaccaattgagtgct

SEQ ID NO: 219171 - DNA, 22 bp, Artificial Sequence
  Synthetic oligonucleotide; CTT chr2 60502767 60502788 60502772 60502767 -
ttgatcaccaattgagtgctct

SEQ ID NO: 219172 - DNA, 22 bp, Artificial Sequence
  Synthetic oligonucleotide; TTT chr2 60502766 60502787 60502771 60502766 -
tgatcaccaattgagtgctctt

SEQ ID NO: 219173 - DNA, 22 bp, Artificial Sequence
  Synthetic oligonucleotide; TTT chr2 60502765 60502786 60502770 60502765 -
gatcaccaattgagtgctcttt

SEQ ID NO: 219174 - DNA, 22 bp, Artificial Sequence
  Synthetic oligonucleotide; TTG chr2 60502764 60502785 60502769 60502764 -
atcaccaattgagtgctctttc

SEQ ID NO: 219175 - DNA, 22 bp, Artificial Sequence
  Synthetic oligonucleotide; TTG chr2 60502753 60502774 60502758 60502753 -
agtgctctttctgctctactgt

SEQ ID NO: 219176 - DNA, 22 bp, Artificial Sequence
  Synthetic oligonucleotide; CTC chr2 60502746 60502767 60502751 60502746 -
tttctgctctactgtgctacca

SEQ ID NO: 219177 - DNA, 22 bp, Artificial Sequence
  Synthetic oligonucleotide; CTT chr2 60502744 60502765 60502749 60502744 -
tctgctctactgtgctaccatg

SEQ ID NO: 219178 - DNA, 22 bp, Artificial Sequence
  Synthetic oligonucleotide; TTT chr2 60502743 60502764 60502748 60502743 -
ctgctctactgtgctaccatga

SEQ ID NO: 219179 - DNA, 22 bp, Artificial Sequence
  Synthetic oligonucleotide; TTC chr2 60502742 60502763 60502747 60502742 -
tgctctactgtgctaccatgat

SEQ ID NO: 219180 - DNA, 22 bp, Artificial Sequence
  Synthetic oligonucleotide; CTG chr2 60502740 60502761 60502745 60502740 -
ctctactgtgctaccatgatca

SEQ ID NO: 219181 - DNA, 22 bp, Artificial Sequence
  Synthetic oligonucleotide; CTC chr2 60502737 60502758 60502742 60502737 -
tactgtgctaccatgatcagag

SEQ ID NO: 219182 - DNA, 22 bp, Artificial Sequence
  Synthetic oligonucleotide; CTA chr2 60502735 60502756 60502740 60502735 -
ctgtgctaccatgatcagaggt

SEQ ID NO: 219183 - DNA, 22 bp, Artificial Sequence
  Synthetic oligonucleotide; CTG chr2 60502732 60502753 60502737 60502732 -
tgctaccatgatcagaggtaaa

SEQ ID NO: 219184 - DNA, 22 bp, Artificial Sequence
  Synthetic oligonucleotide; CTA chr2 60502727 60502748 60502732 60502727 -
ccatgatcagaggtaaatttgt

SEQ ID NO: 219185 - DNA, 22 bp, Artificial Sequence
  Synthetic oligonucleotide; TTT chr2 60502707 60502728 60502712 60502707 -
gtttttctctgatgatgattga

SEQ ID NO: 219186 - DNA, 22 bp, Artificial Sequence
  Synthetic oligonucleotide; TTG chr2 60502706 60502727 60502711 60502706 -
tttttctctgatgatgattgaa

SEQ ID NO: 219187 - DNA, 22 bp, Artificial Sequence
  Synthetic oligonucleotide; TTT chr2 60502703 60502724 60502708 60502703 -
ttctctgatgatgattgaaaac

SEQ ID NO: 219188 - DNA, 22 bp, Artificial Sequence
  Synthetic oligonucleotide; TTT chr2 60502702 60502723 60502707 60502702 -
tctctgatgatgattgaaaaca

SEQ ID NO: 219189 - DNA, 22 bp, Artificial Sequence
  Synthetic oligonucleotide; TTT chr2 60502701 60502722 60502706 60502701 -
ctctgatgatgattgaaaacag

SEQ ID NO: 219190 - DNA, 22 bp, Artificial Sequence
  Synthetic oligonucleotide; TTC chr2 60502700 60502721 60502705 60502700 -
tctgatgatgattgaaaacagt

SEQ ID NO: 219191 - DNA, 22 bp, Artificial Sequence
  Synthetic oligonucleotide; CTC chr2 60502698 60502719 60502703 60502698 -
tgatgatgattgaaaacagttt

SEQ ID NO: 219192 - DNA, 22 bp, Artificial Sequence
  Synthetic oligonucleotide; CTG chr2 60502696 60502717 60502701 60502696 -
atgatgattgaaaacagtttta

SEQ ID NO: 219193 - DNA, 22 bp, Artificial Sequence
  Synthetic oligonucleotide; TTG chr2 60502686 60502707 60502691 60502686 -
aaaacagttttattaacatatc

SEQ ID NO: 219194 - DNA, 22 bp, Artificial Sequence
  Synthetic oligonucleotide; TTT chr2 60502676 60502697 60502681 60502676 -
tattaacatatcaagaacatta

SEQ ID NO: 219195 - DNA, 22 bp, Artificial Sequence
  Synthetic oligonucleotide; TTT chr2 60502675 60502696 60502680 60502675 -
attaacatatcaagaacattac

SEQ ID NO: 219196 - DNA, 22 bp, Artificial Sequence
  Synthetic oligonucleotide; TTA chr2 60502674 60502695 60502679 60502674 -
ttaacatatcaagaacattaca

SEQ ID NO: 219197 - DNA, 22 bp, Artificial Sequence
  Synthetic oligonucleotide; TTA chr2 60502671 60502692 60502676 60502671 -
acatatcaagaacattacaaca

SEQ ID NO: 219198 - DNA, 22 bp, Artificial Sequence
  Synthetic oligonucleotide; TTA chr2 60502654 60502675 60502659 60502654 -
caacacaaagagtttctggttt

SEQ ID NO: 219199 - DNA, 22 bp, Artificial Sequence
  Synthetic oligonucleotide; TTT chr2 60502639 60502660 60502644 60502639 -
ctggtttaaaaaatctcttttc

SEQ ID NO: 219200 - DNA, 22 bp, Artificial Sequence
  Synthetic oligonucleotide; TTC chr2 60502638 60502659 60502643 60502638 -
tggtttaaaaaatctcttttca

SEQ ID NO: 219201 - DNA, 22 bp, Artificial Sequence
  Synthetic oligonucleotide; CTG chr2 60502636 60502657 60502641 60502636 -
gtttaaaaaatctcttttcact

SEQ ID NO: 219202 - DNA, 22 bp, Artificial Sequence
  Synthetic oligonucleotide; TTT chr2 60502632 60502653 60502637 60502632 -
aaaaaatctcttttcactggta

SEQ ID NO: 219203 - DNA, 22 bp, Artificial Sequence
  Synthetic oligonucleotide; TTA chr2 60502631 60502652 60502636 60502631 -
aaaaatctcttttcactggtat

SEQ ID NO: 219204 - DNA, 22 bp, Artificial Sequence
  Synthetic oligonucleotide; CTC chr2 60502622 60502643 60502627 60502622 -
ttttcactggtatttcttaaat

SEQ ID NO: 219205 - DNA, 22 bp, Artificial Sequence
  Synthetic oligonucleotide; CTT chr2 60502620 60502641 60502625 60502620 -
ttcactggtatttcttaaattc

SEQ ID NO: 219206 - DNA, 22 bp, Artificial Sequence
  Synthetic oligonucleotide; TTT chr2 60502619 60502640 60502624 60502619 -
tcactggtatttcttaaattca

SEQ ID NO: 219207 - DNA, 22 bp, Artificial Sequence
  Synthetic oligonucleotide; TTT chr2 60502618 60502639 60502623 60502618 -
cactggtatttcttaaattcat

SEQ ID NO: 219208 - DNA, 22 bp, Artificial Sequence
  Synthetic oligonucleotide; TTC chr2 60502617 60502638 60502622 60502617 -
actggtatttcttaaattcata

SEQ ID NO: 219209 - DNA, 22 bp, Artificial Sequence
  Synthetic oligonucleotide; CTG chr2 60502613 60502634 60502618 60502613 -
gtatttcttaaattcatatttt

SEQ ID NO: 219210 - DNA, 22 bp, Artificial Sequence
  Synthetic oligonucleotide; TTT chr2 60502607 60502628 60502612 60502607 -
cttaaattcatattttaatatt

SEQ ID NO: 219211 - DNA, 22 bp, Artificial Sequence
  Synthetic oligonucleotide; TTC chr2 60502606 60502627 60502611 60502606 -
ttaaattcatattttaatatta

SEQ ID NO: 219212 - DNA, 22 bp, Artificial Sequence
  Synthetic oligonucleotide; CTT chr2 60502604 60502625 60502609 60502604 -
aaattcatattttaatattaga

SEQ ID NO: 219213 - DNA, 22 bp, Artificial Sequence
  Synthetic oligonucleotide; TTA chr2 60502603 60502624 60502608 60502603 -
aattcatattttaatattagaa

SEQ ID NO: 219214 - DNA, 22 bp, Artificial Sequence
  Synthetic oligonucleotide; TTC chr2 60502598 60502619 60502603 60502598 -
atattttaatattagaaagcat

SEQ ID NO: 219215 - DNA, 22 bp, Artificial Sequence
  Synthetic oligonucleotide; TTT chr2 60502592 60502613 60502597 60502592 -
taatattagaaagcatgggatt

SEQ ID NO: 219216 - DNA, 22 bp, Artificial Sequence
  Synthetic oligonucleotide; TTT chr2 60502591 60502612 60502596 60502591 -
aatattagaaagcatgggattg

SEQ ID NO: 219217 - DNA, 22 bp, Artificial Sequence
  Synthetic oligonucleotide; TTA chr2 60502590 60502611 60502595 60502590 -
atattagaaagcatgggattgg

SEQ ID NO: 219218 - DNA, 22 bp, Artificial Sequence
  Synthetic oligonucleotide; TTA chr2 60502584 60502605 60502589 60502584 -
gaaagcatgggattgggtgtga

SEQ ID NO: 219219 - DNA, 22 bp, Artificial Sequence
  Synthetic oligonucleotide; TTG chr2 60502569 60502590 60502574 60502569 -
ggtgtgaacactgcttttggat

SEQ ID NO: 219220 - DNA, 22 bp, Artificial Sequence
  Synthetic oligonucleotide; CTG chr2 60502556 60502577 60502561 60502556 -
cttttggatgttggaggaagat

SEQ ID NO: 219221 - DNA, 22 bp, Artificial Sequence
  Synthetic oligonucleotide; CTT chr2 60502553 60502574 60502558 60502553 -
ttggatgttggaggaagataag

SEQ ID NO: 219222 - DNA, 22 bp, Artificial Sequence
  Synthetic oligonucleotide; TTT chr2 60502552 60502573 60502557 60502552 -
tggatgttggaggaagataaga

SEQ ID NO: 219223 - DNA, 22 bp, Artificial Sequence
  Synthetic oligonucleotide; TTT chr2 60502551 60502572 60502556 60502551 -
ggatgttggaggaagataagag

SEQ ID NO: 219224 - DNA, 22 bp, Artificial Sequence
  Synthetic oligonucleotide; TTG chr2 60502550 60502571 60502555 60502550 -
gatgttggaggaagataagaga

SEQ ID NO: 219225 - DNA, 22 bp, Artificial Sequence
  Synthetic oligonucleotide; TTG chr2 60502543 60502564 60502548 60502543 -
gaggaagataagagaaggaagc

SEQ ID NO: 219226 - DNA, 22 bp, Artificial Sequence
  Synthetic oligonucleotide; CTG chr2 60502519 60502540 60502524 60502519 -
gctctttctttaggagcaatac

SEQ ID NO: 219227 - DNA, 22 bp, Artificial Sequence
  Synthetic oligonucleotide; CTC chr2 60502515 60502536 60502520 60502515 -
tttctttaggagcaatacctga

SEQ ID NO: 219228 - DNA, 22 bp, Artificial Sequence
  Synthetic oligonucleotide; CTT chr2 60502513 60502534 60502518 60502513 -
tctttaggagcaatacctgaga

SEQ ID NO: 219229 - DNA, 22 bp, Artificial Sequence
  Synthetic oligonucleotide; TTT chr2 60502512 60502533 60502517 60502512 -
ctttaggagcaatacctgagat

SEQ ID NO: 219230 - DNA, 22 bp, Artificial Sequence
  Synthetic oligonucleotide; TTC chr2 60502511 60502532 60502516 60502511 -
tttaggagcaatacctgagatc

SEQ ID NO: 219231 - DNA, 22 bp, Artificial Sequence
  Synthetic oligonucleotide; CTT chr2 60502509 60502530 60502514 60502509 -
taggagcaatacctgagatccc

SEQ ID NO: 219232 - DNA, 22 bp, Artificial Sequence
  Synthetic oligonucleotide; TTT chr2 60502508 60502529 60502513 60502508 -
aggagcaatacctgagatccca

SEQ ID NO: 219233 - DNA, 22 bp, Artificial Sequence
  Synthetic oligonucleotide; TTA chr2 60502507 60502528 60502512 60502507 -
ggagcaatacctgagatcccag

SEQ ID NO: 219234 - DNA, 22 bp, Artificial Sequence
  Synthetic oligonucleotide; CTG chr2 60502494 60502515 60502499 60502494 -
agatcccagaattgtatgtaca

SEQ ID NO: 219235 - DNA, 22 bp, Artificial Sequence
  Synthetic oligonucleotide; TTG chr2 60502480 60502501 60502485 60502480 -
tatgtacaaagtgtgtgatggc

SEQ ID NO: 219236 - DNA, 22 bp, Artificial Sequence
  Synthetic oligonucleotide; CTC chr2 60502451 60502472 60502456 60502451 -
aaatctgtgctagcgagaaacc

SEQ ID NO: 219237 - DNA, 22 bp, Artificial Sequence
  Synthetic oligonucleotide; CTG chr2 60502444 60502465 60502449 60502444 -
tgctagcgagaaaccccctgct

SEQ ID NO: 219238 - DNA, 22 bp, Artificial Sequence
  Synthetic oligonucleotide; CTA chr2 60502439 60502460 60502444 60502439 -
gcgagaaaccccctgctactct

SEQ ID NO: 219239 - DNA, 22 bp, Artificial Sequence
  Synthetic oligonucleotide; CTG chr2 60502424 60502445 60502429 60502424 -
ctactcttctgaatctgatgaa

SEQ ID NO: 219240 - DNA, 22 bp, Artificial Sequence
  Synthetic oligonucleotide; CTA chr2 60502421 60502442 60502426 60502421 -
ctcttctgaatctgatgaagaa

SEQ ID NO: 219241 - DNA, 22 bp, Artificial Sequence
  Synthetic oligonucleotide; CTC chr2 60502418 60502439 60502423 60502418 -
ttctgaatctgatgaagaagtt

SEQ ID NO: 219242 - DNA, 22 bp, Artificial Sequence
  Synthetic oligonucleotide; CTT chr2 60502416 60502437 60502421 60502416 -
ctgaatctgatgaagaagttat

SEQ ID NO: 219243 - DNA, 22 bp, Artificial Sequence
  Synthetic oligonucleotide; TTC chr2 60502415 60502436 60502420 60502415 -
tgaatctgatgaagaagttatt

SEQ ID NO: 219244 - DNA, 22 bp, Artificial Sequence
  Synthetic oligonucleotide; CTG chr2 60502413 60502434 60502418 60502413 -
aatctgatgaagaagttattct

SEQ ID NO: 219245 - DNA, 22 bp, Artificial Sequence
  Synthetic oligonucleotide; CTG chr2 60502407 60502428 60502412 60502407 -
atgaagaagttattctgtctgt

SEQ ID NO: 219246 - DNA, 22 bp, Artificial Sequence
  Synthetic oligonucleotide; TTA chr2 60502395 60502416 60502400 60502395 -
ttctgtctgtgcagttttatta

SEQ ID NO: 219247 - DNA, 22 bp, Artificial Sequence
  Synthetic oligonucleotide; TTC chr2 60502392 60502413 60502397 60502392 -
tgtctgtgcagttttattaggc

SEQ ID NO: 219248 - DNA, 22 bp, Artificial Sequence
  Synthetic oligonucleotide; CTG chr2 60502390 60502411 60502395 60502390 -
tctgtgcagttttattaggctg

SEQ ID NO: 219249 - DNA, 22 bp, Artificial Sequence
  Synthetic oligonucleotide; CTG chr2 60502386 60502407 60502391 60502386 -
tgcagttttattaggctgagac

SEQ ID NO: 219250 - DNA, 22 bp, Artificial Sequence
  Synthetic oligonucleotide; TTT chr2 60502378 60502399 60502383 60502378 -
tattaggctgagactttttccg

SEQ ID NO: 219251 - DNA, 22 bp, Artificial Sequence
  Synthetic oligonucleotide; TTT chr2 60502377 60502398 60502382 60502377 -
attaggctgagactttttccga

SEQ ID NO: 219252 - DNA, 22 bp, Artificial Sequence
  Synthetic oligonucleotide; TTA chr2 60502376 60502397 60502381 60502376 -
ttaggctgagactttttccgat

SEQ ID NO: 219253 - DNA, 22 bp, Artificial Sequence
  Synthetic oligonucleotide; TTA chr2 60502373 60502394 60502378 60502373 -
ggctgagactttttccgatggt

SEQ ID NO: 219254 - DNA, 22 bp, Artificial Sequence
  Synthetic oligonucleotide; CTG chr2 60502368 60502389 60502373 60502368 -
agactttttccgatggtttatt

SEQ ID NO: 219255 - DNA, 22 bp, Artificial Sequence
  Synthetic oligonucleotide; CTT chr2 60502362 60502383 60502367 60502362 -
tttccgatggtttatttttccg

SEQ ID NO: 219256 - DNA, 22 bp, Artificial Sequence
  Synthetic oligonucleotide; TTT chr2 60502361 60502382 60502366 60502361 -
ttccgatggtttatttttccgt

SEQ ID NO: 219257 - DNA, 22 bp, Artificial Sequence
  Synthetic oligonucleotide; TTT chr2 60502360 60502381 60502365 60502360 -
tccgatggtttatttttccgtt

SEQ ID NO: 219258 - DNA, 22 bp, Artificial Sequence
  Synthetic oligonucleotide; TTT chr2 60502359 60502380 60502364 60502359 -
ccgatggtttatttttccgttt

SEQ ID NO: 219259 - DNA, 22 bp, Artificial Sequence
  Synthetic oligonucleotide; TTC chr2 60502358 60502379 60502363 60502358 -
cgatggtttatttttccgtttg

SEQ ID NO: 219260 - DNA, 22 bp, Artificial Sequence
  Synthetic oligonucleotide; TTT chr2 60502349 60502370 60502354 60502349 -
atttttccgtttgctcacagaa

SEQ ID NO: 219261 - DNA, 22 bp, Artificial Sequence
  Synthetic oligonucleotide; TTA chr2 60502348 60502369 60502353 60502348 -
tttttccgtttgctcacagaat

SEQ ID NO: 219262 - DNA, 22 bp, Artificial Sequence
  Synthetic oligonucleotide; TTT chr2 60502345 60502366 60502350 60502345 -
ttccgtttgctcacagaatgta

SEQ ID NO: 219263 - DNA, 22 bp, Artificial Sequence
  Synthetic oligonucleotide; TTT chr2 60502344 60502365 60502349 60502344 -
tccgtttgctcacagaatgtag

SEQ ID NO: 219264 - DNA, 22 bp, Artificial Sequence
  Synthetic oligonucleotide; TTT chr2 60502343 60502364 60502348 60502343 -
ccgtttgctcacagaatgtaga

SEQ ID NO: 219265 - DNA, 22 bp, Artificial Sequence
  Synthetic oligonucleotide; TTC chr2 60502342 60502363 60502347 60502342 -
cgtttgctcacagaatgtagag

SEQ ID NO: 219266 - DNA, 22 bp, Artificial Sequence
  Synthetic oligonucleotide; TTT chr2 60502337 60502358 60502342 60502337 -
gctcacagaatgtagaggagag

SEQ ID NO: 219267 - DNA, 22 bp, Artificial Sequence
  Synthetic oligonucleotide; TTG chr2 60502336 60502357 60502341 60502336 -
ctcacagaatgtagaggagagc

SEQ ID NO: 219268 - DNA, 22 bp, Artificial Sequence
  Synthetic oligonucleotide; CTC chr2 60502333 60502354 60502338 60502333 -
acagaatgtagaggagagccag

SEQ ID NO: 219269 - DNA, 22 bp, Artificial Sequence
  Synthetic oligonucleotide; CTG chr2 60502301 60502322 60502306 60502301 -
acacgttcacactgtttaccta

SEQ ID NO: 219270 - DNA, 22 bp, Artificial Sequence
  Synthetic oligonucleotide; TTC chr2 60502293 60502314 60502298 60502293 -
acactgtttacctactccctga

SEQ ID NO: 219271 - DNA, 22 bp, Artificial Sequence
  Synthetic oligonucleotide; CTG chr2 60502287 60502308 60502292 60502287 -
tttacctactccctgactttgg

SEQ ID NO: 219272 - DNA, 22 bp, Artificial Sequence
  Synthetic oligonucleotide; TTT chr2 60502284 60502305 60502289 60502284 -
acctactccctgactttggagc

SEQ ID NO: 219273 - DNA, 22 bp, Artificial Sequence
  Synthetic oligonucleotide; TTA chr2 60502283 60502304 60502288 60502283 -
cctactccctgactttggagct

SEQ ID NO: 219274 - DNA, 22 bp, Artificial Sequence
  Synthetic oligonucleotide; CTA chr2 60502279 60502300 60502284 60502279 -
ctccctgactttggagctcagc

SEQ ID NO: 219275 - DNA, 22 bp, Artificial Sequence
  Synthetic oligonucleotide; CTC chr2 60502276 60502297 60502281 60502276 -
cctgactttggagctcagcaaa

SEQ ID NO: 219276 - DNA, 22 bp, Artificial Sequence
  Synthetic oligonucleotide; CTG chr2 60502272 60502293 60502277 60502272 -
actttggagctcagcaaatctg

SEQ ID NO: 219277 - DNA, 22 bp, Artificial Sequence
  Synthetic oligonucleotide; CTT chr2 60502268 60502289 60502273 60502268 -
tggagctcagcaaatctgctat

SEQ ID NO: 219278 - DNA, 22 bp, Artificial Sequence
  Synthetic oligonucleotide; TTT chr2 60502267 60502288 60502272 60502267 -
ggagctcagcaaatctgctatc

SEQ ID NO: 219279 - DNA, 22 bp, Artificial Sequence
  Synthetic oligonucleotide; TTG chr2 60502266 60502287 60502271 60502266 -
gagctcagcaaatctgctatcc

SEQ ID NO: 219280 - DNA, 22 bp, Artificial Sequence
  Synthetic oligonucleotide; CTC chr2 60502260 60502281 60502265 60502260 -
agcaaatctgctatccatcatt

SEQ ID NO: 219281 - DNA, 22 bp, Artificial Sequence
  Synthetic oligonucleotide; CTG chr2 60502250 60502271 60502255 60502250 -
ctatccatcattttgtttcacc

SEQ ID NO: 219282 - DNA, 22 bp, Artificial Sequence
  Synthetic oligonucleotide; CTA chr2 60502247 60502268 60502252 60502247 -
tccatcattttgtttcaccagc

SEQ ID NO: 219283 - DNA, 22 bp, Artificial Sequence
  Synthetic oligonucleotide; TTT chr2 60502237 60502258 60502242 60502237 -
tgtttcaccagcttttacaaag

SEQ ID NO: 219284 - DNA, 22 bp, Artificial Sequence
  Synthetic oligonucleotide; TTT chr2 60502236 60502257 60502241 60502236 -
gtttcaccagcttttacaaagc

SEQ ID NO: 219285 - DNA, 22 bp, Artificial Sequence
  Synthetic oligonucleotide; TTG chr2 60502235 60502256 60502240 60502235 -
tttcaccagcttttacaaagca

SEQ ID NO: 219286 - DNA, 22 bp, Artificial Sequence
  Synthetic oligonucleotide; TTT chr2 60502232 60502253 60502237 60502232 -
caccagcttttacaaagcagga

SEQ ID NO: 219287 - DNA, 22 bp, Artificial Sequence
  Synthetic oligonucleotide; TTC chr2 60502231 60502252 60502236 60502231 -
accagcttttacaaagcaggat

SEQ ID NO: 219288 - DNA, 22 bp, Artificial Sequence
  Synthetic oligonucleotide; CTT chr2 60502223 60502244 60502228 60502223 -
ttacaaagcaggatcataaact

SEQ ID NO: 219289 - DNA, 22 bp, Artificial Sequence
  Synthetic oligonucleotide; TTT chr2 60502222 60502243 60502227 60502222 -
tacaaagcaggatcataaactg

SEQ ID NO: 219290 - DNA, 22 bp, Artificial Sequence
  Synthetic oligonucleotide; TTT chr2 60502221 60502242 60502226 60502221 -
acaaagcaggatcataaactgt

SEQ ID NO: 219291 - DNA, 22 bp, Artificial Sequence
  Synthetic oligonucleotide; TTA chr2 60502220 60502241 60502225 60502220 -
caaagcaggatcataaactgta

SEQ ID NO: 219292 - DNA, 22 bp, Artificial Sequence
  Synthetic oligonucleotide; CTG chr2 60502200 60502221 60502205 60502200 -
taagctcatttggagggacctg

SEQ ID NO: 219293 - DNA, 22 bp, Artificial Sequence
  Synthetic oligonucleotide; CTC chr2 60502193 60502214 60502198 60502193 -
atttggagggacctgatctctg

SEQ ID NO: 219294 - DNA, 22 bp, Artificial Sequence
  Synthetic oligonucleotide; TTT chr2 60502189 60502210 60502194 60502189 -
ggagggacctgatctctgattg

SEQ ID NO: 219295 - DNA, 22 bp, Artificial Sequence
  Synthetic oligonucleotide; TTG chr2 60502188 60502209 60502193 60502188 -
gagggacctgatctctgattgt

SEQ ID NO: 219296 - DNA, 22 bp, Artificial Sequence
  Synthetic oligonucleotide; CTG chr2 60502178 60502199 60502183 60502178 -
atctctgattgttgctttgata

SEQ ID NO: 219297 - DNA, 22 bp, Artificial Sequence
  Synthetic oligonucleotide; CTC chr2 60502173 60502194 60502178 60502173 -
tgattgttgctttgataagtat

SEQ ID NO: 219298 - DNA, 22 bp, Artificial Sequence
  Synthetic oligonucleotide; CTG chr2 60502171 60502192 60502176 60502171 -
attgttgctttgataagtatct

SEQ ID NO: 219299 - DNA, 22 bp, Artificial Sequence
  Synthetic oligonucleotide; TTG chr2 60502167 60502188 60502172 60502167 -
ttgctttgataagtatctatac

SEQ ID NO: 219300 - DNA, 22 bp, Artificial Sequence
  Synthetic oligonucleotide; TTG chr2 60502164 60502185 60502169 60502164 -
ctttgataagtatctatacaaa

SEQ ID NO: 219301 - DNA, 22 bp, Artificial Sequence
  Synthetic oligonucleotide; CTT chr2 60502161 60502182 60502166 60502161 -
tgataagtatctatacaaatat

SEQ ID NO: 219302 - DNA, 22 bp, Artificial Sequence
  Synthetic oligonucleotide; TTT chr2 60502160 60502181 60502165 60502160 -
gataagtatctatacaaatatt

SEQ ID NO: 219303 - DNA, 22 bp, Artificial Sequence
  Synthetic oligonucleotide; TTG chr2 60502159 60502180 60502164 60502159 -
ataagtatctatacaaatattc

SEQ ID NO: 219304 - DNA, 22 bp, Artificial Sequence
  Synthetic oligonucleotide; CTA chr2 60502148 60502169 60502153 60502148 -
tacaaatattcatatcattctg

SEQ ID NO: 219305 - DNA, 22 bp, Artificial Sequence
  Synthetic oligonucleotide; TTC chr2 60502137 60502158 60502142 60502137 -
atatcattctgatagtcttgag

SEQ ID NO: 219306 - DNA, 22 bp, Artificial Sequence
  Synthetic oligonucleotide; TTC chr2 60502128 60502149 60502133 60502128 -
tgatagtcttgagttgcattgt

SEQ ID NO: 219307 - DNA, 22 bp, Artificial Sequence
  Synthetic oligonucleotide; CTG chr2 60502126 60502147 60502131 60502126 -
atagtcttgagttgcattgtta

SEQ ID NO: 219308 - DNA, 22 bp, Artificial Sequence
  Synthetic oligonucleotide; CTT chr2 60502118 60502139 60502123 60502118 -
gagttgcattgttacaacatgc

SEQ ID NO: 219309 - DNA, 22 bp, Artificial Sequence
  Synthetic oligonucleotide; TTG chr2 60502117 60502138 60502122 60502117 -
agttgcattgttacaacatgca

SEQ ID NO: 219310 - DNA, 22 bp, Artificial Sequence
  Synthetic oligonucleotide; TTG chr2 60502112 60502133 60502117 60502112 -
cattgttacaacatgcaaacct

SEQ ID NO: 219311 - DNA, 22 bp, Artificial Sequence
  Synthetic oligonucleotide; TTG chr2 60502107 60502128 60502112 60502107 -
ttacaacatgcaaacctctcag

SEQ ID NO: 219312 - DNA, 22 bp, Artificial Sequence
  Synthetic oligonucleotide; TTA chr2 60502104 60502125 60502109 60502104 -
caacatgcaaacctctcagttt

SEQ ID NO: 219313 - DNA, 22 bp, Artificial Sequence
  Synthetic oligonucleotide; CTC chr2 60502089 60502110 60502094 60502089 -
tcagttttccaggacttctggt

SEQ ID NO: 219314 - DNA, 22 bp, Artificial Sequence
  Synthetic oligonucleotide; CTC chr2 60502087 60502108 60502092 60502087 -
agttttccaggacttctggtgg

SEQ ID NO: 219315 - DNA, 22 bp, Artificial Sequence
  Synthetic oligonucleotide; TTT chr2 60502082 60502103 60502087 60502082 -
tccaggacttctggtggtacag

SEQ ID NO: 219316 - DNA, 22 bp, Artificial Sequence
  Synthetic oligonucleotide; TTT chr2 60502081 60502102 60502086 60502081 -
ccaggacttctggtggtacagc

SEQ ID NO: 219317 - DNA, 22 bp, Artificial Sequence
  Synthetic oligonucleotide; TTC chr2 60502080 60502101 60502085 60502080 -
caggacttctggtggtacagct

SEQ ID NO: 219318 - DNA, 22 bp, Artificial Sequence
  Synthetic oligonucleotide; CTT chr2 60502072 60502093 60502077 60502072 -
ctggtggtacagcttctctgtg

SEQ ID NO: 219319 - DNA, 22 bp, Artificial Sequence
  Synthetic oligonucleotide; TTC chr2 60502071 60502092 60502076 60502071 -
tggtggtacagcttctctgtgg

SEQ ID NO: 219320 - DNA, 22 bp, Artificial Sequence
  Synthetic oligonucleotide; CTG chr2 60502069 60502090 60502074 60502069 -
gtggtacagcttctctgtggag

SEQ ID NO: 219321 - DNA, 22 bp, Artificial Sequence
  Synthetic oligonucleotide; CTT chr2 60502057 60502078 60502062 60502057 -
ctctgtggagtgaggcatattt

SEQ ID NO: 219322 - DNA, 22 bp, Artificial Sequence
  Synthetic oligonucleotide; TTC chr2 60502056 60502077 60502061 60502056 -
tctgtggagtgaggcatatttt

SEQ ID NO: 219323 - DNA, 22 bp, Artificial Sequence
  Synthetic oligonucleotide; CTC chr2 60502054 60502075 60502059 60502054 -
tgtggagtgaggcatatttttg

SEQ ID NO: 219324 - DNA, 22 bp, Artificial Sequence
  Synthetic oligonucleotide; CTG chr2 60502052 60502073 60502057 60502052 -
tggagtgaggcatatttttggt

SEQ ID NO: 219325 - DNA, 22 bp, Artificial Sequence
  Synthetic oligonucleotide; TTT chr2 60502035 60502056 60502040 60502035 -
ttggtctggcctttcctccctg

SEQ ID NO: 219326 - DNA, 22 bp, Artificial Sequence
  Synthetic oligonucleotide; TTT chr2 60502034 60502055 60502039 60502034 -
tggtctggcctttcctccctga

SEQ ID NO: 219327 - DNA, 22 bp, Artificial Sequence
  Synthetic oligonucleotide; TTT chr2 60502033 60502054 60502038 60502033 -
ggtctggcctttcctccctgaa

SEQ ID NO: 219328 - DNA, 22 bp, Artificial Sequence
  Synthetic oligonucleotide; TTG chr2 60502032 60502053 60502037 60502032 -
gtctggcctttcctccctgaag

SEQ ID NO: 219329 - DNA, 22 bp, Artificial Sequence
  Synthetic oligonucleotide; CTG chr2 60502027 60502048 60502032 60502027 -
gcctttcctccctgaagctctg

SEQ ID NO: 219330 - DNA, 22 bp, Artificial Sequence
  Synthetic oligonucleotide; CTT chr2 60502022 60502043 60502027 60502022 -
tcctccctgaagctctgttagc

SEQ ID NO: 219331 - DNA, 22 bp, Artificial Sequence
  Synthetic oligonucleotide; TTT chr2 60502021 60502042 60502026 60502021 -
cctccctgaagctctgttagcc

SEQ ID NO: 219332 - DNA, 22 bp, Artificial Sequence
  Synthetic oligonucleotide; TTC chr2 60502020 60502041 60502025 60502020 -
ctccctgaagctctgttagcct

SEQ ID NO: 219333 - DNA, 22 bp, Artificial Sequence
  Synthetic oligonucleotide; CTC chr2 60502017 60502038 60502022 60502017 -
cctgaagctctgttagcctgag

SEQ ID NO: 219334 - DNA, 22 bp, Artificial Sequence
  Synthetic oligonucleotide; CTG chr2 60502013 60502034 60502018 60502013 -
aagctctgttagcctgagattt

SEQ ID NO: 219335 - DNA, 22 bp, Artificial Sequence
  Synthetic oligonucleotide; CTC chr2 60502007 60502028 60502012 60502007 -
tgttagcctgagatttcaccta

SEQ ID NO: 219336 - DNA, 22 bp, Artificial Sequence
  Synthetic oligonucleotide; CTG chr2 60502005 60502026 60502010 60502005 -
ttagcctgagatttcacctagt

SEQ ID NO: 219337 - DNA, 22 bp, Artificial Sequence
  Synthetic oligonucleotide; TTA chr2 60502002 60502023 60502007 60502002 -
gcctgagatttcacctagtgca

SEQ ID NO: 219338 - DNA, 22 bp, Artificial Sequence
  Synthetic oligonucleotide; CTG chr2 60501997 60502018 60502002 60501997 -
agatttcacctagtgcaacaca

SEQ ID NO: 219339 - DNA, 22 bp, Artificial Sequence
  Synthetic oligonucleotide; TTT chr2 60501991 60502012 60501996 60501991 -
cacctagtgcaacacaagttgt

SEQ ID NO: 219340 - DNA, 22 bp, Artificial Sequence
  Synthetic oligonucleotide; TTC chr2 60501990 60502011 60501995 60501990 -
acctagtgcaacacaagttgtg

SEQ ID NO: 219341 - DNA, 22 bp, Artificial Sequence
  Synthetic oligonucleotide; CTA chr2 60501985 60502006 60501990 60501985 -
gtgcaacacaagttgtgtagaa

SEQ ID NO: 219342 - DNA, 22 bp, Artificial Sequence
  Synthetic oligonucleotide; TTG chr2 60501970 60501991 60501975 60501970 -
tgtagaaagaaacataatacta

SEQ ID NO: 219343 - DNA, 22 bp, Artificial Sequence
  Synthetic oligonucleotide; CTA chr2 60501948 60501969 60501953 60501948 -
ctttattccataattcactagt

SEQ ID NO: 219344 - DNA, 22 bp, Artificial Sequence
  Synthetic oligonucleotide; CTT chr2 60501945 60501966 60501950 60501945 -
tattccataattcactagtaaa

SEQ ID NO: 219345 - DNA, 22 bp, Artificial Sequence
  Synthetic oligonucleotide; TTT chr2 60501944 60501965 60501949 60501944 -
attccataattcactagtaaaa

SEQ ID NO: 219346 - DNA, 22 bp, Artificial Sequence
  Synthetic oligonucleotide; TTA chr2 60501943 60501964 60501948 60501943 -
ttccataattcactagtaaaat

SEQ ID NO: 219347 - DNA, 22 bp, Artificial Sequence
  Synthetic oligonucleotide; TTC chr2 60501940 60501961 60501945 60501940 -
cataattcactagtaaaataat

SEQ ID NO: 219348 - DNA, 22 bp, Artificial Sequence
  Synthetic oligonucleotide; TTC chr2 60501932 60501953 60501937 60501932 -
actagtaaaataattagaataa

SEQ ID NO: 219349 - DNA, 22 bp, Artificial Sequence
  Synthetic oligonucleotide; CTA chr2 60501928 60501949 60501933 60501928 -
gtaaaataattagaataaaagg

SEQ ID NO: 219350 - DNA, 22 bp, Artificial Sequence
  Synthetic oligonucleotide; TTA chr2 60501916 60501937 60501921 60501916 -
gaataaaaggctgttttggaat

SEQ ID NO: 219351 - DNA, 22 bp, Artificial Sequence
  Synthetic oligonucleotide; CTG chr2 60501903 60501924 60501908 60501903 -
ttttggaatgtagagaggcaga

SEQ ID NO: 219352 - DNA, 22 bp, Artificial Sequence
  Synthetic oligonucleotide; TTT chr2 60501900 60501921 60501905 60501900 -
tggaatgtagagaggcagaggg

SEQ ID NO: 219353 - DNA, 22 bp, Artificial Sequence
  Synthetic oligonucleotide; TTT chr2 60501899 60501920 60501904 60501899 -
ggaatgtagagaggcagagggg

SEQ ID NO: 219354 - DNA, 22 bp, Artificial Sequence
  Synthetic oligonucleotide; TTG chr2 60501898 60501919 60501903 60501898 -
gaatgtagagaggcagaggggc

SEQ ID NO: 219355 - DNA, 22 bp, Artificial Sequence
  Synthetic oligonucleotide; CTG chr2 60501874 60501895 60501879 60501874 -
atataacttctcagaatgcatc

SEQ ID NO: 219356 - DNA, 22 bp, Artificial Sequence
  Synthetic oligonucleotide; CTT chr2 60501865 60501886 60501870 60501865 -
ctcagaatgcatcttcctgttt

SEQ ID NO: 219357 - DNA, 22 bp, Artificial Sequence
  Synthetic oligonucleotide; TTC chr2 60501864 60501885 60501869 60501864 -
tcagaatgcatcttcctgtttt

SEQ ID NO: 219358 - DNA, 22 bp, Artificial Sequence
  Synthetic oligonucleotide; CTC chr2 60501862 60501883 60501867 60501862 -
agaatgcatcttcctgttttcc

SEQ ID NO: 219359 - DNA, 22 bp, Artificial Sequence
  Synthetic oligonucleotide; CTT chr2 60501850 60501871 60501855 60501850 -
cctgttttcccgtcttaaattt

SEQ ID NO: 219360 - DNA, 22 bp, Artificial Sequence
  Synthetic oligonucleotide; TTC chr2 60501849 60501870 60501854 60501849 -
ctgttttcccgtcttaaatttt

SEQ ID NO: 219361 - DNA, 22 bp, Artificial Sequence
  Synthetic oligonucleotide; CTG chr2 60501846 60501867 60501851 60501846 -
ttttcccgtcttaaatttttat

SEQ ID NO: 219362 - DNA, 22 bp, Artificial Sequence
  Synthetic oligonucleotide; TTT chr2 60501843 60501864 60501848 60501843 -
tcccgtcttaaatttttatgtg

SEQ ID NO: 219363 - DNA, 22 bp, Artificial Sequence
  Synthetic oligonucleotide; TTT chr2 60501842 60501863 60501847 60501842 -
cccgtcttaaatttttatgtga

SEQ ID NO: 219364 - DNA, 22 bp, Artificial Sequence
  Synthetic oligonucleotide; TTC chr2 60501841 60501862 60501846 60501841 -
ccgtcttaaatttttatgtgag

SEQ ID NO: 219365 - DNA, 22 bp, Artificial Sequence
  Synthetic oligonucleotide; CTT chr2 60501834 60501855 60501839 60501834 -
aaatttttatgtgagatgagca

SEQ ID NO: 219366 - DNA, 22 bp, Artificial Sequence
  Synthetic oligonucleotide; TTA chr2 60501833 60501854 60501838 60501833 -
aatttttatgtgagatgagcac

SEQ ID NO: 219367 - DNA, 22 bp, Artificial Sequence
  Synthetic oligonucleotide; TTT chr2 60501828 60501849 60501833 60501828 -
ttatgtgagatgagcacactgc

SEQ ID NO: 219368 - DNA, 22 bp, Artificial Sequence
  Synthetic oligonucleotide; TTT chr2 60501827 60501848 60501832 60501827 -
tatgtgagatgagcacactgct

SEQ ID NO: 219369 - DNA, 22 bp, Artificial Sequence
  Synthetic oligonucleotide; TTT chr2 60501826 60501847 60501831 60501826 -
atgtgagatgagcacactgctg

SEQ ID NO: 219370 - DNA, 22 bp, Artificial Sequence
  Synthetic oligonucleotide; TTA chr2 60501825 60501846 60501830 60501825 -
tgtgagatgagcacactgctgt

SEQ ID NO: 219371 - DNA, 22 bp, Artificial Sequence
  Synthetic oligonucleotide; CTG chr2 60501807 60501828 60501812 60501807 -
ctgtaattaagaaagcagtgta

SEQ ID NO: 219372 - DNA, 22 bp, Artificial Sequence
  Synthetic oligonucleotide; CTG chr2 60501804 60501825 60501809 60501804 -
taattaagaaagcagtgtaagg

SEQ ID NO: 219373 - DNA, 22 bp, Artificial Sequence
  Synthetic oligonucleotide; TTA chr2 60501798 60501819 60501803 60501798 -
agaaagcagtgtaaggctgggc

SEQ ID NO: 219374 - DNA, 22 bp, Artificial Sequence
  Synthetic oligonucleotide; CTG chr2 60501779 60501800 60501784 60501779 -
ggcgcagtggctcacgtctgta

SEQ ID NO: 219375 - DNA, 22 bp, Artificial Sequence
  Synthetic oligonucleotide; CTC chr2 60501766 60501787 60501771 60501766 -
acgtctgtaattccagcacttt

SEQ ID NO: 219376 - DNA, 22 bp, Artificial Sequence
  Synthetic oligonucleotide; CTG chr2 60501759 60501780 60501764 60501759 -
taattccagcactttgggaggc

SEQ ID NO: 219377 - DNA, 22 bp, Artificial Sequence
  Synthetic oligonucleotide; TTC chr2 60501753 60501774 60501758 60501753 -
cagcactttgggaggccgaggt

SEQ ID NO: 219378 - DNA, 22 bp, Artificial Sequence
  Synthetic oligonucleotide; CTT chr2 60501745 60501766 60501750 60501745 -
tgggaggccgaggtgggtagat

SEQ ID NO: 219379 - DNA, 22 bp, Artificial Sequence
  Synthetic oligonucleotide; TTT chr2 60501744 60501765 60501749 60501744 -
gggaggccgaggtgggtagatc

SEQ ID NO: 219380 - DNA, 22 bp, Artificial Sequence
  Synthetic oligonucleotide; TTG chr2 60501743 60501764 60501748 60501743 -
ggaggccgaggtgggtagatca

SEQ ID NO: 219381 - DNA, 22 bp, Artificial Sequence
  Synthetic oligonucleotide; CTG chr2 60501717 60501738 60501722 60501717 -
aggtcaagagtttgagaccagc

SEQ ID NO: 219382 - DNA, 22 bp, Artificial Sequence
  Synthetic oligonucleotide; TTT chr2 60501704 60501725 60501709 60501704 -
gagaccagcctgaccaacatgg

SEQ ID NO: 219383 - DNA, 22 bp, Artificial Sequence
  Synthetic oligonucleotide; TTG chr2 60501703 60501724 60501708 60501703 -
agaccagcctgaccaacatgga

SEQ ID NO: 219384 - DNA, 22 bp, Artificial Sequence
  Synthetic oligonucleotide; CTG chr2 60501692 60501713 60501697 60501692 -
accaacatggagaaacctcatc

SEQ ID NO: 219385 - DNA, 22 bp, Artificial Sequence
  Synthetic oligonucleotide; CTC chr2 60501673 60501694 60501678 60501673 -
atctctattaaaaatataaact

SEQ ID NO: 219386 - DNA, 22 bp, Artificial Sequence
  Synthetic oligonucleotide; CTC chr2 60501668 60501689 60501673 60501668 -
tattaaaaatataaacttagcc

SEQ ID NO: 219387 - DNA, 22 bp, Artificial Sequence
  Synthetic oligonucleotide; CTA chr2 60501666 60501687 60501671 60501666 -
ttaaaaatataaacttagccag

SEQ ID NO: 219388 - DNA, 22 bp, Artificial Sequence
  Synthetic oligonucleotide; TTA chr2 60501663 60501684 60501668 60501663 -
aaaatataaacttagccaggca

SEQ ID NO: 219389 - DNA, 22 bp, Artificial Sequence
  Synthetic oligonucleotide; CTT chr2 60501650 60501671 60501655 60501650 -
agccaggcatggtcgcacatgc

SEQ ID NO: 219390 - DNA, 22 bp, Artificial Sequence
  Synthetic oligonucleotide; TTA chr2 60501649 60501670 60501654 60501649 -
gccaggcatggtcgcacatgcc

SEQ ID NO: 219391 - DNA, 22 bp, Artificial Sequence
  Synthetic oligonucleotide; CTG chr2 60501625 60501646 60501630 60501625 -
taatcccagctactcaggaggc

SEQ ID NO: 219392 - DNA, 22 bp, Artificial Sequence
  Synthetic oligonucleotide; CTA chr2 60501613 60501634 60501618 60501613 -
ctcaggaggctgagggaggaga

SEQ ID NO: 219393 - DNA, 22 bp, Artificial Sequence
  Synthetic oligonucleotide; CTC chr2 60501610 60501631 60501615 60501610 -
aggaggctgagggaggagaatt

SEQ ID NO: 219394 - DNA, 22 bp, Artificial Sequence
  Synthetic oligonucleotide; CTG chr2 60501601 60501622 60501606 60501601 -
agggaggagaattgcttgaacc

SEQ ID NO: 219395 - DNA, 22 bp, Artificial Sequence
  Synthetic oligonucleotide; TTG chr2 60501587 60501608 60501592 60501587 -
cttgaacccaggaggcagaggt

SEQ ID NO: 219396 - DNA, 22 bp, Artificial Sequence
  Synthetic oligonucleotide; CTT chr2 60501584 60501605 60501589 60501584 -
gaacccaggaggcagaggtggt

SEQ ID NO: 219397 - DNA, 22 bp, Artificial Sequence
  Synthetic oligonucleotide; TTG chr2 60501583 60501604 60501588 60501583 -
aacccaggaggcagaggtggtg

SEQ ID NO: 219398 - DNA, 22 bp, Artificial Sequence
  Synthetic oligonucleotide; TTG chr2 60501542 60501563 60501547 60501542 -
caccccagcctgggcaacaaga

SEQ ID NO: 219399 - DNA, 22 bp, Artificial Sequence
  Synthetic oligonucleotide; CTG chr2 60501530 60501551 60501535 60501530 -
ggcaacaagagcgaaactctgt

SEQ ID NO: 219400 - DNA, 22 bp, Artificial Sequence
  Synthetic oligonucleotide; CTC chr2 60501511 60501532 60501516 60501511 -
tgtctcaaaaaaaaaaaaaaaa

SEQ ID NO: 219401 - DNA, 22 bp, Artificial Sequence
  Synthetic oligonucleotide; CTG chr2 60501509 60501530 60501514 60501509 -
tctcaaaaaaaaaaaaaaaaaa

SEQ ID NO: 219402 - DNA, 22 bp, Artificial Sequence
  Synthetic oligonucleotide; CTC chr2 60501505 60501526 60501510 60501505 -
aaaaaaaaaaaaaaaaaaaaag

SEQ ID NO: 219403 - DNA, 22 bp, Artificial Sequence
  Synthetic oligonucleotide; CTT chr2 60501465 60501486 60501470 60501465 -
gcaaaaggcctttccctcttgc

SEQ ID NO: 219404 - DNA, 22 bp, Artificial Sequence
  Synthetic oligonucleotide; TTG chr2 60501464 60501485 60501469 60501464 -
caaaaggcctttccctcttgcc

SEQ ID NO: 219405 - DNA, 22 bp, Artificial Sequence
  Synthetic oligonucleotide; CTT chr2 60501453 60501474 60501458 60501453 -
tccctcttgccactcagggaag

SEQ ID NO: 219406 - DNA, 22 bp, Artificial Sequence
  Synthetic oligonucleotide; TTT chr2 60501452 60501473 60501457 60501452 -
ccctcttgccactcagggaagc

SEQ ID NO: 219407 - DNA, 22 bp, Artificial Sequence
  Synthetic oligonucleotide; TTC chr2 60501451 60501472 60501456 60501451 -
cctcttgccactcagggaagca

SEQ ID NO: 219408 - DNA, 22 bp, Artificial Sequence
  Synthetic oligonucleotide; CTC chr2 60501447 60501468 60501452 60501447 -
ttgccactcagggaagcacccg

SEQ ID NO: 219409 - DNA, 22 bp, Artificial Sequence
  Synthetic oligonucleotide; CTT chr2 60501445 60501466 60501450 60501445 -
gccactcagggaagcacccgaa

SEQ ID NO: 219410 - DNA, 22 bp, Artificial Sequence
  Synthetic oligonucleotide; TTG chr2 60501444 60501465 60501449 60501444 -
ccactcagggaagcacccgaaa

SEQ ID NO: 219411 - DNA, 22 bp, Artificial Sequence
  Synthetic oligonucleotide; CTC chr2 60501438 60501459 60501443 60501438 -
agggaagcacccgaaagagaac

SEQ ID NO: 219412 - DNA, 22 bp, Artificial Sequence
  Synthetic oligonucleotide; CTT chr2 60501414 60501435 60501419 60501414 -
acaaaccaggtaaagtatttgg

SEQ ID NO: 219413 - DNA, 22 bp, Artificial Sequence
  Synthetic oligonucleotide; TTA chr2 60501413 60501434 60501418 60501413 -
caaaccaggtaaagtatttgga

SEQ ID NO: 219414 - DNA, 22 bp, Artificial Sequence
  Synthetic oligonucleotide; TTT chr2 60501394 60501415 60501399 60501394 -
ggaagtgattaatcatattaca

SEQ ID NO: 219415 - DNA, 22 bp, Artificial Sequence
  Synthetic oligonucleotide; TTG chr2 60501393 60501414 60501398 60501393 -
gaagtgattaatcatattacaa

SEQ ID NO: 219416 - DNA, 22 bp, Artificial Sequence
  Synthetic oligonucleotide; TTA chr2 60501383 60501404 60501388 60501383 -
atcatattacaagagtgttctt

SEQ ID NO: 219417 - DNA, 22 bp, Artificial Sequence
  Synthetic oligonucleotide; TTA chr2 60501374 60501395 60501379 60501374 -
caagagtgttcttcatttcccc

SEQ ID NO: 219418 - DNA, 22 bp, Artificial Sequence
  Synthetic oligonucleotide; TTC chr2 60501363 60501384 60501368 60501363 -
ttcatttcccccaaaggaccat

SEQ ID NO: 219419 - DNA, 22 bp, Artificial Sequence
  Synthetic oligonucleotide; CTT chr2 60501361 60501382 60501366 60501361 -
catttcccccaaaggaccatgg

SEQ ID NO: 219420 - DNA, 22 bp, Artificial Sequence
  Synthetic oligonucleotide; TTC chr2 60501360 60501381 60501365 60501360 -
atttcccccaaaggaccatggc

SEQ ID NO: 219421 - DNA, 22 bp, Artificial Sequence
  Synthetic oligonucleotide; TTT chr2 60501356 60501377 60501361 60501356 -
cccccaaaggaccatggcttcc

SEQ ID NO: 219422 - DNA, 22 bp, Artificial Sequence
  Synthetic oligonucleotide; TTC chr2 60501355 60501376 60501360 60501355 -
ccccaaaggaccatggcttcct

SEQ ID NO: 219423 - DNA, 22 bp, Artificial Sequence
  Synthetic oligonucleotide; CTT chr2 60501336 60501357 60501341 60501336 -
cctgtgacacttacctgtgctc

SEQ ID NO: 219424 - DNA, 22 bp, Artificial Sequence
  Synthetic oligonucleotide; TTC chr2 60501335 60501356 60501340 60501335 -
ctgtgacacttacctgtgctct

SEQ ID NO: 219425 - DNA, 22 bp, Artificial Sequence
  Synthetic oligonucleotide; CTG chr2 60501332 60501353 60501337 60501332 -
tgacacttacctgtgctcttat

SEQ ID NO: 219426 - DNA, 22 bp, Artificial Sequence
  Synthetic oligonucleotide; CTT chr2 60501324 60501345 60501329 60501324 -
acctgtgctcttatagatatta

SEQ ID NO: 219427 - DNA, 22 bp, Artificial Sequence
  Synthetic oligonucleotide; TTA chr2 60501323 60501344 60501328 60501323 -
cctgtgctcttatagatattaa

SEQ ID NO: 219428 - DNA, 22 bp, Artificial Sequence
  Synthetic oligonucleotide; CTG chr2 60501319 60501340 60501324 60501319 -
tgctcttatagatattaaagac

SEQ ID NO: 219429 - DNA, 22 bp, Artificial Sequence
  Synthetic oligonucleotide; CTC chr2 60501314 60501335 60501319 60501314 -
ttatagatattaaagacagagc

SEQ ID NO: 219430 - DNA, 22 bp, Artificial Sequence
  Synthetic oligonucleotide; CTT chr2 60501312 60501333 60501317 60501312 -
atagatattaaagacagagcca

SEQ ID NO: 219431 - DNA, 22 bp, Artificial Sequence
  Synthetic oligonucleotide; TTA chr2 60501311 60501332 60501316 60501311 -
tagatattaaagacagagccac

SEQ ID NO: 219432 - DNA, 22 bp, Artificial Sequence
  Synthetic oligonucleotide; TTA chr2 60501302 60501323 60501307 60501302 -
aagacagagccactggactgtg

SEQ ID NO: 219433 - DNA, 22 bp, Artificial Sequence
  Synthetic oligonucleotide; CTG chr2 60501287 60501308 60501292 60501287 -
gactgtgagctccttgagggca

SEQ ID NO: 219434 - DNA, 22 bp, Artificial Sequence
  Synthetic oligonucleotide; CTG chr2 60501282 60501303 60501287 60501282 -
tgagctccttgagggcagggaa

SEQ ID NO: 219435 - DNA, 22 bp, Artificial Sequence
  Synthetic oligonucleotide; CTC chr2 60501275 60501296 60501280 60501275 -
cttgagggcagggaatgaggct

SEQ ID NO: 219436 - DNA, 22 bp, Artificial Sequence
  Synthetic oligonucleotide; CTT chr2 60501272 60501293 60501277 60501272 -
gagggcagggaatgaggctcat

SEQ ID NO: 219437 - DNA, 22 bp, Artificial Sequence
  Synthetic oligonucleotide; TTG chr2 60501271 60501292 60501276 60501271 -
agggcagggaatgaggctcatt

SEQ ID NO: 219438 - DNA, 22 bp, Artificial Sequence
  Synthetic oligonucleotide; CTC chr2 60501252 60501273 60501257 60501252 -
attccattttgttctggcaagt

SEQ ID NO: 219439 - DNA, 22 bp, Artificial Sequence
  Synthetic oligonucleotide; TTC chr2 60501248 60501269 60501253 60501248 -
cattttgttctggcaagtagca

SEQ ID NO: 219440 - DNA, 22 bp, Artificial Sequence
  Synthetic oligonucleotide; TTT chr2 60501243 60501264 60501248 60501243 -
tgttctggcaagtagcactaca

SEQ ID NO: 219441 - DNA, 22 bp, Artificial Sequence
  Synthetic oligonucleotide; TTT chr2 60501242 60501263 60501247 60501242 -
gttctggcaagtagcactacag

SEQ ID NO: 219442 - DNA, 22 bp, Artificial Sequence
  Synthetic oligonucleotide; TTG chr2 60501241 60501262 60501246 60501241 -
ttctggcaagtagcactacagg

SEQ ID NO: 219443 - DNA, 22 bp, Artificial Sequence
  Synthetic oligonucleotide; TTC chr2 60501238 60501259 60501243 60501238 -
tggcaagtagcactacaggttt

SEQ ID NO: 219444 - DNA, 22 bp, Artificial Sequence
  Synthetic oligonucleotide; CTG chr2 60501236 60501257 60501241 60501236 -
gcaagtagcactacaggtttgg

SEQ ID NO: 219445 - DNA, 22 bp, Artificial Sequence
  Synthetic oligonucleotide; CTA chr2 60501223 60501244 60501228 60501223 -
caggtttggaccaaatgaatta

SEQ ID NO: 219446 - DNA, 22 bp, Artificial Sequence
  Synthetic oligonucleotide; TTT chr2 60501216 60501237 60501221 60501216 -
ggaccaaatgaattaaattggc

SEQ ID NO: 219447 - DNA, 22 bp, Artificial Sequence
  Synthetic oligonucleotide; TTG chr2 60501215 60501236 60501220 60501215 -
gaccaaatgaattaaattggct

SEQ ID NO: 219448 - DNA, 22 bp, Artificial Sequence
  Synthetic oligonucleotide; TTA chr2 60501201 60501222 60501206 60501201 -
aattggctgccattgaatcaaa

SEQ ID NO: 219449 - DNA, 22 bp, Artificial Sequence
  Synthetic oligonucleotide; TTG chr2 60501196 60501217 60501201 60501196 -
gctgccattgaatcaaagcaga

SEQ ID NO: 219450 - DNA, 22 bp, Artificial Sequence
  Synthetic oligonucleotide; CTG chr2 60501192 60501213 60501197 60501192 -
ccattgaatcaaagcagaatga

SEQ ID NO: 219451 - DNA, 22 bp, Artificial Sequence
  Synthetic oligonucleotide; TTG chr2 60501186 60501207 60501191 60501186 -
aatcaaagcagaatgaaggtag

SEQ ID NO: 219452 - DNA, 22 bp, Artificial Sequence
  Synthetic oligonucleotide; TTT chr2 60501159 60501180 60501164 60501159 -
ctgaaacaataatataaataag

SEQ ID NO: 219453 - DNA, 22 bp, Artificial Sequence
  Synthetic oligonucleotide; TTC chr2 60501158 60501179 60501163 60501158 -
tgaaacaataatataaataagt

SEQ ID NO: 219454 - DNA, 22 bp, Artificial Sequence
  Synthetic oligonucleotide; CTG chr2 60501156 60501177 60501161 60501156 -
aaacaataatataaataagtgc

SEQ ID NO: 219455 - DNA, 22 bp, Artificial Sequence
  Synthetic oligonucleotide; TTG chr2 60501127 60501148 60501132 60501127 -
gatgtttaccaacaactttcca

SEQ ID NO: 219456 - DNA, 22 bp, Artificial Sequence
  Synthetic oligonucleotide; TTT chr2 60501120 60501141 60501125 60501120 -
accaacaactttccagaaacag

SEQ ID NO: 219457 - DNA, 22 bp, Artificial Sequence
  Synthetic oligonucleotide; TTA chr2 60501119 60501140 60501124 60501119 -
ccaacaactttccagaaacagg

SEQ ID NO: 219458 - DNA, 22 bp, Artificial Sequence
  Synthetic oligonucleotide; CTT chr2 60501109 60501130 60501114 60501109 -
tccagaaacaggtcttgtttca

SEQ ID NO: 219459 - DNA, 22 bp, Artificial Sequence
  Synthetic oligonucleotide; TTT chr2 60501108 60501129 60501113 60501108 -
ccagaaacaggtcttgtttcag

SEQ ID NO: 219460 - DNA, 22 bp, Artificial Sequence
  Synthetic oligonucleotide; TTC chr2 60501107 60501128 60501112 60501107 -
cagaaacaggtcttgtttcaga

SEQ ID NO: 219461 - DNA, 22 bp, Artificial Sequence
  Synthetic oligonucleotide; CTT chr2 60501093 60501114 60501098 60501093 -
gtttcagaagatgtgccaaaga

SEQ ID NO: 219462 - DNA, 22 bp, Artificial Sequence
  Synthetic oligonucleotide; TTG chr2 60501092 60501113 60501097 60501092 -
tttcagaagatgtgccaaagat

SEQ ID NO: 219463 - DNA, 22 bp, Artificial Sequence
  Synthetic oligonucleotide; TTT chr2 60501089 60501110 60501094 60501089 -
cagaagatgtgccaaagatgtc

SEQ ID NO: 219464 - DNA, 22 bp, Artificial Sequence
  Synthetic oligonucleotide; TTC chr2 60501088 60501109 60501093 60501088 -
agaagatgtgccaaagatgtct

SEQ ID NO: 219465 - DNA, 22 bp, Artificial Sequence
  Synthetic oligonucleotide; CTC chr2 60501065 60501086 60501070 60501065 -
atgtgggcagggctcctgtgga

SEQ ID NO: 219466 - DNA, 22 bp, Artificial Sequence
  Synthetic oligonucleotide; CTC chr2 60501050 60501071 60501055 60501050 -
ctgtggagacctctgttgctga

SEQ ID NO: 219467 - DNA, 22 bp, Artificial Sequence
  Synthetic oligonucleotide; CTG chr2 60501047 60501068 60501052 60501047 -
tggagacctctgttgctgagtg

SEQ ID NO: 219468 - DNA, 22 bp, Artificial Sequence
  Synthetic oligonucleotide; CTC chr2 60501037 60501058 60501042 60501037 -
tgttgctgagtgagtcaaccat

SEQ ID NO: 219469 - DNA, 22 bp, Artificial Sequence
  Synthetic oligonucleotide; CTG chr2 60501035 60501056 60501040 60501035 -
ttgctgagtgagtcaaccatga

SEQ ID NO: 219470 - DNA, 22 bp, Artificial Sequence
  Synthetic oligonucleotide; TTG chr2 60501032 60501053 60501037 60501032 -
ctgagtgagtcaaccatgaggt

SEQ ID NO: 219471 - DNA, 22 bp, Artificial Sequence
  Synthetic oligonucleotide; CTG chr2 60501029 60501050 60501034 60501029 -
agtgagtcaaccatgaggtcgg

SEQ ID NO: 219472 - DNA, 22 bp, Artificial Sequence
  Synthetic oligonucleotide; CTG chr2 60501004 60501025 60501009 60501004 -
agcagttcagggttctcccatt

SEQ ID NO: 219473 - DNA, 22 bp, Artificial Sequence
  Synthetic oligonucleotide; TTC chr2 60500996 60501017 60501001 60500996 -
agggttctcccattttacagag

SEQ ID NO: 219474 - DNA, 22 bp, Artificial Sequence
  Synthetic oligonucleotide; TTC chr2 60500989 60501010 60500994 60500989 -
tcccattttacagaggaggatg

SEQ ID NO: 219475 - DNA, 22 bp, Artificial Sequence
  Synthetic oligonucleotide; CTC chr2 60500987 60501008 60500992 60500987 -
ccattttacagaggaggatgca

SEQ ID NO: 219476 - DNA, 22 bp, Artificial Sequence
  Synthetic oligonucleotide; TTT chr2 60500981 60501002 60500986 60500981 -
tacagaggaggatgcagcgacc

SEQ ID NO: 219477 - DNA, 22 bp, Artificial Sequence
  Synthetic oligonucleotide; TTT chr2 60500980 60501001 60500985 60500980 -
acagaggaggatgcagcgaccc

SEQ ID NO: 219478 - DNA, 22 bp, Artificial Sequence
  Synthetic oligonucleotide; TTA chr2 60500979 60501000 60500984 60500979 -
cagaggaggatgcagcgaccca

SEQ ID NO: 219479 - DNA, 22 bp, Artificial Sequence
  Synthetic oligonucleotide; CTT chr2 60500948 60500969 60500953 60500948 -
gcaagcccacccagctaggctt

SEQ ID NO: 219480 - DNA, 22 bp, Artificial Sequence
  Synthetic oligonucleotide; TTG chr2 60500947 60500968 60500952 60500947 -
caagcccacccagctaggcttg

SEQ ID NO: 219481 - DNA, 22 bp, Artificial Sequence
  Synthetic oligonucleotide; CTA chr2 60500931 60500952 60500936 60500931 -
ggcttgcttcacagacactctt

SEQ ID NO: 219482 - DNA, 22 bp, Artificial Sequence
  Synthetic oligonucleotide; CTT chr2 60500926 60500947 60500931 60500926 -
gcttcacagacactcttttaac

SEQ ID NO: 219483 - DNA, 22 bp, Artificial Sequence
  Synthetic oligonucleotide; TTG chr2 60500925 60500946 60500930 60500925 -
cttcacagacactcttttaact

SEQ ID NO: 219484 - DNA, 22 bp, Artificial Sequence
  Synthetic oligonucleotide; CTT chr2 60500922 60500943 60500927 60500922 -
cacagacactcttttaactagt

SEQ ID NO: 219485 - DNA, 22 bp, Artificial Sequence
  Synthetic oligonucleotide; TTC chr2 60500921 60500942 60500926 60500921 -
acagacactcttttaactagtt

SEQ ID NO: 219486 - DNA, 22 bp, Artificial Sequence
  Synthetic oligonucleotide; CTC chr2 60500911 60500932 60500916 60500911 -
ttttaactagttccatcagcaa

SEQ ID NO: 219487 - DNA, 22 bp, Artificial Sequence
  Synthetic oligonucleotide; CTT chr2 60500909 60500930 60500914 60500909 -
ttaactagttccatcagcaacc

SEQ ID NO: 219488 - DNA, 22 bp, Artificial Sequence
  Synthetic oligonucleotide; TTT chr2 60500908 60500929 60500913 60500908 -
taactagttccatcagcaaccc

SEQ ID NO: 219489 - DNA, 22 bp, Artificial Sequence
  Synthetic oligonucleotide; TTT chr2 60500907 60500928 60500912 60500907 -
aactagttccatcagcaacccc

SEQ ID NO: 219490 - DNA, 22 bp, Artificial Sequence
  Synthetic oligonucleotide; TTA chr2 60500906 60500927 60500911 60500906 -
actagttccatcagcaacccca

SEQ ID NO: 219491 - DNA, 22 bp, Artificial Sequence
  Synthetic oligonucleotide; CTA chr2 60500902 60500923 60500907 60500902 -
gttccatcagcaaccccaggtt

SEQ ID NO: 219492 - DNA, 22 bp, Artificial Sequence
  Synthetic oligonucleotide; TTC chr2 60500898 60500919 60500903 60500898 -
catcagcaaccccaggttggcc

SEQ ID NO: 219493 - DNA, 22 bp, Artificial Sequence
  Synthetic oligonucleotide; TTG chr2 60500879 60500900 60500884 60500879 -
gccatacaatgtcatcatacac

SEQ ID NO: 219494 - DNA, 22 bp, Artificial Sequence
  Synthetic oligonucleotide; TTT chr2 60500853 60500874 60500858 60500853 -
taccagtgaagaaactgaggct

SEQ ID NO: 219495 - DNA, 22 bp, Artificial Sequence
  Synthetic oligonucleotide; TTT chr2 60500852 60500873 60500857 60500852 -
accagtgaagaaactgaggctt

SEQ ID NO: 219496 - DNA, 22 bp, Artificial Sequence
  Synthetic oligonucleotide; TTA chr2 60500851 60500872 60500856 60500851 -
ccagtgaagaaactgaggcttg

SEQ ID NO: 219497 - DNA, 22 bp, Artificial Sequence
  Synthetic oligonucleotide; CTG chr2 60500836 60500857 60500841 60500836 -
aggcttggagaggttaaagagc

SEQ ID NO: 219498 - DNA, 22 bp, Artificial Sequence
  Synthetic oligonucleotide; CTT chr2 60500830 60500851 60500835 60500830 -
ggagaggttaaagagctgctcc

SEQ ID NO: 219499 - DNA, 22 bp, Artificial Sequence
  Synthetic oligonucleotide; TTG chr2 60500829 60500850 60500834 60500829 -
gagaggttaaagagctgctccc

SEQ ID NO: 219500 - DNA, 22 bp, Artificial Sequence
  Synthetic oligonucleotide; TTA chr2 60500820 60500841 60500825 60500820 -
aagagctgctcccagacacaca

SEQ ID NO: 219501 - DNA, 22 bp, Artificial Sequence
  Synthetic oligonucleotide; CTG chr2 60500812 60500833 60500817 60500812 -
ctcccagacacacagccaggaa

SEQ ID NO: 219502 - DNA, 22 bp, Artificial Sequence
  Synthetic oligonucleotide; CTC chr2 60500809 60500830 60500814 60500809 -
ccagacacacagccaggaaatt

SEQ ID NO: 219503 - DNA, 22 bp, Artificial Sequence
  Synthetic oligonucleotide; TTG chr2 60500786 60500807 60500791 60500786 -
gtggtagatgaaggatccagct

SEQ ID NO: 219504 - DNA, 22 bp, Artificial Sequence
  Synthetic oligonucleotide; CTC chr2 60500763 60500784 60500768 60500763 -
atctgtctaacttgggagcctg

SEQ ID NO: 219505 - DNA, 22 bp, Artificial Sequence
  Synthetic oligonucleotide; CTG chr2 60500758 60500779 60500763 60500758 -
tctaacttgggagcctgagtgt

SEQ ID NO: 219506 - DNA, 22 bp, Artificial Sequence
  Synthetic oligonucleotide; CTA chr2 60500754 60500775 60500759 60500754 -
acttgggagcctgagtgttcat

SEQ ID NO: 219507 - DNA, 22 bp, Artificial Sequence
  Synthetic oligonucleotide; CTT chr2 60500750 60500771 60500755 60500750 -
gggagcctgagtgttcatctta

SEQ ID NO: 219508 - DNA, 22 bp, Artificial Sequence
  Synthetic oligonucleotide; TTG chr2 60500749 60500770 60500754 60500749 -
ggagcctgagtgttcatcttac

SEQ ID NO: 219509 - DNA, 22 bp, Artificial Sequence
  Synthetic oligonucleotide; CTG chr2 60500741 60500762 60500746 60500741 -
agtgttcatcttacctatccac

SEQ ID NO: 219510 - DNA, 22 bp, Artificial Sequence
  Synthetic oligonucleotide; TTC chr2 60500734 60500755 60500739 60500734 -
atcttacctatccaccaaggct

SEQ ID NO: 219511 - DNA, 22 bp, Artificial Sequence
  Synthetic oligonucleotide; CTT chr2 60500729 60500750 60500734 60500729 -
acctatccaccaaggcttgaag

SEQ ID NO: 219512 - DNA, 22 bp, Artificial Sequence
  Synthetic oligonucleotide; TTA chr2 60500728 60500749 60500733 60500728 -
cctatccaccaaggcttgaagt

SEQ ID NO: 219513 - DNA, 22 bp, Artificial Sequence
  Synthetic oligonucleotide; CTA chr2 60500724 60500745 60500729 60500724 -
tccaccaaggcttgaagtgagg

SEQ ID NO: 219514 - DNA, 22 bp, Artificial Sequence
  Synthetic oligonucleotide; CTT chr2 60500711 60500732 60500716 60500711 -
gaagtgaggtgccccgactgtg

SEQ ID NO: 219515 - DNA, 22 bp, Artificial Sequence
  Synthetic oligonucleotide; TTG chr2 60500710 60500731 60500715 60500710 -
aagtgaggtgccccgactgtga

SEQ ID NO: 219516 - DNA, 22 bp, Artificial Sequence
  Synthetic oligonucleotide; CTG chr2 60500691 60500712 60500696 60500691 -
tgagttccaggtttgatgccta

SEQ ID NO: 219517 - DNA, 22 bp, Artificial Sequence
  Synthetic oligonucleotide; TTC chr2 60500684 60500705 60500689 60500684 -
caggtttgatgcctacagccca

SEQ ID NO: 219518 - DNA, 22 bp, Artificial Sequence
  Synthetic oligonucleotide; TTT chr2 60500677 60500698 60500682 60500677 -
gatgcctacagcccatcagcct

SEQ ID NO: 219519 - DNA, 22 bp, Artificial Sequence
  Synthetic oligonucleotide; TTG chr2 60500676 60500697 60500681 60500676 -
atgcctacagcccatcagcctt

SEQ ID NO: 219520 - DNA, 22 bp, Artificial Sequence
  Synthetic oligonucleotide; CTA chr2 60500669 60500690 60500674 60500669 -
cagcccatcagccttatacctt

SEQ ID NO: 219521 - DNA, 22 bp, Artificial Sequence
  Synthetic oligonucleotide; CTT chr2 60500654 60500675 60500659 60500654 -
ataccttgtcttataccttaac

SEQ ID NO: 219522 - DNA, 22 bp, Artificial Sequence
  Synthetic oligonucleotide; TTA chr2 60500653 60500674 60500658 60500653 -
taccttgtcttataccttaact

SEQ ID NO: 219523 - DNA, 22 bp, Artificial Sequence
  Synthetic oligonucleotide; CTT chr2 60500647 60500668 60500652 60500647 -
gtcttataccttaactggtgga

SEQ ID NO: 219524 - DNA, 22 bp, Artificial Sequence
  Synthetic oligonucleotide; TTG chr2 60500646 60500667 60500651 60500646 -
tcttataccttaactggtggag

SEQ ID NO: 219525 - DNA, 22 bp, Artificial Sequence
  Synthetic oligonucleotide; CTT chr2 60500642 60500663 60500647 60500642 -
ataccttaactggtggagggtg

SEQ ID NO: 219526 - DNA, 22 bp, Artificial Sequence
  Synthetic oligonucleotide; TTA chr2 60500641 60500662 60500646 60500641 -
taccttaactggtggagggtgc

SEQ ID NO: 219527 - DNA, 22 bp, Artificial Sequence
  Synthetic oligonucleotide; CTT chr2 60500635 60500656 60500640 60500635 -
aactggtggagggtgctgtctc

SEQ ID NO: 219528 - DNA, 22 bp, Artificial Sequence
  Synthetic oligonucleotide; TTA chr2 60500634 60500655 60500639 60500634 -
actggtggagggtgctgtctct

SEQ ID NO: 219529 - DNA, 22 bp, Artificial Sequence
  Synthetic oligonucleotide; CTG chr2 60500630 60500651 60500635 60500630 -
gtggagggtgctgtctctgtgt

SEQ ID NO: 219530 - DNA, 22 bp, Artificial Sequence
  Synthetic oligonucleotide; CTG chr2 60500617 60500638 60500622 60500617 -
tctctgtgtagcagccaccagc

SEQ ID NO: 219531 - DNA, 22 bp, Artificial Sequence
  Synthetic oligonucleotide; CTC chr2 60500613 60500634 60500618 60500613 -
tgtgtagcagccaccagcctag

SEQ ID NO: 219532 - DNA, 22 bp, Artificial Sequence
  Synthetic oligonucleotide; CTG chr2 60500611 60500632 60500616 60500611 -
tgtagcagccaccagcctagct

SEQ ID NO: 219533 - DNA, 22 bp, Artificial Sequence
  Synthetic oligonucleotide; CTA chr2 60500592 60500613 60500597 60500592 -
gctctgaaccctgtcctgagga

SEQ ID NO: 219534 - DNA, 22 bp, Artificial Sequence
  Synthetic oligonucleotide; CTC chr2 60500588 60500609 60500593 60500588 -
tgaaccctgtcctgaggagttg

SEQ ID NO: 219535 - DNA, 22 bp, Artificial Sequence
  Synthetic oligonucleotide; CTG chr2 60500586 60500607 60500591 60500586 -
aaccctgtcctgaggagttggg

SEQ ID NO: 219536 - DNA, 22 bp, Artificial Sequence
  Synthetic oligonucleotide; CTG chr2 60500579 60500600 60500584 60500579 -
tcctgaggagttgggaagtgtg

SEQ ID NO: 219537 - DNA, 22 bp, Artificial Sequence
  Synthetic oligonucleotide; CTG chr2 60500574 60500595 60500579 60500574 -
aggagttgggaagtgtggggtg

SEQ ID NO: 219538 - DNA, 22 bp, Artificial Sequence
  Synthetic oligonucleotide; TTG chr2 60500566 60500587 60500571 60500566 -
ggaagtgtggggtgtctggttt

SEQ ID NO: 219539 - DNA, 22 bp, Artificial Sequence
  Synthetic oligonucleotide; CTG chr2 60500548 60500569 60500553 60500548 -
gtttattccatcaatacacgta

SEQ ID NO: 219540 - DNA, 22 bp, Artificial Sequence
  Synthetic oligonucleotide; TTT chr2 60500544 60500565 60500549 60500544 -
attccatcaatacacgtagtcc

SEQ ID NO: 219541 - DNA, 22 bp, Artificial Sequence
  Synthetic oligonucleotide; TTA chr2 60500543 60500564 60500548 60500543 -
ttccatcaatacacgtagtccc

SEQ ID NO: 219542 - DNA, 22 bp, Artificial Sequence
  Synthetic oligonucleotide; TTC chr2 60500540 60500561 60500545 60500540 -
catcaatacacgtagtcccttc

SEQ ID NO: 219543 - DNA, 22 bp, Artificial Sequence
  Synthetic oligonucleotide; CTT chr2 60500519 60500540 60500524 60500519 -
ccattcttctgccattttttct

SEQ ID NO: 219544 - DNA, 22 bp, Artificial Sequence
  Synthetic oligonucleotide; TTC chr2 60500518 60500539 60500523 60500518 -
cattcttctgccattttttctc

SEQ ID NO: 219545 - DNA, 22 bp, Artificial Sequence
  Synthetic oligonucleotide; TTC chr2 60500513 60500534 60500518 60500513 -
ttctgccattttttctcagggg

SEQ ID NO: 219546 - DNA, 22 bp, Artificial Sequence
  Synthetic oligonucleotide; CTT chr2 60500511 60500532 60500516 60500511 -
ctgccattttttctcaggggct

SEQ ID NO: 219547 - DNA, 22 bp, Artificial Sequence
  Synthetic oligonucleotide; TTC chr2 60500510 60500531 60500515 60500510 -
tgccattttttctcaggggctc

SEQ ID NO: 219548 - DNA, 22 bp, Artificial Sequence
  Synthetic oligonucleotide; CTG chr2 60500508 60500529 60500513 60500508 -
ccattttttctcaggggctctc

SEQ ID NO: 219549 - DNA, 22 bp, Artificial Sequence
  Synthetic oligonucleotide; TTT chr2 60500502 60500523 60500507 60500502 -
tttctcaggggctctccttcct

SEQ ID NO: 219550 - DNA, 22 bp, Artificial Sequence
  Synthetic oligonucleotide; TTT chr2 60500501 60500522 60500506 60500501 -
ttctcaggggctctccttcctt

SEQ ID NO: 219551 - DNA, 22 bp, Artificial Sequence
  Synthetic oligonucleotide; TTT chr2 60500500 60500521 60500505 60500500 -
tctcaggggctctccttccttc

SEQ ID NO: 219552 - DNA, 22 bp, Artificial Sequence
  Synthetic oligonucleotide; TTT chr2 60500499 60500520 60500504 60500499 -
ctcaggggctctccttccttcc

SEQ ID NO: 219553 - DNA, 22 bp, Artificial Sequence
  Synthetic oligonucleotide; TTC chr2 60500498 60500519 60500503 60500498 -
tcaggggctctccttccttccc

SEQ ID NO: 219554 - DNA, 22 bp, Artificial Sequence
  Synthetic oligonucleotide; CTC chr2 60500496 60500517 60500501 60500496 -
aggggctctccttccttccctg

SEQ ID NO: 219555 - DNA, 22 bp, Artificial Sequence
  Synthetic oligonucleotide; CTC chr2 60500488 60500509 60500493 60500488 -
tccttccttccctggctcttgg

SEQ ID NO: 219556 - DNA, 22 bp, Artificial Sequence
  Synthetic oligonucleotide; CTC chr2 60500486 60500507 60500491 60500486 -
cttccttccctggctcttgggt

SEQ ID NO: 219557 - DNA, 22 bp, Artificial Sequence
  Synthetic oligonucleotide; CTT chr2 60500483 60500504 60500488 60500483 -
ccttccctggctcttgggtagg

SEQ ID NO: 219558 - DNA, 22 bp, Artificial Sequence
  Synthetic oligonucleotide; TTC chr2 60500482 60500503 60500487 60500482 -
cttccctggctcttgggtaggc

SEQ ID NO: 219559 - DNA, 22 bp, Artificial Sequence
  Synthetic oligonucleotide; CTT chr2 60500479 60500500 60500484 60500479 -
ccctggctcttgggtaggctgc

SEQ ID NO: 219560 - DNA, 22 bp, Artificial Sequence
  Synthetic oligonucleotide; TTC chr2 60500478 60500499 60500483 60500478 -
cctggctcttgggtaggctgcc

SEQ ID NO: 219561 - DNA, 22 bp, Artificial Sequence
  Synthetic oligonucleotide; CTG chr2 60500474 60500495 60500479 60500474 -
gctcttgggtaggctgcctgct

SEQ ID NO: 219562 - DNA, 22 bp, Artificial Sequence
  Synthetic oligonucleotide; CTC chr2 60500470 60500491 60500475 60500470 -
ttgggtaggctgcctgctctga

SEQ ID NO: 219563 - DNA, 22 bp, Artificial Sequence
  Synthetic oligonucleotide; CTT chr2 60500468 60500489 60500473 60500468 -
gggtaggctgcctgctctgatg

SEQ ID NO: 219564 - DNA, 22 bp, Artificial Sequence
  Synthetic oligonucleotide; TTG chr2 60500467 60500488 60500472 60500467 -
ggtaggctgcctgctctgatgt

SEQ ID NO: 219565 - DNA, 22 bp, Artificial Sequence
  Synthetic oligonucleotide; CTG chr2 60500458 60500479 60500463 60500458 -
cctgctctgatgtaagttcctg

SEQ ID NO: 219566 - DNA, 22 bp, Artificial Sequence
  Synthetic oligonucleotide; CTG chr2 60500454 60500475 60500459 60500454 -
ctctgatgtaagttcctgctgg

SEQ ID NO: 219567 - DNA, 22 bp, Artificial Sequence
  Synthetic oligonucleotide; CTC chr2 60500451 60500472 60500456 60500451 -
tgatgtaagttcctgctgggat

SEQ ID NO: 219568 - DNA, 22 bp, Artificial Sequence
  Synthetic oligonucleotide; CTG chr2 60500449 60500470 60500454 60500449 -
atgtaagttcctgctgggatga

SEQ ID NO: 219569 - DNA, 22 bp, Artificial Sequence
  Synthetic oligonucleotide; TTC chr2 60500439 60500460 60500444 60500439 -
ctgctgggatgattgctctggc

SEQ ID NO: 219570 - DNA, 22 bp, Artificial Sequence
  Synthetic oligonucleotide; CTG chr2 60500436 60500457 60500441 60500436 -
ctgggatgattgctctggccag

SEQ ID NO: 219571 - DNA, 22 bp, Artificial Sequence
  Synthetic oligonucleotide; CTG chr2 60500433 60500454 60500438 60500433 -
ggatgattgctctggccaggcc

SEQ ID NO: 219572 - DNA, 22 bp, Artificial Sequence
  Synthetic oligonucleotide; TTG chr2 60500424 60500445 60500429 60500424 -
ctctggccaggcccccagctgc

SEQ ID NO: 219573 - DNA, 22 bp, Artificial Sequence
  Synthetic oligonucleotide; CTC chr2 60500421 60500442 60500426 60500421 -
tggccaggcccccagctgctcc

SEQ ID NO: 219574 - DNA, 22 bp, Artificial Sequence
  Synthetic oligonucleotide; CTG chr2 60500419 60500440 60500424 60500419 -
gccaggcccccagctgctccct

SEQ ID NO: 219575 - DNA, 22 bp, Artificial Sequence
  Synthetic oligonucleotide; CTG chr2 60500403 60500424 60500408 60500403 -
ctccctgcccttctctgaaggc

SEQ ID NO: 219576 - DNA, 22 bp, Artificial Sequence
  Synthetic oligonucleotide; CTC chr2 60500400 60500421 60500405 60500400 -
cctgcccttctctgaaggcaca

SEQ ID NO: 219577 - DNA, 22 bp, Artificial Sequence
  Synthetic oligonucleotide; CTG chr2 60500396 60500417 60500401 60500396 -
cccttctctgaaggcacatctg

SEQ ID NO: 219578 - DNA, 22 bp, Artificial Sequence
  Synthetic oligonucleotide; CTT chr2 60500391 60500412 60500396 60500391 -
ctctgaaggcacatctgtcagc

SEQ ID NO: 219579 - DNA, 22 bp, Artificial Sequence
  Synthetic oligonucleotide; TTC chr2 60500390 60500411 60500395 60500390 -
tctgaaggcacatctgtcagcc

SEQ ID NO: 219580 - DNA, 22 bp, Artificial Sequence
  Synthetic oligonucleotide; CTC chr2 60500388 60500409 60500393 60500388 -
tgaaggcacatctgtcagccca

SEQ ID NO: 219581 - DNA, 22 bp, Artificial Sequence
  Synthetic oligonucleotide; CTG chr2 60500386 60500407 60500391 60500386 -
aaggcacatctgtcagcccaca

SEQ ID NO: 219582 - DNA, 22 bp, Artificial Sequence
  Synthetic oligonucleotide; CTG chr2 60500374 60500395 60500379 60500374 -
tcagcccacagaggcacggtta

SEQ ID NO: 219583 - DNA, 22 bp, Artificial Sequence
  Synthetic oligonucleotide; TTA chr2 60500352 60500373 60500357 60500352 -
atggtggcggggaagcagaggc

SEQ ID NO: 219584 - DNA, 22 bp, Artificial Sequence
  Synthetic oligonucleotide; CTG chr2 60500310 60500331 60500315 60500310 -
gccccgggaacctcacctgccc

SEQ ID NO: 219585 - DNA, 22 bp, Artificial Sequence
  Synthetic oligonucleotide; CTC chr2 60500296 60500317 60500301 60500296 -
acctgccctatccctacctgcc

SEQ ID NO: 219586 - DNA, 22 bp, Artificial Sequence
  Synthetic oligonucleotide; CTG chr2 60500291 60500312 60500296 60500291 -
ccctatccctacctgccccctg

SEQ ID NO: 219587 - DNA, 22 bp, Artificial Sequence
  Synthetic oligonucleotide; CTA chr2 60500286 60500307 60500291 60500286 -
tccctacctgccccctgtcccc

SEQ ID NO: 219588 - DNA, 22 bp, Artificial Sequence
  Synthetic oligonucleotide; CTA chr2 60500280 60500301 60500285 60500280 -
cctgccccctgtcccctccccg

SEQ ID NO: 219589 - DNA, 22 bp, Artificial Sequence
  Synthetic oligonucleotide; CTG chr2 60500276 60500297 60500281 60500276 -
ccccctgtcccctccccgcctg

SEQ ID NO: 219590 - DNA, 22 bp, Artificial Sequence
  Synthetic oligonucleotide; CTG chr2 60500269 60500290 60500274 60500269 -
tcccctccccgcctgggcttga

SEQ ID NO: 219591 - DNA, 22 bp, Artificial Sequence
  Synthetic oligonucleotide; CTC chr2 60500262 60500283 60500267 60500262 -
cccgcctgggcttgacttgtcc

SEQ ID NO: 219592 - DNA, 22 bp, Artificial Sequence
  Synthetic oligonucleotide; CTG chr2 60500254 60500275 60500259 60500254 -
ggcttgacttgtccactttcac

SEQ ID NO: 219593 - DNA, 22 bp, Artificial Sequence
  Synthetic oligonucleotide; CTT chr2 60500249 60500270 60500254 60500249 -
gacttgtccactttcactctca

SEQ ID NO: 219594 - DNA, 22 bp, Artificial Sequence
  Synthetic oligonucleotide; TTG chr2 60500248 60500269 60500253 60500248 -
acttgtccactttcactctcaa

SEQ ID NO: 219595 - DNA, 22 bp, Artificial Sequence
  Synthetic oligonucleotide; CTT chr2 60500244 60500265 60500249 60500244 -
gtccactttcactctcaagacc

SEQ ID NO: 219596 - DNA, 22 bp, Artificial Sequence
  Synthetic oligonucleotide; TTG chr2 60500243 60500264 60500248 60500243 -
tccactttcactctcaagacca

SEQ ID NO: 219597 - DNA, 22 bp, Artificial Sequence
  Synthetic oligonucleotide; CTT chr2 60500236 60500257 60500241 60500236 -
tcactctcaagaccaccgctct

SEQ ID NO: 219598 - DNA, 22 bp, Artificial Sequence
  Synthetic oligonucleotide; TTT chr2 60500235 60500256 60500240 60500235 -
cactctcaagaccaccgctctc

SEQ ID NO: 219599 - DNA, 22 bp, Artificial Sequence
  Synthetic oligonucleotide; TTC chr2 60500234 60500255 60500239 60500234 -
actctcaagaccaccgctctca

SEQ ID NO: 219600 - DNA, 22 bp, Artificial Sequence
  Synthetic oligonucleotide; CTC chr2 60500230 60500251 60500235 60500230 -
tcaagaccaccgctctcacaca

SEQ ID NO: 219601 - DNA, 22 bp, Artificial Sequence
  Synthetic oligonucleotide; CTC chr2 60500228 60500249 60500233 60500228 -
aagaccaccgctctcacacaca

SEQ ID NO: 219602 - DNA, 22 bp, Artificial Sequence
  Synthetic oligonucleotide; CTC chr2 60500215 60500236 60500220 60500215 -
tcacacacaggtcctgtgctgc

SEQ ID NO: 219603 - DNA, 22 bp, Artificial Sequence
  Synthetic oligonucleotide; CTC chr2 60500213 60500234 60500218 60500213 -
acacacaggtcctgtgctgccc

SEQ ID NO: 219604 - DNA, 22 bp, Artificial Sequence
  Synthetic oligonucleotide; CTG chr2 60500199 60500220 60500204 60500199 -
tgctgcccccacagctttgcag

SEQ ID NO: 219605 - DNA, 22 bp, Artificial Sequence
  Synthetic oligonucleotide; CTG chr2 60500194 60500215 60500199 60500194 -
cccccacagctttgcaggctgc

SEQ ID NO: 219606 - DNA, 22 bp, Artificial Sequence
  Synthetic oligonucleotide; CTT chr2 60500182 60500203 60500187 60500182 -
tgcaggctgctggttttccatc

SEQ ID NO: 219607 - DNA, 22 bp, Artificial Sequence
  Synthetic oligonucleotide; TTT chr2 60500181 60500202 60500186 60500181 -
gcaggctgctggttttccatcc

SEQ ID NO: 219608 - DNA, 22 bp, Artificial Sequence
  Synthetic oligonucleotide; TTG chr2 60500180 60500201 60500185 60500180 -
caggctgctggttttccatcca

SEQ ID NO: 219609 - DNA, 22 bp, Artificial Sequence
  Synthetic oligonucleotide; CTG chr2 60500173 60500194 60500178 60500173 -
ctggttttccatccagggcaca

SEQ ID NO: 219610 - DNA, 22 bp, Artificial Sequence
  Synthetic oligonucleotide; CTG chr2 60500170 60500191 60500175 60500170 -
gttttccatccagggcacagcc

SEQ ID NO: 219611 - DNA, 22 bp, Artificial Sequence
  Synthetic oligonucleotide; TTT chr2 60500166 60500187 60500171 60500166 -
tccatccagggcacagccgcag

SEQ ID NO: 219612 - DNA, 22 bp, Artificial Sequence
  Synthetic oligonucleotide; TTT chr2 60500165 60500186 60500170 60500165 -
ccatccagggcacagccgcagg

SEQ ID NO: 219613 - DNA, 22 bp, Artificial Sequence
  Synthetic oligonucleotide; TTC chr2 60500164 60500185 60500169 60500164 -
catccagggcacagccgcaggc

SEQ ID NO: 219614 - DNA, 22 bp, Artificial Sequence
  Synthetic oligonucleotide; CTC chr2 60500139 60500160 60500144 60500139 -
tgggcaccctagccctcagtgc

SEQ ID NO: 219615 - DNA, 22 bp, Artificial Sequence
  Synthetic oligonucleotide; CTG chr2 60500137 60500158 60500142 60500137 -
ggcaccctagccctcagtgccc

SEQ ID NO: 219616 - DNA, 22 bp, Artificial Sequence
  Synthetic oligonucleotide; CTA chr2 60500128 60500149 60500133 60500128 -
gccctcagtgcccagggcaaag

SEQ ID NO: 219617 - DNA, 22 bp, Artificial Sequence
  Synthetic oligonucleotide; CTC chr2 60500122 60500143 60500127 60500122 -
agtgcccagggcaaagccctga

SEQ ID NO: 219618 - DNA, 22 bp, Artificial Sequence
  Synthetic oligonucleotide; CTG chr2 60500101 60500122 60500106 60500101 -
acatgcaatctcactggcaggc

SEQ ID NO: 219619 - DNA, 22 bp, Artificial Sequence
  Synthetic oligonucleotide; CTC chr2 60500089 60500110 60500094 60500089 -
actggcaggcagcctcaggcag

SEQ ID NO: 219620 - DNA, 22 bp, Artificial Sequence
  Synthetic oligonucleotide; CTG chr2 60500085 60500106 60500090 60500085 -
gcaggcagcctcaggcaggcct

SEQ ID NO: 219621 - DNA, 22 bp, Artificial Sequence
  Synthetic oligonucleotide; CTC chr2 60500073 60500094 60500078 60500073 -
aggcaggcctgggcagaggacc

SEQ ID NO: 219622 - DNA, 22 bp, Artificial Sequence
  Synthetic oligonucleotide; CTG chr2 60500062 60500083 60500067 60500062 -
ggcagaggaccgaaaggaggag

SEQ ID NO: 219623 - DNA, 22 bp, Artificial Sequence
  Synthetic oligonucleotide; CTA chr2 60500024 60500045 60500029 60500024 -
cagtagagcagacaggagacaa

SEQ ID NO: 219624 - DNA, 22 bp, Artificial Sequence
  Synthetic oligonucleotide; CTA chr2 60499992 60500013 60499997 60499992 -
agagtaaacagcctggcagtgg

SEQ ID NO: 219625 - DNA, 22 bp, Artificial Sequence
  Synthetic oligonucleotide; CTG chr2 60499977 60499998 60499982 60499977 -
gcagtggggtgagtgcctggct

SEQ ID NO: 219626 - DNA, 22 bp, Artificial Sequence
  Synthetic oligonucleotide; CTG chr2 60499958 60499979 60499963 60499958 -
gctggaggggctcacctgggct

SEQ ID NO: 219627 - DNA, 22 bp, Artificial Sequence
  Synthetic oligonucleotide; CTG chr2 60499954 60499975 60499959 60499954 -
gaggggctcacctgggctggcc

SEQ ID NO: 219628 - DNA, 22 bp, Artificial Sequence
  Synthetic oligonucleotide; CTC chr2 60499945 60499966 60499950 60499945 -
acctgggctggcctgcctggga

SEQ ID NO: 219629 - DNA, 22 bp, Artificial Sequence
  Synthetic oligonucleotide; CTG chr2 60499940 60499961 60499945 60499940 -
ggctggcctgcctgggaggagc

SEQ ID NO: 219630 - DNA, 22 bp, Artificial Sequence
  Synthetic oligonucleotide; CTG chr2 60499935 60499956 60499940 60499935 -
gcctgcctgggaggagccaggt

SEQ ID NO: 219631 - DNA, 22 bp, Artificial Sequence
  Synthetic oligonucleotide; CTG chr2 60499930 60499951 60499935 60499930 -
cctgggaggagccaggtcggtg

SEQ ID NO: 219632 - DNA, 22 bp, Artificial Sequence
  Synthetic oligonucleotide; CTG chr2 60499926 60499947 60499931 60499926 -
ggaggagccaggtcggtggctg

SEQ ID NO: 219633 - DNA, 22 bp, Artificial Sequence
  Synthetic oligonucleotide; CTG chr2 60499904 60499925 60499909 60499904 -
ctctctccgaatcttagtcctg

SEQ ID NO: 219634 - DNA, 22 bp, Artificial Sequence
  Synthetic oligonucleotide; CTC chr2 60499901 60499922 60499906 60499901 -
tctccgaatcttagtcctgctt

SEQ ID NO: 219635 - DNA, 22 bp, Artificial Sequence
  Synthetic oligonucleotide; CTC chr2 60499899 60499920 60499904 60499899 -
tccgaatcttagtcctgcttga

SEQ ID NO: 219636 - DNA, 22 bp, Artificial Sequence
  Synthetic oligonucleotide; CTC chr2 60499897 60499918 60499902 60499897 -
cgaatcttagtcctgcttgagg

SEQ ID NO: 219637 - DNA, 22 bp, Artificial Sequence
  Synthetic oligonucleotide; CTT chr2 60499889 60499910 60499894 60499889 -
agtcctgcttgaggtctagcag

SEQ ID NO: 219638 - DNA, 22 bp, Artificial Sequence
  Synthetic oligonucleotide; TTA chr2 60499888 60499909 60499893 60499888 -
gtcctgcttgaggtctagcagc

SEQ ID NO: 219639 - DNA, 22 bp, Artificial Sequence
  Synthetic oligonucleotide; CTG chr2 60499882 60499903 60499887 60499882 -
cttgaggtctagcagcttccgg

SEQ ID NO: 219640 - DNA, 22 bp, Artificial Sequence
  Synthetic oligonucleotide; CTT chr2 60499879 60499900 60499884 60499879 -
gaggtctagcagcttccggagc

SEQ ID NO: 219641 - DNA, 22 bp, Artificial Sequence
  Synthetic oligonucleotide; TTG chr2 60499878 60499899 60499883 60499878 -
aggtctagcagcttccggagct

SEQ ID NO: 219642 - DNA, 22 bp, Artificial Sequence
  Synthetic oligonucleotide; CTA chr2 60499871 60499892 60499876 60499871 -
gcagcttccggagctgcacatg

SEQ ID NO: 219643 - DNA, 22 bp, Artificial Sequence
  Synthetic oligonucleotide; CTT chr2 60499864 60499885 60499869 60499864 -
ccggagctgcacatggggcttg

SEQ ID NO: 219644 - DNA, 22 bp, Artificial Sequence
  Synthetic oligonucleotide; TTC chr2 60499863 60499884 60499868 60499863 -
cggagctgcacatggggcttga

SEQ ID NO: 219645 - DNA, 22 bp, Artificial Sequence
  Synthetic oligonucleotide; CTG chr2 60499855 60499876 60499860 60499855 -
cacatggggcttgaggtctggt

SEQ ID NO: 219646 - DNA, 22 bp, Artificial Sequence
  Synthetic oligonucleotide; CTT chr2 60499843 60499864 60499848 60499843 -
gaggtctggtgcttatggatta

SEQ ID NO: 219647 - DNA, 22 bp, Artificial Sequence
  Synthetic oligonucleotide; TTG chr2 60499842 60499863 60499847 60499842 -
aggtctggtgcttatggattag

SEQ ID NO: 219648 - DNA, 22 bp, Artificial Sequence
  Synthetic oligonucleotide; CTG chr2 60499835 60499856 60499840 60499835 -
gtgcttatggattaggaggaag

SEQ ID NO: 219649 - DNA, 22 bp, Artificial Sequence
  Synthetic oligonucleotide; CTT chr2 60499829 60499850 60499834 60499829 -
atggattaggaggaagagaaga

SEQ ID NO: 219650 - DNA, 22 bp, Artificial Sequence
  Synthetic oligonucleotide; TTA chr2 60499828 60499849 60499833 60499828 -
tggattaggaggaagagaagac

SEQ ID NO: 219651 - DNA, 22 bp, Artificial Sequence
  Synthetic oligonucleotide; TTA chr2 60499821 60499842 60499826 60499821 -
ggaggaagagaagacagatggc

SEQ ID NO: 219652 - DNA, 22 bp, Artificial Sequence
  Synthetic oligonucleotide; CTT chr2 60499782 60499803 60499787 60499782 -
aggaacatgtctccttccacat

SEQ ID NO: 219653 - DNA, 22 bp, Artificial Sequence
  Synthetic oligonucleotide; TTA chr2 60499781 60499802 60499786 60499781 -
ggaacatgtctccttccacatg

SEQ ID NO: 219654 - DNA, 22 bp, Artificial Sequence
  Synthetic oligonucleotide; CTC chr2 60499769 60499790 60499774 60499769 -
cttccacatgctgtggcccagg

SEQ ID NO: 219655 - DNA, 22 bp, Artificial Sequence
  Synthetic oligonucleotide; CTT chr2 60499766 60499787 60499771 60499766 -
ccacatgctgtggcccaggtgc

SEQ ID NO: 219656 - DNA, 22 bp, Artificial Sequence
  Synthetic oligonucleotide; TTC chr2 60499765 60499786 60499770 60499765 -
cacatgctgtggcccaggtgct

SEQ ID NO: 219657 - DNA, 22 bp, Artificial Sequence
  Synthetic oligonucleotide; CTG chr2 60499756 60499777 60499761 60499756 -
tggcccaggtgctgcccagagc

SEQ ID NO: 219658 - DNA, 22 bp, Artificial Sequence
  Synthetic oligonucleotide; CTG chr2 60499742 60499763 60499747 60499742 -
cccagagctgtttcacagcagc

SEQ ID NO: 219659 - DNA, 22 bp, Artificial Sequence
  Synthetic oligonucleotide; CTG chr2 60499732 60499753 60499737 60499732 -
tttcacagcagcctctccactc

SEQ ID NO: 219660 - DNA, 22 bp, Artificial Sequence
  Synthetic oligonucleotide; TTT chr2 60499729 60499750 60499734 60499729 -
cacagcagcctctccactcaag

SEQ ID NO: 219661 - DNA, 22 bp, Artificial Sequence
  Synthetic oligonucleotide; TTC chr2 60499728 60499749 60499733 60499728 -
acagcagcctctccactcaagg

SEQ ID NO: 219662 - DNA, 22 bp, Artificial Sequence
  Synthetic oligonucleotide; CTC chr2 60499717 60499738 60499722 60499717 -
tccactcaaggttgagcggttt

SEQ ID NO: 219663 - DNA, 22 bp, Artificial Sequence
  Synthetic oligonucleotide; CTC chr2 60499715 60499736 60499720 60499715 -
cactcaaggttgagcggtttcc

SEQ ID NO: 219664 - DNA, 22 bp, Artificial Sequence
  Synthetic oligonucleotide; CTC chr2 60499710 60499731 60499715 60499710 -
aaggttgagcggtttccttcag

SEQ ID NO: 219665 - DNA, 22 bp, Artificial Sequence
  Synthetic oligonucleotide; TTG chr2 60499703 60499724 60499708 60499703 -
agcggtttccttcagtgctgtc

SEQ ID NO: 219666 - DNA, 22 bp, Artificial Sequence
  Synthetic oligonucleotide; TTT chr2 60499695 60499716 60499700 60499695 -
ccttcagtgctgtccacccctt

SEQ ID NO: 219667 - DNA, 22 bp, Artificial Sequence
  Synthetic oligonucleotide; TTC chr2 60499694 60499715 60499699 60499694 -
cttcagtgctgtccaccccttt

SEQ ID NO: 219668 - DNA, 22 bp, Artificial Sequence
  Synthetic oligonucleotide; CTT chr2 60499691 60499712 60499696 60499691 -
cagtgctgtccacccctttggt

SEQ ID NO: 219669 - DNA, 22 bp, Artificial Sequence
  Synthetic oligonucleotide; TTC chr2 60499690 60499711 60499695 60499690 -
agtgctgtccacccctttggtc

SEQ ID NO: 219670 - DNA, 22 bp, Artificial Sequence
  Synthetic oligonucleotide; CTG chr2 60499683 60499704 60499688 60499683 -
tccacccctttggtccggggag

SEQ ID NO: 219671 - DNA, 22 bp, Artificial Sequence
  Synthetic oligonucleotide; CTT chr2 60499673 60499694 60499678 60499673 -
tggtccggggagcttcatgttc

SEQ ID NO: 219672 - DNA, 22 bp, Artificial Sequence
  Synthetic oligonucleotide; TTT chr2 60499672 60499693 60499677 60499672 -
ggtccggggagcttcatgttcc

SEQ ID NO: 219673 - DNA, 22 bp, Artificial Sequence
  Synthetic oligonucleotide; TTG chr2 60499671 60499692 60499676 60499671 -
gtccggggagcttcatgttcct

SEQ ID NO: 219674 - DNA, 22 bp, Artificial Sequence
  Synthetic oligonucleotide; CTT chr2 60499658 60499679 60499663 60499658 -
catgttcctgggcctcactgac

SEQ ID NO: 219675 - DNA, 22 bp, Artificial Sequence
  Synthetic oligonucleotide; TTC chr2 60499657 60499678 60499662 60499657 -
atgttcctgggcctcactgaca

SEQ ID NO: 219676 - DNA, 22 bp, Artificial Sequence
  Synthetic oligonucleotide; TTC chr2 60499651 60499672 60499656 60499651 -
ctgggcctcactgacacctgca

SEQ ID NO: 219677 - DNA, 22 bp, Artificial Sequence
  Synthetic oligonucleotide; CTG chr2 60499648 60499669 60499653 60499648 -
ggcctcactgacacctgcatgg

SEQ ID NO: 219678 - DNA, 22 bp, Artificial Sequence
  Synthetic oligonucleotide; CTC chr2 60499642 60499663 60499647 60499642 -
actgacacctgcatggggttgg

SEQ ID NO: 219679 - DNA, 22 bp, Artificial Sequence
  Synthetic oligonucleotide; CTG chr2 60499638 60499659 60499643 60499638 -
acacctgcatggggttggtggg

SEQ ID NO: 219680 - DNA, 22 bp, Artificial Sequence
  Synthetic oligonucleotide; CTG chr2 60499631 60499652 60499636 60499631 -
catggggttggtggggaggtat

SEQ ID NO: 219681 - DNA, 22 bp, Artificial Sequence
  Synthetic oligonucleotide; TTG chr2 60499621 60499642 60499626 60499621 -
gtggggaggtatgaggggttgg

SEQ ID NO: 219682 - DNA, 22 bp, Artificial Sequence
  Synthetic oligonucleotide; TTG chr2 60499600 60499621 60499605 60499600 -
gaggggtctttttgctagccct

SEQ ID NO: 219683 - DNA, 22 bp, Artificial Sequence
  Synthetic oligonucleotide; CTT chr2 60499590 60499611 60499595 60499590 -
tttgctagccctggcccgtggc

SEQ ID NO: 219684 - DNA, 22 bp, Artificial Sequence
  Synthetic oligonucleotide; TTT chr2 60499589 60499610 60499594 60499589 -
ttgctagccctggcccgtggca

SEQ ID NO: 219685 - DNA, 22 bp, Artificial Sequence
  Synthetic oligonucleotide; TTT chr2 60499588 60499609 60499593 60499588 -
tgctagccctggcccgtggcaa

SEQ ID NO: 219686 - DNA, 22 bp, Artificial Sequence
  Synthetic oligonucleotide; TTT chr2 60499587 60499608 60499592 60499587 -
gctagccctggcccgtggcaaa

SEQ ID NO: 219687 - DNA, 22 bp, Artificial Sequence
  Synthetic oligonucleotide; TTG chr2 60499586 60499607 60499591 60499586 -
ctagccctggcccgtggcaaac

SEQ ID NO: 219688 - DNA, 22 bp, Artificial Sequence
  Synthetic oligonucleotide; CTA chr2 60499583 60499604 60499588 60499583 -
gccctggcccgtggcaaacact

SEQ ID NO: 219689 - DNA, 22 bp, Artificial Sequence
  Synthetic oligonucleotide; CTG chr2 60499577 60499598 60499582 60499577 -
gcccgtggcaaacactgtcttg

SEQ ID NO: 219690 - DNA, 22 bp, Artificial Sequence
  Synthetic oligonucleotide; CTG chr2 60499560 60499581 60499565 60499560 -
tcttgagaaagtgggacgttga

SEQ ID NO: 219691 - DNA, 22 bp, Artificial Sequence
  Synthetic oligonucleotide; CTT chr2 60499556 60499577 60499561 60499556 -
gagaaagtgggacgttgaagga

SEQ ID NO: 219692 - DNA, 22 bp, Artificial Sequence
  Synthetic oligonucleotide; TTG chr2 60499555 60499576 60499560 60499555 -
agaaagtgggacgttgaaggag

SEQ ID NO: 219693 - DNA, 22 bp, Artificial Sequence
  Synthetic oligonucleotide; TTG chr2 60499539 60499560 60499544 60499539 -
aaggagcttggactctaaagtc

SEQ ID NO: 219694 - DNA, 22 bp, Artificial Sequence
  Synthetic oligonucleotide; CTT chr2 60499530 60499551 60499535 60499530 -
ggactctaaagtcagctacaca

SEQ ID NO: 219695 - DNA, 22 bp, Artificial Sequence
  Synthetic oligonucleotide; TTG chr2 60499529 60499550 60499534 60499529 -
gactctaaagtcagctacacat

SEQ ID NO: 219696 - DNA, 22 bp, Artificial Sequence
  Synthetic oligonucleotide; CTC chr2 60499524 60499545 60499529 60499524 -
taaagtcagctacacatgagtc

SEQ ID NO: 219697 - DNA, 22 bp, Artificial Sequence
  Synthetic oligonucleotide; CTA chr2 60499522 60499543 60499527 60499522 -
aagtcagctacacatgagtctt

SEQ ID NO: 219698 - DNA, 22 bp, Artificial Sequence
  Synthetic oligonucleotide; CTA chr2 60499512 60499533 60499517 60499512 -
cacatgagtcttttcacctgct

SEQ ID NO: 219699 - DNA, 22 bp, Artificial Sequence
  Synthetic oligonucleotide; CTT chr2 60499500 60499521 60499505 60499500 -
ttcacctgctggctaggtggcc

SEQ ID NO: 219700 - DNA, 22 bp, Artificial Sequence
  Synthetic oligonucleotide; TTT chr2 60499499 60499520 60499504 60499499 -
tcacctgctggctaggtggccc

SEQ ID NO: 219701 - DNA, 22 bp, Artificial Sequence
  Synthetic oligonucleotide; TTT chr2 60499498 60499519 60499503 60499498 -
cacctgctggctaggtggcccc

SEQ ID NO: 219702 - DNA, 22 bp, Artificial Sequence
  Synthetic oligonucleotide; TTC chr2 60499497 60499518 60499502 60499497 -
acctgctggctaggtggccccg

SEQ ID NO: 219703 - DNA, 22 bp, Artificial Sequence
  Synthetic oligonucleotide; CTG chr2 60499492 60499513 60499497 60499492 -
ctggctaggtggccccggacaa

SEQ ID NO: 219704 - DNA, 22 bp, Artificial Sequence
  Synthetic oligonucleotide; CTG chr2 60499489 60499510 60499494 60499489 -
gctaggtggccccggacaagtc

SEQ ID NO: 219705 - DNA, 22 bp, Artificial Sequence
  Synthetic oligonucleotide; CTA chr2 60499485 60499506 60499490 60499485 -
ggtggccccggacaagtcaatc

SEQ ID NO: 219706 - DNA, 22 bp, Artificial Sequence
  Synthetic oligonucleotide; CTA chr2 60499457 60499478 60499462 60499457 -
ttgggcctcaggctctttatct

SEQ ID NO: 219707 - DNA, 22 bp, Artificial Sequence
  Synthetic oligonucleotide; TTG chr2 60499454 60499475 60499459 60499454 -
ggcctcaggctctttatctata

SEQ ID NO: 219708 - DNA, 22 bp, Artificial Sequence
  Synthetic oligonucleotide; CTC chr2 60499448 60499469 60499453 60499448 -
aggctctttatctataaaatgg

SEQ ID NO: 219709 - DNA, 22 bp, Artificial Sequence
  Synthetic oligonucleotide; CTC chr2 60499442 60499463 60499447 60499442 -
tttatctataaaatggggctaa

SEQ ID NO: 219710 - DNA, 22 bp, Artificial Sequence
  Synthetic oligonucleotide; CTT chr2 60499440 60499461 60499445 60499440 -
tatctataaaatggggctaatt

SEQ ID NO: 219711 - DNA, 22 bp, Artificial Sequence
  Synthetic oligonucleotide; TTT chr2 60499439 60499460 60499444 60499439 -
atctataaaatggggctaattt

SEQ ID NO: 219712 - DNA, 22 bp, Artificial Sequence
  Synthetic oligonucleotide; TTA chr2 60499438 60499459 60499443 60499438 -
tctataaaatggggctaatttc

SEQ ID NO: 219713 - DNA, 22 bp, Artificial Sequence
  Synthetic oligonucleotide; CTA chr2 60499434 60499455 60499439 60499434 -
taaaatggggctaatttccttt

SEQ ID NO: 219714 - DNA, 22 bp, Artificial Sequence
  Synthetic oligonucleotide; CTA chr2 60499421 60499442 60499426 60499421 -
atttccttttttgcccctggga

SEQ ID NO: 219715 - DNA, 22 bp, Artificial Sequence
  Synthetic oligonucleotide; TTT chr2 60499417 60499438 60499422 60499417 -
ccttttttgcccctgggaagaa

SEQ ID NO: 219716 - DNA, 22 bp, Artificial Sequence
  Synthetic oligonucleotide; TTC chr2 60499416 60499437 60499421 60499416 -
cttttttgcccctgggaagaaa

SEQ ID NO: 219717 - DNA, 22 bp, Artificial Sequence
  Synthetic oligonucleotide; CTT chr2 60499413 60499434 60499418 60499413 -
ttttgcccctgggaagaaatat

SEQ ID NO: 219718 - DNA, 22 bp, Artificial Sequence
  Synthetic oligonucleotide; TTT chr2 60499412 60499433 60499417 60499412 -
tttgcccctgggaagaaatatc

SEQ ID NO: 219719 - DNA, 22 bp, Artificial Sequence
  Synthetic oligonucleotide; TTT chr2 60499411 60499432 60499416 60499411 -
ttgcccctgggaagaaatatca

SEQ ID NO: 219720 - DNA, 22 bp, Artificial Sequence
  Synthetic oligonucleotide; TTT chr2 60499410 60499431 60499415 60499410 -
tgcccctgggaagaaatatcac

SEQ ID NO: 219721 - DNA, 22 bp, Artificial Sequence
  Synthetic oligonucleotide; TTT chr2 60499409 60499430 60499414 60499409 -
gcccctgggaagaaatatcact

SEQ ID NO: 219722 - DNA, 22 bp, Artificial Sequence
  Synthetic oligonucleotide; TTG chr2 60499408 60499429 60499413 60499408 -
cccctgggaagaaatatcactt

SEQ ID NO: 219723 - DNA, 22 bp, Artificial Sequence
  Synthetic oligonucleotide; CTG chr2 60499402 60499423 60499407 60499402 -
ggaagaaatatcacttagagga

SEQ ID NO: 219724 - DNA, 22 bp, Artificial Sequence
  Synthetic oligonucleotide; CTT chr2 60499386 60499407 60499391 60499386 -
agaggagttacagaatgtgcaa

SEQ ID NO: 219725 - DNA, 22 bp, Artificial Sequence
  Synthetic oligonucleotide; TTA chr2 60499385 60499406 60499390 60499385 -
gaggagttacagaatgtgcaac

SEQ ID NO: 219726 - DNA, 22 bp, Artificial Sequence
  Synthetic oligonucleotide; TTA chr2 60499376 60499397 60499381 60499376 -
cagaatgtgcaacctttcccag

SEQ ID NO: 219727 - DNA, 22 bp, Artificial Sequence
  Synthetic oligonucleotide; CTT chr2 60499360 60499381 60499365 60499360 -
tcccaggagtattgctcctgaa

SEQ ID NO: 219728 - DNA, 22 bp, Artificial Sequence
  Synthetic oligonucleotide; TTT chr2 60499359 60499380 60499364 60499359 -
cccaggagtattgctcctgaag

SEQ ID NO: 219729 - DNA, 22 bp, Artificial Sequence
  Synthetic oligonucleotide; TTC chr2 60499358 60499379 60499363 60499358 -
ccaggagtattgctcctgaagg

SEQ ID NO: 219730 - DNA, 22 bp, Artificial Sequence
  Synthetic oligonucleotide; TTG chr2 60499346 60499367 60499351 60499346 -
ctcctgaaggaataaggcacga

SEQ ID NO: 219731 - DNA, 22 bp, Artificial Sequence
  Synthetic oligonucleotide; CTC chr2 60499343 60499364 60499348 60499343 -
ctgaaggaataaggcacgatgg

SEQ ID NO: 219732 - DNA, 22 bp, Artificial Sequence
  Synthetic oligonucleotide; CTG chr2 60499340 60499361 60499345 60499340 -
aaggaataaggcacgatgggct

SEQ ID NO: 219733 - DNA, 22 bp, Artificial Sequence
  Synthetic oligonucleotide; CTT chr2 60499317 60499338 60499322 60499317 -
tgacttcagcctccagcactgt

SEQ ID NO: 219734 - DNA, 22 bp, Artificial Sequence
  Synthetic oligonucleotide; TTT chr2 60499316 60499337 60499321 60499316 -
gacttcagcctccagcactgtg

SEQ ID NO: 219735 - DNA, 22 bp, Artificial Sequence
  Synthetic oligonucleotide; TTG chr2 60499315 60499336 60499320 60499315 -
acttcagcctccagcactgtgg

SEQ ID NO: 219736 - DNA, 22 bp, Artificial Sequence
  Synthetic oligonucleotide; CTT chr2 60499311 60499332 60499316 60499311 -
cagcctccagcactgtggccca

SEQ ID NO: 219737 - DNA, 22 bp, Artificial Sequence
  Synthetic oligonucleotide; TTC chr2 60499310 60499331 60499315 60499310 -
agcctccagcactgtggcccag

SEQ ID NO: 219738 - DNA, 22 bp, Artificial Sequence
  Synthetic oligonucleotide; CTC chr2 60499304 60499325 60499309 60499304 -
cagcactgtggcccagaagggt

SEQ ID NO: 219739 - DNA, 22 bp, Artificial Sequence
  Synthetic oligonucleotide; CTG chr2 60499296 60499317 60499301 60499296 -
tggcccagaagggtatggctgg

SEQ ID NO: 219740 - DNA, 22 bp, Artificial Sequence
  Synthetic oligonucleotide; CTG chr2 60499275 60499296 60499280 60499275 -
ggcaggggcgtcacacccctgc

SEQ ID NO: 219741 - DNA, 22 bp, Artificial Sequence
  Synthetic oligonucleotide; CTG chr2 60499254 60499275 60499259 60499254 -
cagctctgtgggagtgacggaa

SEQ ID NO: 219742 - DNA, 22 bp, Artificial Sequence
  Synthetic oligonucleotide; CTC chr2 60499248 60499269 60499253 60499248 -
tgtgggagtgacggaagggcgc

SEQ ID NO: 219743 - DNA, 22 bp, Artificial Sequence
  Synthetic oligonucleotide; CTG chr2 60499246 60499267 60499251 60499246 -
tgggagtgacggaagggcgcta

SEQ ID NO: 219744 - DNA, 22 bp, Artificial Sequence
  Synthetic oligonucleotide; CTA chr2 60499224 60499245 60499229 60499224 -
tccactcgccttgcacatggct

SEQ ID NO: 219745 - DNA, 22 bp, Artificial Sequence
  Synthetic oligonucleotide; CTC chr2 60499217 60499238 60499222 60499217 -
gccttgcacatggctgtcttgc

SEQ ID NO: 219746 - DNA, 22 bp, Artificial Sequence
  Synthetic oligonucleotide; CTT chr2 60499212 60499233 60499217 60499212 -
gcacatggctgtcttgctctac

SEQ ID NO: 219747 - DNA, 22 bp, Artificial Sequence
  Synthetic oligonucleotide; TTG chr2 60499211 60499232 60499216 60499211 -
cacatggctgtcttgctctacc

SEQ ID NO: 219748 - DNA, 22 bp, Artificial Sequence
  Synthetic oligonucleotide; CTG chr2 60499201 60499222 60499206 60499201 -
tcttgctctaccaggccttagg

SEQ ID NO: 219749 - DNA, 22 bp, Artificial Sequence
  Synthetic oligonucleotide; CTT chr2 60499197 60499218 60499202 60499197 -
gctctaccaggccttaggttct

SEQ ID NO: 219750 - DNA, 22 bp, Artificial Sequence
  Synthetic oligonucleotide; TTG chr2 60499196 60499217 60499201 60499196 -
ctctaccaggccttaggttctg

SEQ ID NO: 219751 - DNA, 22 bp, Artificial Sequence
  Synthetic oligonucleotide; CTC chr2 60499193 60499214 60499198 60499193 -
taccaggccttaggttctgtgg

SEQ ID NO: 219752 - DNA, 22 bp, Artificial Sequence
  Synthetic oligonucleotide; CTA chr2 60499191 60499212 60499196 60499191 -
ccaggccttaggttctgtggcc

SEQ ID NO: 219753 - DNA, 22 bp, Artificial Sequence
  Synthetic oligonucleotide; CTT chr2 60499182 60499203 60499187 60499182 -
aggttctgtggccagatactgt

SEQ ID NO: 219754 - DNA, 22 bp, Artificial Sequence
  Synthetic oligonucleotide; TTA chr2 60499181 60499202 60499186 60499181 -
ggttctgtggccagatactgtt

SEQ ID NO: 219755 - DNA, 22 bp, Artificial Sequence
  Synthetic oligonucleotide; TTC chr2 60499176 60499197 60499181 60499176 -
tgtggccagatactgttctcca

SEQ ID NO: 219756 - DNA, 22 bp, Artificial Sequence
  Synthetic oligonucleotide; CTG chr2 60499174 60499195 60499179 60499174 -
tggccagatactgttctccagc

SEQ ID NO: 219757 - DNA, 22 bp, Artificial Sequence
  Synthetic oligonucleotide; CTG chr2 60499161 60499182 60499166 60499161 -
ttctccagctctttggcttggg

SEQ ID NO: 219758 - DNA, 22 bp, Artificial Sequence
  Synthetic oligonucleotide; TTC chr2 60499158 60499179 60499163 60499158 -
tccagctctttggcttgggccc

SEQ ID NO: 219759 - DNA, 22 bp, Artificial Sequence
  Synthetic oligonucleotide; CTC chr2 60499156 60499177 60499161 60499156 -
cagctctttggcttgggccccg

SEQ ID NO: 219760 - DNA, 22 bp, Artificial Sequence
  Synthetic oligonucleotide; CTC chr2 60499150 60499171 60499155 60499150 -
tttggcttgggccccgagacca

SEQ ID NO: 219761 - DNA, 22 bp, Artificial Sequence
  Synthetic oligonucleotide; CTT chr2 60499148 60499169 60499153 60499148 -
tggcttgggccccgagaccaga

SEQ ID NO: 219762 - DNA, 22 bp, Artificial Sequence
  Synthetic oligonucleotide; TTT chr2 60499147 60499168 60499152 60499147 -
ggcttgggccccgagaccagag

SEQ ID NO: 219763 - DNA, 22 bp, Artificial Sequence
  Synthetic oligonucleotide; TTG chr2 60499146 60499167 60499151 60499146 -
gcttgggccccgagaccagaga

SEQ ID NO: 219764 - DNA, 22 bp, Artificial Sequence
  Synthetic oligonucleotide; CTT chr2 60499142 60499163 60499147 60499142 -
gggccccgagaccagagaagat

SEQ ID NO: 219765 - DNA, 22 bp, Artificial Sequence
  Synthetic oligonucleotide; TTG chr2 60499141 60499162 60499146 60499141 -
ggccccgagaccagagaagata

SEQ ID NO: 219766 - DNA, 22 bp, Artificial Sequence
  Synthetic oligonucleotide; CTG chr2 60499100 60499121 60499105 60499100 -
aatactggggaacacattgtag

SEQ ID NO: 219767 - DNA, 22 bp, Artificial Sequence
  Synthetic oligonucleotide; CTG chr2 60499093 60499114 60499098 60499093 -
gggaacacattgtagggtgatc

SEQ ID NO: 219768 - DNA, 22 bp, Artificial Sequence
  Synthetic oligonucleotide; TTG chr2 60499081 60499102 60499086 60499081 -
tagggtgatctcccagaaaagc

SEQ ID NO: 219769 - DNA, 22 bp, Artificial Sequence
  Synthetic oligonucleotide; CTC chr2 60499069 60499090 60499074 60499069 -
ccagaaaagccagcgagaaatg

SEQ ID NO: 219770 - DNA, 22 bp, Artificial Sequence
  Synthetic oligonucleotide; CTG chr2 60499042 60499063 60499047 60499042 -
tagctgtagcattcttcccttt

SEQ ID NO: 219771 - DNA, 22 bp, Artificial Sequence
  Synthetic oligonucleotide; CTG chr2 60499036 60499057 60499041 60499036 -
tagcattcttccctttggatgc

SEQ ID NO: 219772 - DNA, 22 bp, Artificial Sequence
  Synthetic oligonucleotide; TTC chr2 60499028 60499049 60499033 60499028 -
ttccctttggatgcctgtgtgg

SEQ ID NO: 219773 - DNA, 22 bp, Artificial Sequence
  Synthetic oligonucleotide; CTT chr2 60499026 60499047 60499031 60499026 -
ccctttggatgcctgtgtgggg

SEQ ID NO: 219774 - DNA, 22 bp, Artificial Sequence
  Synthetic oligonucleotide; TTC chr2 60499025 60499046 60499030 60499025 -
cctttggatgcctgtgtgggga

SEQ ID NO: 219775 - DNA, 22 bp, Artificial Sequence
  Synthetic oligonucleotide; CTT chr2 60499021 60499042 60499026 60499021 -
tggatgcctgtgtggggacaga

SEQ ID NO: 219776 - DNA, 22 bp, Artificial Sequence
  Synthetic oligonucleotide; TTT chr2 60499020 60499041 60499025 60499020 -
ggatgcctgtgtggggacagaa

SEQ ID NO: 219777 - DNA, 22 bp, Artificial Sequence
  Synthetic oligonucleotide; TTG chr2 60499019 60499040 60499024 60499019 -
gatgcctgtgtggggacagaat

SEQ ID NO: 219778 - DNA, 22 bp, Artificial Sequence
  Synthetic oligonucleotide; CTG chr2 60499011 60499032 60499016 60499011 -
tgtggggacagaatcagtggaa

SEQ ID NO: 219779 - DNA, 22 bp, Artificial Sequence
  Synthetic oligonucleotide; CTG chr2 60498966 60498987 60498971 60498966 -
gccctgcctctcatcaatgccc

SEQ ID NO: 219780 - DNA, 22 bp, Artificial Sequence
  Synthetic oligonucleotide; CTG chr2 60498960 60498981 60498965 60498960 -
cctctcatcaatgcccccccac

SEQ ID NO: 219781 - DNA, 22 bp, Artificial Sequence
  Synthetic oligonucleotide; CTC chr2 60498956 60498977 60498961 60498956 -
tcatcaatgcccccccaccacc

SEQ ID NO: 219782 - DNA, 22 bp, Artificial Sequence
  Synthetic oligonucleotide; CTC chr2 60498954 60498975 60498959 60498954 -
atcaatgcccccccaccaccca

SEQ ID NO: 219783 - DNA, 22 bp, Artificial Sequence
  Synthetic oligonucleotide; CTG chr2 60498919 60498940 60498924 60498919 -
cttcctgttctattagacaaac

SEQ ID NO: 219784 - DNA, 22 bp, Artificial Sequence
  Synthetic oligonucleotide; CTT chr2 60498916 60498937 60498921 60498916 -
cctgttctattagacaaacgta

SEQ ID NO: 219785 - DNA, 22 bp, Artificial Sequence
  Synthetic oligonucleotide; TTC chr2 60498915 60498936 60498920 60498915 -
ctgttctattagacaaacgtag

SEQ ID NO: 219786 - DNA, 22 bp, Artificial Sequence
  Synthetic oligonucleotide; CTG chr2 60498912 60498933 60498917 60498912 -
ttctattagacaaacgtagttt

SEQ ID NO: 219787 - DNA, 22 bp, Artificial Sequence
  Synthetic oligonucleotide; TTC chr2 60498909 60498930 60498914 60498909 -
tattagacaaacgtagtttctg

SEQ ID NO: 219788 - DNA, 22 bp, Artificial Sequence
  Synthetic oligonucleotide; CTA chr2 60498907 60498928 60498912 60498907 -
ttagacaaacgtagtttctgga

SEQ ID NO: 219789 - DNA, 22 bp, Artificial Sequence
  Synthetic oligonucleotide; TTA chr2 60498904 60498925 60498909 60498904 -
gacaaacgtagtttctggatga

SEQ ID NO: 219790 - DNA, 22 bp, Artificial Sequence
  Synthetic oligonucleotide; TTT chr2 60498890 60498911 60498895 60498890 -
ctggatgagttggacagtcatc

SEQ ID NO: 219791 - DNA, 22 bp, Artificial Sequence
  Synthetic oligonucleotide; TTC chr2 60498889 60498910 60498894 60498889 -
tggatgagttggacagtcatct

SEQ ID NO: 219792 - DNA, 22 bp, Artificial Sequence
  Synthetic oligonucleotide; CTG chr2 60498887 60498908 60498892 60498887 -
gatgagttggacagtcatctga

SEQ ID NO: 219793 - DNA, 22 bp, Artificial Sequence
  Synthetic oligonucleotide; TTG chr2 60498878 60498899 60498883 60498878 -
gacagtcatctgagtttgatca

SEQ ID NO: 219794 - DNA, 22 bp, Artificial Sequence
  Synthetic oligonucleotide; CTG chr2 60498866 60498887 60498871 60498866 -
agtttgatcaagatttacaggt

SEQ ID NO: 219795 - DNA, 22 bp, Artificial Sequence
  Synthetic oligonucleotide; TTT chr2 60498861 60498882 60498866 60498861 -
gatcaagatttacaggtaattc

SEQ ID NO: 219796 - DNA, 22 bp, Artificial Sequence
  Synthetic oligonucleotide; TTG chr2 60498860 60498881 60498865 60498860 -
atcaagatttacaggtaattca

SEQ ID NO: 219797 - DNA, 22 bp, Artificial Sequence
  Synthetic oligonucleotide; TTT chr2 60498850 60498871 60498855 60498850 -
acaggtaattcaaatgtatgta

SEQ ID NO: 219798 - DNA, 22 bp, Artificial Sequence
  Synthetic oligonucleotide; TTA chr2 60498849 60498870 60498854 60498849 -
caggtaattcaaatgtatgtat

SEQ ID NO: 219799 - DNA, 22 bp, Artificial Sequence
  Synthetic oligonucleotide; TTC chr2 60498839 60498860 60498844 60498839 -
aaatgtatgtataaggtacata

SEQ ID NO: 219800 - DNA, 22 bp, Artificial Sequence
  Synthetic oligonucleotide; TTA chr2 60498810 60498831 60498815 60498810 -
gtacatccatcagagaggcttc

SEQ ID NO: 219801 - DNA, 22 bp, Artificial Sequence
  Synthetic oligonucleotide; CTT chr2 60498789 60498810 60498794 60498789 -
ccttaagccacaagtctctagc

SEQ ID NO: 219802 - DNA, 22 bp, Artificial Sequence
  Synthetic oligonucleotide; TTC chr2 60498788 60498809 60498793 60498788 -
cttaagccacaagtctctagct

SEQ ID NO: 219803 - DNA, 22 bp, Artificial Sequence
  Synthetic oligonucleotide; CTT chr2 60498785 60498806 60498790 60498785 -
aagccacaagtctctagctcct

SEQ ID NO: 219804 - DNA, 22 bp, Artificial Sequence
  Synthetic oligonucleotide; TTA chr2 60498784 60498805 60498789 60498784 -
agccacaagtctctagctcctc

SEQ ID NO: 219805 - DNA, 22 bp, Artificial Sequence
  Synthetic oligonucleotide; CTC chr2 60498771 60498792 60498776 60498771 -
tagctcctcagagaactggcag

SEQ ID NO: 219806 - DNA, 22 bp, Artificial Sequence
  Synthetic oligonucleotide; CTA chr2 60498769 60498790 60498774 60498769 -
gctcctcagagaactggcagtc

SEQ ID NO: 219807 - DNA, 22 bp, Artificial Sequence
  Synthetic oligonucleotide; CTC chr2 60498765 60498786 60498770 60498765 -
ctcagagaactggcagtctggc

SEQ ID NO: 219808 - DNA, 22 bp, Artificial Sequence
  Synthetic oligonucleotide; CTC chr2 60498762 60498783 60498767 60498762 -
agagaactggcagtctggctgg

SEQ ID NO: 219809 - DNA, 22 bp, Artificial Sequence
  Synthetic oligonucleotide; CTG chr2 60498753 60498774 60498758 60498753 -
gcagtctggctgggtctgtacg

SEQ ID NO: 219810 - DNA, 22 bp, Artificial Sequence
  Synthetic oligonucleotide; CTG chr2 60498745 60498766 60498750 60498745 -
gctgggtctgtacgaacttgga

SEQ ID NO: 219811 - DNA, 22 bp, Artificial Sequence
  Synthetic oligonucleotide; CTG chr2 60498741 60498762 60498746 60498741 -
ggtctgtacgaacttggaccta

SEQ ID NO: 219812 - DNA, 22 bp, Artificial Sequence
  Synthetic oligonucleotide; CTG chr2 60498735 60498756 60498740 60498735 -
tacgaacttggacctatagatg

SEQ ID NO: 219813 - DNA, 22 bp, Artificial Sequence
  Synthetic oligonucleotide; CTT chr2 60498726 60498747 60498731 60498726 -
ggacctatagatgacctcactg

SEQ ID NO: 219814 - DNA, 22 bp, Artificial Sequence
  Synthetic oligonucleotide; TTG chr2 60498725 60498746 60498730 60498725 -
gacctatagatgacctcactgg

SEQ ID NO: 219815 - DNA, 22 bp, Artificial Sequence
  Synthetic oligonucleotide; CTA chr2 60498719 60498740 60498724 60498719 -
tagatgacctcactggtttctc

SEQ ID NO: 219816 - DNA, 22 bp, Artificial Sequence
  Synthetic oligonucleotide; CTC chr2 60498708 60498729 60498713 60498708 -
actggtttctccccttgtcacc

SEQ ID NO: 219817 - DNA, 22 bp, Artificial Sequence
  Synthetic oligonucleotide; CTG chr2 60498704 60498725 60498709 60498704 -
gtttctccccttgtcacctcat

SEQ ID NO: 219818 - DNA, 22 bp, Artificial Sequence
  Synthetic oligonucleotide; TTT chr2 60498700 60498721 60498705 60498700 -
ctccccttgtcacctcatctgc

SEQ ID NO: 219819 - DNA, 22 bp, Artificial Sequence
  Synthetic oligonucleotide; TTC chr2 60498699 60498720 60498704 60498699 -
tccccttgtcacctcatctgcc

SEQ ID NO: 219820 - DNA, 22 bp, Artificial Sequence
  Synthetic oligonucleotide; CTC chr2 60498697 60498718 60498702 60498697 -
cccttgtcacctcatctgcctg

SEQ ID NO: 219821 - DNA, 22 bp, Artificial Sequence
  Synthetic oligonucleotide; CTT chr2 60498692 60498713 60498697 60498692 -
gtcacctcatctgcctgcttcc

SEQ ID NO: 219822 - DNA, 22 bp, Artificial Sequence
  Synthetic oligonucleotide; TTG chr2 60498691 60498712 60498696 60498691 -
tcacctcatctgcctgcttcct

SEQ ID NO: 219823 - DNA, 22 bp, Artificial Sequence
  Synthetic oligonucleotide; CTC chr2 60498684 60498705 60498689 60498684 -
atctgcctgcttccttctcttt

SEQ ID NO: 219824 - DNA, 22 bp, Artificial Sequence
  Synthetic oligonucleotide; CTG chr2 60498679 60498700 60498684 60498679 -
cctgcttccttctctttactga

SEQ ID NO: 219825 - DNA, 22 bp, Artificial Sequence
  Synthetic oligonucleotide; CTG chr2 60498675 60498696 60498680 60498675 -
cttccttctctttactgatctt

SEQ ID NO: 219826 - DNA, 22 bp, Artificial Sequence
  Synthetic oligonucleotide; CTT chr2 60498672 60498693 60498677 60498672 -
ccttctctttactgatcttatg

SEQ ID NO: 219827 - DNA, 22 bp, Artificial Sequence
  Synthetic oligonucleotide; TTC chr2 60498671 60498692 60498676 60498671 -
cttctctttactgatcttatgt

SEQ ID NO: 219828 - DNA, 22 bp, Artificial Sequence
  Synthetic oligonucleotide; CTT chr2 60498668 60498689 60498673 60498668 -
ctctttactgatcttatgtgag

SEQ ID NO: 219829 - DNA, 22 bp, Artificial Sequence
  Synthetic oligonucleotide; TTC chr2 60498667 60498688 60498672 60498667 -
tctttactgatcttatgtgagt

SEQ ID NO: 219830 - DNA, 22 bp, Artificial Sequence
  Synthetic oligonucleotide; CTC chr2 60498665 60498686 60498670 60498665 -
tttactgatcttatgtgagtag

SEQ ID NO: 219831 - DNA, 22 bp, Artificial Sequence
  Synthetic oligonucleotide; CTT chr2 60498663 60498684 60498668 60498663 -
tactgatcttatgtgagtaggt

SEQ ID NO: 219832 - DNA, 22 bp, Artificial Sequence
  Synthetic oligonucleotide; TTT chr2 60498662 60498683 60498667 60498662 -
actgatcttatgtgagtaggta

SEQ ID NO: 219833 - DNA, 22 bp, Artificial Sequence
  Synthetic oligonucleotide; TTA chr2 60498661 60498682 60498666 60498661 -
ctgatcttatgtgagtaggtag

SEQ ID NO: 219834 - DNA, 22 bp, Artificial Sequence
  Synthetic oligonucleotide; CTG chr2 60498658 60498679 60498663 60498658 -
atcttatgtgagtaggtagagg

SEQ ID NO: 219835 - DNA, 22 bp, Artificial Sequence
  Synthetic oligonucleotide; CTT chr2 60498653 60498674 60498658 60498653 -
atgtgagtaggtagaggggtca

SEQ ID NO: 219836 - DNA, 22 bp, Artificial Sequence
  Synthetic oligonucleotide; TTA chr2 60498652 60498673 60498657 60498652 -
tgtgagtaggtagaggggtcag

SEQ ID NO: 219837 - DNA, 22 bp, Artificial Sequence
  Synthetic oligonucleotide; CTC chr2 60498622 60498643 60498627 60498622 -
tgctcagctctgcccagcacac

SEQ ID NO: 219838 - DNA, 22 bp, Artificial Sequence
  Synthetic oligonucleotide; CTG chr2 60498620 60498641 60498625 60498620 -
ctcagctctgcccagcacacta

SEQ ID NO: 219839 - DNA, 22 bp, Artificial Sequence
  Synthetic oligonucleotide; CTC chr2 60498617 60498638 60498622 60498617 -
agctctgcccagcacactaagc

SEQ ID NO: 219840 - DNA, 22 bp, Artificial Sequence
  Synthetic oligonucleotide; CTC chr2 60498612 60498633 60498617 60498612 -
tgcccagcacactaagcctatt

SEQ ID NO: 219841 - DNA, 22 bp, Artificial Sequence
  Synthetic oligonucleotide; CTG chr2 60498610 60498631 60498615 60498610 -
cccagcacactaagcctatttg

SEQ ID NO: 219842 - DNA, 22 bp, Artificial Sequence
  Synthetic oligonucleotide; CTA chr2 60498598 60498619 60498603 60498598 -
agcctatttgctattaaaattt

SEQ ID NO: 219843 - DNA, 22 bp, Artificial Sequence
  Synthetic oligonucleotide; CTA chr2 60498592 60498613 60498597 60498592 -
tttgctattaaaatttgaaaaa

SEQ ID NO: 219844 - DNA, 22 bp, Artificial Sequence
  Synthetic oligonucleotide; TTT chr2 60498589 60498610 60498594 60498589 -
gctattaaaatttgaaaaacaa

SEQ ID NO: 219845 - DNA, 22 bp, Artificial Sequence
  Synthetic oligonucleotide; TTG chr2 60498588 60498609 60498593 60498588 -
ctattaaaatttgaaaaacaaa

SEQ ID NO: 219846 - DNA, 22 bp, Artificial Sequence
  Synthetic oligonucleotide; CTA chr2 60498585 60498606 60498590 60498585 -
ttaaaatttgaaaaacaaatgc

SEQ ID NO: 219847 - DNA, 22 bp, Artificial Sequence
  Synthetic oligonucleotide; TTA chr2 60498582 60498603 60498587 60498582 -
aaatttgaaaaacaaatgcagg

SEQ ID NO: 219848 - DNA, 22 bp, Artificial Sequence
  Synthetic oligonucleotide; TTT chr2 60498576 60498597 60498581 60498576 -
gaaaaacaaatgcaggtgccag

SEQ ID NO: 219849 - DNA, 22 bp, Artificial Sequence
  Synthetic oligonucleotide; TTG chr2 60498575 60498596 60498580 60498575 -
aaaaacaaatgcaggtgccaga

SEQ ID NO: 219850 - DNA, 22 bp, Artificial Sequence
  Synthetic oligonucleotide; CTA chr2 60498545 60498566 60498550 60498545 -
aataatgaatgtcccaggccaa

SEQ ID NO: 219851 - DNA, 22 bp, Artificial Sequence
  Synthetic oligonucleotide; TTC chr2 60498520 60498541 60498525 60498520 -
taggaagggaagtgggtatggg

SEQ ID NO: 219852 - DNA, 22 bp, Artificial Sequence
  Synthetic oligonucleotide; CTA chr2 60498518 60498539 60498523 60498518 -
ggaagggaagtgggtatggggc

SEQ ID NO: 219853 - DNA, 22 bp, Artificial Sequence
  Synthetic oligonucleotide; TTG chr2 60498487 60498508 60498492 60498487 -
ccttcctggtaccaggatgatg

SEQ ID NO: 219854 - DNA, 22 bp, Artificial Sequence
  Synthetic oligonucleotide; CTT chr2 60498483 60498504 60498488 60498483 -
cctggtaccaggatgatgcaat

SEQ ID NO: 219855 - DNA, 22 bp, Artificial Sequence
  Synthetic oligonucleotide; TTC chr2 60498482 60498503 60498487 60498482 -
ctggtaccaggatgatgcaatg

SEQ ID NO: 219856 - DNA, 22 bp, Artificial Sequence
  Synthetic oligonucleotide; CTG chr2 60498479 60498500 60498484 60498479 -
gtaccaggatgatgcaatgctt

SEQ ID NO: 219857 - DNA, 22 bp, Artificial Sequence
  Synthetic oligonucleotide; CTT chr2 60498457 60498478 60498462 60498457 -
ggaggctgtgagctccccacct

SEQ ID NO: 219858 - DNA, 22 bp, Artificial Sequence
  Synthetic oligonucleotide; TTG chr2 60498456 60498477 60498461 60498456 -
gaggctgtgagctccccacctt

SEQ ID NO: 219859 - DNA, 22 bp, Artificial Sequence
  Synthetic oligonucleotide; CTG chr2 60498449 60498470 60498454 60498449 -
tgagctccccaccttctcaggg

SEQ ID NO: 219860 - DNA, 22 bp, Artificial Sequence
  Synthetic oligonucleotide; CTC chr2 60498442 60498463 60498447 60498442 -
cccaccttctcagggcacaccc

SEQ ID NO: 219861 - DNA, 22 bp, Artificial Sequence
  Synthetic oligonucleotide; CTT chr2 60498434 60498455 60498439 60498434 -
ctcagggcacaccctgtgatct

SEQ ID NO: 219862 - DNA, 22 bp, Artificial Sequence
  Synthetic oligonucleotide; TTC chr2 60498433 60498454 60498438 60498433 -
tcagggcacaccctgtgatctt

SEQ ID NO: 219863 - DNA, 22 bp, Artificial Sequence
  Synthetic oligonucleotide; CTC chr2 60498431 60498452 60498436 60498431 -
agggcacaccctgtgatcttgt

SEQ ID NO: 219864 - DNA, 22 bp, Artificial Sequence
  Synthetic oligonucleotide; CTG chr2 60498418 60498439 60498423 60498418 -
tgatcttgtgggacccctctgt

SEQ ID NO: 219865 - DNA, 22 bp, Artificial Sequence
  Synthetic oligonucleotide; CTT chr2 60498411 60498432 60498416 60498411 -
gtgggacccctctgtccagccc

SEQ ID NO: 219866 - DNA, 22 bp, Artificial Sequence
  Synthetic oligonucleotide; TTG chr2 60498410 60498431 60498415 60498410 -
tgggacccctctgtccagccca

SEQ ID NO: 219867 - DNA, 22 bp, Artificial Sequence
  Synthetic oligonucleotide; CTC chr2 60498399 60498420 60498404 60498399 -
tgtccagcccagcctgggtgtg

SEQ ID NO: 219868 - DNA, 22 bp, Artificial Sequence
  Synthetic oligonucleotide; CTG chr2 60498397 60498418 60498402 60498397 -
tccagcccagcctgggtgtgca

SEQ ID NO: 219869 - DNA, 22 bp, Artificial Sequence
  Synthetic oligonucleotide; CTG chr2 60498383 60498404 60498388 60498383 -
ggtgtgcatcttgtgtgcttgg

SEQ ID NO: 219870 - DNA, 22 bp, Artificial Sequence
  Synthetic oligonucleotide; CTT chr2 60498371 60498392 60498376 60498371 -
gtgtgcttggtcggcactgata

SEQ ID NO: 219871 - DNA, 22 bp, Artificial Sequence
  Synthetic oligonucleotide; TTG chr2 60498370 60498391 60498375 60498370 -
tgtgcttggtcggcactgatag

SEQ ID NO: 219872 - DNA, 22 bp, Artificial Sequence
  Synthetic oligonucleotide; CTT chr2 60498363 60498384 60498368 60498363 -
ggtcggcactgataggggtcgc

SEQ ID NO: 219873 - DNA, 22 bp, Artificial Sequence
  Synthetic oligonucleotide; TTG chr2 60498362 60498383 60498367 60498362 -
gtcggcactgataggggtcgcg

SEQ ID NO: 219874 - DNA, 22 bp, Artificial Sequence
  Synthetic oligonucleotide; CTG chr2 60498352 60498373 60498357 60498352 -
ataggggtcgcggtagggagtt

SEQ ID NO: 219875 - DNA, 22 bp, Artificial Sequence
  Synthetic oligonucleotide; TTG chr2 60498329 60498350 60498334 60498329 -
tcggcacacactgctgcatgtc

SEQ ID NO: 219876 - DNA, 22 bp, Artificial Sequence
  Synthetic oligonucleotide; CTG chr2 60498316 60498337 60498321 60498316 -
ctgcatgtcctgtgagcggtcc

SEQ ID NO: 219877 - DNA, 22 bp, Artificial Sequence
  Synthetic oligonucleotide; CTG chr2 60498313 60498334 60498318 60498313 -
catgtcctgtgagcggtcccca

SEQ ID NO: 219878 - DNA, 22 bp, Artificial Sequence
  Synthetic oligonucleotide; CTG chr2 60498304 60498325 60498309 60498304 -
tgagcggtccccaaggctgtgc

SEQ ID NO: 219879 - DNA, 22 bp, Artificial Sequence
  Synthetic oligonucleotide; CTG chr2 60498285 60498306 60498290 60498285 -
tgcccagccttcagtgtccagg

SEQ ID NO: 219880 - DNA, 22 bp, Artificial Sequence
  Synthetic oligonucleotide; CTT chr2 60498274 60498295 60498279 60498274 -
cagtgtccagggcctcttctga

SEQ ID NO: 219881 - DNA, 22 bp, Artificial Sequence
  Synthetic oligonucleotide; TTC chr2 60498273 60498294 60498278 60498273 -
agtgtccagggcctcttctgac

SEQ ID NO: 219882 - DNA, 22 bp, Artificial Sequence
  Synthetic oligonucleotide; CTC chr2 60498258 60498279 60498263 60498258 -
ttctgacaggccctgctggtta

SEQ ID NO: 219883 - DNA, 22 bp, Artificial Sequence
  Synthetic oligonucleotide; CTT chr2 60498256 60498277 60498261 60498256 -
ctgacaggccctgctggttatc

SEQ ID NO: 219884 - DNA, 22 bp, Artificial Sequence
  Synthetic oligonucleotide; TTC chr2 60498255 60498276 60498260 60498255 -
tgacaggccctgctggttatca

SEQ ID NO: 219885 - DNA, 22 bp, Artificial Sequence
  Synthetic oligonucleotide; CTG chr2 60498253 60498274 60498258 60498253 -
acaggccctgctggttatcact

SEQ ID NO: 219886 - DNA, 22 bp, Artificial Sequence
  Synthetic oligonucleotide; CTG chr2 60498243 60498264 60498248 60498243 -
ctggttatcactgttggcatta

SEQ ID NO: 219887 - DNA, 22 bp, Artificial Sequence
  Synthetic oligonucleotide; CTG chr2 60498240 60498261 60498245 60498240 -
gttatcactgttggcattatct

SEQ ID NO: 219888 - DNA, 22 bp, Artificial Sequence
  Synthetic oligonucleotide; TTA chr2 60498236 60498257 60498241 60498236 -
tcactgttggcattatctccac

SEQ ID NO: 219889 - DNA, 22 bp, Artificial Sequence
  Synthetic oligonucleotide; CTG chr2 60498230 60498251 60498235 60498230 -
ttggcattatctccacgcacca

SEQ ID NO: 219890 - DNA, 22 bp, Artificial Sequence
  Synthetic oligonucleotide; TTG chr2 60498227 60498248 60498232 60498227 -
gcattatctccacgcaccactt

SEQ ID NO: 219891 - DNA, 22 bp, Artificial Sequence
  Synthetic oligonucleotide; TTA chr2 60498221 60498242 60498226 60498221 -
tctccacgcaccacttctgtgc

SEQ ID NO: 219892 - DNA, 22 bp, Artificial Sequence
  Synthetic oligonucleotide; CTC chr2 60498217 60498238 60498222 60498217 -
cacgcaccacttctgtgcccag

SEQ ID NO: 219893 - DNA, 22 bp, Artificial Sequence
  Synthetic oligonucleotide; CTT chr2 60498205 60498226 60498210 60498205 -
ctgtgcccagggctgctgggtc

SEQ ID NO: 219894 - DNA, 22 bp, Artificial Sequence
  Synthetic oligonucleotide; TTC chr2 60498204 60498225 60498209 60498204 -
tgtgcccagggctgctgggtca

SEQ ID NO: 219895 - DNA, 22 bp, Artificial Sequence
  Synthetic oligonucleotide; CTG chr2 60498202 60498223 60498207 60498202 -
tgcccagggctgctgggtcacc

SEQ ID NO: 219896 - DNA, 22 bp, Artificial Sequence
  Synthetic oligonucleotide; CTG chr2 60498190 60498211 60498195 60498190 -
ctgggtcaccttaaggagccac

SEQ ID NO: 219897 - DNA, 22 bp, Artificial Sequence
  Synthetic oligonucleotide; CTG chr2 60498187 60498208 60498192 60498187 -
ggtcaccttaaggagccacaca

SEQ ID NO: 219898 - DNA, 22 bp, Artificial Sequence
  Synthetic oligonucleotide; CTT chr2 60498178 60498199 60498183 60498178 -
aaggagccacacacccgtctac

SEQ ID NO: 219899 - DNA, 22 bp, Artificial Sequence
  Synthetic oligonucleotide; TTA chr2 60498177 60498198 60498182 60498177 -
aggagccacacacccgtctaca

SEQ ID NO: 219900 - DNA, 22 bp, Artificial Sequence
  Synthetic oligonucleotide; CTA chr2 60498157 60498178 60498162 60498157 -
catagaggcccttcctgcttgg

SEQ ID NO: 219901 - DNA, 22 bp, Artificial Sequence
  Synthetic oligonucleotide; CTT chr2 60498144 60498165 60498149 60498144 -
cctgcttggggtctgacccagt

SEQ ID NO: 219902 - DNA, 22 bp, Artificial Sequence
  Synthetic oligonucleotide; TTC chr2 60498143 60498164 60498148 60498143 -
ctgcttggggtctgacccagtt

SEQ ID NO: 219903 - DNA, 22 bp, Artificial Sequence
  Synthetic oligonucleotide; CTG chr2 60498140 60498161 60498145 60498140 -
cttggggtctgacccagttatc

SEQ ID NO: 219904 - DNA, 22 bp, Artificial Sequence
  Synthetic oligonucleotide; CTT chr2 60498137 60498158 60498142 60498137 -
ggggtctgacccagttatcccc

SEQ ID NO: 219905 - DNA, 22 bp, Artificial Sequence
  Synthetic oligonucleotide; TTG chr2 60498136 60498157 60498141 60498136 -
gggtctgacccagttatcccct

SEQ ID NO: 219906 - DNA, 22 bp, Artificial Sequence
  Synthetic oligonucleotide; CTG chr2 60498129 60498150 60498134 60498129 -
acccagttatcccctccacacc

SEQ ID NO: 219907 - DNA, 22 bp, Artificial Sequence
  Synthetic oligonucleotide; TTA chr2 60498120 60498141 60498125 60498120 -
tcccctccacacctccattctc

SEQ ID NO: 219908 - DNA, 22 bp, Artificial Sequence
  Synthetic oligonucleotide; CTC chr2 60498113 60498134 60498118 60498113 -
cacacctccattctcccagact

SEQ ID NO: 219909 - DNA, 22 bp, Artificial Sequence
  Synthetic oligonucleotide; CTC chr2 60498105 60498126 60498110 60498105 -
cattctcccagacttttgactc

SEQ ID NO: 219910 - DNA, 22 bp, Artificial Sequence
  Synthetic oligonucleotide; TTC chr2 60498100 60498121 60498105 60498100 -
tcccagacttttgactcacccc

SEQ ID NO: 219911 - DNA, 22 bp, Artificial Sequence
  Synthetic oligonucleotide; CTC chr2 60498098 60498119 60498103 60498098 -
ccagacttttgactcaccccag

SEQ ID NO: 219912 - DNA, 22 bp, Artificial Sequence
  Synthetic oligonucleotide; CTT chr2 60498090 60498111 60498095 60498090 -
ttgactcaccccagccctgcta

SEQ ID NO: 219913 - DNA, 22 bp, Artificial Sequence
  Synthetic oligonucleotide; TTT chr2 60498089 60498110 60498094 60498089 -
tgactcaccccagccctgctaa

SEQ ID NO: 219914 - DNA, 22 bp, Artificial Sequence
  Synthetic oligonucleotide; TTT chr2 60498088 60498109 60498093 60498088 -
gactcaccccagccctgctaag

SEQ ID NO: 219915 - DNA, 22 bp, Artificial Sequence
  Synthetic oligonucleotide; TTG chr2 60498087 60498108 60498092 60498087 -
actcaccccagccctgctaaga

SEQ ID NO: 219916 - DNA, 22 bp, Artificial Sequence
  Synthetic oligonucleotide; CTC chr2 60498083 60498104 60498088 60498083 -
accccagccctgctaagagtga

SEQ ID NO: 219917 - DNA, 22 bp, Artificial Sequence
  Synthetic oligonucleotide; CTG chr2 60498071 60498092 60498076 60498071 -
ctaagagtgatgtcctccccca

SEQ ID NO: 219918 - DNA, 22 bp, Artificial Sequence
  Synthetic oligonucleotide; CTA chr2 60498068 60498089 60498073 60498068 -
agagtgatgtcctcccccaaag

SEQ ID NO: 219919 - DNA, 22 bp, Artificial Sequence
  Synthetic oligonucleotide; CTC chr2 60498054 60498075 60498059 60498054 -
ccccaaagagaagacccctgct

SEQ ID NO: 219920 - DNA, 22 bp, Artificial Sequence
  Synthetic oligonucleotide; CTG chr2 60498034 60498055 60498039 60498034 -
ctcttgagggtctgccaggtgg

SEQ ID NO: 219921 - DNA, 22 bp, Artificial Sequence
  Synthetic oligonucleotide; CTC chr2 60498031 60498052 60498036 60498031 -
ttgagggtctgccaggtgggtc

SEQ ID NO: 219922 - DNA, 22 bp, Artificial Sequence
  Synthetic oligonucleotide; CTT chr2 60498029 60498050 60498034 60498029 -
gagggtctgccaggtgggtccc

SEQ ID NO: 219923 - DNA, 22 bp, Artificial Sequence
  Synthetic oligonucleotide; TTG chr2 60498028 60498049 60498033 60498028 -
agggtctgccaggtgggtccct

SEQ ID NO: 219924 - DNA, 22 bp, Artificial Sequence
  Synthetic oligonucleotide; CTG chr2 60498020 60498041 60498025 60498020 -
ccaggtgggtccctcatctccc

SEQ ID NO: 219925 - DNA, 22 bp, Artificial Sequence
  Synthetic oligonucleotide; CTC chr2 60498005 60498026 60498010 60498005 -
atctccccacctccatgggcct

SEQ ID NO: 219926 - DNA, 22 bp, Artificial Sequence
  Synthetic oligonucleotide; CTC chr2 60498000 60498021 60498005 60498000 -
cccacctccatgggcctcttgg

SEQ ID NO: 219927 - DNA, 22 bp, Artificial Sequence
  Synthetic oligonucleotide; CTC chr2 60497992 60498013 60497997 60497992 -
catgggcctcttggattttgtg

SEQ ID NO: 219928 - DNA, 22 bp, Artificial Sequence
  Synthetic oligonucleotide; CTC chr2 60497982 60498003 60497987 60497982 -
ttggattttgtgcatagcaatc

SEQ ID NO: 219929 - DNA, 22 bp, Artificial Sequence
  Synthetic oligonucleotide; CTT chr2 60497980 60498001 60497985 60497980 -
ggattttgtgcatagcaatctc

SEQ ID NO: 219930 - DNA, 22 bp, Artificial Sequence
  Synthetic oligonucleotide; TTG chr2 60497979 60498000 60497984 60497979 -
gattttgtgcatagcaatctct

SEQ ID NO: 219931 - DNA, 22 bp, Artificial Sequence
  Synthetic oligonucleotide; TTT chr2 60497974 60497995 60497979 60497974 -
tgtgcatagcaatctctgcaac

SEQ ID NO: 219932 - DNA, 22 bp, Artificial Sequence
  Synthetic oligonucleotide; TTT chr2 60497973 60497994 60497978 60497973 -
gtgcatagcaatctctgcaaca

SEQ ID NO: 219933 - DNA, 22 bp, Artificial Sequence
  Synthetic oligonucleotide; TTG chr2 60497972 60497993 60497977 60497972 -
tgcatagcaatctctgcaacac

SEQ ID NO: 219934 - DNA, 22 bp, Artificial Sequence
  Synthetic oligonucleotide; CTC chr2 60497958 60497979 60497963 60497958 -
tgcaacaccctgacctttatgg

SEQ ID NO: 219935 - DNA, 22 bp, Artificial Sequence
  Synthetic oligonucleotide; CTG chr2 60497956 60497977 60497961 60497956 -
caacaccctgacctttatgggg

SEQ ID NO: 219936 - DNA, 22 bp, Artificial Sequence
  Synthetic oligonucleotide; CTG chr2 60497946 60497967 60497951 60497946 -
acctttatggggtcatcctcgg

SEQ ID NO: 219937 - DNA, 22 bp, Artificial Sequence
  Synthetic oligonucleotide; CTT chr2 60497941 60497962 60497946 60497941 -
tatggggtcatcctcggccaat

SEQ ID NO: 219938 - DNA, 22 bp, Artificial Sequence
  Synthetic oligonucleotide; TTT chr2 60497940 60497961 60497945 60497940 -
atggggtcatcctcggccaatg

SEQ ID NO: 219939 - DNA, 22 bp, Artificial Sequence
  Synthetic oligonucleotide; TTA chr2 60497939 60497960 60497944 60497939 -
tggggtcatcctcggccaatga

SEQ ID NO: 219940 - DNA, 22 bp, Artificial Sequence
  Synthetic oligonucleotide; CTC chr2 60497926 60497947 60497931 60497926 -
ggccaatgaagcggtgggtcca

SEQ ID NO: 219941 - DNA, 22 bp, Artificial Sequence
  Synthetic oligonucleotide; CTC chr2 60497899 60497920 60497904 60497899 -
ccccttctatcacctggctcac

SEQ ID NO: 219942 - DNA, 22 bp, Artificial Sequence
  Synthetic oligonucleotide; CTT chr2 60497893 60497914 60497898 60497893 -
ctatcacctggctcacttccat

SEQ ID NO: 219943 - DNA, 22 bp, Artificial Sequence
  Synthetic oligonucleotide; TTC chr2 60497892 60497913 60497897 60497892 -
tatcacctggctcacttccatc

SEQ ID NO: 219944 - DNA, 22 bp, Artificial Sequence
  Synthetic oligonucleotide; CTA chr2 60497890 60497911 60497895 60497890 -
tcacctggctcacttccatcct

SEQ ID NO: 219945 - DNA, 22 bp, Artificial Sequence
  Synthetic oligonucleotide; CTG chr2 60497883 60497904 60497888 60497883 -
gctcacttccatcctgcagagg

SEQ ID NO: 219946 - DNA, 22 bp, Artificial Sequence
  Synthetic oligonucleotide; CTC chr2 60497879 60497900 60497884 60497879 -
acttccatcctgcagaggaagc

SEQ ID NO: 219947 - DNA, 22 bp, Artificial Sequence
  Synthetic oligonucleotide; CTT chr2 60497875 60497896 60497880 60497875 -
ccatcctgcagaggaagcttgg

SEQ ID NO: 219948 - DNA, 22 bp, Artificial Sequence
  Synthetic oligonucleotide; TTC chr2 60497874 60497895 60497879 60497874 -
catcctgcagaggaagcttggt

SEQ ID NO: 219949 - DNA, 22 bp, Artificial Sequence
  Synthetic oligonucleotide; CTG chr2 60497867 60497888 60497872 60497867 -
cagaggaagcttggtttcattt

SEQ ID NO: 219950 - DNA, 22 bp, Artificial Sequence
  Synthetic oligonucleotide; CTT chr2 60497855 60497876 60497860 60497855 -
ggtttcatttaggacaatgtgc

SEQ ID NO: 219951 - DNA, 22 bp, Artificial Sequence
  Synthetic oligonucleotide; TTG chr2 60497854 60497875 60497859 60497854 -
gtttcatttaggacaatgtgca

SEQ ID NO: 219952 - DNA, 22 bp, Artificial Sequence
  Synthetic oligonucleotide; TTT chr2 60497850 60497871 60497855 60497850 -
catttaggacaatgtgcaggat

SEQ ID NO: 219953 - DNA, 22 bp, Artificial Sequence
  Synthetic oligonucleotide; TTC chr2 60497849 60497870 60497854 60497849 -
atttaggacaatgtgcaggatc

SEQ ID NO: 219954 - DNA, 22 bp, Artificial Sequence
  Synthetic oligonucleotide; TTT chr2 60497845 60497866 60497850 60497845 -
aggacaatgtgcaggatccttt

SEQ ID NO: 219955 - DNA, 22 bp, Artificial Sequence
  Synthetic oligonucleotide; TTA chr2 60497844 60497865 60497849 60497844 -
ggacaatgtgcaggatcctttt

SEQ ID NO: 219956 - DNA, 22 bp, Artificial Sequence
  Synthetic oligonucleotide; CTT chr2 60497824 60497845 60497829 60497824 -
ttgatcatttctctactggatc

SEQ ID NO: 219957 - DNA, 22 bp, Artificial Sequence
  Synthetic oligonucleotide; TTT chr2 60497823 60497844 60497828 60497823 -
tgatcatttctctactggatca

SEQ ID NO: 219958 - DNA, 22 bp, Artificial Sequence
  Synthetic oligonucleotide; TTT chr2 60497822 60497843 60497827 60497822 -
gatcatttctctactggatcat

SEQ ID NO: 219959 - DNA, 22 bp, Artificial Sequence
  Synthetic oligonucleotide; TTG chr2 60497821 60497842 60497826 60497821 -
atcatttctctactggatcatc

SEQ ID NO: 219960 - DNA, 22 bp, Artificial Sequence
  Synthetic oligonucleotide; TTT chr2 60497814 60497835 60497819 60497814 -
ctctactggatcatcagcaaag

SEQ ID NO: 219961 - DNA, 22 bp, Artificial Sequence
  Synthetic oligonucleotide; TTC chr2 60497813 60497834 60497818 60497813 -
tctactggatcatcagcaaagg

SEQ ID NO: 219962 - DNA, 22 bp, Artificial Sequence
  Synthetic oligonucleotide; CTC chr2 60497811 60497832 60497816 60497811 -
tactggatcatcagcaaaggga

SEQ ID NO: 219963 - DNA, 22 bp, Artificial Sequence
  Synthetic oligonucleotide; CTA chr2 60497809 60497830 60497814 60497809 -
ctggatcatcagcaaagggaga

SEQ ID NO: 219964 - DNA, 22 bp, Artificial Sequence
  Synthetic oligonucleotide; CTG chr2 60497806 60497827 60497811 60497806 -
gatcatcagcaaagggagaaat

SEQ ID NO: 219965 - DNA, 22 bp, Artificial Sequence
  Synthetic oligonucleotide; CTG chr2 60497765 60497786 60497770 60497765 -
agtcctttgggggaaatatgtg

SEQ ID NO: 219966 - DNA, 22 bp, Artificial Sequence
  Synthetic oligonucleotide; CTT chr2 60497758 60497779 60497763 60497758 -
tgggggaaatatgtgcctatag

SEQ ID NO: 219967 - DNA, 22 bp, Artificial Sequence
  Synthetic oligonucleotide; TTT chr2 60497757 60497778 60497762 60497757 -
gggggaaatatgtgcctatagt

SEQ ID NO: 219968 - DNA, 22 bp, Artificial Sequence
  Synthetic oligonucleotide; TTG chr2 60497756 60497777 60497761 60497756 -
ggggaaatatgtgcctatagta

SEQ ID NO: 219969 - DNA, 22 bp, Artificial Sequence
  Synthetic oligonucleotide; CTA chr2 60497739 60497760 60497744 60497739 -
tagtaaggtgatagttcagaga

SEQ ID NO: 219970 - DNA, 22 bp, Artificial Sequence
  Synthetic oligonucleotide; TTC chr2 60497722 60497743 60497727 60497722 -
agagaaagagaagagtaggagg

SEQ ID NO: 219971 - DNA, 22 bp, Artificial Sequence
  Synthetic oligonucleotide; CTG chr2 60497697 60497718 60497702 60497697 -
gacctgaaggccttccaaaaaa

SEQ ID NO: 219972 - DNA, 22 bp, Artificial Sequence
  Synthetic oligonucleotide; CTG chr2 60497691 60497712 60497696 60497691 -
aaggccttccaaaaaaagtaaa

SEQ ID NO: 219973 - DNA, 22 bp, Artificial Sequence
  Synthetic oligonucleotide; CTT chr2 60497683 60497704 60497688 60497683 -
ccaaaaaaagtaaaggatgtta

SEQ ID NO: 219974 - DNA, 22 bp, Artificial Sequence
  Synthetic oligonucleotide; TTC chr2 60497682 60497703 60497687 60497682 -
caaaaaaagtaaaggatgttaa

SEQ ID NO: 219975 - DNA, 22 bp, Artificial Sequence
  Synthetic oligonucleotide; TTA chr2 60497661 60497682 60497666 60497661 -
aattgctctggaaggtgcaaag

SEQ ID NO: 219976 - DNA, 22 bp, Artificial Sequence
  Synthetic oligonucleotide; TTG chr2 60497656 60497677 60497661 60497656 -
ctctggaaggtgcaaagtgcca

SEQ ID NO: 219977 - DNA, 22 bp, Artificial Sequence
  Synthetic oligonucleotide; CTC chr2 60497653 60497674 60497658 60497653 -
tggaaggtgcaaagtgccatcc

SEQ ID NO: 219978 - DNA, 22 bp, Artificial Sequence
  Synthetic oligonucleotide; CTG chr2 60497651 60497672 60497656 60497651 -
gaaggtgcaaagtgccatccag

SEQ ID NO: 219979 - DNA, 22 bp, Artificial Sequence
  Synthetic oligonucleotide; CTA chr2 60497620 60497641 60497625 60497620 -
ttattattattatcatcatcat

SEQ ID NO: 219980 - DNA, 22 bp, Artificial Sequence
  Synthetic oligonucleotide; TTA chr2 60497617 60497638 60497622 60497617 -
ttattattatcatcatcataat

SEQ ID NO: 219981 - DNA, 22 bp, Artificial Sequence
  Synthetic oligonucleotide; TTA chr2 60497614 60497635 60497619 60497614 -
ttattatcatcatcataatggt

SEQ ID NO: 219982 - DNA, 22 bp, Artificial Sequence
  Synthetic oligonucleotide; TTA chr2 60497611 60497632 60497616 60497611 -
ttatcatcatcataatggtcat

SEQ ID NO: 219983 - DNA, 22 bp, Artificial Sequence
  Synthetic oligonucleotide; TTA chr2 60497608 60497629 60497613 60497608 -
tcatcatcataatggtcattat

SEQ ID NO: 219984 - DNA, 22 bp, Artificial Sequence
  Synthetic oligonucleotide; TTA chr2 60497587 60497608 60497592 60497587 -
tcatcaccattataggatatgg

SEQ ID NO: 219985 - DNA, 22 bp, Artificial Sequence
  Synthetic oligonucleotide; TTA chr2 60497575 60497596 60497580 60497575 -
taggatatggcactgacgtagg

SEQ ID NO: 219986 - DNA, 22 bp, Artificial Sequence
  Synthetic oligonucleotide; CTG chr2 60497560 60497581 60497565 60497560 -
acgtaggtagtgactggtaaga

SEQ ID NO: 219987 - DNA, 22 bp, Artificial Sequence
  Synthetic oligonucleotide; CTG chr2 60497544 60497565 60497549 60497544 -
gtaagagccgattgagtttcta

SEQ ID NO: 219988 - DNA, 22 bp, Artificial Sequence
  Synthetic oligonucleotide; TTG chr2 60497530 60497551 60497535 60497530 -
agtttctagctgattcctgatg

SEQ ID NO: 219989 - DNA, 22 bp, Artificial Sequence
  Synthetic oligonucleotide; TTT chr2 60497525 60497546 60497530 60497525 -
ctagctgattcctgatgttagg

SEQ ID NO: 219990 - DNA, 22 bp, Artificial Sequence
  Synthetic oligonucleotide; TTC chr2 60497524 60497545 60497529 60497524 -
tagctgattcctgatgttaggg

SEQ ID NO: 219991 - DNA, 22 bp, Artificial Sequence
  Synthetic oligonucleotide; CTA chr2 60497522 60497543 60497527 60497522 -
gctgattcctgatgttaggggc

SEQ ID NO: 219992 - DNA, 22 bp, Artificial Sequence
  Synthetic oligonucleotide; CTG chr2 60497518 60497539 60497523 60497518 -
attcctgatgttaggggccatg

SEQ ID NO: 219993 - DNA, 22 bp, Artificial Sequence
  Synthetic oligonucleotide; TTC chr2 60497514 60497535 60497519 60497514 -
ctgatgttaggggccatgaatc

SEQ ID NO: 219994 - DNA, 22 bp, Artificial Sequence
  Synthetic oligonucleotide; CTG chr2 60497511 60497532 60497516 60497511 -
atgttaggggccatgaatctgt

SEQ ID NO: 219995 - DNA, 22 bp, Artificial Sequence
  Synthetic oligonucleotide; TTA chr2 60497505 60497526 60497510 60497505 -
ggggccatgaatctgtctacct

SEQ ID NO: 219996 - DNA, 22 bp, Artificial Sequence
  Synthetic oligonucleotide; CTG chr2 60497490 60497511 60497495 60497490 -
tctacctggaatgttctaattc

SEQ ID NO: 219997 - DNA, 22 bp, Artificial Sequence
  Synthetic oligonucleotide; CTA chr2 60497486 60497507 60497491 60497486 -
cctggaatgttctaattcaatt

SEQ ID NO: 219998 - DNA, 22 bp, Artificial Sequence
  Synthetic oligonucleotide; CTG chr2 60497482 60497503 60497487 60497482 -
gaatgttctaattcaattcagg

SEQ ID NO: 219999 - DNA, 22 bp, Artificial Sequence
  Synthetic oligonucleotide; TTC chr2 60497474 60497495 60497479 60497474 -
taattcaattcaggagcggcag

SEQ ID NO: 220000 - DNA, 22 bp, Artificial Sequence
  Synthetic oligonucleotide; CTA chr2 60497472 60497493 60497477 60497472 -
attcaattcaggagcggcagtt

SEQ ID NO: 220001 - DNA, 22 bp, Artificial Sequence
  Synthetic oligonucleotide; TTC chr2 60497468 60497489 60497473 60497468 -
aattcaggagcggcagtttaag

SEQ ID NO: 220002 - DNA, 22 bp, Artificial Sequence
  Synthetic oligonucleotide; TTC chr2 60497463 60497484 60497468 60497463 -
aggagcggcagtttaagtctag

SEQ ID NO: 220003 - DNA, 22 bp, Artificial Sequence
  Synthetic oligonucleotide; TTT chr2 60497449 60497470 60497454 60497449 -
aagtctagacttcaaagcactc

SEQ ID NO: 220004 - DNA, 22 bp, Artificial Sequence
  Synthetic oligonucleotide; TTA chr2 60497448 60497469 60497453 60497448 -
agtctagacttcaaagcactct

SEQ ID NO: 220005 - DNA, 22 bp, Artificial Sequence
  Synthetic oligonucleotide; CTA chr2 60497442 60497463 60497447 60497442 -
gacttcaaagcactctcatata

SEQ ID NO: 220006 - DNA, 22 bp, Artificial Sequence
  Synthetic oligonucleotide; CTT chr2 60497437 60497458 60497442 60497437 -
caaagcactctcatatatcctt

SEQ ID NO: 220007 - DNA, 22 bp, Artificial Sequence
  Synthetic oligonucleotide; TTC chr2 60497436 60497457 60497441 60497436 -
aaagcactctcatatatccttg

SEQ ID NO: 220008 - DNA, 22 bp, Artificial Sequence
  Synthetic oligonucleotide; CTC chr2 60497427 60497448 60497432 60497427 -
tcatatatccttggcctgctaa

SEQ ID NO: 220009 - DNA, 22 bp, Artificial Sequence
  Synthetic oligonucleotide; CTC chr2 60497425 60497446 60497430 60497425 -
atatatccttggcctgctaacc

SEQ ID NO: 220010 - DNA, 22 bp, Artificial Sequence
  Synthetic oligonucleotide; CTT chr2 60497415 60497436 60497420 60497415 -
ggcctgctaacctgagggctag

SEQ ID NO: 220011 - DNA, 22 bp, Artificial Sequence
  Synthetic oligonucleotide; TTG chr2 60497414 60497435 60497419 60497414 -
gcctgctaacctgagggctagt

SEQ ID NO: 220012 - DNA, 22 bp, Artificial Sequence
  Synthetic oligonucleotide; CTG chr2 60497409 60497430 60497414 60497409 -
ctaacctgagggctagtttcta

SEQ ID NO: 220013 - DNA, 22 bp, Artificial Sequence
  Synthetic oligonucleotide; CTA chr2 60497406 60497427 60497411 60497406 -
acctgagggctagtttctaggg

SEQ ID NO: 220014 - DNA, 22 bp, Artificial Sequence
  Synthetic oligonucleotide; CTG chr2 60497401 60497422 60497406 60497401 -
agggctagtttctagggattga

SEQ ID NO: 220015 - DNA, 22 bp, Artificial Sequence
  Synthetic oligonucleotide; CTA chr2 60497394 60497415 60497399 60497394 -
gtttctagggattgattaactt

SEQ ID NO: 220016 - DNA, 22 bp, Artificial Sequence
  Synthetic oligonucleotide; TTT chr2 60497390 60497411 60497395 60497390 -
ctagggattgattaacttaaag

SEQ ID NO: 220017 - DNA, 22 bp, Artificial Sequence
  Synthetic oligonucleotide; TTC chr2 60497389 60497410 60497394 60497389 -
tagggattgattaacttaaaga

SEQ ID NO: 220018 - DNA, 22 bp, Artificial Sequence
  Synthetic oligonucleotide; CTA chr2 60497387 60497408 60497392 60497387 -
gggattgattaacttaaagaca

SEQ ID NO: 220019 - DNA, 22 bp, Artificial Sequence
  Synthetic oligonucleotide; TTG chr2 60497380 60497401 60497385 60497380 -
attaacttaaagacagttcata

SEQ ID NO: 220020 - DNA, 22 bp, Artificial Sequence
  Synthetic oligonucleotide; TTA chr2 60497376 60497397 60497381 60497376 -
acttaaagacagttcatatatg

SEQ ID NO: 220021 - DNA, 22 bp, Artificial Sequence
  Synthetic oligonucleotide; CTT chr2 60497372 60497393 60497377 60497372 -
aaagacagttcatatatgcttg

SEQ ID NO: 220022 - DNA, 22 bp, Artificial Sequence
  Synthetic oligonucleotide; TTA chr2 60497371 60497392 60497376 60497371 -
aagacagttcatatatgcttga

SEQ ID NO: 220023 - DNA, 22 bp, Artificial Sequence
  Synthetic oligonucleotide; TTC chr2 60497361 60497382 60497366 60497361 -
atatatgcttgaatactagcta

SEQ ID NO: 220024 - DNA, 22 bp, Artificial Sequence
  Synthetic oligonucleotide; CTT chr2 60497351 60497372 60497356 60497351 -
gaatactagctattcatattct

SEQ ID NO: 220025 - DNA, 22 bp, Artificial Sequence
  Synthetic oligonucleotide; TTG chr2 60497350 60497371 60497355 60497350 -
aatactagctattcatattctg

SEQ ID NO: 220026 - DNA, 22 bp, Artificial Sequence
  Synthetic oligonucleotide; CTA chr2 60497343 60497364 60497348 60497343 -
gctattcatattctgaaaaatc

SEQ ID NO: 220027 - DNA, 22 bp, Artificial Sequence
  Synthetic oligonucleotide; CTA chr2 60497339 60497360 60497344 60497339 -
ttcatattctgaaaaatctgac

SEQ ID NO: 220028 - DNA, 22 bp, Artificial Sequence
  Synthetic oligonucleotide; TTC chr2 60497336 60497357 60497341 60497336 -
atattctgaaaaatctgacttg

SEQ ID NO: 220029 - DNA, 22 bp, Artificial Sequence
  Synthetic oligonucleotide; TTC chr2 60497330 60497351 60497335 60497330 -
tgaaaaatctgacttgatcaaa

SEQ ID NO: 220030 - DNA, 22 bp, Artificial Sequence
  Synthetic oligonucleotide; CTG chr2 60497328 60497349 60497333 60497328 -
aaaaatctgacttgatcaaaca

SEQ ID NO: 220031 - DNA, 22 bp, Artificial Sequence
  Synthetic oligonucleotide; CTG chr2 60497319 60497340 60497324 60497319 -
acttgatcaaacagagcagtta

SEQ ID NO: 220032 - DNA, 22 bp, Artificial Sequence
  Synthetic oligonucleotide; CTT chr2 60497315 60497336 60497320 60497315 -
gatcaaacagagcagttaaagg

SEQ ID NO: 220033 - DNA, 22 bp, Artificial Sequence
  Synthetic oligonucleotide; TTG chr2 60497314 60497335 60497319 60497314 -
atcaaacagagcagttaaaggc

SEQ ID NO: 220034 - DNA, 22 bp, Artificial Sequence
  Synthetic oligonucleotide; TTA chr2 60497297 60497318 60497302 60497297 -
aaggcgatgcttcgttttacaa

SEQ ID NO: 220035 - DNA, 22 bp, Artificial Sequence
  Synthetic oligonucleotide; CTT chr2 60497285 60497306 60497290 60497285 -
cgttttacaaaagattttcccc

SEQ ID NO: 220036 - DNA, 22 bp, Artificial Sequence
  Synthetic oligonucleotide; TTC chr2 60497284 60497305 60497289 60497284 -
gttttacaaaagattttccccc

SEQ ID NO: 220037 - DNA, 22 bp, Artificial Sequence
  Synthetic oligonucleotide; TTT chr2 60497280 60497301 60497285 60497280 -
tacaaaagattttcccccctct

SEQ ID NO: 220038 - DNA, 22 bp, Artificial Sequence
  Synthetic oligonucleotide; TTT chr2 60497279 60497300 60497284 60497279 -
acaaaagattttcccccctctt

SEQ ID NO: 220039 - DNA, 22 bp, Artificial Sequence
  Synthetic oligonucleotide; TTA chr2 60497278 60497299 60497283 60497278 -
caaaagattttcccccctcttt

SEQ ID NO: 220040 - DNA, 22 bp, Artificial Sequence
  Synthetic oligonucleotide; TTT chr2 60497268 60497289 60497273 60497268 -
tcccccctctttacaaaaggat

SEQ ID NO: 220041 - DNA, 22 bp, Artificial Sequence
  Synthetic oligonucleotide; TTT chr2 60497267 60497288 60497272 60497267 -
cccccctctttacaaaaggatg

SEQ ID NO: 220042 - DNA, 22 bp, Artificial Sequence
  Synthetic oligonucleotide; TTC chr2 60497266 60497287 60497271 60497266 -
ccccctctttacaaaaggatgc

SEQ ID NO: 220043 - DNA, 22 bp, Artificial Sequence
  Synthetic oligonucleotide; CTC chr2 60497259 60497280 60497264 60497259 -
tttacaaaaggatgcacagtgg

SEQ ID NO: 220044 - DNA, 22 bp, Artificial Sequence
  Synthetic oligonucleotide; CTT chr2 60497257 60497278 60497262 60497257 -
tacaaaaggatgcacagtggta

SEQ ID NO: 220045 - DNA, 22 bp, Artificial Sequence
  Synthetic oligonucleotide; TTT chr2 60497256 60497277 60497261 60497256 -
acaaaaggatgcacagtggtat

SEQ ID NO: 220046 - DNA, 22 bp, Artificial Sequence
  Synthetic oligonucleotide; TTA chr2 60497255 60497276 60497260 60497255 -
caaaaggatgcacagtggtatt

SEQ ID NO: 220047 - DNA, 22 bp, Artificial Sequence
  Synthetic oligonucleotide; TTC chr2 60497232 60497253 60497237 60497232 -
ctttcaatggaatgtttctcta

SEQ ID NO: 220048 - DNA, 22 bp, Artificial Sequence
  Synthetic oligonucleotide; CTT chr2 60497229 60497250 60497234 60497229 -
tcaatggaatgtttctctagct

SEQ ID NO: 220049 - DNA, 22 bp, Artificial Sequence
  Synthetic oligonucleotide; TTT chr2 60497228 60497249 60497233 60497228 -
caatggaatgtttctctagctc

SEQ ID NO: 220050 - DNA, 22 bp, Artificial Sequence
  Synthetic oligonucleotide; TTC chr2 60497227 60497248 60497232 60497227 -
aatggaatgtttctctagctca

SEQ ID NO: 220051 - DNA, 22 bp, Artificial Sequence
  Synthetic oligonucleotide; TTT chr2 60497215 60497236 60497220 60497215 -
ctctagctcattaagtgtttac

SEQ ID NO: 220052 - DNA, 22 bp, Artificial Sequence
  Synthetic oligonucleotide; TTC chr2 60497214 60497235 60497219 60497214 -
tctagctcattaagtgtttaca

SEQ ID NO: 220053 - DNA, 22 bp, Artificial Sequence
  Synthetic oligonucleotide; CTC chr2 60497212 60497233 60497217 60497212 -
tagctcattaagtgtttacagg

SEQ ID NO: 220054 - DNA, 22 bp, Artificial Sequence
  Synthetic oligonucleotide; CTA chr2 60497210 60497231 60497215 60497210 -
gctcattaagtgtttacaggtc

SEQ ID NO: 220055 - DNA, 22 bp, Artificial Sequence
  Synthetic oligonucleotide; CTC chr2 60497206 60497227 60497211 60497206 -
attaagtgtttacaggtcatta

SEQ ID NO: 220056 - DNA, 22 bp, Artificial Sequence
  Synthetic oligonucleotide; TTA chr2 60497202 60497223 60497207 60497202 -
agtgtttacaggtcattagcta

SEQ ID NO: 220057 - DNA, 22 bp, Artificial Sequence
  Synthetic oligonucleotide; TTT chr2 60497195 60497216 60497200 60497195 -
acaggtcattagctactgcatg

SEQ ID NO: 220058 - DNA, 22 bp, Artificial Sequence
  Synthetic oligonucleotide; TTA chr2 60497194 60497215 60497199 60497194 -
caggtcattagctactgcatgg

SEQ ID NO: 220059 - DNA, 22 bp, Artificial Sequence
  Synthetic oligonucleotide; TTA chr2 60497184 60497205 60497189 60497184 -
gctactgcatggaaggactttg

SEQ ID NO: 220060 - DNA, 22 bp, Artificial Sequence
  Synthetic oligonucleotide; CTA chr2 60497180 60497201 60497185 60497180 -
ctgcatggaaggactttgctag

SEQ ID NO: 220061 - DNA, 22 bp, Artificial Sequence
  Synthetic oligonucleotide; CTG chr2 60497177 60497198 60497182 60497177 -
catggaaggactttgctagaga

SEQ ID NO: 220062 - DNA, 22 bp, Artificial Sequence
  Synthetic oligonucleotide; CTT chr2 60497164 60497185 60497169 60497164 -
tgctagagaaaaggaaggctgc

SEQ ID NO: 220063 - DNA, 22 bp, Artificial Sequence
  Synthetic oligonucleotide; TTT chr2 60497163 60497184 60497168 60497163 -
gctagagaaaaggaaggctgca

SEQ ID NO: 220064 - DNA, 22 bp, Artificial Sequence
  Synthetic oligonucleotide; TTG chr2 60497162 60497183 60497167 60497162 -
ctagagaaaaggaaggctgcaa

SEQ ID NO: 220065 - DNA, 22 bp, Artificial Sequence
  Synthetic oligonucleotide; CTA chr2 60497159 60497180 60497164 60497159 -
gagaaaaggaaggctgcaagga

SEQ ID NO: 220066 - DNA, 22 bp, Artificial Sequence
  Synthetic oligonucleotide; CTG chr2 60497143 60497164 60497148 60497143 -
caaggaaatagctctagctcta

SEQ ID NO: 220067 - DNA, 22 bp, Artificial Sequence
  Synthetic oligonucleotide; CTC chr2 60497129 60497150 60497134 60497129 -
tagctctagctctagcttaggg

SEQ ID NO: 220068 - DNA, 22 bp, Artificial Sequence
  Synthetic oligonucleotide; CTA chr2 60497127 60497148 60497132 60497127 -
gctctagctctagcttagggga

SEQ ID NO: 220069 - DNA, 22 bp, Artificial Sequence
  Synthetic oligonucleotide; CTC chr2 60497123 60497144 60497128 60497123 -
tagctctagcttaggggatgct

SEQ ID NO: 220070 - DNA, 22 bp, Artificial Sequence
  Synthetic oligonucleotide; CTA chr2 60497121 60497142 60497126 60497121 -
gctctagcttaggggatgctag

SEQ ID NO: 220071 - DNA, 22 bp, Artificial Sequence
  Synthetic oligonucleotide; CTC chr2 60497117 60497138 60497122 60497117 -
tagcttaggggatgctagctaa

SEQ ID NO: 220072 - DNA, 22 bp, Artificial Sequence
  Synthetic oligonucleotide; CTA chr2 60497115 60497136 60497120 60497115 -
gcttaggggatgctagctaaag

SEQ ID NO: 220073 - DNA, 22 bp, Artificial Sequence
  Synthetic oligonucleotide; CTT chr2 60497111 60497132 60497116 60497111 -
aggggatgctagctaaagggaa

SEQ ID NO: 220074 - DNA, 22 bp, Artificial Sequence
  Synthetic oligonucleotide; TTA chr2 60497110 60497131 60497115 60497110 -
ggggatgctagctaaagggaat

SEQ ID NO: 220075 - DNA, 22 bp, Artificial Sequence
  Synthetic oligonucleotide; CTA chr2 60497100 60497121 60497105 60497100 -
gctaaagggaattagaattggt

SEQ ID NO: 220076 - DNA, 22 bp, Artificial Sequence
  Synthetic oligonucleotide; CTA chr2 60497096 60497117 60497101 60497096 -
aagggaattagaattggttggc

SEQ ID NO: 220077 - DNA, 22 bp, Artificial Sequence
  Synthetic oligonucleotide; TTA chr2 60497086 60497107 60497091 60497086 -
gaattggttggccaacaggtgt

SEQ ID NO: 220078 - DNA, 22 bp, Artificial Sequence
  Synthetic oligonucleotide; TTG chr2 60497080 60497101 60497085 60497080 -
gttggccaacaggtgtctgcgg

SEQ ID NO: 220079 - DNA, 22 bp, Artificial Sequence
  Synthetic oligonucleotide; TTG chr2 60497076 60497097 60497081 60497076 -
gccaacaggtgtctgcggtgta

SEQ ID NO: 220080 - DNA, 22 bp, Artificial Sequence
  Synthetic oligonucleotide; CTG chr2 60497061 60497082 60497066 60497061 -
cggtgtactccctgtccactca

SEQ ID NO: 220081 - DNA, 22 bp, Artificial Sequence
  Synthetic oligonucleotide; CTC chr2 60497051 60497072 60497056 60497051 -
cctgtccactcaacactggggg

SEQ ID NO: 220082 - DNA, 22 bp, Artificial Sequence
  Synthetic oligonucleotide; CTG chr2 60497047 60497068 60497052 60497047 -
tccactcaacactgggggagga

SEQ ID NO: 220083 - DNA, 22 bp, Artificial Sequence
  Synthetic oligonucleotide; CTC chr2 60497040 60497061 60497045 60497040 -
aacactgggggaggagtagaga

SEQ ID NO: 220084 - DNA, 22 bp, Artificial Sequence
  Synthetic oligonucleotide; CTG chr2 60497033 60497054 60497038 60497033 -
ggggaggagtagagatcttgct

SEQ ID NO: 220085 - DNA, 22 bp, Artificial Sequence
  Synthetic oligonucleotide; CTT chr2 60497014 60497035 60497019 60497014 -
gcttccttccatgtgagagctt

SEQ ID NO: 220086 - DNA, 22 bp, Artificial Sequence
  Synthetic oligonucleotide; TTG chr2 60497013 60497034 60497018 60497013 -
cttccttccatgtgagagctta

SEQ ID NO: 220087 - DNA, 22 bp, Artificial Sequence
  Synthetic oligonucleotide; CTT chr2 60497010 60497031 60497015 60497010 -
ccttccatgtgagagcttatag

SEQ ID NO: 220088 - DNA, 22 bp, Artificial Sequence
  Synthetic oligonucleotide; TTC chr2 60497009 60497030 60497014 60497009 -
cttccatgtgagagcttatagt

SEQ ID NO: 220089 - DNA, 22 bp, Artificial Sequence
  Synthetic oligonucleotide; CTT chr2 60497006 60497027 60497011 60497006 -
ccatgtgagagcttatagtccc

SEQ ID NO: 220090 - DNA, 22 bp, Artificial Sequence
  Synthetic oligonucleotide; TTC chr2 60497005 60497026 60497010 60497005 -
catgtgagagcttatagtccct

SEQ ID NO: 220091 - DNA, 22 bp, Artificial Sequence
  Synthetic oligonucleotide; CTT chr2 60496992 60497013 60496997 60496992 -
atagtccctttggaatccagat

SEQ ID NO: 220092 - DNA, 22 bp, Artificial Sequence
  Synthetic oligonucleotide; TTA chr2 60496991 60497012 60496996 60496991 -
tagtccctttggaatccagatt

SEQ ID NO: 220093 - DNA, 22 bp, Artificial Sequence
  Synthetic oligonucleotide; CTT chr2 60496982 60497003 60496987 60496982 -
tggaatccagatttatcgtgaa

SEQ ID NO: 220094 - DNA, 22 bp, Artificial Sequence
  Synthetic oligonucleotide; TTT chr2 60496981 60497002 60496986 60496981 -
ggaatccagatttatcgtgaag

SEQ ID NO: 220095 - DNA, 22 bp, Artificial Sequence
  Synthetic oligonucleotide; TTG chr2 60496980 60497001 60496985 60496980 -
gaatccagatttatcgtgaagt

SEQ ID NO: 220096 - DNA, 22 bp, Artificial Sequence
  Synthetic oligonucleotide; TTT chr2 60496968 60496989 60496973 60496968 -
atcgtgaagtaatcgtgaagac

SEQ ID NO: 220097 - DNA, 22 bp, Artificial Sequence
  Synthetic oligonucleotide; TTA chr2 60496967 60496988 60496972 60496967 -
tcgtgaagtaatcgtgaagaca

SEQ ID NO: 220098 - DNA, 22 bp, Artificial Sequence
  Synthetic oligonucleotide; TTA chr2 60496938 60496959 60496943 60496938 -
agtgctacattgtgttcactca

SEQ ID NO: 220099 - DNA, 22 bp, Artificial Sequence
  Synthetic oligonucleotide; CTA chr2 60496931 60496952 60496936 60496931 -
cattgtgttcactcatctctta

SEQ ID NO: 220100 - DNA, 22 bp, Artificial Sequence
  Synthetic oligonucleotide; TTG chr2 60496926 60496947 60496931 60496926 -
tgttcactcatctcttatgact

SEQ ID NO: 220101 - DNA, 22 bp, Artificial Sequence
  Synthetic oligonucleotide; TTC chr2 60496921 60496942 60496926 60496921 -
actcatctcttatgactgtcca

SEQ ID NO: 220102 - DNA, 22 bp, Artificial Sequence
  Synthetic oligonucleotide; CTC chr2 60496917 60496938 60496922 60496917 -
atctcttatgactgtccatggg

SEQ ID NO: 220103 - DNA, 22 bp, Artificial Sequence
  Synthetic oligonucleotide; CTC chr2 60496912 60496933 60496917 60496912 -
ttatgactgtccatggggaaat

SEQ ID NO: 220104 - DNA, 22 bp, Artificial Sequence
  Synthetic oligonucleotide; CTT chr2 60496910 60496931 60496915 60496910 -
atgactgtccatggggaaatgg

SEQ ID NO: 220105 - DNA, 22 bp, Artificial Sequence
  Synthetic oligonucleotide; TTA chr2 60496909 60496930 60496914 60496909 -
tgactgtccatggggaaatggg

SEQ ID NO: 220106 - DNA, 22 bp, Artificial Sequence
  Synthetic oligonucleotide; CTG chr2 60496903 60496924 60496908 60496903 -
tccatggggaaatgggtcctgc

SEQ ID NO: 220107 - DNA, 22 bp, Artificial Sequence
  Synthetic oligonucleotide; CTG chr2 60496882 60496903 60496887 60496882 -
ctttacaaaaattcagtttgca

SEQ ID NO: 220108 - DNA, 22 bp, Artificial Sequence
  Synthetic oligonucleotide; CTT chr2 60496879 60496900 60496884 60496879 -
tacaaaaattcagtttgcatgc

SEQ ID NO: 220109 - DNA, 22 bp, Artificial Sequence
  Synthetic oligonucleotide; TTT chr2 60496878 60496899 60496883 60496878 -
acaaaaattcagtttgcatgct

SEQ ID NO: 220110 - DNA, 22 bp, Artificial Sequence
  Synthetic oligonucleotide; TTA chr2 60496877 60496898 60496882 60496877 -
caaaaattcagtttgcatgctg

SEQ ID NO: 220111 - DNA, 22 bp, Artificial Sequence
  Synthetic oligonucleotide; TTC chr2 60496868 60496889 60496873 60496868 -
agtttgcatgctgcttttcagg

SEQ ID NO: 220112 - DNA, 22 bp, Artificial Sequence
  Synthetic oligonucleotide; TTT chr2 60496863 60496884 60496868 60496863 -
gcatgctgcttttcaggcctat

SEQ ID NO: 220113 - DNA, 22 bp, Artificial Sequence
  Synthetic oligonucleotide; TTG chr2 60496862 60496883 60496867 60496862 -
catgctgcttttcaggcctatg

SEQ ID NO: 220114 - DNA, 22 bp, Artificial Sequence
  Synthetic oligonucleotide; CTG chr2 60496855 60496876 60496860 60496855 -
cttttcaggcctatgactgtga

SEQ ID NO: 220115 - DNA, 22 bp, Artificial Sequence
  Synthetic oligonucleotide; CTT chr2 60496852 60496873 60496857 60496852 -
ttcaggcctatgactgtgacat

SEQ ID NO: 220116 - DNA, 22 bp, Artificial Sequence
  Synthetic oligonucleotide; TTT chr2 60496851 60496872 60496856 60496851 -
tcaggcctatgactgtgacatc

SEQ ID NO: 220117 - DNA, 22 bp, Artificial Sequence
  Synthetic oligonucleotide; TTT chr2 60496850 60496871 60496855 60496850 -
caggcctatgactgtgacatcc

SEQ ID NO: 220118 - DNA, 22 bp, Artificial Sequence
  Synthetic oligonucleotide; TTC chr2 60496849 60496870 60496854 60496849 -
aggcctatgactgtgacatcca

SEQ ID NO: 220119 - DNA, 22 bp, Artificial Sequence
  Synthetic oligonucleotide; CTA chr2 60496842 60496863 60496847 60496842 -
tgactgtgacatccagtgaggg

SEQ ID NO: 220120 - DNA, 22 bp, Artificial Sequence
  Synthetic oligonucleotide; CTG chr2 60496836 60496857 60496841 60496836 -
tgacatccagtgagggagattt

SEQ ID NO: 220121 - DNA, 22 bp, Artificial Sequence
  Synthetic oligonucleotide; TTT chr2 60496814 60496835 60496819 60496814 -
gaggaaggggttgatgtaagac

SEQ ID NO: 220122 - DNA, 22 bp, Artificial Sequence
  Synthetic oligonucleotide; TTG chr2 60496813 60496834 60496818 60496813 -
aggaaggggttgatgtaagact

SEQ ID NO: 220123 - DNA, 22 bp, Artificial Sequence
  Synthetic oligonucleotide; TTG chr2 60496801 60496822 60496806 60496801 -
atgtaagactcctcttgggagc

SEQ ID NO: 220124 - DNA, 22 bp, Artificial Sequence
  Synthetic oligonucleotide; CTC chr2 60496790 60496811 60496795 60496790 -
ctcttgggagcatagtgagaga

SEQ ID NO: 220125 - DNA, 22 bp, Artificial Sequence
  Synthetic oligonucleotide; CTC chr2 60496787 60496808 60496792 60496787 -
ttgggagcatagtgagagagag

SEQ ID NO: 220126 - DNA, 22 bp, Artificial Sequence
  Synthetic oligonucleotide; CTT chr2 60496785 60496806 60496790 60496785 -
gggagcatagtgagagagagag

SEQ ID NO: 220127 - DNA, 22 bp, Artificial Sequence
  Synthetic oligonucleotide; TTG chr2 60496784 60496805 60496789 60496784 -
ggagcatagtgagagagagaga

SEQ ID NO: 220128 - DNA, 22 bp, Artificial Sequence
  Synthetic oligonucleotide; CTC chr2 60496748 60496769 60496753 60496748 -
acagtggaacctagagtgggaa

SEQ ID NO: 220129 - DNA, 22 bp, Artificial Sequence
  Synthetic oligonucleotide; CTA chr2 60496735 60496756 60496740 60496735 -
gagtgggaaaggctacctggtg

SEQ ID NO: 220130 - DNA, 22 bp, Artificial Sequence
  Synthetic oligonucleotide; CTA chr2 60496720 60496741 60496725 60496720 -
cctggtggctgtcctggcatgt

SEQ ID NO: 220131 - DNA, 22 bp, Artificial Sequence
  Synthetic oligonucleotide; CTG chr2 60496716 60496737 60496721 60496716 -
gtggctgtcctggcatgtaagt

SEQ ID NO: 220132 - DNA, 22 bp, Artificial Sequence
  Synthetic oligonucleotide; CTG chr2 60496709 60496730 60496714 60496709 -
tcctggcatgtaagtaagtctg

SEQ ID NO: 220133 - DNA, 22 bp, Artificial Sequence
  Synthetic oligonucleotide; CTG chr2 60496704 60496725 60496709 60496704 -
gcatgtaagtaagtctgtgtgg

SEQ ID NO: 220134 - DNA, 22 bp, Artificial Sequence
  Synthetic oligonucleotide; CTG chr2 60496687 60496708 60496692 60496687 -
tgtggtcagggcttgcattcca

SEQ ID NO: 220135 - DNA, 22 bp, Artificial Sequence
  Synthetic oligonucleotide; CTT chr2 60496673 60496694 60496678 60496673 -
gcattccataaatggcccaggc

SEQ ID NO: 220136 - DNA, 22 bp, Artificial Sequence
  Synthetic oligonucleotide; TTG chr2 60496672 60496693 60496677 60496672 -
cattccataaatggcccaggcc

SEQ ID NO: 220137 - DNA, 22 bp, Artificial Sequence
  Synthetic oligonucleotide; TTC chr2 60496667 60496688 60496672 60496667 -
cataaatggcccaggcccctgc

SEQ ID NO: 220138 - DNA, 22 bp, Artificial Sequence
  Synthetic oligonucleotide; CTG chr2 60496646 60496667 60496651 60496646 -
ctggctgctgggagagaaagtc

SEQ ID NO: 220139 - DNA, 22 bp, Artificial Sequence
  Synthetic oligonucleotide; CTG chr2 60496643 60496664 60496648 60496643 -
gctgctgggagagaaagtcggt

SEQ ID NO: 220140 - DNA, 22 bp, Artificial Sequence
  Synthetic oligonucleotide; CTG chr2 60496639 60496660 60496644 60496639 -
ctgggagagaaagtcggtgagg

SEQ ID NO: 220141 - DNA, 22 bp, Artificial Sequence
  Synthetic oligonucleotide; CTG chr2 60496636 60496657 60496641 60496636 -
ggagagaaagtcggtgaggaga

SEQ ID NO: 220142 - DNA, 22 bp, Artificial Sequence
  Synthetic oligonucleotide; TTG chr2 60496606 60496627 60496611 60496606 -
tacaaggcaggagagatgtact

SEQ ID NO: 220143 - DNA, 22 bp, Artificial Sequence
  Synthetic oligonucleotide; CTC chr2 60496583 60496604 60496588 60496583 -
accaggctcttccagaaggggt

SEQ ID NO: 220144 - DNA, 22 bp, Artificial Sequence
  Synthetic oligonucleotide; CTC chr2 60496574 60496595 60496579 60496574 -
ttccagaaggggtaactgtctc

SEQ ID NO: 220145 - DNA, 22 bp, Artificial Sequence
  Synthetic oligonucleotide; CTT chr2 60496572 60496593 60496577 60496572 -
ccagaaggggtaactgtctcaa

SEQ ID NO: 220146 - DNA, 22 bp, Artificial Sequence
  Synthetic oligonucleotide; TTC chr2 60496571 60496592 60496576 60496571 -
cagaaggggtaactgtctcaaa

SEQ ID NO: 220147 - DNA, 22 bp, Artificial Sequence
  Synthetic oligonucleotide; CTG chr2 60496556 60496577 60496561 60496556 -
tctcaaatccttgccttgaacc

SEQ ID NO: 220148 - DNA, 22 bp, Artificial Sequence
  Synthetic oligonucleotide; CTC chr2 60496552 60496573 60496557 60496552 -
aaatccttgccttgaacctgca

SEQ ID NO: 220149 - DNA, 22 bp, Artificial Sequence
  Synthetic oligonucleotide; CTT chr2 60496544 60496565 60496549 60496544 -
gccttgaacctgcagcaaagtg

SEQ ID NO: 220150 - DNA, 22 bp, Artificial Sequence
  Synthetic oligonucleotide; TTG chr2 60496543 60496564 60496548 60496543 -
ccttgaacctgcagcaaagtgg

SEQ ID NO: 220151 - DNA, 22 bp, Artificial Sequence
  Synthetic oligonucleotide; CTT chr2 60496539 60496560 60496544 60496539 -
gaacctgcagcaaagtggaaga

SEQ ID NO: 220152 - DNA, 22 bp, Artificial Sequence
  Synthetic oligonucleotide; TTG chr2 60496538 60496559 60496543 60496538 -
aacctgcagcaaagtggaagat

SEQ ID NO: 220153 - DNA, 22 bp, Artificial Sequence
  Synthetic oligonucleotide; CTG chr2 60496532 60496553 60496537 60496532 -
cagcaaagtggaagataggtgt

SEQ ID NO: 220154 - DNA, 22 bp, Artificial Sequence
  Synthetic oligonucleotide; TTA chr2 60496508 60496529 60496513 60496508 -
tcctcctctcttccctctttcc

SEQ ID NO: 220155 - DNA, 22 bp, Artificial Sequence
  Synthetic oligonucleotide; CTC chr2 60496503 60496524 60496508 60496503 -
ctctcttccctctttcctgctt

SEQ ID NO: 220156 - DNA, 22 bp, Artificial Sequence
  Synthetic oligonucleotide; CTC chr2 60496500 60496521 60496505 60496500 -
tcttccctctttcctgcttcag

SEQ ID NO: 220157 - DNA, 22 bp, Artificial Sequence
  Synthetic oligonucleotide; CTC chr2 60496498 60496519 60496503 60496498 -
ttccctctttcctgcttcaggc

SEQ ID NO: 220158 - DNA, 22 bp, Artificial Sequence
  Synthetic oligonucleotide; CTT chr2 60496496 60496517 60496501 60496496 -
ccctctttcctgcttcaggcta

SEQ ID NO: 220159 - DNA, 22 bp, Artificial Sequence
  Synthetic oligonucleotide; TTC chr2 60496495 60496516 60496500 60496495 -
cctctttcctgcttcaggctac

SEQ ID NO: 220160 - DNA, 22 bp, Artificial Sequence
  Synthetic oligonucleotide; CTC chr2 60496491 60496512 60496496 60496491 -
tttcctgcttcaggctactctg

SEQ ID NO: 220161 - DNA, 22 bp, Artificial Sequence
  Synthetic oligonucleotide; CTT chr2 60496489 60496510 60496494 60496489 -
tcctgcttcaggctactctgaa

SEQ ID NO: 220162 - DNA, 22 bp, Artificial Sequence
  Synthetic oligonucleotide; TTT chr2 60496488 60496509 60496493 60496488 -
cctgcttcaggctactctgaac

SEQ ID NO: 220163 - DNA, 22 bp, Artificial Sequence
  Synthetic oligonucleotide; TTC chr2 60496487 60496508 60496492 60496487 -
ctgcttcaggctactctgaact

SEQ ID NO: 220164 - DNA, 22 bp, Artificial Sequence
  Synthetic oligonucleotide; CTG chr2 60496484 60496505 60496489 60496484 -
cttcaggctactctgaactcac

SEQ ID NO: 220165 - DNA, 22 bp, Artificial Sequence
  Synthetic oligonucleotide; CTT chr2 60496481 60496502 60496486 60496481 -
caggctactctgaactcacttt

SEQ ID NO: 220166 - DNA, 22 bp, Artificial Sequence
  Synthetic oligonucleotide; TTC chr2 60496480 60496501 60496485 60496480 -
aggctactctgaactcactttt

SEQ ID NO: 220167 - DNA, 22 bp, Artificial Sequence
  Synthetic oligonucleotide; CTA chr2 60496474 60496495 60496479 60496474 -
ctctgaactcacttttgctgtg

SEQ ID NO: 220168 - DNA, 22 bp, Artificial Sequence
  Synthetic oligonucleotide; CTC chr2 60496471 60496492 60496476 60496471 -
tgaactcacttttgctgtgtgt

SEQ ID NO: 220169 - DNA, 22 bp, Artificial Sequence
  Synthetic oligonucleotide; CTG chr2 60496469 60496490 60496474 60496469 -
aactcacttttgctgtgtgtcc

SEQ ID NO: 220170 - DNA, 22 bp, Artificial Sequence
  Synthetic oligonucleotide; CTC chr2 60496464 60496485 60496469 60496464 -
acttttgctgtgtgtccagagc

SEQ ID NO: 220171 - DNA, 22 bp, Artificial Sequence
  Synthetic oligonucleotide; CTT chr2 60496460 60496481 60496465 60496460 -
ttgctgtgtgtccagagctgac

SEQ ID NO: 220172 - DNA, 22 bp, Artificial Sequence
  Synthetic oligonucleotide; TTT chr2 60496459 60496480 60496464 60496459 -
tgctgtgtgtccagagctgacc

SEQ ID NO: 220173 - DNA, 22 bp, Artificial Sequence
  Synthetic oligonucleotide; TTT chr2 60496458 60496479 60496463 60496458 -
gctgtgtgtccagagctgacca

SEQ ID NO: 220174 - DNA, 22 bp, Artificial Sequence
  Synthetic oligonucleotide; TTG chr2 60496457 60496478 60496462 60496457 -
ctgtgtgtccagagctgaccag

SEQ ID NO: 220175 - DNA, 22 bp, Artificial Sequence
  Synthetic oligonucleotide; CTG chr2 60496454 60496475 60496459 60496454 -
tgtgtccagagctgaccagagg

SEQ ID NO: 220176 - DNA, 22 bp, Artificial Sequence
  Synthetic oligonucleotide; CTG chr2 60496440 60496461 60496445 60496440 -
accagaggacaatggcagactt

SEQ ID NO: 220177 - DNA, 22 bp, Artificial Sequence
  Synthetic oligonucleotide; CTT chr2 60496418 60496439 60496423 60496418 -
attgtcagactggcagcaccag

SEQ ID NO: 220178 - DNA, 22 bp, Artificial Sequence
  Synthetic oligonucleotide; TTA chr2 60496417 60496438 60496422 60496417 -
ttgtcagactggcagcaccagc

SEQ ID NO: 220179 - DNA, 22 bp, Artificial Sequence
  Synthetic oligonucleotide; TTG chr2 60496414 60496435 60496419 60496414 -
tcagactggcagcaccagccta

SEQ ID NO: 220180 - DNA, 22 bp, Artificial Sequence
  Synthetic oligonucleotide; CTG chr2 60496406 60496427 60496411 60496406 -
gcagcaccagcctagtgctctg

SEQ ID NO: 220181 - DNA, 22 bp, Artificial Sequence
  Synthetic oligonucleotide; CTA chr2 60496392 60496413 60496397 60496392 -
gtgctctgtctctgcctgggaa

SEQ ID NO: 220182 - DNA, 22 bp, Artificial Sequence
  Synthetic oligonucleotide; CTC chr2 60496386 60496407 60496391 60496386 -
tgtctctgcctgggaaatggtt

SEQ ID NO: 220183 - DNA, 22 bp, Artificial Sequence
  Synthetic oligonucleotide; CTG chr2 60496384 60496405 60496389 60496384 -
tctctgcctgggaaatggtttc

SEQ ID NO: 220184 - DNA, 22 bp, Artificial Sequence
  Synthetic oligonucleotide; CTC chr2 60496380 60496401 60496385 60496380 -
tgcctgggaaatggtttcacaa

SEQ ID NO: 220185 - DNA, 22 bp, Artificial Sequence
  Synthetic oligonucleotide; CTG chr2 60496378 60496399 60496383 60496378 -
cctgggaaatggtttcacaaag

SEQ ID NO: 220186 - DNA, 22 bp, Artificial Sequence
  Synthetic oligonucleotide; CTG chr2 60496374 60496395 60496379 60496374 -
ggaaatggtttcacaaagctcc

SEQ ID NO: 220187 - DNA, 22 bp, Artificial Sequence
  Synthetic oligonucleotide; TTT chr2 60496363 60496384 60496368 60496363 -
cacaaagctccagttctgccct

SEQ ID NO: 220188 - DNA, 22 bp, Artificial Sequence
  Synthetic oligonucleotide; TTC chr2 60496362 60496383 60496367 60496362 -
acaaagctccagttctgccctg

SEQ ID NO: 220189 - DNA, 22 bp, Artificial Sequence
  Synthetic oligonucleotide; CTC chr2 60496353 60496374 60496358 60496353 -
cagttctgccctggacacttgc

SEQ ID NO: 220190 - DNA, 22 bp, Artificial Sequence
  Synthetic oligonucleotide; TTC chr2 60496347 60496368 60496352 60496347 -
tgccctggacacttgcctcata

SEQ ID NO: 220191 - DNA, 22 bp, Artificial Sequence
  Synthetic oligonucleotide; CTG chr2 60496345 60496366 60496350 60496345 -
ccctggacacttgcctcatagg

SEQ ID NO: 220192 - DNA, 22 bp, Artificial Sequence
  Synthetic oligonucleotide; CTG chr2 60496340 60496361 60496345 60496340 -
gacacttgcctcatagggctat

SEQ ID NO: 220193 - DNA, 22 bp, Artificial Sequence
  Synthetic oligonucleotide; CTT chr2 60496333 60496354 60496338 60496333 -
gcctcatagggctatccctttg

SEQ ID NO: 220194 - DNA, 22 bp, Artificial Sequence
  Synthetic oligonucleotide; TTG chr2 60496332 60496353 60496337 60496332 -
cctcatagggctatccctttgc

SEQ ID NO: 220195 - DNA, 22 bp, Artificial Sequence
  Synthetic oligonucleotide; CTC chr2 60496328 60496349 60496333 60496328 -
atagggctatccctttgcccct

SEQ ID NO: 220196 - DNA, 22 bp, Artificial Sequence
  Synthetic oligonucleotide; CTA chr2 60496319 60496340 60496324 60496319 -
tccctttgcccctcagtaacac

SEQ ID NO: 220197 - DNA, 22 bp, Artificial Sequence
  Synthetic oligonucleotide; CTT chr2 60496313 60496334 60496318 60496313 -
tgcccctcagtaacaccactgg

SEQ ID NO: 220198 - DNA, 22 bp, Artificial Sequence
  Synthetic oligonucleotide; TTT chr2 60496312 60496333 60496317 60496312 -
gcccctcagtaacaccactggg

SEQ ID NO: 220199 - DNA, 22 bp, Artificial Sequence
  Synthetic oligonucleotide; TTG chr2 60496311 60496332 60496316 60496311 -
cccctcagtaacaccactggga

SEQ ID NO: 220200 - DNA, 22 bp, Artificial Sequence
  Synthetic oligonucleotide; CTC chr2 60496305 60496326 60496310 60496305 -
agtaacaccactgggatggtcc

SEQ ID NO: 220201 - DNA, 22 bp, Artificial Sequence
  Synthetic oligonucleotide; CTG chr2 60496292 60496313 60496297 60496292 -
ggatggtccactcccaccctgt

SEQ ID NO: 220202 - DNA, 22 bp, Artificial Sequence
  Synthetic oligonucleotide; CTC chr2 60496279 60496300 60496284 60496279 -
ccaccctgtcccccatctgtgg

SEQ ID NO: 220203 - DNA, 22 bp, Artificial Sequence
  Synthetic oligonucleotide; CTG chr2 60496271 60496292 60496276 60496271 -
tcccccatctgtggtagcctgt

SEQ ID NO: 220204 - DNA, 22 bp, Artificial Sequence
  Synthetic oligonucleotide; CTG chr2 60496260 60496281 60496265 60496260 -
tggtagcctgtgttgcctcgtg

SEQ ID NO: 220205 - DNA, 22 bp, Artificial Sequence
  Synthetic oligonucleotide; CTG chr2 60496250 60496271 60496255 60496250 -
tgttgcctcgtgggacaaggca

SEQ ID NO: 220206 - DNA, 22 bp, Artificial Sequence
  Synthetic oligonucleotide; TTG chr2 60496245 60496266 60496250 60496245 -
cctcgtgggacaaggcattctg

SEQ ID NO: 220207 - DNA, 22 bp, Artificial Sequence
  Synthetic oligonucleotide; CTC chr2 60496241 60496262 60496246 60496241 -
gtgggacaaggcattctgtaaa

SEQ ID NO: 220208 - DNA, 22 bp, Artificial Sequence
  Synthetic oligonucleotide; TTC chr2 60496225 60496246 60496230 60496225 -
tgtaaacgtgtattggacttcc

SEQ ID NO: 220209 - DNA, 22 bp, Artificial Sequence
  Synthetic oligonucleotide; CTG chr2 60496223 60496244 60496228 60496223 -
taaacgtgtattggacttccat

SEQ ID NO: 220210 - DNA, 22 bp, Artificial Sequence
  Synthetic oligonucleotide; TTG chr2 60496210 60496231 60496215 60496210 -
gacttccattgcttaagtcatg

SEQ ID NO: 220211 - DNA, 22 bp, Artificial Sequence
  Synthetic oligonucleotide; CTT chr2 60496205 60496226 60496210 60496205 -
ccattgcttaagtcatgatttg

SEQ ID NO: 220212 - DNA, 22 bp, Artificial Sequence
  Synthetic oligonucleotide; TTC chr2 60496204 60496225 60496209 60496204 -
cattgcttaagtcatgatttgt

SEQ ID NO: 220213 - DNA, 22 bp, Artificial Sequence
  Synthetic oligonucleotide; TTG chr2 60496199 60496220 60496204 60496199 -
cttaagtcatgatttgtttttc

SEQ ID NO: 220214 - DNA, 22 bp, Artificial Sequence
  Synthetic oligonucleotide; CTT chr2 60496196 60496217 60496201 60496196 -
aagtcatgatttgtttttccga

SEQ ID NO: 220215 - DNA, 22 bp, Artificial Sequence
  Synthetic oligonucleotide; TTA chr2 60496195 60496216 60496200 60496195 -
agtcatgatttgtttttccgac

SEQ ID NO: 220216 - DNA, 22 bp, Artificial Sequence
  Synthetic oligonucleotide; TTT chr2 60496184 60496205 60496189 60496184 -
gtttttccgacttccagaactt

SEQ ID NO: 220217 - DNA, 22 bp, Artificial Sequence
  Synthetic oligonucleotide; TTG chr2 60496183 60496204 60496188 60496183 -
tttttccgacttccagaacttt

SEQ ID NO: 220218 - DNA, 22 bp, Artificial Sequence
  Synthetic oligonucleotide; TTT chr2 60496180 60496201 60496185 60496180 -
ttccgacttccagaactttccc

SEQ ID NO: 220219 - DNA, 22 bp, Artificial Sequence
  Synthetic oligonucleotide; TTT chr2 60496179 60496200 60496184 60496179 -
tccgacttccagaactttcccg

SEQ ID NO: 220220 - DNA, 22 bp, Artificial Sequence
  Synthetic oligonucleotide; TTT chr2 60496178 60496199 60496183 60496178 -
ccgacttccagaactttcccgg

SEQ ID NO: 220221 - DNA, 22 bp, Artificial Sequence
  Synthetic oligonucleotide; TTC chr2 60496177 60496198 60496182 60496177 -
cgacttccagaactttcccggt

SEQ ID NO: 220222 - DNA, 22 bp, Artificial Sequence
  Synthetic oligonucleotide; CTT chr2 60496171 60496192 60496176 60496171 -
ccagaactttcccggttctggt

SEQ ID NO: 220223 - DNA, 22 bp, Artificial Sequence
  Synthetic oligonucleotide; TTC chr2 60496170 60496191 60496175 60496170 -
cagaactttcccggttctggtt

SEQ ID NO: 220224 - DNA, 22 bp, Artificial Sequence
  Synthetic oligonucleotide; CTT chr2 60496162 60496183 60496167 60496162 -
tcccggttctggttttctggga

SEQ ID NO: 220225 - DNA, 22 bp, Artificial Sequence
  Synthetic oligonucleotide; TTT chr2 60496161 60496182 60496166 60496161 -
cccggttctggttttctgggat

SEQ ID NO: 220226 - DNA, 22 bp, Artificial Sequence
  Synthetic oligonucleotide; TTC chr2 60496160 60496181 60496165 60496160 -
ccggttctggttttctgggatt

SEQ ID NO: 220227 - DNA, 22 bp, Artificial Sequence
  Synthetic oligonucleotide; TTC chr2 60496153 60496174 60496158 60496153 -
tggttttctgggatttcatgaa

SEQ ID NO: 220228 - DNA, 22 bp, Artificial Sequence
  Synthetic oligonucleotide; CTG chr2 60496151 60496172 60496156 60496151 -
gttttctgggatttcatgaaca

SEQ ID NO: 220229 - DNA, 22 bp, Artificial Sequence
  Synthetic oligonucleotide; TTT chr2 60496147 60496168 60496152 60496147 -
tctgggatttcatgaacaattc

SEQ ID NO: 220230 - DNA, 22 bp, Artificial Sequence
  Synthetic oligonucleotide; TTT chr2 60496146 60496167 60496151 60496146 -
ctgggatttcatgaacaattcc

SEQ ID NO: 220231 - DNA, 22 bp, Artificial Sequence
  Synthetic oligonucleotide; TTC chr2 60496145 60496166 60496150 60496145 -
tgggatttcatgaacaattccc

SEQ ID NO: 220232 - DNA, 22 bp, Artificial Sequence
  Synthetic oligonucleotide; CTG chr2 60496143 60496164 60496148 60496143 -
ggatttcatgaacaattccctg

SEQ ID NO: 220233 - DNA, 22 bp, Artificial Sequence
  Synthetic oligonucleotide; TTT chr2 60496137 60496158 60496142 60496137 -
catgaacaattccctgtttccg

SEQ ID NO: 220234 - DNA, 22 bp, Artificial Sequence
  Synthetic oligonucleotide; TTC chr2 60496136 60496157 60496141 60496136 -
atgaacaattccctgtttccgt

SEQ ID NO: 220235 - DNA, 22 bp, Artificial Sequence
  Synthetic oligonucleotide; TTC chr2 60496125 60496146 60496130 60496125 -
cctgtttccgtaatccatttcc

SEQ ID NO: 220236 - DNA, 22 bp, Artificial Sequence
  Synthetic oligonucleotide; CTG chr2 60496121 60496142 60496126 60496121 -
tttccgtaatccatttcctgca

SEQ ID NO: 220237 - DNA, 22 bp, Artificial Sequence
  Synthetic oligonucleotide; TTT chr2 60496118 60496139 60496123 60496118 -
ccgtaatccatttcctgcacag

SEQ ID NO: 220238 - DNA, 22 bp, Artificial Sequence
  Synthetic oligonucleotide; TTC chr2 60496117 60496138 60496122 60496117 -
cgtaatccatttcctgcacagg

SEQ ID NO: 220239 - DNA, 22 bp, Artificial Sequence
  Synthetic oligonucleotide; TTT chr2 60496105 60496126 60496110 60496105 -
cctgcacaggtgcattgctttc

SEQ ID NO: 220240 - DNA, 22 bp, Artificial Sequence
  Synthetic oligonucleotide; TTC chr2 60496104 60496125 60496109 60496104 -
ctgcacaggtgcattgctttca

SEQ ID NO: 220241 - DNA, 22 bp, Artificial Sequence
  Synthetic oligonucleotide; CTG chr2 60496101 60496122 60496106 60496101 -
cacaggtgcattgctttcaatc

SEQ ID NO: 220242 - DNA, 22 bp, Artificial Sequence
  Synthetic oligonucleotide; TTG chr2 60496088 60496109 60496093 60496088 -
ctttcaatcatctcccctccgg

SEQ ID NO: 220243 - DNA, 22 bp, Artificial Sequence
  Synthetic oligonucleotide; CTT chr2 60496085 60496106 60496090 60496085 -
tcaatcatctcccctccggtta

SEQ ID NO: 220244 - DNA, 22 bp, Artificial Sequence
  Synthetic oligonucleotide; TTT chr2 60496084 60496105 60496089 60496084 -
caatcatctcccctccggttat

SEQ ID NO: 220245 - DNA, 22 bp, Artificial Sequence
  Synthetic oligonucleotide; TTC chr2 60496083 60496104 60496088 60496083 -
aatcatctcccctccggttatc

SEQ ID NO: 220246 - DNA, 22 bp, Artificial Sequence
  Synthetic oligonucleotide; CTC chr2 60496074 60496095 60496079 60496074 -
ccctccggttatcctaaagcct

SEQ ID NO: 220247 - DNA, 22 bp, Artificial Sequence
  Synthetic oligonucleotide; CTC chr2 60496069 60496090 60496074 60496069 -
cggttatcctaaagccttcatt

SEQ ID NO: 220248 - DNA, 22 bp, Artificial Sequence
  Synthetic oligonucleotide; TTA chr2 60496063 60496084 60496068 60496063 -
tcctaaagccttcattatcaat

SEQ ID NO: 220249 - DNA, 22 bp, Artificial Sequence
  Synthetic oligonucleotide; CTA chr2 60496058 60496079 60496063 60496058 -
aagccttcattatcaattgact

SEQ ID NO: 220250 - DNA, 22 bp, Artificial Sequence
  Synthetic oligonucleotide; CTT chr2 60496051 60496072 60496056 60496051 -
cattatcaattgacttttcaca

SEQ ID NO: 220251 - DNA, 22 bp, Artificial Sequence
  Synthetic oligonucleotide; TTC chr2 60496050 60496071 60496055 60496050 -
attatcaattgacttttcacat

SEQ ID NO: 220252 - DNA, 22 bp, Artificial Sequence
  Synthetic oligonucleotide; TTA chr2 60496046 60496067 60496051 60496046 -
tcaattgacttttcacatatga

SEQ ID NO: 220253 - DNA, 22 bp, Artificial Sequence
  Synthetic oligonucleotide; TTG chr2 60496039 60496060 60496044 60496039 -
acttttcacatatgagggtgac

SEQ ID NO: 220254 - DNA, 22 bp, Artificial Sequence
  Synthetic oligonucleotide; CTT chr2 60496035 60496056 60496040 60496035 -
ttcacatatgagggtgacctct

SEQ ID NO: 220255 - DNA, 22 bp, Artificial Sequence
  Synthetic oligonucleotide; TTT chr2 60496034 60496055 60496039 60496034 -
tcacatatgagggtgacctctg

SEQ ID NO: 220256 - DNA, 22 bp, Artificial Sequence
  Synthetic oligonucleotide; TTT chr2 60496033 60496054 60496038 60496033 -
cacatatgagggtgacctctgg

SEQ ID NO: 220257 - DNA, 22 bp, Artificial Sequence
  Synthetic oligonucleotide; TTC chr2 60496032 60496053 60496037 60496032 -
acatatgagggtgacctctgga

SEQ ID NO: 220258 - DNA, 22 bp, Artificial Sequence
  Synthetic oligonucleotide; CTC chr2 60496014 60496035 60496019 60496014 -
tggatcccttctctttggtttg

SEQ ID NO: 220259 - DNA, 22 bp, Artificial Sequence
  Synthetic oligonucleotide; CTG chr2 60496012 60496033 60496017 60496012 -
gatcccttctctttggtttgtt

SEQ ID NO: 220260 - DNA, 22 bp, Artificial Sequence
  Synthetic oligonucleotide; CTT chr2 60496004 60496025 60496009 60496004 -
ctctttggtttgtttgttctct

SEQ ID NO: 220261 - DNA, 22 bp, Artificial Sequence
  Synthetic oligonucleotide; TTC chr2 60496003 60496024 60496008 60496003 -
tctttggtttgtttgttctctt

SEQ ID NO: 220262 - DNA, 22 bp, Artificial Sequence
  Synthetic oligonucleotide; CTC chr2 60496001 60496022 60496006 60496001 -
tttggtttgtttgttctctttt

SEQ ID NO: 220263 - DNA, 22 bp, Artificial Sequence
  Synthetic oligonucleotide; CTT chr2 60495999 60496020 60496004 60495999 -
tggtttgtttgttctcttttcc

SEQ ID NO: 220264 - DNA, 22 bp, Artificial Sequence
  Synthetic oligonucleotide; TTT chr2 60495998 60496019 60496003 60495998 -
ggtttgtttgttctcttttcca

SEQ ID NO: 220265 - DNA, 22 bp, Artificial Sequence
  Synthetic oligonucleotide; TTG chr2 60495997 60496018 60496002 60495997 -
gtttgtttgttctcttttccag

SEQ ID NO: 220266 - DNA, 22 bp, Artificial Sequence
  Synthetic oligonucleotide; TTT chr2 60495993 60496014 60495998 60495993 -
gtttgttctcttttccagagct

SEQ ID NO: 220267 - DNA, 22 bp, Artificial Sequence
  Synthetic oligonucleotide; TTG chr2 60495992 60496013 60495997 60495992 -
tttgttctcttttccagagctg

SEQ ID NO: 220268 - DNA, 22 bp, Artificial Sequence
  Synthetic oligonucleotide; TTT chr2 60495989 60496010 60495994 60495989 -
gttctcttttccagagctgcag

SEQ ID NO: 220269 - DNA, 22 bp, Artificial Sequence
  Synthetic oligonucleotide; TTG chr2 60495988 60496009 60495993 60495988 -
ttctcttttccagagctgcagt

SEQ ID NO: 220270 - DNA, 22 bp, Artificial Sequence
  Synthetic oligonucleotide; TTC chr2 60495985 60496006 60495990 60495985 -
tcttttccagagctgcagtatg

SEQ ID NO: 220271 - DNA, 22 bp, Artificial Sequence
  Synthetic oligonucleotide; CTC chr2 60495983 60496004 60495988 60495983 -
ttttccagagctgcagtatgtt

SEQ ID NO: 220272 - DNA, 22 bp, Artificial Sequence
  Synthetic oligonucleotide; CTT chr2 60495981 60496002 60495986 60495981 -
ttccagagctgcagtatgtttc

SEQ ID NO: 220273 - DNA, 22 bp, Artificial Sequence
  Synthetic oligonucleotide; TTT chr2 60495980 60496001 60495985 60495980 -
tccagagctgcagtatgtttct

SEQ ID NO: 220274 - DNA, 22 bp, Artificial Sequence
  Synthetic oligonucleotide; TTT chr2 60495979 60496000 60495984 60495979 -
ccagagctgcagtatgtttctt

SEQ ID NO: 220275 - DNA, 22 bp, Artificial Sequence
  Synthetic oligonucleotide; TTC chr2 60495978 60495999 60495983 60495978 -
cagagctgcagtatgtttctta

SEQ ID NO: 220276 - DNA, 22 bp, Artificial Sequence
  Synthetic oligonucleotide; CTG chr2 60495970 60495991 60495975 60495970 -
cagtatgtttcttaggtgtttt

SEQ ID NO: 220277 - DNA, 22 bp, Artificial Sequence
  Synthetic oligonucleotide; TTT chr2 60495960 60495981 60495965 60495960 -
cttaggtgttttaaaaaatagc

SEQ ID NO: 220278 - DNA, 22 bp, Artificial Sequence
  Synthetic oligonucleotide; TTC chr2 60495959 60495980 60495964 60495959 -
ttaggtgttttaaaaaatagct

SEQ ID NO: 220279 - DNA, 22 bp, Artificial Sequence
  Synthetic oligonucleotide; CTT chr2 60495957 60495978 60495962 60495957 -
aggtgttttaaaaaatagctaa

SEQ ID NO: 220280 - DNA, 22 bp, Artificial Sequence
  Synthetic oligonucleotide; TTA chr2 60495956 60495977 60495961 60495956 -
ggtgttttaaaaaatagctaag

SEQ ID NO: 220281 - DNA, 22 bp, Artificial Sequence
  Synthetic oligonucleotide; TTT chr2 60495949 60495970 60495954 60495949 -
taaaaaatagctaagaatagtg

SEQ ID NO: 220282 - DNA, 22 bp, Artificial Sequence
  Synthetic oligonucleotide; TTT chr2 60495948 60495969 60495953 60495948 -
aaaaaatagctaagaatagtga

SEQ ID NO: 220283 - DNA, 22 bp, Artificial Sequence
  Synthetic oligonucleotide; TTA chr2 60495947 60495968 60495952 60495947 -
aaaaatagctaagaatagtgaa

SEQ ID NO: 220284 - DNA, 22 bp, Artificial Sequence
  Synthetic oligonucleotide; CTA chr2 60495936 60495957 60495941 60495936 -
agaatagtgaaaacacccttgt

SEQ ID NO: 220285 - DNA, 22 bp, Artificial Sequence
  Synthetic oligonucleotide; CTT chr2 60495916 60495937 60495921 60495916 -
gtaatttagagactctcagaaa

SEQ ID NO: 220286 - DNA, 22 bp, Artificial Sequence
  Synthetic oligonucleotide; TTG chr2 60495915 60495936 60495920 60495915 -
taatttagagactctcagaaaa

SEQ ID NO: 220287 - DNA, 22 bp, Artificial Sequence
  Synthetic oligonucleotide; TTT chr2 60495909 60495930 60495914 60495909 -
agagactctcagaaaaatgaca

SEQ ID NO: 220288 - DNA, 22 bp, Artificial Sequence
  Synthetic oligonucleotide; TTA chr2 60495908 60495929 60495913 60495908 -
gagactctcagaaaaatgacag

SEQ ID NO: 220289 - DNA, 22 bp, Artificial Sequence
  Synthetic oligonucleotide; CTC chr2 60495901 60495922 60495906 60495901 -
tcagaaaaatgacagcaccatt

SEQ ID NO: 220290 - DNA, 22 bp, Artificial Sequence
  Synthetic oligonucleotide; CTC chr2 60495899 60495920 60495904 60495899 -
agaaaaatgacagcaccattta

SEQ ID NO: 220291 - DNA, 22 bp, Artificial Sequence
  Synthetic oligonucleotide; TTT chr2 60495878 60495899 60495883 60495878 -
agagcctggaattacagtttga

SEQ ID NO: 220292 - DNA, 22 bp, Artificial Sequence
  Synthetic oligonucleotide; TTA chr2 60495877 60495898 60495882 60495877 -
gagcctggaattacagtttgac

SEQ ID NO: 220293 - DNA, 22 bp, Artificial Sequence
  Synthetic oligonucleotide; CTG chr2 60495870 60495891 60495875 60495870 -
gaattacagtttgacttcactg

SEQ ID NO: 220294 - DNA, 22 bp, Artificial Sequence
  Synthetic oligonucleotide; TTA chr2 60495864 60495885 60495869 60495864 -
cagtttgacttcactgtgcctt

SEQ ID NO: 220295 - DNA, 22 bp, Artificial Sequence
  Synthetic oligonucleotide; TTT chr2 60495858 60495879 60495863 60495858 -
gacttcactgtgccttctctgc

SEQ ID NO: 220296 - DNA, 22 bp, Artificial Sequence
  Synthetic oligonucleotide; TTG chr2 60495857 60495878 60495862 60495857 -
acttcactgtgccttctctgcc

SEQ ID NO: 220297 - DNA, 22 bp, Artificial Sequence
  Synthetic oligonucleotide; CTT chr2 60495853 60495874 60495858 60495853 -
cactgtgccttctctgccccag

SEQ ID NO: 220298 - DNA, 22 bp, Artificial Sequence
  Synthetic oligonucleotide; TTC chr2 60495852 60495873 60495857 60495852 -
actgtgccttctctgccccagg

SEQ ID NO: 220299 - DNA, 22 bp, Artificial Sequence
  Synthetic oligonucleotide; CTG chr2 60495848 60495869 60495853 60495848 -
tgccttctctgccccaggctcc

SEQ ID NO: 220300 - DNA, 22 bp, Artificial Sequence
  Synthetic oligonucleotide; CTT chr2 60495842 60495863 60495847 60495842 -
ctctgccccaggctcccatggt

SEQ ID NO: 220301 - DNA, 22 bp, Artificial Sequence
  Synthetic oligonucleotide; TTC chr2 60495841 60495862 60495846 60495841 -
tctgccccaggctcccatggtg

SEQ ID NO: 220302 - DNA, 22 bp, Artificial Sequence
  Synthetic oligonucleotide; CTC chr2 60495839 60495860 60495844 60495839 -
tgccccaggctcccatggtggc

SEQ ID NO: 220303 - DNA, 22 bp, Artificial Sequence
  Synthetic oligonucleotide; CTG chr2 60495837 60495858 60495842 60495837 -
ccccaggctcccatggtggcaa

SEQ ID NO: 220304 - DNA, 22 bp, Artificial Sequence
  Synthetic oligonucleotide; CTC chr2 60495827 60495848 60495832 60495827 -
ccatggtggcaagggtttttgg

SEQ ID NO: 220305 - DNA, 22 bp, Artificial Sequence
  Synthetic oligonucleotide; TTT chr2 60495809 60495830 60495814 60495809 -
ttggttgggggaaggggtattg

SEQ ID NO: 220306 - DNA, 22 bp, Artificial Sequence
  Synthetic oligonucleotide; TTT chr2 60495808 60495829 60495813 60495808 -
tggttgggggaaggggtattga

SEQ ID NO: 220307 - DNA, 22 bp, Artificial Sequence
  Synthetic oligonucleotide; TTT chr2 60495807 60495828 60495812 60495807 -
ggttgggggaaggggtattgaa

SEQ ID NO: 220308 - DNA, 22 bp, Artificial Sequence
  Synthetic oligonucleotide; TTG chr2 60495806 60495827 60495811 60495806 -
gttgggggaaggggtattgaat

SEQ ID NO: 220309 - DNA, 22 bp, Artificial Sequence
  Synthetic oligonucleotide; TTG chr2 60495802 60495823 60495807 60495802 -
ggggaaggggtattgaattgcc

SEQ ID NO: 220310 - DNA, 22 bp, Artificial Sequence
  Synthetic oligonucleotide; TTG chr2 60495787 60495808 60495792 60495787 -
aattgcctgtctttgagcagga

SEQ ID NO: 220311 - DNA, 22 bp, Artificial Sequence
  Synthetic oligonucleotide; TTG chr2 60495782 60495803 60495787 60495782 -
cctgtctttgagcaggaaaaga

SEQ ID NO: 220312 - DNA, 22 bp, Artificial Sequence
  Synthetic oligonucleotide; CTG chr2 60495778 60495799 60495783 60495778 -
tctttgagcaggaaaagaatta

SEQ ID NO: 220313 - DNA, 22 bp, Artificial Sequence
  Synthetic oligonucleotide; CTT chr2 60495774 60495795 60495779 60495774 -
tgagcaggaaaagaattacagt

SEQ ID NO: 220314 - DNA, 22 bp, Artificial Sequence
  Synthetic oligonucleotide; TTT chr2 60495773 60495794 60495778 60495773 -
gagcaggaaaagaattacagtt

SEQ ID NO: 220315 - DNA, 22 bp, Artificial Sequence
  Synthetic oligonucleotide; TTG chr2 60495772 60495793 60495777 60495772 -
agcaggaaaagaattacagttt

SEQ ID NO: 220316 - DNA, 22 bp, Artificial Sequence
  Synthetic oligonucleotide; TTA chr2 60495756 60495777 60495761 60495756 -
cagttttccaggtaccttttgt

SEQ ID NO: 220317 - DNA, 22 bp, Artificial Sequence
  Synthetic oligonucleotide; TTT chr2 60495750 60495771 60495755 60495750 -
tccaggtaccttttgtgtgtat

SEQ ID NO: 220318 - DNA, 22 bp, Artificial Sequence
  Synthetic oligonucleotide; TTT chr2 60495749 60495770 60495754 60495749 -
ccaggtaccttttgtgtgtatg

SEQ ID NO: 220319 - DNA, 22 bp, Artificial Sequence
  Synthetic oligonucleotide; TTC chr2 60495748 60495769 60495753 60495748 -
caggtaccttttgtgtgtatgt

SEQ ID NO: 220320 - DNA, 22 bp, Artificial Sequence
  Synthetic oligonucleotide; CTT chr2 60495738 60495759 60495743 60495738 -
ttgtgtgtatgtgctgattgag

SEQ ID NO: 220321 - DNA, 22 bp, Artificial Sequence
  Synthetic oligonucleotide; TTT chr2 60495737 60495758 60495742 60495737 -
tgtgtgtatgtgctgattgagg

SEQ ID NO: 220322 - DNA, 22 bp, Artificial Sequence
  Synthetic oligonucleotide; TTT chr2 60495736 60495757 60495741 60495736 -
gtgtgtatgtgctgattgaggg

SEQ ID NO: 220323 - DNA, 22 bp, Artificial Sequence
  Synthetic oligonucleotide; TTG chr2 60495735 60495756 60495740 60495735 -
tgtgtatgtgctgattgagggc

SEQ ID NO: 220324 - DNA, 22 bp, Artificial Sequence
  Synthetic oligonucleotide; CTG chr2 60495722 60495743 60495727 60495722 -
attgagggcccattgagaatat

SEQ ID NO: 220325 - DNA, 22 bp, Artificial Sequence
  Synthetic oligonucleotide; TTG chr2 60495718 60495739 60495723 60495718 -
agggcccattgagaatattttg

SEQ ID NO: 220326 - DNA, 22 bp, Artificial Sequence
  Synthetic oligonucleotide; TTG chr2 60495707 60495728 60495712 60495707 -
agaatattttgacttttaggga

SEQ ID NO: 220327 - DNA, 22 bp, Artificial Sequence
  Synthetic oligonucleotide; TTT chr2 60495698 60495719 60495703 60495698 -
tgacttttagggaagctccaaa

SEQ ID NO: 220328 - DNA, 22 bp, Artificial Sequence
  Synthetic oligonucleotide; TTT chr2 60495697 60495718 60495702 60495697 -
gacttttagggaagctccaaac

SEQ ID NO: 220329 - DNA, 22 bp, Artificial Sequence
  Synthetic oligonucleotide; TTG chr2 60495696 60495717 60495701 60495696 -
acttttagggaagctccaaact

SEQ ID NO: 220330 - DNA, 22 bp, Artificial Sequence
  Synthetic oligonucleotide; CTT chr2 60495692 60495713 60495697 60495692 -
ttagggaagctccaaactctca

SEQ ID NO: 220331 - DNA, 22 bp, Artificial Sequence
  Synthetic oligonucleotide; TTT chr2 60495691 60495712 60495696 60495691 -
tagggaagctccaaactctcaa

SEQ ID NO: 220332 - DNA, 22 bp, Artificial Sequence
  Synthetic oligonucleotide; TTT chr2 60495690 60495711 60495695 60495690 -
agggaagctccaaactctcaaa

SEQ ID NO: 220333 - DNA, 22 bp, Artificial Sequence
  Synthetic oligonucleotide; TTA chr2 60495689 60495710 60495694 60495689 -
gggaagctccaaactctcaaac

SEQ ID NO: 220334 - DNA, 22 bp, Artificial Sequence
  Synthetic oligonucleotide; CTC chr2 60495680 60495701 60495685 60495680 -
caaactctcaaaccacagggat

SEQ ID NO: 220335 - DNA, 22 bp, Artificial Sequence
  Synthetic oligonucleotide; CTC chr2 60495673 60495694 60495678 60495673 -
tcaaaccacagggatcacaaca

SEQ ID NO: 220336 - DNA, 22 bp, Artificial Sequence
  Synthetic oligonucleotide; CTC chr2 60495671 60495692 60495676 60495671 -
aaaccacagggatcacaacaca

SEQ ID NO: 220337 - DNA, 22 bp, Artificial Sequence
  Synthetic oligonucleotide; CTG chr2 60495637 60495658 60495642 60495637 -
ttatgacgttatatgtaagcat

SEQ ID NO: 220338 - DNA, 22 bp, Artificial Sequence
  Synthetic oligonucleotide; TTA chr2 60495634 60495655 60495639 60495634 -
tgacgttatatgtaagcatcac

SEQ ID NO: 220339 - DNA, 22 bp, Artificial Sequence
  Synthetic oligonucleotide; TTA chr2 60495626 60495647 60495631 60495626 -
tatgtaagcatcacaacaggca

SEQ ID NO: 220340 - DNA, 22 bp, Artificial Sequence
  Synthetic oligonucleotide; CTG chr2 60495593 60495614 60495598 60495593 -
caccccaccctggaaaacagcc

SEQ ID NO: 220341 - DNA, 22 bp, Artificial Sequence
  Synthetic oligonucleotide; CTG chr2 60495581 60495602 60495586 60495581 -
gaaaacagcctgactgtgcccc

SEQ ID NO: 220342 - DNA, 22 bp, Artificial Sequence
  Synthetic oligonucleotide; CTG chr2 60495569 60495590 60495574 60495569 -
actgtgccccatgggcaaacca

SEQ ID NO: 220343 - DNA, 22 bp, Artificial Sequence
  Synthetic oligonucleotide; CTG chr2 60495565 60495586 60495570 60495565 -
tgccccatgggcaaaccagact

SEQ ID NO: 220344 - DNA, 22 bp, Artificial Sequence
  Synthetic oligonucleotide; CTA chr2 60495542 60495563 60495547 60495542 -
gtttatagggggttctactctg

SEQ ID NO: 220345 - DNA, 22 bp, Artificial Sequence
  Synthetic oligonucleotide; TTT chr2 60495538 60495559 60495543 60495538 -
atagggggttctactctgaggt

SEQ ID NO: 220346 - DNA, 22 bp, Artificial Sequence
  Synthetic oligonucleotide; TTA chr2 60495537 60495558 60495542 60495537 -
tagggggttctactctgaggta

SEQ ID NO: 220347 - DNA, 22 bp, Artificial Sequence
  Synthetic oligonucleotide; TTC chr2 60495527 60495548 60495532 60495527 -
tactctgaggtactgatggacc

SEQ ID NO: 220348 - DNA, 22 bp, Artificial Sequence
  Synthetic oligonucleotide; CTA chr2 60495525 60495546 60495530 60495525 -
ctctgaggtactgatggacctt

SEQ ID NO: 220349 - DNA, 22 bp, Artificial Sequence
  Synthetic oligonucleotide; CTC chr2 60495522 60495543 60495527 60495522 -
tgaggtactgatggaccttggg

SEQ ID NO: 220350 - DNA, 22 bp, Artificial Sequence
  Synthetic oligonucleotide; CTG chr2 60495520 60495541 60495525 60495520 -
aggtactgatggaccttgggtg

SEQ ID NO: 220351 - DNA, 22 bp, Artificial Sequence
  Synthetic oligonucleotide; CTG chr2 60495512 60495533 60495517 60495512 -
atggaccttgggtgctattcct

SEQ ID NO: 220352 - DNA, 22 bp, Artificial Sequence
  Synthetic oligonucleotide; CTT chr2 60495503 60495524 60495508 60495503 -
gggtgctattcctgtgataagg

SEQ ID NO: 220353 - DNA, 22 bp, Artificial Sequence
  Synthetic oligonucleotide; TTG chr2 60495502 60495523 60495507 60495502 -
ggtgctattcctgtgataagga

SEQ ID NO: 220354 - DNA, 22 bp, Artificial Sequence
  Synthetic oligonucleotide; CTA chr2 60495495 60495516 60495500 60495495 -
ttcctgtgataaggaaggcagc

SEQ ID NO: 220355 - DNA, 22 bp, Artificial Sequence
  Synthetic oligonucleotide; TTC chr2 60495492 60495513 60495497 60495492 -
ctgtgataaggaaggcagctag

SEQ ID NO: 220356 - DNA, 22 bp, Artificial Sequence
  Synthetic oligonucleotide; CTG chr2 60495489 60495510 60495494 60495489 -
tgataaggaaggcagctagaca

SEQ ID NO: 220357 - DNA, 22 bp, Artificial Sequence
  Synthetic oligonucleotide; CTA chr2 60495471 60495492 60495476 60495471 -
gacaggacttgggagttatctg

SEQ ID NO: 220358 - DNA, 22 bp, Artificial Sequence
  Synthetic oligonucleotide; CTT chr2 60495461 60495482 60495466 60495461 -
gggagttatctgtagtgagatg

SEQ ID NO: 220359 - DNA, 22 bp, Artificial Sequence
  Synthetic oligonucleotide; TTG chr2 60495460 60495481 60495465 60495460 -
ggagttatctgtagtgagatgg

SEQ ID NO: 220360 - DNA, 22 bp, Artificial Sequence
  Synthetic oligonucleotide; TTA chr2 60495453 60495474 60495458 60495453 -
tctgtagtgagatggctgaaaa

SEQ ID NO: 220361 - DNA, 22 bp, Artificial Sequence
  Synthetic oligonucleotide; CTG chr2 60495449 60495470 60495454 60495449 -
tagtgagatggctgaaaagcga

SEQ ID NO: 220362 - DNA, 22 bp, Artificial Sequence
  Synthetic oligonucleotide; CTG chr2 60495435 60495456 60495440 60495435 -
aaaagcgatacagggctggctc

SEQ ID NO: 220363 - DNA, 22 bp, Artificial Sequence
  Synthetic oligonucleotide; CTG chr2 60495417 60495438 60495422 60495417 -
gctctatgccccaggtgtgcat

SEQ ID NO: 220364 - DNA, 22 bp, Artificial Sequence
  Synthetic oligonucleotide; CTC chr2 60495413 60495434 60495418 60495413 -
tatgccccaggtgtgcataagt

SEQ ID NO: 220365 - DNA, 22 bp, Artificial Sequence
  Synthetic oligonucleotide; CTA chr2 60495411 60495432 60495416 60495411 -
tgccccaggtgtgcataagtaa

SEQ ID NO: 220366 - DNA, 22 bp, Artificial Sequence
  Synthetic oligonucleotide; CTG chr2 60495376 60495397 60495381 60495376 -
attccagtgcaaagtccataca

SEQ ID NO: 220367 - DNA, 22 bp, Artificial Sequence
  Synthetic oligonucleotide; TTC chr2 60495372 60495393 60495377 60495372 -
cagtgcaaagtccatacaggta

SEQ ID NO: 220368 - DNA, 22 bp, Artificial Sequence
  Synthetic oligonucleotide; CTA chr2 60495317 60495338 60495322 60495317 -
ctcttagacataacacaccagg

SEQ ID NO: 220369 - DNA, 22 bp, Artificial Sequence
  Synthetic oligonucleotide; CTC chr2 60495314 60495335 60495319 60495314 -
ttagacataacacaccagggtc

SEQ ID NO: 220370 - DNA, 22 bp, Artificial Sequence
  Synthetic oligonucleotide; CTT chr2 60495312 60495333 60495317 60495312 -
agacataacacaccagggtcaa

SEQ ID NO: 220371 - DNA, 22 bp, Artificial Sequence
  Synthetic oligonucleotide; TTA chr2 60495311 60495332 60495316 60495311 -
gacataacacaccagggtcaat

SEQ ID NO: 220372 - DNA, 22 bp, Artificial Sequence
  Synthetic oligonucleotide; CTT chr2 60495282 60495303 60495287 60495282 -
tgaagctagtctagtgcaagct

SEQ ID NO: 220373 - DNA, 22 bp, Artificial Sequence
  Synthetic oligonucleotide; TTT chr2 60495281 60495302 60495286 60495281 -
gaagctagtctagtgcaagcta

SEQ ID NO: 220374 - DNA, 22 bp, Artificial Sequence
  Synthetic oligonucleotide; TTG chr2 60495280 60495301 60495285 60495280 -
aagctagtctagtgcaagctaa

SEQ ID NO: 220375 - DNA, 22 bp, Artificial Sequence
  Synthetic oligonucleotide; CTA chr2 60495274 60495295 60495279 60495274 -
gtctagtgcaagctaacagttg

SEQ ID NO: 220376 - DNA, 22 bp, Artificial Sequence
  Synthetic oligonucleotide; CTA chr2 60495269 60495290 60495274 60495269 -
gtgcaagctaacagttgctttt

SEQ ID NO: 220377 - DNA, 22 bp, Artificial Sequence
  Synthetic oligonucleotide; CTA chr2 60495259 60495280 60495264 60495259 -
acagttgcttttatcacaggct

SEQ ID NO: 220378 - DNA, 22 bp, Artificial Sequence
  Synthetic oligonucleotide; TTG chr2 60495252 60495273 60495257 60495252 -
cttttatcacaggctccaggaa

SEQ ID NO: 220379 - DNA, 22 bp, Artificial Sequence
  Synthetic oligonucleotide; CTT chr2 60495249 60495270 60495254 60495249 -
ttatcacaggctccaggaaggg

SEQ ID NO: 220380 - DNA, 22 bp, Artificial Sequence
  Synthetic oligonucleotide; TTT chr2 60495248 60495269 60495253 60495248 -
tatcacaggctccaggaagggt

SEQ ID NO: 220381 - DNA, 22 bp, Artificial Sequence
  Synthetic oligonucleotide; TTT chr2 60495247 60495268 60495252 60495247 -
atcacaggctccaggaagggtt

SEQ ID NO: 220382 - DNA, 22 bp, Artificial Sequence
  Synthetic oligonucleotide; TTA chr2 60495246 60495267 60495251 60495246 -
tcacaggctccaggaagggttt

SEQ ID NO: 220383 - DNA, 22 bp, Artificial Sequence
  Synthetic oligonucleotide; CTC chr2 60495236 60495257 60495241 60495236 -
caggaagggtttggcctctgat

SEQ ID NO: 220384 - DNA, 22 bp, Artificial Sequence
  Synthetic oligonucleotide; TTT chr2 60495224 60495245 60495229 60495224 -
ggcctctgattagggtgggggc

SEQ ID NO: 220385 - DNA, 22 bp, Artificial Sequence
  Synthetic oligonucleotide; TTG chr2 60495223 60495244 60495228 60495223 -
gcctctgattagggtgggggcg

SEQ ID NO: 220386 - DNA, 22 bp, Artificial Sequence
  Synthetic oligonucleotide; CTC chr2 60495218 60495239 60495223 60495218 -
tgattagggtgggggcgtgggt

SEQ ID NO: 220387 - DNA, 22 bp, Artificial Sequence
  Synthetic oligonucleotide; CTG chr2 60495216 60495237 60495221 60495216 -
attagggtgggggcgtgggtgg

SEQ ID NO: 220388 - DNA, 22 bp, Artificial Sequence
  Synthetic oligonucleotide; TTA chr2 60495212 60495233 60495217 60495212 -
gggtgggggcgtgggtggggta

SEQ ID NO: 220389 - DNA, 22 bp, Artificial Sequence
  Synthetic oligonucleotide; CTG chr2 60495179 60495200 60495184 60495179 -
gcagacctctccatcggtggcc

SEQ ID NO: 220390 - DNA, 22 bp, Artificial Sequence
  Synthetic oligonucleotide; CTC chr2 60495170 60495191 60495175 60495170 -
tccatcggtggccgtttgccca

SEQ ID NO: 220391 - DNA, 22 bp, Artificial Sequence
  Synthetic oligonucleotide; CTC chr2 60495168 60495189 60495173 60495168 -
catcggtggccgtttgcccagg

SEQ ID NO: 220392 - DNA, 22 bp, Artificial Sequence
  Synthetic oligonucleotide; TTT chr2 60495153 60495174 60495158 60495153 -
gcccaggggggcctctttcgga

SEQ ID NO: 220393 - DNA, 22 bp, Artificial Sequence
  Synthetic oligonucleotide; TTG chr2 60495152 60495173 60495157 60495152 -
cccaggggggcctctttcggaa

SEQ ID NO: 220394 - DNA, 22 bp, Artificial Sequence
  Synthetic oligonucleotide; CTC chr2 60495138 60495159 60495143 60495138 -
tttcggaaggctctcttggtga

SEQ ID NO: 220395 - DNA, 22 bp, Artificial Sequence
  Synthetic oligonucleotide; CTT chr2 60495136 60495157 60495141 60495136 -
tcggaaggctctcttggtgatg

SEQ ID NO: 220396 - DNA, 22 bp, Artificial Sequence
  Synthetic oligonucleotide; TTT chr2 60495135 60495156 60495140 60495135 -
cggaaggctctcttggtgatgg

SEQ ID NO: 220397 - DNA, 22 bp, Artificial Sequence
  Synthetic oligonucleotide; TTC chr2 60495134 60495155 60495139 60495134 -
ggaaggctctcttggtgatgga

SEQ ID NO: 220398 - DNA, 22 bp, Artificial Sequence
  Synthetic oligonucleotide; CTC chr2 60495125 60495146 60495130 60495125 -
tcttggtgatggagaattggat

SEQ ID NO: 220399 - DNA, 22 bp, Artificial Sequence
  Synthetic oligonucleotide; CTC chr2 60495123 60495144 60495128 60495123 -
ttggtgatggagaattggattt

SEQ ID NO: 220400 - DNA, 22 bp, Artificial Sequence
  Synthetic oligonucleotide; CTT chr2 60495121 60495142 60495126 60495121 -
ggtgatggagaattggatttta

SEQ ID NO: 220401 - DNA, 22 bp, Artificial Sequence
  Synthetic oligonucleotide; TTG chr2 60495120 60495141 60495125 60495120 -
gtgatggagaattggattttat

SEQ ID NO: 220402 - DNA, 22 bp, Artificial Sequence
  Synthetic oligonucleotide; TTG chr2 60495106 60495127 60495111 60495106 -
gattttatttctcaatgggaat

SEQ ID NO: 220403 - DNA, 22 bp, Artificial Sequence
  Synthetic oligonucleotide; TTT chr2 60495101 60495122 60495106 60495101 -
tatttctcaatgggaatgaaat

SEQ ID NO: 220404 - DNA, 22 bp, Artificial Sequence
  Synthetic oligonucleotide; TTT chr2 60495100 60495121 60495105 60495100 -
atttctcaatgggaatgaaata

SEQ ID NO: 220405 - DNA, 22 bp, Artificial Sequence
  Synthetic oligonucleotide; TTA chr2 60495099 60495120 60495104 60495099 -
tttctcaatgggaatgaaataa

SEQ ID NO: 220406 - DNA, 22 bp, Artificial Sequence
  Synthetic oligonucleotide; TTT chr2 60495096 60495117 60495101 60495096 -
ctcaatgggaatgaaataattt

SEQ ID NO: 220407 - DNA, 22 bp, Artificial Sequence
  Synthetic oligonucleotide; TTC chr2 60495095 60495116 60495100 60495095 -
tcaatgggaatgaaataatttg

SEQ ID NO: 220408 - DNA, 22 bp, Artificial Sequence
  Synthetic oligonucleotide; CTC chr2 60495093 60495114 60495098 60495093 -
aatgggaatgaaataatttgta

SEQ ID NO: 220409 - DNA, 22 bp, Artificial Sequence
  Synthetic oligonucleotide; TTT chr2 60495074 60495095 60495079 60495074 -
gtatgccatgccgtgtggactc

SEQ ID NO: 220410 - DNA, 22 bp, Artificial Sequence
  Synthetic oligonucleotide; TTG chr2 60495073 60495094 60495078 60495073 -
tatgccatgccgtgtggactcc

SEQ ID NO: 220411 - DNA, 22 bp, Artificial Sequence
  Synthetic oligonucleotide; CTC chr2 60495052 60495073 60495057 60495052 -
ccaaaattgtaaaggaggtgaa

SEQ ID NO: 220412 - DNA, 22 bp, Artificial Sequence
  Synthetic oligonucleotide; TTG chr2 60495043 60495064 60495048 60495043 -
taaaggaggtgaagcttcccct

SEQ ID NO: 220413 - DNA, 22 bp, Artificial Sequence
  Synthetic oligonucleotide; CTT chr2 60495026 60495047 60495031 60495026 -
cccctgtctgcactctcccctc

SEQ ID NO: 220414 - DNA, 22 bp, Artificial Sequence
  Synthetic oligonucleotide; TTC chr2 60495025 60495046 60495030 60495025 -
ccctgtctgcactctcccctcc

SEQ ID NO: 220415 - DNA, 22 bp, Artificial Sequence
  Synthetic oligonucleotide; CTG chr2 60495020 60495041 60495025 60495020 -
tctgcactctcccctcctcata

SEQ ID NO: 220416 - DNA, 22 bp, Artificial Sequence
  Synthetic oligonucleotide; CTG chr2 60495016 60495037 60495021 60495016 -
cactctcccctcctcataattg

SEQ ID NO: 220417 - DNA, 22 bp, Artificial Sequence
  Synthetic oligonucleotide; CTC chr2 60495011 60495032 60495016 60495011 -
tcccctcctcataattgtccat

SEQ ID NO: 220418 - DNA, 22 bp, Artificial Sequence
  Synthetic oligonucleotide; CTC chr2 60495009 60495030 60495014 60495009 -
ccctcctcataattgtccattt

SEQ ID NO: 220419 - DNA, 22 bp, Artificial Sequence
  Synthetic oligonucleotide; CTC chr2 60495004 60495025 60495009 60495004 -
ctcataattgtccatttttcat

SEQ ID NO: 220420 - DNA, 22 bp, Artificial Sequence
  Synthetic oligonucleotide; CTC chr2 60495001 60495022 60495006 60495001 -
ataattgtccatttttcatctg

SEQ ID NO: 220421 - DNA, 22 bp, Artificial Sequence
  Synthetic oligonucleotide; TTG chr2 60494994 60495015 60494999 60494994 -
tccatttttcatctgtcgggct

SEQ ID NO: 220422 - DNA, 22 bp, Artificial Sequence
  Synthetic oligonucleotide; TTT chr2 60494987 60495008 60494992 60494987 -
ttcatctgtcgggctgtccacc

SEQ ID NO: 220423 - DNA, 22 bp, Artificial Sequence
  Synthetic oligonucleotide; TTT chr2 60494986 60495007 60494991 60494986 -
tcatctgtcgggctgtccaccc

SEQ ID NO: 220424 - DNA, 22 bp, Artificial Sequence
  Synthetic oligonucleotide; TTT chr2 60494985 60495006 60494990 60494985 -
catctgtcgggctgtccaccca

SEQ ID NO: 220425 - DNA, 22 bp, Artificial Sequence
  Synthetic oligonucleotide; TTC chr2 60494984 60495005 60494989 60494984 -
atctgtcgggctgtccacccat

SEQ ID NO: 220426 - DNA, 22 bp, Artificial Sequence
  Synthetic oligonucleotide; CTG chr2 60494979 60495000 60494984 60494979 -
tcgggctgtccacccatccatc

SEQ ID NO: 220427 - DNA, 22 bp, Artificial Sequence
  Synthetic oligonucleotide; CTG chr2 60494971 60494992 60494976 60494971 -
tccacccatccatcacatatag

SEQ ID NO: 220428 - DNA, 22 bp, Artificial Sequence
  Synthetic oligonucleotide; CTA chr2 60494942 60494963 60494947 60494942 -
tcaggtaccagctactgtgtta

SEQ ID NO: 220429 - DNA, 22 bp, Artificial Sequence
  Synthetic oligonucleotide; CTA chr2 60494928 60494949 60494933 60494928 -
ctgtgttaggatctgtgttccc

SEQ ID NO: 220430 - DNA, 22 bp, Artificial Sequence
  Synthetic oligonucleotide; CTG chr2 60494925 60494946 60494930 60494925 -
tgttaggatctgtgttcccaac

SEQ ID NO: 220431 - DNA, 22 bp, Artificial Sequence
  Synthetic oligonucleotide; TTA chr2 60494920 60494941 60494925 60494920 -
ggatctgtgttcccaactgact

SEQ ID NO: 220432 - DNA, 22 bp, Artificial Sequence
  Synthetic oligonucleotide; CTG chr2 60494913 60494934 60494918 60494913 -
tgttcccaactgacttgcctcc

SEQ ID NO: 220433 - DNA, 22 bp, Artificial Sequence
  Synthetic oligonucleotide; TTC chr2 60494908 60494929 60494913 60494908 -
ccaactgacttgcctccccctg

SEQ ID NO: 220434 - DNA, 22 bp, Artificial Sequence
  Synthetic oligonucleotide; CTG chr2 60494901 60494922 60494906 60494901 -
acttgcctccccctgacgtcat

SEQ ID NO: 220435 - DNA, 22 bp, Artificial Sequence
  Synthetic oligonucleotide; CTT chr2 60494897 60494918 60494902 60494897 -
gcctccccctgacgtcatattc

SEQ ID NO: 220436 - DNA, 22 bp, Artificial Sequence
  Synthetic oligonucleotide; TTG chr2 60494896 60494917 60494901 60494896 -
cctccccctgacgtcatattct

SEQ ID NO: 220437 - DNA, 22 bp, Artificial Sequence
  Synthetic oligonucleotide; CTC chr2 60494892 60494913 60494897 60494892 -
cccctgacgtcatattcttttc

SEQ ID NO: 220438 - DNA, 22 bp, Artificial Sequence
  Synthetic oligonucleotide; CTG chr2 60494886 60494907 60494891 60494886 -
acgtcatattcttttccttttt

SEQ ID NO: 220439 - DNA, 22 bp, Artificial Sequence
  Synthetic oligonucleotide; TTC chr2 60494875 60494896 60494880 60494875 -
ttttcctttttcctctcccttt

SEQ ID NO: 220440 - DNA, 22 bp, Artificial Sequence
  Synthetic oligonucleotide; CTT chr2 60494873 60494894 60494878 60494873 -
ttcctttttcctctcccttttc

SEQ ID NO: 220441 - DNA, 22 bp, Artificial Sequence
  Synthetic oligonucleotide; TTT chr2 60494872 60494893 60494877 60494872 -
tcctttttcctctcccttttcc

SEQ ID NO: 220442 - DNA, 22 bp, Artificial Sequence
  Synthetic oligonucleotide; TTT chr2 60494871 60494892 60494876 60494871 -
cctttttcctctcccttttccc

SEQ ID NO: 220443 - DNA, 22 bp, Artificial Sequence
  Synthetic oligonucleotide; TTC chr2 60494870 60494891 60494875 60494870 -
ctttttcctctcccttttccct

SEQ ID NO: 220444 - DNA, 22 bp, Artificial Sequence
  Synthetic oligonucleotide; CTT chr2 60494867 60494888 60494872 60494867 -
tttcctctcccttttccctttt

SEQ ID NO: 220445 - DNA, 22 bp, Artificial Sequence
  Synthetic oligonucleotide; TTT chr2 60494866 60494887 60494871 60494866 -
ttcctctcccttttcccttttc

SEQ ID NO: 220446 - DNA, 22 bp, Artificial Sequence
  Synthetic oligonucleotide; TTT chr2 60494865 60494886 60494870 60494865 -
tcctctcccttttcccttttct

SEQ ID NO: 220447 - DNA, 22 bp, Artificial Sequence
  Synthetic oligonucleotide; TTT chr2 60494864 60494885 60494869 60494864 -
cctctcccttttcccttttctt

SEQ ID NO: 220448 - DNA, 22 bp, Artificial Sequence
  Synthetic oligonucleotide; TTC chr2 60494863 60494884 60494868 60494863 -
ctctcccttttcccttttcttc

SEQ ID NO: 220449 - DNA, 22 bp, Artificial Sequence
  Synthetic oligonucleotide; CTC chr2 60494860 60494881 60494865 60494860 -
tcccttttcccttttcttctga

SEQ ID NO: 220450 - DNA, 22 bp, Artificial Sequence
  Synthetic oligonucleotide; CTC chr2 60494858 60494879 60494863 60494858 -
ccttttcccttttcttctgacc

SEQ ID NO: 220451 - DNA, 22 bp, Artificial Sequence
  Synthetic oligonucleotide; CTT chr2 60494854 60494875 60494859 60494854 -
ttcccttttcttctgacccaaa

SEQ ID NO: 220452 - DNA, 22 bp, Artificial Sequence
  Synthetic oligonucleotide; TTT chr2 60494853 60494874 60494858 60494853 -
tcccttttcttctgacccaaac

SEQ ID NO: 220453 - DNA, 22 bp, Artificial Sequence
  Synthetic oligonucleotide; TTT chr2 60494852 60494873 60494857 60494852 -
cccttttcttctgacccaaact

SEQ ID NO: 220454 - DNA, 22 bp, Artificial Sequence
  Synthetic oligonucleotide; TTC chr2 60494851 60494872 60494856 60494851 -
ccttttcttctgacccaaacta

SEQ ID NO: 220455 - DNA, 22 bp, Artificial Sequence
  Synthetic oligonucleotide; CTT chr2 60494847 60494868 60494852 60494847 -
ttcttctgacccaaactaggaa

SEQ ID NO: 220456 - DNA, 22 bp, Artificial Sequence
  Synthetic oligonucleotide; TTT chr2 60494846 60494867 60494851 60494846 -
tcttctgacccaaactaggaat

SEQ ID NO: 220457 - DNA, 22 bp, Artificial Sequence
  Synthetic oligonucleotide; TTT chr2 60494845 60494866 60494850 60494845 -
cttctgacccaaactaggaatt

SEQ ID NO: 220458 - DNA, 22 bp, Artificial Sequence
  Synthetic oligonucleotide; TTC chr2 60494844 60494865 60494849 60494844 -
ttctgacccaaactaggaattg

SEQ ID NO: 220459 - DNA, 22 bp, Artificial Sequence
  Synthetic oligonucleotide; CTT chr2 60494842 60494863 60494847 60494842 -
ctgacccaaactaggaattggg

SEQ ID NO: 220460 - DNA, 22 bp, Artificial Sequence
  Synthetic oligonucleotide; TTC chr2 60494841 60494862 60494846 60494841 -
tgacccaaactaggaattgggg

SEQ ID NO: 220461 - DNA, 22 bp, Artificial Sequence
  Synthetic oligonucleotide; CTG chr2 60494839 60494860 60494844 60494839 -
acccaaactaggaattggggaa

SEQ ID NO: 220462 - DNA, 22 bp, Artificial Sequence
  Synthetic oligonucleotide; CTA chr2 60494829 60494850 60494834 60494829 -
ggaattggggaaagggcctgat

SEQ ID NO: 220463 - DNA, 22 bp, Artificial Sequence
  Synthetic oligonucleotide; TTG chr2 60494822 60494843 60494827 60494822 -
gggaaagggcctgataactttg

SEQ ID NO: 220464 - DNA, 22 bp, Artificial Sequence
  Synthetic oligonucleotide; CTG chr2 60494809 60494830 60494814 60494809 -
ataactttgtttctgctgaggt

SEQ ID NO: 220465 - DNA, 22 bp, Artificial Sequence
  Synthetic oligonucleotide; CTT chr2 60494802 60494823 60494807 60494802 -
tgtttctgctgaggtgtaacta

SEQ ID NO: 220466 - DNA, 22 bp, Artificial Sequence
  Synthetic oligonucleotide; TTT chr2 60494801 60494822 60494806 60494801 -
gtttctgctgaggtgtaactaa

SEQ ID NO: 220467 - DNA, 22 bp, Artificial Sequence
  Synthetic oligonucleotide; TTG chr2 60494800 60494821 60494805 60494800 -
tttctgctgaggtgtaactaat

SEQ ID NO: 220468 - DNA, 22 bp, Artificial Sequence
  Synthetic oligonucleotide; TTT chr2 60494797 60494818 60494802 60494797 -
ctgctgaggtgtaactaataaa

SEQ ID NO: 220469 - DNA, 22 bp, Artificial Sequence
  Synthetic oligonucleotide; TTC chr2 60494796 60494817 60494801 60494796 -
tgctgaggtgtaactaataaat

SEQ ID NO: 220470 - DNA, 22 bp, Artificial Sequence
  Synthetic oligonucleotide; CTG chr2 60494794 60494815 60494799 60494794 -
ctgaggtgtaactaataaatac

SEQ ID NO: 220471 - DNA, 22 bp, Artificial Sequence
  Synthetic oligonucleotide; CTG chr2 60494791 60494812 60494796 60494791 -
aggtgtaactaataaataccag

SEQ ID NO: 220472 - DNA, 22 bp, Artificial Sequence
  Synthetic oligonucleotide; CTA chr2 60494780 60494801 60494785 60494780 -
ataaataccaggaggcagcatt

SEQ ID NO: 220473 - DNA, 22 bp, Artificial Sequence
  Synthetic oligonucleotide; TTT chr2 60494757 60494778 60494762 60494757 -
tagttcacaagctcggagcact

SEQ ID NO: 220474 - DNA, 22 bp, Artificial Sequence
  Synthetic oligonucleotide; TTT chr2 60494756 60494777 60494761 60494756 -
agttcacaagctcggagcactt

SEQ ID NO: 220475 - DNA, 22 bp, Artificial Sequence
  Synthetic oligonucleotide; TTA chr2 60494755 60494776 60494760 60494755 -
gttcacaagctcggagcactta

SEQ ID NO: 220476 - DNA, 22 bp, Artificial Sequence
  Synthetic oligonucleotide; TTC chr2 60494751 60494772 60494756 60494751 -
acaagctcggagcacttactct

SEQ ID NO: 220477 - DNA, 22 bp, Artificial Sequence
  Synthetic oligonucleotide; CTC chr2 60494743 60494764 60494748 60494743 -
ggagcacttactctgctctagg

SEQ ID NO: 220478 - DNA, 22 bp, Artificial Sequence
  Synthetic oligonucleotide; CTT chr2 60494734 60494755 60494739 60494734 -
actctgctctaggaactttaca

SEQ ID NO: 220479 - DNA, 22 bp, Artificial Sequence
  Synthetic oligonucleotide; TTA chr2 60494733 60494754 60494738 60494733 -
ctctgctctaggaactttacaa

SEQ ID NO: 220480 - DNA, 22 bp, Artificial Sequence
  Synthetic oligonucleotide; CTC chr2 60494730 60494751 60494735 60494730 -
tgctctaggaactttacaaata

SEQ ID NO: 220481 - DNA, 22 bp, Artificial Sequence
  Synthetic oligonucleotide; CTG chr2 60494728 60494749 60494733 60494728 -
ctctaggaactttacaaatacg

SEQ ID NO: 220482 - DNA, 22 bp, Artificial Sequence
  Synthetic oligonucleotide; CTC chr2 60494725 60494746 60494730 60494725 -
taggaactttacaaatacgcac

SEQ ID NO: 220483 - DNA, 22 bp, Artificial Sequence
  Synthetic oligonucleotide; CTA chr2 60494723 60494744 60494728 60494723 -
ggaactttacaaatacgcactc

SEQ ID NO: 220484 - DNA, 22 bp, Artificial Sequence
  Synthetic oligonucleotide; CTT chr2 60494716 60494737 60494721 60494716 -
tacaaatacgcactcattttat

SEQ ID NO: 220485 - DNA, 22 bp, Artificial Sequence
  Synthetic oligonucleotide; TTT chr2 60494715 60494736 60494720 60494715 -
acaaatacgcactcattttatt

SEQ ID NO: 220486 - DNA, 22 bp, Artificial Sequence
  Synthetic oligonucleotide; TTA chr2 60494714 60494735 60494719 60494714 -
caaatacgcactcattttattt

SEQ ID NO: 220487 - DNA, 22 bp, Artificial Sequence
  Synthetic oligonucleotide; CTC chr2 60494701 60494722 60494706 60494701 -
attttattttcatacaaaccct

SEQ ID NO: 220488 - DNA, 22 bp, Artificial Sequence
  Synthetic oligonucleotide; TTT chr2 60494697 60494718 60494702 60494697 -
tattttcatacaaaccctatga

SEQ ID NO: 220489 - DNA, 22 bp, Artificial Sequence
  Synthetic oligonucleotide; TTT chr2 60494696 60494717 60494701 60494696 -
attttcatacaaaccctatgaa

SEQ ID NO: 220490 - DNA, 22 bp, Artificial Sequence
  Synthetic oligonucleotide; TTA chr2 60494695 60494716 60494700 60494695 -
ttttcatacaaaccctatgaag

SEQ ID NO: 220491 - DNA, 22 bp, Artificial Sequence
  Synthetic oligonucleotide; TTT chr2 60494692 60494713 60494697 60494692 -
tcatacaaaccctatgaagcat

SEQ ID NO: 220492 - DNA, 22 bp, Artificial Sequence
  Synthetic oligonucleotide; TTT chr2 60494691 60494712 60494696 60494691 -
catacaaaccctatgaagcata

SEQ ID NO: 220493 - DNA, 22 bp, Artificial Sequence
  Synthetic oligonucleotide; TTC chr2 60494690 60494711 60494695 60494690 -
atacaaaccctatgaagcatat

SEQ ID NO: 220494 - DNA, 22 bp, Artificial Sequence
  Synthetic oligonucleotide; CTA chr2 60494678 60494699 60494683 60494678 -
tgaagcatatactattattatt

SEQ ID NO: 220495 - DNA, 22 bp, Artificial Sequence
  Synthetic oligonucleotide; CTA chr2 60494664 60494685 60494669 60494664 -
ttattattcctattttacggat

SEQ ID NO: 220496 - DNA, 22 bp, Artificial Sequence
  Synthetic oligonucleotide; TTA chr2 60494661 60494682 60494666 60494661 -
ttattcctattttacggatgag

SEQ ID NO: 220497 - DNA, 22 bp, Artificial Sequence
  Synthetic oligonucleotide; TTA chr2 60494658 60494679 60494663 60494658 -
ttcctattttacggatgagtcc

SEQ ID NO: 220498 - DNA, 22 bp, Artificial Sequence
  Synthetic oligonucleotide; TTC chr2 60494655 60494676 60494660 60494655 -
ctattttacggatgagtccata

SEQ ID NO: 220499 - DNA, 22 bp, Artificial Sequence
  Synthetic oligonucleotide; CTA chr2 60494652 60494673 60494657 60494652 -
ttttacggatgagtccatattt

SEQ ID NO: 220500 - DNA, 22 bp, Artificial Sequence
  Synthetic oligonucleotide; TTT chr2 60494649 60494670 60494654 60494649 -
tacggatgagtccatattttaa

SEQ ID NO: 220501 - DNA, 22 bp, Artificial Sequence
  Synthetic oligonucleotide; TTT chr2 60494648 60494669 60494653 60494648 -
acggatgagtccatattttaaa

SEQ ID NO: 220502 - DNA, 22 bp, Artificial Sequence
  Synthetic oligonucleotide; TTA chr2 60494647 60494668 60494652 60494647 -
cggatgagtccatattttaaat

SEQ ID NO: 220503 - DNA, 22 bp, Artificial Sequence
  Synthetic oligonucleotide; TTT chr2 60494630 60494651 60494635 60494630 -
taaattccagctgaagaaagaa

SEQ ID NO: 220504 - DNA, 22 bp, Artificial Sequence
  Synthetic oligonucleotide; TTT chr2 60494629 60494650 60494634 60494629 -
aaattccagctgaagaaagaac

SEQ ID NO: 220505 - DNA, 22 bp, Artificial Sequence
  Synthetic oligonucleotide; TTA chr2 60494628 60494649 60494633 60494628 -
aattccagctgaagaaagaaca

SEQ ID NO: 220506 - DNA, 22 bp, Artificial Sequence
  Synthetic oligonucleotide; TTC chr2 60494623 60494644 60494628 60494623 -
cagctgaagaaagaacatttgg

SEQ ID NO: 220507 - DNA, 22 bp, Artificial Sequence
  Synthetic oligonucleotide; CTG chr2 60494617 60494638 60494622 60494617 -
aagaaagaacatttggtgataa

SEQ ID NO: 220508 - DNA, 22 bp, Artificial Sequence
  Synthetic oligonucleotide; TTT chr2 60494603 60494624 60494608 60494603 -
ggtgataaatcattaggaatga

SEQ ID NO: 220509 - DNA, 22 bp, Artificial Sequence
  Synthetic oligonucleotide; TTG chr2 60494602 60494623 60494607 60494602 -
gtgataaatcattaggaatgag

SEQ ID NO: 220510 - DNA, 22 bp, Artificial Sequence
  Synthetic oligonucleotide; TTA chr2 60494588 60494609 60494593 60494588 -
ggaatgagctaggagttatttg

SEQ ID NO: 220511 - DNA, 22 bp, Artificial Sequence
  Synthetic oligonucleotide; CTA chr2 60494577 60494598 60494582 60494577 -
ggagttatttgtcatcacagaa

SEQ ID NO: 220512 - DNA, 22 bp, Artificial Sequence
  Synthetic oligonucleotide; TTA chr2 60494570 60494591 60494575 60494570 -
tttgtcatcacagaaccagtct

SEQ ID NO: 220513 - DNA, 22 bp, Artificial Sequence
  Synthetic oligonucleotide; TTT chr2 60494567 60494588 60494572 60494567 -
gtcatcacagaaccagtctgta

SEQ ID NO: 220514 - DNA, 22 bp, Artificial Sequence
  Synthetic oligonucleotide; TTG chr2 60494566 60494587 60494571 60494566 -
tcatcacagaaccagtctgtat

SEQ ID NO: 220515 - DNA, 22 bp, Artificial Sequence
  Synthetic oligonucleotide; CTG chr2 60494547 60494568 60494552 60494547 -
tattgccccaagtctggctttg

SEQ ID NO: 220516 - DNA, 22 bp, Artificial Sequence
  Synthetic oligonucleotide; TTG chr2 60494542 60494563 60494547 60494542 -
ccccaagtctggctttgccaat

SEQ ID NO: 220517 - DNA, 22 bp, Artificial Sequence
  Synthetic oligonucleotide; CTG chr2 60494531 60494552 60494536 60494531 -
gctttgccaattggagattagg

SEQ ID NO: 220518 - DNA, 22 bp, Artificial Sequence
  Synthetic oligonucleotide; CTT chr2 60494527 60494548 60494532 60494527 -
tgccaattggagattagggaga

SEQ ID NO: 220519 - DNA, 22 bp, Artificial Sequence
  Synthetic oligonucleotide; TTT chr2 60494526 60494547 60494531 60494526 -
gccaattggagattagggagat

SEQ ID NO: 220520 - DNA, 22 bp, Artificial Sequence
  Synthetic oligonucleotide; TTG chr2 60494525 60494546 60494530 60494525 -
ccaattggagattagggagatg

SEQ ID NO: 220521 - DNA, 22 bp, Artificial Sequence
  Synthetic oligonucleotide; TTG chr2 60494518 60494539 60494523 60494518 -
gagattagggagatggaatgaa

SEQ ID NO: 220522 - DNA, 22 bp, Artificial Sequence
  Synthetic oligonucleotide; TTA chr2 60494511 60494532 60494516 60494511 -
gggagatggaatgaacactttt

SEQ ID NO: 220523 - DNA, 22 bp, Artificial Sequence
  Synthetic oligonucleotide; CTT chr2 60494491 60494512 60494496 60494491 -
ttcgtcccctttgatatctcat

SEQ ID NO: 220524 - DNA, 22 bp, Artificial Sequence
  Synthetic oligonucleotide; TTT chr2 60494490 60494511 60494495 60494490 -
tcgtcccctttgatatctcatc

SEQ ID NO: 220525 - DNA, 22 bp, Artificial Sequence
  Synthetic oligonucleotide; TTT chr2 60494489 60494510 60494494 60494489 -
cgtcccctttgatatctcatct

SEQ ID NO: 220526 - DNA, 22 bp, Artificial Sequence
  Synthetic oligonucleotide; TTC chr2 60494488 60494509 60494493 60494488 -
gtcccctttgatatctcatctc

SEQ ID NO: 220527 - DNA, 22 bp, Artificial Sequence
  Synthetic oligonucleotide; CTT chr2 60494480 60494501 60494485 60494480 -
tgatatctcatctcactgagct

SEQ ID NO: 220528 - DNA, 22 bp, Artificial Sequence
  Synthetic oligonucleotide; TTT chr2 60494479 60494500 60494484 60494479 -
gatatctcatctcactgagctc

SEQ ID NO: 220529 - DNA, 22 bp, Artificial Sequence
  Synthetic oligonucleotide; TTG chr2 60494478 60494499 60494483 60494478 -
atatctcatctcactgagctct

SEQ ID NO: 220530 - DNA, 22 bp, Artificial Sequence
  Synthetic oligonucleotide; CTC chr2 60494471 60494492 60494476 60494471 -
atctcactgagctctgggccgt

SEQ ID NO: 220531 - DNA, 22 bp, Artificial Sequence
  Synthetic oligonucleotide; CTC chr2 60494466 60494487 60494471 60494466 -
actgagctctgggccgtttcca

SEQ ID NO: 220532 - DNA, 22 bp, Artificial Sequence
  Synthetic oligonucleotide; CTG chr2 60494462 60494483 60494467 60494462 -
agctctgggccgtttccactct

SEQ ID NO: 220533 - DNA, 22 bp, Artificial Sequence
  Synthetic oligonucleotide; CTC chr2 60494457 60494478 60494462 60494457 -
tgggccgtttccactcttctct

SEQ ID NO: 220534 - DNA, 22 bp, Artificial Sequence
  Synthetic oligonucleotide; CTG chr2 60494455 60494476 60494460 60494455 -
ggccgtttccactcttctctcc

SEQ ID NO: 220535 - DNA, 22 bp, Artificial Sequence
  Synthetic oligonucleotide; TTT chr2 60494447 60494468 60494452 60494447 -
ccactcttctctccccatactc

SEQ ID NO: 220536 - DNA, 22 bp, Artificial Sequence
  Synthetic oligonucleotide; TTC chr2 60494446 60494467 60494451 60494446 -
cactcttctctccccatactcc

SEQ ID NO: 220537 - DNA, 22 bp, Artificial Sequence
  Synthetic oligonucleotide; CTC chr2 60494441 60494462 60494446 60494441 -
ttctctccccatactcccatct

SEQ ID NO: 220538 - DNA, 22 bp, Artificial Sequence
  Synthetic oligonucleotide; CTT chr2 60494439 60494460 60494444 60494439 -
ctctccccatactcccatcttg

SEQ ID NO: 220539 - DNA, 22 bp, Artificial Sequence
  Synthetic oligonucleotide; TTC chr2 60494438 60494459 60494443 60494438 -
tctccccatactcccatcttgg

SEQ ID NO: 220540 - DNA, 22 bp, Artificial Sequence
  Synthetic oligonucleotide; CTC chr2 60494436 60494457 60494441 60494436 -
tccccatactcccatcttggca

SEQ ID NO: 220541 - DNA, 22 bp, Artificial Sequence
  Synthetic oligonucleotide; CTC chr2 60494434 60494455 60494439 60494434 -
cccatactcccatcttggcaaa

SEQ ID NO: 220542 - DNA, 22 bp, Artificial Sequence
  Synthetic oligonucleotide; CTC chr2 60494425 60494446 60494430 60494425 -
ccatcttggcaaaaattgcata

SEQ ID NO: 220543 - DNA, 22 bp, Artificial Sequence
  Synthetic oligonucleotide; CTT chr2 60494418 60494439 60494423 60494418 -
ggcaaaaattgcataagattta

SEQ ID NO: 220544 - DNA, 22 bp, Artificial Sequence
  Synthetic oligonucleotide; TTG chr2 60494417 60494438 60494422 60494417 -
gcaaaaattgcataagatttat

SEQ ID NO: 220545 - DNA, 22 bp, Artificial Sequence
  Synthetic oligonucleotide; TTG chr2 60494407 60494428 60494412 60494407 -
cataagatttataagacattag

SEQ ID NO: 220546 - DNA, 22 bp, Artificial Sequence
  Synthetic oligonucleotide; TTT chr2 60494397 60494418 60494402 60494397 -
ataagacattagggtattggag

SEQ ID NO: 220547 - DNA, 22 bp, Artificial Sequence
  Synthetic oligonucleotide; TTA chr2 60494396 60494417 60494401 60494396 -
taagacattagggtattggaga

SEQ ID NO: 220548 - DNA, 22 bp, Artificial Sequence
  Synthetic oligonucleotide; TTA chr2 60494386 60494407 60494391 60494386 -
gggtattggagataatttatta

SEQ ID NO: 220549 - DNA, 22 bp, Artificial Sequence
  Synthetic oligonucleotide; TTG chr2 60494378 60494399 60494383 60494378 -
gagataatttattacaacctcc

SEQ ID NO: 220550 - DNA, 22 bp, Artificial Sequence
  Synthetic oligonucleotide; TTT chr2 60494368 60494389 60494373 60494368 -
attacaacctccttgtttacag

SEQ ID NO: 220551 - DNA, 22 bp, Artificial Sequence
  Synthetic oligonucleotide; TTA chr2 60494367 60494388 60494372 60494367 -
ttacaacctccttgtttacaga

SEQ ID NO: 220552 - DNA, 22 bp, Artificial Sequence
  Synthetic oligonucleotide; TTA chr2 60494364 60494385 60494369 60494364 -
caacctccttgtttacagaggg

SEQ ID NO: 220553 - DNA, 22 bp, Artificial Sequence
  Synthetic oligonucleotide; CTC chr2 60494357 60494378 60494362 60494357 -
cttgtttacagaggggcaaccc

SEQ ID NO: 220554 - DNA, 22 bp, Artificial Sequence
  Synthetic oligonucleotide; CTT chr2 60494354 60494375 60494359 60494354 -
gtttacagaggggcaacccagg

SEQ ID NO: 220555 - DNA, 22 bp, Artificial Sequence
  Synthetic oligonucleotide; TTG chr2 60494353 60494374 60494358 60494353 -
tttacagaggggcaacccaggt

SEQ ID NO: 220556 - DNA, 22 bp, Artificial Sequence
  Synthetic oligonucleotide; TTT chr2 60494350 60494371 60494355 60494350 -
acagaggggcaacccaggtcca

SEQ ID NO: 220557 - DNA, 22 bp, Artificial Sequence
  Synthetic oligonucleotide; TTA chr2 60494349 60494370 60494354 60494349 -
cagaggggcaacccaggtccag

SEQ ID NO: 220558 - DNA, 22 bp, Artificial Sequence
  Synthetic oligonucleotide; CTG chr2 60494297 60494318 60494302 60494297 -
cccagtttagaggccatgcaca

SEQ ID NO: 220559 - DNA, 22 bp, Artificial Sequence
  Synthetic oligonucleotide; TTT chr2 60494289 60494310 60494294 60494289 -
agaggccatgcacagatgagaa

SEQ ID NO: 220560 - DNA, 22 bp, Artificial Sequence
  Synthetic oligonucleotide; TTA chr2 60494288 60494309 60494293 60494288 -
gaggccatgcacagatgagaag

SEQ ID NO: 220561 - DNA, 22 bp, Artificial Sequence
  Synthetic oligonucleotide; CTC chr2 60494258 60494279 60494263 60494258 -
ccagctcccagcccacgtcttc

SEQ ID NO: 220562 - DNA, 22 bp, Artificial Sequence
  Synthetic oligonucleotide; CTC chr2 60494251 60494272 60494256 60494251 -
ccagcccacgtcttcccactct

SEQ ID NO: 220563 - DNA, 22 bp, Artificial Sequence
  Synthetic oligonucleotide; CTT chr2 60494237 60494258 60494242 60494237 -
cccactctcccatgtggcctgt

SEQ ID NO: 220564 - DNA, 22 bp, Artificial Sequence
  Synthetic oligonucleotide; TTC chr2 60494236 60494257 60494241 60494236 -
ccactctcccatgtggcctgtc

SEQ ID NO: 220565 - DNA, 22 bp, Artificial Sequence
  Synthetic oligonucleotide; CTC chr2 60494230 60494251 60494235 60494230 -
tcccatgtggcctgtcagcatc

SEQ ID NO: 220566 - DNA, 22 bp, Artificial Sequence
  Synthetic oligonucleotide; CTC chr2 60494228 60494249 60494233 60494228 -
ccatgtggcctgtcagcatcac

SEQ ID NO: 220567 - DNA, 22 bp, Artificial Sequence
  Synthetic oligonucleotide; CTG chr2 60494216 60494237 60494221 60494216 -
tcagcatcaccctctctcactc

SEQ ID NO: 220568 - DNA, 22 bp, Artificial Sequence
  Synthetic oligonucleotide; CTC chr2 60494202 60494223 60494207 60494202 -
tctcactcttgcttagcctgtg

SEQ ID NO: 220569 - DNA, 22 bp, Artificial Sequence
  Synthetic oligonucleotide; CTC chr2 60494200 60494221 60494205 60494200 -
tcactcttgcttagcctgtgta

SEQ ID NO: 220570 - DNA, 22 bp, Artificial Sequence
  Synthetic oligonucleotide; CTC chr2 60494198 60494219 60494203 60494198 -
actcttgcttagcctgtgtagc

SEQ ID NO: 220571 - DNA, 22 bp, Artificial Sequence
  Synthetic oligonucleotide; CTC chr2 60494194 60494215 60494199 60494194 -
ttgcttagcctgtgtagctcaa

SEQ ID NO: 220572 - DNA, 22 bp, Artificial Sequence
  Synthetic oligonucleotide; CTT chr2 60494192 60494213 60494197 60494192 -
gcttagcctgtgtagctcaagg

SEQ ID NO: 220573 - DNA, 22 bp, Artificial Sequence
  Synthetic oligonucleotide; TTG chr2 60494191 60494212 60494196 60494191 -
cttagcctgtgtagctcaagga

SEQ ID NO: 220574 - DNA, 22 bp, Artificial Sequence
  Synthetic oligonucleotide; CTT chr2 60494188 60494209 60494193 60494188 -
agcctgtgtagctcaaggatgt

SEQ ID NO: 220575 - DNA, 22 bp, Artificial Sequence
  Synthetic oligonucleotide; TTA chr2 60494187 60494208 60494192 60494187 -
gcctgtgtagctcaaggatgta

SEQ ID NO: 220576 - DNA, 22 bp, Artificial Sequence
  Synthetic oligonucleotide; CTG chr2 60494182 60494203 60494187 60494182 -
tgtagctcaaggatgtatttat

SEQ ID NO: 220577 - DNA, 22 bp, Artificial Sequence
  Synthetic oligonucleotide; CTC chr2 60494174 60494195 60494179 60494174 -
aaggatgtatttattgccctag

SEQ ID NO: 220578 - DNA, 22 bp, Artificial Sequence
  Synthetic oligonucleotide; TTT chr2 60494162 60494183 60494167 60494162 -
attgccctaggcgtaagaatgt

SEQ ID NO: 220579 - DNA, 22 bp, Artificial Sequence
  Synthetic oligonucleotide; TTA chr2 60494161 60494182 60494166 60494161 -
ttgccctaggcgtaagaatgtg

SEQ ID NO: 220580 - DNA, 22 bp, Artificial Sequence
  Synthetic oligonucleotide; TTG chr2 60494158 60494179 60494163 60494158 -
ccctaggcgtaagaatgtgctc

SEQ ID NO: 220581 - DNA, 22 bp, Artificial Sequence
  Synthetic oligonucleotide; CTA chr2 60494153 60494174 60494158 60494153 -
ggcgtaagaatgtgctcaggtt

SEQ ID NO: 220582 - DNA, 22 bp, Artificial Sequence
  Synthetic oligonucleotide; CTC chr2 60494136 60494157 60494141 60494136 -
aggtttcttaagtaatgtaggt

SEQ ID NO: 220583 - DNA, 22 bp, Artificial Sequence
  Synthetic oligonucleotide; TTT chr2 60494130 60494151 60494135 60494130 -
cttaagtaatgtaggtgtgcct

SEQ ID NO: 220584 - DNA, 22 bp, Artificial Sequence
  Synthetic oligonucleotide; TTC chr2 60494129 60494150 60494134 60494129 -
ttaagtaatgtaggtgtgcctc

SEQ ID NO: 220585 - DNA, 22 bp, Artificial Sequence
  Synthetic oligonucleotide; CTT chr2 60494127 60494148 60494132 60494127 -
aagtaatgtaggtgtgcctcac

SEQ ID NO: 220586 - DNA, 22 bp, Artificial Sequence
  Synthetic oligonucleotide; TTA chr2 60494126 60494147 60494131 60494126 -
agtaatgtaggtgtgcctcacc

SEQ ID NO: 220587 - DNA, 22 bp, Artificial Sequence
  Synthetic oligonucleotide; CTC chr2 60494107 60494128 60494112 60494107 -
acccatggggcttcactttctc

SEQ ID NO: 220588 - DNA, 22 bp, Artificial Sequence
  Synthetic oligonucleotide; CTT chr2 60494094 60494115 60494099 60494094 -
cactttctctctgtttattgcc

SEQ ID NO: 220589 - DNA, 22 bp, Artificial Sequence
  Synthetic oligonucleotide; TTC chr2 60494093 60494114 60494098 60494093 -
actttctctctgtttattgcca

SEQ ID NO: 220590 - DNA, 22 bp, Artificial Sequence
  Synthetic oligonucleotide; CTT chr2 60494089 60494110 60494094 60494089 -
tctctctgtttattgccagtag

SEQ ID NO: 220591 - DNA, 22 bp, Artificial Sequence
  Synthetic oligonucleotide; TTT chr2 60494088 60494109 60494093 60494088 -
ctctctgtttattgccagtagt

SEQ ID NO: 220592 - DNA, 22 bp, Artificial Sequence
  Synthetic oligonucleotide; TTC chr2 60494087 60494108 60494092 60494087 -
tctctgtttattgccagtagtg

SEQ ID NO: 220593 - DNA, 22 bp, Artificial Sequence
  Synthetic oligonucleotide; CTC chr2 60494085 60494106 60494090 60494085 -
tctgtttattgccagtagtggt

SEQ ID NO: 220594 - DNA, 22 bp, Artificial Sequence
  Synthetic oligonucleotide; CTC chr2 60494083 60494104 60494088 60494083 -
tgtttattgccagtagtggtct

SEQ ID NO: 220595 - DNA, 22 bp, Artificial Sequence
  Synthetic oligonucleotide; CTG chr2 60494081 60494102 60494086 60494081 -
tttattgccagtagtggtctct

SEQ ID NO: 220596 - DNA, 22 bp, Artificial Sequence
  Synthetic oligonucleotide; TTT chr2 60494078 60494099 60494083 60494078 -
attgccagtagtggtctctgtt

SEQ ID NO: 220597 - DNA, 22 bp, Artificial Sequence
  Synthetic oligonucleotide; TTA chr2 60494077 60494098 60494082 60494077 -
ttgccagtagtggtctctgttc

SEQ ID NO: 220598 - DNA, 22 bp, Artificial Sequence
  Synthetic oligonucleotide; TTG chr2 60494074 60494095 60494079 60494074 -
ccagtagtggtctctgttctgt

SEQ ID NO: 220599 - DNA, 22 bp, Artificial Sequence
  Synthetic oligonucleotide; CTC chr2 60494060 60494081 60494065 60494060 -
tgttctgttttcttcagtttct

SEQ ID NO: 220600 - DNA, 22 bp, Artificial Sequence
  Synthetic oligonucleotide; CTG chr2 60494058 60494079 60494063 60494058 -
ttctgttttcttcagtttctcc

SEQ ID NO: 220601 - DNA, 22 bp, Artificial Sequence
  Synthetic oligonucleotide; TTC chr2 60494055 60494076 60494060 60494055 -
tgttttcttcagtttctccccc

SEQ ID NO: 220602 - DNA, 22 bp, Artificial Sequence
  Synthetic oligonucleotide; CTG chr2 60494053 60494074 60494058 60494053 -
ttttcttcagtttctccccctt

SEQ ID NO: 220603 - DNA, 22 bp, Artificial Sequence
  Synthetic oligonucleotide; TTT chr2 60494050 60494071 60494055 60494050 -
tcttcagtttctcccccttgca

SEQ ID NO: 220604 - DNA, 22 bp, Artificial Sequence
  Synthetic oligonucleotide; TTT chr2 60494049 60494070 60494054 60494049 -
cttcagtttctcccccttgcat

SEQ ID NO: 220605 - DNA, 22 bp, Artificial Sequence
  Synthetic oligonucleotide; TTC chr2 60494048 60494069 60494053 60494048 -
ttcagtttctcccccttgcatt

SEQ ID NO: 220606 - DNA, 22 bp, Artificial Sequence
  Synthetic oligonucleotide; CTT chr2 60494046 60494067 60494051 60494046 -
cagtttctcccccttgcattgt

SEQ ID NO: 220607 - DNA, 22 bp, Artificial Sequence
  Synthetic oligonucleotide; TTC chr2 60494045 60494066 60494050 60494045 -
agtttctcccccttgcattgtt

SEQ ID NO: 220608 - DNA, 22 bp, Artificial Sequence
  Synthetic oligonucleotide; TTT chr2 60494040 60494061 60494045 60494040 -
ctcccccttgcattgttgtcta

SEQ ID NO: 220609 - DNA, 22 bp, Artificial Sequence
  Synthetic oligonucleotide; TTC chr2 60494039 60494060 60494044 60494039 -
tcccccttgcattgttgtctaa

SEQ ID NO: 220610 - DNA, 22 bp, Artificial Sequence
  Synthetic oligonucleotide; CTC chr2 60494037 60494058 60494042 60494037 -
ccccttgcattgttgtctaaga

SEQ ID NO: 220611 - DNA, 22 bp, Artificial Sequence
  Synthetic oligonucleotide; CTT chr2 60494031 60494052 60494036 60494031 -
gcattgttgtctaagatggctg

SEQ ID NO: 220612 - DNA, 22 bp, Artificial Sequence
  Synthetic oligonucleotide; TTG chr2 60494030 60494051 60494035 60494030 -
cattgttgtctaagatggctgt

SEQ ID NO: 220613 - DNA, 22 bp, Artificial Sequence
  Synthetic oligonucleotide; TTG chr2 60494025 60494046 60494030 60494025 -
ttgtctaagatggctgtcctgt

SEQ ID NO: 220614 - DNA, 22 bp, Artificial Sequence
  Synthetic oligonucleotide; TTG chr2 60494022 60494043 60494027 60494022 -
tctaagatggctgtcctgtctt

SEQ ID NO: 220615 - DNA, 22 bp, Artificial Sequence
  Synthetic oligonucleotide; CTA chr2 60494018 60494039 60494023 60494018 -
agatggctgtcctgtcttttgt

SEQ ID NO: 220616 - DNA, 22 bp, Artificial Sequence
  Synthetic oligonucleotide; CTG chr2 60494009 60494030 60494014 60494009 -
tcctgtcttttgtccacttccc

SEQ ID NO: 220617 - DNA, 22 bp, Artificial Sequence
  Synthetic oligonucleotide; CTG chr2 60494004 60494025 60494009 60494004 -
tcttttgtccacttcccctcca

SEQ ID NO: 220618 - DNA, 22 bp, Artificial Sequence
  Synthetic oligonucleotide; CTT chr2 60494000 60494021 60494005 60494000 -
ttgtccacttcccctccactcc

SEQ ID NO: 220619 - DNA, 22 bp, Artificial Sequence
  Synthetic oligonucleotide; TTT chr2 60493999 60494020 60494004 60493999 -
tgtccacttcccctccactccc

SEQ ID NO: 220620 - DNA, 22 bp, Artificial Sequence
  Synthetic oligonucleotide; TTT chr2 60493998 60494019 60494003 60493998 -
gtccacttcccctccactcccc

SEQ ID NO: 220621 - DNA, 22 bp, Artificial Sequence
  Synthetic oligonucleotide; TTG chr2 60493997 60494018 60494002 60493997 -
tccacttcccctccactccccg

SEQ ID NO: 220622 - DNA, 22 bp, Artificial Sequence
  Synthetic oligonucleotide; CTT chr2 60493990 60494011 60493995 60493990 -
cccctccactccccgtaccttc

SEQ ID NO: 220623 - DNA, 22 bp, Artificial Sequence
  Synthetic oligonucleotide; TTC chr2 60493989 60494010 60493994 60493989 -
ccctccactccccgtaccttcc

SEQ ID NO: 220624 - DNA, 22 bp, Artificial Sequence
  Synthetic oligonucleotide; CTC chr2 60493984 60494005 60493989 60493984 -
cactccccgtaccttcctttaa

SEQ ID NO: 220625 - DNA, 22 bp, Artificial Sequence
  Synthetic oligonucleotide; CTC chr2 60493979 60494000 60493984 60493979 -
cccgtaccttcctttaatcagc

SEQ ID NO: 220626 - DNA, 22 bp, Artificial Sequence
  Synthetic oligonucleotide; CTT chr2 60493969 60493990 60493974 60493969 -
cctttaatcagcttccgccact

SEQ ID NO: 220627 - DNA, 22 bp, Artificial Sequence
  Synthetic oligonucleotide; TTC chr2 60493968 60493989 60493973 60493968 -
ctttaatcagcttccgccactg

SEQ ID NO: 220628 - DNA, 22 bp, Artificial Sequence
  Synthetic oligonucleotide; CTT chr2 60493965 60493986 60493970 60493965 -
taatcagcttccgccactgcct

SEQ ID NO: 220629 - DNA, 22 bp, Artificial Sequence
  Synthetic oligonucleotide; TTT chr2 60493964 60493985 60493969 60493964 -
aatcagcttccgccactgcctg

SEQ ID NO: 220630 - DNA, 22 bp, Artificial Sequence
  Synthetic oligonucleotide; TTA chr2 60493963 60493984 60493968 60493963 -
atcagcttccgccactgcctga

SEQ ID NO: 220631 - DNA, 22 bp, Artificial Sequence
  Synthetic oligonucleotide; CTT chr2 60493955 60493976 60493960 60493955 -
ccgccactgcctgaggccactc

SEQ ID NO: 220632 - DNA, 22 bp, Artificial Sequence
  Synthetic oligonucleotide; TTC chr2 60493954 60493975 60493959 60493954 -
cgccactgcctgaggccactca

SEQ ID NO: 220633 - DNA, 22 bp, Artificial Sequence
  Synthetic oligonucleotide; CTG chr2 60493946 60493967 60493951 60493946 -
cctgaggccactcagctctggt

SEQ ID NO: 220634 - DNA, 22 bp, Artificial Sequence
  Synthetic oligonucleotide; CTG chr2 60493942 60493963 60493947 60493942 -
aggccactcagctctggtccca

SEQ ID NO: 220635 - DNA, 22 bp, Artificial Sequence
  Synthetic oligonucleotide; CTC chr2 60493933 60493954 60493938 60493933 -
agctctggtcccactggaggcc

SEQ ID NO: 220636 - DNA, 22 bp, Artificial Sequence
  Synthetic oligonucleotide; CTC chr2 60493928 60493949 60493933 60493928 -
tggtcccactggaggccctgtc

SEQ ID NO: 220637 - DNA, 22 bp, Artificial Sequence
  Synthetic oligonucleotide; CTG chr2 60493926 60493947 60493931 60493926 -
gtcccactggaggccctgtctc

SEQ ID NO: 220638 - DNA, 22 bp, Artificial Sequence
  Synthetic oligonucleotide; CTG chr2 60493917 60493938 60493922 60493917 -
gaggccctgtctcccccagggg

SEQ ID NO: 220639 - DNA, 22 bp, Artificial Sequence
  Synthetic oligonucleotide; CTG chr2 60493908 60493929 60493913 60493908 -
tctcccccaggggtccttctgc

SEQ ID NO: 220640 - DNA, 22 bp, Artificial Sequence
  Synthetic oligonucleotide; CTC chr2 60493904 60493925 60493909 60493904 -
ccccaggggtccttctgcttcc

SEQ ID NO: 220641 - DNA, 22 bp, Artificial Sequence
  Synthetic oligonucleotide; CTT chr2 60493890 60493911 60493895 60493890 -
ctgcttcctgttcacctctgat

SEQ ID NO: 220642 - DNA, 22 bp, Artificial Sequence
  Synthetic oligonucleotide; TTC chr2 60493889 60493910 60493894 60493889 -
tgcttcctgttcacctctgatc

SEQ ID NO: 220643 - DNA, 22 bp, Artificial Sequence
  Synthetic oligonucleotide; CTG chr2 60493887 60493908 60493892 60493887 -
cttcctgttcacctctgatccc

SEQ ID NO: 220644 - DNA, 22 bp, Artificial Sequence
  Synthetic oligonucleotide; CTT chr2 60493884 60493905 60493889 60493884 -
cctgttcacctctgatccccca

SEQ ID NO: 220645 - DNA, 22 bp, Artificial Sequence
  Synthetic oligonucleotide; TTC chr2 60493883 60493904 60493888 60493883 -
ctgttcacctctgatcccccag

SEQ ID NO: 220646 - DNA, 22 bp, Artificial Sequence
  Synthetic oligonucleotide; CTG chr2 60493880 60493901 60493885 60493880 -
ttcacctctgatcccccagccc

SEQ ID NO: 220647 - DNA, 22 bp, Artificial Sequence
  Synthetic oligonucleotide; TTC chr2 60493877 60493898 60493882 60493877 -
acctctgatcccccagccctgc

SEQ ID NO: 220648 - DNA, 22 bp, Artificial Sequence
  Synthetic oligonucleotide; CTC chr2 60493872 60493893 60493877 60493872 -
tgatcccccagccctgccatgg

SEQ ID NO: 220649 - DNA, 22 bp, Artificial Sequence
  Synthetic oligonucleotide; CTG chr2 60493870 60493891 60493875 60493870 -
atcccccagccctgccatggcc

SEQ ID NO: 220650 - DNA, 22 bp, Artificial Sequence
  Synthetic oligonucleotide; CTG chr2 60493856 60493877 60493861 60493856 -
ccatggccaagctgatgaggat

SEQ ID NO: 220651 - DNA, 22 bp, Artificial Sequence
  Synthetic oligonucleotide; CTG chr2 60493842 60493863 60493847 60493842 -
atgaggatgggggagggggagg

SEQ ID NO: 220652 - DNA, 22 bp, Artificial Sequence
  Synthetic oligonucleotide; CTT chr2 60493807 60493828 60493812 60493807 -
aatttcctgcactgaagctttg

SEQ ID NO: 220653 - DNA, 22 bp, Artificial Sequence
  Synthetic oligonucleotide; TTA chr2 60493806 60493827 60493811 60493806 -
atttcctgcactgaagctttgc

SEQ ID NO: 220654 - DNA, 22 bp, Artificial Sequence
  Synthetic oligonucleotide; TTT chr2 60493802 60493823 60493807 60493802 -
cctgcactgaagctttgctgtc

SEQ ID NO: 220655 - DNA, 22 bp, Artificial Sequence
  Synthetic oligonucleotide; TTC chr2 60493801 60493822 60493806 60493801 -
ctgcactgaagctttgctgtcc

SEQ ID NO: 220656 - DNA, 22 bp, Artificial Sequence
  Synthetic oligonucleotide; CTG chr2 60493798 60493819 60493803 60493798 -
cactgaagctttgctgtccaca

SEQ ID NO: 220657 - DNA, 22 bp, Artificial Sequence
  Synthetic oligonucleotide; CTG chr2 60493793 60493814 60493798 60493793 -
aagctttgctgtccacagcact

SEQ ID NO: 220658 - DNA, 22 bp, Artificial Sequence
  Synthetic oligonucleotide; CTT chr2 60493787 60493808 60493792 60493787 -
tgctgtccacagcactgggcag

SEQ ID NO: 220659 - DNA, 22 bp, Artificial Sequence
  Synthetic oligonucleotide; TTT chr2 60493786 60493807 60493791 60493786 -
gctgtccacagcactgggcagc

SEQ ID NO: 220660 - DNA, 22 bp, Artificial Sequence
  Synthetic oligonucleotide; TTG chr2 60493785 60493806 60493790 60493785 -
ctgtccacagcactgggcagca

SEQ ID NO: 220661 - DNA, 22 bp, Artificial Sequence
  Synthetic oligonucleotide; CTG chr2 60493782 60493803 60493787 60493782 -
tccacagcactgggcagcagct

SEQ ID NO: 220662 - DNA, 22 bp, Artificial Sequence
  Synthetic oligonucleotide; CTG chr2 60493770 60493791 60493775 60493770 -
ggcagcagctgcctccctggag

SEQ ID NO: 220663 - DNA, 22 bp, Artificial Sequence
  Synthetic oligonucleotide; CTG chr2 60493759 60493780 60493764 60493759 -
cctccctggagtgttgtgtgag

SEQ ID NO: 220664 - DNA, 22 bp, Artificial Sequence
  Synthetic oligonucleotide; CTC chr2 60493755 60493776 60493760 60493755 -
cctggagtgttgtgtgagacct

SEQ ID NO: 220665 - DNA, 22 bp, Artificial Sequence
  Synthetic oligonucleotide; CTG chr2 60493751 60493772 60493756 60493751 -
gagtgttgtgtgagaccttgat

SEQ ID NO: 220666 - DNA, 22 bp, Artificial Sequence
  Synthetic oligonucleotide; TTG chr2 60493743 60493764 60493748 60493743 -
tgtgagaccttgatgctgtctt

SEQ ID NO: 220667 - DNA, 22 bp, Artificial Sequence
  Synthetic oligonucleotide; CTT chr2 60493732 60493753 60493737 60493732 -
gatgctgtctttcttcccaagg

SEQ ID NO: 220668 - DNA, 22 bp, Artificial Sequence
  Synthetic oligonucleotide; TTG chr2 60493731 60493752 60493736 60493731 -
atgctgtctttcttcccaaggc

SEQ ID NO: 220669 - DNA, 22 bp, Artificial Sequence
  Synthetic oligonucleotide; CTG chr2 60493725 60493746 60493730 60493725 -
tctttcttcccaaggcctttgg

SEQ ID NO: 220670 - DNA, 22 bp, Artificial Sequence
  Synthetic oligonucleotide; CTT chr2 60493721 60493742 60493726 60493721 -
tcttcccaaggcctttggcaag

SEQ ID NO: 220671 - DNA, 22 bp, Artificial Sequence
  Synthetic oligonucleotide; TTT chr2 60493720 60493741 60493725 60493720 -
cttcccaaggcctttggcaagg

SEQ ID NO: 220672 - DNA, 22 bp, Artificial Sequence
  Synthetic oligonucleotide; TTC chr2 60493719 60493740 60493724 60493719 -
ttcccaaggcctttggcaaggt

SEQ ID NO: 220673 - DNA, 22 bp, Artificial Sequence
  Synthetic oligonucleotide; CTT chr2 60493717 60493738 60493722 60493717 -
cccaaggcctttggcaaggtag

SEQ ID NO: 220674 - DNA, 22 bp, Artificial Sequence
  Synthetic oligonucleotide; TTC chr2 60493716 60493737 60493721 60493716 -
ccaaggcctttggcaaggtaga

SEQ ID NO: 220675 - DNA, 22 bp, Artificial Sequence
  Synthetic oligonucleotide; CTT chr2 60493706 60493727 60493711 60493706 -
tggcaaggtagaagtcatctcc

SEQ ID NO: 220676 - DNA, 22 bp, Artificial Sequence
  Synthetic oligonucleotide; TTT chr2 60493705 60493726 60493710 60493705 -
ggcaaggtagaagtcatctcct

SEQ ID NO: 220677 - DNA, 22 bp, Artificial Sequence
  Synthetic oligonucleotide; TTG chr2 60493704 60493725 60493709 60493704 -
gcaaggtagaagtcatctcctt

SEQ ID NO: 220678 - DNA, 22 bp, Artificial Sequence
  Synthetic oligonucleotide; CTC chr2 60493685 60493706 60493690 60493685 -
cttgactctccatgctgctaat

SEQ ID NO: 220679 - DNA, 22 bp, Artificial Sequence
  Synthetic oligonucleotide; CTT chr2 60493682 60493703 60493687 60493682 -
gactctccatgctgctaatggg

SEQ ID NO: 220680 - DNA, 22 bp, Artificial Sequence
  Synthetic oligonucleotide; TTG chr2 60493681 60493702 60493686 60493681 -
actctccatgctgctaatgggg

SEQ ID NO: 220681 - DNA, 22 bp, Artificial Sequence
  Synthetic oligonucleotide; CTC chr2 60493677 60493698 60493682 60493677 -
tccatgctgctaatgggggagg

SEQ ID NO: 220682 - DNA, 22 bp, Artificial Sequence
  Synthetic oligonucleotide; CTC chr2 60493675 60493696 60493680 60493675 -
catgctgctaatgggggaggtc

SEQ ID NO: 220683 - DNA, 22 bp, Artificial Sequence
  Synthetic oligonucleotide; CTG chr2 60493668 60493689 60493673 60493668 -
ctaatgggggaggtcaactaag

SEQ ID NO: 220684 - DNA, 22 bp, Artificial Sequence
  Synthetic oligonucleotide; CTA chr2 60493665 60493686 60493670 60493665 -
atgggggaggtcaactaagtcc

SEQ ID NO: 220685 - DNA, 22 bp, Artificial Sequence
  Synthetic oligonucleotide; CTA chr2 60493648 60493669 60493653 60493648 -
agtccatttctgagctagtggg

SEQ ID NO: 220686 - DNA, 22 bp, Artificial Sequence
  Synthetic oligonucleotide; TTT chr2 60493639 60493660 60493644 60493639 -
ctgagctagtgggggctcttag

SEQ ID NO: 220687 - DNA, 22 bp, Artificial Sequence
  Synthetic oligonucleotide; TTC chr2 60493638 60493659 60493643 60493638 -
tgagctagtgggggctcttagg

SEQ ID NO: 220688 - DNA, 22 bp, Artificial Sequence
  Synthetic oligonucleotide; CTG chr2 60493636 60493657 60493641 60493636 -
agctagtgggggctcttaggac

SEQ ID NO: 220689 - DNA, 22 bp, Artificial Sequence
  Synthetic oligonucleotide; CTA chr2 60493631 60493652 60493636 60493631 -
gtgggggctcttaggactccga

SEQ ID NO: 220690 - DNA, 22 bp, Artificial Sequence
  Synthetic oligonucleotide; CTC chr2 60493621 60493642 60493626 60493621 -
ttaggactccgaacaccacact

SEQ ID NO: 220691 - DNA, 22 bp, Artificial Sequence
  Synthetic oligonucleotide; CTT chr2 60493619 60493640 60493624 60493619 -
aggactccgaacaccacactta

SEQ ID NO: 220692 - DNA, 22 bp, Artificial Sequence
  Synthetic oligonucleotide; TTA chr2 60493618 60493639 60493623 60493618 -
ggactccgaacaccacacttaa

SEQ ID NO: 220693 - DNA, 22 bp, Artificial Sequence
  Synthetic oligonucleotide; CTC chr2 60493612 60493633 60493617 60493612 -
cgaacaccacacttaagttatc

SEQ ID NO: 220694 - DNA, 22 bp, Artificial Sequence
  Synthetic oligonucleotide; CTT chr2 60493598 60493619 60493603 60493598 -
aagttatctctgacccagagtc

SEQ ID NO: 220695 - DNA, 22 bp, Artificial Sequence
  Synthetic oligonucleotide; TTA chr2 60493597 60493618 60493602 60493597 -
agttatctctgacccagagtcc

SEQ ID NO: 220696 - DNA, 22 bp, Artificial Sequence
  Synthetic oligonucleotide; TTA chr2 60493592 60493613 60493597 60493592 -
tctctgacccagagtccaattt

SEQ ID NO: 220697 - DNA, 22 bp, Artificial Sequence
  Synthetic oligonucleotide; CTC chr2 60493588 60493609 60493593 60493588 -
tgacccagagtccaatttattt

SEQ ID NO: 220698 - DNA, 22 bp, Artificial Sequence
  Synthetic oligonucleotide; CTG chr2 60493586 60493607 60493591 60493586 -
acccagagtccaatttatttgg

SEQ ID NO: 220699 - DNA, 22 bp, Artificial Sequence
  Synthetic oligonucleotide; TTT chr2 60493570 60493591 60493575 60493570 -
atttggcctgattcaaatgaat

SEQ ID NO: 220700 - DNA, 22 bp, Artificial Sequence
  Synthetic oligonucleotide; TTA chr2 60493569 60493590 60493574 60493569 -
tttggcctgattcaaatgaatg

SEQ ID NO: 220701 - DNA, 22 bp, Artificial Sequence
  Synthetic oligonucleotide; TTT chr2 60493566 60493587 60493571 60493566 -
ggcctgattcaaatgaatgccc

SEQ ID NO: 220702 - DNA, 22 bp, Artificial Sequence
  Synthetic oligonucleotide; TTG chr2 60493565 60493586 60493570 60493565 -
gcctgattcaaatgaatgccca

SEQ ID NO: 220703 - DNA, 22 bp, Artificial Sequence
  Synthetic oligonucleotide; CTG chr2 60493560 60493581 60493565 60493560 -
attcaaatgaatgcccatttta

SEQ ID NO: 220704 - DNA, 22 bp, Artificial Sequence
  Synthetic oligonucleotide; TTC chr2 60493556 60493577 60493561 60493556 -
aaatgaatgcccattttaagaa

SEQ ID NO: 220705 - DNA, 22 bp, Artificial Sequence
  Synthetic oligonucleotide; TTT chr2 60493540 60493561 60493545 60493540 -
taagaatgttttggggtctctt

SEQ ID NO: 220706 - DNA, 22 bp, Artificial Sequence
  Synthetic oligonucleotide; TTT chr2 60493539 60493560 60493544 60493539 -
aagaatgttttggggtctcttc

SEQ ID NO: 220707 - DNA, 22 bp, Artificial Sequence
  Synthetic oligonucleotide; TTA chr2 60493538 60493559 60493543 60493538 -
agaatgttttggggtctcttcc

SEQ ID NO: 220708 - DNA, 22 bp, Artificial Sequence
  Synthetic oligonucleotide; TTT chr2 60493529 60493550 60493534 60493529 -
tggggtctcttcccatcatttc

SEQ ID NO: 220709 - DNA, 22 bp, Artificial Sequence
  Synthetic oligonucleotide; TTT chr2 60493528 60493549 60493533 60493528 -
ggggtctcttcccatcatttcc

SEQ ID NO: 220710 - DNA, 22 bp, Artificial Sequence
  Synthetic oligonucleotide; TTG chr2 60493527 60493548 60493532 60493527 -
gggtctcttcccatcatttcct

SEQ ID NO: 220711 - DNA, 22 bp, Artificial Sequence
  Synthetic oligonucleotide; CTC chr2 60493520 60493541 60493525 60493520 -
ttcccatcatttccttagtgta

SEQ ID NO: 220712 - DNA, 22 bp, Artificial Sequence
  Synthetic oligonucleotide; CTT chr2 60493518 60493539 60493523 60493518 -
cccatcatttccttagtgtagt

SEQ ID NO: 220713 - DNA, 22 bp, Artificial Sequence
  Synthetic oligonucleotide; TTC chr2 60493517 60493538 60493522 60493517 -
ccatcatttccttagtgtagtg

SEQ ID NO: 220714 - DNA, 22 bp, Artificial Sequence
  Synthetic oligonucleotide; TTT chr2 60493508 60493529 60493513 60493508 -
ccttagtgtagtggagaggttt

SEQ ID NO: 220715 - DNA, 22 bp, Artificial Sequence
  Synthetic oligonucleotide; TTC chr2 60493507 60493528 60493512 60493507 -
cttagtgtagtggagaggtttc

SEQ ID NO: 220716 - DNA, 22 bp, Artificial Sequence
  Synthetic oligonucleotide; CTT chr2 60493504 60493525 60493509 60493504 -
agtgtagtggagaggtttctat

SEQ ID NO: 220717 - DNA, 22 bp, Artificial Sequence
  Synthetic oligonucleotide; TTA chr2 60493503 60493524 60493508 60493503 -
gtgtagtggagaggtttctatt

SEQ ID NO: 220718 - DNA, 22 bp, Artificial Sequence
  Synthetic oligonucleotide; TTT chr2 60493486 60493507 60493491 60493486 -
ctattcggaataggatgacatt

SEQ ID NO: 220719 - DNA, 22 bp, Artificial Sequence
  Synthetic oligonucleotide; TTC chr2 60493485 60493506 60493490 60493485 -
tattcggaataggatgacattt

SEQ ID NO: 220720 - DNA, 22 bp, Artificial Sequence
  Synthetic oligonucleotide; CTA chr2 60493483 60493504 60493488 60493483 -
ttcggaataggatgacatttgg

SEQ ID NO: 220721 - DNA, 22 bp, Artificial Sequence
  Synthetic oligonucleotide; TTC chr2 60493480 60493501 60493485 60493480 -
ggaataggatgacatttggtag

SEQ ID NO: 220722 - DNA, 22 bp, Artificial Sequence
  Synthetic oligonucleotide; TTT chr2 60493463 60493484 60493468 60493463 -
ggtagctgagccaaacagatag

SEQ ID NO: 220723 - DNA, 22 bp, Artificial Sequence
  Synthetic oligonucleotide; TTG chr2 60493462 60493483 60493467 60493462 -
gtagctgagccaaacagatagc

SEQ ID NO: 220724 - DNA, 22 bp, Artificial Sequence
  Synthetic oligonucleotide; CTG chr2 60493455 60493476 60493460 60493455 -
agccaaacagatagctgggata

SEQ ID NO: 220725 - DNA, 22 bp, Artificial Sequence
  Synthetic oligonucleotide; CTG chr2 60493438 60493459 60493443 60493438 -
ggatatagggtttggagttgaa

SEQ ID NO: 220726 - DNA, 22 bp, Artificial Sequence
  Synthetic oligonucleotide; TTT chr2 60493425 60493446 60493430 60493425 -
ggagttgaactctccagggaat

SEQ ID NO: 220727 - DNA, 22 bp, Artificial Sequence
  Synthetic oligonucleotide; TTG chr2 60493424 60493445 60493429 60493424 -
gagttgaactctccagggaatg

SEQ ID NO: 220728 - DNA, 22 bp, Artificial Sequence
  Synthetic oligonucleotide; TTG chr2 60493418 60493439 60493423 60493418 -
aactctccagggaatggggtgg

SEQ ID NO: 220729 - DNA, 22 bp, Artificial Sequence
  Synthetic oligonucleotide; CTC chr2 60493413 60493434 60493418 60493413 -
tccagggaatggggtgggaggg

SEQ ID NO: 220730 - DNA, 22 bp, Artificial Sequence
  Synthetic oligonucleotide; CTC chr2 60493411 60493432 60493416 60493411 -
cagggaatggggtgggaggggg

SEQ ID NO: 220731 - DNA, 22 bp, Artificial Sequence
  Synthetic oligonucleotide; CTG chr2 60493381 60493402 60493386 60493381 -
gaggatgacaaaatgagggctc

SEQ ID NO: 220732 - DNA, 22 bp, Artificial Sequence
  Synthetic oligonucleotide; CTC chr2 60493359 60493380 60493364 60493359 -
cctggactcaaactcaaaacct

SEQ ID NO: 220733 - DNA, 22 bp, Artificial Sequence
  Synthetic oligonucleotide; CTG chr2 60493355 60493376 60493360 60493355 -
gactcaaactcaaaaccttttc

SEQ ID NO: 220734 - DNA, 22 bp, Artificial Sequence
  Synthetic oligonucleotide; CTC chr2 60493350 60493371 60493355 60493350 -
aaactcaaaaccttttctgtgt

SEQ ID NO: 220735 - DNA, 22 bp, Artificial Sequence
  Synthetic oligonucleotide; CTC chr2 60493344 60493365 60493349 60493344 -
aaaaccttttctgtgttctcga

SEQ ID NO: 220736 - DNA, 22 bp, Artificial Sequence
  Synthetic oligonucleotide; CTT chr2 60493336 60493357 60493341 60493336 -
ttctgtgttctcgaaatgcctt

SEQ ID NO: 220737 - DNA, 22 bp, Artificial Sequence
  Synthetic oligonucleotide; TTT chr2 60493335 60493356 60493340 60493335 -
tctgtgttctcgaaatgcctta

SEQ ID NO: 220738 - DNA, 22 bp, Artificial Sequence
  Synthetic oligonucleotide; TTT chr2 60493334 60493355 60493339 60493334 -
ctgtgttctcgaaatgccttag

SEQ ID NO: 220739 - DNA, 22 bp, Artificial Sequence
  Synthetic oligonucleotide; TTC chr2 60493333 60493354 60493338 60493333 -
tgtgttctcgaaatgccttaga

SEQ ID NO: 220740 - DNA, 22 bp, Artificial Sequence
  Synthetic oligonucleotide; CTG chr2 60493331 60493352 60493336 60493331 -
tgttctcgaaatgccttagatg

SEQ ID NO: 220741 - DNA, 22 bp, Artificial Sequence
  Synthetic oligonucleotide; TTC chr2 60493326 60493347 60493331 60493326 -
tcgaaatgccttagatgtttac

SEQ ID NO: 220742 - DNA, 22 bp, Artificial Sequence
  Synthetic oligonucleotide; CTC chr2 60493324 60493345 60493329 60493324 -
gaaatgccttagatgtttacct

SEQ ID NO: 220743 - DNA, 22 bp, Artificial Sequence
  Synthetic oligonucleotide; CTT chr2 60493314 60493335 60493319 60493314 -
agatgtttacctaagagaaatg

SEQ ID NO: 220744 - DNA, 22 bp, Artificial Sequence
  Synthetic oligonucleotide; TTA chr2 60493313 60493334 60493318 60493313 -
gatgtttacctaagagaaatgt

SEQ ID NO: 220745 - DNA, 22 bp, Artificial Sequence
  Synthetic oligonucleotide; TTT chr2 60493306 60493327 60493311 60493306 -
acctaagagaaatgtagacata

SEQ ID NO: 220746 - DNA, 22 bp, Artificial Sequence
  Synthetic oligonucleotide; TTA chr2 60493305 60493326 60493310 60493305 -
cctaagagaaatgtagacatac

SEQ ID NO: 220747 - DNA, 22 bp, Artificial Sequence
  Synthetic oligonucleotide; CTA chr2 60493301 60493322 60493306 60493301 -
agagaaatgtagacatacattc

SEQ ID NO: 220748 - DNA, 22 bp, Artificial Sequence
  Synthetic oligonucleotide; TTC chr2 60493279 60493300 60493284 60493279 -
ctataaacacatctacacagtg

SEQ ID NO: 220749 - DNA, 22 bp, Artificial Sequence
  Synthetic oligonucleotide; CTA chr2 60493276 60493297 60493281 60493276 -
taaacacatctacacagtgtcc

SEQ ID NO: 220750 - DNA, 22 bp, Artificial Sequence
  Synthetic oligonucleotide; CTA chr2 60493264 60493285 60493269 60493264 -
cacagtgtccattgtagcactg

SEQ ID NO: 220751 - DNA, 22 bp, Artificial Sequence
  Synthetic oligonucleotide; TTG chr2 60493250 60493271 60493255 60493250 -
tagcactgttcatagtggtcaa

SEQ ID NO: 220752 - DNA, 22 bp, Artificial Sequence
  Synthetic oligonucleotide; CTG chr2 60493242 60493263 60493247 60493242 -
ttcatagtggtcaaaaagtggt

SEQ ID NO: 220753 - DNA, 22 bp, Artificial Sequence
  Synthetic oligonucleotide; TTC chr2 60493239 60493260 60493244 60493239 -
atagtggtcaaaaagtggtcac

SEQ ID NO: 220754 - DNA, 22 bp, Artificial Sequence
  Synthetic oligonucleotide; TTG chr2 60493192 60493213 60493197 60493192 -
aatggataaacgccctatggtg

SEQ ID NO: 220755 - DNA, 22 bp, Artificial Sequence
  Synthetic oligonucleotide; CTA chr2 60493175 60493196 60493180 60493175 -
tggtggaatacaactcaacagt

SEQ ID NO: 220756 - DNA, 22 bp, Artificial Sequence
  Synthetic oligonucleotide; CTC chr2 60493159 60493180 60493164 60493159 -
aacagtagaagaatgaaagagt

SEQ ID NO: 220757 - DNA, 22 bp, Artificial Sequence
  Synthetic oligonucleotide; CTC chr2 60493128 60493149 60493133 60493128 -
cacaccatggatgaatcccaga

SEQ ID NO: 220758 - DNA, 22 bp, Artificial Sequence
  Synthetic oligonucleotide; TTC chr2 60493099 60493120 60493104 60493099 -
tgctctgtggaagaaattaaac

SEQ ID NO: 220759 - DNA, 22 bp, Artificial Sequence
  Synthetic oligonucleotide; CTG chr2 60493097 60493118 60493102 60493097 -
ctctgtggaagaaattaaacac

SEQ ID NO: 220760 - DNA, 22 bp, Artificial Sequence
  Synthetic oligonucleotide; CTC chr2 60493094 60493115 60493099 60493094 -
tgtggaagaaattaaacacaaa

SEQ ID NO: 220761 - DNA, 22 bp, Artificial Sequence
  Synthetic oligonucleotide; CTG chr2 60493092 60493113 60493097 60493092 -
tggaagaaattaaacacaaaag

SEQ ID NO: 220762 - DNA, 22 bp, Artificial Sequence
  Synthetic oligonucleotide; TTA chr2 60493080 60493101 60493085 60493080 -
aacacaaaagacgatatcctgt

SEQ ID NO: 220763 - DNA, 22 bp, Artificial Sequence
  Synthetic oligonucleotide; CTG chr2 60493059 60493080 60493064 60493059 -
tatgagtccatttgtaacaaat

SEQ ID NO: 220764 - DNA, 22 bp, Artificial Sequence
  Synthetic oligonucleotide; TTT chr2 60493046 60493067 60493051 60493046 -
gtaacaaattctagaattctca

SEQ ID NO: 220765 - DNA, 22 bp, Artificial Sequence
  Synthetic oligonucleotide; TTG chr2 60493045 60493066 60493050 60493045 -
taacaaattctagaattctcaa

SEQ ID NO: 220766 - DNA, 22 bp, Artificial Sequence
  Synthetic oligonucleotide; TTC chr2 60493035 60493056 60493040 60493035 -
tagaattctcaacactgtggtg

SEQ ID NO: 220767 - DNA, 22 bp, Artificial Sequence
  Synthetic oligonucleotide; CTA chr2 60493033 60493054 60493038 60493033 -
gaattctcaacactgtggtggt

SEQ ID NO: 220768 - DNA, 22 bp, Artificial Sequence
  Synthetic oligonucleotide; TTC chr2 60493027 60493048 60493032 60493027 -
tcaacactgtggtggtaggtgg

SEQ ID NO: 220769 - DNA, 22 bp, Artificial Sequence
  Synthetic oligonucleotide; CTC chr2 60493025 60493046 60493030 60493025 -
aacactgtggtggtaggtgggg

SEQ ID NO: 220770 - DNA, 22 bp, Artificial Sequence
  Synthetic oligonucleotide; CTG chr2 60493018 60493039 60493023 60493018 -
tggtggtaggtgggggttcagt

SEQ ID NO: 220771 - DNA, 22 bp, Artificial Sequence
  Synthetic oligonucleotide; TTC chr2 60492999 60493020 60493004 60492999 -
agtggttagaaggaaggggtca

SEQ ID NO: 220772 - DNA, 22 bp, Artificial Sequence
  Synthetic oligonucleotide; TTA chr2 60492991 60493012 60492996 60492991 -
gaaggaaggggtcagagggtta

SEQ ID NO: 220773 - DNA, 22 bp, Artificial Sequence
  Synthetic oligonucleotide; TTA chr2 60492969 60492990 60492974 60492969 -
gggaaggggattgacagcaaag

SEQ ID NO: 220774 - DNA, 22 bp, Artificial Sequence
  Synthetic oligonucleotide; TTG chr2 60492956 60492977 60492961 60492956 -
acagcaaaggggcatgaggggg

SEQ ID NO: 220775 - DNA, 22 bp, Artificial Sequence
  Synthetic oligonucleotide; CTT chr2 60492931 60492952 60492936 60492931 -
tctagactggtggacgtgttct

SEQ ID NO: 220776 - DNA, 22 bp, Artificial Sequence
  Synthetic oligonucleotide; TTT chr2 60492930 60492951 60492935 60492930 -
ctagactggtggacgtgttctg

SEQ ID NO: 220777 - DNA, 22 bp, Artificial Sequence
  Synthetic oligonucleotide; TTC chr2 60492929 60492950 60492934 60492929 -
tagactggtggacgtgttctgt

SEQ ID NO: 220778 - DNA, 22 bp, Artificial Sequence
  Synthetic oligonucleotide; CTA chr2 60492927 60492948 60492932 60492927 -
gactggtggacgtgttctgtat

SEQ ID NO: 220779 - DNA, 22 bp, Artificial Sequence
  Synthetic oligonucleotide; CTG chr2 60492922 60492943 60492927 60492922 -
gtggacgtgttctgtatcttga

SEQ ID NO: 220780 - DNA, 22 bp, Artificial Sequence
  Synthetic oligonucleotide; TTC chr2 60492910 60492931 60492915 60492910 -
tgtatcttgattttggtggagg

SEQ ID NO: 220781 - DNA, 22 bp, Artificial Sequence
  Synthetic oligonucleotide; CTG chr2 60492908 60492929 60492913 60492908 -
tatcttgattttggtggaggcc

SEQ ID NO: 220782 - DNA, 22 bp, Artificial Sequence
  Synthetic oligonucleotide; CTT chr2 60492902 60492923 60492907 60492902 -
gattttggtggaggccacacag

SEQ ID NO: 220783 - DNA, 22 bp, Artificial Sequence
  Synthetic oligonucleotide; TTG chr2 60492901 60492922 60492906 60492901 -
attttggtggaggccacacagc

SEQ ID NO: 220784 - DNA, 22 bp, Artificial Sequence
  Synthetic oligonucleotide; TTT chr2 60492897 60492918 60492902 60492897 -
tggtggaggccacacagctgta

SEQ ID NO: 220785 - DNA, 22 bp, Artificial Sequence
  Synthetic oligonucleotide; TTT chr2 60492896 60492917 60492901 60492896 -
ggtggaggccacacagctgtat

SEQ ID NO: 220786 - DNA, 22 bp, Artificial Sequence
  Synthetic oligonucleotide; TTG chr2 60492895 60492916 60492900 60492895 -
gtggaggccacacagctgtata

SEQ ID NO: 220787 - DNA, 22 bp, Artificial Sequence
  Synthetic oligonucleotide; CTG chr2 60492877 60492898 60492882 60492877 -
tatacaactggcaaattgaatc

SEQ ID NO: 220788 - DNA, 22 bp, Artificial Sequence
  Synthetic oligonucleotide; CTG chr2 60492867 60492888 60492872 60492867 -
gcaaattgaatccaactgtaca

SEQ ID NO: 220789 - DNA, 22 bp, Artificial Sequence
  Synthetic oligonucleotide; TTG chr2 60492859 60492880 60492864 60492859 -
aatccaactgtacacttaaaat

SEQ ID NO: 220790 - DNA, 22 bp, Artificial Sequence
  Synthetic oligonucleotide; CTG chr2 60492849 60492870 60492854 60492849 -
tacacttaaaatgaatgacttt

SEQ ID NO: 220791 - DNA, 22 bp, Artificial Sequence
  Synthetic oligonucleotide; CTT chr2 60492842 60492863 60492847 60492842 -
aaaatgaatgacttttgttgta

SEQ ID NO: 220792 - DNA, 22 bp, Artificial Sequence
  Synthetic oligonucleotide; TTA chr2 60492841 60492862 60492846 60492841 -
aaatgaatgacttttgttgtat

SEQ ID NO: 220793 - DNA, 22 bp, Artificial Sequence
  Synthetic oligonucleotide; CTT chr2 60492828 60492849 60492833 60492828 -
ttgttgtatgtaaagtatacct

SEQ ID NO: 220794 - DNA, 22 bp, Artificial Sequence
  Synthetic oligonucleotide; TTT chr2 60492827 60492848 60492832 60492827 -
tgttgtatgtaaagtatacctt

SEQ ID NO: 220795 - DNA, 22 bp, Artificial Sequence
  Synthetic oligonucleotide; TTT chr2 60492826 60492847 60492831 60492826 -
gttgtatgtaaagtatacctta

SEQ ID NO: 220796 - DNA, 22 bp, Artificial Sequence
  Synthetic oligonucleotide; TTG chr2 60492825 60492846 60492830 60492825 -
ttgtatgtaaagtataccttaa

SEQ ID NO: 220797 - DNA, 22 bp, Artificial Sequence
  Synthetic oligonucleotide; TTG chr2 60492822 60492843 60492827 60492822 -
tatgtaaagtataccttaataa

SEQ ID NO: 220798 - DNA, 22 bp, Artificial Sequence
  Synthetic oligonucleotide; CTT chr2 60492805 60492826 60492810 60492805 -
aataaagctaaagcgaaacaaa

SEQ ID NO: 220799 - DNA, 22 bp, Artificial Sequence
  Synthetic oligonucleotide; TTA chr2 60492804 60492825 60492809 60492804 -
ataaagctaaagcgaaacaaaa

SEQ ID NO: 220800 - DNA, 22 bp, Artificial Sequence
  Synthetic oligonucleotide; CTA chr2 60492795 60492816 60492800 60492795 -
aagcgaaacaaaacaaaacacc

SEQ ID NO: 220801 - DNA, 22 bp, Artificial Sequence
  Synthetic oligonucleotide; CTG chr2 60492765 60492786 60492770 60492765 -
gagtggaaccaagtctgtctgt

SEQ ID NO: 220802 - DNA, 22 bp, Artificial Sequence
  Synthetic oligonucleotide; CTG chr2 60492748 60492769 60492753 60492748 -
tctgtaacctttaactgtttgg

SEQ ID NO: 220803 - DNA, 22 bp, Artificial Sequence
  Synthetic oligonucleotide; CTG chr2 60492744 60492765 60492749 60492744 -
taacctttaactgtttgggtct

SEQ ID NO: 220804 - DNA, 22 bp, Artificial Sequence
  Synthetic oligonucleotide; CTT chr2 60492737 60492758 60492742 60492737 -
taactgtttgggtctcctcaag

SEQ ID NO: 220805 - DNA, 22 bp, Artificial Sequence
  Synthetic oligonucleotide; TTT chr2 60492736 60492757 60492741 60492736 -
aactgtttgggtctcctcaaga

SEQ ID NO: 220806 - DNA, 22 bp, Artificial Sequence
  Synthetic oligonucleotide; TTA chr2 60492735 60492756 60492740 60492735 -
actgtttgggtctcctcaagac

SEQ ID NO: 220807 - DNA, 22 bp, Artificial Sequence
  Synthetic oligonucleotide; CTG chr2 60492731 60492752 60492736 60492731 -
tttgggtctcctcaagactcta

SEQ ID NO: 220808 - DNA, 22 bp, Artificial Sequence
  Synthetic oligonucleotide; TTT chr2 60492728 60492749 60492733 60492728 -
gggtctcctcaagactctagcc

SEQ ID NO: 220809 - DNA, 22 bp, Artificial Sequence
  Synthetic oligonucleotide; TTG chr2 60492727 60492748 60492732 60492727 -
ggtctcctcaagactctagccg

SEQ ID NO: 220810 - DNA, 22 bp, Artificial Sequence
  Synthetic oligonucleotide; CTC chr2 60492721 60492742 60492726 60492721 -
ctcaagactctagccgtctttc

SEQ ID NO: 220811 - DNA, 22 bp, Artificial Sequence
  Synthetic oligonucleotide; CTC chr2 60492718 60492739 60492723 60492718 -
aagactctagccgtctttcagg

SEQ ID NO: 220812 - DNA, 22 bp, Artificial Sequence
  Synthetic oligonucleotide; CTC chr2 60492711 60492732 60492716 60492711 -
tagccgtctttcagggtagcac

SEQ ID NO: 220813 - DNA, 22 bp, Artificial Sequence
  Synthetic oligonucleotide; CTA chr2 60492709 60492730 60492714 60492709 -
gccgtctttcagggtagcacca

SEQ ID NO: 220814 - DNA, 22 bp, Artificial Sequence
  Synthetic oligonucleotide; CTT chr2 60492701 60492722 60492706 60492701 -
tcagggtagcaccaaagtacat

SEQ ID NO: 220815 - DNA, 22 bp, Artificial Sequence
  Synthetic oligonucleotide; TTT chr2 60492700 60492721 60492705 60492700 -
cagggtagcaccaaagtacatt

SEQ ID NO: 220816 - DNA, 22 bp, Artificial Sequence
  Synthetic oligonucleotide; TTC chr2 60492699 60492720 60492704 60492699 -
agggtagcaccaaagtacattt

SEQ ID NO: 220817 - DNA, 22 bp, Artificial Sequence
  Synthetic oligonucleotide; TTT chr2 60492677 60492698 60492682 60492677 -
cagggaaatgagaatgcccttt

SEQ ID NO: 220818 - DNA, 22 bp, Artificial Sequence
  Synthetic oligonucleotide; TTC chr2 60492676 60492697 60492681 60492676 -
agggaaatgagaatgccctttg

SEQ ID NO: 220819 - DNA, 22 bp, Artificial Sequence
  Synthetic oligonucleotide; CTT chr2 60492656 60492677 60492661 60492656 -
tgtattctgagattttatagaa

SEQ ID NO: 220820 - DNA, 22 bp, Artificial Sequence
  Synthetic oligonucleotide; TTT chr2 60492655 60492676 60492660 60492655 -
gtattctgagattttatagaag

SEQ ID NO: 220821 - DNA, 22 bp, Artificial Sequence
  Synthetic oligonucleotide; TTG chr2 60492654 60492675 60492659 60492654 -
tattctgagattttatagaagt

SEQ ID NO: 220822 - DNA, 22 bp, Artificial Sequence
  Synthetic oligonucleotide; TTC chr2 60492649 60492670 60492654 60492649 -
tgagattttatagaagttggta

SEQ ID NO: 220823 - DNA, 22 bp, Artificial Sequence
  Synthetic oligonucleotide; CTG chr2 60492647 60492668 60492652 60492647 -
agattttatagaagttggtaat

SEQ ID NO: 220824 - DNA, 22 bp, Artificial Sequence
  Synthetic oligonucleotide; TTT chr2 60492641 60492662 60492646 60492641 -
tatagaagttggtaatgacaga

SEQ ID NO: 220825 - DNA, 22 bp, Artificial Sequence
  Synthetic oligonucleotide; TTT chr2 60492640 60492661 60492645 60492640 -
atagaagttggtaatgacagag

SEQ ID NO: 220826 - DNA, 22 bp, Artificial Sequence
  Synthetic oligonucleotide; TTA chr2 60492639 60492660 60492644 60492639 -
tagaagttggtaatgacagaga

SEQ ID NO: 220827 - DNA, 22 bp, Artificial Sequence
  Synthetic oligonucleotide; TTG chr2 60492630 60492651 60492635 60492630 -
gtaatgacagagagagagagag

SEQ ID NO: 220828 - DNA, 22 bp, Artificial Sequence
  Synthetic oligonucleotide; CTG chr2 60492582 60492603 60492587 60492582 -
agatggggttatccaccataag

SEQ ID NO: 220829 - DNA, 22 bp, Artificial Sequence
  Synthetic oligonucleotide; TTA chr2 60492571 60492592 60492576 60492571 -
tccaccataagcagagcatttg

SEQ ID NO: 220830 - DNA, 22 bp, Artificial Sequence
  Synthetic oligonucleotide; TTT chr2 60492550 60492571 60492555 60492550 -
gggtctgagaagcgcatgagta

SEQ ID NO: 220831 - DNA, 22 bp, Artificial Sequence
  Synthetic oligonucleotide; TTG chr2 60492549 60492570 60492554 60492549 -
ggtctgagaagcgcatgagtac

SEQ ID NO: 220832 - DNA, 22 bp, Artificial Sequence
  Synthetic oligonucleotide; CTG chr2 60492543 60492564 60492548 60492543 -
agaagcgcatgagtactggtga

SEQ ID NO: 220833 - DNA, 22 bp, Artificial Sequence
  Synthetic oligonucleotide; CTG chr2 60492525 60492546 60492530 60492525 -
gtgagtatgtgaggaaggagag

SEQ ID NO: 220834 - DNA, 22 bp, Artificial Sequence
  Synthetic oligonucleotide; CTG chr2 60492484 60492505 60492489 60492484 -
ttttcctagaattccagcaggc

SEQ ID NO: 220835 - DNA, 22 bp, Artificial Sequence
  Synthetic oligonucleotide; TTT chr2 60492481 60492502 60492486 60492481 -
tcctagaattccagcaggcttc

SEQ ID NO: 220836 - DNA, 22 bp, Artificial Sequence
  Synthetic oligonucleotide; TTT chr2 60492480 60492501 60492485 60492480 -
cctagaattccagcaggcttca

SEQ ID NO: 220837 - DNA, 22 bp, Artificial Sequence
  Synthetic oligonucleotide; TTC chr2 60492479 60492500 60492484 60492479 -
ctagaattccagcaggcttcaa

SEQ ID NO: 220838 - DNA, 22 bp, Artificial Sequence
  Synthetic oligonucleotide; CTA chr2 60492476 60492497 60492481 60492476 -
gaattccagcaggcttcaaaaa

SEQ ID NO: 220839 - DNA, 22 bp, Artificial Sequence
  Synthetic oligonucleotide; TTC chr2 60492470 60492491 60492475 60492470 -
cagcaggcttcaaaaagtaaaa

SEQ ID NO: 220840 - DNA, 22 bp, Artificial Sequence
  Synthetic oligonucleotide; CTT chr2 60492460 60492481 60492465 60492460 -
caaaaagtaaaaaggggaggga

SEQ ID NO: 220841 - DNA, 22 bp, Artificial Sequence
  Synthetic oligonucleotide; TTC chr2 60492459 60492480 60492464 60492459 -
aaaaagtaaaaaggggagggag

SEQ ID NO: 220842 - DNA, 22 bp, Artificial Sequence
  Synthetic oligonucleotide; CTA chr2 60492427 60492448 60492432 60492427 -
agtttttttcttccctagaaat

SEQ ID NO: 220843 - DNA, 22 bp, Artificial Sequence
  Synthetic oligonucleotide; TTT chr2 60492422 60492443 60492427 60492422 -
ttttcttccctagaaatacatt

SEQ ID NO: 220844 - DNA, 22 bp, Artificial Sequence
  Synthetic oligonucleotide; TTT chr2 60492421 60492442 60492426 60492421 -
tttcttccctagaaatacattt

SEQ ID NO: 220845 - DNA, 22 bp, Artificial Sequence
  Synthetic oligonucleotide; TTT chr2 60492420 60492441 60492425 60492420 -
ttcttccctagaaatacattta

SEQ ID NO: 220846 - DNA, 22 bp, Artificial Sequence
  Synthetic oligonucleotide; TTT chr2 60492419 60492440 60492424 60492419 -
tcttccctagaaatacatttat

SEQ ID NO: 220847 - DNA, 22 bp, Artificial Sequence
  Synthetic oligonucleotide; TTT chr2 60492418 60492439 60492423 60492418 -
cttccctagaaatacatttatt

SEQ ID NO: 220848 - DNA, 22 bp, Artificial Sequence
  Synthetic oligonucleotide; TTC chr2 60492417 60492438 60492422 60492417 -
ttccctagaaatacatttattc

SEQ ID NO: 220849 - DNA, 22 bp, Artificial Sequence
  Synthetic oligonucleotide; CTT chr2 60492415 60492436 60492420 60492415 -
ccctagaaatacatttattcta

SEQ ID NO: 220850 - DNA, 22 bp, Artificial Sequence
  Synthetic oligonucleotide; TTC chr2 60492414 60492435 60492419 60492414 -
cctagaaatacatttattctaa

SEQ ID NO: 220851 - DNA, 22 bp, Artificial Sequence
  Synthetic oligonucleotide; CTA chr2 60492410 60492431 60492415 60492410 -
gaaatacatttattctaaacat

SEQ ID NO: 220852 - DNA, 22 bp, Artificial Sequence
  Synthetic oligonucleotide; TTT chr2 60492399 60492420 60492404 60492399 -
attctaaacattagcccaatta

SEQ ID NO: 220853 - DNA, 22 bp, Artificial Sequence
  Synthetic oligonucleotide; TTA chr2 60492398 60492419 60492403 60492398 -
ttctaaacattagcccaattag

SEQ ID NO: 220854 - DNA, 22 bp, Artificial Sequence
  Synthetic oligonucleotide; TTC chr2 60492395 60492416 60492400 60492395 -
taaacattagcccaattagttg

SEQ ID NO: 220855 - DNA, 22 bp, Artificial Sequence
  Synthetic oligonucleotide; CTA chr2 60492393 60492414 60492398 60492393 -
aacattagcccaattagttgtc

SEQ ID NO: 220856 - DNA, 22 bp, Artificial Sequence
  Synthetic oligonucleotide; TTA chr2 60492386 60492407 60492391 60492386 -
gcccaattagttgtcttttgtt

SEQ ID NO: 220857 - DNA, 22 bp, Artificial Sequence
  Synthetic oligonucleotide; TTA chr2 60492377 60492398 60492382 60492377 -
gttgtcttttgtttgtttgttt

SEQ ID NO: 220858 - DNA, 22 bp, Artificial Sequence
  Synthetic oligonucleotide; TTG chr2 60492373 60492394 60492378 60492373 -
tcttttgtttgtttgtttgttt

SEQ ID NO: 220859 - DNA, 22 bp, Artificial Sequence
  Synthetic oligonucleotide; CTT chr2 60492369 60492390 60492374 60492369 -
ttgtttgtttgtttgtttgttt

SEQ ID NO: 220860 - DNA, 22 bp, Artificial Sequence
  Synthetic oligonucleotide; TTT chr2 60492368 60492389 60492373 60492368 -
tgtttgtttgtttgtttgtttt

SEQ ID NO: 220861 - DNA, 22 bp, Artificial Sequence
  Synthetic oligonucleotide; TTT chr2 60492367 60492388 60492372 60492367 -
gtttgtttgtttgtttgttttt

SEQ ID NO: 220862 - DNA, 22 bp, Artificial Sequence
  Synthetic oligonucleotide; TTG chr2 60492366 60492387 60492371 60492366 -
tttgtttgtttgtttgtttttg

SEQ ID NO: 220863 - DNA, 22 bp, Artificial Sequence
  Synthetic oligonucleotide; TTT chr2 60492363 60492384 60492368 60492363 -
gtttgtttgtttgtttttgaga

SEQ ID NO: 220864 - DNA, 22 bp, Artificial Sequence
  Synthetic oligonucleotide; TTG chr2 60492362 60492383 60492367 60492362 -
tttgtttgtttgtttttgagac

SEQ ID NO: 220865 - DNA, 22 bp, Artificial Sequence
  Synthetic oligonucleotide; TTT chr2 60492359 60492380 60492364 60492359 -
gtttgtttgtttttgagacagg

SEQ ID NO: 220866 - DNA, 22 bp, Artificial Sequence
  Synthetic oligonucleotide; TTG chr2 60492358 60492379 60492363 60492358 -
tttgtttgtttttgagacaggg

SEQ ID NO: 220867 - DNA, 22 bp, Artificial Sequence
  Synthetic oligonucleotide; TTT chr2 60492355 60492376 60492360 60492355 -
gtttgtttttgagacagggtct

SEQ ID NO: 220868 - DNA, 22 bp, Artificial Sequence
  Synthetic oligonucleotide; TTG chr2 60492354 60492375 60492359 60492354 -
tttgtttttgagacagggtctc

SEQ ID NO: 220869 - DNA, 22 bp, Artificial Sequence
  Synthetic oligonucleotide; TTT chr2 60492351 60492372 60492356 60492351 -
gtttttgagacagggtctcgct

SEQ ID NO: 220870 - DNA, 22 bp, Artificial Sequence
  Synthetic oligonucleotide; TTG chr2 60492350 60492371 60492355 60492350 -
tttttgagacagggtctcgctg

SEQ ID NO: 220871 - DNA, 22 bp, Artificial Sequence
  Synthetic oligonucleotide; TTT chr2 60492347 60492368 60492352 60492347 -
ttgagacagggtctcgctgtgt

SEQ ID NO: 220872 - DNA, 22 bp, Artificial Sequence
  Synthetic oligonucleotide; TTT chr2 60492346 60492367 60492351 60492346 -
tgagacagggtctcgctgtgtt

SEQ ID NO: 220873 - DNA, 22 bp, Artificial Sequence
  Synthetic oligonucleotide; TTT chr2 60492345 60492366 60492350 60492345 -
gagacagggtctcgctgtgttg

SEQ ID NO: 220874 - DNA, 22 bp, Artificial Sequence
  Synthetic oligonucleotide; TTG chr2 60492344 60492365 60492349 60492344 -
agacagggtctcgctgtgttgc

SEQ ID NO: 220875 - DNA, 22 bp, Artificial Sequence
  Synthetic oligonucleotide; CTC chr2 60492332 60492353 60492337 60492332 -
gctgtgttgcctaggctagagt

SEQ ID NO: 220876 - DNA, 22 bp, Artificial Sequence
  Synthetic oligonucleotide; CTG chr2 60492328 60492349 60492333 60492328 -
tgttgcctaggctagagtgtag

SEQ ID NO: 220877 - DNA, 22 bp, Artificial Sequence
  Synthetic oligonucleotide; TTG chr2 60492323 60492344 60492328 60492323 -
cctaggctagagtgtagtggca

SEQ ID NO: 220878 - DNA, 22 bp, Artificial Sequence
  Synthetic oligonucleotide; CTA chr2 60492319 60492340 60492324 60492319 -
ggctagagtgtagtggcatgtt

SEQ ID NO: 220879 - DNA, 22 bp, Artificial Sequence
  Synthetic oligonucleotide; CTA chr2 60492314 60492335 60492319 60492314 -
gagtgtagtggcatgttcatag

SEQ ID NO: 220880 - DNA, 22 bp, Artificial Sequence
  Synthetic oligonucleotide; TTC chr2 60492296 60492317 60492301 60492296 -
atagctcactgcagccttgatc

SEQ ID NO: 220881 - DNA, 22 bp, Artificial Sequence
  Synthetic oligonucleotide; CTC chr2 60492289 60492310 60492294 60492289 -
actgcagccttgatctcctagg

SEQ ID NO: 220882 - DNA, 22 bp, Artificial Sequence
  Synthetic oligonucleotide; CTG chr2 60492285 60492306 60492290 60492285 -
cagccttgatctcctaggctca

SEQ ID NO: 220883 - DNA, 22 bp, Artificial Sequence
  Synthetic oligonucleotide; CTT chr2 60492278 60492299 60492283 60492278 -
gatctcctaggctcaagccatc

SEQ ID NO: 220884 - DNA, 22 bp, Artificial Sequence
  Synthetic oligonucleotide; TTG chr2 60492277 60492298 60492282 60492277 -
atctcctaggctcaagccatcc

SEQ ID NO: 220885 - DNA, 22 bp, Artificial Sequence
  Synthetic oligonucleotide; CTC chr2 60492272 60492293 60492277 60492272 -
ctaggctcaagccatcctgtca

SEQ ID NO: 220886 - DNA, 22 bp, Artificial Sequence
  Synthetic oligonucleotide; CTA chr2 60492269 60492290 60492274 60492269 -
ggctcaagccatcctgtcacct

SEQ ID NO: 220887 - DNA, 22 bp, Artificial Sequence
  Synthetic oligonucleotide; CTC chr2 60492264 60492285 60492269 60492264 -
aagccatcctgtcacctcagcc

SEQ ID NO: 220888 - DNA, 22 bp, Artificial Sequence
  Synthetic oligonucleotide; CTG chr2 60492253 60492274 60492258 60492253 -
tcacctcagcctcctgagtagc

SEQ ID NO: 220889 - DNA, 22 bp, Artificial Sequence
  Synthetic oligonucleotide; CTC chr2 60492246 60492267 60492251 60492246 -
agcctcctgagtagctgggacg

SEQ ID NO: 220890 - DNA, 22 bp, Artificial Sequence
  Synthetic oligonucleotide; CTC chr2 60492240 60492261 60492245 60492240 -
ctgagtagctgggacgacaggt

SEQ ID NO: 220891 - DNA, 22 bp, Artificial Sequence
  Synthetic oligonucleotide; CTG chr2 60492237 60492258 60492242 60492237 -
agtagctgggacgacaggtgca

SEQ ID NO: 220892 - DNA, 22 bp, Artificial Sequence
  Synthetic oligonucleotide; CTG chr2 60492229 60492250 60492234 60492229 -
ggacgacaggtgcatgccacca

SEQ ID NO: 220893 - DNA, 22 bp, Artificial Sequence
  Synthetic oligonucleotide; CTG chr2 60492201 60492222 60492206 60492201 -
gctaattttgtagagatggagt

SEQ ID NO: 220894 - DNA, 22 bp, Artificial Sequence
  Synthetic oligonucleotide; CTA chr2 60492197 60492218 60492202 60492197 -
attttgtagagatggagtttct

SEQ ID NO: 220895 - DNA, 22 bp, Artificial Sequence
  Synthetic oligonucleotide; TTT chr2 60492193 60492214 60492198 60492193 -
tgtagagatggagtttctccct

SEQ ID NO: 220896 - DNA, 22 bp, Artificial Sequence
  Synthetic oligonucleotide; TTT chr2 60492192 60492213 60492197 60492192 -
gtagagatggagtttctccctg

SEQ ID NO: 220897 - DNA, 22 bp, Artificial Sequence
  Synthetic oligonucleotide; TTG chr2 60492191 60492212 60492196 60492191 -
tagagatggagtttctccctgt

SEQ ID NO: 220898 - DNA, 22 bp, Artificial Sequence
  Synthetic oligonucleotide; TTT chr2 60492177 60492198 60492182 60492177 -
ctccctgttgcccaggctggtc

SEQ ID NO: 220899 - DNA, 22 bp, Artificial Sequence
  Synthetic oligonucleotide; TTC chr2 60492176 60492197 60492181 60492176 -
tccctgttgcccaggctggtct

SEQ ID NO: 220900 - DNA, 22 bp, Artificial Sequence
  Synthetic oligonucleotide; CTC chr2 60492174 60492195 60492179 60492174 -
cctgttgcccaggctggtcttg

SEQ ID NO: 220901 - DNA, 22 bp, Artificial Sequence
  Synthetic oligonucleotide; CTG chr2 60492170 60492191 60492175 60492170 -
ttgcccaggctggtcttgaact

SEQ ID NO: 220902 - DNA, 22 bp, Artificial Sequence
  Synthetic oligonucleotide; TTG chr2 60492167 60492188 60492172 60492167 -
cccaggctggtcttgaactcct

SEQ ID NO: 220903 - DNA, 22 bp, Artificial Sequence
  Synthetic oligonucleotide; CTG chr2 60492158 60492179 60492163 60492158 -
gtcttgaactcctgggctccag

SEQ ID NO: 220904 - DNA, 22 bp, Artificial Sequence
  Synthetic oligonucleotide; CTT chr2 60492153 60492174 60492158 60492153 -
gaactcctgggctccagtgatc

SEQ ID NO: 220905 - DNA, 22 bp, Artificial Sequence
  Synthetic oligonucleotide; TTG chr2 60492152 60492173 60492157 60492152 -
aactcctgggctccagtgatcc

SEQ ID NO: 220906 - DNA, 22 bp, Artificial Sequence
  Synthetic oligonucleotide; CTC chr2 60492147 60492168 60492152 60492147 -
ctgggctccagtgatcctcctg

SEQ ID NO: 220907 - DNA, 22 bp, Artificial Sequence
  Synthetic oligonucleotide; CTG chr2 60492144 60492165 60492149 60492144 -
ggctccagtgatcctcctgcct

SEQ ID NO: 220908 - DNA, 22 bp, Artificial Sequence
  Synthetic oligonucleotide; CTC chr2 60492139 60492160 60492144 60492139 -
cagtgatcctcctgccttgacc

SEQ ID NO: 220909 - DNA, 22 bp, Artificial Sequence
  Synthetic oligonucleotide; CTC chr2 60492128 60492149 60492133 60492128 -
ctgccttgacctcccaaagtgc

SEQ ID NO: 220910 - DNA, 22 bp, Artificial Sequence
  Synthetic oligonucleotide; CTG chr2 60492125 60492146 60492130 60492125 -
ccttgacctcccaaagtgctgg

SEQ ID NO: 220911 - DNA, 22 bp, Artificial Sequence
  Synthetic oligonucleotide; CTT chr2 60492121 60492142 60492126 60492121 -
gacctcccaaagtgctgggatt

SEQ ID NO: 220912 - DNA, 22 bp, Artificial Sequence
  Synthetic oligonucleotide; TTG chr2 60492120 60492141 60492125 60492120 -
acctcccaaagtgctgggatta

SEQ ID NO: 220913 - DNA, 22 bp, Artificial Sequence
  Synthetic oligonucleotide; CTC chr2 60492115 60492136 60492120 60492115 -
ccaaagtgctgggattacaggc

SEQ ID NO: 220914 - DNA, 22 bp, Artificial Sequence
  Synthetic oligonucleotide; CTG chr2 60492104 60492125 60492109 60492104 -
ggattacaggcgagagccactg

SEQ ID NO: 220915 - DNA, 22 bp, Artificial Sequence
  Synthetic oligonucleotide; TTA chr2 60492098 60492119 60492103 60492098 -
caggcgagagccactgtgcctg

SEQ ID NO: 220916 - DNA, 22 bp, Artificial Sequence
  Synthetic oligonucleotide; CTG chr2 60492082 60492103 60492087 60492082 -
tgcctgtcaccaactcagtctt

SEQ ID NO: 220917 - DNA, 22 bp, Artificial Sequence
  Synthetic oligonucleotide; CTG chr2 60492076 60492097 60492081 60492076 -
tcaccaactcagtcttattcat

SEQ ID NO: 220918 - DNA, 22 bp, Artificial Sequence
  Synthetic oligonucleotide; CTC chr2 60492066 60492087 60492071 60492066 -
agtcttattcatcagtatgtct

SEQ ID NO: 220919 - DNA, 22 bp, Artificial Sequence
  Synthetic oligonucleotide; CTT chr2 60492060 60492081 60492065 60492060 -
attcatcagtatgtcttctcct

SEQ ID NO: 220920 - DNA, 22 bp, Artificial Sequence
  Synthetic oligonucleotide; TTA chr2 60492059 60492080 60492064 60492059 -
ttcatcagtatgtcttctcctt

SEQ ID NO: 220921 - DNA, 22 bp, Artificial Sequence
  Synthetic oligonucleotide; TTC chr2 60492056 60492077 60492061 60492056 -
atcagtatgtcttctccttaag

SEQ ID NO: 220922 - DNA, 22 bp, Artificial Sequence
  Synthetic oligonucleotide; CTT chr2 60492043 60492064 60492048 60492043 -
ctccttaagcggagatgctaac

SEQ ID NO: 220923 - DNA, 22 bp, Artificial Sequence
  Synthetic oligonucleotide; TTC chr2 60492042 60492063 60492047 60492042 -
tccttaagcggagatgctaaca

SEQ ID NO: 220924 - DNA, 22 bp, Artificial Sequence
  Synthetic oligonucleotide; CTC chr2 60492040 60492061 60492045 60492040 -
cttaagcggagatgctaacaat

SEQ ID NO: 220925 - DNA, 22 bp, Artificial Sequence
  Synthetic oligonucleotide; CTT chr2 60492037 60492058 60492042 60492037 -
aagcggagatgctaacaatgta

SEQ ID NO: 220926 - DNA, 22 bp, Artificial Sequence
  Synthetic oligonucleotide; TTA chr2 60492036 60492057 60492041 60492036 -
agcggagatgctaacaatgtag

SEQ ID NO: 220927 - DNA, 22 bp, Artificial Sequence
  Synthetic oligonucleotide; CTA chr2 60492023 60492044 60492028 60492023 -
acaatgtagcatctcctgtgct

SEQ ID NO: 220928 - DNA, 22 bp, Artificial Sequence
  Synthetic oligonucleotide; CTC chr2 60492008 60492029 60492013 60492008 -
ctgtgctgaattcctgtaaagt

SEQ ID NO: 220929 - DNA, 22 bp, Artificial Sequence
  Synthetic oligonucleotide; CTG chr2 60492005 60492026 60492010 60492005 -
tgctgaattcctgtaaagtgag

SEQ ID NO: 220930 - DNA, 22 bp, Artificial Sequence
  Synthetic oligonucleotide; CTG chr2 60492000 60492021 60492005 60492000 -
aattcctgtaaagtgagggttt

SEQ ID NO: 220931 - DNA, 22 bp, Artificial Sequence
  Synthetic oligonucleotide; TTC chr2 60491995 60492016 60492000 60491995 -
ctgtaaagtgagggtttttgtt

SEQ ID NO: 220932 - DNA, 22 bp, Artificial Sequence
  Synthetic oligonucleotide; CTG chr2 60491992 60492013 60491997 60491992 -
taaagtgagggtttttgttttt

SEQ ID NO: 220933 - DNA, 22 bp, Artificial Sequence
  Synthetic oligonucleotide; TTT chr2 60491978 60491999 60491983 60491978 -
ttgtttttcctacatccatctt

SEQ ID NO: 220934 - DNA, 22 bp, Artificial Sequence
  Synthetic oligonucleotide; TTT chr2 60491977 60491998 60491982 60491977 -
tgtttttcctacatccatcttc

SEQ ID NO: 220935 - DNA, 22 bp, Artificial Sequence
  Synthetic oligonucleotide; TTT chr2 60491976 60491997 60491981 60491976 -
gtttttcctacatccatcttcc

SEQ ID NO: 220936 - DNA, 22 bp, Artificial Sequence
  Synthetic oligonucleotide; TTG chr2 60491975 60491996 60491980 60491975 -
tttttcctacatccatcttcct

SEQ ID NO: 220937 - DNA, 22 bp, Artificial Sequence
  Synthetic oligonucleotide; TTT chr2 60491972 60491993 60491977 60491972 -
ttcctacatccatcttcctctc

SEQ ID NO: 220938 - DNA, 22 bp, Artificial Sequence
  Synthetic oligonucleotide; TTT chr2 60491971 60491992 60491976 60491971 -
tcctacatccatcttcctctcc

SEQ ID NO: 220939 - DNA, 22 bp, Artificial Sequence
  Synthetic oligonucleotide; TTT chr2 60491970 60491991 60491975 60491970 -
cctacatccatcttcctctcca

SEQ ID NO: 220940 - DNA, 22 bp, Artificial Sequence
  Synthetic oligonucleotide; TTC chr2 60491969 60491990 60491974 60491969 -
ctacatccatcttcctctccag

SEQ ID NO: 220941 - DNA, 22 bp, Artificial Sequence
  Synthetic oligonucleotide; CTA chr2 60491966 60491987 60491971 60491966 -
catccatcttcctctccagatt

SEQ ID NO: 220942 - DNA, 22 bp, Artificial Sequence
  Synthetic oligonucleotide; CTT chr2 60491956 60491977 60491961 60491956 -
cctctccagattccctctcaat

SEQ ID NO: 220943 - DNA, 22 bp, Artificial Sequence
  Synthetic oligonucleotide; TTC chr2 60491955 60491976 60491960 60491955 -
ctctccagattccctctcaatt

SEQ ID NO: 220944 - DNA, 22 bp, Artificial Sequence
  Synthetic oligonucleotide; CTC chr2 60491952 60491973 60491957 60491952 -
tccagattccctctcaatttcc

SEQ ID NO: 220945 - DNA, 22 bp, Artificial Sequence
  Synthetic oligonucleotide; CTC chr2 60491950 60491971 60491955 60491950 -
cagattccctctcaatttccaa

SEQ ID NO: 220946 - DNA, 22 bp, Artificial Sequence
  Synthetic oligonucleotide; TTC chr2 60491943 60491964 60491948 60491943 -
cctctcaatttccaaggtattt

SEQ ID NO: 220947 - DNA, 22 bp, Artificial Sequence
  Synthetic oligonucleotide; CTC chr2 60491939 60491960 60491944 60491939 -
tcaatttccaaggtatttagcg

SEQ ID NO: 220948 - DNA, 22 bp, Artificial Sequence
  Synthetic oligonucleotide; CTC chr2 60491937 60491958 60491942 60491937 -
aatttccaaggtatttagcgta

SEQ ID NO: 220949 - DNA, 22 bp, Artificial Sequence
  Synthetic oligonucleotide; TTT chr2 60491932 60491953 60491937 60491932 -
ccaaggtatttagcgtaaatgc

SEQ ID NO: 220950 - DNA, 22 bp, Artificial Sequence
  Synthetic oligonucleotide; TTC chr2 60491931 60491952 60491936 60491931 -
caaggtatttagcgtaaatgca

SEQ ID NO: 220951 - DNA, 22 bp, Artificial Sequence
  Synthetic oligonucleotide; TTT chr2 60491921 60491942 60491926 60491921 -
agcgtaaatgcaatatctgaac

SEQ ID NO: 220952 - DNA, 22 bp, Artificial Sequence
  Synthetic oligonucleotide; TTA chr2 60491920 60491941 60491925 60491920 -
gcgtaaatgcaatatctgaact

SEQ ID NO: 220953 - DNA, 22 bp, Artificial Sequence
  Synthetic oligonucleotide; CTG chr2 60491902 60491923 60491907 60491902 -
aacttcatttatttggcagatt

SEQ ID NO: 220954 - DNA, 22 bp, Artificial Sequence
  Synthetic oligonucleotide; CTT chr2 60491897 60491918 60491902 60491897 -
catttatttggcagatttgtgt

SEQ ID NO: 220955 - DNA, 22 bp, Artificial Sequence
  Synthetic oligonucleotide; TTC chr2 60491896 60491917 60491901 60491896 -
atttatttggcagatttgtgtg

SEQ ID NO: 220956 - DNA, 22 bp, Artificial Sequence
  Synthetic oligonucleotide; TTT chr2 60491892 60491913 60491897 60491892 -
atttggcagatttgtgtggact

SEQ ID NO: 220957 - DNA, 22 bp, Artificial Sequence
  Synthetic oligonucleotide; TTA chr2 60491891 60491912 60491896 60491891 -
tttggcagatttgtgtggactg

SEQ ID NO: 220958 - DNA, 22 bp, Artificial Sequence
  Synthetic oligonucleotide; TTT chr2 60491888 60491909 60491893 60491888 -
ggcagatttgtgtggactgcct

SEQ ID NO: 220959 - DNA, 22 bp, Artificial Sequence
  Synthetic oligonucleotide; TTG chr2 60491887 60491908 60491892 60491887 -
gcagatttgtgtggactgcctt

SEQ ID NO: 220960 - DNA, 22 bp, Artificial Sequence
  Synthetic oligonucleotide; TTT chr2 60491879 60491900 60491884 60491879 -
gtgtggactgccttttctgaac

SEQ ID NO: 220961 - DNA, 22 bp, Artificial Sequence
  Synthetic oligonucleotide; TTG chr2 60491878 60491899 60491883 60491878 -
tgtggactgccttttctgaacc

SEQ ID NO: 220962 - DNA, 22 bp, Artificial Sequence
  Synthetic oligonucleotide; CTG chr2 60491869 60491890 60491874 60491869 -
ccttttctgaacctatttgggt

SEQ ID NO: 220963 - DNA, 22 bp, Artificial Sequence
  Synthetic oligonucleotide; CTT chr2 60491865 60491886 60491870 60491865 -
ttctgaacctatttgggtgcta

SEQ ID NO: 220964 - DNA, 22 bp, Artificial Sequence
  Synthetic oligonucleotide; TTT chr2 60491864 60491885 60491869 60491864 -
tctgaacctatttgggtgctaa

SEQ ID NO: 220965 - DNA, 22 bp, Artificial Sequence
  Synthetic oligonucleotide; TTT chr2 60491863 60491884 60491868 60491863 -
ctgaacctatttgggtgctaag

SEQ ID NO: 220966 - DNA, 22 bp, Artificial Sequence
  Synthetic oligonucleotide; TTC chr2 60491862 60491883 60491867 60491862 -
tgaacctatttgggtgctaagg

SEQ ID NO: 220967 - DNA, 22 bp, Artificial Sequence
  Synthetic oligonucleotide; CTG chr2 60491860 60491881 60491865 60491860 -
aacctatttgggtgctaaggac

SEQ ID NO: 220968 - DNA, 22 bp, Artificial Sequence
  Synthetic oligonucleotide; CTA chr2 60491854 60491875 60491859 60491854 -
tttgggtgctaaggactgtatg

SEQ ID NO: 220969 - DNA, 22 bp, Artificial Sequence
  Synthetic oligonucleotide; TTT chr2 60491851 60491872 60491856 60491851 -
gggtgctaaggactgtatggat

SEQ ID NO: 220970 - DNA, 22 bp, Artificial Sequence
  Synthetic oligonucleotide; TTG chr2 60491850 60491871 60491855 60491850 -
ggtgctaaggactgtatggatt

SEQ ID NO: 220971 - DNA, 22 bp, Artificial Sequence
  Synthetic oligonucleotide; CTA chr2 60491843 60491864 60491848 60491843 -
aggactgtatggatttgggttc

SEQ ID NO: 220972 - DNA, 22 bp, Artificial Sequence
  Synthetic oligonucleotide; CTG chr2 60491836 60491857 60491841 60491836 -
tatggatttgggttcttaacat

SEQ ID NO: 220973 - DNA, 22 bp, Artificial Sequence
  Synthetic oligonucleotide; TTT chr2 60491827 60491848 60491832 60491827 -
gggttcttaacatggaaaacgt

SEQ ID NO: 220974 - DNA, 22 bp, Artificial Sequence
  Synthetic oligonucleotide; TTG chr2 60491826 60491847 60491831 60491826 -
ggttcttaacatggaaaacgtc

SEQ ID NO: 220975 - DNA, 22 bp, Artificial Sequence
  Synthetic oligonucleotide; TTC chr2 60491821 60491842 60491826 60491821 -
ttaacatggaaaacgtctgtgc

SEQ ID NO: 220976 - DNA, 22 bp, Artificial Sequence
  Synthetic oligonucleotide; CTT chr2 60491819 60491840 60491824 60491819 -
aacatggaaaacgtctgtgcct

SEQ ID NO: 220977 - DNA, 22 bp, Artificial Sequence
  Synthetic oligonucleotide; TTA chr2 60491818 60491839 60491823 60491818 -
acatggaaaacgtctgtgcctg

SEQ ID NO: 220978 - DNA, 22 bp, Artificial Sequence
  Synthetic oligonucleotide; CTG chr2 60491802 60491823 60491807 60491802 -
tgcctgcgtagtgttgggtcct

SEQ ID NO: 220979 - DNA, 22 bp, Artificial Sequence
  Synthetic oligonucleotide; CTG chr2 60491796 60491817 60491801 60491796 -
cgtagtgttgggtcctacctgg

SEQ ID NO: 220980 - DNA, 22 bp, Artificial Sequence
  Synthetic oligonucleotide; TTG chr2 60491786 60491807 60491791 60491786 -
ggtcctacctggccacttggct

SEQ ID NO: 220981 - DNA, 22 bp, Artificial Sequence
  Synthetic oligonucleotide; CTA chr2 60491779 60491800 60491784 60491779 -
cctggccacttggctctcaaca

SEQ ID NO: 220982 - DNA, 22 bp, Artificial Sequence
  Synthetic oligonucleotide; CTG chr2 60491775 60491796 60491780 60491775 -
gccacttggctctcaacacgga

SEQ ID NO: 220983 - DNA, 22 bp, Artificial Sequence
  Synthetic oligonucleotide; CTT chr2 60491768 60491789 60491773 60491768 -
ggctctcaacacggagtgatga

SEQ ID NO: 220984 - DNA, 22 bp, Artificial Sequence
  Synthetic oligonucleotide; TTG chr2 60491767 60491788 60491772 60491767 -
gctctcaacacggagtgatgat

SEQ ID NO: 220985 - DNA, 22 bp, Artificial Sequence
  Synthetic oligonucleotide; CTC chr2 60491763 60491784 60491768 60491763 -
tcaacacggagtgatgatgcct

SEQ ID NO: 220986 - DNA, 22 bp, Artificial Sequence
  Synthetic oligonucleotide; CTC chr2 60491761 60491782 60491766 60491761 -
aacacggagtgatgatgcctag

SEQ ID NO: 220987 - DNA, 22 bp, Artificial Sequence
  Synthetic oligonucleotide; CTA chr2 60491740 60491761 60491745 60491740 -
gggtgttttgacgtgggcagtc

SEQ ID NO: 220988 - DNA, 22 bp, Artificial Sequence
  Synthetic oligonucleotide; TTT chr2 60491732 60491753 60491737 60491732 -
tgacgtgggcagtcagcccagc

SEQ ID NO: 220989 - DNA, 22 bp, Artificial Sequence
  Synthetic oligonucleotide; TTT chr2 60491731 60491752 60491736 60491731 -
gacgtgggcagtcagcccagcc

SEQ ID NO: 220990 - DNA, 22 bp, Artificial Sequence
  Synthetic oligonucleotide; TTG chr2 60491730 60491751 60491735 60491730 -
acgtgggcagtcagcccagcct

SEQ ID NO: 220991 - DNA, 22 bp, Artificial Sequence
  Synthetic oligonucleotide; CTG chr2 60491707 60491728 60491712 60491707 -
gagaactgaggggagcatttct

SEQ ID NO: 220992 - DNA, 22 bp, Artificial Sequence
  Synthetic oligonucleotide; CTG chr2 60491699 60491720 60491704 60491699 -
aggggagcatttctttcttttt

SEQ ID NO: 220993 - DNA, 22 bp, Artificial Sequence
  Synthetic oligonucleotide; TTT chr2 60491687 60491708 60491692 60491687 -
ctttcttttttttttttttctt

SEQ ID NO: 220994 - DNA, 22 bp, Artificial Sequence
  Synthetic oligonucleotide; TTC chr2 60491686 60491707 60491691 60491686 -
tttcttttttttttttttcttt

SEQ ID NO: 220995 - DNA, 22 bp, Artificial Sequence
  Synthetic oligonucleotide; CTT chr2 60491684 60491705 60491689 60491684 -
tcttttttttttttttcttttt

SEQ ID NO: 220996 - DNA, 22 bp, Artificial Sequence
  Synthetic oligonucleotide; TTT chr2 60491683 60491704 60491688 60491683 -
cttttttttttttttctttttt

SEQ ID NO: 220997 - DNA, 22 bp, Artificial Sequence
  Synthetic oligonucleotide; TTC chr2 60491682 60491703 60491687 60491682 -
ttttttttttttttcttttttc

SEQ ID NO: 220998 - DNA, 22 bp, Artificial Sequence
  Synthetic oligonucleotide; CTT chr2 60491680 60491701 60491685 60491680 -
ttttttttttttcttttttctt

SEQ ID NO: 220999 - DNA, 22 bp, Artificial Sequence
  Synthetic oligonucleotide; TTT chr2 60491679 60491700 60491684 60491679 -
tttttttttttcttttttcttt

SEQ ID NO: 221000 - DNA, 22 bp, Artificial Sequence
  Synthetic oligonucleotide; TTT chr2 60491678 60491699 60491683 60491678 -
ttttttttttcttttttctttt

SEQ ID NO: 221001 - DNA, 22 bp, Artificial Sequence
  Synthetic oligonucleotide; TTT chr2 60491677 60491698 60491682 60491677 -
tttttttttcttttttcttttt

SEQ ID NO: 221002 - DNA, 22 bp, Artificial Sequence
  Synthetic oligonucleotide; TTT chr2 60491676 60491697 60491681 60491676 -
ttttttttcttttttctttttt

SEQ ID NO: 221003 - DNA, 22 bp, Artificial Sequence
  Synthetic oligonucleotide; TTT chr2 60491675 60491696 60491680 60491675 -
tttttttcttttttcttttttt

SEQ ID NO: 221004 - DNA, 22 bp, Artificial Sequence
  Synthetic oligonucleotide; TTT chr2 60491674 60491695 60491679 60491674 -
ttttttcttttttctttttttg

SEQ ID NO: 221005 - DNA, 22 bp, Artificial Sequence
  Synthetic oligonucleotide; TTT chr2 60491673 60491694 60491678 60491673 -
tttttcttttttctttttttgg

SEQ ID NO: 221006 - DNA, 22 bp, Artificial Sequence
  Synthetic oligonucleotide; TTT chr2 60491672 60491693 60491677 60491672 -
ttttcttttttctttttttggt

SEQ ID NO: 221007 - DNA, 22 bp, Artificial Sequence
  Synthetic oligonucleotide; TTT chr2 60491671 60491692 60491676 60491671 -
tttcttttttctttttttggtg

SEQ ID NO: 221008 - DNA, 22 bp, Artificial Sequence
  Synthetic oligonucleotide; TTT chr2 60491670 60491691 60491675 60491670 -
ttcttttttctttttttggtga

SEQ ID NO: 221009 - DNA, 22 bp, Artificial Sequence
  Synthetic oligonucleotide; TTT chr2 60491669 60491690 60491674 60491669 -
tcttttttctttttttggtgag

SEQ ID NO: 221010 - DNA, 22 bp, Artificial Sequence
  Synthetic oligonucleotide; TTT chr2 60491668 60491689 60491673 60491668 -
cttttttctttttttggtgaga

SEQ ID NO: 221011 - DNA, 22 bp, Artificial Sequence
  Synthetic oligonucleotide; TTC chr2 60491667 60491688 60491672 60491667 -
ttttttctttttttggtgagac

SEQ ID NO: 221012 - DNA, 22 bp, Artificial Sequence
  Synthetic oligonucleotide; CTT chr2 60491665 60491686 60491670 60491665 -
ttttctttttttggtgagacgg

SEQ ID NO: 221013 - DNA, 22 bp, Artificial Sequence
  Synthetic oligonucleotide; TTT chr2 60491664 60491685 60491669 60491664 -
tttctttttttggtgagacgga

SEQ ID NO: 221014 - DNA, 22 bp, Artificial Sequence
  Synthetic oligonucleotide; TTT chr2 60491663 60491684 60491668 60491663 -
ttctttttttggtgagacggag

SEQ ID NO: 221015 - DNA, 22 bp, Artificial Sequence
  Synthetic oligonucleotide; TTT chr2 60491662 60491683 60491667 60491662 -
tctttttttggtgagacggaga

SEQ ID NO: 221016 - DNA, 22 bp, Artificial Sequence
  Synthetic oligonucleotide; TTT chr2 60491661 60491682 60491666 60491661 -
ctttttttggtgagacggagat

SEQ ID NO: 221017 - DNA, 22 bp, Artificial Sequence
  Synthetic oligonucleotide; TTC chr2 60491660 60491681 60491665 60491660 -
tttttttggtgagacggagatt

SEQ ID NO: 221018 - DNA, 22 bp, Artificial Sequence
  Synthetic oligonucleotide; CTT chr2 60491658 60491679 60491663 60491658 -
tttttggtgagacggagattta

SEQ ID NO: 221019 - DNA, 22 bp, Artificial Sequence
  Synthetic oligonucleotide; TTT chr2 60491657 60491678 60491662 60491657 -
ttttggtgagacggagatttac

SEQ ID NO: 221020 - DNA, 22 bp, Artificial Sequence
  Synthetic oligonucleotide; TTT chr2 60491656 60491677 60491661 60491656 -
tttggtgagacggagatttact

SEQ ID NO: 221021 - DNA, 22 bp, Artificial Sequence
  Synthetic oligonucleotide; TTT chr2 60491655 60491676 60491660 60491655 -
ttggtgagacggagatttactc

SEQ ID NO: 221022 - DNA, 22 bp, Artificial Sequence
  Synthetic oligonucleotide; TTT chr2 60491654 60491675 60491659 60491654 -
tggtgagacggagatttactct

SEQ ID NO: 221023 - DNA, 22 bp, Artificial Sequence
  Synthetic oligonucleotide; TTT chr2 60491653 60491674 60491658 60491653 -
ggtgagacggagatttactctt

SEQ ID NO: 221024 - DNA, 22 bp, Artificial Sequence
  Synthetic oligonucleotide; TTG chr2 60491652 60491673 60491657 60491652 -
gtgagacggagatttactcttg

SEQ ID NO: 221025 - DNA, 22 bp, Artificial Sequence
  Synthetic oligonucleotide; TTT chr2 60491637 60491658 60491642 60491637 -
actcttgttgcccgggctggaa

SEQ ID NO: 221026 - DNA, 22 bp, Artificial Sequence
  Synthetic oligonucleotide; TTA chr2 60491636 60491657 60491641 60491636 -
ctcttgttgcccgggctggaat

SEQ ID NO: 221027 - DNA, 22 bp, Artificial Sequence
  Synthetic oligonucleotide; CTC chr2 60491633 60491654 60491638 60491633 -
ttgttgcccgggctggaatgca

SEQ ID NO: 221028 - DNA, 22 bp, Artificial Sequence
  Synthetic oligonucleotide; CTT chr2 60491631 60491652 60491636 60491631 -
gttgcccgggctggaatgcaat

SEQ ID NO: 221029 - DNA, 22 bp, Artificial Sequence
  Synthetic oligonucleotide; TTG chr2 60491630 60491651 60491635 60491630 -
ttgcccgggctggaatgcaatg

SEQ ID NO: 221030 - DNA, 22 bp, Artificial Sequence
  Synthetic oligonucleotide; TTG chr2 60491627 60491648 60491632 60491627 -
cccgggctggaatgcaatggcg

SEQ ID NO: 221031 - DNA, 22 bp, Artificial Sequence
  Synthetic oligonucleotide; CTG chr2 60491618 60491639 60491623 60491618 -
gaatgcaatggcgcgatctcgg

SEQ ID NO: 221032 - DNA, 22 bp, Artificial Sequence
  Synthetic oligonucleotide; CTC chr2 60491598 60491619 60491603 60491598 -
ggctcactgcatcttctgcctc

SEQ ID NO: 221033 - DNA, 22 bp, Artificial Sequence
  Synthetic oligonucleotide; CTC chr2 60491593 60491614 60491598 60491593 -
actgcatcttctgcctcccagg

SEQ ID NO: 221034 - DNA, 22 bp, Artificial Sequence
  Synthetic oligonucleotide; CTG chr2 60491589 60491610 60491594 60491589 -
catcttctgcctcccaggttca

SEQ ID NO: 221035 - DNA, 22 bp, Artificial Sequence
  Synthetic oligonucleotide; CTT chr2 60491583 60491604 60491588 60491583 -
ctgcctcccaggttcaagcgat

SEQ ID NO: 221036 - DNA, 22 bp, Artificial Sequence
  Synthetic oligonucleotide; TTC chr2 60491582 60491603 60491587 60491582 -
tgcctcccaggttcaagcgatc

SEQ ID NO: 221037 - DNA, 22 bp, Artificial Sequence
  Synthetic oligonucleotide; CTG chr2 60491580 60491601 60491585 60491580 -
cctcccaggttcaagcgatctc

SEQ ID NO: 221038 - DNA, 22 bp, Artificial Sequence
  Synthetic oligonucleotide; CTC chr2 60491576 60491597 60491581 60491576 -
ccaggttcaagcgatctcctgc

SEQ ID NO: 221039 - DNA, 22 bp, Artificial Sequence
  Synthetic oligonucleotide; TTC chr2 60491568 60491589 60491573 60491568 -
aagcgatctcctgcctcagcct

SEQ ID NO: 221040 - DNA, 22 bp, Artificial Sequence
  Synthetic oligonucleotide; CTC chr2 60491558 60491579 60491563 60491558 -
ctgcctcagcctcccgagtagc

SEQ ID NO: 221041 - DNA, 22 bp, Artificial Sequence
  Synthetic oligonucleotide; CTG chr2 60491555 60491576 60491560 60491555 -
cctcagcctcccgagtagctga

SEQ ID NO: 221042 - DNA, 22 bp, Artificial Sequence
  Synthetic oligonucleotide; CTC chr2 60491551 60491572 60491556 60491551 -
agcctcccgagtagctgagatt

SEQ ID NO: 221043 - DNA, 22 bp, Artificial Sequence
  Synthetic oligonucleotide; CTC chr2 60491545 60491566 60491550 60491545 -
ccgagtagctgagattacaggc

SEQ ID NO: 221044 - DNA, 22 bp, Artificial Sequence
  Synthetic oligonucleotide; CTG chr2 60491534 60491555 60491539 60491534 -
agattacaggcatgtattacca

SEQ ID NO: 221045 - DNA, 22 bp, Artificial Sequence
  Synthetic oligonucleotide; TTA chr2 60491528 60491549 60491533 60491528 -
caggcatgtattaccatgcccg

SEQ ID NO: 221046 - DNA, 22 bp, Artificial Sequence
  Synthetic oligonucleotide; TTA chr2 60491515 60491536 60491520 60491515 -
ccatgcccggctaattttgtat

SEQ ID NO: 221047 - DNA, 22 bp, Artificial Sequence
  Synthetic oligonucleotide; CTA chr2 60491502 60491523 60491507 60491502 -
attttgtatttttagtagagac

SEQ ID NO: 221048 - DNA, 22 bp, Artificial Sequence
  Synthetic oligonucleotide; TTT chr2 60491498 60491519 60491503 60491498 -
tgtatttttagtagagacgggg

SEQ ID NO: 221049 - DNA, 22 bp, Artificial Sequence
  Synthetic oligonucleotide; TTT chr2 60491497 60491518 60491502 60491497 -
gtatttttagtagagacggggt

SEQ ID NO: 221050 - DNA, 22 bp, Artificial Sequence
  Synthetic oligonucleotide; TTG chr2 60491496 60491517 60491501 60491496 -
tatttttagtagagacggggtt

SEQ ID NO: 221051 - DNA, 22 bp, Artificial Sequence
  Synthetic oligonucleotide; TTT chr2 60491491 60491512 60491496 60491491 -
ttagtagagacggggtttcact

SEQ ID NO: 221052 - DNA, 22 bp, Artificial Sequence
  Synthetic oligonucleotide; TTT chr2 60491490 60491511 60491495 60491490 -
tagtagagacggggtttcactg

SEQ ID NO: 221053 - DNA, 22 bp, Artificial Sequence
  Synthetic oligonucleotide; TTT chr2 60491489 60491510 60491494 60491489 -
agtagagacggggtttcactgt

SEQ ID NO: 221054 - DNA, 22 bp, Artificial Sequence
  Synthetic oligonucleotide; TTA chr2 60491488 60491509 60491493 60491488 -
gtagagacggggtttcactgtg

SEQ ID NO: 221055 - DNA, 22 bp, Artificial Sequence
  Synthetic oligonucleotide; TTT chr2 60491473 60491494 60491478 60491473 -
cactgtgttgtccaaactgatc

SEQ ID NO: 221056 - DNA, 22 bp, Artificial Sequence
  Synthetic oligonucleotide; TTC chr2 60491472 60491493 60491477 60491472 -
actgtgttgtccaaactgatct

SEQ ID NO: 221057 - DNA, 22 bp, Artificial Sequence
  Synthetic oligonucleotide; CTG chr2 60491468 60491489 60491473 60491468 -
tgttgtccaaactgatcttgaa

SEQ ID NO: 221058 - DNA, 22 bp, Artificial Sequence
  Synthetic oligonucleotide; TTG chr2 60491463 60491484 60491468 60491463 -
tccaaactgatcttgaactcct

SEQ ID NO: 221059 - DNA, 22 bp, Artificial Sequence
  Synthetic oligonucleotide; CTG chr2 60491454 60491475 60491459 60491454 -
atcttgaactcctgacctcagg

SEQ ID NO: 221060 - DNA, 22 bp, Artificial Sequence
  Synthetic oligonucleotide; CTT chr2 60491449 60491470 60491454 60491449 -
gaactcctgacctcaggtgatc

SEQ ID NO: 221061 - DNA, 22 bp, Artificial Sequence
  Synthetic oligonucleotide; TTG chr2 60491448 60491469 60491453 60491448 -
aactcctgacctcaggtgatcc

SEQ ID NO: 221062 - DNA, 22 bp, Artificial Sequence
  Synthetic oligonucleotide; CTC chr2 60491443 60491464 60491448 60491443 -
ctgacctcaggtgatcctcctg

SEQ ID NO: 221063 - DNA, 22 bp, Artificial Sequence
  Synthetic oligonucleotide; CTG chr2 60491440 60491461 60491445 60491440 -
acctcaggtgatcctcctgccc

SEQ ID NO: 221064 - DNA, 22 bp, Artificial Sequence
  Synthetic oligonucleotide; CTC chr2 60491435 60491456 60491440 60491435 -
aggtgatcctcctgccccggcc

SEQ ID NO: 221065 - DNA, 22 bp, Artificial Sequence
  Synthetic oligonucleotide; CTC chr2 60491424 60491445 60491429 60491424 -
ctgccccggcctcccaaagtgc

SEQ ID NO: 221066 - DNA, 22 bp, Artificial Sequence
  Synthetic oligonucleotide; CTG chr2 60491421 60491442 60491426 60491421 -
ccccggcctcccaaagtgctgg

SEQ ID NO: 221067 - DNA, 22 bp, Artificial Sequence
  Synthetic oligonucleotide; CTC chr2 60491411 60491432 60491416 60491411 -
ccaaagtgctgggattacaggt

SEQ ID NO: 221068 - DNA, 22 bp, Artificial Sequence
  Synthetic oligonucleotide; CTG chr2 60491400 60491421 60491405 60491400 -
ggattacaggtgtgagccacag

SEQ ID NO: 221069 - DNA, 22 bp, Artificial Sequence
  Synthetic oligonucleotide; TTA chr2 60491394 60491415 60491399 60491394 -
caggtgtgagccacagcgcctg

SEQ ID NO: 221070 - DNA, 22 bp, Artificial Sequence
  Synthetic oligonucleotide; CTG chr2 60491372 60491393 60491377 60491372 -
gccgggagcatttcaaatgata

SEQ ID NO: 221071 - DNA, 22 bp, Artificial Sequence
  Synthetic oligonucleotide; TTT chr2 60491359 60491380 60491364 60491359 -
caaatgatagttaggacttcct

SEQ ID NO: 221072 - DNA, 22 bp, Artificial Sequence
  Synthetic oligonucleotide; TTC chr2 60491358 60491379 60491363 60491358 -
aaatgatagttaggacttcctt

SEQ ID NO: 221073 - DNA, 22 bp, Artificial Sequence
  Synthetic oligonucleotide; TTA chr2 60491346 60491367 60491351 60491346 -
ggacttccttttactgtactta

SEQ ID NO: 221074 - DNA, 22 bp, Artificial Sequence
  Synthetic oligonucleotide; CTT chr2 60491340 60491361 60491345 60491340 -
ccttttactgtacttaatagct

SEQ ID NO: 221075 - DNA, 22 bp, Artificial Sequence
  Synthetic oligonucleotide; TTC chr2 60491339 60491360 60491344 60491339 -
cttttactgtacttaatagctg

SEQ ID NO: 221076 - DNA, 22 bp, Artificial Sequence
  Synthetic oligonucleotide; CTT chr2 60491336 60491357 60491341 60491336 -
ttactgtacttaatagctgaag

SEQ ID NO: 221077 - DNA, 22 bp, Artificial Sequence
  Synthetic oligonucleotide; TTT chr2 60491335 60491356 60491340 60491335 -
tactgtacttaatagctgaagg

SEQ ID NO: 221078 - DNA, 22 bp, Artificial Sequence
  Synthetic oligonucleotide; TTT chr2 60491334 60491355 60491339 60491334 -
actgtacttaatagctgaaggg

SEQ ID NO: 221079 - DNA, 22 bp, Artificial Sequence
  Synthetic oligonucleotide; TTA chr2 60491333 60491354 60491338 60491333 -
ctgtacttaatagctgaagggg

SEQ ID NO: 221080 - DNA, 22 bp, Artificial Sequence
  Synthetic oligonucleotide; CTG chr2 60491330 60491351 60491335 60491330 -
tacttaatagctgaagggggcc

SEQ ID NO: 221081 - DNA, 22 bp, Artificial Sequence
  Synthetic oligonucleotide; CTT chr2 60491325 60491346 60491330 60491325 -
aatagctgaagggggccaaaag

SEQ ID NO: 221082 - DNA, 22 bp, Artificial Sequence
  Synthetic oligonucleotide; TTA chr2 60491324 60491345 60491329 60491324 -
atagctgaagggggccaaaagt

SEQ ID NO: 221083 - DNA, 22 bp, Artificial Sequence
  Synthetic oligonucleotide; CTG chr2 60491317 60491338 60491322 60491317 -
aagggggccaaaagtgtccatg

SEQ ID NO: 221084 - DNA, 22 bp, Artificial Sequence
  Synthetic oligonucleotide; TTT chr2 60491292 60491313 60491297 60491292 -
gctgccctctggcatcaaaatg

SEQ ID NO: 221085 - DNA, 22 bp, Artificial Sequence
  Synthetic oligonucleotide; TTG chr2 60491291 60491312 60491296 60491291 -
ctgccctctggcatcaaaatga

SEQ ID NO: 221086 - DNA, 22 bp, Artificial Sequence
  Synthetic oligonucleotide; CTG chr2 60491288 60491309 60491293 60491288 -
ccctctggcatcaaaatgaggt

SEQ ID NO: 221087 - DNA, 22 bp, Artificial Sequence
  Synthetic oligonucleotide; CTC chr2 60491283 60491304 60491288 60491283 -
tggcatcaaaatgaggtccttt

SEQ ID NO: 221088 - DNA, 22 bp, Artificial Sequence
  Synthetic oligonucleotide; CTG chr2 60491281 60491302 60491286 60491281 -
gcatcaaaatgaggtccttttt

SEQ ID NO: 221089 - DNA, 22 bp, Artificial Sequence
  Synthetic oligonucleotide; CTT chr2 60491262 60491283 60491267 60491262 -
tttagtagtgctgcatttaaaa

SEQ ID NO: 221090 - DNA, 22 bp, Artificial Sequence
  Synthetic oligonucleotide; TTT chr2 60491261 60491282 60491266 60491261 -
ttagtagtgctgcatttaaaac

SEQ ID NO: 221091 - DNA, 22 bp, Artificial Sequence
  Synthetic oligonucleotide; TTT chr2 60491260 60491281 60491265 60491260 -
tagtagtgctgcatttaaaaca

SEQ ID NO: 221092 - DNA, 22 bp, Artificial Sequence
  Synthetic oligonucleotide; TTT chr2 60491259 60491280 60491264 60491259 -
agtagtgctgcatttaaaacag

SEQ ID NO: 221093 - DNA, 22 bp, Artificial Sequence
  Synthetic oligonucleotide; TTA chr2 60491258 60491279 60491263 60491258 -
gtagtgctgcatttaaaacagc

SEQ ID NO: 221094 - DNA, 22 bp, Artificial Sequence
  Synthetic oligonucleotide; CTG chr2 60491249 60491270 60491254 60491249 -
catttaaaacagcattaagaat

SEQ ID NO: 221095 - DNA, 22 bp, Artificial Sequence
  Synthetic oligonucleotide; TTT chr2 60491244 60491265 60491249 60491244 -
aaaacagcattaagaatacgtt

SEQ ID NO: 221096 - DNA, 22 bp, Artificial Sequence
  Synthetic oligonucleotide; TTA chr2 60491243 60491264 60491248 60491243 -
aaacagcattaagaatacgttt

SEQ ID NO: 221097 - DNA, 22 bp, Artificial Sequence
  Synthetic oligonucleotide; TTA chr2 60491232 60491253 60491237 60491232 -
agaatacgtttttagaacttag

SEQ ID NO: 221098 - DNA, 22 bp, Artificial Sequence
  Synthetic oligonucleotide; TTT chr2 60491221 60491242 60491226 60491221 -
ttagaacttagctttttgcatt

SEQ ID NO: 221099 - DNA, 22 bp, Artificial Sequence
  Synthetic oligonucleotide; TTT chr2 60491220 60491241 60491225 60491220 -
tagaacttagctttttgcattg

SEQ ID NO: 221100 - DNA, 22 bp, Artificial Sequence
  Synthetic oligonucleotide; TTT chr2 60491219 60491240 60491224 60491219 -
agaacttagctttttgcattga

SEQ ID NO: 221101 - DNA, 22 bp, Artificial Sequence
  Synthetic oligonucleotide; TTA chr2 60491218 60491239 60491223 60491218 -
gaacttagctttttgcattgag

SEQ ID NO: 221102 - DNA, 22 bp, Artificial Sequence
  Synthetic oligonucleotide; CTT chr2 60491212 60491233 60491217 60491212 -
agctttttgcattgaggatgcg

SEQ ID NO: 221103 - DNA, 22 bp, Artificial Sequence
  Synthetic oligonucleotide; TTA chr2 60491211 60491232 60491216 60491211 -
gctttttgcattgaggatgcgc

SEQ ID NO: 221104 - DNA, 22 bp, Artificial Sequence
  Synthetic oligonucleotide; CTT chr2 60491207 60491228 60491212 60491207 -
tttgcattgaggatgcgcaggt

SEQ ID NO: 221105 - DNA, 22 bp, Artificial Sequence
  Synthetic oligonucleotide; TTT chr2 60491206 60491227 60491211 60491206 -
ttgcattgaggatgcgcaggtg

SEQ ID NO: 221106 - DNA, 22 bp, Artificial Sequence
  Synthetic oligonucleotide; TTT chr2 60491205 60491226 60491210 60491205 -
tgcattgaggatgcgcaggtgg

SEQ ID NO: 221107 - DNA, 22 bp, Artificial Sequence
  Synthetic oligonucleotide; TTT chr2 60491204 60491225 60491209 60491204 -
gcattgaggatgcgcaggtggc

SEQ ID NO: 221108 - DNA, 22 bp, Artificial Sequence
  Synthetic oligonucleotide; TTG chr2 60491203 60491224 60491208 60491203 -
cattgaggatgcgcaggtggct

SEQ ID NO: 221109 - DNA, 22 bp, Artificial Sequence
  Synthetic oligonucleotide; TTG chr2 60491198 60491219 60491203 60491198 -
aggatgcgcaggtggctgagac

SEQ ID NO: 221110 - DNA, 22 bp, Artificial Sequence
  Synthetic oligonucleotide; CTG chr2 60491180 60491201 60491185 60491180 -
agactaacttctttgcagatga

SEQ ID NO: 221111 - DNA, 22 bp, Artificial Sequence
  Synthetic oligonucleotide; CTA chr2 60491174 60491195 60491179 60491174 -
acttctttgcagatgaccatgg

SEQ ID NO: 221112 - DNA, 22 bp, Artificial Sequence
  Synthetic oligonucleotide; CTT chr2 60491170 60491191 60491175 60491170 -
ctttgcagatgaccatggttga

SEQ ID NO: 221113 - DNA, 22 bp, Artificial Sequence
  Synthetic oligonucleotide; TTC chr2 60491169 60491190 60491174 60491169 -
tttgcagatgaccatggttgaa

SEQ ID NO: 221114 - DNA, 22 bp, Artificial Sequence
  Synthetic oligonucleotide; CTT chr2 60491167 60491188 60491172 60491167 -
tgcagatgaccatggttgaaag

SEQ ID NO: 221115 - DNA, 22 bp, Artificial Sequence
  Synthetic oligonucleotide; TTT chr2 60491166 60491187 60491171 60491166 -
gcagatgaccatggttgaaagt

SEQ ID NO: 221116 - DNA, 22 bp, Artificial Sequence
  Synthetic oligonucleotide; TTG chr2 60491165 60491186 60491170 60491165 -
cagatgaccatggttgaaagtc

SEQ ID NO: 221117 - DNA, 22 bp, Artificial Sequence
  Synthetic oligonucleotide; TTG chr2 60491149 60491170 60491154 60491149 -
aaagtcagctatagagttgcac

SEQ ID NO: 221118 - DNA, 22 bp, Artificial Sequence
  Synthetic oligonucleotide; CTA chr2 60491138 60491159 60491143 60491138 -
tagagttgcacaaccacgtagt

SEQ ID NO: 221119 - DNA, 22 bp, Artificial Sequence
  Synthetic oligonucleotide; TTG chr2 60491130 60491151 60491135 60491130 -
cacaaccacgtagttgggcttc

SEQ ID NO: 221120 - DNA, 22 bp, Artificial Sequence
  Synthetic oligonucleotide; TTG chr2 60491114 60491135 60491119 60491114 -
ggcttcacatatagaagatgtt

SEQ ID NO: 221121 - DNA, 22 bp, Artificial Sequence
  Synthetic oligonucleotide; CTT chr2 60491109 60491130 60491114 60491109 -
cacatatagaagatgttgtcat

SEQ ID NO: 221122 - DNA, 22 bp, Artificial Sequence
  Synthetic oligonucleotide; TTC chr2 60491108 60491129 60491113 60491108 -
acatatagaagatgttgtcatt

SEQ ID NO: 221123 - DNA, 22 bp, Artificial Sequence
  Synthetic oligonucleotide; TTG chr2 60491091 60491112 60491096 60491091 -
tcattttttggtaactctgtca

SEQ ID NO: 221124 - DNA, 22 bp, Artificial Sequence
  Synthetic oligonucleotide; TTT chr2 60491085 60491106 60491090 60491085 -
tttggtaactctgtcagacttt

SEQ ID NO: 221125 - DNA, 22 bp, Artificial Sequence
  Synthetic oligonucleotide; TTT chr2 60491084 60491105 60491089 60491084 -
ttggtaactctgtcagacttta

SEQ ID NO: 221126 - DNA, 22 bp, Artificial Sequence
  Synthetic oligonucleotide; TTT chr2 60491083 60491104 60491088 60491083 -
tggtaactctgtcagactttac

SEQ ID NO: 221127 - DNA, 22 bp, Artificial Sequence
  Synthetic oligonucleotide; TTT chr2 60491082 60491103 60491087 60491082 -
ggtaactctgtcagactttacc

SEQ ID NO: 221128 - DNA, 22 bp, Artificial Sequence
  Synthetic oligonucleotide; TTG chr2 60491081 60491102 60491086 60491081 -
gtaactctgtcagactttacca

SEQ ID NO: 221129 - DNA, 22 bp, Artificial Sequence
  Synthetic oligonucleotide; CTC chr2 60491074 60491095 60491079 60491074 -
tgtcagactttaccaacctggc

SEQ ID NO: 221130 - DNA, 22 bp, Artificial Sequence
  Synthetic oligonucleotide; CTG chr2 60491072 60491093 60491077 60491072 -
tcagactttaccaacctggcgc

SEQ ID NO: 221131 - DNA, 22 bp, Artificial Sequence
  Synthetic oligonucleotide; CTT chr2 60491064 60491085 60491069 60491064 -
taccaacctggcgcacagtctg

SEQ ID NO: 221132 - DNA, 22 bp, Artificial Sequence
  Synthetic oligonucleotide; TTT chr2 60491063 60491084 60491068 60491063 -
accaacctggcgcacagtctgg

SEQ ID NO: 221133 - DNA, 22 bp, Artificial Sequence
  Synthetic oligonucleotide; TTA chr2 60491062 60491083 60491067 60491062 -
ccaacctggcgcacagtctggt

SEQ ID NO: 221134 - DNA, 22 bp, Artificial Sequence
  Synthetic oligonucleotide; CTG chr2 60491054 60491075 60491059 60491054 -
gcgcacagtctggttggcacat

SEQ ID NO: 221135 - DNA, 22 bp, Artificial Sequence
  Synthetic oligonucleotide; CTG chr2 60491042 60491063 60491047 60491042 -
gttggcacataaacttcacatt

SEQ ID NO: 221136 - DNA, 22 bp, Artificial Sequence
  Synthetic oligonucleotide; TTG chr2 60491038 60491059 60491043 60491038 -
gcacataaacttcacatttgct

SEQ ID NO: 221137 - DNA, 22 bp, Artificial Sequence
  Synthetic oligonucleotide; CTT chr2 60491026 60491047 60491031 60491026 -
cacatttgctcttctccagggt

SEQ ID NO: 221138 - DNA, 22 bp, Artificial Sequence
  Synthetic oligonucleotide; TTC chr2 60491025 60491046 60491030 60491025 -
acatttgctcttctccagggtg

SEQ ID NO: 221139 - DNA, 22 bp, Artificial Sequence
  Synthetic oligonucleotide; TTT chr2 60491019 60491040 60491024 60491019 -
gctcttctccagggtgtggggt

SEQ ID NO: 221140 - DNA, 22 bp, Artificial Sequence
  Synthetic oligonucleotide; TTG chr2 60491018 60491039 60491023 60491018 -
ctcttctccagggtgtggggtg

SEQ ID NO: 221141 - DNA, 22 bp, Artificial Sequence
  Synthetic oligonucleotide; CTC chr2 60491015 60491036 60491020 60491015 -
ttctccagggtgtggggtggct

SEQ ID NO: 221142 - DNA, 22 bp, Artificial Sequence
  Synthetic oligonucleotide; CTT chr2 60491013 60491034 60491018 60491013 -
ctccagggtgtggggtggctgt

SEQ ID NO: 221143 - DNA, 22 bp, Artificial Sequence
  Synthetic oligonucleotide; TTC chr2 60491012 60491033 60491017 60491012 -
tccagggtgtggggtggctgtt

SEQ ID NO: 221144 - DNA, 22 bp, Artificial Sequence
  Synthetic oligonucleotide; CTC chr2 60491010 60491031 60491015 60491010 -
cagggtgtggggtggctgttta

SEQ ID NO: 221145 - DNA, 22 bp, Artificial Sequence
  Synthetic oligonucleotide; CTG chr2 60490992 60491013 60490997 60490992 -
tttaaagagggtggatattcat

SEQ ID NO: 221146 - DNA, 22 bp, Artificial Sequence
  Synthetic oligonucleotide; TTT chr2 60490989 60491010 60490994 60490989 -
aaagagggtggatattcatgct

SEQ ID NO: 221147 - DNA, 22 bp, Artificial Sequence
  Synthetic oligonucleotide; TTA chr2 60490988 60491009 60490993 60490988 -
aagagggtggatattcatgcta

SEQ ID NO: 221148 - DNA, 22 bp, Artificial Sequence
  Synthetic oligonucleotide; TTC chr2 60490972 60490993 60490977 60490972 -
atgctaatctttgtgtagcata

SEQ ID NO: 221149 - DNA, 22 bp, Artificial Sequence
  Synthetic oligonucleotide; CTA chr2 60490966 60490987 60490971 60490966 -
atctttgtgtagcataacatgt

SEQ ID NO: 221150 - DNA, 22 bp, Artificial Sequence
  Synthetic oligonucleotide; CTT chr2 60490961 60490982 60490966 60490961 -
tgtgtagcataacatgttactg

SEQ ID NO: 221151 - DNA, 22 bp, Artificial Sequence
  Synthetic oligonucleotide; TTT chr2 60490960 60490981 60490965 60490960 -
gtgtagcataacatgttactgc

SEQ ID NO: 221152 - DNA, 22 bp, Artificial Sequence
  Synthetic oligonucleotide; TTG chr2 60490959 60490980 60490964 60490959 -
tgtagcataacatgttactgca

SEQ ID NO: 221153 - DNA, 22 bp, Artificial Sequence
  Synthetic oligonucleotide; TTA chr2 60490942 60490963 60490947 60490942 -
ctgcaacttgcttttttttttt

SEQ ID NO: 221154 - DNA, 22 bp, Artificial Sequence
  Synthetic oligonucleotide; CTG chr2 60490939 60490960 60490944 60490939 -
caacttgcttttttttttttat

SEQ ID NO: 221155 - DNA, 22 bp, Artificial Sequence
  Synthetic oligonucleotide; CTT chr2 60490933 60490954 60490938 60490933 -
gcttttttttttttatctgaaa

SEQ ID NO: 221156 - DNA, 22 bp, Artificial Sequence
  Synthetic oligonucleotide; TTG chr2 60490932 60490953 60490937 60490932 -
cttttttttttttatctgaaag

SEQ ID NO: 221157 - DNA, 22 bp, Artificial Sequence
  Synthetic oligonucleotide; CTT chr2 60490929 60490950 60490934 60490929 -
ttttttttttatctgaaagttc

SEQ ID NO: 221158 - DNA, 22 bp, Artificial Sequence
  Synthetic oligonucleotide; TTT chr2 60490928 60490949 60490933 60490928 -
tttttttttatctgaaagttca

SEQ ID NO: 221159 - DNA, 22 bp, Artificial Sequence
  Synthetic oligonucleotide; TTT chr2 60490927 60490948 60490932 60490927 -
ttttttttatctgaaagttcaa

SEQ ID NO: 221160 - DNA, 22 bp, Artificial Sequence
  Synthetic oligonucleotide; TTT chr2 60490926 60490947 60490931 60490926 -
tttttttatctgaaagttcaag

SEQ ID NO: 221161 - DNA, 22 bp, Artificial Sequence
  Synthetic oligonucleotide; TTT chr2 60490925 60490946 60490930 60490925 -
ttttttatctgaaagttcaagt

SEQ ID NO: 221162 - DNA, 22 bp, Artificial Sequence
  Synthetic oligonucleotide; TTT chr2 60490924 60490945 60490929 60490924 -
tttttatctgaaagttcaagta

SEQ ID NO: 221163 - DNA, 22 bp, Artificial Sequence
  Synthetic oligonucleotide; TTT chr2 60490923 60490944 60490928 60490923 -
ttttatctgaaagttcaagtag

SEQ ID NO: 221164 - DNA, 22 bp, Artificial Sequence
  Synthetic oligonucleotide; TTT chr2 60490922 60490943 60490927 60490922 -
tttatctgaaagttcaagtaga

SEQ ID NO: 221165 - DNA, 22 bp, Artificial Sequence
  Synthetic oligonucleotide; TTT chr2 60490921 60490942 60490926 60490921 -
ttatctgaaagttcaagtagat

SEQ ID NO: 221166 - DNA, 22 bp, Artificial Sequence
  Synthetic oligonucleotide; TTT chr2 60490920 60490941 60490925 60490920 -
tatctgaaagttcaagtagata

SEQ ID NO: 221167 - DNA, 22 bp, Artificial Sequence
  Synthetic oligonucleotide; TTT chr2 60490919 60490940 60490924 60490919 -
atctgaaagttcaagtagatat

SEQ ID NO: 221168 - DNA, 22 bp, Artificial Sequence
  Synthetic oligonucleotide; TTA chr2 60490918 60490939 60490923 60490918 -
tctgaaagttcaagtagatatc

SEQ ID NO: 221169 - DNA, 22 bp, Artificial Sequence
  Synthetic oligonucleotide; CTG chr2 60490914 60490935 60490919 60490914 -
aaagttcaagtagatatcagaa

SEQ ID NO: 221170 - DNA, 22 bp, Artificial Sequence
  Synthetic oligonucleotide; TTC chr2 60490907 60490928 60490912 60490907 -
aagtagatatcagaagggaaat

SEQ ID NO: 221171 - DNA, 22 bp, Artificial Sequence
  Synthetic oligonucleotide; TTT chr2 60490881 60490902 60490886 60490881 -
gtgggtgctaagaaggttaaaa

SEQ ID NO: 221172 - DNA, 22 bp, Artificial Sequence
  Synthetic oligonucleotide; TTG chr2 60490880 60490901 60490885 60490880 -
tgggtgctaagaaggttaaaat

SEQ ID NO: 221173 - DNA, 22 bp, Artificial Sequence
  Synthetic oligonucleotide; CTA chr2 60490871 60490892 60490876 60490871 -
agaaggttaaaattaccatttt

SEQ ID NO: 221174 - DNA, 22 bp, Artificial Sequence
  Synthetic oligonucleotide; TTA chr2 60490862 60490883 60490867 60490862 -
aaattaccattttgaacagaaa

SEQ ID NO: 221175 - DNA, 22 bp, Artificial Sequence
  Synthetic oligonucleotide; TTA chr2 60490856 60490877 60490861 60490856 -
ccattttgaacagaaatgatat

SEQ ID NO: 221176 - DNA, 22 bp, Artificial Sequence
  Synthetic oligonucleotide; TTT chr2 60490850 60490871 60490855 60490850 -
tgaacagaaatgatatttggaa

SEQ ID NO: 221177 - DNA, 22 bp, Artificial Sequence
  Synthetic oligonucleotide; TTT chr2 60490849 60490870 60490854 60490849 -
gaacagaaatgatatttggaaa

SEQ ID NO: 221178 - DNA, 22 bp, Artificial Sequence
  Synthetic oligonucleotide; TTG chr2 60490848 60490869 60490853 60490848 -
aacagaaatgatatttggaaaa

SEQ ID NO: 221179 - DNA, 22 bp, Artificial Sequence
  Synthetic oligonucleotide; TTT chr2 60490832 60490853 60490837 60490832 -
ggaaaaataacttcccttttag

SEQ ID NO: 221180 - DNA, 22 bp, Artificial Sequence
  Synthetic oligonucleotide; TTG chr2 60490831 60490852 60490836 60490831 -
gaaaaataacttcccttttagg

SEQ ID NO: 221181 - DNA, 22 bp, Artificial Sequence
  Synthetic oligonucleotide; CTT chr2 60490819 60490840 60490824 60490819 -
cccttttaggaaggtaaatcag

SEQ ID NO: 221182 - DNA, 22 bp, Artificial Sequence
  Synthetic oligonucleotide; TTC chr2 60490818 60490839 60490823 60490818 -
ccttttaggaaggtaaatcagt

SEQ ID NO: 221183 - DNA, 22 bp, Artificial Sequence
  Synthetic oligonucleotide; CTT chr2 60490814 60490835 60490819 60490814 -
ttaggaaggtaaatcagtcatt

SEQ ID NO: 221184 - DNA, 22 bp, Artificial Sequence
  Synthetic oligonucleotide; TTT chr2 60490813 60490834 60490818 60490813 -
taggaaggtaaatcagtcattt

SEQ ID NO: 221185 - DNA, 22 bp, Artificial Sequence
  Synthetic oligonucleotide; TTT chr2 60490812 60490833 60490817 60490812 -
aggaaggtaaatcagtcattta

SEQ ID NO: 221186 - DNA, 22 bp, Artificial Sequence
  Synthetic oligonucleotide; TTA chr2 60490811 60490832 60490816 60490811 -
ggaaggtaaatcagtcatttat

SEQ ID NO: 221187 - DNA, 22 bp, Artificial Sequence
  Synthetic oligonucleotide; TTT chr2 60490791 60490812 60490796 60490791 -
atatgctatttgttgaattcct

SEQ ID NO: 221188 - DNA, 22 bp, Artificial Sequence
  Synthetic oligonucleotide; TTA chr2 60490790 60490811 60490795 60490790 -
tatgctatttgttgaattccta

SEQ ID NO: 221189 - DNA, 22 bp, Artificial Sequence
  Synthetic oligonucleotide; CTA chr2 60490783 60490804 60490788 60490783 -
tttgttgaattcctagaatata

SEQ ID NO: 221190 - DNA, 22 bp, Artificial Sequence
  Synthetic oligonucleotide; TTT chr2 60490780 60490801 60490785 60490780 -
gttgaattcctagaatatatga

SEQ ID NO: 221191 - DNA, 22 bp, Artificial Sequence
  Synthetic oligonucleotide; TTG chr2 60490779 60490800 60490784 60490779 -
ttgaattcctagaatatatgaa

SEQ ID NO: 221192 - DNA, 22 bp, Artificial Sequence
  Synthetic oligonucleotide; TTG chr2 60490776 60490797 60490781 60490776 -
aattcctagaatatatgaatat

SEQ ID NO: 221193 - DNA, 22 bp, Artificial Sequence
  Synthetic oligonucleotide; TTC chr2 60490771 60490792 60490776 60490771 -
ctagaatatatgaatatcatgt

SEQ ID NO: 221194 - DNA, 22 bp, Artificial Sequence
  Synthetic oligonucleotide; CTA chr2 60490768 60490789 60490773 60490768 -
gaatatatgaatatcatgtcac

SEQ ID NO: 221195 - DNA, 22 bp, Artificial Sequence
  Synthetic oligonucleotide; CTG chr2 60490740 60490761 60490745 60490740 -
tgctggtactttcaaatataat

SEQ ID NO: 221196 - DNA, 22 bp, Artificial Sequence
  Synthetic oligonucleotide; CTG chr2 60490735 60490756 60490740 60490735 -
gtactttcaaatataatagaag

SEQ ID NO: 221197 - DNA, 22 bp, Artificial Sequence
  Synthetic oligonucleotide; CTT chr2 60490729 60490750 60490734 60490729 -
tcaaatataatagaagcaagta

SEQ ID NO: 221198 - DNA, 22 bp, Artificial Sequence
  Synthetic oligonucleotide; TTT chr2 60490728 60490749 60490733 60490728 -
caaatataatagaagcaagtag

SEQ ID NO: 221199 - DNA, 22 bp, Artificial Sequence
  Synthetic oligonucleotide; TTC chr2 60490727 60490748 60490732 60490727 -
aaatataatagaagcaagtagg

SEQ ID NO: 221200 - DNA, 22 bp, Artificial Sequence
  Synthetic oligonucleotide; CTG chr2 60490691 60490712 60490696 60490691 -
tattgaagaaactcattgggaa

SEQ ID NO: 221201 - DNA, 22 bp, Artificial Sequence
  Synthetic oligonucleotide; TTG chr2 60490686 60490707 60490691 60490686 -
aagaaactcattgggaacacat

SEQ ID NO: 221202 - DNA, 22 bp, Artificial Sequence
  Synthetic oligonucleotide; CTC chr2 60490677 60490698 60490682 60490677 -
attgggaacacatgaaattaat

SEQ ID NO: 221203 - DNA, 22 bp, Artificial Sequence
  Synthetic oligonucleotide; TTG chr2 60490673 60490694 60490678 60490673 -
ggaacacatgaaattaattaga

SEQ ID NO: 221204 - DNA, 22 bp, Artificial Sequence
  Synthetic oligonucleotide; TTA chr2 60490657 60490678 60490662 60490657 -
attagaggcatagagggttaac

SEQ ID NO: 221205 - DNA, 22 bp, Artificial Sequence
  Synthetic oligonucleotide; TTA chr2 60490653 60490674 60490658 60490653 -
gaggcatagagggttaaccagc

SEQ ID NO: 221206 - DNA, 22 bp, Artificial Sequence
  Synthetic oligonucleotide; TTA chr2 60490637 60490658 60490642 60490637 -
accagcaatgtaaggcctagat

SEQ ID NO: 221207 - DNA, 22 bp, Artificial Sequence
  Synthetic oligonucleotide; CTA chr2 60490618 60490639 60490623 60490618 -
gatatgagtcagggagtggtgc

SEQ ID NO: 221208 - DNA, 22 bp, Artificial Sequence
  Synthetic oligonucleotide; TTC chr2 60490581 60490602 60490586 60490581 -
tatgaggttggagaaggatgag

SEQ ID NO: 221209 - DNA, 22 bp, Artificial Sequence
  Synthetic oligonucleotide; CTA chr2 60490579 60490600 60490584 60490579 -
tgaggttggagaaggatgagat

SEQ ID NO: 221210 - DNA, 22 bp, Artificial Sequence
  Synthetic oligonucleotide; TTG chr2 60490571 60490592 60490576 60490571 -
gagaaggatgagattgattctt

SEQ ID NO: 221211 - DNA, 22 bp, Artificial Sequence
  Synthetic oligonucleotide; TTG chr2 60490555 60490576 60490560 60490555 -
attcttcttgctaaggtgacta

SEQ ID NO: 221212 - DNA, 22 bp, Artificial Sequence
  Synthetic oligonucleotide; TTC chr2 60490551 60490572 60490556 60490551 -
ttcttgctaaggtgactaggta

SEQ ID NO: 221213 - DNA, 22 bp, Artificial Sequence
  Synthetic oligonucleotide; CTT chr2 60490549 60490570 60490554 60490549 -
cttgctaaggtgactaggtaga

SEQ ID NO: 221214 - DNA, 22 bp, Artificial Sequence
  Synthetic oligonucleotide; TTC chr2 60490548 60490569 60490553 60490548 -
ttgctaaggtgactaggtagac

SEQ ID NO: 221215 - DNA, 22 bp, Artificial Sequence
  Synthetic oligonucleotide; CTT chr2 60490546 60490567 60490551 60490546 -
gctaaggtgactaggtagacct

SEQ ID NO: 221216 - DNA, 22 bp, Artificial Sequence
  Synthetic oligonucleotide; TTG chr2 60490545 60490566 60490550 60490545 -
ctaaggtgactaggtagacctt

SEQ ID NO: 221217 - DNA, 22 bp, Artificial Sequence
  Synthetic oligonucleotide; CTA chr2 60490542 60490563 60490547 60490542 -
aggtgactaggtagaccttcat

SEQ ID NO: 221218 - DNA, 22 bp, Artificial Sequence
  Synthetic oligonucleotide; CTA chr2 60490533 60490554 60490538 60490533 -
ggtagaccttcattgaggcctt

SEQ ID NO: 221219 - DNA, 22 bp, Artificial Sequence
  Synthetic oligonucleotide; CTT chr2 60490523 60490544 60490528 60490523 -
cattgaggccttgaagtatgag

SEQ ID NO: 221220 - DNA, 22 bp, Artificial Sequence
  Synthetic oligonucleotide; TTC chr2 60490522 60490543 60490527 60490522 -
attgaggccttgaagtatgagc

SEQ ID NO: 221221 - DNA, 22 bp, Artificial Sequence
  Synthetic oligonucleotide; TTG chr2 60490518 60490539 60490523 60490518 -
aggccttgaagtatgagcagga

SEQ ID NO: 221222 - DNA, 22 bp, Artificial Sequence
  Synthetic oligonucleotide; CTT chr2 60490511 60490532 60490516 60490511 -
gaagtatgagcaggattccagg

SEQ ID NO: 221223 - DNA, 22 bp, Artificial Sequence
  Synthetic oligonucleotide; TTG chr2 60490510 60490531 60490515 60490510 -
aagtatgagcaggattccagga

SEQ ID NO: 221224 - DNA, 22 bp, Artificial Sequence
  Synthetic oligonucleotide; TTC chr2 60490493 60490514 60490498 60490493 -
caggaggtaagagaagaagaag

SEQ ID NO: 221225 - DNA, 22 bp, Artificial Sequence
  Synthetic oligonucleotide; TTT chr2 60490436 60490457 60490441 60490436 -
ttacttgggcagaatattttcc

SEQ ID NO: 221226 - DNA, 22 bp, Artificial Sequence
  Synthetic oligonucleotide; TTT chr2 60490435 60490456 60490440 60490435 -
tacttgggcagaatattttcct

SEQ ID NO: 221227 - DNA, 22 bp, Artificial Sequence
  Synthetic oligonucleotide; TTT chr2 60490434 60490455 60490439 60490434 -
acttgggcagaatattttcctt

SEQ ID NO: 221228 - DNA, 22 bp, Artificial Sequence
  Synthetic oligonucleotide; TTA chr2 60490433 60490454 60490438 60490433 -
cttgggcagaatattttccttg

SEQ ID NO: 221229 - DNA, 22 bp, Artificial Sequence
  Synthetic oligonucleotide; CTT chr2 60490430 60490451 60490435 60490430 -
gggcagaatattttccttgatg

SEQ ID NO: 221230 - DNA, 22 bp, Artificial Sequence
  Synthetic oligonucleotide; TTG chr2 60490429 60490450 60490434 60490429 -
ggcagaatattttccttgatgg

SEQ ID NO: 221231 - DNA, 22 bp, Artificial Sequence
  Synthetic oligonucleotide; TTT chr2 60490417 60490438 60490422 60490417 -
tccttgatgggtacggggaact

SEQ ID NO: 221232 - DNA, 22 bp, Artificial Sequence
  Synthetic oligonucleotide; TTT chr2 60490416 60490437 60490421 60490416 -
ccttgatgggtacggggaacta

SEQ ID NO: 221233 - DNA, 22 bp, Artificial Sequence
  Synthetic oligonucleotide; TTC chr2 60490415 60490436 60490420 60490415 -
cttgatgggtacggggaactaa

SEQ ID NO: 221234 - DNA, 22 bp, Artificial Sequence
  Synthetic oligonucleotide; CTT chr2 60490412 60490433 60490417 60490412 -
gatgggtacggggaactaagac

SEQ ID NO: 221235 - DNA, 22 bp, Artificial Sequence
  Synthetic oligonucleotide; TTG chr2 60490411 60490432 60490416 60490411 -
atgggtacggggaactaagact

SEQ ID NO: 221236 - DNA, 22 bp, Artificial Sequence
  Synthetic oligonucleotide; CTA chr2 60490394 60490415 60490399 60490394 -
agactggaatagaaaattggag

SEQ ID NO: 221237 - DNA, 22 bp, Artificial Sequence
  Synthetic oligonucleotide; CTG chr2 60490388 60490409 60490393 60490388 -
gaatagaaaattggagttggat

SEQ ID NO: 221238 - DNA, 22 bp, Artificial Sequence
  Synthetic oligonucleotide; TTG chr2 60490375 60490396 60490380 60490375 -
gagttggattgtggagctctgg

SEQ ID NO: 221239 - DNA, 22 bp, Artificial Sequence
  Synthetic oligonucleotide; TTG chr2 60490369 60490390 60490374 60490369 -
gattgtggagctctggaatgat

SEQ ID NO: 221240 - DNA, 22 bp, Artificial Sequence
  Synthetic oligonucleotide; TTG chr2 60490364 60490385 60490369 60490364 -
tggagctctggaatgatggctt

SEQ ID NO: 221241 - DNA, 22 bp, Artificial Sequence
  Synthetic oligonucleotide; CTC chr2 60490356 60490377 60490361 60490356 -
tggaatgatggcttaaggagtt

SEQ ID NO: 221242 - DNA, 22 bp, Artificial Sequence
  Synthetic oligonucleotide; CTG chr2 60490354 60490375 60490359 60490354 -
gaatgatggcttaaggagttgg

SEQ ID NO: 221243 - DNA, 22 bp, Artificial Sequence
  Synthetic oligonucleotide; CTT chr2 60490342 60490363 60490347 60490342 -
aaggagttggaccatatcctat

SEQ ID NO: 221244 - DNA, 22 bp, Artificial Sequence
  Synthetic oligonucleotide; TTA chr2 60490341 60490362 60490346 60490341 -
aggagttggaccatatcctata

SEQ ID NO: 221245 - DNA, 22 bp, Artificial Sequence
  Synthetic oligonucleotide; TTG chr2 60490333 60490354 60490338 60490333 -
gaccatatcctatagatcacag

SEQ ID NO: 221246 - DNA, 22 bp, Artificial Sequence
  Synthetic oligonucleotide; CTA chr2 60490321 60490342 60490326 60490321 -
tagatcacagagggctgctgaa

SEQ ID NO: 221247 - DNA, 22 bp, Artificial Sequence
  Synthetic oligonucleotide; CTG chr2 60490304 60490325 60490309 60490304 -
ctgaaatactctgatcagaaga

SEQ ID NO: 221248 - DNA, 22 bp, Artificial Sequence
  Synthetic oligonucleotide; CTG chr2 60490301 60490322 60490306 60490301 -
aaatactctgatcagaagacaa

SEQ ID NO: 221249 - DNA, 22 bp, Artificial Sequence
  Synthetic oligonucleotide; CTC chr2 60490293 60490314 60490298 60490293 -
tgatcagaagacaaaggcagca

SEQ ID NO: 221250 - DNA, 22 bp, Artificial Sequence
  Synthetic oligonucleotide; CTG chr2 60490291 60490312 60490296 60490291 -
atcagaagacaaaggcagcatg

SEQ ID NO: 221251 - DNA, 22 bp, Artificial Sequence
  Synthetic oligonucleotide; CTA chr2 60490266 60490287 60490271 60490266 -
ggggatgttaagtgaggactct

SEQ ID NO: 221252 - DNA, 22 bp, Artificial Sequence
  Synthetic oligonucleotide; TTA chr2 60490256 60490277 60490261 60490256 -
agtgaggactctgcaaaggggg

SEQ ID NO: 221253 - DNA, 22 bp, Artificial Sequence
  Synthetic oligonucleotide; CTC chr2 60490245 60490266 60490250 60490245 -
tgcaaagggggtggatgagttg

SEQ ID NO: 221254 - DNA, 22 bp, Artificial Sequence
  Synthetic oligonucleotide; CTG chr2 60490243 60490264 60490248 60490243 -
caaagggggtggatgagttgtt

SEQ ID NO: 221255 - DNA, 22 bp, Artificial Sequence
  Synthetic oligonucleotide; TTG chr2 60490223 60490244 60490228 60490223 -
ttgaaattctctgttataccct

SEQ ID NO: 221256 - DNA, 22 bp, Artificial Sequence
  Synthetic oligonucleotide; TTG chr2 60490220 60490241 60490225 60490220 -
aaattctctgttatacccttca

SEQ ID NO: 221257 - DNA, 22 bp, Artificial Sequence
  Synthetic oligonucleotide; TTC chr2 60490214 60490235 60490219 60490214 -
tctgttatacccttcatgccga

SEQ ID NO: 221258 - DNA, 22 bp, Artificial Sequence
  Synthetic oligonucleotide; CTC chr2 60490212 60490233 60490217 60490212 -
tgttatacccttcatgccgagt

SEQ ID NO: 221259 - DNA, 22 bp, Artificial Sequence
  Synthetic oligonucleotide; CTG chr2 60490210 60490231 60490215 60490210 -
ttatacccttcatgccgagttc

SEQ ID NO: 221260 - DNA, 22 bp, Artificial Sequence
  Synthetic oligonucleotide; TTA chr2 60490207 60490228 60490212 60490207 -
tacccttcatgccgagttctcc

SEQ ID NO: 221261 - DNA, 22 bp, Artificial Sequence
  Synthetic oligonucleotide; CTT chr2 60490200 60490221 60490205 60490200 -
catgccgagttctcccctgttg

SEQ ID NO: 221262 - DNA, 22 bp, Artificial Sequence
  Synthetic oligonucleotide; TTC chr2 60490199 60490220 60490204 60490199 -
atgccgagttctcccctgttga

SEQ ID NO: 221263 - DNA, 22 bp, Artificial Sequence
  Synthetic oligonucleotide; TTC chr2 60490188 60490209 60490193 60490188 -
tcccctgttgacttatatgttc

SEQ ID NO: 221264 - DNA, 22 bp, Artificial Sequence
  Synthetic oligonucleotide; CTC chr2 60490186 60490207 60490191 60490186 -
ccctgttgacttatatgttcta

SEQ ID NO: 221265 - DNA, 22 bp, Artificial Sequence
  Synthetic oligonucleotide; CTG chr2 60490181 60490202 60490186 60490181 -
ttgacttatatgttctagagga

SEQ ID NO: 221266 - DNA, 22 bp, Artificial Sequence
  Synthetic oligonucleotide; TTG chr2 60490178 60490199 60490183 60490178 -
acttatatgttctagaggatgg

SEQ ID NO: 221267 - DNA, 22 bp, Artificial Sequence
  Synthetic oligonucleotide; CTT chr2 60490174 60490195 60490179 60490174 -
atatgttctagaggatggagtt

SEQ ID NO: 221268 - DNA, 22 bp, Artificial Sequence
  Synthetic oligonucleotide; TTA chr2 60490173 60490194 60490178 60490173 -
tatgttctagaggatggagttg

SEQ ID NO: 221269 - DNA, 22 bp, Artificial Sequence
  Synthetic oligonucleotide; TTC chr2 60490166 60490187 60490171 60490166 -
tagaggatggagttggttgacc

SEQ ID NO: 221270 - DNA, 22 bp, Artificial Sequence
  Synthetic oligonucleotide; CTA chr2 60490164 60490185 60490169 60490164 -
gaggatggagttggttgaccgt

SEQ ID NO: 221271 - DNA, 22 bp, Artificial Sequence
  Synthetic oligonucleotide; TTG chr2 60490151 60490172 60490156 60490151 -
gttgaccgtagggtttcctttc

SEQ ID NO: 221272 - DNA, 22 bp, Artificial Sequence
  Synthetic oligonucleotide; TTG chr2 60490147 60490168 60490152 60490147 -
accgtagggtttcctttcacta

SEQ ID NO: 221273 - DNA, 22 bp, Artificial Sequence
  Synthetic oligonucleotide; TTT chr2 60490135 60490156 60490140 60490135 -
cctttcactagcagaatggaac

SEQ ID NO: 221274 - DNA, 22 bp, Artificial Sequence
  Synthetic oligonucleotide; TTC chr2 60490134 60490155 60490139 60490134 -
ctttcactagcagaatggaacc

SEQ ID NO: 221275 - DNA, 22 bp, Artificial Sequence
  Synthetic oligonucleotide; CTT chr2 60490131 60490152 60490136 60490131 -
tcactagcagaatggaaccaga

SEQ ID NO: 221276 - DNA, 22 bp, Artificial Sequence
  Synthetic oligonucleotide; TTT chr2 60490130 60490151 60490135 60490130 -
cactagcagaatggaaccagat

SEQ ID NO: 221277 - DNA, 22 bp, Artificial Sequence
  Synthetic oligonucleotide; TTC chr2 60490129 60490150 60490134 60490129 -
actagcagaatggaaccagata

SEQ ID NO: 221278 - DNA, 22 bp, Artificial Sequence
  Synthetic oligonucleotide; CTA chr2 60490125 60490146 60490130 60490125 -
gcagaatggaaccagatattgt

SEQ ID NO: 221279 - DNA, 22 bp, Artificial Sequence
  Synthetic oligonucleotide; TTG chr2 60490104 60490125 60490109 60490104 -
taggagcctagcacatgggtct

SEQ ID NO: 221280 - DNA, 22 bp, Artificial Sequence
  Synthetic oligonucleotide; CTA chr2 60490094 60490115 60490099 60490094 -
gcacatgggtctgttactaata

SEQ ID NO: 221281 - DNA, 22 bp, Artificial Sequence
  Synthetic oligonucleotide; CTG chr2 60490081 60490102 60490086 60490081 -
ttactaatatagaggactgttt

SEQ ID NO: 221282 - DNA, 22 bp, Artificial Sequence
  Synthetic oligonucleotide; TTA chr2 60490078 60490099 60490083 60490078 -
ctaatatagaggactgtttaaa

SEQ ID NO: 221283 - DNA, 22 bp, Artificial Sequence
  Synthetic oligonucleotide; CTA chr2 60490075 60490096 60490080 60490075 -
atatagaggactgtttaaatct

SEQ ID NO: 221284 - DNA, 22 bp, Artificial Sequence
  Synthetic oligonucleotide; CTG chr2 60490062 60490083 60490067 60490062 -
tttaaatcttggaaagctttcc

SEQ ID NO: 221285 - DNA, 22 bp, Artificial Sequence
  Synthetic oligonucleotide; TTT chr2 60490059 60490080 60490064 60490059 -
aaatcttggaaagctttccttt

SEQ ID NO: 221286 - DNA, 22 bp, Artificial Sequence
  Synthetic oligonucleotide; TTA chr2 60490058 60490079 60490063 60490058 -
aatcttggaaagctttcctttt

SEQ ID NO: 221287 - DNA, 22 bp, Artificial Sequence
  Synthetic oligonucleotide; CTT chr2 60490052 60490073 60490057 60490052 -
ggaaagctttccttttgccttt

SEQ ID NO: 221288 - DNA, 22 bp, Artificial Sequence
  Synthetic oligonucleotide; TTG chr2 60490051 60490072 60490056 60490051 -
gaaagctttccttttgcctttg

SEQ ID NO: 221289 - DNA, 22 bp, Artificial Sequence
  Synthetic oligonucleotide; CTT chr2 60490043 60490064 60490048 60490043 -
tccttttgcctttgcccccatt

SEQ ID NO: 221290 - DNA, 22 bp, Artificial Sequence
  Synthetic oligonucleotide; TTT chr2 60490042 60490063 60490047 60490042 -
ccttttgcctttgcccccattg

SEQ ID NO: 221291 - DNA, 22 bp, Artificial Sequence
  Synthetic oligonucleotide; TTC chr2 60490041 60490062 60490046 60490041 -
cttttgcctttgcccccattgc

SEQ ID NO: 221292 - DNA, 22 bp, Artificial Sequence
  Synthetic oligonucleotide; CTT chr2 60490038 60490059 60490043 60490038 -
ttgcctttgcccccattgcaga

SEQ ID NO: 221293 - DNA, 22 bp, Artificial Sequence
  Synthetic oligonucleotide; TTT chr2 60490037 60490058 60490042 60490037 -
tgcctttgcccccattgcagat

SEQ ID NO: 221294 - DNA, 22 bp, Artificial Sequence
  Synthetic oligonucleotide; TTT chr2 60490036 60490057 60490041 60490036 -
gcctttgcccccattgcagatg

SEQ ID NO: 221295 - DNA, 22 bp, Artificial Sequence
  Synthetic oligonucleotide; TTG chr2 60490035 60490056 60490040 60490035 -
cctttgcccccattgcagatgg

SEQ ID NO: 221296 - DNA, 22 bp, Artificial Sequence
  Synthetic oligonucleotide; CTT chr2 60490031 60490052 60490036 60490031 -
tgcccccattgcagatggggag

SEQ ID NO: 221297 - DNA, 22 bp, Artificial Sequence
  Synthetic oligonucleotide; TTT chr2 60490030 60490051 60490035 60490030 -
gcccccattgcagatggggagt

SEQ ID NO: 221298 - DNA, 22 bp, Artificial Sequence
  Synthetic oligonucleotide; TTG chr2 60490029 60490050 60490034 60490029 -
cccccattgcagatggggagtg

SEQ ID NO: 221299 - DNA, 22 bp, Artificial Sequence
  Synthetic oligonucleotide; TTG chr2 60490020 60490041 60490025 60490020 -
cagatggggagtgggcaggaat

SEQ ID NO: 221300 - DNA, 22 bp, Artificial Sequence
  Synthetic oligonucleotide; TTC chr2 60489991 60490012 60489996 60489991 -
agaatcaagggcccatcagggt

SEQ ID NO: 221301 - DNA, 22 bp, Artificial Sequence
  Synthetic oligonucleotide; CTG chr2 60489966 60489987 60489971 60489966 -
tattggtcccttgtccctctcc

SEQ ID NO: 221302 - DNA, 22 bp, Artificial Sequence
  Synthetic oligonucleotide; TTG chr2 60489961 60489982 60489966 60489961 -
gtcccttgtccctctcctccag

SEQ ID NO: 221303 - DNA, 22 bp, Artificial Sequence
  Synthetic oligonucleotide; CTT chr2 60489954 60489975 60489959 60489954 -
gtccctctcctccagtccatcc

SEQ ID NO: 221304 - DNA, 22 bp, Artificial Sequence
  Synthetic oligonucleotide; TTG chr2 60489953 60489974 60489958 60489953 -
tccctctcctccagtccatcca

SEQ ID NO: 221305 - DNA, 22 bp, Artificial Sequence
  Synthetic oligonucleotide; CTC chr2 60489947 60489968 60489952 60489947 -
tcctccagtccatccatgttgg

SEQ ID NO: 221306 - DNA, 22 bp, Artificial Sequence
  Synthetic oligonucleotide; CTC chr2 60489945 60489966 60489950 60489945 -
ctccagtccatccatgttggga

SEQ ID NO: 221307 - DNA, 22 bp, Artificial Sequence
  Synthetic oligonucleotide; CTC chr2 60489942 60489963 60489947 60489942 -
cagtccatccatgttgggatac

SEQ ID NO: 221308 - DNA, 22 bp, Artificial Sequence
  Synthetic oligonucleotide; TTG chr2 60489926 60489947 60489931 60489926 -
ggatactcagggcatggatggt

SEQ ID NO: 221309 - DNA, 22 bp, Artificial Sequence
  Synthetic oligonucleotide; CTC chr2 60489918 60489939 60489923 60489918 -
agggcatggatggtgtttcatg

SEQ ID NO: 221310 - DNA, 22 bp, Artificial Sequence
  Synthetic oligonucleotide; TTT chr2 60489900 60489921 60489905 60489900 -
catgatagcatttatcattttg

SEQ ID NO: 221311 - DNA, 22 bp, Artificial Sequence
  Synthetic oligonucleotide; TTC chr2 60489899 60489920 60489904 60489899 -
atgatagcatttatcattttga

SEQ ID NO: 221312 - DNA, 22 bp, Artificial Sequence
  Synthetic oligonucleotide; TTT chr2 60489887 60489908 60489892 60489887 -
atcattttgatgatatgtgaca

SEQ ID NO: 221313 - DNA, 22 bp, Artificial Sequence
  Synthetic oligonucleotide; TTA chr2 60489886 60489907 60489891 60489886 -
tcattttgatgatatgtgacaa

SEQ ID NO: 221314 - DNA, 22 bp, Artificial Sequence
  Synthetic oligonucleotide; TTT chr2 60489880 60489901 60489885 60489880 -
tgatgatatgtgacaaaataag

SEQ ID NO: 221315 - DNA, 22 bp, Artificial Sequence
  Synthetic oligonucleotide; TTT chr2 60489879 60489900 60489884 60489879 -
gatgatatgtgacaaaataagg

SEQ ID NO: 221316 - DNA, 22 bp, Artificial Sequence
  Synthetic oligonucleotide; TTG chr2 60489878 60489899 60489883 60489878 -
atgatatgtgacaaaataaggc

SEQ ID NO: 221317 - DNA, 22 bp, Artificial Sequence
  Synthetic oligonucleotide; TTC chr2 60489842 60489863 60489847 60489842 -
atatccctgtgatctctcttta

SEQ ID NO: 221318 - DNA, 22 bp, Artificial Sequence
  Synthetic oligonucleotide; CTG chr2 60489833 60489854 60489838 60489833 -
tgatctctctttaatagtgtcc

SEQ ID NO: 221319 - DNA, 22 bp, Artificial Sequence
  Synthetic oligonucleotide; CTC chr2 60489826 60489847 60489831 60489826 -
tctttaatagtgtcctcctgct

SEQ ID NO: 221320 - DNA, 22 bp, Artificial Sequence
  Synthetic oligonucleotide; CTC chr2 60489824 60489845 60489829 60489824 -
tttaatagtgtcctcctgcttt

SEQ ID NO: 221321 - DNA, 22 bp, Artificial Sequence
  Synthetic oligonucleotide; CTT chr2 60489822 60489843 60489827 60489822 -
taatagtgtcctcctgctttgg

SEQ ID NO: 221322 - DNA, 22 bp, Artificial Sequence
  Synthetic oligonucleotide; TTT chr2 60489821 60489842 60489826 60489821 -
aatagtgtcctcctgctttggg

SEQ ID NO: 221323 - DNA, 22 bp, Artificial Sequence
  Synthetic oligonucleotide; TTA chr2 60489820 60489841 60489825 60489820 -
atagtgtcctcctgctttgggg

SEQ ID NO: 221324 - DNA, 22 bp, Artificial Sequence
  Synthetic oligonucleotide; CTC chr2 60489809 60489830 60489814 60489809 -
ctgctttgggggttattaagct

SEQ ID NO: 221325 - DNA, 22 bp, Artificial Sequence
  Synthetic oligonucleotide; CTG chr2 60489806 60489827 60489811 60489806 -
ctttgggggttattaagctagc

SEQ ID NO: 221326 - DNA, 22 bp, Artificial Sequence
  Synthetic oligonucleotide; CTT chr2 60489803 60489824 60489808 60489803 -
tgggggttattaagctagcctg

SEQ ID NO: 221327 - DNA, 22 bp, Artificial Sequence
  Synthetic oligonucleotide; TTT chr2 60489802 60489823 60489807 60489802 -
gggggttattaagctagcctga

SEQ ID NO: 221328 - DNA, 22 bp, Artificial Sequence
  Synthetic oligonucleotide; TTG chr2 60489801 60489822 60489806 60489801 -
ggggttattaagctagcctgaa

SEQ ID NO: 221329 - DNA, 22 bp, Artificial Sequence
  Synthetic oligonucleotide; TTA chr2 60489794 60489815 60489799 60489794 -
ttaagctagcctgaacttgagt

SEQ ID NO: 221330 - DNA, 22 bp, Artificial Sequence
  Synthetic oligonucleotide; TTA chr2 60489791 60489812 60489796 60489791 -
agctagcctgaacttgagtaaa

SEQ ID NO: 221331 - DNA, 22 bp, Artificial Sequence
  Synthetic oligonucleotide; CTA chr2 60489786 60489807 60489791 60489786 -
gcctgaacttgagtaaacattt

SEQ ID NO: 221332 - DNA, 22 bp, Artificial Sequence
  Synthetic oligonucleotide; CTG chr2 60489781 60489802 60489786 60489781 -
aacttgagtaaacatttttgga

SEQ ID NO: 221333 - DNA, 22 bp, Artificial Sequence
  Synthetic oligonucleotide; CTT chr2 60489776 60489797 60489781 60489776 -
gagtaaacatttttggatgggg

SEQ ID NO: 221334 - DNA, 22 bp, Artificial Sequence
  Synthetic oligonucleotide; TTG chr2 60489775 60489796 60489780 60489775 -
agtaaacatttttggatggggt

SEQ ID NO: 221335 - DNA, 22 bp, Artificial Sequence
  Synthetic oligonucleotide; TTT chr2 60489764 60489785 60489769 60489764 -
ttggatggggtgagaggggggc

SEQ ID NO: 221336 - DNA, 22 bp, Artificial Sequence
  Synthetic oligonucleotide; TTT chr2 60489763 60489784 60489768 60489763 -
tggatggggtgagaggggggct

SEQ ID NO: 221337 - DNA, 22 bp, Artificial Sequence
  Synthetic oligonucleotide; TTT chr2 60489762 60489783 60489767 60489762 -
ggatggggtgagaggggggctg

SEQ ID NO: 221338 - DNA, 22 bp, Artificial Sequence
  Synthetic oligonucleotide; TTG chr2 60489761 60489782 60489766 60489761 -
gatggggtgagaggggggctga

SEQ ID NO: 221339 - DNA, 22 bp, Artificial Sequence
  Synthetic oligonucleotide; CTG chr2 60489740 60489761 60489745 60489740 -
ataaaagtggttagtaaataga

SEQ ID NO: 221340 - DNA, 22 bp, Artificial Sequence
  Synthetic oligonucleotide; TTA chr2 60489727 60489748 60489732 60489727 -
gtaaatagacagttggaaagga

SEQ ID NO: 221341 - DNA, 22 bp, Artificial Sequence
  Synthetic oligonucleotide; TTG chr2 60489712 60489733 60489717 60489712 -
gaaaggagaacggcccgggggc

SEQ ID NO: 221342 - DNA, 22 bp, Artificial Sequence
  Synthetic oligonucleotide; CTC chr2 60489688 60489709 60489693 60489688 -
aggagatgagccagggaacaag

SEQ ID NO: 221343 - DNA, 22 bp, Artificial Sequence
  Synthetic oligonucleotide; CTA chr2 60489650 60489671 60489655 60489650 -
gtgacccagagtgtcctagagg

SEQ ID NO: 221344 - DNA, 22 bp, Artificial Sequence
  Synthetic oligonucleotide; CTA chr2 60489632 60489653 60489637 60489632 -
gaggggaaagaacctctgttag

SEQ ID NO: 221345 - DNA, 22 bp, Artificial Sequence
  Synthetic oligonucleotide; CTC chr2 60489616 60489637 60489621 60489616 -
tgttagaatttcaaatgtcaga

SEQ ID NO: 221346 - DNA, 22 bp, Artificial Sequence
  Synthetic oligonucleotide; CTG chr2 60489614 60489635 60489619 60489614 -
ttagaatttcaaatgtcagact

SEQ ID NO: 221347 - DNA, 22 bp, Artificial Sequence
  Synthetic oligonucleotide; TTA chr2 60489611 60489632 60489616 60489611 -
gaatttcaaatgtcagactttc

SEQ ID NO: 221348 - DNA, 22 bp, Artificial Sequence
  Synthetic oligonucleotide; TTT chr2 60489605 60489626 60489610 60489605 -
caaatgtcagactttcttttca

SEQ ID NO: 221349 - DNA, 22 bp, Artificial Sequence
  Synthetic oligonucleotide; TTC chr2 60489604 60489625 60489609 60489604 -
aaatgtcagactttcttttcag

SEQ ID NO: 221350 - DNA, 22 bp, Artificial Sequence
  Synthetic oligonucleotide; CTT chr2 60489591 60489612 60489596 60489591 -
tcttttcagcttccttcaggtg

SEQ ID NO: 221351 - DNA, 22 bp, Artificial Sequence
  Synthetic oligonucleotide; TTT chr2 60489590 60489611 60489595 60489590 -
cttttcagcttccttcaggtgc

SEQ ID NO: 221352 - DNA, 22 bp, Artificial Sequence
  Synthetic oligonucleotide; TTC chr2 60489589 60489610 60489594 60489589 -
ttttcagcttccttcaggtgct

SEQ ID NO: 221353 - DNA, 22 bp, Artificial Sequence
  Synthetic oligonucleotide; CTT chr2 60489587 60489608 60489592 60489587 -
ttcagcttccttcaggtgcttc

SEQ ID NO: 221354 - DNA, 22 bp, Artificial Sequence
  Synthetic oligonucleotide; TTT chr2 60489586 60489607 60489591 60489586 -
tcagcttccttcaggtgcttcc

SEQ ID NO: 221355 - DNA, 22 bp, Artificial Sequence
  Synthetic oligonucleotide; TTT chr2 60489585 60489606 60489590 60489585 -
cagcttccttcaggtgcttcct

SEQ ID NO: 221356 - DNA, 22 bp, Artificial Sequence
  Synthetic oligonucleotide; TTC chr2 60489584 60489605 60489589 60489584 -
agcttccttcaggtgcttcctc

SEQ ID NO: 221357 - DNA, 22 bp, Artificial Sequence
  Synthetic oligonucleotide; CTT chr2 60489579 60489600 60489584 60489579 -
ccttcaggtgcttcctcttcta

SEQ ID NO: 221358 - DNA, 22 bp, Artificial Sequence
  Synthetic oligonucleotide; TTC chr2 60489578 60489599 60489583 60489578 -
cttcaggtgcttcctcttctac

SEQ ID NO: 221359 - DNA, 22 bp, Artificial Sequence
  Synthetic oligonucleotide; CTT chr2 60489575 60489596 60489580 60489575 -
caggtgcttcctcttctactca

SEQ ID NO: 221360 - DNA, 22 bp, Artificial Sequence
  Synthetic oligonucleotide; TTC chr2 60489574 60489595 60489579 60489574 -
aggtgcttcctcttctactcag

SEQ ID NO: 221361 - DNA, 22 bp, Artificial Sequence
  Synthetic oligonucleotide; CTT chr2 60489566 60489587 60489571 60489566 -
cctcttctactcagaattttct

SEQ ID NO: 221362 - DNA, 22 bp, Artificial Sequence
  Synthetic oligonucleotide; TTC chr2 60489565 60489586 60489570 60489565 -
ctcttctactcagaattttctt

SEQ ID NO: 221363 - DNA, 22 bp, Artificial Sequence
  Synthetic oligonucleotide; CTC chr2 60489562 60489583 60489567 60489562 -
ttctactcagaattttcttttg

SEQ ID NO: 221364 - DNA, 22 bp, Artificial Sequence
  Synthetic oligonucleotide; CTT chr2 60489560 60489581 60489565 60489560 -
ctactcagaattttcttttgag

SEQ ID NO: 221365 - DNA, 22 bp, Artificial Sequence
  Synthetic oligonucleotide; TTC chr2 60489559 60489580 60489564 60489559 -
tactcagaattttcttttgaga

SEQ ID NO: 221366 - DNA, 22 bp, Artificial Sequence
  Synthetic oligonucleotide; CTA chr2 60489557 60489578 60489562 60489557 -
ctcagaattttcttttgagata

SEQ ID NO: 221367 - DNA, 22 bp, Artificial Sequence
  Synthetic oligonucleotide; CTC chr2 60489554 60489575 60489559 60489554 -
agaattttcttttgagataggt

SEQ ID NO: 221368 - DNA, 22 bp, Artificial Sequence
  Synthetic oligonucleotide; TTT chr2 60489547 60489568 60489552 60489547 -
tcttttgagataggtgctggtc

SEQ ID NO: 221369 - DNA, 22 bp, Artificial Sequence
  Synthetic oligonucleotide; TTT chr2 60489546 60489567 60489551 60489546 -
cttttgagataggtgctggtca

SEQ ID NO: 221370 - DNA, 22 bp, Artificial Sequence
  Synthetic oligonucleotide; TTC chr2 60489545 60489566 60489550 60489545 -
ttttgagataggtgctggtcaa

SEQ ID NO: 221371 - DNA, 22 bp, Artificial Sequence
  Synthetic oligonucleotide; CTT chr2 60489543 60489564 60489548 60489543 -
ttgagataggtgctggtcaaac

SEQ ID NO: 221372 - DNA, 22 bp, Artificial Sequence
  Synthetic oligonucleotide; TTT chr2 60489542 60489563 60489547 60489542 -
tgagataggtgctggtcaaaca

SEQ ID NO: 221373 - DNA, 22 bp, Artificial Sequence
  Synthetic oligonucleotide; TTT chr2 60489541 60489562 60489546 60489541 -
gagataggtgctggtcaaacaa

SEQ ID NO: 221374 - DNA, 22 bp, Artificial Sequence
  Synthetic oligonucleotide; TTG chr2 60489540 60489561 60489545 60489540 -
agataggtgctggtcaaacaag

SEQ ID NO: 221375 - DNA, 22 bp, Artificial Sequence
  Synthetic oligonucleotide; CTG chr2 60489528 60489549 60489533 60489528 -
gtcaaacaagcttttgtttgtg

SEQ ID NO: 221376 - DNA, 22 bp, Artificial Sequence
  Synthetic oligonucleotide; CTT chr2 60489515 60489536 60489520 60489515 -
ttgtttgtggctggtcacttgg

SEQ ID NO: 221377 - DNA, 22 bp, Artificial Sequence
  Synthetic oligonucleotide; TTT chr2 60489514 60489535 60489519 60489514 -
tgtttgtggctggtcacttggc

SEQ ID NO: 221378 - DNA, 22 bp, Artificial Sequence
  Synthetic oligonucleotide; TTT chr2 60489513 60489534 60489518 60489513 -
gtttgtggctggtcacttggca

SEQ ID NO: 221379 - DNA, 22 bp, Artificial Sequence
  Synthetic oligonucleotide; TTG chr2 60489512 60489533 60489517 60489512 -
tttgtggctggtcacttggcac

SEQ ID NO: 221380 - DNA, 22 bp, Artificial Sequence
  Synthetic oligonucleotide; TTT chr2 60489509 60489530 60489514 60489509 -
gtggctggtcacttggcacaca

SEQ ID NO: 221381 - DNA, 22 bp, Artificial Sequence
  Synthetic oligonucleotide; TTG chr2 60489508 60489529 60489513 60489508 -
tggctggtcacttggcacacag

SEQ ID NO: 221382 - DNA, 22 bp, Artificial Sequence
  Synthetic oligonucleotide; CTG chr2 60489502 60489523 60489507 60489502 -
gtcacttggcacacagtgtggc

SEQ ID NO: 221383 - DNA, 22 bp, Artificial Sequence
  Synthetic oligonucleotide; CTT chr2 60489495 60489516 60489500 60489495 -
ggcacacagtgtggctgtttgt

SEQ ID NO: 221384 - DNA, 22 bp, Artificial Sequence
  Synthetic oligonucleotide; TTG chr2 60489494 60489515 60489499 60489494 -
gcacacagtgtggctgtttgtc

SEQ ID NO: 221385 - DNA, 22 bp, Artificial Sequence
  Synthetic oligonucleotide; CTG chr2 60489478 60489499 60489483 60489478 -
tttgtcatcctggatgatgagg

SEQ ID NO: 221386 - DNA, 22 bp, Artificial Sequence
  Synthetic oligonucleotide; TTT chr2 60489475 60489496 60489480 60489475 -
gtcatcctggatgatgaggcag

SEQ ID NO: 221387 - DNA, 22 bp, Artificial Sequence
  Synthetic oligonucleotide; TTG chr2 60489474 60489495 60489479 60489474 -
tcatcctggatgatgaggcagc

SEQ ID NO: 221388 - DNA, 22 bp, Artificial Sequence
  Synthetic oligonucleotide; CTG chr2 60489466 60489487 60489471 60489466 -
gatgatgaggcagctattttaa

SEQ ID NO: 221389 - DNA, 22 bp, Artificial Sequence
  Synthetic oligonucleotide; CTA chr2 60489450 60489471 60489455 60489450 -
ttttaatggcacgcagggccgc

SEQ ID NO: 221390 - DNA, 22 bp, Artificial Sequence
  Synthetic oligonucleotide; TTT chr2 60489447 60489468 60489452 60489447 -
taatggcacgcagggccgccgt

SEQ ID NO: 221391 - DNA, 22 bp, Artificial Sequence
  Synthetic oligonucleotide; TTT chr2 60489446 60489467 60489451 60489446 -
aatggcacgcagggccgccgtg

SEQ ID NO: 221392 - DNA, 22 bp, Artificial Sequence
  Synthetic oligonucleotide; TTA chr2 60489445 60489466 60489450 60489445 -
atggcacgcagggccgccgtgt

SEQ ID NO: 221393 - DNA, 22 bp, Artificial Sequence
  Synthetic oligonucleotide; TTT chr2 60489419 60489440 60489424 60489419 -
actgccaagaaataagggcttc

SEQ ID NO: 221394 - DNA, 22 bp, Artificial Sequence
  Synthetic oligonucleotide; TTA chr2 60489418 60489439 60489423 60489418 -
ctgccaagaaataagggcttct

SEQ ID NO: 221395 - DNA, 22 bp, Artificial Sequence
  Synthetic oligonucleotide; CTG chr2 60489415 60489436 60489420 60489415 -
ccaagaaataagggcttctagg

SEQ ID NO: 221396 - DNA, 22 bp, Artificial Sequence
  Synthetic oligonucleotide; CTT chr2 60489398 60489419 60489403 60489398 -
ctaggagacttggtggctttag

SEQ ID NO: 221397 - DNA, 22 bp, Artificial Sequence
  Synthetic oligonucleotide; TTC chr2 60489397 60489418 60489402 60489397 -
taggagacttggtggctttagg

SEQ ID NO: 221398 - DNA, 22 bp, Artificial Sequence
  Synthetic oligonucleotide; CTA chr2 60489395 60489416 60489400 60489395 -
ggagacttggtggctttaggaa

SEQ ID NO: 221399 - DNA, 22 bp, Artificial Sequence
  Synthetic oligonucleotide; CTT chr2 60489387 60489408 60489392 60489387 -
ggtggctttaggaacaaacttc

SEQ ID NO: 221400 - DNA, 22 bp, Artificial Sequence
  Synthetic oligonucleotide; TTG chr2 60489386 60489407 60489391 60489386 -
gtggctttaggaacaaacttcc

SEQ ID NO: 221401 - DNA, 22 bp, Artificial Sequence
  Synthetic oligonucleotide; CTT chr2 60489379 60489400 60489384 60489379 -
taggaacaaacttccagcggca

SEQ ID NO: 221402 - DNA, 22 bp, Artificial Sequence
  Synthetic oligonucleotide; TTT chr2 60489378 60489399 60489383 60489378 -
aggaacaaacttccagcggcag

SEQ ID NO: 221403 - DNA, 22 bp, Artificial Sequence
  Synthetic oligonucleotide; TTA chr2 60489377 60489398 60489382 60489377 -
ggaacaaacttccagcggcaga

SEQ ID NO: 221404 - DNA, 22 bp, Artificial Sequence
  Synthetic oligonucleotide; CTT chr2 60489366 60489387 60489371 60489366 -
ccagcggcagaaattagttagg

SEQ ID NO: 221405 - DNA, 22 bp, Artificial Sequence
  Synthetic oligonucleotide; TTC chr2 60489365 60489386 60489370 60489365 -
cagcggcagaaattagttagga

SEQ ID NO: 221406 - DNA, 22 bp, Artificial Sequence
  Synthetic oligonucleotide; TTA chr2 60489350 60489371 60489355 60489350 -
gttaggaagcagagtagcactg

SEQ ID NO: 221407 - DNA, 22 bp, Artificial Sequence
  Synthetic oligonucleotide; TTA chr2 60489346 60489367 60489351 60489346 -
ggaagcagagtagcactgggtt

SEQ ID NO: 221408 - DNA, 22 bp, Artificial Sequence
  Synthetic oligonucleotide; CTG chr2 60489328 60489349 60489333 60489328 -
ggttccaaatgcctctattgta

SEQ ID NO: 221409 - DNA, 22 bp, Artificial Sequence
  Synthetic oligonucleotide; TTC chr2 60489323 60489344 60489328 60489323 -
caaatgcctctattgtatgaat

SEQ ID NO: 221410 - DNA, 22 bp, Artificial Sequence
  Synthetic oligonucleotide; CTC chr2 60489313 60489334 60489318 60489313 -
tattgtatgaatttggatatgt

SEQ ID NO: 221411 - DNA, 22 bp, Artificial Sequence
  Synthetic oligonucleotide; CTA chr2 60489311 60489332 60489316 60489311 -
ttgtatgaatttggatatgttg

SEQ ID NO: 221412 - DNA, 22 bp, Artificial Sequence
  Synthetic oligonucleotide; TTG chr2 60489308 60489329 60489313 60489308 -
tatgaatttggatatgttgtgg

SEQ ID NO: 221413 - DNA, 22 bp, Artificial Sequence
  Synthetic oligonucleotide; TTT chr2 60489299 60489320 60489304 60489299 -
ggatatgttgtgggcaaaatga

SEQ ID NO: 221414 - DNA, 22 bp, Artificial Sequence
  Synthetic oligonucleotide; TTG chr2 60489298 60489319 60489303 60489298 -
gatatgttgtgggcaaaatgac

SEQ ID NO: 221415 - DNA, 22 bp, Artificial Sequence
  Synthetic oligonucleotide; TTG chr2 60489289 60489310 60489294 60489289 -
tgggcaaaatgacataaaagaa

SEQ ID NO: 221416 - DNA, 22 bp, Artificial Sequence
  Synthetic oligonucleotide; CTG chr2 60489239 60489260 60489244 60489239 -
acaaggaccccattggcatgtg

SEQ ID NO: 221417 - DNA, 22 bp, Artificial Sequence
  Synthetic oligonucleotide; TTG chr2 60489224 60489245 60489229 60489224 -
gcatgtgggctagtgttgactg

SEQ ID NO: 221418 - DNA, 22 bp, Artificial Sequence
  Synthetic oligonucleotide; CTA chr2 60489212 60489233 60489217 60489212 -
gtgttgactggctctcacagtg

SEQ ID NO: 221419 - DNA, 22 bp, Artificial Sequence
  Synthetic oligonucleotide; TTG chr2 60489206 60489227 60489211 60489206 -
actggctctcacagtgtgaatt

SEQ ID NO: 221420 - DNA, 22 bp, Artificial Sequence
  Synthetic oligonucleotide; CTG chr2 60489202 60489223 60489207 60489202 -
gctctcacagtgtgaatttagt

SEQ ID NO: 221421 - DNA, 22 bp, Artificial Sequence
  Synthetic oligonucleotide; CTC chr2 60489198 60489219 60489203 60489198 -
tcacagtgtgaatttagttagg

SEQ ID NO: 221422 - DNA, 22 bp, Artificial Sequence
  Synthetic oligonucleotide; CTC chr2 60489196 60489217 60489201 60489196 -
acagtgtgaatttagttaggtg

SEQ ID NO: 221423 - DNA, 22 bp, Artificial Sequence
  Synthetic oligonucleotide; TTT chr2 60489183 60489204 60489188 60489183 -
agttaggtgtttccactttatt

SEQ ID NO: 221424 - DNA, 22 bp, Artificial Sequence
  Synthetic oligonucleotide; TTA chr2 60489182 60489203 60489187 60489182 -
gttaggtgtttccactttattt

SEQ ID NO: 221425 - DNA, 22 bp, Artificial Sequence
  Synthetic oligonucleotide; TTA chr2 60489178 60489199 60489183 60489178 -
ggtgtttccactttattttccc

SEQ ID NO: 221426 - DNA, 22 bp, Artificial Sequence
  Synthetic oligonucleotide; TTT chr2 60489171 60489192 60489176 60489171 -
ccactttattttccccaaactc

SEQ ID NO: 221427 - DNA, 22 bp, Artificial Sequence
  Synthetic oligonucleotide; TTC chr2 60489170 60489191 60489175 60489170 -
cactttattttccccaaactct

SEQ ID NO: 221428 - DNA, 22 bp, Artificial Sequence
  Synthetic oligonucleotide; CTT chr2 60489165 60489186 60489170 60489165 -
tattttccccaaactctaaagc

SEQ ID NO: 221429 - DNA, 22 bp, Artificial Sequence
  Synthetic oligonucleotide; TTT chr2 60489164 60489185 60489169 60489164 -
attttccccaaactctaaagca

SEQ ID NO: 221430 - DNA, 22 bp, Artificial Sequence
  Synthetic oligonucleotide; TTA chr2 60489163 60489184 60489168 60489163 -
ttttccccaaactctaaagcaa

SEQ ID NO: 221431 - DNA, 22 bp, Artificial Sequence
  Synthetic oligonucleotide; TTT chr2 60489160 60489181 60489165 60489160 -
tccccaaactctaaagcaacag

SEQ ID NO: 221432 - DNA, 22 bp, Artificial Sequence
  Synthetic oligonucleotide; TTT chr2 60489159 60489180 60489164 60489159 -
ccccaaactctaaagcaacagt

SEQ ID NO: 221433 - DNA, 22 bp, Artificial Sequence
  Synthetic oligonucleotide; TTC chr2 60489158 60489179 60489163 60489158 -
cccaaactctaaagcaacagtt

SEQ ID NO: 221434 - DNA, 22 bp, Artificial Sequence
  Synthetic oligonucleotide; CTC chr2 60489149 60489170 60489154 60489149 -
taaagcaacagtttaattgggg

SEQ ID NO: 221435 - DNA, 22 bp, Artificial Sequence
  Synthetic oligonucleotide; CTA chr2 60489147 60489168 60489152 60489147 -
aagcaacagtttaattggggtc

SEQ ID NO: 221436 - DNA, 22 bp, Artificial Sequence
  Synthetic oligonucleotide; TTT chr2 60489135 60489156 60489140 60489135 -
aattggggtctaaggtaccctt

SEQ ID NO: 221437 - DNA, 22 bp, Artificial Sequence
  Synthetic oligonucleotide; TTA chr2 60489134 60489155 60489139 60489134 -
attggggtctaaggtacccttt

SEQ ID NO: 221438 - DNA, 22 bp, Artificial Sequence
  Synthetic oligonucleotide; TTG chr2 60489130 60489151 60489135 60489130 -
gggtctaaggtaccctttagaa

SEQ ID NO: 221439 - DNA, 22 bp, Artificial Sequence
  Synthetic oligonucleotide; CTA chr2 60489123 60489144 60489128 60489123 -
aggtaccctttagaaacatttt

SEQ ID NO: 221440 - DNA, 22 bp, Artificial Sequence
  Synthetic oligonucleotide; CTT chr2 60489113 60489134 60489118 60489113 -
tagaaacattttgaccacctat

SEQ ID NO: 221441 - DNA, 22 bp, Artificial Sequence
  Synthetic oligonucleotide; TTT chr2 60489112 60489133 60489117 60489112 -
agaaacattttgaccacctatt

SEQ ID NO: 221442 - DNA, 22 bp, Artificial Sequence
  Synthetic oligonucleotide; TTA chr2 60489111 60489132 60489116 60489111 -
gaaacattttgaccacctatta

SEQ ID NO: 221443 - DNA, 22 bp, Artificial Sequence
  Synthetic oligonucleotide; TTT chr2 60489102 60489123 60489107 60489102 -
tgaccacctattatttaggaca

SEQ ID NO: 221444 - DNA, 22 bp, Artificial Sequence
  Synthetic oligonucleotide; TTT chr2 60489101 60489122 60489106 60489101 -
gaccacctattatttaggacac

SEQ ID NO: 221445 - DNA, 22 bp, Artificial Sequence
  Synthetic oligonucleotide; TTG chr2 60489100 60489121 60489105 60489100 -
accacctattatttaggacaca

SEQ ID NO: 221446 - DNA, 22 bp, Artificial Sequence
  Synthetic oligonucleotide; CTA chr2 60489092 60489113 60489097 60489092 -
ttatttaggacacacagcattt

SEQ ID NO: 221447 - DNA, 22 bp, Artificial Sequence
  Synthetic oligonucleotide; TTA chr2 60489089 60489110 60489094 60489089 -
tttaggacacacagcatttttt

SEQ ID NO: 221448 - DNA, 22 bp, Artificial Sequence
  Synthetic oligonucleotide; TTT chr2 60489086 60489107 60489091 60489086 -
aggacacacagcattttttttc

SEQ ID NO: 221449 - DNA, 22 bp, Artificial Sequence
  Synthetic oligonucleotide; TTA chr2 60489085 60489106 60489090 60489085 -
ggacacacagcattttttttct

SEQ ID NO: 221450 - DNA, 22 bp, Artificial Sequence
  Synthetic oligonucleotide; TTT chr2 60489070 60489091 60489075 60489070 -
tttttctttgaagataaatttg

SEQ ID NO: 221451 - DNA, 22 bp, Artificial Sequence
  Synthetic oligonucleotide; TTT chr2 60489069 60489090 60489074 60489069 -
ttttctttgaagataaatttgt

SEQ ID NO: 221452 - DNA, 22 bp, Artificial Sequence
  Synthetic oligonucleotide; TTT chr2 60489068 60489089 60489073 60489068 -
tttctttgaagataaatttgtt

SEQ ID NO: 221453 - DNA, 22 bp, Artificial Sequence
  Synthetic oligonucleotide; TTT chr2 60489067 60489088 60489072 60489067 -
ttctttgaagataaatttgttt

SEQ ID NO: 221454 - DNA, 22 bp, Artificial Sequence
  Synthetic oligonucleotide; TTT chr2 60489066 60489087 60489071 60489066 -
tctttgaagataaatttgtttt

SEQ ID NO: 221455 - DNA, 22 bp, Artificial Sequence
  Synthetic oligonucleotide; TTT chr2 60489065 60489086 60489070 60489065 -
ctttgaagataaatttgttttg

SEQ ID NO: 221456 - DNA, 22 bp, Artificial Sequence
  Synthetic oligonucleotide; TTC chr2 60489064 60489085 60489069 60489064 -
tttgaagataaatttgttttgg

SEQ ID NO: 221457 - DNA, 22 bp, Artificial Sequence
  Synthetic oligonucleotide; CTT chr2 60489062 60489083 60489067 60489062 -
tgaagataaatttgttttgggt

SEQ ID NO: 221458 - DNA, 22 bp, Artificial Sequence
  Synthetic oligonucleotide; TTT chr2 60489061 60489082 60489066 60489061 -
gaagataaatttgttttgggta

SEQ ID NO: 221459 - DNA, 22 bp, Artificial Sequence
  Synthetic oligonucleotide; TTG chr2 60489060 60489081 60489065 60489060 -
aagataaatttgttttgggtat

SEQ ID NO: 221460 - DNA, 22 bp, Artificial Sequence
  Synthetic oligonucleotide; TTT chr2 60489049 60489070 60489054 60489049 -
gttttgggtatggctgggtgtg

SEQ ID NO: 221461 - DNA, 22 bp, Artificial Sequence
  Synthetic oligonucleotide; TTG chr2 60489048 60489069 60489053 60489048 -
ttttgggtatggctgggtgtgg

SEQ ID NO: 221462 - DNA, 22 bp, Artificial Sequence
  Synthetic oligonucleotide; TTT chr2 60489045 60489066 60489050 60489045 -
tgggtatggctgggtgtggtag

SEQ ID NO: 221463 - DNA, 22 bp, Artificial Sequence
  Synthetic oligonucleotide; TTT chr2 60489044 60489065 60489049 60489044 -
gggtatggctgggtgtggtagc

SEQ ID NO: 221464 - DNA, 22 bp, Artificial Sequence
  Synthetic oligonucleotide; TTG chr2 60489043 60489064 60489048 60489043 -
ggtatggctgggtgtggtagct

SEQ ID NO: 221465 - DNA, 22 bp, Artificial Sequence
  Synthetic oligonucleotide; CTG chr2 60489033 60489054 60489038 60489033 -
ggtgtggtagcttatgcctata

SEQ ID NO: 221466 - DNA, 22 bp, Artificial Sequence
  Synthetic oligonucleotide; CTT chr2 60489020 60489041 60489025 60489020 -
atgcctataatcccagcacttt

SEQ ID NO: 221467 - DNA, 22 bp, Artificial Sequence
  Synthetic oligonucleotide; TTA chr2 60489019 60489040 60489024 60489019 -
tgcctataatcccagcactttg

SEQ ID NO: 221468 - DNA, 22 bp, Artificial Sequence
  Synthetic oligonucleotide; CTA chr2 60489013 60489034 60489018 60489013 -
taatcccagcactttgggaggc

SEQ ID NO: 221469 - DNA, 22 bp, Artificial Sequence
  Synthetic oligonucleotide; CTT chr2 60488999 60489020 60489004 60488999 -
tgggaggctgaggtgggtggat

SEQ ID NO: 221470 - DNA, 22 bp, Artificial Sequence
  Synthetic oligonucleotide; TTT chr2 60488998 60489019 60489003 60488998 -
gggaggctgaggtgggtggatc

SEQ ID NO: 221471 - DNA, 22 bp, Artificial Sequence
  Synthetic oligonucleotide; TTG chr2 60488997 60489018 60489002 60488997 -
ggaggctgaggtgggtggatca

SEQ ID NO: 221472 - DNA, 22 bp, Artificial Sequence
  Synthetic oligonucleotide; CTG chr2 60488989 60489010 60488994 60488989 -
aggtgggtggatcacctaaggt

SEQ ID NO: 221473 - DNA, 22 bp, Artificial Sequence
  Synthetic oligonucleotide; CTA chr2 60488971 60488992 60488976 60488971 -
aggtcgggagtttgagaccagc

SEQ ID NO: 221474 - DNA, 22 bp, Artificial Sequence
  Synthetic oligonucleotide; TTT chr2 60488958 60488979 60488963 60488958 -
gagaccagcctgaccaacatgg

SEQ ID NO: 221475 - DNA, 22 bp, Artificial Sequence
  Synthetic oligonucleotide; TTG chr2 60488957 60488978 60488962 60488957 -
agaccagcctgaccaacatgga

SEQ ID NO: 221476 - DNA, 22 bp, Artificial Sequence
  Synthetic oligonucleotide; CTG chr2 60488946 60488967 60488951 60488946 -
accaacatggagaaaccccgtc

SEQ ID NO: 221477 - DNA, 22 bp, Artificial Sequence
  Synthetic oligonucleotide; CTC chr2 60488922 60488943 60488927 60488922 -
taccaaaaatacagaaattagc

SEQ ID NO: 221478 - DNA, 22 bp, Artificial Sequence
  Synthetic oligonucleotide; CTA chr2 60488920 60488941 60488925 60488920 -
ccaaaaatacagaaattagccg

SEQ ID NO: 221479 - DNA, 22 bp, Artificial Sequence
  Synthetic oligonucleotide; TTA chr2 60488902 60488923 60488907 60488902 -
gccgcgtgtggtggcgcatgcc

SEQ ID NO: 221480 - DNA, 22 bp, Artificial Sequence
  Synthetic oligonucleotide; CTA chr2 60488878 60488899 60488883 60488878 -
taatcccagctacttgggaggc

SEQ ID NO: 221481 - DNA, 22 bp, Artificial Sequence
  Synthetic oligonucleotide; CTA chr2 60488866 60488887 60488871 60488866 -
cttgggaggctgaggcaggaga

SEQ ID NO: 221482 - DNA, 22 bp, Artificial Sequence
  Synthetic oligonucleotide; CTT chr2 60488863 60488884 60488868 60488863 -
gggaggctgaggcaggagaatc

SEQ ID NO: 221483 - DNA, 22 bp, Artificial Sequence
  Synthetic oligonucleotide; TTG chr2 60488862 60488883 60488867 60488862 -
ggaggctgaggcaggagaatcg

SEQ ID NO: 221484 - DNA, 22 bp, Artificial Sequence
  Synthetic oligonucleotide; CTG chr2 60488854 60488875 60488859 60488854 -
aggcaggagaatcgcttgaacc

SEQ ID NO: 221485 - DNA, 22 bp, Artificial Sequence
  Synthetic oligonucleotide; CTT chr2 60488837 60488858 60488842 60488837 -
gaacccgggaggcggagattgc

SEQ ID NO: 221486 - DNA, 22 bp, Artificial Sequence
  Synthetic oligonucleotide; TTG chr2 60488836 60488857 60488841 60488836 -
aacccgggaggcggagattgcg

SEQ ID NO: 221487 - DNA, 22 bp, Artificial Sequence
  Synthetic oligonucleotide; TTG chr2 60488816 60488837 60488821 60488816 -
cggtgagccgagattgcgccat

SEQ ID NO: 221488 - DNA, 22 bp, Artificial Sequence
  Synthetic oligonucleotide; TTG chr2 60488800 60488821 60488805 60488800 -
cgccattgcactccagcccggg

SEQ ID NO: 221489 - DNA, 22 bp, Artificial Sequence
  Synthetic oligonucleotide; TTG chr2 60488792 60488813 60488797 60488792 -
cactccagcccgggcaacaaga

SEQ ID NO: 221490 - DNA, 22 bp, Artificial Sequence
  Synthetic oligonucleotide; CTC chr2 60488787 60488808 60488792 60488787 -
cagcccgggcaacaagagcgaa

SEQ ID NO: 221491 - DNA, 22 bp, Artificial Sequence
  Synthetic oligonucleotide; CTC chr2 60488761 60488782 60488766 60488761 -
cacctcagaaacaaaaaacaaa

SEQ ID NO: 221492 - DNA, 22 bp, Artificial Sequence
  Synthetic oligonucleotide; CTC chr2 60488755 60488776 60488760 60488755 -
agaaacaaaaaacaaacaaaca

SEQ ID NO: 221493 - DNA, 22 bp, Artificial Sequence
  Synthetic oligonucleotide; TTT chr2 60488708 60488729 60488713 60488708 -
tgggtagcagtggctttaggct

SEQ ID NO: 221494 - DNA, 22 bp, Artificial Sequence
  Synthetic oligonucleotide; TTT chr2 60488707 60488728 60488712 60488707 -
gggtagcagtggctttaggctg

SEQ ID NO: 221495 - DNA, 22 bp, Artificial Sequence
  Synthetic oligonucleotide; TTG chr2 60488706 60488727 60488711 60488706 -
ggtagcagtggctttaggctgt

SEQ ID NO: 221496 - DNA, 22 bp, Artificial Sequence
  Synthetic oligonucleotide; CTT chr2 60488692 60488713 60488697 60488692 -
taggctgtttttggatctttgg

SEQ ID NO: 221497 - DNA, 22 bp, Artificial Sequence
  Synthetic oligonucleotide; TTT chr2 60488691 60488712 60488696 60488691 -
aggctgtttttggatctttggc

SEQ ID NO: 221498 - DNA, 22 bp, Artificial Sequence
  Synthetic oligonucleotide; TTA chr2 60488690 60488711 60488695 60488690 -
ggctgtttttggatctttggct

SEQ ID NO: 221499 - DNA, 22 bp, Artificial Sequence
  Synthetic oligonucleotide; CTG chr2 60488685 60488706 60488690 60488685 -
tttttggatctttggctattga

SEQ ID NO: 221500 - DNA, 22 bp, Artificial Sequence
  Synthetic oligonucleotide; TTT chr2 60488682 60488703 60488687 60488682 -
ttggatctttggctattgatac

SEQ ID NO: 221501 - DNA, 22 bp, Artificial Sequence
  Synthetic oligonucleotide; TTT chr2 60488681 60488702 60488686 60488681 -
tggatctttggctattgatact

SEQ ID NO: 221502 - DNA, 22 bp, Artificial Sequence
  Synthetic oligonucleotide; TTT chr2 60488680 60488701 60488685 60488680 -
ggatctttggctattgatactg

SEQ ID NO: 221503 - DNA, 22 bp, Artificial Sequence
  Synthetic oligonucleotide; TTG chr2 60488679 60488700 60488684 60488679 -
gatctttggctattgatactga

SEQ ID NO: 221504 - DNA, 22 bp, Artificial Sequence
  Synthetic oligonucleotide; CTT chr2 60488673 60488694 60488678 60488673 -
tggctattgatactgatttgaa

SEQ ID NO: 221505 - DNA, 22 bp, Artificial Sequence
  Synthetic oligonucleotide; TTT chr2 60488672 60488693 60488677 60488672 -
ggctattgatactgatttgaaa

SEQ ID NO: 221506 - DNA, 22 bp, Artificial Sequence
  Synthetic oligonucleotide; TTG chr2 60488671 60488692 60488676 60488671 -
gctattgatactgatttgaaat

SEQ ID NO: 221507 - DNA, 22 bp, Artificial Sequence
  Synthetic oligonucleotide; CTA chr2 60488667 60488688 60488672 60488667 -
ttgatactgatttgaaattttt

SEQ ID NO: 221508 - DNA, 22 bp, Artificial Sequence
  Synthetic oligonucleotide; TTG chr2 60488664 60488685 60488669 60488664 -
atactgatttgaaattttttgt

SEQ ID NO: 221509 - DNA, 22 bp, Artificial Sequence
  Synthetic oligonucleotide; CTG chr2 60488658 60488679 60488663 60488658 -
atttgaaattttttgttattat

SEQ ID NO: 221510 - DNA, 22 bp, Artificial Sequence
  Synthetic oligonucleotide; TTT chr2 60488654 60488675 60488659 60488654 -
gaaattttttgttattattttc

SEQ ID NO: 221511 - DNA, 22 bp, Artificial Sequence
  Synthetic oligonucleotide; TTG chr2 60488653 60488674 60488658 60488653 -
aaattttttgttattattttca

SEQ ID NO: 221512 - DNA, 22 bp, Artificial Sequence
  Synthetic oligonucleotide; TTT chr2 60488647 60488668 60488652 60488647 -
tttgttattattttcatgttaa

SEQ ID NO: 221513 - DNA, 22 bp, Artificial Sequence
  Synthetic oligonucleotide; TTT chr2 60488646 60488667 60488651 60488646 -
ttgttattattttcatgttaag

SEQ ID NO: 221514 - DNA, 22 bp, Artificial Sequence
  Synthetic oligonucleotide; TTT chr2 60488645 60488666 60488650 60488645 -
tgttattattttcatgttaagc

SEQ ID NO: 221515 - DNA, 22 bp, Artificial Sequence
  Synthetic oligonucleotide; TTT chr2 60488644 60488665 60488649 60488644 -
gttattattttcatgttaagca

SEQ ID NO: 221516 - DNA, 22 bp, Artificial Sequence
  Synthetic oligonucleotide; TTG chr2 60488643 60488664 60488648 60488643 -
ttattattttcatgttaagcaa

SEQ ID NO: 221517 - DNA, 22 bp, Artificial Sequence
  Synthetic oligonucleotide; TTA chr2 60488640 60488661 60488645 60488640 -
ttattttcatgttaagcaaaac

SEQ ID NO: 221518 - DNA, 22 bp, Artificial Sequence
  Synthetic oligonucleotide; TTA chr2 60488637 60488658 60488642 60488637 -
ttttcatgttaagcaaaactag

SEQ ID NO: 221519 - DNA, 22 bp, Artificial Sequence
  Synthetic oligonucleotide; TTT chr2 60488634 60488655 60488639 60488634 -
tcatgttaagcaaaactagaaa

SEQ ID NO: 221520 - DNA, 22 bp, Artificial Sequence
  Synthetic oligonucleotide; TTT chr2 60488633 60488654 60488638 60488633 -
catgttaagcaaaactagaaag

SEQ ID NO: 221521 - DNA, 22 bp, Artificial Sequence
  Synthetic oligonucleotide; TTC chr2 60488632 60488653 60488637 60488632 -
atgttaagcaaaactagaaagt

SEQ ID NO: 221522 - DNA, 22 bp, Artificial Sequence
  Synthetic oligonucleotide; TTA chr2 60488626 60488647 60488631 60488626 -
agcaaaactagaaagttttacc

SEQ ID NO: 221523 - DNA, 22 bp, Artificial Sequence
  Synthetic oligonucleotide; CTA chr2 60488616 60488637 60488621 60488616 -
gaaagttttaccgaattcccct

SEQ ID NO: 221524 - DNA, 22 bp, Artificial Sequence
  Synthetic oligonucleotide; TTT chr2 60488608 60488629 60488613 60488608 -
taccgaattcccctgcagtaca

SEQ ID NO: 221525 - DNA, 22 bp, Artificial Sequence
  Synthetic oligonucleotide; TTT chr2 60488607 60488628 60488612 60488607 -
accgaattcccctgcagtacag

SEQ ID NO: 221526 - DNA, 22 bp, Artificial Sequence
  Synthetic oligonucleotide; TTA chr2 60488606 60488627 60488611 60488606 -
ccgaattcccctgcagtacagt

SEQ ID NO: 221527 - DNA, 22 bp, Artificial Sequence
  Synthetic oligonucleotide; TTC chr2 60488598 60488619 60488603 60488598 -
ccctgcagtacagtaagtattt

SEQ ID NO: 221528 - DNA, 22 bp, Artificial Sequence
  Synthetic oligonucleotide; CTG chr2 60488593 60488614 60488598 60488593 -
cagtacagtaagtattttcttt

SEQ ID NO: 221529 - DNA, 22 bp, Artificial Sequence
  Synthetic oligonucleotide; TTT chr2 60488576 60488597 60488581 60488576 -
tctttcattgggggaagcaaac

SEQ ID NO: 221530 - DNA, 22 bp, Artificial Sequence
  Synthetic oligonucleotide; TTT chr2 60488575 60488596 60488580 60488575 -
ctttcattgggggaagcaaact

SEQ ID NO: 221531 - DNA, 22 bp, Artificial Sequence
  Synthetic oligonucleotide; TTC chr2 60488574 60488595 60488579 60488574 -
tttcattgggggaagcaaacta

SEQ ID NO: 221532 - DNA, 22 bp, Artificial Sequence
  Synthetic oligonucleotide; CTT chr2 60488572 60488593 60488577 60488572 -
tcattgggggaagcaaactatt

SEQ ID NO: 221533 - DNA, 22 bp, Artificial Sequence
  Synthetic oligonucleotide; TTT chr2 60488571 60488592 60488576 60488571 -
cattgggggaagcaaactattt

SEQ ID NO: 221534 - DNA, 22 bp, Artificial Sequence
  Synthetic oligonucleotide; TTC chr2 60488570 60488591 60488575 60488570 -
attgggggaagcaaactattta

SEQ ID NO: 221535 - DNA, 22 bp, Artificial Sequence
  Synthetic oligonucleotide; TTG chr2 60488566 60488587 60488571 60488566 -
ggggaagcaaactatttacagc

SEQ ID NO: 221536 - DNA, 22 bp, Artificial Sequence
  Synthetic oligonucleotide; CTA chr2 60488552 60488573 60488557 60488552 -
tttacagccataacagggtttc

SEQ ID NO: 221537 - DNA, 22 bp, Artificial Sequence
  Synthetic oligonucleotide; TTT chr2 60488549 60488570 60488554 60488549 -
acagccataacagggtttccag

SEQ ID NO: 221538 - DNA, 22 bp, Artificial Sequence
  Synthetic oligonucleotide; TTA chr2 60488548 60488569 60488553 60488548 -
cagccataacagggtttccagt

SEQ ID NO: 221539 - DNA, 22 bp, Artificial Sequence
  Synthetic oligonucleotide; TTT chr2 60488531 60488552 60488536 60488531 -
ccagtgaattgtataagtagca

SEQ ID NO: 221540 - DNA, 22 bp, Artificial Sequence
  Synthetic oligonucleotide; TTC chr2 60488530 60488551 60488535 60488530 -
cagtgaattgtataagtagcac

SEQ ID NO: 221541 - DNA, 22 bp, Artificial Sequence
  Synthetic oligonucleotide; TTG chr2 60488520 60488541 60488525 60488520 -
tataagtagcactgagttctgt

SEQ ID NO: 221542 - DNA, 22 bp, Artificial Sequence
  Synthetic oligonucleotide; CTG chr2 60488506 60488527 60488511 60488506 -
agttctgtgtcagcaaaaaatg

SEQ ID NO: 221543 - DNA, 22 bp, Artificial Sequence
  Synthetic oligonucleotide; TTC chr2 60488501 60488522 60488506 60488501 -
tgtgtcagcaaaaaatgaaaca

SEQ ID NO: 221544 - DNA, 22 bp, Artificial Sequence
  Synthetic oligonucleotide; CTG chr2 60488499 60488520 60488504 60488499 -
tgtcagcaaaaaatgaaacaaa

SEQ ID NO: 221545 - DNA, 22 bp, Artificial Sequence
  Synthetic oligonucleotide; CTG chr2 60488472 60488493 60488477 60488472 -
atcatagatgacattacctaaa

SEQ ID NO: 221546 - DNA, 22 bp, Artificial Sequence
  Synthetic oligonucleotide; TTA chr2 60488456 60488477 60488461 60488456 -
cctaaatgacagtacctacgtg

SEQ ID NO: 221547 - DNA, 22 bp, Artificial Sequence
  Synthetic oligonucleotide; CTA chr2 60488452 60488473 60488457 60488452 -
aatgacagtacctacgtgtgtc

SEQ ID NO: 221548 - DNA, 22 bp, Artificial Sequence
  Synthetic oligonucleotide; CTA chr2 60488438 60488459 60488443 60488438 -
cgtgtgtcctttctttcacatt

SEQ ID NO: 221549 - DNA, 22 bp, Artificial Sequence
  Synthetic oligonucleotide; CTT chr2 60488427 60488448 60488432 60488427 -
tctttcacatttgctgtaatcc

SEQ ID NO: 221550 - DNA, 22 bp, Artificial Sequence
  Synthetic oligonucleotide; TTT chr2 60488426 60488447 60488431 60488426 -
ctttcacatttgctgtaatcct

SEQ ID NO: 221551 - DNA, 22 bp, Artificial Sequence
  Synthetic oligonucleotide; TTC chr2 60488425 60488446 60488430 60488425 -
tttcacatttgctgtaatcctg

SEQ ID NO: 221552 - DNA, 22 bp, Artificial Sequence
  Synthetic oligonucleotide; CTT chr2 60488423 60488444 60488428 60488423 -
tcacatttgctgtaatcctgtt

SEQ ID NO: 221553 - DNA, 22 bp, Artificial Sequence
  Synthetic oligonucleotide; TTT chr2 60488422 60488443 60488427 60488422 -
cacatttgctgtaatcctgtta

SEQ ID NO: 221554 - DNA, 22 bp, Artificial Sequence
  Synthetic oligonucleotide; TTC chr2 60488421 60488442 60488426 60488421 -
acatttgctgtaatcctgttat

SEQ ID NO: 221555 - DNA, 22 bp, Artificial Sequence
  Synthetic oligonucleotide; TTT chr2 60488415 60488436 60488420 60488415 -
gctgtaatcctgttatggcatt

SEQ ID NO: 221556 - DNA, 22 bp, Artificial Sequence
  Synthetic oligonucleotide; TTG chr2 60488414 60488435 60488419 60488414 -
ctgtaatcctgttatggcattg

SEQ ID NO: 221557 - DNA, 22 bp, Artificial Sequence
  Synthetic oligonucleotide; CTG chr2 60488411 60488432 60488416 60488411 -
taatcctgttatggcattgtcc

SEQ ID NO: 221558 - DNA, 22 bp, Artificial Sequence
  Synthetic oligonucleotide; CTG chr2 60488403 60488424 60488408 60488403 -
ttatggcattgtcctattatct

SEQ ID NO: 221559 - DNA, 22 bp, Artificial Sequence
  Synthetic oligonucleotide; TTA chr2 60488400 60488421 60488405 60488400 -
tggcattgtcctattatctcaa

SEQ ID NO: 221560 - DNA, 22 bp, Artificial Sequence
  Synthetic oligonucleotide; TTG chr2 60488392 60488413 60488397 60488392 -
tcctattatctcaagtactgtc

SEQ ID NO: 221561 - DNA, 22 bp, Artificial Sequence
  Synthetic oligonucleotide; CTA chr2 60488387 60488408 60488392 60488387 -
ttatctcaagtactgtcatctt

SEQ ID NO: 221562 - DNA, 22 bp, Artificial Sequence
  Synthetic oligonucleotide; TTA chr2 60488384 60488405 60488389 60488384 -
tctcaagtactgtcatctttaa

SEQ ID NO: 221563 - DNA, 22 bp, Artificial Sequence
  Synthetic oligonucleotide; CTC chr2 60488380 60488401 60488385 60488380 -
aagtactgtcatctttaaatgc

SEQ ID NO: 221564 - DNA, 22 bp, Artificial Sequence
  Synthetic oligonucleotide; CTG chr2 60488372 60488393 60488377 60488372 -
tcatctttaaatgctgtcaaat

SEQ ID NO: 221565 - DNA, 22 bp, Artificial Sequence
  Synthetic oligonucleotide; CTT chr2 60488365 60488386 60488370 60488365 -
taaatgctgtcaaattgtaact

SEQ ID NO: 221566 - DNA, 22 bp, Artificial Sequence
  Synthetic oligonucleotide; TTT chr2 60488364 60488385 60488369 60488364 -
aaatgctgtcaaattgtaactg

SEQ ID NO: 221567 - DNA, 22 bp, Artificial Sequence
  Synthetic oligonucleotide; TTA chr2 60488363 60488384 60488368 60488363 -
aatgctgtcaaattgtaactgg

SEQ ID NO: 221568 - DNA, 22 bp, Artificial Sequence
  Synthetic oligonucleotide; CTG chr2 60488356 60488377 60488361 60488356 -
tcaaattgtaactggattgcca

SEQ ID NO: 221569 - DNA, 22 bp, Artificial Sequence
  Synthetic oligonucleotide; TTG chr2 60488348 60488369 60488353 60488348 -
taactggattgccaaggacaga

SEQ ID NO: 221570 - DNA, 22 bp, Artificial Sequence
  Synthetic oligonucleotide; CTG chr2 60488342 60488363 60488347 60488342 -
gattgccaaggacagaggagag

SEQ ID NO: 221571 - DNA, 22 bp, Artificial Sequence
  Synthetic oligonucleotide; TTG chr2 60488337 60488358 60488342 60488337 -
ccaaggacagaggagaggaacc

SEQ ID NO: 221572 - DNA, 22 bp, Artificial Sequence
  Synthetic oligonucleotide; TTC chr2 60488293 60488314 60488298 60488293 -
ccactgcaccaaagagacggtc

SEQ ID NO: 221573 - DNA, 22 bp, Artificial Sequence
  Synthetic oligonucleotide; CTG chr2 60488287 60488308 60488292 60488287 -
caccaaagagacggtcttcttc

SEQ ID NO: 221574 - DNA, 22 bp, Artificial Sequence
  Synthetic oligonucleotide; CTT chr2 60488269 60488290 60488274 60488269 -
cttccccctctcacagtctgaa

SEQ ID NO: 221575 - DNA, 22 bp, Artificial Sequence
  Synthetic oligonucleotide; TTC chr2 60488268 60488289 60488273 60488268 -
ttccccctctcacagtctgaat

SEQ ID NO: 221576 - DNA, 22 bp, Artificial Sequence
  Synthetic oligonucleotide; CTT chr2 60488266 60488287 60488271 60488266 -
ccccctctcacagtctgaattc

SEQ ID NO: 221577 - DNA, 22 bp, Artificial Sequence
  Synthetic oligonucleotide; TTC chr2 60488265 60488286 60488270 60488265 -
cccctctcacagtctgaattct

SEQ ID NO: 221578 - DNA, 22 bp, Artificial Sequence
  Synthetic oligonucleotide; CTC chr2 60488259 60488280 60488264 60488259 -
tcacagtctgaattcttggaga

SEQ ID NO: 221579 - DNA, 22 bp, Artificial Sequence
  Synthetic oligonucleotide; CTC chr2 60488257 60488278 60488262 60488257 -
acagtctgaattcttggagaca

SEQ ID NO: 221580 - DNA, 22 bp, Artificial Sequence
  Synthetic oligonucleotide; CTG chr2 60488249 60488270 60488254 60488249 -
aattcttggagacattgttcag

SEQ ID NO: 221581 - DNA, 22 bp, Artificial Sequence
  Synthetic oligonucleotide; TTC chr2 60488244 60488265 60488249 60488244 -
ttggagacattgttcagttaaa

SEQ ID NO: 221582 - DNA, 22 bp, Artificial Sequence
  Synthetic oligonucleotide; CTT chr2 60488242 60488263 60488247 60488242 -
ggagacattgttcagttaaaat

SEQ ID NO: 221583 - DNA, 22 bp, Artificial Sequence
  Synthetic oligonucleotide; TTG chr2 60488241 60488262 60488246 60488241 -
gagacattgttcagttaaaatc

SEQ ID NO: 221584 - DNA, 22 bp, Artificial Sequence
  Synthetic oligonucleotide; TTG chr2 60488232 60488253 60488237 60488232 -
ttcagttaaaatcatgactcag

SEQ ID NO: 221585 - DNA, 22 bp, Artificial Sequence
  Synthetic oligonucleotide; TTC chr2 60488229 60488250 60488234 60488229 -
agttaaaatcatgactcaggta

SEQ ID NO: 221586 - DNA, 22 bp, Artificial Sequence
  Synthetic oligonucleotide; TTA chr2 60488224 60488245 60488229 60488224 -
aaatcatgactcaggtatcttt

SEQ ID NO: 221587 - DNA, 22 bp, Artificial Sequence
  Synthetic oligonucleotide; CTC chr2 60488212 60488233 60488217 60488212 -
aggtatcttttacaggctttga

SEQ ID NO: 221588 - DNA, 22 bp, Artificial Sequence
  Synthetic oligonucleotide; CTT chr2 60488203 60488224 60488208 60488203 -
ttacaggctttgatgaaatagt

SEQ ID NO: 221589 - DNA, 22 bp, Artificial Sequence
  Synthetic oligonucleotide; TTT chr2 60488202 60488223 60488207 60488202 -
tacaggctttgatgaaatagtc

SEQ ID NO: 221590 - DNA, 22 bp, Artificial Sequence
  Synthetic oligonucleotide; TTT chr2 60488201 60488222 60488206 60488201 -
acaggctttgatgaaatagtca

SEQ ID NO: 221591 - DNA, 22 bp, Artificial Sequence
  Synthetic oligonucleotide; TTA chr2 60488200 60488221 60488205 60488200 -
caggctttgatgaaatagtcag

SEQ ID NO: 221592 - DNA, 22 bp, Artificial Sequence
  Synthetic oligonucleotide; CTT chr2 60488193 60488214 60488198 60488193 -
tgatgaaatagtcagattcact

SEQ ID NO: 221593 - DNA, 22 bp, Artificial Sequence
  Synthetic oligonucleotide; TTT chr2 60488192 60488213 60488197 60488192 -
gatgaaatagtcagattcactc

SEQ ID NO: 221594 - DNA, 22 bp, Artificial Sequence
  Synthetic oligonucleotide; TTG chr2 60488191 60488212 60488196 60488191 -
atgaaatagtcagattcactcc

SEQ ID NO: 221595 - DNA, 22 bp, Artificial Sequence
  Synthetic oligonucleotide; TTC chr2 60488174 60488195 60488179 60488174 -
actcctcatgttcctagaagga

SEQ ID NO: 221596 - DNA, 22 bp, Artificial Sequence
  Synthetic oligonucleotide; CTC chr2 60488170 60488191 60488175 60488170 -
ctcatgttcctagaaggaaagg

SEQ ID NO: 221597 - DNA, 22 bp, Artificial Sequence
  Synthetic oligonucleotide; CTC chr2 60488167 60488188 60488172 60488167 -
atgttcctagaaggaaaggaag

SEQ ID NO: 221598 - DNA, 22 bp, Artificial Sequence
  Synthetic oligonucleotide; TTC chr2 60488161 60488182 60488166 60488161 -
ctagaaggaaaggaagaaacac

SEQ ID NO: 221599 - DNA, 22 bp, Artificial Sequence
  Synthetic oligonucleotide; CTA chr2 60488158 60488179 60488163 60488158 -
gaaggaaaggaagaaacactct

SEQ ID NO: 221600 - DNA, 22 bp, Artificial Sequence
  Synthetic oligonucleotide; CTC chr2 60488137 60488158 60488142 60488137 -
tttgaacagcccgtgagacaaa

SEQ ID NO: 221601 - DNA, 22 bp, Artificial Sequence
  Synthetic oligonucleotide; CTT chr2 60488135 60488156 60488140 60488135 -
tgaacagcccgtgagacaaact

SEQ ID NO: 221602 - DNA, 22 bp, Artificial Sequence
  Synthetic oligonucleotide; TTT chr2 60488134 60488155 60488139 60488134 -
gaacagcccgtgagacaaactc

SEQ ID NO: 221603 - DNA, 22 bp, Artificial Sequence
  Synthetic oligonucleotide; TTG chr2 60488133 60488154 60488138 60488133 -
aacagcccgtgagacaaactct

SEQ ID NO: 221604 - DNA, 22 bp, Artificial Sequence
  Synthetic oligonucleotide; CTC chr2 60488112 60488133 60488117 60488112 -
ttccaggataatttaaatgttt

SEQ ID NO: 221605 - DNA, 22 bp, Artificial Sequence
  Synthetic oligonucleotide; CTT chr2 60488110 60488131 60488115 60488110 -
ccaggataatttaaatgtttct

SEQ ID NO: 221606 - DNA, 22 bp, Artificial Sequence
  Synthetic oligonucleotide; TTC chr2 60488109 60488130 60488114 60488109 -
caggataatttaaatgtttcta

SEQ ID NO: 221607 - DNA, 22 bp, Artificial Sequence
  Synthetic oligonucleotide; TTT chr2 60488098 60488119 60488103 60488098 -
aaatgtttctacataatgagaa

SEQ ID NO: 221608 - DNA, 22 bp, Artificial Sequence
  Synthetic oligonucleotide; TTA chr2 60488097 60488118 60488102 60488097 -
aatgtttctacataatgagaat

SEQ ID NO: 221609 - DNA, 22 bp, Artificial Sequence
  Synthetic oligonucleotide; TTT chr2 60488090 60488111 60488095 60488090 -
ctacataatgagaataaattgt

SEQ ID NO: 221610 - DNA, 22 bp, Artificial Sequence
  Synthetic oligonucleotide; TTC chr2 60488089 60488110 60488094 60488089 -
tacataatgagaataaattgta

SEQ ID NO: 221611 - DNA, 22 bp, Artificial Sequence
  Synthetic oligonucleotide; CTA chr2 60488087 60488108 60488092 60488087 -
cataatgagaataaattgtaag

SEQ ID NO: 221612 - DNA, 22 bp, Artificial Sequence
  Synthetic oligonucleotide; TTG chr2 60488069 60488090 60488074 60488069 -
taagtgttactgtgtttttaaa

SEQ ID NO: 221613 - DNA, 22 bp, Artificial Sequence
  Synthetic oligonucleotide; TTA chr2 60488060 60488081 60488065 60488060 -
ctgtgtttttaaaacccaggtc

SEQ ID NO: 221614 - DNA, 22 bp, Artificial Sequence
  Synthetic oligonucleotide; CTG chr2 60488057 60488078 60488062 60488057 -
tgtttttaaaacccaggtcaaa

SEQ ID NO: 221615 - DNA, 22 bp, Artificial Sequence
  Synthetic oligonucleotide; TTT chr2 60488052 60488073 60488057 60488052 -
ttaaaacccaggtcaaaagtaa

SEQ ID NO: 221616 - DNA, 22 bp, Artificial Sequence
  Synthetic oligonucleotide; TTT chr2 60488051 60488072 60488056 60488051 -
taaaacccaggtcaaaagtaat

SEQ ID NO: 221617 - DNA, 22 bp, Artificial Sequence
  Synthetic oligonucleotide; TTT chr2 60488050 60488071 60488055 60488050 -
aaaacccaggtcaaaagtaata

SEQ ID NO: 221618 - DNA, 22 bp, Artificial Sequence
  Synthetic oligonucleotide; TTA chr2 60488049 60488070 60488054 60488049 -
aaacccaggtcaaaagtaatag

SEQ ID NO: 221619 - DNA, 22 bp, Artificial Sequence
  Synthetic oligonucleotide; CTA chr2 60488011 60488032 60488016 60488011 -
taagcatttaatatctaattgt

SEQ ID NO: 221620 - DNA, 22 bp, Artificial Sequence
  Synthetic oligonucleotide; TTT chr2 60488002 60488023 60488007 60488002 -
aatatctaattgttcatatatt

SEQ ID NO: 221621 - DNA, 22 bp, Artificial Sequence
  Synthetic oligonucleotide; TTA chr2 60488001 60488022 60488006 60488001 -
atatctaattgttcatatattg

SEQ ID NO: 221622 - DNA, 22 bp, Artificial Sequence
  Synthetic oligonucleotide; CTA chr2 60487994 60488015 60487999 60487994 -
attgttcatatattgcttcccc

SEQ ID NO: 221623 - DNA, 22 bp, Artificial Sequence
  Synthetic oligonucleotide; TTG chr2 60487990 60488011 60487995 60487990 -
ttcatatattgcttccccaggt

SEQ ID NO: 221624 - DNA, 22 bp, Artificial Sequence
  Synthetic oligonucleotide; TTC chr2 60487987 60488008 60487992 60487987 -
atatattgcttccccaggttta

SEQ ID NO: 221625 - DNA, 22 bp, Artificial Sequence
  Synthetic oligonucleotide; TTG chr2 60487979 60488000 60487984 60487979 -
cttccccaggtttagatgaggg

SEQ ID NO: 221626 - DNA, 22 bp, Artificial Sequence
  Synthetic oligonucleotide; CTT chr2 60487976 60487997 60487981 60487976 -
ccccaggtttagatgagggctc

SEQ ID NO: 221627 - DNA, 22 bp, Artificial Sequence
  Synthetic oligonucleotide; TTC chr2 60487975 60487996 60487980 60487975 -
cccaggtttagatgagggctcc

SEQ ID NO: 221628 - DNA, 22 bp, Artificial Sequence
  Synthetic oligonucleotide; TTT chr2 60487966 60487987 60487971 60487966 -
agatgagggctccattctagag

SEQ ID NO: 221629 - DNA, 22 bp, Artificial Sequence
  Synthetic oligonucleotide; TTA chr2 60487965 60487986 60487970 60487965 -
gatgagggctccattctagagt

SEQ ID NO: 221630 - DNA, 22 bp, Artificial Sequence
  Synthetic oligonucleotide; CTC chr2 60487954 60487975 60487959 60487954 -
cattctagagttgggaaaacca

SEQ ID NO: 221631 - DNA, 22 bp, Artificial Sequence
  Synthetic oligonucleotide; TTC chr2 60487949 60487970 60487954 60487949 -
tagagttgggaaaaccaagtca

SEQ ID NO: 221632 - DNA, 22 bp, Artificial Sequence
  Synthetic oligonucleotide; CTA chr2 60487947 60487968 60487952 60487947 -
gagttgggaaaaccaagtcagt

SEQ ID NO: 221633 - DNA, 22 bp, Artificial Sequence
  Synthetic oligonucleotide; TTG chr2 60487941 60487962 60487946 60487941 -
ggaaaaccaagtcagtaaacct

SEQ ID NO: 221634 - DNA, 22 bp, Artificial Sequence
  Synthetic oligonucleotide; CTT chr2 60487918 60487939 60487923 60487918 -
tagtggcagatgttatcaggga

SEQ ID NO: 221635 - DNA, 22 bp, Artificial Sequence
  Synthetic oligonucleotide; TTT chr2 60487917 60487938 60487922 60487917 -
agtggcagatgttatcagggag

SEQ ID NO: 221636 - DNA, 22 bp, Artificial Sequence
  Synthetic oligonucleotide; TTA chr2 60487916 60487937 60487921 60487916 -
gtggcagatgttatcagggagc

SEQ ID NO: 221637 - DNA, 22 bp, Artificial Sequence
  Synthetic oligonucleotide; TTA chr2 60487903 60487924 60487908 60487903 -
tcagggagctggagttggagta

SEQ ID NO: 221638 - DNA, 22 bp, Artificial Sequence
  Synthetic oligonucleotide; CTG chr2 60487892 60487913 60487897 60487892 -
gagttggagtacttgcattttg

SEQ ID NO: 221639 - DNA, 22 bp, Artificial Sequence
  Synthetic oligonucleotide; TTG chr2 60487886 60487907 60487891 60487886 -
gagtacttgcattttgtgtttg

SEQ ID NO: 221640 - DNA, 22 bp, Artificial Sequence
  Synthetic oligonucleotide; CTT chr2 60487878 60487899 60487883 60487878 -
gcattttgtgtttgtgccagct

SEQ ID NO: 221641 - DNA, 22 bp, Artificial Sequence
  Synthetic oligonucleotide; TTG chr2 60487877 60487898 60487882 60487877 -
cattttgtgtttgtgccagctg

SEQ ID NO: 221642 - DNA, 22 bp, Artificial Sequence
  Synthetic oligonucleotide; TTT chr2 60487872 60487893 60487877 60487872 -
tgtgtttgtgccagctgtccat

SEQ ID NO: 221643 - DNA, 22 bp, Artificial Sequence
  Synthetic oligonucleotide; TTT chr2 60487871 60487892 60487876 60487871 -
gtgtttgtgccagctgtccatg

SEQ ID NO: 221644 - DNA, 22 bp, Artificial Sequence
  Synthetic oligonucleotide; TTG chr2 60487870 60487891 60487875 60487870 -
tgtttgtgccagctgtccatgt

SEQ ID NO: 221645 - DNA, 22 bp, Artificial Sequence
  Synthetic oligonucleotide; TTT chr2 60487865 60487886 60487870 60487865 -
gtgccagctgtccatgttcctc

SEQ ID NO: 221646 - DNA, 22 bp, Artificial Sequence
  Synthetic oligonucleotide; TTG chr2 60487864 60487885 60487869 60487864 -
tgccagctgtccatgttcctct

SEQ ID NO: 221647 - DNA, 22 bp, Artificial Sequence
  Synthetic oligonucleotide; CTG chr2 60487855 60487876 60487860 60487855 -
tccatgttcctcttcatatatt

SEQ ID NO: 221648 - DNA, 22 bp, Artificial Sequence
  Synthetic oligonucleotide; TTC chr2 60487846 60487867 60487851 60487846 -
ctcttcatatatttagaccaaa

SEQ ID NO: 221649 - DNA, 22 bp, Artificial Sequence
  Synthetic oligonucleotide; CTC chr2 60487843 60487864 60487848 60487843 -
ttcatatatttagaccaaattc

SEQ ID NO: 221650 - DNA, 22 bp, Artificial Sequence
  Synthetic oligonucleotide; CTT chr2 60487841 60487862 60487846 60487841 -
catatatttagaccaaattctt

SEQ ID NO: 221651 - DNA, 22 bp, Artificial Sequence
  Synthetic oligonucleotide; TTC chr2 60487840 60487861 60487845 60487840 -
atatatttagaccaaattctta

SEQ ID NO: 221652 - DNA, 22 bp, Artificial Sequence
  Synthetic oligonucleotide; TTT chr2 60487832 60487853 60487837 60487832 -
agaccaaattcttatccagatt

SEQ ID NO: 221653 - DNA, 22 bp, Artificial Sequence
  Synthetic oligonucleotide; TTA chr2 60487831 60487852 60487836 60487831 -
gaccaaattcttatccagattt

SEQ ID NO: 221654 - DNA, 22 bp, Artificial Sequence
  Synthetic oligonucleotide; TTC chr2 60487821 60487842 60487826 60487821 -
ttatccagatttcccattaaag

SEQ ID NO: 221655 - DNA, 22 bp, Artificial Sequence
  Synthetic oligonucleotide; CTT chr2 60487819 60487840 60487824 60487819 -
atccagatttcccattaaaggt

SEQ ID NO: 221656 - DNA, 22 bp, Artificial Sequence
  Synthetic oligonucleotide; TTA chr2 60487818 60487839 60487823 60487818 -
tccagatttcccattaaaggtt

SEQ ID NO: 221657 - DNA, 22 bp, Artificial Sequence
  Synthetic oligonucleotide; TTT chr2 60487809 60487830 60487814 60487809 -
cccattaaaggttcataaattt

SEQ ID NO: 221658 - DNA, 22 bp, Artificial Sequence
  Synthetic oligonucleotide; TTC chr2 60487808 60487829 60487813 60487808 -
ccattaaaggttcataaatttc

SEQ ID NO: 221659 - DNA, 22 bp, Artificial Sequence
  Synthetic oligonucleotide; TTA chr2 60487802 60487823 60487807 60487802 -
aaggttcataaatttccagttt

SEQ ID NO: 221660 - DNA, 22 bp, Artificial Sequence
  Synthetic oligonucleotide; TTC chr2 60487795 60487816 60487800 60487795 -
ataaatttccagttttcacctt

SEQ ID NO: 221661 - DNA, 22 bp, Artificial Sequence
  Synthetic oligonucleotide; TTT chr2 60487787 60487808 60487792 60487787 -
ccagttttcacctttctgcagc

SEQ ID NO: 221662 - DNA, 22 bp, Artificial Sequence
  Synthetic oligonucleotide; TTC chr2 60487786 60487807 60487791 60487786 -
cagttttcacctttctgcagct

SEQ ID NO: 221663 - DNA, 22 bp, Artificial Sequence
  Synthetic oligonucleotide; TTT chr2 60487780 60487801 60487785 60487780 -
tcacctttctgcagcttcctta

SEQ ID NO: 221664 - DNA, 22 bp, Artificial Sequence
  Synthetic oligonucleotide; TTT chr2 60487779 60487800 60487784 60487779 -
cacctttctgcagcttccttag

SEQ ID NO: 221665 - DNA, 22 bp, Artificial Sequence
  Synthetic oligonucleotide; TTC chr2 60487778 60487799 60487783 60487778 -
acctttctgcagcttccttaga

SEQ ID NO: 221666 - DNA, 22 bp, Artificial Sequence
  Synthetic oligonucleotide; CTT chr2 60487773 60487794 60487778 60487773 -
tctgcagcttccttagatagaa

SEQ ID NO: 221667 - DNA, 22 bp, Artificial Sequence
  Synthetic oligonucleotide; TTT chr2 60487772 60487793 60487777 60487772 -
ctgcagcttccttagatagaat

SEQ ID NO: 221668 - DNA, 22 bp, Artificial Sequence
  Synthetic oligonucleotide; TTC chr2 60487771 60487792 60487776 60487771 -
tgcagcttccttagatagaatg

SEQ ID NO: 221669 - DNA, 22 bp, Artificial Sequence
  Synthetic oligonucleotide; CTG chr2 60487769 60487790 60487774 60487769 -
cagcttccttagatagaatggt

SEQ ID NO: 221670 - DNA, 22 bp, Artificial Sequence
  Synthetic oligonucleotide; CTT chr2 60487763 60487784 60487768 60487763 -
ccttagatagaatggttgatga

SEQ ID NO: 221671 - DNA, 22 bp, Artificial Sequence
  Synthetic oligonucleotide; TTC chr2 60487762 60487783 60487767 60487762 -
cttagatagaatggttgatgag

SEQ ID NO: 221672 - DNA, 22 bp, Artificial Sequence
  Synthetic oligonucleotide; CTT chr2 60487759 60487780 60487764 60487759 -
agatagaatggttgatgagaaa

SEQ ID NO: 221673 - DNA, 22 bp, Artificial Sequence
  Synthetic oligonucleotide; TTA chr2 60487758 60487779 60487763 60487758 -
gatagaatggttgatgagaaaa

SEQ ID NO: 221674 - DNA, 22 bp, Artificial Sequence
  Synthetic oligonucleotide; TTG chr2 60487745 60487766 60487750 60487745 -
atgagaaaattaccgcattaaa

SEQ ID NO: 221675 - DNA, 22 bp, Artificial Sequence
  Synthetic oligonucleotide; TTA chr2 60487733 60487754 60487738 60487733 -
ccgcattaaaattaagcctctt

SEQ ID NO: 221676 - DNA, 22 bp, Artificial Sequence
  Synthetic oligonucleotide; TTA chr2 60487725 60487746 60487730 60487725 -
aaattaagcctcttgcttttta

SEQ ID NO: 221677 - DNA, 22 bp, Artificial Sequence
  Synthetic oligonucleotide; TTA chr2 60487719 60487740 60487724 60487719 -
agcctcttgctttttacattct

SEQ ID NO: 221678 - DNA, 22 bp, Artificial Sequence
  Synthetic oligonucleotide; CTC chr2 60487713 60487734 60487718 60487713 -
ttgctttttacattctgctgct

SEQ ID NO: 221679 - DNA, 22 bp, Artificial Sequence
  Synthetic oligonucleotide; CTT chr2 60487711 60487732 60487716 60487711 -
gctttttacattctgctgctca

SEQ ID NO: 221680 - DNA, 22 bp, Artificial Sequence
  Synthetic oligonucleotide; TTG chr2 60487710 60487731 60487715 60487710 -
ctttttacattctgctgctcat

SEQ ID NO: 221681 - DNA, 22 bp, Artificial Sequence
  Synthetic oligonucleotide; CTT chr2 60487707 60487728 60487712 60487707 -
tttacattctgctgctcataaa

SEQ ID NO: 221682 - DNA, 22 bp, Artificial Sequence
  Synthetic oligonucleotide; TTT chr2 60487706 60487727 60487711 60487706 -
ttacattctgctgctcataaat

SEQ ID NO: 221683 - DNA, 22 bp, Artificial Sequence
  Synthetic oligonucleotide; TTT chr2 60487705 60487726 60487710 60487705 -
tacattctgctgctcataaata

SEQ ID NO: 221684 - DNA, 22 bp, Artificial Sequence
  Synthetic oligonucleotide; TTT chr2 60487704 60487725 60487709 60487704 -
acattctgctgctcataaataa

SEQ ID NO: 221685 - DNA, 22 bp, Artificial Sequence
  Synthetic oligonucleotide; TTA chr2 60487703 60487724 60487708 60487703 -
cattctgctgctcataaataag

SEQ ID NO: 221686 - DNA, 22 bp, Artificial Sequence
  Synthetic oligonucleotide; TTC chr2 60487698 60487719 60487703 60487698 -
tgctgctcataaataagggagt

SEQ ID NO: 221687 - DNA, 22 bp, Artificial Sequence
  Synthetic oligonucleotide; CTG chr2 60487696 60487717 60487701 60487696 -
ctgctcataaataagggagtgg

SEQ ID NO: 221688 - DNA, 22 bp, Artificial Sequence
  Synthetic oligonucleotide; CTG chr2 60487693 60487714 60487698 60487693 -
ctcataaataagggagtgggaa

SEQ ID NO: 221689 - DNA, 22 bp, Artificial Sequence
  Synthetic oligonucleotide; CTC chr2 60487690 60487711 60487695 60487690 -
ataaataagggagtgggaaatg

SEQ ID NO: 221690 - DNA, 22 bp, Artificial Sequence
  Synthetic oligonucleotide; TTA chr2 60487664 60487685 60487669 60487664 -
ctttgaacaccctcgttaaagg

SEQ ID NO: 221691 - DNA, 22 bp, Artificial Sequence
  Synthetic oligonucleotide; CTT chr2 60487661 60487682 60487666 60487661 -
tgaacaccctcgttaaaggctg

SEQ ID NO: 221692 - DNA, 22 bp, Artificial Sequence
  Synthetic oligonucleotide; TTT chr2 60487660 60487681 60487665 60487660 -
gaacaccctcgttaaaggctgg

SEQ ID NO: 221693 - DNA, 22 bp, Artificial Sequence
  Synthetic oligonucleotide; TTG chr2 60487659 60487680 60487664 60487659 -
aacaccctcgttaaaggctggt

SEQ ID NO: 221694 - DNA, 22 bp, Artificial Sequence
  Synthetic oligonucleotide; CTC chr2 60487650 60487671 60487655 60487650 -
gttaaaggctggtgtggttgcc

SEQ ID NO: 221695 - DNA, 22 bp, Artificial Sequence
  Synthetic oligonucleotide; TTA chr2 60487646 60487667 60487651 60487646 -
aaggctggtgtggttgccagag

SEQ ID NO: 221696 - DNA, 22 bp, Artificial Sequence
  Synthetic oligonucleotide; CTG chr2 60487639 60487660 60487644 60487639 -
gtgtggttgccagagaataggg

SEQ ID NO: 221697 - DNA, 22 bp, Artificial Sequence
  Synthetic oligonucleotide; TTG chr2 60487630 60487651 60487635 60487630 -
ccagagaatagggctaacttaa

SEQ ID NO: 221698 - DNA, 22 bp, Artificial Sequence
  Synthetic oligonucleotide; CTA chr2 60487614 60487635 60487619 60487614 -
acttaagggggatccgctaagc

SEQ ID NO: 221699 - DNA, 22 bp, Artificial Sequence
  Synthetic oligonucleotide; CTT chr2 60487610 60487631 60487615 60487610 -
aagggggatccgctaagccttc

SEQ ID NO: 221700 - DNA, 22 bp, Artificial Sequence
  Synthetic oligonucleotide; TTA chr2 60487609 60487630 60487614 60487609 -
agggggatccgctaagccttct

SEQ ID NO: 221701 - DNA, 22 bp, Artificial Sequence
  Synthetic oligonucleotide; CTA chr2 60487595 60487616 60487600 60487595 -
agccttctttttcatgcctttt

SEQ ID NO: 221702 - DNA, 22 bp, Artificial Sequence
  Synthetic oligonucleotide; CTT chr2 60487589 60487610 60487594 60487589 -
ctttttcatgcctttttttgtt

SEQ ID NO: 221703 - DNA, 22 bp, Artificial Sequence
  Synthetic oligonucleotide; TTC chr2 60487588 60487609 60487593 60487588 -
tttttcatgcctttttttgttt

SEQ ID NO: 221704 - DNA, 22 bp, Artificial Sequence
  Synthetic oligonucleotide; CTT chr2 60487586 60487607 60487591 60487586 -
tttcatgcctttttttgttttg

SEQ ID NO: 221705 - DNA, 22 bp, Artificial Sequence
  Synthetic oligonucleotide; TTT chr2 60487585 60487606 60487590 60487585 -
ttcatgcctttttttgttttgt

SEQ ID NO: 221706 - DNA, 22 bp, Artificial Sequence
  Synthetic oligonucleotide; TTT chr2 60487584 60487605 60487589 60487584 -
tcatgcctttttttgttttgtt

SEQ ID NO: 221707 - DNA, 22 bp, Artificial Sequence
  Synthetic oligonucleotide; TTT chr2 60487583 60487604 60487588 60487583 -
catgcctttttttgttttgttt

SEQ ID NO: 221708 - DNA, 22 bp, Artificial Sequence
  Synthetic oligonucleotide; TTC chr2 60487582 60487603 60487587 60487582 -
atgcctttttttgttttgtttt

SEQ ID NO: 221709 - DNA, 22 bp, Artificial Sequence
  Synthetic oligonucleotide; CTT chr2 60487575 60487596 60487580 60487575 -
tttttgttttgttttgttctgg

SEQ ID NO: 221710 - DNA, 22 bp, Artificial Sequence
  Synthetic oligonucleotide; TTT chr2 60487574 60487595 60487579 60487574 -
ttttgttttgttttgttctgga

SEQ ID NO: 221711 - DNA, 22 bp, Artificial Sequence
  Synthetic oligonucleotide; TTT chr2 60487573 60487594 60487578 60487573 -
tttgttttgttttgttctggat

SEQ ID NO: 221712 - DNA, 22 bp, Artificial Sequence
  Synthetic oligonucleotide; TTT chr2 60487572 60487593 60487577 60487572 -
ttgttttgttttgttctggatt

SEQ ID NO: 221713 - DNA, 22 bp, Artificial Sequence
  Synthetic oligonucleotide; TTT chr2 60487571 60487592 60487576 60487571 -
tgttttgttttgttctggattt

SEQ ID NO: 221714 - DNA, 22 bp, Artificial Sequence
  Synthetic oligonucleotide; TTT chr2 60487570 60487591 60487575 60487570 -
gttttgttttgttctggatttt

SEQ ID NO: 221715 - DNA, 22 bp, Artificial Sequence
  Synthetic oligonucleotide; TTG chr2 60487569 60487590 60487574 60487569 -
ttttgttttgttctggatttta

SEQ ID NO: 221716 - DNA, 22 bp, Artificial Sequence
  Synthetic oligonucleotide; TTT chr2 60487566 60487587 60487571 60487566 -
tgttttgttctggattttataa

SEQ ID NO: 221717 - DNA, 22 bp, Artificial Sequence
  Synthetic oligonucleotide; TTT chr2 60487565 60487586 60487570 60487565 -
gttttgttctggattttataaa

SEQ ID NO: 221718 - DNA, 22 bp, Artificial Sequence
  Synthetic oligonucleotide; TTG chr2 60487564 60487585 60487569 60487564 -
ttttgttctggattttataaag

SEQ ID NO: 221719 - DNA, 22 bp, Artificial Sequence
  Synthetic oligonucleotide; TTT chr2 60487561 60487582 60487566 60487561 -
tgttctggattttataaaggca

SEQ ID NO: 221720 - DNA, 22 bp, Artificial Sequence
  Synthetic oligonucleotide; TTT chr2 60487560 60487581 60487565 60487560 -
gttctggattttataaaggcat

SEQ ID NO: 221721 - DNA, 22 bp, Artificial Sequence
  Synthetic oligonucleotide; TTG chr2 60487559 60487580 60487564 60487559 -
ttctggattttataaaggcatc

SEQ ID NO: 221722 - DNA, 22 bp, Artificial Sequence
  Synthetic oligonucleotide; TTC chr2 60487556 60487577 60487561 60487556 -
tggattttataaaggcatcatt

SEQ ID NO: 221723 - DNA, 22 bp, Artificial Sequence
  Synthetic oligonucleotide; CTG chr2 60487554 60487575 60487559 60487554 -
gattttataaaggcatcattta

SEQ ID NO: 221724 - DNA, 22 bp, Artificial Sequence
  Synthetic oligonucleotide; TTT chr2 60487549 60487570 60487554 60487549 -
tataaaggcatcatttagtttt

SEQ ID NO: 221725 - DNA, 22 bp, Artificial Sequence
  Synthetic oligonucleotide; TTT chr2 60487548 60487569 60487553 60487548 -
ataaaggcatcatttagttttc

SEQ ID NO: 221726 - DNA, 22 bp, Artificial Sequence
  Synthetic oligonucleotide; TTA chr2 60487547 60487568 60487552 60487547 -
taaaggcatcatttagttttcc

SEQ ID NO: 221727 - DNA, 22 bp, Artificial Sequence
  Synthetic oligonucleotide; TTT chr2 60487533 60487554 60487538 60487533 -
agttttcccttaatctgaatct

SEQ ID NO: 221728 - DNA, 22 bp, Artificial Sequence
  Synthetic oligonucleotide; TTA chr2 60487532 60487553 60487537 60487532 -
gttttcccttaatctgaatctg

SEQ ID NO: 221729 - DNA, 22 bp, Artificial Sequence
  Synthetic oligonucleotide; TTT chr2 60487528 60487549 60487533 60487528 -
tcccttaatctgaatctgtatt

SEQ ID NO: 221730 - DNA, 22 bp, Artificial Sequence
  Synthetic oligonucleotide; TTT chr2 60487527 60487548 60487532 60487527 -
cccttaatctgaatctgtattc

SEQ ID NO: 221731 - DNA, 22 bp, Artificial Sequence
  Synthetic oligonucleotide; TTC chr2 60487526 60487547 60487531 60487526 -
ccttaatctgaatctgtattca

SEQ ID NO: 221732 - DNA, 22 bp, Artificial Sequence
  Synthetic oligonucleotide; CTT chr2 60487522 60487543 60487527 60487522 -
aatctgaatctgtattcatttt

SEQ ID NO: 221733 - DNA, 22 bp, Artificial Sequence
  Synthetic oligonucleotide; TTA chr2 60487521 60487542 60487526 60487521 -
atctgaatctgtattcattttt

SEQ ID NO: 221734 - DNA, 22 bp, Artificial Sequence
  Synthetic oligonucleotide; CTG chr2 60487516 60487537 60487521 60487516 -
aatctgtattcatttttaaata

SEQ ID NO: 221735 - DNA, 22 bp, Artificial Sequence
  Synthetic oligonucleotide; CTG chr2 60487510 60487531 60487515 60487510 -
tattcatttttaaatatctaat

SEQ ID NO: 221736 - DNA, 22 bp, Artificial Sequence
  Synthetic oligonucleotide; TTC chr2 60487505 60487526 60487510 60487505 -
atttttaaatatctaatgttga

SEQ ID NO: 221737 - DNA, 22 bp, Artificial Sequence
  Synthetic oligonucleotide; TTT chr2 60487501 60487522 60487506 60487501 -
ttaaatatctaatgttgattag

SEQ ID NO: 221738 - DNA, 22 bp, Artificial Sequence
  Synthetic oligonucleotide; TTT chr2 60487500 60487521 60487505 60487500 -
taaatatctaatgttgattagt

SEQ ID NO: 221739 - DNA, 22 bp, Artificial Sequence
  Synthetic oligonucleotide; TTT chr2 60487499 60487520 60487504 60487499 -
aaatatctaatgttgattagta

SEQ ID NO: 221740 - DNA, 22 bp, Artificial Sequence
  Synthetic oligonucleotide; TTA chr2 60487498 60487519 60487503 60487498 -
aatatctaatgttgattagtat

SEQ ID NO: 221741 - DNA, 22 bp, Artificial Sequence
  Synthetic oligonucleotide; CTA chr2 60487490 60487511 60487495 60487490 -
atgttgattagtatgttctatt

SEQ ID NO: 221742 - DNA, 22 bp, Artificial Sequence
  Synthetic oligonucleotide; TTG chr2 60487484 60487505 60487489 60487484 -
attagtatgttctattatttat

SEQ ID NO: 221743 - DNA, 22 bp, Artificial Sequence
  Synthetic oligonucleotide; TTA chr2 60487480 60487501 60487485 60487480 -
gtatgttctattatttatagcc

SEQ ID NO: 221744 - DNA, 22 bp, Artificial Sequence
  Synthetic oligonucleotide; TTC chr2 60487472 60487493 60487477 60487472 -
tattatttatagccctccagaa

SEQ ID NO: 221745 - DNA, 22 bp, Artificial Sequence
  Synthetic oligonucleotide; CTA chr2 60487470 60487491 60487475 60487470 -
ttatttatagccctccagaagg

SEQ ID NO: 221746 - DNA, 22 bp, Artificial Sequence
  Synthetic oligonucleotide; TTA chr2 60487467 60487488 60487472 60487467 -
tttatagccctccagaaggatc

SEQ ID NO: 221747 - DNA, 22 bp, Artificial Sequence
  Synthetic oligonucleotide; TTT chr2 60487464 60487485 60487469 60487464 -
atagccctccagaaggatccca

SEQ ID NO: 221748 - DNA, 22 bp, Artificial Sequence
  Synthetic oligonucleotide; TTA chr2 60487463 60487484 60487468 60487463 -
tagccctccagaaggatcccaa

SEQ ID NO: 221749 - DNA, 22 bp, Artificial Sequence
  Synthetic oligonucleotide; CTC chr2 60487455 60487476 60487460 60487455 -
cagaaggatcccaagggaagat

SEQ ID NO: 221750 - DNA, 22 bp, Artificial Sequence
  Synthetic oligonucleotide; CTA chr2 60487427 60487448 60487432 60487427 -
catttgagaagacgatttccca

SEQ ID NO: 221751 - DNA, 22 bp, Artificial Sequence
  Synthetic oligonucleotide; TTT chr2 60487422 60487443 60487427 60487422 -
gagaagacgatttcccaatttc

SEQ ID NO: 221752 - DNA, 22 bp, Artificial Sequence
  Synthetic oligonucleotide; TTG chr2 60487421 60487442 60487426 60487421 -
agaagacgatttcccaatttcc

SEQ ID NO: 221753 - DNA, 22 bp, Artificial Sequence
  Synthetic oligonucleotide; TTT chr2 60487409 60487430 60487414 60487409 -
cccaatttccatacagatgacg

SEQ ID NO: 221754 - DNA, 22 bp, Artificial Sequence
  Synthetic oligonucleotide; TTC chr2 60487408 60487429 60487413 60487408 -
ccaatttccatacagatgacga

SEQ ID NO: 221755 - DNA, 22 bp, Artificial Sequence
  Synthetic oligonucleotide; TTT chr2 60487401 60487422 60487406 60487401 -
ccatacagatgacgaaaacgta

SEQ ID NO: 221756 - DNA, 22 bp, Artificial Sequence
  Synthetic oligonucleotide; TTC chr2 60487400 60487421 60487405 60487400 -
catacagatgacgaaaacgtaa

SEQ ID NO: 221757 - DNA, 22 bp, Artificial Sequence
  Synthetic oligonucleotide; CTG chr2 60487375 60487396 60487380 60487375 -
cccactacactgctccccctgc

SEQ ID NO: 221758 - DNA, 22 bp, Artificial Sequence
  Synthetic oligonucleotide; CTA chr2 60487368 60487389 60487373 60487368 -
cactgctccccctgctgaattt

SEQ ID NO: 221759 - DNA, 22 bp, Artificial Sequence
  Synthetic oligonucleotide; CTG chr2 60487363 60487384 60487368 60487363 -
ctccccctgctgaattttcttt

SEQ ID NO: 221760 - DNA, 22 bp, Artificial Sequence
  Synthetic oligonucleotide; CTC chr2 60487360 60487381 60487365 60487360 -
cccctgctgaattttctttttc

SEQ ID NO: 221761 - DNA, 22 bp, Artificial Sequence
  Synthetic oligonucleotide; CTG chr2 60487354 60487375 60487359 60487354 -
ctgaattttctttttccactct

SEQ ID NO: 221762 - DNA, 22 bp, Artificial Sequence
  Synthetic oligonucleotide; CTG chr2 60487351 60487372 60487356 60487351 -
aattttctttttccactctcgg

SEQ ID NO: 221763 - DNA, 22 bp, Artificial Sequence
  Synthetic oligonucleotide; TTT chr2 60487346 60487367 60487351 60487346 -
tctttttccactctcggtgtgt

SEQ ID NO: 221764 - DNA, 22 bp, Artificial Sequence
  Synthetic oligonucleotide; TTT chr2 60487345 60487366 60487350 60487345 -
ctttttccactctcggtgtgtg

SEQ ID NO: 221765 - DNA, 22 bp, Artificial Sequence
  Synthetic oligonucleotide; TTC chr2 60487344 60487365 60487349 60487344 -
tttttccactctcggtgtgtgg

SEQ ID NO: 221766 - DNA, 22 bp, Artificial Sequence
  Synthetic oligonucleotide; CTT chr2 60487342 60487363 60487347 60487342 -
tttccactctcggtgtgtggca

SEQ ID NO: 221767 - DNA, 22 bp, Artificial Sequence
  Synthetic oligonucleotide; TTT chr2 60487341 60487362 60487346 60487341 -
ttccactctcggtgtgtggcat

SEQ ID NO: 221768 - DNA, 22 bp, Artificial Sequence
  Synthetic oligonucleotide; TTT chr2 60487340 60487361 60487345 60487340 -
tccactctcggtgtgtggcatt

SEQ ID NO: 221769 - DNA, 22 bp, Artificial Sequence
  Synthetic oligonucleotide; TTT chr2 60487339 60487360 60487344 60487339 -
ccactctcggtgtgtggcattg

SEQ ID NO: 221770 - DNA, 22 bp, Artificial Sequence
  Synthetic oligonucleotide; TTC chr2 60487338 60487359 60487343 60487338 -
cactctcggtgtgtggcattgt

SEQ ID NO: 221771 - DNA, 22 bp, Artificial Sequence
  Synthetic oligonucleotide; CTC chr2 60487333 60487354 60487338 60487333 -
tcggtgtgtggcattgtggggt

SEQ ID NO: 221772 - DNA, 22 bp, Artificial Sequence
  Synthetic oligonucleotide; CTC chr2 60487331 60487352 60487336 60487331 -
ggtgtgtggcattgtggggtgc

SEQ ID NO: 221773 - DNA, 22 bp, Artificial Sequence
  Synthetic oligonucleotide; TTG chr2 60487317 60487338 60487322 60487317 -
tggggtgcagacacctgaaagc

SEQ ID NO: 221774 - DNA, 22 bp, Artificial Sequence
  Synthetic oligonucleotide; CTG chr2 60487300 60487321 60487305 60487300 -
aaagcctgactggagatgtaac

SEQ ID NO: 221775 - DNA, 22 bp, Artificial Sequence
  Synthetic oligonucleotide; CTG chr2 60487292 60487313 60487297 60487292 -
actggagatgtaacatgggctc

SEQ ID NO: 221776 - DNA, 22 bp, Artificial Sequence
  Synthetic oligonucleotide; CTG chr2 60487288 60487309 60487293 60487288 -
gagatgtaacatgggctctgct

SEQ ID NO: 221777 - DNA, 22 bp, Artificial Sequence
  Synthetic oligonucleotide; CTC chr2 60487270 60487291 60487275 60487270 -
tgctgacattagcatgaagagc

SEQ ID NO: 221778 - DNA, 22 bp, Artificial Sequence
  Synthetic oligonucleotide; CTG chr2 60487268 60487289 60487273 60487268 -
ctgacattagcatgaagagctt

SEQ ID NO: 221779 - DNA, 22 bp, Artificial Sequence
  Synthetic oligonucleotide; CTG chr2 60487265 60487286 60487270 60487265 -
acattagcatgaagagcttagc

SEQ ID NO: 221780 - DNA, 22 bp, Artificial Sequence
  Synthetic oligonucleotide; TTA chr2 60487259 60487280 60487264 60487259 -
gcatgaagagcttagctaatcg

SEQ ID NO: 221781 - DNA, 22 bp, Artificial Sequence
  Synthetic oligonucleotide; CTT chr2 60487246 60487267 60487251 60487246 -
agctaatcgacttgcaaaatat

SEQ ID NO: 221782 - DNA, 22 bp, Artificial Sequence
  Synthetic oligonucleotide; TTA chr2 60487245 60487266 60487250 60487245 -
gctaatcgacttgcaaaatata

SEQ ID NO: 221783 - DNA, 22 bp, Artificial Sequence
  Synthetic oligonucleotide; CTA chr2 60487241 60487262 60487246 60487241 -
atcgacttgcaaaatataggtt

SEQ ID NO: 221784 - DNA, 22 bp, Artificial Sequence
  Synthetic oligonucleotide; CTT chr2 60487233 60487254 60487238 60487233 -
gcaaaatataggttagggagtt

SEQ ID NO: 221785 - DNA, 22 bp, Artificial Sequence
  Synthetic oligonucleotide; TTG chr2 60487232 60487253 60487237 60487232 -
caaaatataggttagggagttt

SEQ ID NO: 221786 - DNA, 22 bp, Artificial Sequence
  Synthetic oligonucleotide; TTA chr2 60487218 60487239 60487223 60487218 -
gggagttttataggatatcaaa

SEQ ID NO: 221787 - DNA, 22 bp, Artificial Sequence
  Synthetic oligonucleotide; TTT chr2 60487210 60487231 60487215 60487210 -
tataggatatcaaattatctta

SEQ ID NO: 221788 - DNA, 22 bp, Artificial Sequence
  Synthetic oligonucleotide; TTT chr2 60487209 60487230 60487214 60487209 -
ataggatatcaaattatcttac

SEQ ID NO: 221789 - DNA, 22 bp, Artificial Sequence
  Synthetic oligonucleotide; TTA chr2 60487208 60487229 60487213 60487208 -
taggatatcaaattatcttact

SEQ ID NO: 221790 - DNA, 22 bp, Artificial Sequence
  Synthetic oligonucleotide; TTA chr2 60487193 60487214 60487198 60487193 -
tcttactctttcattgattaaa

SEQ ID NO: 221791 - DNA, 22 bp, Artificial Sequence
  Synthetic oligonucleotide; CTT chr2 60487189 60487210 60487194 60487189 -
actctttcattgattaaaggca

SEQ ID NO: 221792 - DNA, 22 bp, Artificial Sequence
  Synthetic oligonucleotide; TTA chr2 60487188 60487209 60487193 60487188 -
ctctttcattgattaaaggcaa

SEQ ID NO: 221793 - DNA, 22 bp, Artificial Sequence
  Synthetic oligonucleotide; CTC chr2 60487185 60487206 60487190 60487185 -
tttcattgattaaaggcaaaat

SEQ ID NO: 221794 - DNA, 22 bp, Artificial Sequence
  Synthetic oligonucleotide; CTT chr2 60487183 60487204 60487188 60487183 -
tcattgattaaaggcaaaatat

SEQ ID NO: 221795 - DNA, 22 bp, Artificial Sequence
  Synthetic oligonucleotide; TTT chr2 60487182 60487203 60487187 60487182 -
cattgattaaaggcaaaatatt

SEQ ID NO: 221796 - DNA, 22 bp, Artificial Sequence
  Synthetic oligonucleotide; TTC chr2 60487181 60487202 60487186 60487181 -
attgattaaaggcaaaatatta

SEQ ID NO: 221797 - DNA, 22 bp, Artificial Sequence
  Synthetic oligonucleotide; TTG chr2 60487177 60487198 60487182 60487177 -
attaaaggcaaaatattacatt

SEQ ID NO: 221798 - DNA, 22 bp, Artificial Sequence
  Synthetic oligonucleotide; TTA chr2 60487173 60487194 60487178 60487173 -
aaggcaaaatattacattaact

SEQ ID NO: 221799 - DNA, 22 bp, Artificial Sequence
  Synthetic oligonucleotide; TTA chr2 60487159 60487180 60487164 60487159 -
cattaactagatcattacatgg

SEQ ID NO: 221800 - DNA, 22 bp, Artificial Sequence
  Synthetic oligonucleotide; TTA chr2 60487154 60487175 60487159 60487154 -
actagatcattacatgggtaaa

SEQ ID NO: 221801 - DNA, 22 bp, Artificial Sequence
  Synthetic oligonucleotide; CTA chr2 60487150 60487171 60487155 60487150 -
gatcattacatgggtaaaaggt

SEQ ID NO: 221802 - DNA, 22 bp, Artificial Sequence
  Synthetic oligonucleotide; TTA chr2 60487142 60487163 60487147 60487142 -
catgggtaaaaggttagaactt

SEQ ID NO: 221803 - DNA, 22 bp, Artificial Sequence
  Synthetic oligonucleotide; TTA chr2 60487126 60487147 60487131 60487126 -
gaacttcacacacttaggggtg

SEQ ID NO: 221804 - DNA, 22 bp, Artificial Sequence
  Synthetic oligonucleotide; CTT chr2 60487120 60487141 60487125 60487120 -
cacacacttaggggtgttgcac

SEQ ID NO: 221805 - DNA, 22 bp, Artificial Sequence
  Synthetic oligonucleotide; TTC chr2 60487119 60487140 60487124 60487119 -
acacacttaggggtgttgcact

SEQ ID NO: 221806 - DNA, 22 bp, Artificial Sequence
  Synthetic oligonucleotide; CTT chr2 60487111 60487132 60487116 60487111 -
aggggtgttgcactatccttcc

SEQ ID NO: 221807 - DNA, 22 bp, Artificial Sequence
  Synthetic oligonucleotide; TTA chr2 60487110 60487131 60487115 60487110 -
ggggtgttgcactatccttccc

SEQ ID NO: 221808 - DNA, 22 bp, Artificial Sequence
  Synthetic oligonucleotide; TTG chr2 60487101 60487122 60487106 60487101 -
cactatccttccccttcctgcc

SEQ ID NO: 221809 - DNA, 22 bp, Artificial Sequence
  Synthetic oligonucleotide; CTA chr2 60487096 60487117 60487101 60487096 -
tccttccccttcctgccttgtg

SEQ ID NO: 221810 - DNA, 22 bp, Artificial Sequence
  Synthetic oligonucleotide; CTT chr2 60487091 60487112 60487096 60487091 -
ccccttcctgccttgtggcaaa

SEQ ID NO: 221811 - DNA, 22 bp, Artificial Sequence
  Synthetic oligonucleotide; TTC chr2 60487090 60487111 60487095 60487090 -
cccttcctgccttgtggcaaat

SEQ ID NO: 221812 - DNA, 22 bp, Artificial Sequence
  Synthetic oligonucleotide; CTT chr2 60487085 60487106 60487090 60487085 -
cctgccttgtggcaaatcacag

SEQ ID NO: 221813 - DNA, 22 bp, Artificial Sequence
  Synthetic oligonucleotide; TTC chr2 60487084 60487105 60487089 60487084 -
ctgccttgtggcaaatcacagg

SEQ ID NO: 221814 - DNA, 22 bp, Artificial Sequence
  Synthetic oligonucleotide; CTG chr2 60487081 60487102 60487086 60487081 -
ccttgtggcaaatcacaggttg

SEQ ID NO: 221815 - DNA, 22 bp, Artificial Sequence
  Synthetic oligonucleotide; CTT chr2 60487077 60487098 60487082 60487077 -
gtggcaaatcacaggttggagg

SEQ ID NO: 221816 - DNA, 22 bp, Artificial Sequence
  Synthetic oligonucleotide; TTG chr2 60487076 60487097 60487081 60487076 -
tggcaaatcacaggttggaggc

SEQ ID NO: 221817 - DNA, 22 bp, Artificial Sequence
  Synthetic oligonucleotide; TTG chr2 60487059 60487080 60487064 60487059 -
gaggcagggaaactcactgtgt

SEQ ID NO: 221818 - DNA, 22 bp, Artificial Sequence
  Synthetic oligonucleotide; CTC chr2 60487044 60487065 60487049 60487044 -
actgtgtctagcgctcctaaat

SEQ ID NO: 221819 - DNA, 22 bp, Artificial Sequence
  Synthetic oligonucleotide; CTG chr2 60487040 60487061 60487045 60487040 -
tgtctagcgctcctaaatgcct

SEQ ID NO: 221820 - DNA, 22 bp, Artificial Sequence
  Synthetic oligonucleotide; CTA chr2 60487034 60487055 60487039 60487034 -
gcgctcctaaatgcctgaatag

SEQ ID NO: 221821 - DNA, 22 bp, Artificial Sequence
  Synthetic oligonucleotide; CTC chr2 60487028 60487049 60487033 60487028 -
ctaaatgcctgaatagcaacgt

SEQ ID NO: 221822 - DNA, 22 bp, Artificial Sequence
  Synthetic oligonucleotide; CTA chr2 60487025 60487046 60487030 60487025 -
aatgcctgaatagcaacgttag

SEQ ID NO: 221823 - DNA, 22 bp, Artificial Sequence
  Synthetic oligonucleotide; CTG chr2 60487017 60487038 60487022 60487017 -
aatagcaacgttagacttaaag

SEQ ID NO: 221824 - DNA, 22 bp, Artificial Sequence
  Synthetic oligonucleotide; TTA chr2 60487004 60487025 60487009 60487004 -
gacttaaaggaggggcatttgc

SEQ ID NO: 221825 - DNA, 22 bp, Artificial Sequence
  Synthetic oligonucleotide; CTT chr2 60486999 60487020 60487004 60486999 -
aaaggaggggcatttgccttcg

SEQ ID NO: 221826 - DNA, 22 bp, Artificial Sequence
  Synthetic oligonucleotide; TTA chr2 60486998 60487019 60487003 60486998 -
aaggaggggcatttgccttcgc

SEQ ID NO: 221827 - DNA, 22 bp, Artificial Sequence
  Synthetic oligonucleotide; TTT chr2 60486984 60487005 60486989 60486984 -
gccttcgctttgaatctcccga

SEQ ID NO: 221828 - DNA, 22 bp, Artificial Sequence
  Synthetic oligonucleotide; TTG chr2 60486983 60487004 60486988 60486983 -
ccttcgctttgaatctcccgag

SEQ ID NO: 221829 - DNA, 22 bp, Artificial Sequence
  Synthetic oligonucleotide; CTT chr2 60486979 60487000 60486984 60486979 -
cgctttgaatctcccgagtctt

SEQ ID NO: 221830 - DNA, 22 bp, Artificial Sequence
  Synthetic oligonucleotide; TTC chr2 60486978 60486999 60486983 60486978 -
gctttgaatctcccgagtcttt

SEQ ID NO: 221831 - DNA, 22 bp, Artificial Sequence
  Synthetic oligonucleotide; CTT chr2 60486974 60486995 60486979 60486974 -
tgaatctcccgagtctttttta

SEQ ID NO: 221832 - DNA, 22 bp, Artificial Sequence
  Synthetic oligonucleotide; TTT chr2 60486973 60486994 60486978 60486973 -
gaatctcccgagtcttttttat

SEQ ID NO: 221833 - DNA, 22 bp, Artificial Sequence
  Synthetic oligonucleotide; TTG chr2 60486972 60486993 60486977 60486972 -
aatctcccgagtcttttttatt

SEQ ID NO: 221834 - DNA, 22 bp, Artificial Sequence
  Synthetic oligonucleotide; CTC chr2 60486966 60486987 60486971 60486966 -
ccgagtcttttttattctgata

SEQ ID NO: 221835 - DNA, 22 bp, Artificial Sequence
  Synthetic oligonucleotide; CTT chr2 60486957 60486978 60486962 60486957 -
ttttattctgatagaatagtaa

SEQ ID NO: 221836 - DNA, 22 bp, Artificial Sequence
  Synthetic oligonucleotide; TTT chr2 60486956 60486977 60486961 60486956 -
tttattctgatagaatagtaat

SEQ ID NO: 221837 - DNA, 22 bp, Artificial Sequence
  Synthetic oligonucleotide; TTT chr2 60486955 60486976 60486960 60486955 -
ttattctgatagaatagtaatc

SEQ ID NO: 221838 - DNA, 22 bp, Artificial Sequence
  Synthetic oligonucleotide; TTT chr2 60486954 60486975 60486959 60486954 -
tattctgatagaatagtaatct

SEQ ID NO: 221839 - DNA, 22 bp, Artificial Sequence
  Synthetic oligonucleotide; TTT chr2 60486953 60486974 60486958 60486953 -
attctgatagaatagtaatctt

SEQ ID NO: 221840 - DNA, 22 bp, Artificial Sequence
  Synthetic oligonucleotide; TTA chr2 60486952 60486973 60486957 60486952 -
ttctgatagaatagtaatctta

SEQ ID NO: 221841 - DNA, 22 bp, Artificial Sequence
  Synthetic oligonucleotide; TTC chr2 60486949 60486970 60486954 60486949 -
tgatagaatagtaatcttaaaa

SEQ ID NO: 221842 - DNA, 22 bp, Artificial Sequence
  Synthetic oligonucleotide; CTG chr2 60486947 60486968 60486952 60486947 -
atagaatagtaatcttaaaatt

SEQ ID NO: 221843 - DNA, 22 bp, Artificial Sequence
  Synthetic oligonucleotide; CTT chr2 60486931 60486952 60486936 60486931 -
aaaattaaatattaatttgttc

SEQ ID NO: 221844 - DNA, 22 bp, Artificial Sequence
  Synthetic oligonucleotide; TTA chr2 60486930 60486951 60486935 60486930 -
aaattaaatattaatttgttct

SEQ ID NO: 221845 - DNA, 22 bp, Artificial Sequence
  Synthetic oligonucleotide; TTA chr2 60486924 60486945 60486929 60486924 -
aatattaatttgttctgattcc

SEQ ID NO: 221846 - DNA, 22 bp, Artificial Sequence
  Synthetic oligonucleotide; TTA chr2 60486917 60486938 60486922 60486917 -
atttgttctgattccatttctg

SEQ ID NO: 221847 - DNA, 22 bp, Artificial Sequence
  Synthetic oligonucleotide; TTT chr2 60486913 60486934 60486918 60486913 -
gttctgattccatttctgttag

SEQ ID NO: 221848 - DNA, 22 bp, Artificial Sequence
  Synthetic oligonucleotide; TTG chr2 60486912 60486933 60486917 60486912 -
ttctgattccatttctgttagc

SEQ ID NO: 221849 - DNA, 22 bp, Artificial Sequence
  Synthetic oligonucleotide; TTC chr2 60486909 60486930 60486914 60486909 -
tgattccatttctgttagcagg

SEQ ID NO: 221850 - DNA, 22 bp, Artificial Sequence
  Synthetic oligonucleotide; CTG chr2 60486907 60486928 60486912 60486907 -
attccatttctgttagcaggga

SEQ ID NO: 221851 - DNA, 22 bp, Artificial Sequence
  Synthetic oligonucleotide; TTC chr2 60486903 60486924 60486908 60486903 -
catttctgttagcagggaaaag

SEQ ID NO: 221852 - DNA, 22 bp, Artificial Sequence
  Synthetic oligonucleotide; TTT chr2 60486898 60486919 60486903 60486898 -
ctgttagcagggaaaagggcaa

SEQ ID NO: 221853 - DNA, 22 bp, Artificial Sequence
  Synthetic oligonucleotide; TTC chr2 60486897 60486918 60486902 60486897 -
tgttagcagggaaaagggcaaa

SEQ ID NO: 221854 - DNA, 22 bp, Artificial Sequence
  Synthetic oligonucleotide; CTG chr2 60486895 60486916 60486900 60486895 -
ttagcagggaaaagggcaaata

SEQ ID NO: 221855 - DNA, 22 bp, Artificial Sequence
  Synthetic oligonucleotide; TTA chr2 60486892 60486913 60486897 60486892 -
gcagggaaaagggcaaatacat

SEQ ID NO: 221856 - DNA, 22 bp, Artificial Sequence
  Synthetic oligonucleotide; CTG chr2 60486854 60486875 60486859 60486854 -
agccatggccaggtttgagaga

SEQ ID NO: 221857 - DNA, 22 bp, Artificial Sequence
  Synthetic oligonucleotide; TTT chr2 60486838 60486859 60486843 60486838 -
gagagacagagtgattcgcagt

SEQ ID NO: 221858 - DNA, 22 bp, Artificial Sequence
  Synthetic oligonucleotide; TTG chr2 60486837 60486858 60486842 60486837 -
agagacagagtgattcgcagta

SEQ ID NO: 221859 - DNA, 22 bp, Artificial Sequence
  Synthetic oligonucleotide; TTC chr2 60486821 60486842 60486826 60486821 -
gcagtagtcttcccagggtgtt

SEQ ID NO: 221860 - DNA, 22 bp, Artificial Sequence
  Synthetic oligonucleotide; CTT chr2 60486810 60486831 60486815 60486810 -
cccagggtgttgagtgggaacg

SEQ ID NO: 221861 - DNA, 22 bp, Artificial Sequence
  Synthetic oligonucleotide; TTC chr2 60486809 60486830 60486814 60486809 -
ccagggtgttgagtgggaacgt

SEQ ID NO: 221862 - DNA, 22 bp, Artificial Sequence
  Synthetic oligonucleotide; TTG chr2 60486798 60486819 60486803 60486798 -
agtgggaacgtctccctgggaa

SEQ ID NO: 221863 - DNA, 22 bp, Artificial Sequence
  Synthetic oligonucleotide; CTC chr2 60486784 60486805 60486789 60486784 -
cctgggaagggatgtggtcatt

SEQ ID NO: 221864 - DNA, 22 bp, Artificial Sequence
  Synthetic oligonucleotide; CTG chr2 60486780 60486801 60486785 60486780 -
ggaagggatgtggtcattctca

SEQ ID NO: 221865 - DNA, 22 bp, Artificial Sequence
  Synthetic oligonucleotide; TTC chr2 60486761 60486782 60486766 60486761 -
tcagactgtgggctcagactct

SEQ ID NO: 221866 - DNA, 22 bp, Artificial Sequence
  Synthetic oligonucleotide; CTC chr2 60486759 60486780 60486764 60486759 -
agactgtgggctcagactctgt

SEQ ID NO: 221867 - DNA, 22 bp, Artificial Sequence
  Synthetic oligonucleotide; CTG chr2 60486753 60486774 60486758 60486753 -
tgggctcagactctgtcacact

SEQ ID NO: 221868 - DNA, 22 bp, Artificial Sequence
  Synthetic oligonucleotide; CTC chr2 60486746 60486767 60486751 60486746 -
agactctgtcacactgtaatac

SEQ ID NO: 221869 - DNA, 22 bp, Artificial Sequence
  Synthetic oligonucleotide; CTC chr2 60486740 60486761 60486745 60486740 -
tgtcacactgtaatacctctgt

SEQ ID NO: 221870 - DNA, 22 bp, Artificial Sequence
  Synthetic oligonucleotide; CTG chr2 60486738 60486759 60486743 60486738 -
tcacactgtaatacctctgtca

SEQ ID NO: 221871 - DNA, 22 bp, Artificial Sequence
  Synthetic oligonucleotide; CTG chr2 60486730 60486751 60486735 60486730 -
taatacctctgtcaaccatcta

SEQ ID NO: 221872 - DNA, 22 bp, Artificial Sequence
  Synthetic oligonucleotide; CTC chr2 60486721 60486742 60486726 60486721 -
tgtcaaccatctaatgctatca

SEQ ID NO: 221873 - DNA, 22 bp, Artificial Sequence
  Synthetic oligonucleotide; CTG chr2 60486719 60486740 60486724 60486719 -
tcaaccatctaatgctatcaag

SEQ ID NO: 221874 - DNA, 22 bp, Artificial Sequence
  Synthetic oligonucleotide; CTA chr2 60486708 60486729 60486713 60486708 -
atgctatcaaggccttcctgag

SEQ ID NO: 221875 - DNA, 22 bp, Artificial Sequence
  Synthetic oligonucleotide; CTA chr2 60486702 60486723 60486707 60486702 -
tcaaggccttcctgagagaagt

SEQ ID NO: 221876 - DNA, 22 bp, Artificial Sequence
  Synthetic oligonucleotide; CTT chr2 60486692 60486713 60486697 60486692 -
cctgagagaagtttcaggccca

SEQ ID NO: 221877 - DNA, 22 bp, Artificial Sequence
  Synthetic oligonucleotide; TTC chr2 60486691 60486712 60486696 60486691 -
ctgagagaagtttcaggcccaa

SEQ ID NO: 221878 - DNA, 22 bp, Artificial Sequence
  Synthetic oligonucleotide; CTG chr2 60486688 60486709 60486693 60486688 -
agagaagtttcaggcccaatcc

SEQ ID NO: 221879 - DNA, 22 bp, Artificial Sequence
  Synthetic oligonucleotide; TTT chr2 60486678 60486699 60486683 60486678 -
caggcccaatcctgatgttgag

SEQ ID NO: 221880 - DNA, 22 bp, Artificial Sequence
  Synthetic oligonucleotide; TTC chr2 60486677 60486698 60486682 60486677 -
aggcccaatcctgatgttgagt

SEQ ID NO: 221881 - DNA, 22 bp, Artificial Sequence
  Synthetic oligonucleotide; CTG chr2 60486664 60486685 60486669 60486664 -
atgttgagttggcatgttcaca

SEQ ID NO: 221882 - DNA, 22 bp, Artificial Sequence
  Synthetic oligonucleotide; TTG chr2 60486658 60486679 60486663 60486658 -
agttggcatgttcacatgtctg

SEQ ID NO: 221883 - DNA, 22 bp, Artificial Sequence
  Synthetic oligonucleotide; TTG chr2 60486653 60486674 60486658 60486653 -
gcatgttcacatgtctggtaat

SEQ ID NO: 221884 - DNA, 22 bp, Artificial Sequence
  Synthetic oligonucleotide; TTC chr2 60486645 60486666 60486650 60486645 -
acatgtctggtaataatctgcc

SEQ ID NO: 221885 - DNA, 22 bp, Artificial Sequence
  Synthetic oligonucleotide; CTG chr2 60486636 60486657 60486641 60486636 -
gtaataatctgccagctaatcc

SEQ ID NO: 221886 - DNA, 22 bp, Artificial Sequence
  Synthetic oligonucleotide; CTG chr2 60486625 60486646 60486630 60486625 -
ccagctaatccatcatgctgct

SEQ ID NO: 221887 - DNA, 22 bp, Artificial Sequence
  Synthetic oligonucleotide; CTA chr2 60486618 60486639 60486623 60486618 -
atccatcatgctgctcatttct

SEQ ID NO: 221888 - DNA, 22 bp, Artificial Sequence
  Synthetic oligonucleotide; CTG chr2 60486605 60486626 60486610 60486605 -
ctcatttctgtgcattattcat

SEQ ID NO: 221889 - DNA, 22 bp, Artificial Sequence
  Synthetic oligonucleotide; CTC chr2 60486602 60486623 60486607 60486602 -
atttctgtgcattattcatctc

SEQ ID NO: 221890 - DNA, 22 bp, Artificial Sequence
  Synthetic oligonucleotide; TTT chr2 60486598 60486619 60486603 60486598 -
ctgtgcattattcatctcaaag

SEQ ID NO: 221891 - DNA, 22 bp, Artificial Sequence
  Synthetic oligonucleotide; TTC chr2 60486597 60486618 60486602 60486597 -
tgtgcattattcatctcaaagc

SEQ ID NO: 221892 - DNA, 22 bp, Artificial Sequence
  Synthetic oligonucleotide; CTG chr2 60486595 60486616 60486600 60486595 -
tgcattattcatctcaaagcca

SEQ ID NO: 221893 - DNA, 22 bp, Artificial Sequence
  Synthetic oligonucleotide; TTA chr2 60486588 60486609 60486593 60486588 -
ttcatctcaaagccagaggatc

SEQ ID NO: 221894 - DNA, 22 bp, Artificial Sequence
  Synthetic oligonucleotide; TTC chr2 60486585 60486606 60486590 60486585 -
atctcaaagccagaggatctca

SEQ ID NO: 221895 - DNA, 22 bp, Artificial Sequence
  Synthetic oligonucleotide; CTC chr2 60486580 60486601 60486585 60486580 -
aaagccagaggatctcatgtcc

SEQ ID NO: 221896 - DNA, 22 bp, Artificial Sequence
  Synthetic oligonucleotide; CTC chr2 60486564 60486585 60486569 60486564 -
atgtccatcacagggctgtggt

SEQ ID NO: 221897 - DNA, 22 bp, Artificial Sequence
  Synthetic oligonucleotide; CTG chr2 60486546 60486567 60486551 60486546 -
tggtctgtggatagggaaaatt

SEQ ID NO: 221898 - DNA, 22 bp, Artificial Sequence
  Synthetic oligonucleotide; CTG chr2 60486539 60486560 60486544 60486539 -
tggatagggaaaatttcaaggc

SEQ ID NO: 221899 - DNA, 22 bp, Artificial Sequence
  Synthetic oligonucleotide; TTT chr2 60486523 60486544 60486528 60486523 -
caaggcttttctgggcctgatg

SEQ ID NO: 221900 - DNA, 22 bp, Artificial Sequence
  Synthetic oligonucleotide; TTC chr2 60486522 60486543 60486527 60486522 -
aaggcttttctgggcctgatgt

SEQ ID NO: 221901 - DNA, 22 bp, Artificial Sequence
  Synthetic oligonucleotide; CTT chr2 60486515 60486536 60486520 60486515 -
ttctgggcctgatgtagccatt

SEQ ID NO: 221902 - DNA, 22 bp, Artificial Sequence
  Synthetic oligonucleotide; TTT chr2 60486514 60486535 60486519 60486514 -
tctgggcctgatgtagccattt

SEQ ID NO: 221903 - DNA, 22 bp, Artificial Sequence
  Synthetic oligonucleotide; TTT chr2 60486513 60486534 60486518 60486513 -
ctgggcctgatgtagccatttt

SEQ ID NO: 221904 - DNA, 22 bp, Artificial Sequence
  Synthetic oligonucleotide; TTC chr2 60486512 60486533 60486517 60486512 -
tgggcctgatgtagccattttc

SEQ ID NO: 221905 - DNA, 22 bp, Artificial Sequence
  Synthetic oligonucleotide; CTG chr2 60486510 60486531 60486515 60486510 -
ggcctgatgtagccattttctt

SEQ ID NO: 221906 - DNA, 22 bp, Artificial Sequence
  Synthetic oligonucleotide; CTG chr2 60486504 60486525 60486509 60486504 -
atgtagccattttctttcagta

SEQ ID NO: 221907 - DNA, 22 bp, Artificial Sequence
  Synthetic oligonucleotide; TTT chr2 60486492 60486513 60486497 60486492 -
tctttcagtatcttagattggt

SEQ ID NO: 221908 - DNA, 22 bp, Artificial Sequence
  Synthetic oligonucleotide; TTT chr2 60486491 60486512 60486496 60486491 -
ctttcagtatcttagattggta

SEQ ID NO: 221909 - DNA, 22 bp, Artificial Sequence
  Synthetic oligonucleotide; TTC chr2 60486490 60486511 60486495 60486490 -
tttcagtatcttagattggtag

SEQ ID NO: 221910 - DNA, 22 bp, Artificial Sequence
  Synthetic oligonucleotide; CTT chr2 60486488 60486509 60486493 60486488 -
tcagtatcttagattggtaggt

SEQ ID NO: 221911 - DNA, 22 bp, Artificial Sequence
  Synthetic oligonucleotide; TTT chr2 60486487 60486508 60486492 60486487 -
cagtatcttagattggtaggtc

SEQ ID NO: 221912 - DNA, 22 bp, Artificial Sequence
  Synthetic oligonucleotide; TTC chr2 60486486 60486507 60486491 60486486 -
agtatcttagattggtaggtct

SEQ ID NO: 221913 - DNA, 22 bp, Artificial Sequence
  Synthetic oligonucleotide; CTT chr2 60486478 60486499 60486483 60486478 -
agattggtaggtctttagaaat

SEQ ID NO: 221914 - DNA, 22 bp, Artificial Sequence
  Synthetic oligonucleotide; TTA chr2 60486477 60486498 60486482 60486477 -
gattggtaggtctttagaaatt

SEQ ID NO: 221915 - DNA, 22 bp, Artificial Sequence
  Synthetic oligonucleotide; TTG chr2 60486472 60486493 60486477 60486472 -
gtaggtctttagaaattatctc

SEQ ID NO: 221916 - DNA, 22 bp, Artificial Sequence
  Synthetic oligonucleotide; CTT chr2 60486463 60486484 60486468 60486463 -
tagaaattatctctcaaaatgt

SEQ ID NO: 221917 - DNA, 22 bp, Artificial Sequence
  Synthetic oligonucleotide; TTT chr2 60486462 60486483 60486467 60486462 -
agaaattatctctcaaaatgtg

SEQ ID NO: 221918 - DNA, 22 bp, Artificial Sequence
  Synthetic oligonucleotide; TTA chr2 60486461 60486482 60486466 60486461 -
gaaattatctctcaaaatgtgt

SEQ ID NO: 221919 - DNA, 22 bp, Artificial Sequence
  Synthetic oligonucleotide; TTA chr2 60486454 60486475 60486459 60486454 -
tctctcaaaatgtgtgtgtgtg

SEQ ID NO: 221920 - DNA, 22 bp, Artificial Sequence
  Synthetic oligonucleotide; CTC chr2 60486450 60486471 60486455 60486450 -
tcaaaatgtgtgtgtgtgtgcc

SEQ ID NO: 221921 - DNA, 22 bp, Artificial Sequence
  Synthetic oligonucleotide; CTC chr2 60486448 60486469 60486453 60486448 -
aaaatgtgtgtgtgtgtgccta

SEQ ID NO: 221922 - DNA, 22 bp, Artificial Sequence
  Synthetic oligonucleotide; CTA chr2 60486426 60486447 60486431 60486426 -
agtatagttttcttgaatttct

SEQ ID NO: 221923 - DNA, 22 bp, Artificial Sequence
  Synthetic oligonucleotide; TTT chr2 60486416 60486437 60486421 60486416 -
tcttgaatttctcacttcagta

SEQ ID NO: 221924 - DNA, 22 bp, Artificial Sequence
  Synthetic oligonucleotide; TTT chr2 60486415 60486436 60486420 60486415 -
cttgaatttctcacttcagtac

SEQ ID NO: 221925 - DNA, 22 bp, Artificial Sequence
  Synthetic oligonucleotide; TTC chr2 60486414 60486435 60486419 60486414 -
ttgaatttctcacttcagtact

SEQ ID NO: 221926 - DNA, 22 bp, Artificial Sequence
  Synthetic oligonucleotide; CTT chr2 60486412 60486433 60486417 60486412 -
gaatttctcacttcagtactta

SEQ ID NO: 221927 - DNA, 22 bp, Artificial Sequence
  Synthetic oligonucleotide; TTG chr2 60486411 60486432 60486416 60486411 -
aatttctcacttcagtacttaa

SEQ ID NO: 221928 - DNA, 22 bp, Artificial Sequence
  Synthetic oligonucleotide; TTT chr2 60486406 60486427 60486411 60486406 -
ctcacttcagtacttaactaca

SEQ ID NO: 221929 - DNA, 22 bp, Artificial Sequence
  Synthetic oligonucleotide; TTC chr2 60486405 60486426 60486410 60486405 -
tcacttcagtacttaactacac

SEQ ID NO: 221930 - DNA, 22 bp, Artificial Sequence
  Synthetic oligonucleotide; CTC chr2 60486403 60486424 60486408 60486403 -
acttcagtacttaactacacat

SEQ ID NO: 221931 - DNA, 22 bp, Artificial Sequence
  Synthetic oligonucleotide; CTT chr2 60486399 60486420 60486404 60486399 -
cagtacttaactacacatatgt

SEQ ID NO: 221932 - DNA, 22 bp, Artificial Sequence
  Synthetic oligonucleotide; TTC chr2 60486398 60486419 60486403 60486398 -
agtacttaactacacatatgtg

SEQ ID NO: 221933 - DNA, 22 bp, Artificial Sequence
  Synthetic oligonucleotide; CTT chr2 60486391 60486412 60486396 60486391 -
aactacacatatgtgcagaaag

SEQ ID NO: 221934 - DNA, 22 bp, Artificial Sequence
  Synthetic oligonucleotide; TTA chr2 60486390 60486411 60486395 60486390 -
actacacatatgtgcagaaagt

SEQ ID NO: 221935 - DNA, 22 bp, Artificial Sequence
  Synthetic oligonucleotide; CTA chr2 60486386 60486407 60486391 60486386 -
cacatatgtgcagaaagtgaac

SEQ ID NO: 221936 - DNA, 22 bp, Artificial Sequence
  Synthetic oligonucleotide; CTC chr2 60486362 60486383 60486367 60486362 -
ttagaatttggctatccgttct

SEQ ID NO: 221937 - DNA, 22 bp, Artificial Sequence
  Synthetic oligonucleotide; CTT chr2 60486360 60486381 60486365 60486360 -
agaatttggctatccgttcttt

SEQ ID NO: 221938 - DNA, 22 bp, Artificial Sequence
  Synthetic oligonucleotide; TTA chr2 60486359 60486380 60486364 60486359 -
gaatttggctatccgttctttc

SEQ ID NO: 221939 - DNA, 22 bp, Artificial Sequence
  Synthetic oligonucleotide; TTT chr2 60486353 60486374 60486358 60486353 -
ggctatccgttctttctcattg

SEQ ID NO: 221940 - DNA, 22 bp, Artificial Sequence
  Synthetic oligonucleotide; TTG chr2 60486352 60486373 60486357 60486352 -
gctatccgttctttctcattgt

SEQ ID NO: 221941 - DNA, 22 bp, Artificial Sequence
  Synthetic oligonucleotide; CTA chr2 60486348 60486369 60486353 60486348 -
tccgttctttctcattgtgtga

SEQ ID NO: 221942 - DNA, 22 bp, Artificial Sequence
  Synthetic oligonucleotide; TTC chr2 60486341 60486362 60486346 60486341 -
tttctcattgtgtgagaaggag

SEQ ID NO: 221943 - DNA, 22 bp, Artificial Sequence
  Synthetic oligonucleotide; CTT chr2 60486339 60486360 60486344 60486339 -
tctcattgtgtgagaaggaggc

SEQ ID NO: 221944 - DNA, 22 bp, Artificial Sequence
  Synthetic oligonucleotide; TTT chr2 60486338 60486359 60486343 60486338 -
ctcattgtgtgagaaggaggca

SEQ ID NO: 221945 - DNA, 22 bp, Artificial Sequence
  Synthetic oligonucleotide; TTC chr2 60486337 60486358 60486342 60486337 -
tcattgtgtgagaaggaggcaa

SEQ ID NO: 221946 - DNA, 22 bp, Artificial Sequence
  Synthetic oligonucleotide; CTC chr2 60486335 60486356 60486340 60486335 -
attgtgtgagaaggaggcaaag

SEQ ID NO: 221947 - DNA, 22 bp, Artificial Sequence
  Synthetic oligonucleotide; TTG chr2 60486331 60486352 60486336 60486331 -
tgtgagaaggaggcaaagttgc

SEQ ID NO: 221948 - DNA, 22 bp, Artificial Sequence
  Synthetic oligonucleotide; TTG chr2 60486310 60486331 60486315 60486310 -
ccaaattggaggtggggcaagg

SEQ ID NO: 221949 - DNA, 22 bp, Artificial Sequence
  Synthetic oligonucleotide; TTG chr2 60486302 60486323 60486307 60486302 -
gaggtggggcaaggtgggccag

SEQ ID NO: 221950 - DNA, 22 bp, Artificial Sequence
  Synthetic oligonucleotide; CTG chr2 60486272 60486293 60486277 60486272 -
tgattggtgtctcactttgatg

SEQ ID NO: 221951 - DNA, 22 bp, Artificial Sequence
  Synthetic oligonucleotide; TTG chr2 60486266 60486287 60486271 60486266 -
gtgtctcactttgatgtgtagg

SEQ ID NO: 221952 - DNA, 22 bp, Artificial Sequence
  Synthetic oligonucleotide; CTC chr2 60486259 60486280 60486264 60486259 -
actttgatgtgtaggagagaga

SEQ ID NO: 221953 - DNA, 22 bp, Artificial Sequence
  Synthetic oligonucleotide; CTT chr2 60486255 60486276 60486260 60486255 -
tgatgtgtaggagagagaacaa

SEQ ID NO: 221954 - DNA, 22 bp, Artificial Sequence
  Synthetic oligonucleotide; TTT chr2 60486254 60486275 60486259 60486254 -
gatgtgtaggagagagaacaaa

SEQ ID NO: 221955 - DNA, 22 bp, Artificial Sequence
  Synthetic oligonucleotide; TTG chr2 60486253 60486274 60486258 60486253 -
atgtgtaggagagagaacaaat

SEQ ID NO: 221956 - DNA, 22 bp, Artificial Sequence
  Synthetic oligonucleotide; TTC chr2 60486219 60486240 60486224 60486219 -
tctggaaaggagccatggtcca

SEQ ID NO: 221957 - DNA, 22 bp, Artificial Sequence
  Synthetic oligonucleotide; CTC chr2 60486217 60486238 60486222 60486217 -
tggaaaggagccatggtccacc

SEQ ID NO: 221958 - DNA, 22 bp, Artificial Sequence
  Synthetic oligonucleotide; CTG chr2 60486215 60486236 60486220 60486215 -
gaaaggagccatggtccaccca

SEQ ID NO: 221959 - DNA, 22 bp, Artificial Sequence
  Synthetic oligonucleotide; CTG chr2 60486177 60486198 60486182 60486177 -
aaatccccagtaccagtctccc

SEQ ID NO: 221960 - DNA, 22 bp, Artificial Sequence
  Synthetic oligonucleotide; CTC chr2 60486157 60486178 60486162 60486157 -
cctaggatgtcttgcctttcag

SEQ ID NO: 221961 - DNA, 22 bp, Artificial Sequence
  Synthetic oligonucleotide; CTA chr2 60486153 60486174 60486158 60486153 -
ggatgtcttgcctttcagcagc

SEQ ID NO: 221962 - DNA, 22 bp, Artificial Sequence
  Synthetic oligonucleotide; CTT chr2 60486144 60486165 60486149 60486144 -
gcctttcagcagctgttcagtc

SEQ ID NO: 221963 - DNA, 22 bp, Artificial Sequence
  Synthetic oligonucleotide; TTG chr2 60486143 60486164 60486148 60486143 -
cctttcagcagctgttcagtca

SEQ ID NO: 221964 - DNA, 22 bp, Artificial Sequence
  Synthetic oligonucleotide; CTT chr2 60486139 60486160 60486144 60486139 -
tcagcagctgttcagtcaaatc

SEQ ID NO: 221965 - DNA, 22 bp, Artificial Sequence
  Synthetic oligonucleotide; TTT chr2 60486138 60486159 60486143 60486138 -
cagcagctgttcagtcaaatcc

SEQ ID NO: 221966 - DNA, 22 bp, Artificial Sequence
  Synthetic oligonucleotide; TTC chr2 60486137 60486158 60486142 60486137 -
agcagctgttcagtcaaatcca

SEQ ID NO: 221967 - DNA, 22 bp, Artificial Sequence
  Synthetic oligonucleotide; CTG chr2 60486129 60486150 60486134 60486129 -
ttcagtcaaatccatttcagaa

SEQ ID NO: 221968 - DNA, 22 bp, Artificial Sequence
  Synthetic oligonucleotide; TTC chr2 60486126 60486147 60486131 60486126 -
agtcaaatccatttcagaatgg

SEQ ID NO: 221969 - DNA, 22 bp, Artificial Sequence
  Synthetic oligonucleotide; TTT chr2 60486112 60486133 60486117 60486112 -
cagaatggagaacagcttgtca

SEQ ID NO: 221970 - DNA, 22 bp, Artificial Sequence
  Synthetic oligonucleotide; TTC chr2 60486111 60486132 60486116 60486111 -
agaatggagaacagcttgtcac

SEQ ID NO: 221971 - DNA, 22 bp, Artificial Sequence
  Synthetic oligonucleotide; CTT chr2 60486094 60486115 60486099 60486094 -
gtcacagttctctactcttgac

SEQ ID NO: 221972 - DNA, 22 bp, Artificial Sequence
  Synthetic oligonucleotide; TTG chr2 60486093 60486114 60486098 60486093 -
tcacagttctctactcttgacc

SEQ ID NO: 221973 - DNA, 22 bp, Artificial Sequence
  Synthetic oligonucleotide; TTC chr2 60486084 60486105 60486089 60486084 -
tctactcttgacctgctgatag

SEQ ID NO: 221974 - DNA, 22 bp, Artificial Sequence
  Synthetic oligonucleotide; CTC chr2 60486082 60486103 60486087 60486082 -
tactcttgacctgctgatagaa

SEQ ID NO: 221975 - DNA, 22 bp, Artificial Sequence
  Synthetic oligonucleotide; CTA chr2 60486080 60486101 60486085 60486080 -
ctcttgacctgctgatagaaca

SEQ ID NO: 221976 - DNA, 22 bp, Artificial Sequence
  Synthetic oligonucleotide; CTC chr2 60486077 60486098 60486082 60486077 -
ttgacctgctgatagaacaagg

SEQ ID NO: 221977 - DNA, 22 bp, Artificial Sequence
  Synthetic oligonucleotide; CTT chr2 60486075 60486096 60486080 60486075 -
gacctgctgatagaacaagggg

SEQ ID NO: 221978 - DNA, 22 bp, Artificial Sequence
  Synthetic oligonucleotide; TTG chr2 60486074 60486095 60486079 60486074 -
acctgctgatagaacaaggggc

SEQ ID NO: 221979 - DNA, 22 bp, Artificial Sequence
  Synthetic oligonucleotide; CTG chr2 60486069 60486090 60486074 60486069 -
ctgatagaacaaggggcttgga

SEQ ID NO: 221980 - DNA, 22 bp, Artificial Sequence
  Synthetic oligonucleotide; CTG chr2 60486066 60486087 60486071 60486066 -
atagaacaaggggcttggagat

SEQ ID NO: 221981 - DNA, 22 bp, Artificial Sequence
  Synthetic oligonucleotide; CTT chr2 60486050 60486071 60486055 60486050 -
ggagattttgggtagatatgga

SEQ ID NO: 221982 - DNA, 22 bp, Artificial Sequence
  Synthetic oligonucleotide; TTG chr2 60486049 60486070 60486054 60486049 -
gagattttgggtagatatggaa

SEQ ID NO: 221983 - DNA, 22 bp, Artificial Sequence
  Synthetic oligonucleotide; TTT chr2 60486042 60486063 60486047 60486042 -
tgggtagatatggaaatagatc

SEQ ID NO: 221984 - DNA, 22 bp, Artificial Sequence
  Synthetic oligonucleotide; TTT chr2 60486041 60486062 60486046 60486041 -
gggtagatatggaaatagatcc

SEQ ID NO: 221985 - DNA, 22 bp, Artificial Sequence
  Synthetic oligonucleotide; TTG chr2 60486040 60486061 60486045 60486040 -
ggtagatatggaaatagatccc

SEQ ID NO: 221986 - DNA, 22 bp, Artificial Sequence
  Synthetic oligonucleotide; CTA chr2 60486016 60486037 60486021 60486016 -
aacatactaaaaagattttttt

SEQ ID NO: 221987 - DNA, 22 bp, Artificial Sequence
  Synthetic oligonucleotide; CTA chr2 60486007 60486028 60486012 60486007 -
aaaagattttttttgtacgtgt

SEQ ID NO: 221988 - DNA, 22 bp, Artificial Sequence
  Synthetic oligonucleotide; TTT chr2 60485998 60486019 60486003 60485998 -
tttttgtacgtgtggtggggga

SEQ ID NO: 221989 - DNA, 22 bp, Artificial Sequence
  Synthetic oligonucleotide; TTT chr2 60485997 60486018 60486002 60485997 -
ttttgtacgtgtggtgggggag

SEQ ID NO: 221990 - DNA, 22 bp, Artificial Sequence
  Synthetic oligonucleotide; TTT chr2 60485996 60486017 60486001 60485996 -
tttgtacgtgtggtgggggaga

SEQ ID NO: 221991 - DNA, 22 bp, Artificial Sequence
  Synthetic oligonucleotide; TTT chr2 60485995 60486016 60486000 60485995 -
ttgtacgtgtggtgggggagag

SEQ ID NO: 221992 - DNA, 22 bp, Artificial Sequence
  Synthetic oligonucleotide; TTT chr2 60485994 60486015 60485999 60485994 -
tgtacgtgtggtgggggagagg

SEQ ID NO: 221993 - DNA, 22 bp, Artificial Sequence
  Synthetic oligonucleotide; TTT chr2 60485993 60486014 60485998 60485993 -
gtacgtgtggtgggggagagga

SEQ ID NO: 221994 - DNA, 22 bp, Artificial Sequence
  Synthetic oligonucleotide; TTG chr2 60485992 60486013 60485997 60485992 -
tacgtgtggtgggggagaggag

SEQ ID NO: 221995 - DNA, 22 bp, Artificial Sequence
  Synthetic oligonucleotide; TTG chr2 60485952 60485973 60485957 60485952 -
gagaaagaaagttggggaagga

SEQ ID NO: 221996 - DNA, 22 bp, Artificial Sequence
  Synthetic oligonucleotide; TTG chr2 60485938 60485959 60485943 60485938 -
gggaaggaaactaaaatgtgca

SEQ ID NO: 221997 - DNA, 22 bp, Artificial Sequence
  Synthetic oligonucleotide; CTA chr2 60485925 60485946 60485930 60485925 -
aaatgtgcaatctcattcctca

SEQ ID NO: 221998 - DNA, 22 bp, Artificial Sequence
  Synthetic oligonucleotide; CTC chr2 60485911 60485932 60485916 60485911 -
attcctcagccttcttgttgaa

SEQ ID NO: 221999 - DNA, 22 bp, Artificial Sequence
  Synthetic oligonucleotide; TTC chr2 60485907 60485928 60485912 60485907 -
ctcagccttcttgttgaaaatg

SEQ ID NO: 222000 - DNA, 22 bp, Artificial Sequence
  Synthetic oligonucleotide; CTC chr2 60485904 60485925 60485909 60485904 -
agccttcttgttgaaaatgaga

SEQ ID NO: 222001 - DNA, 22 bp, Artificial Sequence
  Synthetic oligonucleotide; CTT chr2 60485898 60485919 60485903 60485898 -
cttgttgaaaatgagaatcaga

SEQ ID NO: 222002 - DNA, 22 bp, Artificial Sequence
  Synthetic oligonucleotide; TTC chr2 60485897 60485918 60485902 60485897 -
ttgttgaaaatgagaatcagat

SEQ ID NO: 222003 - DNA, 22 bp, Artificial Sequence
  Synthetic oligonucleotide; CTT chr2 60485895 60485916 60485900 60485895 -
gttgaaaatgagaatcagatgc

SEQ ID NO: 222004 - DNA, 22 bp, Artificial Sequence
  Synthetic oligonucleotide; TTG chr2 60485894 60485915 60485899 60485894 -
ttgaaaatgagaatcagatgca

SEQ ID NO: 222005 - DNA, 22 bp, Artificial Sequence
  Synthetic oligonucleotide; TTG chr2 60485891 60485912 60485896 60485891 -
aaaatgagaatcagatgcagca

SEQ ID NO: 222006 - DNA, 22 bp, Artificial Sequence
  Synthetic oligonucleotide; TTA chr2 60485861 60485882 60485866 60485861 -
tttccaagagctatctggtgat

SEQ ID NO: 222007 - DNA, 22 bp, Artificial Sequence
  Synthetic oligonucleotide; TTT chr2 60485858 60485879 60485863 60485858 -
ccaagagctatctggtgatggg

SEQ ID NO: 222008 - DNA, 22 bp, Artificial Sequence
  Synthetic oligonucleotide; TTC chr2 60485857 60485878 60485862 60485857 -
caagagctatctggtgatggga

SEQ ID NO: 222009 - DNA, 22 bp, Artificial Sequence
  Synthetic oligonucleotide; CTA chr2 60485848 60485869 60485853 60485848 -
tctggtgatgggatccatctgg

SEQ ID NO: 222010 - DNA, 22 bp, Artificial Sequence
  Synthetic oligonucleotide; CTG chr2 60485844 60485865 60485849 60485844 -
gtgatgggatccatctggtgaa

SEQ ID NO: 222011 - DNA, 22 bp, Artificial Sequence
  Synthetic oligonucleotide; CTG chr2 60485827 60485848 60485832 60485827 -
gtgaagggctacttctggggga

SEQ ID NO: 222012 - DNA, 22 bp, Artificial Sequence
  Synthetic oligonucleotide; CTA chr2 60485816 60485837 60485821 60485816 -
cttctgggggacctggaattgc

SEQ ID NO: 222013 - DNA, 22 bp, Artificial Sequence
  Synthetic oligonucleotide; CTT chr2 60485813 60485834 60485818 60485813 -
ctgggggacctggaattgctgt

SEQ ID NO: 222014 - DNA, 22 bp, Artificial Sequence
  Synthetic oligonucleotide; TTC chr2 60485812 60485833 60485817 60485812 -
tgggggacctggaattgctgtg

SEQ ID NO: 222015 - DNA, 22 bp, Artificial Sequence
  Synthetic oligonucleotide; CTG chr2 60485810 60485831 60485815 60485810 -
ggggacctggaattgctgtgtg

SEQ ID NO: 222016 - DNA, 22 bp, Artificial Sequence
  Synthetic oligonucleotide; CTG chr2 60485801 60485822 60485806 60485801 -
gaattgctgtgtgacctttggg

SEQ ID NO: 222017 - DNA, 22 bp, Artificial Sequence
  Synthetic oligonucleotide; TTG chr2 60485795 60485816 60485800 60485795 -
ctgtgtgacctttgggaaacac

SEQ ID NO: 222018 - DNA, 22 bp, Artificial Sequence
  Synthetic oligonucleotide; CTG chr2 60485792 60485813 60485797 60485792 -
tgtgacctttgggaaacacttg

SEQ ID NO: 222019 - DNA, 22 bp, Artificial Sequence
  Synthetic oligonucleotide; CTT chr2 60485783 60485804 60485788 60485783 -
tgggaaacacttgccttctctg

SEQ ID NO: 222020 - DNA, 22 bp, Artificial Sequence
  Synthetic oligonucleotide; TTT chr2 60485782 60485803 60485787 60485782 -
gggaaacacttgccttctctgg

SEQ ID NO: 222021 - DNA, 22 bp, Artificial Sequence
  Synthetic oligonucleotide; TTG chr2 60485781 60485802 60485786 60485781 -
ggaaacacttgccttctctggg

SEQ ID NO: 222022 - DNA, 22 bp, Artificial Sequence
  Synthetic oligonucleotide; CTT chr2 60485771 60485792 60485776 60485771 -
gccttctctgggttgagctcag

SEQ ID NO: 222023 - DNA, 22 bp, Artificial Sequence
  Synthetic oligonucleotide; TTG chr2 60485770 60485791 60485775 60485770 -
ccttctctgggttgagctcagc

SEQ ID NO: 222024 - DNA, 22 bp, Artificial Sequence
  Synthetic oligonucleotide; CTT chr2 60485766 60485787 60485771 60485766 -
ctctgggttgagctcagcccgt

SEQ ID NO: 222025 - DNA, 22 bp, Artificial Sequence
  Synthetic oligonucleotide; TTC chr2 60485765 60485786 60485770 60485765 -
tctgggttgagctcagcccgta

SEQ ID NO: 222026 - DNA, 22 bp, Artificial Sequence
  Synthetic oligonucleotide; CTC chr2 60485763 60485784 60485768 60485763 -
tgggttgagctcagcccgtagt

SEQ ID NO: 222027 - DNA, 22 bp, Artificial Sequence
  Synthetic oligonucleotide; CTG chr2 60485761 60485782 60485766 60485761 -
ggttgagctcagcccgtagttc

SEQ ID NO: 222028 - DNA, 22 bp, Artificial Sequence
  Synthetic oligonucleotide; TTG chr2 60485756 60485777 60485761 60485756 -
agctcagcccgtagttcacaag

SEQ ID NO: 222029 - DNA, 22 bp, Artificial Sequence
  Synthetic oligonucleotide; CTC chr2 60485751 60485772 60485756 60485751 -
agcccgtagttcacaaggggca

SEQ ID NO: 222030 - DNA, 22 bp, Artificial Sequence
  Synthetic oligonucleotide; TTC chr2 60485739 60485760 60485744 60485739 -
acaaggggcattgctggtattt

SEQ ID NO: 222031 - DNA, 22 bp, Artificial Sequence
  Synthetic oligonucleotide; TTG chr2 60485726 60485747 60485731 60485726 -
ctggtatttatagactgtgttt

SEQ ID NO: 222032 - DNA, 22 bp, Artificial Sequence
  Synthetic oligonucleotide; CTG chr2 60485723 60485744 60485728 60485723 -
gtatttatagactgtgtttgac

SEQ ID NO: 222033 - DNA, 22 bp, Artificial Sequence
  Synthetic oligonucleotide; TTT chr2 60485717 60485738 60485722 60485717 -
atagactgtgtttgacagtccc

SEQ ID NO: 222034 - DNA, 22 bp, Artificial Sequence
  Synthetic oligonucleotide; TTA chr2 60485716 60485737 60485721 60485716 -
tagactgtgtttgacagtcccg

SEQ ID NO: 222035 - DNA, 22 bp, Artificial Sequence
  Synthetic oligonucleotide; CTG chr2 60485709 60485730 60485714 60485709 -
tgtttgacagtcccgagtgaaa

SEQ ID NO: 222036 - DNA, 22 bp, Artificial Sequence
  Synthetic oligonucleotide; TTT chr2 60485704 60485725 60485709 60485704 -
gacagtcccgagtgaaaggcaa

SEQ ID NO: 222037 - DNA, 22 bp, Artificial Sequence
  Synthetic oligonucleotide; TTG chr2 60485703 60485724 60485708 60485703 -
acagtcccgagtgaaaggcaac

SEQ ID NO: 222038 - DNA, 22 bp, Artificial Sequence
  Synthetic oligonucleotide; CTT chr2 60485679 60485700 60485684 60485679 -
cacttctcaccccagaatagca

SEQ ID NO: 222039 - DNA, 22 bp, Artificial Sequence
  Synthetic oligonucleotide; TTC chr2 60485678 60485699 60485683 60485678 -
acttctcaccccagaatagcaa

SEQ ID NO: 222040 - DNA, 22 bp, Artificial Sequence
  Synthetic oligonucleotide; CTT chr2 60485674 60485695 60485679 60485674 -
ctcaccccagaatagcaagcgt

SEQ ID NO: 222041 - DNA, 22 bp, Artificial Sequence
  Synthetic oligonucleotide; TTC chr2 60485673 60485694 60485678 60485673 -
tcaccccagaatagcaagcgtt

SEQ ID NO: 222042 - DNA, 22 bp, Artificial Sequence
  Synthetic oligonucleotide; CTC chr2 60485671 60485692 60485676 60485671 -
accccagaatagcaagcgttgt

SEQ ID NO: 222043 - DNA, 22 bp, Artificial Sequence
  Synthetic oligonucleotide; TTG chr2 60485650 60485671 60485655 60485650 -
tttctcatatctaggttgctgg

SEQ ID NO: 222044 - DNA, 22 bp, Artificial Sequence
  Synthetic oligonucleotide; TTT chr2 60485647 60485668 60485652 60485647 -
ctcatatctaggttgctgggac

SEQ ID NO: 222045 - DNA, 22 bp, Artificial Sequence
  Synthetic oligonucleotide; TTC chr2 60485646 60485667 60485651 60485646 -
tcatatctaggttgctgggaca

SEQ ID NO: 222046 - DNA, 22 bp, Artificial Sequence
  Synthetic oligonucleotide; CTC chr2 60485644 60485665 60485649 60485644 -
atatctaggttgctgggacagc

SEQ ID NO: 222047 - DNA, 22 bp, Artificial Sequence
  Synthetic oligonucleotide; CTA chr2 60485637 60485658 60485642 60485637 -
ggttgctgggacagcttcccag

SEQ ID NO: 222048 - DNA, 22 bp, Artificial Sequence
  Synthetic oligonucleotide; TTG chr2 60485632 60485653 60485637 60485632 -
ctgggacagcttcccaggaacc

SEQ ID NO: 222049 - DNA, 22 bp, Artificial Sequence
  Synthetic oligonucleotide; CTG chr2 60485629 60485650 60485634 60485629 -
ggacagcttcccaggaacctaa

SEQ ID NO: 222050 - DNA, 22 bp, Artificial Sequence
  Synthetic oligonucleotide; CTT chr2 60485620 60485641 60485625 60485620 -
cccaggaacctaatattcagca

SEQ ID NO: 222051 - DNA, 22 bp, Artificial Sequence
  Synthetic oligonucleotide; TTC chr2 60485619 60485640 60485624 60485619 -
ccaggaacctaatattcagcag

SEQ ID NO: 222052 - DNA, 22 bp, Artificial Sequence
  Synthetic oligonucleotide; CTA chr2 60485608 60485629 60485613 60485608 -
atattcagcagcttcgtgacgt

SEQ ID NO: 222053 - DNA, 22 bp, Artificial Sequence
  Synthetic oligonucleotide; TTC chr2 60485602 60485623 60485607 60485602 -
agcagcttcgtgacgttggatg

SEQ ID NO: 222054 - DNA, 22 bp, Artificial Sequence
  Synthetic oligonucleotide; CTT chr2 60485594 60485615 60485599 60485594 -
cgtgacgttggatggagggttt

SEQ ID NO: 222055 - DNA, 22 bp, Artificial Sequence
  Synthetic oligonucleotide; TTC chr2 60485593 60485614 60485598 60485593 -
gtgacgttggatggagggtttt

SEQ ID NO: 222056 - DNA, 22 bp, Artificial Sequence
  Synthetic oligonucleotide; TTG chr2 60485584 60485605 60485589 60485584 -
gatggagggtttttctttttaa

SEQ ID NO: 222057 - DNA, 22 bp, Artificial Sequence
  Synthetic oligonucleotide; TTT chr2 60485572 60485593 60485577 60485572 -
ttctttttaaatgagttgattg

SEQ ID NO: 222058 - DNA, 22 bp, Artificial Sequence
  Synthetic oligonucleotide; TTT chr2 60485571 60485592 60485576 60485571 -
tctttttaaatgagttgattgg

SEQ ID NO: 222059 - DNA, 22 bp, Artificial Sequence
  Synthetic oligonucleotide; TTT chr2 60485570 60485591 60485575 60485570 -
ctttttaaatgagttgattggc

SEQ ID NO: 222060 - DNA, 22 bp, Artificial Sequence
  Synthetic oligonucleotide; TTC chr2 60485569 60485590 60485574 60485569 -
tttttaaatgagttgattggct

SEQ ID NO: 222061 - DNA, 22 bp, Artificial Sequence
  Synthetic oligonucleotide; CTT chr2 60485567 60485588 60485572 60485567 -
tttaaatgagttgattggcttt

SEQ ID NO: 222062 - DNA, 22 bp, Artificial Sequence
  Synthetic oligonucleotide; TTT chr2 60485566 60485587 60485571 60485566 -
ttaaatgagttgattggctttt

SEQ ID NO: 222063 - DNA, 22 bp, Artificial Sequence
  Synthetic oligonucleotide; TTT chr2 60485565 60485586 60485570 60485565 -
taaatgagttgattggcttttg

SEQ ID NO: 222064 - DNA, 22 bp, Artificial Sequence
  Synthetic oligonucleotide; TTT chr2 60485564 60485585 60485569 60485564 -
aaatgagttgattggcttttgc

SEQ ID NO: 222065 - DNA, 22 bp, Artificial Sequence
  Synthetic oligonucleotide; TTA chr2 60485563 60485584 60485568 60485563 -
aatgagttgattggcttttgcc

SEQ ID NO: 222066 - DNA, 22 bp, Artificial Sequence
  Synthetic oligonucleotide; TTG chr2 60485554 60485575 60485559 60485554 -
attggcttttgccactttacac

SEQ ID NO: 222067 - DNA, 22 bp, Artificial Sequence
  Synthetic oligonucleotide; TTG chr2 60485550 60485571 60485555 60485550 -
gcttttgccactttacacattg

SEQ ID NO: 222068 - DNA, 22 bp, Artificial Sequence
  Synthetic oligonucleotide; CTT chr2 60485546 60485567 60485551 60485546 -
ttgccactttacacattgtttt

SEQ ID NO: 222069 - DNA, 22 bp, Artificial Sequence
  Synthetic oligonucleotide; TTT chr2 60485545 60485566 60485550 60485545 -
tgccactttacacattgttttc

SEQ ID NO: 222070 - DNA, 22 bp, Artificial Sequence
  Synthetic oligonucleotide; TTT chr2 60485544 60485565 60485549 60485544 -
gccactttacacattgttttcc

SEQ ID NO: 222071 - DNA, 22 bp, Artificial Sequence
  Synthetic oligonucleotide; TTG chr2 60485543 60485564 60485548 60485543 -
ccactttacacattgttttcca

SEQ ID NO: 222072 - DNA, 22 bp, Artificial Sequence
  Synthetic oligonucleotide; CTT chr2 60485537 60485558 60485542 60485537 -
tacacattgttttccaggtcta

SEQ ID NO: 222073 - DNA, 22 bp, Artificial Sequence
  Synthetic oligonucleotide; TTT chr2 60485536 60485557 60485541 60485536 -
acacattgttttccaggtctag

SEQ ID NO: 222074 - DNA, 22 bp, Artificial Sequence
  Synthetic oligonucleotide; TTA chr2 60485535 60485556 60485540 60485535 -
cacattgttttccaggtctagg

SEQ ID NO: 222075 - DNA, 22 bp, Artificial Sequence
  Synthetic oligonucleotide; TTG chr2 60485528 60485549 60485533 60485528 -
ttttccaggtctaggtttattt

SEQ ID NO: 222076 - DNA, 22 bp, Artificial Sequence
  Synthetic oligonucleotide; TTT chr2 60485525 60485546 60485530 60485525 -
tccaggtctaggtttatttttc

SEQ ID NO: 222077 - DNA, 22 bp, Artificial Sequence
  Synthetic oligonucleotide; TTT chr2 60485524 60485545 60485529 60485524 -
ccaggtctaggtttatttttcc

SEQ ID NO: 222078 - DNA, 22 bp, Artificial Sequence
  Synthetic oligonucleotide; TTC chr2 60485523 60485544 60485528 60485523 -
caggtctaggtttatttttccc

SEQ ID NO: 222079 - DNA, 22 bp, Artificial Sequence
  Synthetic oligonucleotide; CTA chr2 60485515 60485536 60485520 60485515 -
ggtttatttttcccttataggt

SEQ ID NO: 222080 - DNA, 22 bp, Artificial Sequence
  Synthetic oligonucleotide; TTT chr2 60485510 60485531 60485515 60485510 -
atttttcccttataggtagaat

SEQ ID NO: 222081 - DNA, 22 bp, Artificial Sequence
  Synthetic oligonucleotide; TTA chr2 60485509 60485530 60485514 60485509 -
tttttcccttataggtagaata

SEQ ID NO: 222082 - DNA, 22 bp, Artificial Sequence
  Synthetic oligonucleotide; TTT chr2 60485506 60485527 60485511 60485506 -
ttcccttataggtagaatataa

SEQ ID NO: 222083 - DNA, 22 bp, Artificial Sequence
  Synthetic oligonucleotide; TTT chr2 60485505 60485526 60485510 60485505 -
tcccttataggtagaatataaa

SEQ ID NO: 222084 - DNA, 22 bp, Artificial Sequence
  Synthetic oligonucleotide; TTT chr2 60485504 60485525 60485509 60485504 -
cccttataggtagaatataaaa

SEQ ID NO: 222085 - DNA, 22 bp, Artificial Sequence
  Synthetic oligonucleotide; TTC chr2 60485503 60485524 60485508 60485503 -
ccttataggtagaatataaaag

SEQ ID NO: 222086 - DNA, 22 bp, Artificial Sequence
  Synthetic oligonucleotide; CTT chr2 60485499 60485520 60485504 60485499 -
ataggtagaatataaaagagta

SEQ ID NO: 222087 - DNA, 22 bp, Artificial Sequence
  Synthetic oligonucleotide; TTA chr2 60485498 60485519 60485503 60485498 -
taggtagaatataaaagagtat

SEQ ID NO: 222088 - DNA, 22 bp, Artificial Sequence
  Synthetic oligonucleotide; CTG chr2 60485468 60485489 60485473 60485468 -
ccctggctcacaccgttctgtt

SEQ ID NO: 222089 - DNA, 22 bp, Artificial Sequence
  Synthetic oligonucleotide; CTG chr2 60485463 60485484 60485468 60485463 -
gctcacaccgttctgtttttgc

SEQ ID NO: 222090 - DNA, 22 bp, Artificial Sequence
  Synthetic oligonucleotide; CTC chr2 60485459 60485480 60485464 60485459 -
acaccgttctgtttttgcagtt

SEQ ID NO: 222091 - DNA, 22 bp, Artificial Sequence
  Synthetic oligonucleotide; TTC chr2 60485450 60485471 60485455 60485450 -
tgtttttgcagttagcttaaag

SEQ ID NO: 222092 - DNA, 22 bp, Artificial Sequence
  Synthetic oligonucleotide; CTG chr2 60485448 60485469 60485453 60485448 -
tttttgcagttagcttaaaggc

SEQ ID NO: 222093 - DNA, 22 bp, Artificial Sequence
  Synthetic oligonucleotide; TTT chr2 60485445 60485466 60485450 60485445 -
ttgcagttagcttaaaggcatg

SEQ ID NO: 222094 - DNA, 22 bp, Artificial Sequence
  Synthetic oligonucleotide; TTT chr2 60485444 60485465 60485449 60485444 -
tgcagttagcttaaaggcatgg

SEQ ID NO: 222095 - DNA, 22 bp, Artificial Sequence
  Synthetic oligonucleotide; TTT chr2 60485443 60485464 60485448 60485443 -
gcagttagcttaaaggcatgga

SEQ ID NO: 222096 - DNA, 22 bp, Artificial Sequence
  Synthetic oligonucleotide; TTG chr2 60485442 60485463 60485447 60485442 -
cagttagcttaaaggcatggag

SEQ ID NO: 222097 - DNA, 22 bp, Artificial Sequence
  Synthetic oligonucleotide; TTA chr2 60485436 60485457 60485441 60485436 -
gcttaaaggcatggaggacatt

SEQ ID NO: 222098 - DNA, 22 bp, Artificial Sequence
  Synthetic oligonucleotide; CTT chr2 60485432 60485453 60485437 60485432 -
aaaggcatggaggacattcctg

SEQ ID NO: 222099 - DNA, 22 bp, Artificial Sequence
  Synthetic oligonucleotide; TTA chr2 60485431 60485452 60485436 60485431 -
aaggcatggaggacattcctgg

SEQ ID NO: 222100 - DNA, 22 bp, Artificial Sequence
  Synthetic oligonucleotide; TTC chr2 60485413 60485434 60485418 60485413 -
ctgggactagcatctgctagcc

SEQ ID NO: 222101 - DNA, 22 bp, Artificial Sequence
  Synthetic oligonucleotide; CTG chr2 60485410 60485431 60485415 60485410 -
ggactagcatctgctagccaag

SEQ ID NO: 222102 - DNA, 22 bp, Artificial Sequence
  Synthetic oligonucleotide; CTA chr2 60485404 60485425 60485409 60485404 -
gcatctgctagccaagaacgaa

SEQ ID NO: 222103 - DNA, 22 bp, Artificial Sequence
  Synthetic oligonucleotide; CTG chr2 60485397 60485418 60485402 60485397 -
ctagccaagaacgaagatgaca

SEQ ID NO: 222104 - DNA, 22 bp, Artificial Sequence
  Synthetic oligonucleotide; CTA chr2 60485394 60485415 60485399 60485394 -
gccaagaacgaagatgacagca

SEQ ID NO: 222105 - DNA, 22 bp, Artificial Sequence
  Synthetic oligonucleotide; CTG chr2 60485346 60485367 60485351 60485346 -
ctggggctaataacccactgca

SEQ ID NO: 222106 - DNA, 22 bp, Artificial Sequence
  Synthetic oligonucleotide; CTG chr2 60485343 60485364 60485348 60485343 -
gggctaataacccactgcaggc

SEQ ID NO: 222107 - DNA, 22 bp, Artificial Sequence
  Synthetic oligonucleotide; CTA chr2 60485337 60485358 60485342 60485337 -
ataacccactgcaggctatcct

SEQ ID NO: 222108 - DNA, 22 bp, Artificial Sequence
  Synthetic oligonucleotide; CTG chr2 60485326 60485347 60485331 60485326 -
caggctatccttggcattcttg

SEQ ID NO: 222109 - DNA, 22 bp, Artificial Sequence
  Synthetic oligonucleotide; CTA chr2 60485319 60485340 60485324 60485319 -
tccttggcattcttgctggagt

SEQ ID NO: 222110 - DNA, 22 bp, Artificial Sequence
  Synthetic oligonucleotide; CTT chr2 60485314 60485335 60485319 60485314 -
ggcattcttgctggagtggcct

SEQ ID NO: 222111 - DNA, 22 bp, Artificial Sequence
  Synthetic oligonucleotide; TTG chr2 60485313 60485334 60485318 60485313 -
gcattcttgctggagtggcctt

SEQ ID NO: 222112 - DNA, 22 bp, Artificial Sequence
  Synthetic oligonucleotide; TTC chr2 60485307 60485328 60485312 60485307 -
ttgctggagtggccttgctcca

SEQ ID NO: 222113 - DNA, 22 bp, Artificial Sequence
  Synthetic oligonucleotide; CTT chr2 60485305 60485326 60485310 60485305 -
gctggagtggccttgctccacc

SEQ ID NO: 222114 - DNA, 22 bp, Artificial Sequence
  Synthetic oligonucleotide; TTG chr2 60485304 60485325 60485309 60485304 -
ctggagtggccttgctccaccc

SEQ ID NO: 222115 - DNA, 22 bp, Artificial Sequence
  Synthetic oligonucleotide; CTG chr2 60485301 60485322 60485306 60485301 -
gagtggccttgctccaccctac

SEQ ID NO: 222116 - DNA, 22 bp, Artificial Sequence
  Synthetic oligonucleotide; CTT chr2 60485291 60485312 60485296 60485291 -
gctccaccctacctggtcactg

SEQ ID NO: 222117 - DNA, 22 bp, Artificial Sequence
  Synthetic oligonucleotide; TTG chr2 60485290 60485311 60485295 60485290 -
ctccaccctacctggtcactgt

SEQ ID NO: 222118 - DNA, 22 bp, Artificial Sequence
  Synthetic oligonucleotide; CTC chr2 60485287 60485308 60485292 60485287 -
caccctacctggtcactgtgcc

SEQ ID NO: 222119 - DNA, 22 bp, Artificial Sequence
  Synthetic oligonucleotide; CTA chr2 60485280 60485301 60485285 60485280 -
cctggtcactgtgccgttcagt

SEQ ID NO: 222120 - DNA, 22 bp, Artificial Sequence
  Synthetic oligonucleotide; CTG chr2 60485276 60485297 60485281 60485276 -
gtcactgtgccgttcagtctgg

SEQ ID NO: 222121 - DNA, 22 bp, Artificial Sequence
  Synthetic oligonucleotide; CTG chr2 60485269 60485290 60485274 60485269 -
tgccgttcagtctgggctatgg

SEQ ID NO: 222122 - DNA, 22 bp, Artificial Sequence
  Synthetic oligonucleotide; TTC chr2 60485261 60485282 60485266 60485261 -
agtctgggctatggcctctcac

SEQ ID NO: 222123 - DNA, 22 bp, Artificial Sequence
  Synthetic oligonucleotide; CTG chr2 60485255 60485276 60485260 60485255 -
ggctatggcctctcaccccacc

SEQ ID NO: 222124 - DNA, 22 bp, Artificial Sequence
  Synthetic oligonucleotide; CTA chr2 60485250 60485271 60485255 60485250 -
tggcctctcaccccacctcatc

SEQ ID NO: 222125 - DNA, 22 bp, Artificial Sequence
  Synthetic oligonucleotide; CTC chr2 60485243 60485264 60485248 60485243 -
tcaccccacctcatcccattgc

SEQ ID NO: 222126 - DNA, 22 bp, Artificial Sequence
  Synthetic oligonucleotide; CTC chr2 60485241 60485262 60485246 60485241 -
accccacctcatcccattgcat

SEQ ID NO: 222127 - DNA, 22 bp, Artificial Sequence
  Synthetic oligonucleotide; CTC chr2 60485231 60485252 60485236 60485231 -
atcccattgcatttcataagcc

SEQ ID NO: 222128 - DNA, 22 bp, Artificial Sequence
  Synthetic oligonucleotide; TTG chr2 60485222 60485243 60485227 60485222 -
catttcataagccagtaactcc

SEQ ID NO: 222129 - DNA, 22 bp, Artificial Sequence
  Synthetic oligonucleotide; TTT chr2 60485217 60485238 60485222 60485217 -
cataagccagtaactccaaggc

SEQ ID NO: 222130 - DNA, 22 bp, Artificial Sequence
  Synthetic oligonucleotide; TTC chr2 60485216 60485237 60485221 60485216 -
ataagccagtaactccaaggcc

SEQ ID NO: 222131 - DNA, 22 bp, Artificial Sequence
  Synthetic oligonucleotide; CTC chr2 60485201 60485222 60485206 60485201 -
caaggccagacttccattacac

SEQ ID NO: 222132 - DNA, 22 bp, Artificial Sequence
  Synthetic oligonucleotide; CTT chr2 60485188 60485209 60485193 60485188 -
ccattacactctggatgactgc

SEQ ID NO: 222133 - DNA, 22 bp, Artificial Sequence
  Synthetic oligonucleotide; TTC chr2 60485187 60485208 60485192 60485187 -
cattacactctggatgactgca

SEQ ID NO: 222134 - DNA, 22 bp, Artificial Sequence
  Synthetic oligonucleotide; TTA chr2 60485182 60485203 60485187 60485182 -
cactctggatgactgcatttat

SEQ ID NO: 222135 - DNA, 22 bp, Artificial Sequence
  Synthetic oligonucleotide; CTC chr2 60485177 60485198 60485182 60485177 -
tggatgactgcatttatttgca

SEQ ID NO: 222136 - DNA, 22 bp, Artificial Sequence
  Synthetic oligonucleotide; CTG chr2 60485175 60485196 60485180 60485175 -
gatgactgcatttatttgcagt

SEQ ID NO: 222137 - DNA, 22 bp, Artificial Sequence
  Synthetic oligonucleotide; CTG chr2 60485167 60485188 60485172 60485167 -
catttatttgcagtgacttcaa

SEQ ID NO: 222138 - DNA, 22 bp, Artificial Sequence
  Synthetic oligonucleotide; TTT chr2 60485162 60485183 60485167 60485162 -
atttgcagtgacttcaaggaag

SEQ ID NO: 222139 - DNA, 22 bp, Artificial Sequence
  Synthetic oligonucleotide; TTA chr2 60485161 60485182 60485166 60485161 -
tttgcagtgacttcaaggaaga

SEQ ID NO: 222140 - DNA, 22 bp, Artificial Sequence
  Synthetic oligonucleotide; TTT chr2 60485158 60485179 60485163 60485158 -
gcagtgacttcaaggaagaagg

SEQ ID NO: 222141 - DNA, 22 bp, Artificial Sequence
  Synthetic oligonucleotide; TTG chr2 60485157 60485178 60485162 60485157 -
cagtgacttcaaggaagaaggg

SEQ ID NO: 222142 - DNA, 22 bp, Artificial Sequence
  Synthetic oligonucleotide; CTT chr2 60485148 60485169 60485153 60485148 -
caaggaagaaggggcctgttta

SEQ ID NO: 222143 - DNA, 22 bp, Artificial Sequence
  Synthetic oligonucleotide; TTC chr2 60485147 60485168 60485152 60485147 -
aaggaagaaggggcctgtttag

SEQ ID NO: 222144 - DNA, 22 bp, Artificial Sequence
  Synthetic oligonucleotide; CTG chr2 60485130 60485151 60485135 60485130 -
tttaggaaattaggcactggcc

SEQ ID NO: 222145 - DNA, 22 bp, Artificial Sequence
  Synthetic oligonucleotide; TTT chr2 60485127 60485148 60485132 60485127 -
aggaaattaggcactggcctgg

SEQ ID NO: 222146 - DNA, 22 bp, Artificial Sequence
  Synthetic oligonucleotide; TTA chr2 60485126 60485147 60485131 60485126 -
ggaaattaggcactggcctggt

SEQ ID NO: 222147 - DNA, 22 bp, Artificial Sequence
  Synthetic oligonucleotide; TTA chr2 60485118 60485139 60485123 60485118 -
ggcactggcctggtgaaaaggt

SEQ ID NO: 222148 - DNA, 22 bp, Artificial Sequence
  Synthetic oligonucleotide; CTG chr2 60485111 60485132 60485116 60485111 -
gcctggtgaaaaggtcaacttg

SEQ ID NO: 222149 - DNA, 22 bp, Artificial Sequence
  Synthetic oligonucleotide; CTG chr2 60485106 60485127 60485111 60485106 -
gtgaaaaggtcaacttgcgaaa

SEQ ID NO: 222150 - DNA, 22 bp, Artificial Sequence
  Synthetic oligonucleotide; CTT chr2 60485090 60485111 60485095 60485090 -
gcgaaattgtggctgcaaggga

SEQ ID NO: 222151 - DNA, 22 bp, Artificial Sequence
  Synthetic oligonucleotide; TTG chr2 60485089 60485110 60485094 60485089 -
cgaaattgtggctgcaagggat

SEQ ID NO: 222152 - DNA, 22 bp, Artificial Sequence
  Synthetic oligonucleotide; TTG chr2 60485081 60485102 60485086 60485081 -
tggctgcaagggatgccttttt

SEQ ID NO: 222153 - DNA, 22 bp, Artificial Sequence
  Synthetic oligonucleotide; CTG chr2 60485075 60485096 60485080 60485075 -
caagggatgcctttttcttcca

SEQ ID NO: 222154 - DNA, 22 bp, Artificial Sequence
  Synthetic oligonucleotide; CTT chr2 60485062 60485083 60485067 60485062 -
tttcttccaaggctatgccttg

SEQ ID NO: 222155 - DNA, 22 bp, Artificial Sequence
  Synthetic oligonucleotide; TTT chr2 60485061 60485082 60485066 60485061 -
ttcttccaaggctatgccttgg

SEQ ID NO: 222156 - DNA, 22 bp, Artificial Sequence
  Synthetic oligonucleotide; TTT chr2 60485060 60485081 60485065 60485060 -
tcttccaaggctatgccttggt

SEQ ID NO: 222157 - DNA, 22 bp, Artificial Sequence
  Synthetic oligonucleotide; TTT chr2 60485059 60485080 60485064 60485059 -
cttccaaggctatgccttggtg

SEQ ID NO: 222158 - DNA, 22 bp, Artificial Sequence
  Synthetic oligonucleotide; TTC chr2 60485058 60485079 60485063 60485058 -
ttccaaggctatgccttggtgg

SEQ ID NO: 222159 - DNA, 22 bp, Artificial Sequence
  Synthetic oligonucleotide; CTT chr2 60485056 60485077 60485061 60485056 -
ccaaggctatgccttggtggtg

SEQ ID NO: 222160 - DNA, 22 bp, Artificial Sequence
  Synthetic oligonucleotide; TTC chr2 60485055 60485076 60485060 60485055 -
caaggctatgccttggtggtgg

SEQ ID NO: 222161 - DNA, 22 bp, Artificial Sequence
  Synthetic oligonucleotide; CTA chr2 60485047 60485068 60485052 60485047 -
tgccttggtggtggtggtgagg

SEQ ID NO: 222162 - DNA, 22 bp, Artificial Sequence
  Synthetic oligonucleotide; CTT chr2 60485041 60485062 60485046 60485041 -
ggtggtggtggtgagggtgtac

SEQ ID NO: 222163 - DNA, 22 bp, Artificial Sequence
  Synthetic oligonucleotide; TTG chr2 60485040 60485061 60485045 60485040 -
gtggtggtggtgagggtgtaca

SEQ ID NO: 222164 - DNA, 22 bp, Artificial Sequence
  Synthetic oligonucleotide; TTG chr2 60485013 60485034 60485018 60485013 -
ttttttgtatttcctattttga

SEQ ID NO: 222165 - DNA, 22 bp, Artificial Sequence
  Synthetic oligonucleotide; TTT chr2 60485010 60485031 60485015 60485010 -
tttgtatttcctattttgattt

SEQ ID NO: 222166 - DNA, 22 bp, Artificial Sequence
  Synthetic oligonucleotide; TTT chr2 60485009 60485030 60485014 60485009 -
ttgtatttcctattttgattta

SEQ ID NO: 222167 - DNA, 22 bp, Artificial Sequence
  Synthetic oligonucleotide; TTT chr2 60485008 60485029 60485013 60485008 -
tgtatttcctattttgatttaa

SEQ ID NO: 222168 - DNA, 22 bp, Artificial Sequence
  Synthetic oligonucleotide; TTT chr2 60485007 60485028 60485012 60485007 -
gtatttcctattttgatttaaa

SEQ ID NO: 222169 - DNA, 22 bp, Artificial Sequence
  Synthetic oligonucleotide; TTG chr2 60485006 60485027 60485011 60485006 -
tatttcctattttgatttaaat

SEQ ID NO: 222170 - DNA, 22 bp, Artificial Sequence
  Synthetic oligonucleotide; TTT chr2 60485001 60485022 60485006 60485001 -
cctattttgatttaaatactgt

SEQ ID NO: 222171 - DNA, 22 bp, Artificial Sequence
  Synthetic oligonucleotide; TTC chr2 60485000 60485021 60485005 60485000 -
ctattttgatttaaatactgtt

SEQ ID NO: 222172 - DNA, 22 bp, Artificial Sequence
  Synthetic oligonucleotide; CTA chr2 60484997 60485018 60485002 60484997 -
ttttgatttaaatactgttttt

SEQ ID NO: 222173 - DNA, 22 bp, Artificial Sequence
  Synthetic oligonucleotide; TTT chr2 60484994 60485015 60484999 60484994 -
tgatttaaatactgttttttgt

SEQ ID NO: 222174 - DNA, 22 bp, Artificial Sequence
  Synthetic oligonucleotide; TTT chr2 60484993 60485014 60484998 60484993 -
gatttaaatactgttttttgtt

SEQ ID NO: 222175 - DNA, 22 bp, Artificial Sequence
  Synthetic oligonucleotide; TTG chr2 60484992 60485013 60484997 60484992 -
atttaaatactgttttttgttt

SEQ ID NO: 222176 - DNA, 22 bp, Artificial Sequence
  Synthetic oligonucleotide; TTT chr2 60484988 60485009 60484993 60484988 -
aaatactgttttttgtttggtt

SEQ ID NO: 222177 - DNA, 22 bp, Artificial Sequence
  Synthetic oligonucleotide; TTA chr2 60484987 60485008 60484992 60484987 -
aatactgttttttgtttggttg

SEQ ID NO: 222178 - DNA, 22 bp, Artificial Sequence
  Synthetic oligonucleotide; CTG chr2 60484980 60485001 60484985 60484980 -
ttttttgtttggttggttggtt

SEQ ID NO: 222179 - DNA, 22 bp, Artificial Sequence
  Synthetic oligonucleotide; TTT chr2 60484977 60484998 60484982 60484977 -
tttgtttggttggttggttttt

SEQ ID NO: 222180 - DNA, 22 bp, Artificial Sequence
  Synthetic oligonucleotide; TTT chr2 60484976 60484997 60484981 60484976 -
ttgtttggttggttggtttttt

SEQ ID NO: 222181 - DNA, 22 bp, Artificial Sequence
  Synthetic oligonucleotide; TTT chr2 60484975 60484996 60484980 60484975 -
tgtttggttggttggttttttt

SEQ ID NO: 222182 - DNA, 22 bp, Artificial Sequence
  Synthetic oligonucleotide; TTT chr2 60484974 60484995 60484979 60484974 -
gtttggttggttggtttttttt

SEQ ID NO: 222183 - DNA, 22 bp, Artificial Sequence
  Synthetic oligonucleotide; TTG chr2 60484973 60484994 60484978 60484973 -
tttggttggttggttttttttt

SEQ ID NO: 222184 - DNA, 22 bp, Artificial Sequence
  Synthetic oligonucleotide; TTT chr2 60484970 60484991 60484975 60484970 -
ggttggttggtttttttttttt

SEQ ID NO: 222185 - DNA, 22 bp, Artificial Sequence
  Synthetic oligonucleotide; TTG chr2 60484969 60484990 60484974 60484969 -
gttggttggttttttttttttt

SEQ ID NO: 222186 - DNA, 22 bp, Artificial Sequence
  Synthetic oligonucleotide; TTG chr2 60484965 60484986 60484970 60484965 -
gttggttttttttttttttttt

SEQ ID NO: 222187 - DNA, 22 bp, Artificial Sequence
  Synthetic oligonucleotide; TTG chr2 60484961 60484982 60484966 60484961 -
gttttttttttttttttttaag

SEQ ID NO: 222188 - DNA, 22 bp, Artificial Sequence
  Synthetic oligonucleotide; TTT chr2 60484957 60484978 60484962 60484957 -
tttttttttttttttaagtcct

SEQ ID NO: 222189 - DNA, 22 bp, Artificial Sequence
  Synthetic oligonucleotide; TTT chr2 60484956 60484977 60484961 60484956 -
ttttttttttttttaagtccta

SEQ ID NO: 222190 - DNA, 22 bp, Artificial Sequence
  Synthetic oligonucleotide; TTT chr2 60484955 60484976 60484960 60484955 -
tttttttttttttaagtcctaa

SEQ ID NO: 222191 - DNA, 22 bp, Artificial Sequence
  Synthetic oligonucleotide; TTT chr2 60484954 60484975 60484959 60484954 -
ttttttttttttaagtcctaaa

SEQ ID NO: 222192 - DNA, 22 bp, Artificial Sequence
  Synthetic oligonucleotide; TTT chr2 60484953 60484974 60484958 60484953 -
tttttttttttaagtcctaaac

SEQ ID NO: 222193 - DNA, 22 bp, Artificial Sequence
  Synthetic oligonucleotide; TTT chr2 60484952 60484973 60484957 60484952 -
ttttttttttaagtcctaaaca

SEQ ID NO: 222194 - DNA, 22 bp, Artificial Sequence
  Synthetic oligonucleotide; TTT chr2 60484951 60484972 60484956 60484951 -
tttttttttaagtcctaaacaa

SEQ ID NO: 222195 - DNA, 22 bp, Artificial Sequence
  Synthetic oligonucleotide; TTT chr2 60484950 60484971 60484955 60484950 -
ttttttttaagtcctaaacaag

SEQ ID NO: 222196 - DNA, 22 bp, Artificial Sequence
  Synthetic oligonucleotide; TTT chr2 60484949 60484970 60484954 60484949 -
tttttttaagtcctaaacaagt

SEQ ID NO: 222197 - DNA, 22 bp, Artificial Sequence
  Synthetic oligonucleotide; TTT chr2 60484948 60484969 60484953 60484948 -
ttttttaagtcctaaacaagtg

SEQ ID NO: 222198 - DNA, 22 bp, Artificial Sequence
  Synthetic oligonucleotide; TTT chr2 60484947 60484968 60484952 60484947 -
tttttaagtcctaaacaagtgc

SEQ ID NO: 222199 - DNA, 22 bp, Artificial Sequence
  Synthetic oligonucleotide; TTT chr2 60484946 60484967 60484951 60484946 -
ttttaagtcctaaacaagtgcc

SEQ ID NO: 222200 - DNA, 22 bp, Artificial Sequence
  Synthetic oligonucleotide; TTT chr2 60484945 60484966 60484950 60484945 -
tttaagtcctaaacaagtgcca

SEQ ID NO: 222201 - DNA, 22 bp, Artificial Sequence
  Synthetic oligonucleotide; TTT chr2 60484944 60484965 60484949 60484944 -
ttaagtcctaaacaagtgccac

SEQ ID NO: 222202 - DNA, 22 bp, Artificial Sequence
  Synthetic oligonucleotide; TTT chr2 60484943 60484964 60484948 60484943 -
taagtcctaaacaagtgccaca

SEQ ID NO: 222203 - DNA, 22 bp, Artificial Sequence
  Synthetic oligonucleotide; TTT chr2 60484942 60484963 60484947 60484942 -
aagtcctaaacaagtgccacag

SEQ ID NO: 222204 - DNA, 22 bp, Artificial Sequence
  Synthetic oligonucleotide; TTA chr2 60484941 60484962 60484946 60484941 -
agtcctaaacaagtgccacaga

SEQ ID NO: 222205 - DNA, 22 bp, Artificial Sequence
  Synthetic oligonucleotide; CTA chr2 60484934 60484955 60484939 60484934 -
aacaagtgccacagaggatttc

SEQ ID NO: 222206 - DNA, 22 bp, Artificial Sequence
  Synthetic oligonucleotide; TTT chr2 60484913 60484934 60484918 60484913 -
ctttttggcttgaacttgataa

SEQ ID NO: 222207 - DNA, 22 bp, Artificial Sequence
  Synthetic oligonucleotide; TTC chr2 60484912 60484933 60484917 60484912 -
tttttggcttgaacttgataaa

SEQ ID NO: 222208 - DNA, 22 bp, Artificial Sequence
  Synthetic oligonucleotide; CTT chr2 60484910 60484931 60484915 60484910 -
tttggcttgaacttgataaaat

SEQ ID NO: 222209 - DNA, 22 bp, Artificial Sequence
  Synthetic oligonucleotide; TTT chr2 60484909 60484930 60484914 60484909 -
ttggcttgaacttgataaaatt

SEQ ID NO: 222210 - DNA, 22 bp, Artificial Sequence
  Synthetic oligonucleotide; TTT chr2 60484908 60484929 60484913 60484908 -
tggcttgaacttgataaaattt

SEQ ID NO: 222211 - DNA, 22 bp, Artificial Sequence
  Synthetic oligonucleotide; TTT chr2 60484907 60484928 60484912 60484907 -
ggcttgaacttgataaaatttg

SEQ ID NO: 222212 - DNA, 22 bp, Artificial Sequence
  Synthetic oligonucleotide; TTG chr2 60484906 60484927 60484911 60484906 -
gcttgaacttgataaaatttgg

SEQ ID NO: 222213 - DNA, 22 bp, Artificial Sequence
  Synthetic oligonucleotide; CTT chr2 60484902 60484923 60484907 60484902 -
gaacttgataaaatttggagca

SEQ ID NO: 222214 - DNA, 22 bp, Artificial Sequence
  Synthetic oligonucleotide; TTG chr2 60484901 60484922 60484906 60484901 -
aacttgataaaatttggagcac

SEQ ID NO: 222215 - DNA, 22 bp, Artificial Sequence
  Synthetic oligonucleotide; CTT chr2 60484896 60484917 60484901 60484896 -
gataaaatttggagcacacaag

SEQ ID NO: 222216 - DNA, 22 bp, Artificial Sequence
  Synthetic oligonucleotide; TTG chr2 60484895 60484916 60484900 60484895 -
ataaaatttggagcacacaagt

SEQ ID NO: 222217 - DNA, 22 bp, Artificial Sequence
  Synthetic oligonucleotide; TTT chr2 60484886 60484907 60484891 60484886 -
ggagcacacaagtttacacaca

SEQ ID NO: 222218 - DNA, 22 bp, Artificial Sequence
  Synthetic oligonucleotide; TTG chr2 60484885 60484906 60484890 60484885 -
gagcacacaagtttacacacat

SEQ ID NO: 222219 - DNA, 22 bp, Artificial Sequence
  Synthetic oligonucleotide; TTT chr2 60484871 60484892 60484876 60484871 -
acacacatggtcatgaacacac

SEQ ID NO: 222220 - DNA, 22 bp, Artificial Sequence
  Synthetic oligonucleotide; TTA chr2 60484870 60484891 60484875 60484870 -
cacacatggtcatgaacacaca

SEQ ID NO: 222221 - DNA, 22 bp, Artificial Sequence
  Synthetic oligonucleotide; CTT chr2 60484842 60484863 60484847 60484842 -
ctcccatctccccagaccccca

SEQ ID NO: 222222 - DNA, 22 bp, Artificial Sequence
  Synthetic oligonucleotide; TTC chr2 60484841 60484862 60484846 60484841 -
tcccatctccccagacccccag

SEQ ID NO: 222223 - DNA, 22 bp, Artificial Sequence
  Synthetic oligonucleotide; CTC chr2 60484839 60484860 60484844 60484839 -
ccatctccccagacccccagca

SEQ ID NO: 222224 - DNA, 22 bp, Artificial Sequence
  Synthetic oligonucleotide; CTC chr2 60484832 60484853 60484837 60484832 -
cccagacccccagcacatatgt

SEQ ID NO: 222225 - DNA, 22 bp, Artificial Sequence
  Synthetic oligonucleotide; TTC chr2 60484808 60484829 60484813 60484808 -
cataatgaggtgttcctaagtg

SEQ ID NO: 222226 - DNA, 22 bp, Artificial Sequence
  Synthetic oligonucleotide; TTC chr2 60484793 60484814 60484798 60484793 -
ctaagtgagaattcccataatt

SEQ ID NO: 222227 - DNA, 22 bp, Artificial Sequence
  Synthetic oligonucleotide; CTA chr2 60484790 60484811 60484795 60484790 -
agtgagaattcccataatttga

SEQ ID NO: 222228 - DNA, 22 bp, Artificial Sequence
  Synthetic oligonucleotide; TTC chr2 60484779 60484800 60484784 60484779 -
ccataatttgaggttttatact

SEQ ID NO: 222229 - DNA, 22 bp, Artificial Sequence
  Synthetic oligonucleotide; TTT chr2 60484770 60484791 60484775 60484770 -
gaggttttatactggaatggtg

SEQ ID NO: 222230 - DNA, 22 bp, Artificial Sequence
  Synthetic oligonucleotide; TTG chr2 60484769 60484790 60484774 60484769 -
aggttttatactggaatggtga

SEQ ID NO: 222231 - DNA, 22 bp, Artificial Sequence
  Synthetic oligonucleotide; TTT chr2 60484763 60484784 60484768 60484763 -
tatactggaatggtgataaggg

SEQ ID NO: 222232 - DNA, 22 bp, Artificial Sequence
  Synthetic oligonucleotide; TTT chr2 60484762 60484783 60484767 60484762 -
atactggaatggtgataagggc

SEQ ID NO: 222233 - DNA, 22 bp, Artificial Sequence
  Synthetic oligonucleotide; TTA chr2 60484761 60484782 60484766 60484761 -
tactggaatggtgataagggca

SEQ ID NO: 222234 - DNA, 22 bp, Artificial Sequence
  Synthetic oligonucleotide; CTG chr2 60484756 60484777 60484761 60484756 -
gaatggtgataagggcaggaaa

SEQ ID NO: 222235 - DNA, 22 bp, Artificial Sequence
  Synthetic oligonucleotide; CTC chr2 60484730 60484751 60484735 60484730 -
agcccatgtgcattttttctcg

SEQ ID NO: 222236 - DNA, 22 bp, Artificial Sequence
  Synthetic oligonucleotide; TTT chr2 60484715 60484736 60484720 60484715 -
tttctcgagtggttaacctttc

SEQ ID NO: 222237 - DNA, 22 bp, Artificial Sequence
  Synthetic oligonucleotide; TTT chr2 60484714 60484735 60484719 60484714 -
ttctcgagtggttaacctttcc

SEQ ID NO: 222238 - DNA, 22 bp, Artificial Sequence
  Synthetic oligonucleotide; TTT chr2 60484713 60484734 60484718 60484713 -
tctcgagtggttaacctttcct

SEQ ID NO: 222239 - DNA, 22 bp, Artificial Sequence
  Synthetic oligonucleotide; TTT chr2 60484712 60484733 60484717 60484712 -
ctcgagtggttaacctttcctc

SEQ ID NO: 222240 - DNA, 22 bp, Artificial Sequence
  Synthetic oligonucleotide; TTC chr2 60484711 60484732 60484716 60484711 -
tcgagtggttaacctttcctct

SEQ ID NO: 222241 - DNA, 22 bp, Artificial Sequence
  Synthetic oligonucleotide; CTC chr2 60484709 60484730 60484714 60484709 -
gagtggttaacctttcctctct

SEQ ID NO: 222242 - DNA, 22 bp, Artificial Sequence
  Synthetic oligonucleotide; TTA chr2 60484700 60484721 60484705 60484700 -
acctttcctctctttctccttc

SEQ ID NO: 222243 - DNA, 22 bp, Artificial Sequence
  Synthetic oligonucleotide; CTT chr2 60484695 60484716 60484700 60484695 -
tcctctctttctccttcttttt

SEQ ID NO: 222244 - DNA, 22 bp, Artificial Sequence
  Synthetic oligonucleotide; TTT chr2 60484694 60484715 60484699 60484694 -
cctctctttctccttctttttt

SEQ ID NO: 222245 - DNA, 22 bp, Artificial Sequence
  Synthetic oligonucleotide; TTC chr2 60484693 60484714 60484698 60484693 -
ctctctttctccttcttttttt

SEQ ID NO: 222246 - DNA, 22 bp, Artificial Sequence
  Synthetic oligonucleotide; CTC chr2 60484690 60484711 60484695 60484690 -
tctttctccttctttttttgcc

SEQ ID NO: 222247 - DNA, 22 bp, Artificial Sequence
  Synthetic oligonucleotide; CTC chr2 60484688 60484709 60484693 60484688 -
tttctccttctttttttgcccc

SEQ ID NO: 222248 - DNA, 22 bp, Artificial Sequence
  Synthetic oligonucleotide; CTT chr2 60484686 60484707 60484691 60484686 -
tctccttctttttttgcccccc

SEQ ID NO: 222249 - DNA, 22 bp, Artificial Sequence
  Synthetic oligonucleotide; TTT chr2 60484685 60484706 60484690 60484685 -
ctccttctttttttgcccccct

SEQ ID NO: 222250 - DNA, 22 bp, Artificial Sequence
  Synthetic oligonucleotide; TTC chr2 60484684 60484705 60484689 60484684 -
tccttctttttttgcccccctc

SEQ ID NO: 222251 - DNA, 22 bp, Artificial Sequence
  Synthetic oligonucleotide; CTC chr2 60484682 60484703 60484687 60484682 -
cttctttttttgcccccctcca

SEQ ID NO: 222252 - DNA, 22 bp, Artificial Sequence
  Synthetic oligonucleotide; CTT chr2 60484679 60484700 60484684 60484679 -
ctttttttgcccccctccaaat

SEQ ID NO: 222253 - DNA, 22 bp, Artificial Sequence
  Synthetic oligonucleotide; TTC chr2 60484678 60484699 60484683 60484678 -
tttttttgcccccctccaaatt

SEQ ID NO: 222254 - DNA, 22 bp, Artificial Sequence
  Synthetic oligonucleotide; CTT chr2 60484676 60484697 60484681 60484676 -
tttttgcccccctccaaattcc

SEQ ID NO: 222255 - DNA, 22 bp, Artificial Sequence
  Synthetic oligonucleotide; TTT chr2 60484675 60484696 60484680 60484675 -
ttttgcccccctccaaattccc

SEQ ID NO: 222256 - DNA, 22 bp, Artificial Sequence
  Synthetic oligonucleotide; TTT chr2 60484674 60484695 60484679 60484674 -
tttgcccccctccaaattcccc

SEQ ID NO: 222257 - DNA, 22 bp, Artificial Sequence
  Synthetic oligonucleotide; TTT chr2 60484673 60484694 60484678 60484673 -
ttgcccccctccaaattccccc

SEQ ID NO: 222258 - DNA, 22 bp, Artificial Sequence
  Synthetic oligonucleotide; TTT chr2 60484672 60484693 60484677 60484672 -
tgcccccctccaaattccccct

SEQ ID NO: 222259 - DNA, 22 bp, Artificial Sequence
  Synthetic oligonucleotide; TTT chr2 60484671 60484692 60484676 60484671 -
gcccccctccaaattccccctt

SEQ ID NO: 222260 - DNA, 22 bp, Artificial Sequence
  Synthetic oligonucleotide; TTG chr2 60484670 60484691 60484675 60484670 -
cccccctccaaattcccccttc

SEQ ID NO: 222261 - DNA, 22 bp, Artificial Sequence
  Synthetic oligonucleotide; CTC chr2 60484662 60484683 60484667 60484662 -
caaattcccccttctcttaaga

SEQ ID NO: 222262 - DNA, 22 bp, Artificial Sequence
  Synthetic oligonucleotide; TTC chr2 60484655 60484676 60484660 60484655 -
ccccttctcttaagaaaaaaca

SEQ ID NO: 222263 - DNA, 22 bp, Artificial Sequence
  Synthetic oligonucleotide; CTT chr2 60484649 60484670 60484654 60484649 -
ctcttaagaaaaaacacgtgag

SEQ ID NO: 222264 - DNA, 22 bp, Artificial Sequence
  Synthetic oligonucleotide; TTC chr2 60484648 60484669 60484653 60484648 -
tcttaagaaaaaacacgtgagc

SEQ ID NO: 222265 - DNA, 22 bp, Artificial Sequence
  Synthetic oligonucleotide; CTC chr2 60484646 60484667 60484651 60484646 -
ttaagaaaaaacacgtgagcca

SEQ ID NO: 222266 - DNA, 22 bp, Artificial Sequence
  Synthetic oligonucleotide; CTT chr2 60484644 60484665 60484649 60484644 -
aagaaaaaacacgtgagccatg

SEQ ID NO: 222267 - DNA, 22 bp, Artificial Sequence
  Synthetic oligonucleotide; TTA chr2 60484643 60484664 60484648 60484643 -
agaaaaaacacgtgagccatgt

SEQ ID NO: 222268 - DNA, 22 bp, Artificial Sequence
  Synthetic oligonucleotide; TTG chr2 60484619 60484640 60484624 60484619 -
gaagtacagccttgacctcagc

SEQ ID NO: 222269 - DNA, 22 bp, Artificial Sequence
  Synthetic oligonucleotide; CTT chr2 60484606 60484627 60484611 60484606 -
gacctcagcctcaccaggtgcg

SEQ ID NO: 222270 - DNA, 22 bp, Artificial Sequence
  Synthetic oligonucleotide; TTG chr2 60484605 60484626 60484610 60484605 -
acctcagcctcaccaggtgcgg

SEQ ID NO: 222271 - DNA, 22 bp, Artificial Sequence
  Synthetic oligonucleotide; CTC chr2 60484600 60484621 60484605 60484600 -
agcctcaccaggtgcggctgct

SEQ ID NO: 222272 - DNA, 22 bp, Artificial Sequence
  Synthetic oligonucleotide; CTC chr2 60484594 60484615 60484599 60484594 -
accaggtgcggctgctgaccgg

SEQ ID NO: 222273 - DNA, 22 bp, Artificial Sequence
  Synthetic oligonucleotide; CTG chr2 60484580 60484601 60484585 60484580 -
ctgaccggtgcaaaaaaatagg

SEQ ID NO: 222274 - DNA, 22 bp, Artificial Sequence
  Synthetic oligonucleotide; CTG chr2 60484577 60484598 60484582 60484577 -
accggtgcaaaaaaataggaaa

SEQ ID NO: 222275 - DNA, 22 bp, Artificial Sequence
  Synthetic oligonucleotide; TTA chr2 60484550 60484571 60484555 60484550 -
tttaaaaggcagggaggggaga

SEQ ID NO: 222276 - DNA, 22 bp, Artificial Sequence
  Synthetic oligonucleotide; TTT chr2 60484547 60484568 60484552 60484547 -
aaaaggcagggaggggagagtt

SEQ ID NO: 222277 - DNA, 22 bp, Artificial Sequence
  Synthetic oligonucleotide; TTA chr2 60484546 60484567 60484551 60484546 -
aaaggcagggaggggagagttt

SEQ ID NO: 222278 - DNA, 22 bp, Artificial Sequence
  Synthetic oligonucleotide; TTT chr2 60484524 60484545 60484529 60484524 -
ctgttccacaatcactgctgtt

SEQ ID NO: 222279 - DNA, 22 bp, Artificial Sequence
  Synthetic oligonucleotide; TTC chr2 60484523 60484544 60484528 60484523 -
tgttccacaatcactgctgttt

SEQ ID NO: 222280 - DNA, 22 bp, Artificial Sequence
  Synthetic oligonucleotide; CTG chr2 60484521 60484542 60484526 60484521 -
ttccacaatcactgctgtttca

SEQ ID NO: 222281 - DNA, 22 bp, Artificial Sequence
  Synthetic oligonucleotide; TTC chr2 60484518 60484539 60484523 60484518 -
cacaatcactgctgtttcagtg

SEQ ID NO: 222282 - DNA, 22 bp, Artificial Sequence
  Synthetic oligonucleotide; CTG chr2 60484507 60484528 60484512 60484507 -
ctgtttcagtgaaaagcaaccc

SEQ ID NO: 222283 - DNA, 22 bp, Artificial Sequence
  Synthetic oligonucleotide; CTG chr2 60484504 60484525 60484509 60484504 -
tttcagtgaaaagcaacccggt

SEQ ID NO: 222284 - DNA, 22 bp, Artificial Sequence
  Synthetic oligonucleotide; TTT chr2 60484501 60484522 60484506 60484501 -
cagtgaaaagcaacccggttta

SEQ ID NO: 222285 - DNA, 22 bp, Artificial Sequence
  Synthetic oligonucleotide; TTC chr2 60484500 60484521 60484505 60484500 -
agtgaaaagcaacccggtttat

SEQ ID NO: 222286 - DNA, 22 bp, Artificial Sequence
  Synthetic oligonucleotide; TTT chr2 60484480 60484501 60484485 60484480 -
atctgtaaaacctacttccctt

SEQ ID NO: 222287 - DNA, 22 bp, Artificial Sequence
  Synthetic oligonucleotide; TTA chr2 60484479 60484500 60484484 60484479 -
tctgtaaaacctacttcccttt

SEQ ID NO: 222288 - DNA, 22 bp, Artificial Sequence
  Synthetic oligonucleotide; CTG chr2 60484475 60484496 60484480 60484475 -
taaaacctacttccctttctgg

SEQ ID NO: 222289 - DNA, 22 bp, Artificial Sequence
  Synthetic oligonucleotide; CTA chr2 60484466 60484487 60484471 60484466 -
cttccctttctggtgaatgtgg

SEQ ID NO: 222290 - DNA, 22 bp, Artificial Sequence
  Synthetic oligonucleotide; CTT chr2 60484463 60484484 60484468 60484463 -
ccctttctggtgaatgtggctg

SEQ ID NO: 222291 - DNA, 22 bp, Artificial Sequence
  Synthetic oligonucleotide; TTC chr2 60484462 60484483 60484467 60484462 -
cctttctggtgaatgtggctgt

SEQ ID NO: 222292 - DNA, 22 bp, Artificial Sequence
  Synthetic oligonucleotide; CTT chr2 60484458 60484479 60484463 60484458 -
tctggtgaatgtggctgttttt

SEQ ID NO: 222293 - DNA, 22 bp, Artificial Sequence
  Synthetic oligonucleotide; TTT chr2 60484457 60484478 60484462 60484457 -
ctggtgaatgtggctgtttttg

SEQ ID NO: 222294 - DNA, 22 bp, Artificial Sequence
  Synthetic oligonucleotide; TTC chr2 60484456 60484477 60484461 60484456 -
tggtgaatgtggctgtttttga

SEQ ID NO: 222295 - DNA, 22 bp, Artificial Sequence
  Synthetic oligonucleotide; CTG chr2 60484454 60484475 60484459 60484454 -
gtgaatgtggctgtttttgaca

SEQ ID NO: 222296 - DNA, 22 bp, Artificial Sequence
  Synthetic oligonucleotide; CTG chr2 60484441 60484462 60484446 60484441 -
tttttgacagcagaggacccca

SEQ ID NO: 222297 - DNA, 22 bp, Artificial Sequence
  Synthetic oligonucleotide; TTT chr2 60484438 60484459 60484443 60484438 -
ttgacagcagaggaccccagtt

SEQ ID NO: 222298 - DNA, 22 bp, Artificial Sequence
  Synthetic oligonucleotide; TTT chr2 60484437 60484458 60484442 60484437 -
tgacagcagaggaccccagttg

SEQ ID NO: 222299 - DNA, 22 bp, Artificial Sequence
  Synthetic oligonucleotide; TTT chr2 60484436 60484457 60484441 60484436 -
gacagcagaggaccccagttgt

SEQ ID NO: 222300 - DNA, 22 bp, Artificial Sequence
  Synthetic oligonucleotide; TTG chr2 60484435 60484456 60484440 60484435 -
acagcagaggaccccagttgtt

SEQ ID NO: 222301 - DNA, 22 bp, Artificial Sequence
  Synthetic oligonucleotide; TTG chr2 60484415 60484436 60484420 60484415 -
ttgaggactaaagagagagaag

SEQ ID NO: 222302 - DNA, 22 bp, Artificial Sequence
  Synthetic oligonucleotide; TTG chr2 60484412 60484433 60484417 60484412 -
aggactaaagagagagaagatg

SEQ ID NO: 222303 - DNA, 22 bp, Artificial Sequence
  Synthetic oligonucleotide; CTA chr2 60484405 60484426 60484410 60484405 -
aagagagagaagatgagaaaga

SEQ ID NO: 222304 - DNA, 22 bp, Artificial Sequence
  Synthetic oligonucleotide; CTG chr2 60484375 60484396 60484380 60484375 -
gaaacagaggttggagaaagag

SEQ ID NO: 222305 - DNA, 22 bp, Artificial Sequence
  Synthetic oligonucleotide; TTG chr2 60484362 60484383 60484367 60484362 -
gagaaagagaggcaaggaagta

SEQ ID NO: 222306 - DNA, 22 bp, Artificial Sequence
  Synthetic oligonucleotide; TTG chr2 60484294 60484315 60484299 60484294 -
gaattcgagctattttcagctg

SEQ ID NO: 222307 - DNA, 22 bp, Artificial Sequence
  Synthetic oligonucleotide; TTC chr2 60484288 60484309 60484293 60484288 -
gagctattttcagctgaatgtg

SEQ ID NO: 222308 - DNA, 22 bp, Artificial Sequence
  Synthetic oligonucleotide; CTA chr2 60484282 60484303 60484287 60484282 -
ttttcagctgaatgtgagtgca

SEQ ID NO: 222309 - DNA, 22 bp, Artificial Sequence
  Synthetic oligonucleotide; TTT chr2 60484279 60484300 60484284 60484279 -
tcagctgaatgtgagtgcagat

SEQ ID NO: 222310 - DNA, 22 bp, Artificial Sequence
  Synthetic oligonucleotide; TTT chr2 60484278 60484299 60484283 60484278 -
cagctgaatgtgagtgcagatt

SEQ ID NO: 222311 - DNA, 22 bp, Artificial Sequence
  Synthetic oligonucleotide; TTC chr2 60484277 60484298 60484282 60484277 -
agctgaatgtgagtgcagattt

SEQ ID NO: 222312 - DNA, 22 bp, Artificial Sequence
  Synthetic oligonucleotide; CTG chr2 60484272 60484293 60484277 60484272 -
aatgtgagtgcagatttcatca

SEQ ID NO: 222313 - DNA, 22 bp, Artificial Sequence
  Synthetic oligonucleotide; TTT chr2 60484255 60484276 60484260 60484255 -
catcaggcttctgggctacagg

SEQ ID NO: 222314 - DNA, 22 bp, Artificial Sequence
  Synthetic oligonucleotide; TTC chr2 60484254 60484275 60484259 60484254 -
atcaggcttctgggctacaggg

SEQ ID NO: 222315 - DNA, 22 bp, Artificial Sequence
  Synthetic oligonucleotide; CTT chr2 60484245 60484266 60484250 60484245 -
ctgggctacagggaaactgact

SEQ ID NO: 222316 - DNA, 22 bp, Artificial Sequence
  Synthetic oligonucleotide; TTC chr2 60484244 60484265 60484249 60484244 -
tgggctacagggaaactgactg

SEQ ID NO: 222317 - DNA, 22 bp, Artificial Sequence
  Synthetic oligonucleotide; CTG chr2 60484242 60484263 60484247 60484242 -
ggctacagggaaactgactgtg

SEQ ID NO: 222318 - DNA, 22 bp, Artificial Sequence
  Synthetic oligonucleotide; CTA chr2 60484237 60484258 60484242 60484237 -
cagggaaactgactgtgtgcgg

SEQ ID NO: 222319 - DNA, 22 bp, Artificial Sequence
  Synthetic oligonucleotide; CTG chr2 60484226 60484247 60484231 60484226 -
actgtgtgcggaccttgcgtgt

SEQ ID NO: 222320 - DNA, 22 bp, Artificial Sequence
  Synthetic oligonucleotide; CTG chr2 60484222 60484243 60484227 60484222 -
tgtgcggaccttgcgtgtaact

SEQ ID NO: 222321 - DNA, 22 bp, Artificial Sequence
  Synthetic oligonucleotide; CTT chr2 60484210 60484231 60484215 60484210 -
gcgtgtaacttcctgtgaagca

SEQ ID NO: 222322 - DNA, 22 bp, Artificial Sequence
  Synthetic oligonucleotide; TTG chr2 60484209 60484230 60484214 60484209 -
cgtgtaacttcctgtgaagcag

SEQ ID NO: 222323 - DNA, 22 bp, Artificial Sequence
  Synthetic oligonucleotide; CTT chr2 60484199 60484220 60484204 60484199 -
cctgtgaagcagccgtggtgac

SEQ ID NO: 222324 - DNA, 22 bp, Artificial Sequence
  Synthetic oligonucleotide; TTC chr2 60484198 60484219 60484203 60484198 -
ctgtgaagcagccgtggtgact

SEQ ID NO: 222325 - DNA, 22 bp, Artificial Sequence
  Synthetic oligonucleotide; CTG chr2 60484195 60484216 60484200 60484195 -
tgaagcagccgtggtgactgca

SEQ ID NO: 222326 - DNA, 22 bp, Artificial Sequence
  Synthetic oligonucleotide; CTG chr2 60484175 60484196 60484180 60484175 -
cattttctgacactgtcagagt

SEQ ID NO: 222327 - DNA, 22 bp, Artificial Sequence
  Synthetic oligonucleotide; TTT chr2 60484170 60484191 60484175 60484170 -
tctgacactgtcagagtctgga

SEQ ID NO: 222328 - DNA, 22 bp, Artificial Sequence
  Synthetic oligonucleotide; TTT chr2 60484169 60484190 60484174 60484169 -
ctgacactgtcagagtctggac

SEQ ID NO: 222329 - DNA, 22 bp, Artificial Sequence
  Synthetic oligonucleotide; TTC chr2 60484168 60484189 60484173 60484168 -
tgacactgtcagagtctggaca

SEQ ID NO: 222330 - DNA, 22 bp, Artificial Sequence
  Synthetic oligonucleotide; CTG chr2 60484166 60484187 60484171 60484166 -
acactgtcagagtctggacaac

SEQ ID NO: 222331 - DNA, 22 bp, Artificial Sequence
  Synthetic oligonucleotide; CTG chr2 60484160 60484181 60484165 60484160 -
tcagagtctggacaaccctgcc

SEQ ID NO: 222332 - DNA, 22 bp, Artificial Sequence
  Synthetic oligonucleotide; CTG chr2 60484150 60484171 60484155 60484150 -
gacaaccctgccagctcctaga

SEQ ID NO: 222333 - DNA, 22 bp, Artificial Sequence
  Synthetic oligonucleotide; CTG chr2 60484140 60484161 60484145 60484140 -
ccagctcctagaagggcaaccc

SEQ ID NO: 222334 - DNA, 22 bp, Artificial Sequence
  Synthetic oligonucleotide; CTC chr2 60484133 60484154 60484138 60484133 -
ctagaagggcaacccaacaact

SEQ ID NO: 222335 - DNA, 22 bp, Artificial Sequence
  Synthetic oligonucleotide; CTA chr2 60484130 60484151 60484135 60484130 -
gaagggcaacccaacaactgtc

SEQ ID NO: 222336 - DNA, 22 bp, Artificial Sequence
  Synthetic oligonucleotide; CTG chr2 60484110 60484131 60484115 60484110 -
tcacagacgaagcatcaaaagc

SEQ ID NO: 222337 - DNA, 22 bp, Artificial Sequence
  Synthetic oligonucleotide; CTG chr2 60484080 60484101 60484085 60484080 -
tcgatagtgacctgcatttgca

SEQ ID NO: 222338 - DNA, 22 bp, Artificial Sequence
  Synthetic oligonucleotide; CTG chr2 60484066 60484087 60484071 60484066 -
catttgcagaaaatctgagggc

SEQ ID NO: 222339 - DNA, 22 bp, Artificial Sequence
  Synthetic oligonucleotide; TTT chr2 60484061 60484082 60484066 60484061 -
gcagaaaatctgagggctttct

SEQ ID NO: 222340 - DNA, 22 bp, Artificial Sequence
  Synthetic oligonucleotide; TTG chr2 60484060 60484081 60484065 60484060 -
cagaaaatctgagggctttcta

SEQ ID NO: 222341 - DNA, 22 bp, Artificial Sequence
  Synthetic oligonucleotide; CTG chr2 60484049 60484070 60484054 60484049 -
agggctttctaattaacagagg

SEQ ID NO: 222342 - DNA, 22 bp, Artificial Sequence
  Synthetic oligonucleotide; CTT chr2 60484042 60484063 60484047 60484042 -
tctaattaacagaggagctcta

SEQ ID NO: 222343 - DNA, 22 bp, Artificial Sequence
  Synthetic oligonucleotide; TTT chr2 60484041 60484062 60484046 60484041 -
ctaattaacagaggagctctaa

SEQ ID NO: 222344 - DNA, 22 bp, Artificial Sequence
  Synthetic oligonucleotide; TTC chr2 60484040 60484061 60484045 60484040 -
taattaacagaggagctctaaa

SEQ ID NO: 222345 - DNA, 22 bp, Artificial Sequence
  Synthetic oligonucleotide; CTA chr2 60484038 60484059 60484043 60484038 -
attaacagaggagctctaaatt

SEQ ID NO: 222346 - DNA, 22 bp, Artificial Sequence
  Synthetic oligonucleotide; TTA chr2 60484034 60484055 60484039 60484034 -
acagaggagctctaaattagag

SEQ ID NO: 222347 - DNA, 22 bp, Artificial Sequence
  Synthetic oligonucleotide; CTC chr2 60484022 60484043 60484027 60484022 -
taaattagagtaaagctgttcg

SEQ ID NO: 222348 - DNA, 22 bp, Artificial Sequence
  Synthetic oligonucleotide; CTA chr2 60484020 60484041 60484025 60484020 -
aattagagtaaagctgttcgac

SEQ ID NO: 222349 - DNA, 22 bp, Artificial Sequence
  Synthetic oligonucleotide; TTA chr2 60484015 60484036 60484020 60484015 -
gagtaaagctgttcgacaagac

SEQ ID NO: 222350 - DNA, 22 bp, Artificial Sequence
  Synthetic oligonucleotide; CTG chr2 60484004 60484025 60484009 60484004 -
ttcgacaagacccctcatacgc

SEQ ID NO: 222351 - DNA, 22 bp, Artificial Sequence
  Synthetic oligonucleotide; TTC chr2 60484001 60484022 60484006 60484001 -
gacaagacccctcatacgcggt

SEQ ID NO: 222352 - DNA, 22 bp, Artificial Sequence
  Synthetic oligonucleotide; CTC chr2 60483988 60484009 60483993 60483988 -
atacgcggtaagtgtcacaatg

SEQ ID NO: 222353 - DNA, 22 bp, Artificial Sequence
  Synthetic oligonucleotide; TTA chr2 60483953 60483974 60483958 60483953 -
catctaacaagcttctgatttt

SEQ ID NO: 222354 - DNA, 22 bp, Artificial Sequence
  Synthetic oligonucleotide; CTA chr2 60483947 60483968 60483952 60483947 -
acaagcttctgatttttaacag

SEQ ID NO: 222355 - DNA, 22 bp, Artificial Sequence
  Synthetic oligonucleotide; CTT chr2 60483939 60483960 60483944 60483939 -
ctgatttttaacagaagctatg

SEQ ID NO: 222356 - DNA, 22 bp, Artificial Sequence
  Synthetic oligonucleotide; TTC chr2 60483938 60483959 60483943 60483938 -
tgatttttaacagaagctatga

SEQ ID NO: 222357 - DNA, 22 bp, Artificial Sequence
  Synthetic oligonucleotide; CTG chr2 60483936 60483957 60483941 60483936 -
atttttaacagaagctatgaga

SEQ ID NO: 222358 - DNA, 22 bp, Artificial Sequence
  Synthetic oligonucleotide; TTT chr2 60483932 60483953 60483937 60483932 -
ttaacagaagctatgagaccaa

SEQ ID NO: 222359 - DNA, 22 bp, Artificial Sequence
  Synthetic oligonucleotide; TTT chr2 60483931 60483952 60483936 60483931 -
taacagaagctatgagaccaac

SEQ ID NO: 222360 - DNA, 22 bp, Artificial Sequence
  Synthetic oligonucleotide; TTT chr2 60483930 60483951 60483935 60483930 -
aacagaagctatgagaccaact

SEQ ID NO: 222361 - DNA, 22 bp, Artificial Sequence
  Synthetic oligonucleotide; TTA chr2 60483929 60483950 60483934 60483929 -
acagaagctatgagaccaactc

SEQ ID NO: 222362 - DNA, 22 bp, Artificial Sequence
  Synthetic oligonucleotide; CTA chr2 60483919 60483940 60483924 60483919 -
tgagaccaactcatttataatg

SEQ ID NO: 222363 - DNA, 22 bp, Artificial Sequence
  Synthetic oligonucleotide; CTC chr2 60483907 60483928 60483912 60483907 -
atttataatggttcagtttcaa

SEQ ID NO: 222364 - DNA, 22 bp, Artificial Sequence
  Synthetic oligonucleotide; TTT chr2 60483903 60483924 60483908 60483903 -
ataatggttcagtttcaaaggg

SEQ ID NO: 222365 - DNA, 22 bp, Artificial Sequence
  Synthetic oligonucleotide; TTA chr2 60483902 60483923 60483907 60483902 -
taatggttcagtttcaaagggg

SEQ ID NO: 222366 - DNA, 22 bp, Artificial Sequence
  Synthetic oligonucleotide; TTC chr2 60483893 60483914 60483898 60483893 -
agtttcaaagggggaaaaaaaa

SEQ ID NO: 222367 - DNA, 22 bp, Artificial Sequence
  Synthetic oligonucleotide; TTT chr2 60483888 60483909 60483893 60483888 -
caaagggggaaaaaaaagcaac

SEQ ID NO: 222368 - DNA, 22 bp, Artificial Sequence
  Synthetic oligonucleotide; TTC chr2 60483887 60483908 60483892 60483887 -
aaagggggaaaaaaaagcaacc

SEQ ID NO: 222369 - DNA, 22 bp, Artificial Sequence
  Synthetic oligonucleotide; CTC chr2 60483767 60483788 60483772 60483767 -
cttctagtgctttgggcgagtg

SEQ ID NO: 222370 - DNA, 22 bp, Artificial Sequence
  Synthetic oligonucleotide; CTT chr2 60483764 60483785 60483769 60483764 -
ctagtgctttgggcgagtgctt

SEQ ID NO: 222371 - DNA, 22 bp, Artificial Sequence
  Synthetic oligonucleotide; TTC chr2 60483763 60483784 60483768 60483763 -
tagtgctttgggcgagtgctta

SEQ ID NO: 222372 - DNA, 22 bp, Artificial Sequence
  Synthetic oligonucleotide; CTA chr2 60483761 60483782 60483766 60483761 -
gtgctttgggcgagtgcttaga

SEQ ID NO: 222373 - DNA, 22 bp, Artificial Sequence
  Synthetic oligonucleotide; CTT chr2 60483755 60483776 60483760 60483755 -
tgggcgagtgcttagacccagt

SEQ ID NO: 222374 - DNA, 22 bp, Artificial Sequence
  Synthetic oligonucleotide; TTT chr2 60483754 60483775 60483759 60483754 -
gggcgagtgcttagacccagtc

SEQ ID NO: 222375 - DNA, 22 bp, Artificial Sequence
  Synthetic oligonucleotide; TTG chr2 60483753 60483774 60483758 60483753 -
ggcgagtgcttagacccagtcc

SEQ ID NO: 222376 - DNA, 22 bp, Artificial Sequence
  Synthetic oligonucleotide; CTT chr2 60483742 60483763 60483747 60483742 -
agacccagtccccaaattcttc

SEQ ID NO: 222377 - DNA, 22 bp, Artificial Sequence
  Synthetic oligonucleotide; TTA chr2 60483741 60483762 60483746 60483741 -
gacccagtccccaaattcttcc

SEQ ID NO: 222378 - DNA, 22 bp, Artificial Sequence
  Synthetic oligonucleotide; TTC chr2 60483723 60483744 60483728 60483723 -
ttcctttgttgtctgctgaagc

SEQ ID NO: 222379 - DNA, 22 bp, Artificial Sequence
  Synthetic oligonucleotide; CTT chr2 60483721 60483742 60483726 60483721 -
cctttgttgtctgctgaagcat

SEQ ID NO: 222380 - DNA, 22 bp, Artificial Sequence
  Synthetic oligonucleotide; TTC chr2 60483720 60483741 60483725 60483720 -
ctttgttgtctgctgaagcatc

SEQ ID NO: 222381 - DNA, 22 bp, Artificial Sequence
  Synthetic oligonucleotide; CTT chr2 60483717 60483738 60483722 60483717 -
tgttgtctgctgaagcatccag

SEQ ID NO: 222382 - DNA, 22 bp, Artificial Sequence
  Synthetic oligonucleotide; TTT chr2 60483716 60483737 60483721 60483716 -
gttgtctgctgaagcatccaga

SEQ ID NO: 222383 - DNA, 22 bp, Artificial Sequence
  Synthetic oligonucleotide; TTG chr2 60483715 60483736 60483720 60483715 -
ttgtctgctgaagcatccagat

SEQ ID NO: 222384 - DNA, 22 bp, Artificial Sequence
  Synthetic oligonucleotide; TTG chr2 60483712 60483733 60483717 60483712 -
tctgctgaagcatccagataca

SEQ ID NO: 222385 - DNA, 22 bp, Artificial Sequence
  Synthetic oligonucleotide; CTG chr2 60483708 60483729 60483713 60483708 -
ctgaagcatccagatacatctt

SEQ ID NO: 222386 - DNA, 22 bp, Artificial Sequence
  Synthetic oligonucleotide; CTG chr2 60483705 60483726 60483710 60483705 -
aagcatccagatacatcttctg

SEQ ID NO: 222387 - DNA, 22 bp, Artificial Sequence
  Synthetic oligonucleotide; CTT chr2 60483686 60483707 60483691 60483686 -
ctgttttagattttccttactg

SEQ ID NO: 222388 - DNA, 22 bp, Artificial Sequence
  Synthetic oligonucleotide; TTC chr2 60483685 60483706 60483690 60483685 -
tgttttagattttccttactgt

SEQ ID NO: 222389 - DNA, 22 bp, Artificial Sequence
  Synthetic oligonucleotide; CTG chr2 60483683 60483704 60483688 60483683 -
ttttagattttccttactgtaa

SEQ ID NO: 222390 - DNA, 22 bp, Artificial Sequence
  Synthetic oligonucleotide; TTT chr2 60483680 60483701 60483685 60483680 -
tagattttccttactgtaatcc

SEQ ID NO: 222391 - DNA, 22 bp, Artificial Sequence
  Synthetic oligonucleotide; TTT chr2 60483679 60483700 60483684 60483679 -
agattttccttactgtaatcca

SEQ ID NO: 222392 - DNA, 22 bp, Artificial Sequence
  Synthetic oligonucleotide; TTA chr2 60483678 60483699 60483683 60483678 -
gattttccttactgtaatccac

SEQ ID NO: 222393 - DNA, 22 bp, Artificial Sequence
  Synthetic oligonucleotide; TTT chr2 60483673 60483694 60483678 60483673 -
tccttactgtaatccacgtctg

SEQ ID NO: 222394 - DNA, 22 bp, Artificial Sequence
  Synthetic oligonucleotide; TTT chr2 60483672 60483693 60483677 60483672 -
ccttactgtaatccacgtctgc

SEQ ID NO: 222395 - DNA, 22 bp, Artificial Sequence
  Synthetic oligonucleotide; TTC chr2 60483671 60483692 60483676 60483671 -
cttactgtaatccacgtctgct

SEQ ID NO: 222396 - DNA, 22 bp, Artificial Sequence
  Synthetic oligonucleotide; CTT chr2 60483668 60483689 60483673 60483668 -
actgtaatccacgtctgctaat

SEQ ID NO: 222397 - DNA, 22 bp, Artificial Sequence
  Synthetic oligonucleotide; TTA chr2 60483667 60483688 60483672 60483667 -
ctgtaatccacgtctgctaata

SEQ ID NO: 222398 - DNA, 22 bp, Artificial Sequence
  Synthetic oligonucleotide; CTG chr2 60483664 60483685 60483669 60483664 -
taatccacgtctgctaatatgc

SEQ ID NO: 222399 - DNA, 22 bp, Artificial Sequence
  Synthetic oligonucleotide; CTG chr2 60483651 60483672 60483656 60483651 -
ctaatatgccagctcattcatt

SEQ ID NO: 222400 - DNA, 22 bp, Artificial Sequence
  Synthetic oligonucleotide; CTA chr2 60483648 60483669 60483653 60483648 -
atatgccagctcattcatttga

SEQ ID NO: 222401 - DNA, 22 bp, Artificial Sequence
  Synthetic oligonucleotide; CTC chr2 60483636 60483657 60483641 60483636 -
attcatttgatgtttcctgggg

SEQ ID NO: 222402 - DNA, 22 bp, Artificial Sequence
  Synthetic oligonucleotide; TTC chr2 60483632 60483653 60483637 60483632 -
atttgatgtttcctggggacga

SEQ ID NO: 222403 - DNA, 22 bp, Artificial Sequence
  Synthetic oligonucleotide; TTT chr2 60483628 60483649 60483633 60483628 -
gatgtttcctggggacgagcat

SEQ ID NO: 222404 - DNA, 22 bp, Artificial Sequence
  Synthetic oligonucleotide; TTG chr2 60483627 60483648 60483632 60483627 -
atgtttcctggggacgagcatc

SEQ ID NO: 222405 - DNA, 22 bp, Artificial Sequence
  Synthetic oligonucleotide; TTT chr2 60483621 60483642 60483626 60483621 -
cctggggacgagcatcctctct

SEQ ID NO: 222406 - DNA, 22 bp, Artificial Sequence
  Synthetic oligonucleotide; TTC chr2 60483620 60483641 60483625 60483620 -
ctggggacgagcatcctctctt

SEQ ID NO: 222407 - DNA, 22 bp, Artificial Sequence
  Synthetic oligonucleotide; CTG chr2 60483617 60483638 60483622 60483617 -
gggacgagcatcctctcttgag

SEQ ID NO: 222408 - DNA, 22 bp, Artificial Sequence
  Synthetic oligonucleotide; CTC chr2 60483602 60483623 60483607 60483602 -
tcttgagttatttctgacaact

SEQ ID NO: 222409 - DNA, 22 bp, Artificial Sequence
  Synthetic oligonucleotide; CTC chr2 60483600 60483621 60483605 60483600 -
ttgagttatttctgacaactgc

SEQ ID NO: 222410 - DNA, 22 bp, Artificial Sequence
  Synthetic oligonucleotide; CTT chr2 60483598 60483619 60483603 60483598 -
gagttatttctgacaactgcag

SEQ ID NO: 222411 - DNA, 22 bp, Artificial Sequence
  Synthetic oligonucleotide; TTG chr2 60483597 60483618 60483602 60483597 -
agttatttctgacaactgcagc

SEQ ID NO: 222412 - DNA, 22 bp, Artificial Sequence
  Synthetic oligonucleotide; TTA chr2 60483592 60483613 60483597 60483592 -
tttctgacaactgcagcattcc

SEQ ID NO: 222413 - DNA, 22 bp, Artificial Sequence
  Synthetic oligonucleotide; TTT chr2 60483589 60483610 60483594 60483589 -
ctgacaactgcagcattccaca

SEQ ID NO: 222414 - DNA, 22 bp, Artificial Sequence
  Synthetic oligonucleotide; TTC chr2 60483588 60483609 60483593 60483588 -
tgacaactgcagcattccacag

SEQ ID NO: 222415 - DNA, 22 bp, Artificial Sequence
  Synthetic oligonucleotide; CTG chr2 60483586 60483607 60483591 60483586 -
acaactgcagcattccacaggg

SEQ ID NO: 222416 - DNA, 22 bp, Artificial Sequence
  Synthetic oligonucleotide; CTG chr2 60483579 60483600 60483584 60483579 -
cagcattccacagggtctgagt

SEQ ID NO: 222417 - DNA, 22 bp, Artificial Sequence
  Synthetic oligonucleotide; TTC chr2 60483571 60483592 60483576 60483571 -
cacagggtctgagttgttgaac

SEQ ID NO: 222418 - DNA, 22 bp, Artificial Sequence
  Synthetic oligonucleotide; CTG chr2 60483560 60483581 60483565 60483560 -
agttgttgaacacagtgcccta

SEQ ID NO: 222419 - DNA, 22 bp, Artificial Sequence
  Synthetic oligonucleotide; TTG chr2 60483555 60483576 60483560 60483555 -
ttgaacacagtgccctaactta

SEQ ID NO: 222420 - DNA, 22 bp, Artificial Sequence
  Synthetic oligonucleotide; TTG chr2 60483552 60483573 60483557 60483552 -
aacacagtgccctaacttaaat

SEQ ID NO: 222421 - DNA, 22 bp, Artificial Sequence
  Synthetic oligonucleotide; CTA chr2 60483538 60483559 60483543 60483538 -
acttaaatattacaatcaaaac

SEQ ID NO: 222422 - DNA, 22 bp, Artificial Sequence
  Synthetic oligonucleotide; CTT chr2 60483534 60483555 60483539 60483534 -
aaatattacaatcaaaacacat

SEQ ID NO: 222423 - DNA, 22 bp, Artificial Sequence
  Synthetic oligonucleotide; TTA chr2 60483533 60483554 60483538 60483533 -
aatattacaatcaaaacacatg

SEQ ID NO: 222424 - DNA, 22 bp, Artificial Sequence
  Synthetic oligonucleotide; TTA chr2 60483526 60483547 60483531 60483526 -
caatcaaaacacatgacataga

SEQ ID NO: 222425 - DNA, 22 bp, Artificial Sequence
  Synthetic oligonucleotide; TTG chr2 60483495 60483516 60483500 60483495 -
atttgggttctgccttggacag

SEQ ID NO: 222426 - DNA, 22 bp, Artificial Sequence
  Synthetic oligonucleotide; TTT chr2 60483491 60483512 60483496 60483491 -
gggttctgccttggacagagaa

SEQ ID NO: 222427 - DNA, 22 bp, Artificial Sequence
  Synthetic oligonucleotide; TTG chr2 60483490 60483511 60483495 60483490 -
ggttctgccttggacagagaaa

SEQ ID NO: 222428 - DNA, 22 bp, Artificial Sequence
  Synthetic oligonucleotide; TTC chr2 60483485 60483506 60483490 60483485 -
tgccttggacagagaaacagac

SEQ ID NO: 222429 - DNA, 22 bp, Artificial Sequence
  Synthetic oligonucleotide; CTG chr2 60483483 60483504 60483488 60483483 -
ccttggacagagaaacagactg

SEQ ID NO: 222430 - DNA, 22 bp, Artificial Sequence
  Synthetic oligonucleotide; CTT chr2 60483479 60483500 60483484 60483479 -
ggacagagaaacagactggggc

SEQ ID NO: 222431 - DNA, 22 bp, Artificial Sequence
  Synthetic oligonucleotide; TTG chr2 60483478 60483499 60483483 60483478 -
gacagagaaacagactggggct

SEQ ID NO: 222432 - DNA, 22 bp, Artificial Sequence
  Synthetic oligonucleotide; CTG chr2 60483461 60483482 60483466 60483461 -
gggctaaagggactgcagctat

SEQ ID NO: 222433 - DNA, 22 bp, Artificial Sequence
  Synthetic oligonucleotide; CTA chr2 60483455 60483476 60483460 60483455 -
aagggactgcagctatacctgg

SEQ ID NO: 222434 - DNA, 22 bp, Artificial Sequence
  Synthetic oligonucleotide; CTG chr2 60483446 60483467 60483451 60483446 -
cagctatacctggggacttgcc

SEQ ID NO: 222435 - DNA, 22 bp, Artificial Sequence
  Synthetic oligonucleotide; CTA chr2 60483440 60483461 60483445 60483440 -
tacctggggacttgcctgagat

SEQ ID NO: 222436 - DNA, 22 bp, Artificial Sequence
  Synthetic oligonucleotide; CTG chr2 60483434 60483455 60483439 60483434 -
gggacttgcctgagatcatctg

SEQ ID NO: 222437 - DNA, 22 bp, Artificial Sequence
  Synthetic oligonucleotide; CTT chr2 60483427 60483448 60483432 60483427 -
gcctgagatcatctgggacttg

SEQ ID NO: 222438 - DNA, 22 bp, Artificial Sequence
  Synthetic oligonucleotide; TTG chr2 60483426 60483447 60483431 60483426 -
cctgagatcatctgggacttgc

SEQ ID NO: 222439 - DNA, 22 bp, Artificial Sequence
  Synthetic oligonucleotide; CTG chr2 60483422 60483443 60483427 60483422 -
agatcatctgggacttgcctgg

SEQ ID NO: 222440 - DNA, 22 bp, Artificial Sequence
  Synthetic oligonucleotide; CTG chr2 60483412 60483433 60483417 60483412 -
ggacttgcctggtctcaagtct

SEQ ID NO: 222441 - DNA, 22 bp, Artificial Sequence
  Synthetic oligonucleotide; CTT chr2 60483406 60483427 60483411 60483406 -
gcctggtctcaagtcttctgac

SEQ ID NO: 222442 - DNA, 22 bp, Artificial Sequence
  Synthetic oligonucleotide; TTG chr2 60483405 60483426 60483410 60483405 -
cctggtctcaagtcttctgacc

SEQ ID NO: 222443 - DNA, 22 bp, Artificial Sequence
  Synthetic oligonucleotide; CTG chr2 60483401 60483422 60483406 60483401 -
gtctcaagtcttctgaccttgg

SEQ ID NO: 222444 - DNA, 22 bp, Artificial Sequence
  Synthetic oligonucleotide; CTC chr2 60483396 60483417 60483401 60483396 -
aagtcttctgaccttggccagg

SEQ ID NO: 222445 - DNA, 22 bp, Artificial Sequence
  Synthetic oligonucleotide; CTT chr2 60483389 60483410 60483394 60483389 -
ctgaccttggccagggatcttt

SEQ ID NO: 222446 - DNA, 22 bp, Artificial Sequence
  Synthetic oligonucleotide; TTC chr2 60483388 60483409 60483393 60483388 -
tgaccttggccagggatctttg

SEQ ID NO: 222447 - DNA, 22 bp, Artificial Sequence
  Synthetic oligonucleotide; CTG chr2 60483386 60483407 60483391 60483386 -
accttggccagggatctttgca

SEQ ID NO: 222448 - DNA, 22 bp, Artificial Sequence
  Synthetic oligonucleotide; CTT chr2 60483381 60483402 60483386 60483381 -
ggccagggatctttgcactggg

SEQ ID NO: 222449 - DNA, 22 bp, Artificial Sequence
  Synthetic oligonucleotide; TTG chr2 60483380 60483401 60483385 60483380 -
gccagggatctttgcactgggc

SEQ ID NO: 222450 - DNA, 22 bp, Artificial Sequence
  Synthetic oligonucleotide; CTT chr2 60483368 60483389 60483373 60483368 -
tgcactgggcaggggaatttga

SEQ ID NO: 222451 - DNA, 22 bp, Artificial Sequence
  Synthetic oligonucleotide; TTT chr2 60483367 60483388 60483372 60483367 -
gcactgggcaggggaatttgag

SEQ ID NO: 222452 - DNA, 22 bp, Artificial Sequence
  Synthetic oligonucleotide; TTG chr2 60483366 60483387 60483371 60483366 -
cactgggcaggggaatttgagt

SEQ ID NO: 222453 - DNA, 22 bp, Artificial Sequence
  Synthetic oligonucleotide; CTG chr2 60483361 60483382 60483366 60483361 -
ggcaggggaatttgagtcccaa

SEQ ID NO: 222454 - DNA, 22 bp, Artificial Sequence
  Synthetic oligonucleotide; TTT chr2 60483348 60483369 60483353 60483348 -
gagtcccaatttgaggcatcga

SEQ ID NO: 222455 - DNA, 22 bp, Artificial Sequence
  Synthetic oligonucleotide; TTG chr2 60483347 60483368 60483352 60483347 -
agtcccaatttgaggcatcgat

SEQ ID NO: 222456 - DNA, 22 bp, Artificial Sequence
  Synthetic oligonucleotide; TTT chr2 60483336 60483357 60483341 60483336 -
gaggcatcgatttaaaccactt

SEQ ID NO: 222457 - DNA, 22 bp, Artificial Sequence
  Synthetic oligonucleotide; TTG chr2 60483335 60483356 60483340 60483335 -
aggcatcgatttaaaccacttt

SEQ ID NO: 222458 - DNA, 22 bp, Artificial Sequence
  Synthetic oligonucleotide; TTT chr2 60483323 60483344 60483328 60483323 -
aaaccacttttcaaaggcctga

SEQ ID NO: 222459 - DNA, 22 bp, Artificial Sequence
  Synthetic oligonucleotide; TTA chr2 60483322 60483343 60483327 60483322 -
aaccacttttcaaaggcctgaa

SEQ ID NO: 222460 - DNA, 22 bp, Artificial Sequence
  Synthetic oligonucleotide; CTT chr2 60483314 60483335 60483319 60483314 -
ttcaaaggcctgaatggagctg

SEQ ID NO: 222461 - DNA, 22 bp, Artificial Sequence
  Synthetic oligonucleotide; TTT chr2 60483313 60483334 60483318 60483313 -
tcaaaggcctgaatggagctga

SEQ ID NO: 222462 - DNA, 22 bp, Artificial Sequence
  Synthetic oligonucleotide; TTT chr2 60483312 60483333 60483317 60483312 -
caaaggcctgaatggagctgat

SEQ ID NO: 222463 - DNA, 22 bp, Artificial Sequence
  Synthetic oligonucleotide; TTC chr2 60483311 60483332 60483316 60483311 -
aaaggcctgaatggagctgatt

SEQ ID NO: 222464 - DNA, 22 bp, Artificial Sequence
  Synthetic oligonucleotide; CTG chr2 60483302 60483323 60483307 60483302 -
aatggagctgattatttgtgtg

SEQ ID NO: 222465 - DNA, 22 bp, Artificial Sequence
  Synthetic oligonucleotide; CTG chr2 60483292 60483313 60483297 60483292 -
attatttgtgtgtcttcttttc

SEQ ID NO: 222466 - DNA, 22 bp, Artificial Sequence
  Synthetic oligonucleotide; TTA chr2 60483288 60483309 60483293 60483288 -
tttgtgtgtcttcttttcctgg

SEQ ID NO: 222467 - DNA, 22 bp, Artificial Sequence
  Synthetic oligonucleotide; TTT chr2 60483285 60483306 60483290 60483285 -
gtgtgtcttcttttcctggtct

SEQ ID NO: 222468 - DNA, 22 bp, Artificial Sequence
  Synthetic oligonucleotide; TTG chr2 60483284 60483305 60483289 60483284 -
tgtgtcttcttttcctggtctt

SEQ ID NO: 222469 - DNA, 22 bp, Artificial Sequence
  Synthetic oligonucleotide; CTT chr2 60483276 60483297 60483281 60483276 -
cttttcctggtcttccccttgt

SEQ ID NO: 222470 - DNA, 22 bp, Artificial Sequence
  Synthetic oligonucleotide; TTC chr2 60483275 60483296 60483280 60483275 -
ttttcctggtcttccccttgtc

SEQ ID NO: 222471 - DNA, 22 bp, Artificial Sequence
  Synthetic oligonucleotide; CTT chr2 60483273 60483294 60483278 60483273 -
ttcctggtcttccccttgtcaa

SEQ ID NO: 222472 - DNA, 22 bp, Artificial Sequence
  Synthetic oligonucleotide; TTT chr2 60483272 60483293 60483277 60483272 -
tcctggtcttccccttgtcaag

SEQ ID NO: 222473 - DNA, 22 bp, Artificial Sequence
  Synthetic oligonucleotide; TTT chr2 60483271 60483292 60483276 60483271 -
cctggtcttccccttgtcaaga

SEQ ID NO: 222474 - DNA, 22 bp, Artificial Sequence
  Synthetic oligonucleotide; TTC chr2 60483270 60483291 60483275 60483270 -
ctggtcttccccttgtcaagac

SEQ ID NO: 222475 - DNA, 22 bp, Artificial Sequence
  Synthetic oligonucleotide; CTG chr2 60483267 60483288 60483272 60483267 -
gtcttccccttgtcaagaccat

SEQ ID NO: 222476 - DNA, 22 bp, Artificial Sequence
  Synthetic oligonucleotide; CTT chr2 60483262 60483283 60483267 60483262 -
ccccttgtcaagaccatttctc

SEQ ID NO: 222477 - DNA, 22 bp, Artificial Sequence
  Synthetic oligonucleotide; TTC chr2 60483261 60483282 60483266 60483261 -
cccttgtcaagaccatttctct

SEQ ID NO: 222478 - DNA, 22 bp, Artificial Sequence
  Synthetic oligonucleotide; CTT chr2 60483256 60483277 60483261 60483256 -
gtcaagaccatttctctaccac

SEQ ID NO: 222479 - DNA, 22 bp, Artificial Sequence
  Synthetic oligonucleotide; TTG chr2 60483255 60483276 60483260 60483255 -
tcaagaccatttctctaccacg

SEQ ID NO: 222480 - DNA, 22 bp, Artificial Sequence
  Synthetic oligonucleotide; TTT chr2 60483243 60483264 60483248 60483243 -
ctctaccacgggatatatatta

SEQ ID NO: 222481 - DNA, 22 bp, Artificial Sequence
  Synthetic oligonucleotide; TTC chr2 60483242 60483263 60483247 60483242 -
tctaccacgggatatatattag

SEQ ID NO: 222482 - DNA, 22 bp, Artificial Sequence
  Synthetic oligonucleotide; CTC chr2 60483240 60483261 60483245 60483240 -
taccacgggatatatattagag

SEQ ID NO: 222483 - DNA, 22 bp, Artificial Sequence
  Synthetic oligonucleotide; CTA chr2 60483238 60483259 60483243 60483238 -
ccacgggatatatattagaggg

SEQ ID NO: 222484 - DNA, 22 bp, Artificial Sequence
  Synthetic oligonucleotide; TTA chr2 60483221 60483242 60483226 60483221 -
gaggggaaaacggctgtaaacc

SEQ ID NO: 222485 - DNA, 22 bp, Artificial Sequence
  Synthetic oligonucleotide; CTG chr2 60483205 60483226 60483210 60483205 -
taaaccctgattgttggctagc

SEQ ID NO: 222486 - DNA, 22 bp, Artificial Sequence
  Synthetic oligonucleotide; CTG chr2 60483196 60483217 60483201 60483196 -
attgttggctagcattgttcag

SEQ ID NO: 222487 - DNA, 22 bp, Artificial Sequence
  Synthetic oligonucleotide; TTG chr2 60483192 60483213 60483197 60483192 -
ttggctagcattgttcaggaag

SEQ ID NO: 222488 - DNA, 22 bp, Artificial Sequence
  Synthetic oligonucleotide; TTG chr2 60483189 60483210 60483194 60483189 -
gctagcattgttcaggaagtgt

SEQ ID NO: 222489 - DNA, 22 bp, Artificial Sequence
  Synthetic oligonucleotide; CTA chr2 60483185 60483206 60483190 60483185 -
gcattgttcaggaagtgtagca

SEQ ID NO: 222490 - DNA, 22 bp, Artificial Sequence
  Synthetic oligonucleotide; TTG chr2 60483179 60483200 60483184 60483179 -
ttcaggaagtgtagcattaagg

SEQ ID NO: 222491 - DNA, 22 bp, Artificial Sequence
  Synthetic oligonucleotide; TTC chr2 60483176 60483197 60483181 60483176 -
aggaagtgtagcattaaggagc

SEQ ID NO: 222492 - DNA, 22 bp, Artificial Sequence
  Synthetic oligonucleotide; TTA chr2 60483160 60483181 60483165 60483160 -
aggagcaacacttctctcgcct

SEQ ID NO: 222493 - DNA, 22 bp, Artificial Sequence
  Synthetic oligonucleotide; CTT chr2 60483147 60483168 60483152 60483147 -
ctctcgcctgtgttgattctcc

SEQ ID NO: 222494 - DNA, 22 bp, Artificial Sequence
  Synthetic oligonucleotide; TTC chr2 60483146 60483167 60483151 60483146 -
tctcgcctgtgttgattctcct

SEQ ID NO: 222495 - DNA, 22 bp, Artificial Sequence
  Synthetic oligonucleotide; CTC chr2 60483144 60483165 60483149 60483144 -
tcgcctgtgttgattctcctcc

SEQ ID NO: 222496 - DNA, 22 bp, Artificial Sequence
  Synthetic oligonucleotide; CTC chr2 60483142 60483163 60483147 60483142 -
gcctgtgttgattctcctccaa

SEQ ID NO: 222497 - DNA, 22 bp, Artificial Sequence
  Synthetic oligonucleotide; CTG chr2 60483137 60483158 60483142 60483137 -
tgttgattctcctccaactacc

SEQ ID NO: 222498 - DNA, 22 bp, Artificial Sequence
  Synthetic oligonucleotide; TTG chr2 60483132 60483153 60483137 60483132 -
attctcctccaactacccacac

SEQ ID NO: 222499 - DNA, 22 bp, Artificial Sequence
  Synthetic oligonucleotide; TTC chr2 60483128 60483149 60483133 60483128 -
tcctccaactacccacactatc

SEQ ID NO: 222500 - DNA, 22 bp, Artificial Sequence
  Synthetic oligonucleotide; CTC chr2 60483126 60483147 60483131 60483126 -
ctccaactacccacactatcct

SEQ ID NO: 222501 - DNA, 22 bp, Artificial Sequence
  Synthetic oligonucleotide; CTC chr2 60483123 60483144 60483128 60483123 -
caactacccacactatccttgc

SEQ ID NO: 222502 - DNA, 22 bp, Artificial Sequence
  Synthetic oligonucleotide; CTA chr2 60483117 60483138 60483122 60483117 -
cccacactatccttgcagttat

SEQ ID NO: 222503 - DNA, 22 bp, Artificial Sequence
  Synthetic oligonucleotide; CTA chr2 60483108 60483129 60483113 60483108 -
tccttgcagttattcatgggaa

SEQ ID NO: 222504 - DNA, 22 bp, Artificial Sequence
  Synthetic oligonucleotide; CTT chr2 60483103 60483124 60483108 60483103 -
gcagttattcatgggaaataat

SEQ ID NO: 222505 - DNA, 22 bp, Artificial Sequence
  Synthetic oligonucleotide; TTG chr2 60483102 60483123 60483107 60483102 -
cagttattcatgggaaataata

SEQ ID NO: 222506 - DNA, 22 bp, Artificial Sequence
  Synthetic oligonucleotide; TTA chr2 60483096 60483117 60483101 60483096 -
ttcatgggaaataatataaatc

SEQ ID NO: 222507 - DNA, 22 bp, Artificial Sequence
  Synthetic oligonucleotide; TTC chr2 60483093 60483114 60483098 60483093 -
atgggaaataatataaatcaca

SEQ ID NO: 222508 - DNA, 22 bp, Artificial Sequence
  Synthetic oligonucleotide; CTG chr2 60483068 60483089 60483073 60483068 -
cctgattcttctcaaacatctc

SEQ ID NO: 222509 - DNA, 22 bp, Artificial Sequence
  Synthetic oligonucleotide; CTG chr2 60483064 60483085 60483069 60483064 -
attcttctcaaacatctcgcaa

SEQ ID NO: 222510 - DNA, 22 bp, Artificial Sequence
  Synthetic oligonucleotide; TTC chr2 60483060 60483081 60483065 60483060 -
ttctcaaacatctcgcaaagta

SEQ ID NO: 222511 - DNA, 22 bp, Artificial Sequence
  Synthetic oligonucleotide; CTT chr2 60483058 60483079 60483063 60483058 -
ctcaaacatctcgcaaagtaat

SEQ ID NO: 222512 - DNA, 22 bp, Artificial Sequence
  Synthetic oligonucleotide; TTC chr2 60483057 60483078 60483062 60483057 -
tcaaacatctcgcaaagtaatc

SEQ ID NO: 222513 - DNA, 22 bp, Artificial Sequence
  Synthetic oligonucleotide; CTC chr2 60483055 60483076 60483060 60483055 -
aaacatctcgcaaagtaatcat

SEQ ID NO: 222514 - DNA, 22 bp, Artificial Sequence
  Synthetic oligonucleotide; CTC chr2 60483046 60483067 60483051 60483046 -
gcaaagtaatcatgggctgaag

SEQ ID NO: 222515 - DNA, 22 bp, Artificial Sequence
  Synthetic oligonucleotide; CTG chr2 60483027 60483048 60483032 60483027 -
aagtgcaggttttcttgcagtg

SEQ ID NO: 222516 - DNA, 22 bp, Artificial Sequence
  Synthetic oligonucleotide; TTT chr2 60483015 60483036 60483020 60483015 -
tcttgcagtgcctttatcagta

SEQ ID NO: 222517 - DNA, 22 bp, Artificial Sequence
  Synthetic oligonucleotide; TTT chr2 60483014 60483035 60483019 60483014 -
cttgcagtgcctttatcagtaa

SEQ ID NO: 222518 - DNA, 22 bp, Artificial Sequence
  Synthetic oligonucleotide; TTC chr2 60483013 60483034 60483018 60483013 -
ttgcagtgcctttatcagtaaa

SEQ ID NO: 222519 - DNA, 22 bp, Artificial Sequence
  Synthetic oligonucleotide; CTT chr2 60483011 60483032 60483016 60483011 -
gcagtgcctttatcagtaaatc

SEQ ID NO: 222520 - DNA, 22 bp, Artificial Sequence
  Synthetic oligonucleotide; TTG chr2 60483010 60483031 60483015 60483010 -
cagtgcctttatcagtaaatca

SEQ ID NO: 222521 - DNA, 22 bp, Artificial Sequence
  Synthetic oligonucleotide; CTT chr2 60483001 60483022 60483006 60483001 -
tatcagtaaatcagattttgag

SEQ ID NO: 222522 - DNA, 22 bp, Artificial Sequence
  Synthetic oligonucleotide; TTT chr2 60483000 60483021 60483005 60483000 -
atcagtaaatcagattttgagc

SEQ ID NO: 222523 - DNA, 22 bp, Artificial Sequence
  Synthetic oligonucleotide; TTA chr2 60482999 60483020 60483004 60482999 -
tcagtaaatcagattttgagca

SEQ ID NO: 222524 - DNA, 22 bp, Artificial Sequence
  Synthetic oligonucleotide; TTT chr2 60482983 60483004 60482988 60482983 -
tgagcatttatcagcaaaagtt

SEQ ID NO: 222525 - DNA, 22 bp, Artificial Sequence
  Synthetic oligonucleotide; TTT chr2 60482982 60483003 60482987 60482982 -
gagcatttatcagcaaaagtta

SEQ ID NO: 222526 - DNA, 22 bp, Artificial Sequence
  Synthetic oligonucleotide; TTG chr2 60482981 60483002 60482986 60482981 -
agcatttatcagcaaaagttag

SEQ ID NO: 222527 - DNA, 22 bp, Artificial Sequence
  Synthetic oligonucleotide; TTT chr2 60482974 60482995 60482979 60482974 -
atcagcaaaagttagacttaaa

SEQ ID NO: 222528 - DNA, 22 bp, Artificial Sequence
  Synthetic oligonucleotide; TTA chr2 60482973 60482994 60482978 60482973 -
tcagcaaaagttagacttaaac

SEQ ID NO: 222529 - DNA, 22 bp, Artificial Sequence
  Synthetic oligonucleotide; TTA chr2 60482960 60482981 60482965 60482960 -
gacttaaacatcatcatttctg

SEQ ID NO: 222530 - DNA, 22 bp, Artificial Sequence
  Synthetic oligonucleotide; CTT chr2 60482955 60482976 60482960 60482955 -
aaacatcatcatttctgtaatg

SEQ ID NO: 222531 - DNA, 22 bp, Artificial Sequence
  Synthetic oligonucleotide; TTA chr2 60482954 60482975 60482959 60482954 -
aacatcatcatttctgtaatgt

SEQ ID NO: 222532 - DNA, 22 bp, Artificial Sequence
  Synthetic oligonucleotide; TTT chr2 60482941 60482962 60482946 60482941 -
ctgtaatgtttgaaagaaagat

SEQ ID NO: 222533 - DNA, 22 bp, Artificial Sequence
  Synthetic oligonucleotide; TTC chr2 60482940 60482961 60482945 60482940 -
tgtaatgtttgaaagaaagatt

SEQ ID NO: 222534 - DNA, 22 bp, Artificial Sequence
  Synthetic oligonucleotide; CTG chr2 60482938 60482959 60482943 60482938 -
taatgtttgaaagaaagatttg

SEQ ID NO: 222535 - DNA, 22 bp, Artificial Sequence
  Synthetic oligonucleotide; TTT chr2 60482930 60482951 60482935 60482930 -
gaaagaaagatttgtttcagtg

SEQ ID NO: 222536 - DNA, 22 bp, Artificial Sequence
  Synthetic oligonucleotide; TTG chr2 60482929 60482950 60482934 60482929 -
aaagaaagatttgtttcagtgg

SEQ ID NO: 222537 - DNA, 22 bp, Artificial Sequence
  Synthetic oligonucleotide; TTT chr2 60482917 60482938 60482922 60482917 -
gtttcagtggggactctgccaa

SEQ ID NO: 222538 - DNA, 22 bp, Artificial Sequence
  Synthetic oligonucleotide; TTG chr2 60482916 60482937 60482921 60482916 -
tttcagtggggactctgccaat

SEQ ID NO: 222539 - DNA, 22 bp, Artificial Sequence
  Synthetic oligonucleotide; TTT chr2 60482913 60482934 60482918 60482913 -
cagtggggactctgccaatcaa

SEQ ID NO: 222540 - DNA, 22 bp, Artificial Sequence
  Synthetic oligonucleotide; TTC chr2 60482912 60482933 60482917 60482912 -
agtggggactctgccaatcaat

SEQ ID NO: 222541 - DNA, 22 bp, Artificial Sequence
  Synthetic oligonucleotide; CTC chr2 60482901 60482922 60482906 60482901 -
tgccaatcaatgatcttccagc

SEQ ID NO: 222542 - DNA, 22 bp, Artificial Sequence
  Synthetic oligonucleotide; CTG chr2 60482899 60482920 60482904 60482899 -
ccaatcaatgatcttccagctt

SEQ ID NO: 222543 - DNA, 22 bp, Artificial Sequence
  Synthetic oligonucleotide; CTT chr2 60482884 60482905 60482889 60482884 -
ccagcttgactctgctatcaat

SEQ ID NO: 222544 - DNA, 22 bp, Artificial Sequence
  Synthetic oligonucleotide; TTC chr2 60482883 60482904 60482888 60482883 -
cagcttgactctgctatcaatt

SEQ ID NO: 222545 - DNA, 22 bp, Artificial Sequence
  Synthetic oligonucleotide; CTT chr2 60482877 60482898 60482882 60482877 -
gactctgctatcaattattgct

SEQ ID NO: 222546 - DNA, 22 bp, Artificial Sequence
  Synthetic oligonucleotide; TTG chr2 60482876 60482897 60482881 60482876 -
actctgctatcaattattgctg

SEQ ID NO: 222547 - DNA, 22 bp, Artificial Sequence
  Synthetic oligonucleotide; CTC chr2 60482872 60482893 60482877 60482872 -
tgctatcaattattgctgcaat

SEQ ID NO: 222548 - DNA, 22 bp, Artificial Sequence
  Synthetic oligonucleotide; CTG chr2 60482870 60482891 60482875 60482870 -
ctatcaattattgctgcaatta

SEQ ID NO: 222549 - DNA, 22 bp, Artificial Sequence
  Synthetic oligonucleotide; CTA chr2 60482867 60482888 60482872 60482867 -
tcaattattgctgcaattattt

SEQ ID NO: 222550 - DNA, 22 bp, Artificial Sequence
  Synthetic oligonucleotide; TTA chr2 60482860 60482881 60482865 60482860 -
ttgctgcaattatttgtctagt

SEQ ID NO: 222551 - DNA, 22 bp, Artificial Sequence
  Synthetic oligonucleotide; TTG chr2 60482857 60482878 60482862 60482857 -
ctgcaattatttgtctagttgg

SEQ ID NO: 222552 - DNA, 22 bp, Artificial Sequence
  Synthetic oligonucleotide; CTG chr2 60482854 60482875 60482859 60482854 -
caattatttgtctagttggata

SEQ ID NO: 222553 - DNA, 22 bp, Artificial Sequence
  Synthetic oligonucleotide; TTA chr2 60482848 60482869 60482853 60482848 -
tttgtctagttggatatttaaa

SEQ ID NO: 222554 - DNA, 22 bp, Artificial Sequence
  Synthetic oligonucleotide; TTT chr2 60482845 60482866 60482850 60482845 -
gtctagttggatatttaaaatg

SEQ ID NO: 222555 - DNA, 22 bp, Artificial Sequence
  Synthetic oligonucleotide; TTG chr2 60482844 60482865 60482849 60482844 -
tctagttggatatttaaaatgt

SEQ ID NO: 222556 - DNA, 22 bp, Artificial Sequence
  Synthetic oligonucleotide; CTA chr2 60482840 60482861 60482845 60482840 -
gttggatatttaaaatgtcatc

SEQ ID NO: 222557 - DNA, 22 bp, Artificial Sequence
  Synthetic oligonucleotide; TTG chr2 60482836 60482857 60482841 60482836 -
gatatttaaaatgtcatcagaa

SEQ ID NO: 222558 - DNA, 22 bp, Artificial Sequence
  Synthetic oligonucleotide; TTT chr2 60482829 60482850 60482834 60482829 -
aaaatgtcatcagaaagagatg

SEQ ID NO: 222559 - DNA, 22 bp, Artificial Sequence
  Synthetic oligonucleotide; TTA chr2 60482828 60482849 60482833 60482828 -
aaatgtcatcagaaagagatga

SEQ ID NO: 222560 - DNA, 22 bp, Artificial Sequence
  Synthetic oligonucleotide; TTA chr2 60482803 60482824 60482808 60482803 -
cacattctagaaagcaaggcac

SEQ ID NO: 222561 - DNA, 22 bp, Artificial Sequence
  Synthetic oligonucleotide; TTC chr2 60482796 60482817 60482801 60482796 -
tagaaagcaaggcactgtataa

SEQ ID NO: 222562 - DNA, 22 bp, Artificial Sequence
  Synthetic oligonucleotide; CTA chr2 60482794 60482815 60482799 60482794 -
gaaagcaaggcactgtataatc

SEQ ID NO: 222563 - DNA, 22 bp, Artificial Sequence
  Synthetic oligonucleotide; CTG chr2 60482779 60482800 60482784 60482779 -
tataatcacatgaactgaatcc

SEQ ID NO: 222564 - DNA, 22 bp, Artificial Sequence
  Synthetic oligonucleotide; CTG chr2 60482762 60482783 60482767 60482762 -
aatccagttaaatgtagtgtgg

SEQ ID NO: 222565 - DNA, 22 bp, Artificial Sequence
  Synthetic oligonucleotide; TTA chr2 60482752 60482773 60482757 60482752 -
aatgtagtgtggtactaacctg

SEQ ID NO: 222566 - DNA, 22 bp, Artificial Sequence
  Synthetic oligonucleotide; CTA chr2 60482735 60482756 60482740 60482735 -
acctgtccttcaaaatagaatt

SEQ ID NO: 222567 - DNA, 22 bp, Artificial Sequence
  Synthetic oligonucleotide; CTG chr2 60482730 60482751 60482735 60482730 -
tccttcaaaatagaatttttga

SEQ ID NO: 222568 - DNA, 22 bp, Artificial Sequence
  Synthetic oligonucleotide; CTT chr2 60482725 60482746 60482730 60482725 -
caaaatagaatttttgagctac

SEQ ID NO: 222569 - DNA, 22 bp, Artificial Sequence
  Synthetic oligonucleotide; TTC chr2 60482724 60482745 60482729 60482724 -
aaaatagaatttttgagctacc

SEQ ID NO: 222570 - DNA, 22 bp, Artificial Sequence
  Synthetic oligonucleotide; TTT chr2 60482712 60482733 60482717 60482712 -
ttgagctaccactgaagcagca

SEQ ID NO: 222571 - DNA, 22 bp, Artificial Sequence
  Synthetic oligonucleotide; TTT chr2 60482711 60482732 60482716 60482711 -
tgagctaccactgaagcagcag

SEQ ID NO: 222572 - DNA, 22 bp, Artificial Sequence
  Synthetic oligonucleotide; TTT chr2 60482710 60482731 60482715 60482710 -
gagctaccactgaagcagcagt

SEQ ID NO: 222573 - DNA, 22 bp, Artificial Sequence
  Synthetic oligonucleotide; TTG chr2 60482709 60482730 60482714 60482709 -
agctaccactgaagcagcagtc

SEQ ID NO: 222574 - DNA, 22 bp, Artificial Sequence
  Synthetic oligonucleotide; CTA chr2 60482704 60482725 60482709 60482704 -
ccactgaagcagcagtcttctg

SEQ ID NO: 222575 - DNA, 22 bp, Artificial Sequence
  Synthetic oligonucleotide; CTG chr2 60482698 60482719 60482703 60482698 -
aagcagcagtcttctgccctgt

SEQ ID NO: 222576 - DNA, 22 bp, Artificial Sequence
  Synthetic oligonucleotide; CTT chr2 60482685 60482706 60482690 60482685 -
ctgccctgttttcaggaagctg

SEQ ID NO: 222577 - DNA, 22 bp, Artificial Sequence
  Synthetic oligonucleotide; TTC chr2 60482684 60482705 60482689 60482684 -
tgccctgttttcaggaagctga

SEQ ID NO: 222578 - DNA, 22 bp, Artificial Sequence
  Synthetic oligonucleotide; CTG chr2 60482682 60482703 60482687 60482682 -
ccctgttttcaggaagctgatc

SEQ ID NO: 222579 - DNA, 22 bp, Artificial Sequence
  Synthetic oligonucleotide; CTG chr2 60482677 60482698 60482682 60482677 -
ttttcaggaagctgatcttaac

SEQ ID NO: 222580 - DNA, 22 bp, Artificial Sequence
  Synthetic oligonucleotide; TTT chr2 60482674 60482695 60482679 60482674 -
tcaggaagctgatcttaacctt

SEQ ID NO: 222581 - DNA, 22 bp, Artificial Sequence
  Synthetic oligonucleotide; TTT chr2 60482673 60482694 60482678 60482673 -
caggaagctgatcttaaccttg

SEQ ID NO: 222582 - DNA, 22 bp, Artificial Sequence
  Synthetic oligonucleotide; TTC chr2 60482672 60482693 60482677 60482672 -
aggaagctgatcttaaccttgg

SEQ ID NO: 222583 - DNA, 22 bp, Artificial Sequence
  Synthetic oligonucleotide; CTG chr2 60482663 60482684 60482668 60482663 -
atcttaaccttgggatgcagtg

SEQ ID NO: 222584 - DNA, 22 bp, Artificial Sequence
  Synthetic oligonucleotide; CTT chr2 60482658 60482679 60482663 60482658 -
aaccttgggatgcagtgtgctt

SEQ ID NO: 222585 - DNA, 22 bp, Artificial Sequence
  Synthetic oligonucleotide; TTA chr2 60482657 60482678 60482662 60482657 -
accttgggatgcagtgtgcttt

SEQ ID NO: 222586 - DNA, 22 bp, Artificial Sequence
  Synthetic oligonucleotide; CTT chr2 60482652 60482673 60482657 60482652 -
gggatgcagtgtgctttcaggg

SEQ ID NO: 222587 - DNA, 22 bp, Artificial Sequence
  Synthetic oligonucleotide; TTG chr2 60482651 60482672 60482656 60482651 -
ggatgcagtgtgctttcagggt

SEQ ID NO: 222588 - DNA, 22 bp, Artificial Sequence
  Synthetic oligonucleotide; CTT chr2 60482636 60482657 60482641 60482636 -
tcagggttgggtgatacttaat

SEQ ID NO: 222589 - DNA, 22 bp, Artificial Sequence
  Synthetic oligonucleotide; TTT chr2 60482635 60482656 60482640 60482635 -
cagggttgggtgatacttaatt

SEQ ID NO: 222590 - DNA, 22 bp, Artificial Sequence
  Synthetic oligonucleotide; TTC chr2 60482634 60482655 60482639 60482634 -
agggttgggtgatacttaatta

SEQ ID NO: 222591 - DNA, 22 bp, Artificial Sequence
  Synthetic oligonucleotide; TTG chr2 60482627 60482648 60482632 60482627 -
ggtgatacttaattatggagaa

SEQ ID NO: 222592 - DNA, 22 bp, Artificial Sequence
  Synthetic oligonucleotide; CTT chr2 60482617 60482638 60482622 60482617 -
aattatggagaactttccaagt

SEQ ID NO: 222593 - DNA, 22 bp, Artificial Sequence
  Synthetic oligonucleotide; TTA chr2 60482616 60482637 60482621 60482616 -
attatggagaactttccaagtc

SEQ ID NO: 222594 - DNA, 22 bp, Artificial Sequence
  Synthetic oligonucleotide; TTA chr2 60482612 60482633 60482617 60482612 -
tggagaactttccaagtctgaa

SEQ ID NO: 222595 - DNA, 22 bp, Artificial Sequence
  Synthetic oligonucleotide; CTT chr2 60482602 60482623 60482607 60482602 -
tccaagtctgaaaatggaattg

SEQ ID NO: 222596 - DNA, 22 bp, Artificial Sequence
  Synthetic oligonucleotide; TTT chr2 60482601 60482622 60482606 60482601 -
ccaagtctgaaaatggaattgc

SEQ ID NO: 222597 - DNA, 22 bp, Artificial Sequence
  Synthetic oligonucleotide; TTC chr2 60482600 60482621 60482605 60482600 -
caagtctgaaaatggaattgct

SEQ ID NO: 222598 - DNA, 22 bp, Artificial Sequence
  Synthetic oligonucleotide; CTG chr2 60482592 60482613 60482597 60482592 -
aaaatggaattgctccttcaca

SEQ ID NO: 222599 - DNA, 22 bp, Artificial Sequence
  Synthetic oligonucleotide; TTG chr2 60482580 60482601 60482585 60482580 -
ctccttcacatacgcgagaagt

SEQ ID NO: 222600 - DNA, 22 bp, Artificial Sequence
  Synthetic oligonucleotide; CTC chr2 60482577 60482598 60482582 60482577 -
cttcacatacgcgagaagtgca

SEQ ID NO: 222601 - DNA, 22 bp, Artificial Sequence
  Synthetic oligonucleotide; CTT chr2 60482574 60482595 60482579 60482574 -
cacatacgcgagaagtgcattt

SEQ ID NO: 222602 - DNA, 22 bp, Artificial Sequence
  Synthetic oligonucleotide; TTC chr2 60482573 60482594 60482578 60482573 -
acatacgcgagaagtgcatttt

SEQ ID NO: 222603 - DNA, 22 bp, Artificial Sequence
  Synthetic oligonucleotide; TTT chr2 60482552 60482573 60482557 60482552 -
tggttatctcattcatctgcaa

SEQ ID NO: 222604 - DNA, 22 bp, Artificial Sequence
  Synthetic oligonucleotide; TTT chr2 60482551 60482572 60482556 60482551 -
ggttatctcattcatctgcaaa

SEQ ID NO: 222605 - DNA, 22 bp, Artificial Sequence
  Synthetic oligonucleotide; TTG chr2 60482550 60482571 60482555 60482550 -
gttatctcattcatctgcaaat

SEQ ID NO: 222606 - DNA, 22 bp, Artificial Sequence
  Synthetic oligonucleotide; TTA chr2 60482546 60482567 60482551 60482546 -
tctcattcatctgcaaatctat

SEQ ID NO: 222607 - DNA, 22 bp, Artificial Sequence
  Synthetic oligonucleotide; CTC chr2 60482542 60482563 60482547 60482542 -
attcatctgcaaatctataaat

SEQ ID NO: 222608 - DNA, 22 bp, Artificial Sequence
  Synthetic oligonucleotide; TTC chr2 60482538 60482559 60482543 60482538 -
atctgcaaatctataaataagc

SEQ ID NO: 222609 - DNA, 22 bp, Artificial Sequence
  Synthetic oligonucleotide; CTG chr2 60482533 60482554 60482538 60482533 -
caaatctataaataagcagtcc

SEQ ID NO: 222610 - DNA, 22 bp, Artificial Sequence
  Synthetic oligonucleotide; CTA chr2 60482525 60482546 60482530 60482525 -
taaataagcagtccctctattc

SEQ ID NO: 222611 - DNA, 22 bp, Artificial Sequence
  Synthetic oligonucleotide; CTC chr2 60482508 60482529 60482513 60482508 -
tattcttcttgcttcctgtgga

SEQ ID NO: 222612 - DNA, 22 bp, Artificial Sequence
  Synthetic oligonucleotide; CTA chr2 60482506 60482527 60482511 60482506 -
ttcttcttgcttcctgtggatt

SEQ ID NO: 222613 - DNA, 22 bp, Artificial Sequence
  Synthetic oligonucleotide; TTC chr2 60482503 60482524 60482508 60482503 -
ttcttgcttcctgtggatttaa

SEQ ID NO: 222614 - DNA, 22 bp, Artificial Sequence
  Synthetic oligonucleotide; CTT chr2 60482501 60482522 60482506 60482501 -
cttgcttcctgtggatttaaat

SEQ ID NO: 222615 - DNA, 22 bp, Artificial Sequence
  Synthetic oligonucleotide; TTC chr2 60482500 60482521 60482505 60482500 -
ttgcttcctgtggatttaaatg

SEQ ID NO: 222616 - DNA, 22 bp, Artificial Sequence
  Synthetic oligonucleotide; CTT chr2 60482498 60482519 60482503 60482498 -
gcttcctgtggatttaaatgcc

SEQ ID NO: 222617 - DNA, 22 bp, Artificial Sequence
  Synthetic oligonucleotide; TTG chr2 60482497 60482518 60482502 60482497 -
cttcctgtggatttaaatgcca

SEQ ID NO: 222618 - DNA, 22 bp, Artificial Sequence
  Synthetic oligonucleotide; CTT chr2 60482494 60482515 60482499 60482494 -
cctgtggatttaaatgccaaat

SEQ ID NO: 222619 - DNA, 22 bp, Artificial Sequence
  Synthetic oligonucleotide; TTC chr2 60482493 60482514 60482498 60482493 -
ctgtggatttaaatgccaaatc

SEQ ID NO: 222620 - DNA, 22 bp, Artificial Sequence
  Synthetic oligonucleotide; CTG chr2 60482490 60482511 60482495 60482490 -
tggatttaaatgccaaatcctg

SEQ ID NO: 222621 - DNA, 22 bp, Artificial Sequence
  Synthetic oligonucleotide; TTT chr2 60482483 60482504 60482488 60482483 -
aaatgccaaatcctgatttgtg

SEQ ID NO: 222622 - DNA, 22 bp, Artificial Sequence
  Synthetic oligonucleotide; TTA chr2 60482482 60482503 60482487 60482482 -
aatgccaaatcctgatttgtgg

SEQ ID NO: 222623 - DNA, 22 bp, Artificial Sequence
  Synthetic oligonucleotide; CTG chr2 60482468 60482489 60482473 60482468 -
atttgtggcaaagttgtcacat

SEQ ID NO: 222624 - DNA, 22 bp, Artificial Sequence
  Synthetic oligonucleotide; TTT chr2 60482464 60482485 60482469 60482464 -
gtggcaaagttgtcacatgccc

SEQ ID NO: 222625 - DNA, 22 bp, Artificial Sequence
  Synthetic oligonucleotide; TTG chr2 60482463 60482484 60482468 60482463 -
tggcaaagttgtcacatgcccc

SEQ ID NO: 222626 - DNA, 22 bp, Artificial Sequence
  Synthetic oligonucleotide; TTG chr2 60482452 60482473 60482457 60482452 -
tcacatgcccctttcccactct

SEQ ID NO: 222627 - DNA, 22 bp, Artificial Sequence
  Synthetic oligonucleotide; CTT chr2 60482439 60482460 60482444 60482439 -
tcccactctgtatgcctggtgc

SEQ ID NO: 222628 - DNA, 22 bp, Artificial Sequence
  Synthetic oligonucleotide; TTT chr2 60482438 60482459 60482443 60482438 -
cccactctgtatgcctggtgcc

SEQ ID NO: 222629 - DNA, 22 bp, Artificial Sequence
  Synthetic oligonucleotide; TTC chr2 60482437 60482458 60482442 60482437 -
ccactctgtatgcctggtgccc

SEQ ID NO: 222630 - DNA, 22 bp, Artificial Sequence
  Synthetic oligonucleotide; CTC chr2 60482431 60482452 60482436 60482431 -
tgtatgcctggtgcccaggaac

SEQ ID NO: 222631 - DNA, 22 bp, Artificial Sequence
  Synthetic oligonucleotide; CTG chr2 60482429 60482450 60482434 60482429 -
tatgcctggtgcccaggaacta

SEQ ID NO: 222632 - DNA, 22 bp, Artificial Sequence
  Synthetic oligonucleotide; CTG chr2 60482421 60482442 60482426 60482421 -
gtgcccaggaactaagcagtgg

SEQ ID NO: 222633 - DNA, 22 bp, Artificial Sequence
  Synthetic oligonucleotide; CTA chr2 60482407 60482428 60482412 60482407 -
agcagtggcagtggaaattaca

SEQ ID NO: 222634 - DNA, 22 bp, Artificial Sequence
  Synthetic oligonucleotide; TTA chr2 60482387 60482408 60482392 60482387 -
caactgtttggaagccaagaaa

SEQ ID NO: 222635 - DNA, 22 bp, Artificial Sequence
  Synthetic oligonucleotide; CTG chr2 60482381 60482402 60482386 60482381 -
tttggaagccaagaaaaaagct

SEQ ID NO: 222636 - DNA, 22 bp, Artificial Sequence
  Synthetic oligonucleotide; TTT chr2 60482378 60482399 60482383 60482378 -
ggaagccaagaaaaaagctcca

SEQ ID NO: 222637 - DNA, 22 bp, Artificial Sequence
  Synthetic oligonucleotide; TTG chr2 60482377 60482398 60482382 60482377 -
gaagccaagaaaaaagctccat

SEQ ID NO: 222638 - DNA, 22 bp, Artificial Sequence
  Synthetic oligonucleotide; CTC chr2 60482358 60482379 60482363 60482358 -
catttctcacttttctccagtt

SEQ ID NO: 222639 - DNA, 22 bp, Artificial Sequence
  Synthetic oligonucleotide; TTT chr2 60482353 60482374 60482358 60482353 -
ctcacttttctccagttccgga

SEQ ID NO: 222640 - DNA, 22 bp, Artificial Sequence
  Synthetic oligonucleotide; TTC chr2 60482352 60482373 60482357 60482352 -
tcacttttctccagttccggat

SEQ ID NO: 222641 - DNA, 22 bp, Artificial Sequence
  Synthetic oligonucleotide; CTC chr2 60482350 60482371 60482355 60482350 -
acttttctccagttccggatat

SEQ ID NO: 222642 - DNA, 22 bp, Artificial Sequence
  Synthetic oligonucleotide; CTT chr2 60482346 60482367 60482351 60482346 -
ttctccagttccggatattctc

SEQ ID NO: 222643 - DNA, 22 bp, Artificial Sequence
  Synthetic oligonucleotide; TTT chr2 60482345 60482366 60482350 60482345 -
tctccagttccggatattctcg

SEQ ID NO: 222644 - DNA, 22 bp, Artificial Sequence
  Synthetic oligonucleotide; TTT chr2 60482344 60482365 60482349 60482344 -
ctccagttccggatattctcgg

SEQ ID NO: 222645 - DNA, 22 bp, Artificial Sequence
  Synthetic oligonucleotide; TTC chr2 60482343 60482364 60482348 60482343 -
tccagttccggatattctcggc

SEQ ID NO: 222646 - DNA, 22 bp, Artificial Sequence
  Synthetic oligonucleotide; CTC chr2 60482341 60482362 60482346 60482341 -
cagttccggatattctcggctc

SEQ ID NO: 222647 - DNA, 22 bp, Artificial Sequence
  Synthetic oligonucleotide; TTC chr2 60482335 60482356 60482340 60482335 -
cggatattctcggctctgctcc

SEQ ID NO: 222648 - DNA, 22 bp, Artificial Sequence
  Synthetic oligonucleotide; TTC chr2 60482326 60482347 60482331 60482326 -
tcggctctgctccatgtatcag

SEQ ID NO: 222649 - DNA, 22 bp, Artificial Sequence
  Synthetic oligonucleotide; CTC chr2 60482324 60482345 60482329 60482324 -
ggctctgctccatgtatcagcc

SEQ ID NO: 222650 - DNA, 22 bp, Artificial Sequence
  Synthetic oligonucleotide; CTC chr2 60482319 60482340 60482324 60482319 -
tgctccatgtatcagcctcctc

SEQ ID NO: 222651 - DNA, 22 bp, Artificial Sequence
  Synthetic oligonucleotide; CTG chr2 60482317 60482338 60482322 60482317 -
ctccatgtatcagcctcctccc

SEQ ID NO: 222652 - DNA, 22 bp, Artificial Sequence
  Synthetic oligonucleotide; CTC chr2 60482314 60482335 60482319 60482314 -
catgtatcagcctcctccccac

SEQ ID NO: 222653 - DNA, 22 bp, Artificial Sequence
  Synthetic oligonucleotide; CTC chr2 60482300 60482321 60482305 60482300 -
ctccccacacacctcctccact

SEQ ID NO: 222654 - DNA, 22 bp, Artificial Sequence
  Synthetic oligonucleotide; CTC chr2 60482297 60482318 60482302 60482297 -
cccacacacctcctccactgca

SEQ ID NO: 222655 - DNA, 22 bp, Artificial Sequence
  Synthetic oligonucleotide; CTC chr2 60482285 60482306 60482290 60482285 -
ctccactgcacaccctccttct

SEQ ID NO: 222656 - DNA, 22 bp, Artificial Sequence
  Synthetic oligonucleotide; CTC chr2 60482282 60482303 60482287 60482282 -
cactgcacaccctccttctgtc

SEQ ID NO: 222657 - DNA, 22 bp, Artificial Sequence
  Synthetic oligonucleotide; CTG chr2 60482277 60482298 60482282 60482277 -
cacaccctccttctgtccgctc

SEQ ID NO: 222658 - DNA, 22 bp, Artificial Sequence
  Synthetic oligonucleotide; CTC chr2 60482268 60482289 60482273 60482268 -
cttctgtccgctccgtgaacag

SEQ ID NO: 222659 - DNA, 22 bp, Artificial Sequence
  Synthetic oligonucleotide; CTT chr2 60482265 60482286 60482270 60482265 -
ctgtccgctccgtgaacaggaa

SEQ ID NO: 222660 - DNA, 22 bp, Artificial Sequence
  Synthetic oligonucleotide; TTC chr2 60482264 60482285 60482269 60482264 -
tgtccgctccgtgaacaggaaa

SEQ ID NO: 222661 - DNA, 22 bp, Artificial Sequence
  Synthetic oligonucleotide; CTG chr2 60482262 60482283 60482267 60482262 -
tccgctccgtgaacaggaaaca

SEQ ID NO: 222662 - DNA, 22 bp, Artificial Sequence
  Synthetic oligonucleotide; CTC chr2 60482255 60482276 60482260 60482255 -
cgtgaacaggaaacagaaatac

SEQ ID NO: 222663 - DNA, 22 bp, Artificial Sequence
  Synthetic oligonucleotide; CTC chr2 60482228 60482249 60482233 60482228 -
caatttttttttttaatggagg

SEQ ID NO: 222664 - DNA, 22 bp, Artificial Sequence
  Synthetic oligonucleotide; TTT chr2 60482222 60482243 60482227 60482222 -
ttttttttaatggaggaagaga

SEQ ID NO: 222665 - DNA, 22 bp, Artificial Sequence
  Synthetic oligonucleotide; TTT chr2 60482221 60482242 60482226 60482221 -
tttttttaatggaggaagagaa

SEQ ID NO: 222666 - DNA, 22 bp, Artificial Sequence
  Synthetic oligonucleotide; TTT chr2 60482220 60482241 60482225 60482220 -
ttttttaatggaggaagagaaa

SEQ ID NO: 222667 - DNA, 22 bp, Artificial Sequence
  Synthetic oligonucleotide; TTT chr2 60482219 60482240 60482224 60482219 -
tttttaatggaggaagagaaac

SEQ ID NO: 222668 - DNA, 22 bp, Artificial Sequence
  Synthetic oligonucleotide; TTT chr2 60482218 60482239 60482223 60482218 -
ttttaatggaggaagagaaacc

SEQ ID NO: 222669 - DNA, 22 bp, Artificial Sequence
  Synthetic oligonucleotide; TTT chr2 60482217 60482238 60482222 60482217 -
tttaatggaggaagagaaacca

SEQ ID NO: 222670 - DNA, 22 bp, Artificial Sequence
  Synthetic oligonucleotide; TTT chr2 60482216 60482237 60482221 60482216 -
ttaatggaggaagagaaaccac

SEQ ID NO: 222671 - DNA, 22 bp, Artificial Sequence
  Synthetic oligonucleotide; TTT chr2 60482215 60482236 60482220 60482215 -
taatggaggaagagaaaccaca

SEQ ID NO: 222672 - DNA, 22 bp, Artificial Sequence
  Synthetic oligonucleotide; TTT chr2 60482214 60482235 60482219 60482214 -
aatggaggaagagaaaccacaa

SEQ ID NO: 222673 - DNA, 22 bp, Artificial Sequence
  Synthetic oligonucleotide; TTA chr2 60482213 60482234 60482218 60482213 -
atggaggaagagaaaccacaac

SEQ ID NO: 222674 - DNA, 22 bp, Artificial Sequence
  Synthetic oligonucleotide; CTC chr2 60482176 60482197 60482181 60482176 -
aaaaactaaactccaaccaaac

SEQ ID NO: 222675 - DNA, 22 bp, Artificial Sequence
  Synthetic oligonucleotide; CTA chr2 60482168 60482189 60482173 60482168 -
aactccaaccaaactaaactct

SEQ ID NO: 222676 - DNA, 22 bp, Artificial Sequence
  Synthetic oligonucleotide; CTC chr2 60482163 60482184 60482168 60482163 -
caaccaaactaaactctcaaga

SEQ ID NO: 222677 - DNA, 22 bp, Artificial Sequence
  Synthetic oligonucleotide; CTA chr2 60482152 60482173 60482157 60482152 -
aactctcaagatagaatcatga

SEQ ID NO: 222678 - DNA, 22 bp, Artificial Sequence
  Synthetic oligonucleotide; CTC chr2 60482147 60482168 60482152 60482147 -
tcaagatagaatcatgagagat

SEQ ID NO: 222679 - DNA, 22 bp, Artificial Sequence
  Synthetic oligonucleotide; CTC chr2 60482145 60482166 60482150 60482145 -
aagatagaatcatgagagatgc

SEQ ID NO: 222680 - DNA, 22 bp, Artificial Sequence
  Synthetic oligonucleotide; CTA chr2 60482103 60482124 60482108 60482103 -
agtggctcaaaccacccgcccc

SEQ ID NO: 222681 - DNA, 22 bp, Artificial Sequence
  Synthetic oligonucleotide; CTC chr2 60482095 60482116 60482100 60482095 -
aaaccacccgccccttaacagg

SEQ ID NO: 222682 - DNA, 22 bp, Artificial Sequence
  Synthetic oligonucleotide; CTT chr2 60482079 60482100 60482084 60482079 -
aacaggtctgcctctcttcctg

SEQ ID NO: 222683 - DNA, 22 bp, Artificial Sequence
  Synthetic oligonucleotide; TTA chr2 60482078 60482099 60482083 60482078 -
acaggtctgcctctcttcctgg

SEQ ID NO: 222684 - DNA, 22 bp, Artificial Sequence
  Synthetic oligonucleotide; CTG chr2 60482069 60482090 60482074 60482069 -
cctctcttcctgggagtcagaa

SEQ ID NO: 222685 - DNA, 22 bp, Artificial Sequence
  Synthetic oligonucleotide; CTC chr2 60482065 60482086 60482070 60482065 -
tcttcctgggagtcagaagtga

SEQ ID NO: 222686 - DNA, 22 bp, Artificial Sequence
  Synthetic oligonucleotide; CTC chr2 60482063 60482084 60482068 60482063 -
ttcctgggagtcagaagtgacc

SEQ ID NO: 222687 - DNA, 22 bp, Artificial Sequence
  Synthetic oligonucleotide; CTT chr2 60482061 60482082 60482066 60482061 -
cctgggagtcagaagtgacctt

SEQ ID NO: 222688 - DNA, 22 bp, Artificial Sequence
  Synthetic oligonucleotide; TTC chr2 60482060 60482081 60482065 60482060 -
ctgggagtcagaagtgaccttg

SEQ ID NO: 222689 - DNA, 22 bp, Artificial Sequence
  Synthetic oligonucleotide; CTG chr2 60482057 60482078 60482062 60482057 -
ggagtcagaagtgaccttgatg

SEQ ID NO: 222690 - DNA, 22 bp, Artificial Sequence
  Synthetic oligonucleotide; CTT chr2 60482039 60482060 60482044 60482039 -
gatgaactggatgttaggtcca

SEQ ID NO: 222691 - DNA, 22 bp, Artificial Sequence
  Synthetic oligonucleotide; TTG chr2 60482038 60482059 60482043 60482038 -
atgaactggatgttaggtccaa

SEQ ID NO: 222692 - DNA, 22 bp, Artificial Sequence
  Synthetic oligonucleotide; CTG chr2 60482030 60482051 60482035 60482030 -
gatgttaggtccaaaaatgaca

SEQ ID NO: 222693 - DNA, 22 bp, Artificial Sequence
  Synthetic oligonucleotide; TTA chr2 60482023 60482044 60482028 60482023 -
ggtccaaaaatgacaaacaagc

SEQ ID NO: 222694 - DNA, 22 bp, Artificial Sequence
  Synthetic oligonucleotide; CTC chr2 60481997 60482018 60482002 60481997 -
cactgggaaacatcagtccaac

SEQ ID NO: 222695 - DNA, 22 bp, Artificial Sequence
  Synthetic oligonucleotide; CTG chr2 60481992 60482013 60481997 60481992 -
ggaaacatcagtccaacccctt

SEQ ID NO: 222696 - DNA, 22 bp, Artificial Sequence
  Synthetic oligonucleotide; CTT chr2 60481970 60481991 60481975 60481970 -
tcttttgacagcaggactagaa

SEQ ID NO: 222697 - DNA, 22 bp, Artificial Sequence
  Synthetic oligonucleotide; TTT chr2 60481969 60481990 60481974 60481969 -
cttttgacagcaggactagaac

SEQ ID NO: 222698 - DNA, 22 bp, Artificial Sequence
  Synthetic oligonucleotide; TTC chr2 60481968 60481989 60481973 60481968 -
ttttgacagcaggactagaaca

SEQ ID NO: 222699 - DNA, 22 bp, Artificial Sequence
  Synthetic oligonucleotide; CTT chr2 60481966 60481987 60481971 60481966 -
ttgacagcaggactagaacaga

SEQ ID NO: 222700 - DNA, 22 bp, Artificial Sequence
  Synthetic oligonucleotide; TTT chr2 60481965 60481986 60481970 60481965 -
tgacagcaggactagaacagac

SEQ ID NO: 222701 - DNA, 22 bp, Artificial Sequence
  Synthetic oligonucleotide; TTT chr2 60481964 60481985 60481969 60481964 -
gacagcaggactagaacagacc

SEQ ID NO: 222702 - DNA, 22 bp, Artificial Sequence
  Synthetic oligonucleotide; TTG chr2 60481963 60481984 60481968 60481963 -
acagcaggactagaacagacca

SEQ ID NO: 222703 - DNA, 22 bp, Artificial Sequence
  Synthetic oligonucleotide; CTA chr2 60481951 60481972 60481956 60481951 -
gaacagaccagaggttccggag

SEQ ID NO: 222704 - DNA, 22 bp, Artificial Sequence
  Synthetic oligonucleotide; TTC chr2 60481934 60481955 60481939 60481934 -
cggagaaggtctctatacctag

SEQ ID NO: 222705 - DNA, 22 bp, Artificial Sequence
  Synthetic oligonucleotide; CTC chr2 60481921 60481942 60481926 60481921 -
tatacctaggtgggtttcctga

SEQ ID NO: 222706 - DNA, 22 bp, Artificial Sequence
  Synthetic oligonucleotide; CTA chr2 60481919 60481940 60481924 60481919 -
tacctaggtgggtttcctgagc

SEQ ID NO: 222707 - DNA, 22 bp, Artificial Sequence
  Synthetic oligonucleotide; CTA chr2 60481913 60481934 60481918 60481913 -
ggtgggtttcctgagctggaga

SEQ ID NO: 222708 - DNA, 22 bp, Artificial Sequence
  Synthetic oligonucleotide; TTT chr2 60481904 60481925 60481909 60481904 -
cctgagctggagaattttccat

SEQ ID NO: 222709 - DNA, 22 bp, Artificial Sequence
  Synthetic oligonucleotide; TTC chr2 60481903 60481924 60481908 60481903 -
ctgagctggagaattttccatg

SEQ ID NO: 222710 - DNA, 22 bp, Artificial Sequence
  Synthetic oligonucleotide; CTG chr2 60481900 60481921 60481905 60481900 -
agctggagaattttccatgggg

SEQ ID NO: 222711 - DNA, 22 bp, Artificial Sequence
  Synthetic oligonucleotide; CTG chr2 60481895 60481916 60481900 60481895 -
gagaattttccatggggctgtc

SEQ ID NO: 222712 - DNA, 22 bp, Artificial Sequence
  Synthetic oligonucleotide; TTT chr2 60481887 60481908 60481892 60481887 -
tccatggggctgtctgtgtgtt

SEQ ID NO: 222713 - DNA, 22 bp, Artificial Sequence
  Synthetic oligonucleotide; TTT chr2 60481886 60481907 60481891 60481886 -
ccatggggctgtctgtgtgttg

SEQ ID NO: 222714 - DNA, 22 bp, Artificial Sequence
  Synthetic oligonucleotide; TTC chr2 60481885 60481906 60481890 60481885 -
catggggctgtctgtgtgttga

SEQ ID NO: 222715 - DNA, 22 bp, Artificial Sequence
  Synthetic oligonucleotide; CTG chr2 60481875 60481896 60481880 60481875 -
tctgtgtgttgaggcttttccc

SEQ ID NO: 222716 - DNA, 22 bp, Artificial Sequence
  Synthetic oligonucleotide; CTG chr2 60481871 60481892 60481876 60481871 -
tgtgttgaggcttttccccatt

SEQ ID NO: 222717 - DNA, 22 bp, Artificial Sequence
  Synthetic oligonucleotide; TTG chr2 60481864 60481885 60481869 60481864 -
aggcttttccccattcactttc

SEQ ID NO: 222718 - DNA, 22 bp, Artificial Sequence
  Synthetic oligonucleotide; CTT chr2 60481858 60481879 60481863 60481858 -
ttccccattcactttcccaatt

SEQ ID NO: 222719 - DNA, 22 bp, Artificial Sequence
  Synthetic oligonucleotide; TTT chr2 60481857 60481878 60481862 60481857 -
tccccattcactttcccaattc

SEQ ID NO: 222720 - DNA, 22 bp, Artificial Sequence
  Synthetic oligonucleotide; TTT chr2 60481856 60481877 60481861 60481856 -
ccccattcactttcccaattca

SEQ ID NO: 222721 - DNA, 22 bp, Artificial Sequence
  Synthetic oligonucleotide; TTC chr2 60481855 60481876 60481860 60481855 -
cccattcactttcccaattcac

SEQ ID NO: 222722 - DNA, 22 bp, Artificial Sequence
  Synthetic oligonucleotide; TTC chr2 60481848 60481869 60481853 60481848 -
actttcccaattcacttcccag

SEQ ID NO: 222723 - DNA, 22 bp, Artificial Sequence
  Synthetic oligonucleotide; CTT chr2 60481844 60481865 60481849 60481844 -
tcccaattcacttcccagagag

SEQ ID NO: 222724 - DNA, 22 bp, Artificial Sequence
  Synthetic oligonucleotide; TTT chr2 60481843 60481864 60481848 60481843 -
cccaattcacttcccagagagc

SEQ ID NO: 222725 - DNA, 22 bp, Artificial Sequence
  Synthetic oligonucleotide; TTC chr2 60481842 60481863 60481847 60481842 -
ccaattcacttcccagagagca

SEQ ID NO: 222726 - DNA, 22 bp, Artificial Sequence
  Synthetic oligonucleotide; TTC chr2 60481835 60481856 60481840 60481835 -
acttcccagagagcatgctgag

SEQ ID NO: 222727 - DNA, 22 bp, Artificial Sequence
  Synthetic oligonucleotide; CTT chr2 60481831 60481852 60481836 60481831 -
cccagagagcatgctgagctca

SEQ ID NO: 222728 - DNA, 22 bp, Artificial Sequence
  Synthetic oligonucleotide; TTC chr2 60481830 60481851 60481835 60481830 -
ccagagagcatgctgagctcat

SEQ ID NO: 222729 - DNA, 22 bp, Artificial Sequence
  Synthetic oligonucleotide; CTG chr2 60481815 60481836 60481820 60481815 -
agctcattccaggacactgtga

SEQ ID NO: 222730 - DNA, 22 bp, Artificial Sequence
  Synthetic oligonucleotide; CTC chr2 60481810 60481831 60481815 60481810 -
attccaggacactgtgatggtc

SEQ ID NO: 222731 - DNA, 22 bp, Artificial Sequence
  Synthetic oligonucleotide; TTC chr2 60481806 60481827 60481811 60481806 -
caggacactgtgatggtcaaaa

SEQ ID NO: 222732 - DNA, 22 bp, Artificial Sequence
  Synthetic oligonucleotide; CTG chr2 60481796 60481817 60481801 60481796 -
tgatggtcaaaaggctctccca

SEQ ID NO: 222733 - DNA, 22 bp, Artificial Sequence
  Synthetic oligonucleotide; CTC chr2 60481779 60481800 60481784 60481779 -
tcccaccatcacacagaatgta

SEQ ID NO: 222734 - DNA, 22 bp, Artificial Sequence
  Synthetic oligonucleotide; CTC chr2 60481777 60481798 60481782 60481777 -
ccaccatcacacagaatgtact

SEQ ID NO: 222735 - DNA, 22 bp, Artificial Sequence
  Synthetic oligonucleotide; CTA chr2 60481754 60481775 60481759 60481754 -
gggttctgttagaaaattaatc

SEQ ID NO: 222736 - DNA, 22 bp, Artificial Sequence
  Synthetic oligonucleotide; TTC chr2 60481748 60481769 60481753 60481748 -
tgttagaaaattaatctcactt

SEQ ID NO: 222737 - DNA, 22 bp, Artificial Sequence
  Synthetic oligonucleotide; CTG chr2 60481746 60481767 60481751 60481746 -
ttagaaaattaatctcacttgt

SEQ ID NO: 222738 - DNA, 22 bp, Artificial Sequence
  Synthetic oligonucleotide; TTA chr2 60481743 60481764 60481748 60481743 -
gaaaattaatctcacttgtgga

SEQ ID NO: 222739 - DNA, 22 bp, Artificial Sequence
  Synthetic oligonucleotide; TTA chr2 60481735 60481756 60481740 60481735 -
atctcacttgtggaaaaaaaat

SEQ ID NO: 222740 - DNA, 22 bp, Artificial Sequence
  Synthetic oligonucleotide; CTC chr2 60481730 60481751 60481735 60481730 -
acttgtggaaaaaaaatgccct

SEQ ID NO: 222741 - DNA, 22 bp, Artificial Sequence
  Synthetic oligonucleotide; CTT chr2 60481726 60481747 60481731 60481726 -
gtggaaaaaaaatgcccttaaa

SEQ ID NO: 222742 - DNA, 22 bp, Artificial Sequence
  Synthetic oligonucleotide; TTG chr2 60481725 60481746 60481730 60481725 -
tggaaaaaaaatgcccttaaaa

SEQ ID NO: 222743 - DNA, 22 bp, Artificial Sequence
  Synthetic oligonucleotide; CTT chr2 60481707 60481728 60481712 60481707 -
aaaacactggagccctgagttg

SEQ ID NO: 222744 - DNA, 22 bp, Artificial Sequence
  Synthetic oligonucleotide; TTA chr2 60481706 60481727 60481711 60481706 -
aaacactggagccctgagttgt

SEQ ID NO: 222745 - DNA, 22 bp, Artificial Sequence
  Synthetic oligonucleotide; CTG chr2 60481698 60481719 60481703 60481698 -
gagccctgagttgtatgtgctg

SEQ ID NO: 222746 - DNA, 22 bp, Artificial Sequence
  Synthetic oligonucleotide; CTG chr2 60481690 60481711 60481695 60481690 -
agttgtatgtgctggagcatgt

SEQ ID NO: 222747 - DNA, 22 bp, Artificial Sequence
  Synthetic oligonucleotide; TTG chr2 60481685 60481706 60481690 60481685 -
tatgtgctggagcatgtgggga

SEQ ID NO: 222748 - DNA, 22 bp, Artificial Sequence
  Synthetic oligonucleotide; CTG chr2 60481676 60481697 60481681 60481676 -
gagcatgtggggaaaagaaaga

SEQ ID NO: 222749 - DNA, 22 bp, Artificial Sequence
  Synthetic oligonucleotide; TTC chr2 60481612 60481633 60481617 60481612 -
acgagccatggaaatggagaag

SEQ ID NO: 222750 - DNA, 22 bp, Artificial Sequence
  Synthetic oligonucleotide; CTG chr2 60481582 60481603 60481587 60481582 -
tttctgctgcagttgctcttag

SEQ ID NO: 222751 - DNA, 22 bp, Artificial Sequence
  Synthetic oligonucleotide; TTT chr2 60481579 60481600 60481584 60481579 -
ctgctgcagttgctcttagcca

SEQ ID NO: 222752 - DNA, 22 bp, Artificial Sequence
  Synthetic oligonucleotide; TTC chr2 60481578 60481599 60481583 60481578 -
tgctgcagttgctcttagccag

SEQ ID NO: 222753 - DNA, 22 bp, Artificial Sequence
  Synthetic oligonucleotide; CTG chr2 60481576 60481597 60481581 60481576 -
ctgcagttgctcttagccaggg

SEQ ID NO: 222754 - DNA, 22 bp, Artificial Sequence
  Synthetic oligonucleotide; CTG chr2 60481573 60481594 60481578 60481573 -
cagttgctcttagccaggggcc

SEQ ID NO: 222755 - DNA, 22 bp, Artificial Sequence
  Synthetic oligonucleotide; TTG chr2 60481567 60481588 60481572 60481567 -
ctcttagccaggggccagcgtg

SEQ ID NO: 222756 - DNA, 22 bp, Artificial Sequence
  Synthetic oligonucleotide; CTC chr2 60481564 60481585 60481569 60481564 -
ttagccaggggccagcgtggac

SEQ ID NO: 222757 - DNA, 22 bp, Artificial Sequence
  Synthetic oligonucleotide; CTT chr2 60481562 60481583 60481567 60481562 -
agccaggggccagcgtggacag

SEQ ID NO: 222758 - DNA, 22 bp, Artificial Sequence
  Synthetic oligonucleotide; TTA chr2 60481561 60481582 60481566 60481561 -
gccaggggccagcgtggacagc

SEQ ID NO: 222759 - DNA, 22 bp, Artificial Sequence
  Synthetic oligonucleotide; CTG chr2 60481535 60481556 60481540 60481535 -
tcaccttgatccctgtcctcct

SEQ ID NO: 222760 - DNA, 22 bp, Artificial Sequence
  Synthetic oligonucleotide; CTT chr2 60481528 60481549 60481533 60481528 -
gatccctgtcctccttcacctg

SEQ ID NO: 222761 - DNA, 22 bp, Artificial Sequence
  Synthetic oligonucleotide; TTG chr2 60481527 60481548 60481532 60481527 -
atccctgtcctccttcacctgc

SEQ ID NO: 222762 - DNA, 22 bp, Artificial Sequence
  Synthetic oligonucleotide; CTG chr2 60481520 60481541 60481525 60481520 -
tcctccttcacctgccagcttg

SEQ ID NO: 222763 - DNA, 22 bp, Artificial Sequence
  Synthetic oligonucleotide; CTC chr2 60481515 60481536 60481520 60481515 -
cttcacctgccagcttgtgggc

SEQ ID NO: 222764 - DNA, 22 bp, Artificial Sequence
  Synthetic oligonucleotide; CTT chr2 60481512 60481533 60481517 60481512 -
cacctgccagcttgtgggctgg

SEQ ID NO: 222765 - DNA, 22 bp, Artificial Sequence
  Synthetic oligonucleotide; TTC chr2 60481511 60481532 60481516 60481511 -
acctgccagcttgtgggctggg

SEQ ID NO: 222766 - DNA, 22 bp, Artificial Sequence
  Synthetic oligonucleotide; CTG chr2 60481506 60481527 60481511 60481506 -
ccagcttgtgggctgggtggct

SEQ ID NO: 222767 - DNA, 22 bp, Artificial Sequence
  Synthetic oligonucleotide; CTT chr2 60481499 60481520 60481504 60481499 -
gtgggctgggtggcttaagttc

SEQ ID NO: 222768 - DNA, 22 bp, Artificial Sequence
  Synthetic oligonucleotide; TTG chr2 60481498 60481519 60481503 60481498 -
tgggctgggtggcttaagttct

SEQ ID NO: 222769 - DNA, 22 bp, Artificial Sequence
  Synthetic oligonucleotide; CTG chr2 60481491 60481512 60481496 60481491 -
ggtggcttaagttctagccctg

SEQ ID NO: 222770 - DNA, 22 bp, Artificial Sequence
  Synthetic oligonucleotide; CTT chr2 60481483 60481504 60481488 60481483 -
aagttctagccctgggtgaccc

SEQ ID NO: 222771 - DNA, 22 bp, Artificial Sequence
  Synthetic oligonucleotide; TTA chr2 60481482 60481503 60481487 60481482 -
agttctagccctgggtgaccct

SEQ ID NO: 222772 - DNA, 22 bp, Artificial Sequence
  Synthetic oligonucleotide; TTC chr2 60481477 60481498 60481482 60481477 -
tagccctgggtgaccctctgac

SEQ ID NO: 222773 - DNA, 22 bp, Artificial Sequence
  Synthetic oligonucleotide; CTA chr2 60481475 60481496 60481480 60481475 -
gccctgggtgaccctctgactc

SEQ ID NO: 222774 - DNA, 22 bp, Artificial Sequence
  Synthetic oligonucleotide; CTG chr2 60481469 60481490 60481474 60481469 -
ggtgaccctctgactcctgaga

SEQ ID NO: 222775 - DNA, 22 bp, Artificial Sequence
  Synthetic oligonucleotide; CTC chr2 60481459 60481480 60481464 60481459 -
tgactcctgagagcatgtgtat

SEQ ID NO: 222776 - DNA, 22 bp, Artificial Sequence
  Synthetic oligonucleotide; CTG chr2 60481457 60481478 60481462 60481457 -
actcctgagagcatgtgtatgt

SEQ ID NO: 222777 - DNA, 22 bp, Artificial Sequence
  Synthetic oligonucleotide; CTC chr2 60481453 60481474 60481458 60481453 -
ctgagagcatgtgtatgtgctt

SEQ ID NO: 222778 - DNA, 22 bp, Artificial Sequence
  Synthetic oligonucleotide; CTG chr2 60481450 60481471 60481455 60481450 -
agagcatgtgtatgtgcttgtg

SEQ ID NO: 222779 - DNA, 22 bp, Artificial Sequence
  Synthetic oligonucleotide; CTT chr2 60481431 60481452 60481436 60481431 -
gtggtgggtggggtgtagtgcg

SEQ ID NO: 222780 - DNA, 22 bp, Artificial Sequence
  Synthetic oligonucleotide; TTG chr2 60481430 60481451 60481435 60481430 -
tggtgggtggggtgtagtgcgt

SEQ ID NO: 222781 - DNA, 22 bp, Artificial Sequence
  Synthetic oligonucleotide; TTA chr2 60481406 60481427 60481411 60481406 -
aagccgcaaagcagaggtgcga

SEQ ID NO: 222782 - DNA, 22 bp, Artificial Sequence
  Synthetic oligonucleotide; CTG chr2 60481376 60481397 60481381 60481376 -
gtgtaggtcgtgggagacagag

SEQ ID NO: 222783 - DNA, 22 bp, Artificial Sequence
  Synthetic oligonucleotide; CTG chr2 60481343 60481364 60481348 60481343 -
ggttctgaatgtttttactttt

SEQ ID NO: 222784 - DNA, 22 bp, Artificial Sequence
  Synthetic oligonucleotide; TTC chr2 60481338 60481359 60481343 60481338 -
tgaatgtttttacttttcctag

SEQ ID NO: 222785 - DNA, 22 bp, Artificial Sequence
  Synthetic oligonucleotide; CTG chr2 60481336 60481357 60481341 60481336 -
aatgtttttacttttcctagga

SEQ ID NO: 222786 - DNA, 22 bp, Artificial Sequence
  Synthetic oligonucleotide; TTT chr2 60481329 60481350 60481334 60481329 -
ttacttttcctaggatccctgc

SEQ ID NO: 222787 - DNA, 22 bp, Artificial Sequence
  Synthetic oligonucleotide; TTT chr2 60481328 60481349 60481333 60481328 -
tacttttcctaggatccctgct

SEQ ID NO: 222788 - DNA, 22 bp, Artificial Sequence
  Synthetic oligonucleotide; TTT chr2 60481327 60481348 60481332 60481327 -
acttttcctaggatccctgctt

SEQ ID NO: 222789 - DNA, 22 bp, Artificial Sequence
  Synthetic oligonucleotide; TTA chr2 60481326 60481347 60481331 60481326 -
cttttcctaggatccctgcttc

SEQ ID NO: 222790 - DNA, 22 bp, Artificial Sequence
  Synthetic oligonucleotide; CTT chr2 60481323 60481344 60481328 60481323 -
ttcctaggatccctgcttcatt

SEQ ID NO: 222791 - DNA, 22 bp, Artificial Sequence
  Synthetic oligonucleotide; TTT chr2 60481322 60481343 60481327 60481322 -
tcctaggatccctgcttcattt

SEQ ID NO: 222792 - DNA, 22 bp, Artificial Sequence
  Synthetic oligonucleotide; TTT chr2 60481321 60481342 60481326 60481321 -
cctaggatccctgcttcatttt

SEQ ID NO: 222793 - DNA, 22 bp, Artificial Sequence
  Synthetic oligonucleotide; TTC chr2 60481320 60481341 60481325 60481320 -
ctaggatccctgcttcattttt

SEQ ID NO: 222794 - DNA, 22 bp, Artificial Sequence
  Synthetic oligonucleotide; CTA chr2 60481317 60481338 60481322 60481317 -
ggatccctgcttcatttttgtt

SEQ ID NO: 222795 - DNA, 22 bp, Artificial Sequence
  Synthetic oligonucleotide; CTG chr2 60481308 60481329 60481313 60481308 -
cttcatttttgttttcaaggag

SEQ ID NO: 222796 - DNA, 22 bp, Artificial Sequence
  Synthetic oligonucleotide; CTT chr2 60481305 60481326 60481310 60481305 -
catttttgttttcaaggagtta

SEQ ID NO: 222797 - DNA, 22 bp, Artificial Sequence
  Synthetic oligonucleotide; TTC chr2 60481304 60481325 60481309 60481304 -
atttttgttttcaaggagttac

SEQ ID NO: 222798 - DNA, 22 bp, Artificial Sequence
  Synthetic oligonucleotide; TTT chr2 60481300 60481321 60481305 60481300 -
ttgttttcaaggagttacttgt

SEQ ID NO: 222799 - DNA, 22 bp, Artificial Sequence
  Synthetic oligonucleotide; TTT chr2 60481299 60481320 60481304 60481299 -
tgttttcaaggagttacttgtt

SEQ ID NO: 222800 - DNA, 22 bp, Artificial Sequence
  Synthetic oligonucleotide; TTT chr2 60481298 60481319 60481303 60481298 -
gttttcaaggagttacttgttt

SEQ ID NO: 222801 - DNA, 22 bp, Artificial Sequence
  Synthetic oligonucleotide; TTG chr2 60481297 60481318 60481302 60481297 -
ttttcaaggagttacttgtttc

SEQ ID NO: 222802 - DNA, 22 bp, Artificial Sequence
  Synthetic oligonucleotide; TTT chr2 60481294 60481315 60481299 60481294 -
tcaaggagttacttgtttctct

SEQ ID NO: 222803 - DNA, 22 bp, Artificial Sequence
  Synthetic oligonucleotide; TTT chr2 60481293 60481314 60481298 60481293 -
caaggagttacttgtttctctc

SEQ ID NO: 222804 - DNA, 22 bp, Artificial Sequence
  Synthetic oligonucleotide; TTC chr2 60481292 60481313 60481297 60481292 -
aaggagttacttgtttctctct

SEQ ID NO: 222805 - DNA, 22 bp, Artificial Sequence
  Synthetic oligonucleotide; TTA chr2 60481283 60481304 60481288 60481283 -
cttgtttctctcttcttgcctt

SEQ ID NO: 222806 - DNA, 22 bp, Artificial Sequence
  Synthetic oligonucleotide; CTT chr2 60481280 60481301 60481285 60481280 -
gtttctctcttcttgccttcca

SEQ ID NO: 222807 - DNA, 22 bp, Artificial Sequence
  Synthetic oligonucleotide; TTG chr2 60481279 60481300 60481284 60481279 -
tttctctcttcttgccttccag

SEQ ID NO: 222808 - DNA, 22 bp, Artificial Sequence
  Synthetic oligonucleotide; TTT chr2 60481276 60481297 60481281 60481276 -
ctctcttcttgccttccagcat

SEQ ID NO: 222809 - DNA, 22 bp, Artificial Sequence
  Synthetic oligonucleotide; TTC chr2 60481275 60481296 60481280 60481275 -
tctcttcttgccttccagcatg

SEQ ID NO: 222810 - DNA, 22 bp, Artificial Sequence
  Synthetic oligonucleotide; CTC chr2 60481273 60481294 60481278 60481273 -
tcttcttgccttccagcatgtc

SEQ ID NO: 222811 - DNA, 22 bp, Artificial Sequence
  Synthetic oligonucleotide; CTC chr2 60481271 60481292 60481276 60481271 -
ttcttgccttccagcatgtccc

SEQ ID NO: 222812 - DNA, 22 bp, Artificial Sequence
  Synthetic oligonucleotide; CTT chr2 60481269 60481290 60481274 60481269 -
cttgccttccagcatgtcccaa

SEQ ID NO: 222813 - DNA, 22 bp, Artificial Sequence
  Synthetic oligonucleotide; TTC chr2 60481268 60481289 60481273 60481268 -
ttgccttccagcatgtcccaag

SEQ ID NO: 222814 - DNA, 22 bp, Artificial Sequence
  Synthetic oligonucleotide; CTT chr2 60481266 60481287 60481271 60481266 -
gccttccagcatgtcccaagca

SEQ ID NO: 222815 - DNA, 22 bp, Artificial Sequence
  Synthetic oligonucleotide; TTG chr2 60481265 60481286 60481270 60481265 -
ccttccagcatgtcccaagcag

SEQ ID NO: 222816 - DNA, 22 bp, Artificial Sequence
  Synthetic oligonucleotide; CTT chr2 60481261 60481282 60481266 60481261 -
ccagcatgtcccaagcagagat

SEQ ID NO: 222817 - DNA, 22 bp, Artificial Sequence
  Synthetic oligonucleotide; TTC chr2 60481260 60481281 60481265 60481260 -
cagcatgtcccaagcagagatg

SEQ ID NO: 222818 - DNA, 22 bp, Artificial Sequence
  Synthetic oligonucleotide; CTA chr2 60481230 60481251 60481235 60481230 -
ggtttgggaatggggtgctggg

SEQ ID NO: 222819 - DNA, 22 bp, Artificial Sequence
  Synthetic oligonucleotide; TTT chr2 60481225 60481246 60481230 60481225 -
gggaatggggtgctgggagggg

SEQ ID NO: 222820 - DNA, 22 bp, Artificial Sequence
  Synthetic oligonucleotide; TTG chr2 60481224 60481245 60481229 60481224 -
ggaatggggtgctgggagggga

SEQ ID NO: 222821 - DNA, 22 bp, Artificial Sequence
  Synthetic oligonucleotide; CTG chr2 60481210 60481231 60481215 60481210 -
ggaggggaggggatatcccatt

SEQ ID NO: 222822 - DNA, 22 bp, Artificial Sequence
  Synthetic oligonucleotide; TTC chr2 60481187 60481208 60481192 60481187 -
cagggcccttcccagttttggg

SEQ ID NO: 222823 - DNA, 22 bp, Artificial Sequence
  Synthetic oligonucleotide; CTT chr2 60481177 60481198 60481182 60481177 -
cccagttttggggctgggaagc

SEQ ID NO: 222824 - DNA, 22 bp, Artificial Sequence
  Synthetic oligonucleotide; TTC chr2 60481176 60481197 60481181 60481176 -
ccagttttggggctgggaagcc

SEQ ID NO: 222825 - DNA, 22 bp, Artificial Sequence
  Synthetic oligonucleotide; TTT chr2 60481169 60481190 60481174 60481169 -
tggggctgggaagcctcaatct

SEQ ID NO: 222826 - DNA, 22 bp, Artificial Sequence
  Synthetic oligonucleotide; TTT chr2 60481168 60481189 60481173 60481168 -
ggggctgggaagcctcaatctc

SEQ ID NO: 222827 - DNA, 22 bp, Artificial Sequence
  Synthetic oligonucleotide; TTG chr2 60481167 60481188 60481172 60481167 -
gggctgggaagcctcaatctcc

SEQ ID NO: 222828 - DNA, 22 bp, Artificial Sequence
  Synthetic oligonucleotide; CTG chr2 60481161 60481182 60481166 60481161 -
ggaagcctcaatctccttgagc

SEQ ID NO: 222829 - DNA, 22 bp, Artificial Sequence
  Synthetic oligonucleotide; CTC chr2 60481152 60481173 60481157 60481152 -
aatctccttgagcacagcaggg

SEQ ID NO: 222830 - DNA, 22 bp, Artificial Sequence
  Synthetic oligonucleotide; CTC chr2 60481146 60481167 60481151 60481146 -
cttgagcacagcagggctttgc

SEQ ID NO: 222831 - DNA, 22 bp, Artificial Sequence
  Synthetic oligonucleotide; CTT chr2 60481143 60481164 60481148 60481143 -
gagcacagcagggctttgcctt

SEQ ID NO: 222832 - DNA, 22 bp, Artificial Sequence
  Synthetic oligonucleotide; TTG chr2 60481142 60481163 60481147 60481142 -
agcacagcagggctttgccttc

SEQ ID NO: 222833 - DNA, 22 bp, Artificial Sequence
  Synthetic oligonucleotide; CTT chr2 60481127 60481148 60481132 60481127 -
tgccttctttcttccctgagct

SEQ ID NO: 222834 - DNA, 22 bp, Artificial Sequence
  Synthetic oligonucleotide; TTT chr2 60481126 60481147 60481131 60481126 -
gccttctttcttccctgagctg

SEQ ID NO: 222835 - DNA, 22 bp, Artificial Sequence
  Synthetic oligonucleotide; TTG chr2 60481125 60481146 60481130 60481125 -
ccttctttcttccctgagctgc

SEQ ID NO: 222836 - DNA, 22 bp, Artificial Sequence
  Synthetic oligonucleotide; CTT chr2 60481121 60481142 60481126 60481121 -
ctttcttccctgagctgcggcc

SEQ ID NO: 222837 - DNA, 22 bp, Artificial Sequence
  Synthetic oligonucleotide; TTC chr2 60481120 60481141 60481125 60481120 -
tttcttccctgagctgcggcca

SEQ ID NO: 222838 - DNA, 22 bp, Artificial Sequence
  Synthetic oligonucleotide; CTT chr2 60481118 60481139 60481123 60481118 -
tcttccctgagctgcggccacc

SEQ ID NO: 222839 - DNA, 22 bp, Artificial Sequence
  Synthetic oligonucleotide; TTT chr2 60481117 60481138 60481122 60481117 -
cttccctgagctgcggccacca

SEQ ID NO: 222840 - DNA, 22 bp, Artificial Sequence
  Synthetic oligonucleotide; TTC chr2 60481116 60481137 60481121 60481116 -
ttccctgagctgcggccaccac

SEQ ID NO: 222841 - DNA, 22 bp, Artificial Sequence
  Synthetic oligonucleotide; CTT chr2 60481114 60481135 60481119 60481114 -
ccctgagctgcggccaccactg

SEQ ID NO: 222842 - DNA, 22 bp, Artificial Sequence
  Synthetic oligonucleotide; TTC chr2 60481113 60481134 60481118 60481113 -
cctgagctgcggccaccactgg

SEQ ID NO: 222843 - DNA, 22 bp, Artificial Sequence
  Synthetic oligonucleotide; CTG chr2 60481109 60481130 60481114 60481109 -
agctgcggccaccactgggctg

SEQ ID NO: 222844 - DNA, 22 bp, Artificial Sequence
  Synthetic oligonucleotide; CTG chr2 60481104 60481125 60481109 60481104 -
cggccaccactgggctgtacca

SEQ ID NO: 222845 - DNA, 22 bp, Artificial Sequence
  Synthetic oligonucleotide; CTG chr2 60481092 60481113 60481097 60481092 -
ggctgtaccaggatctagtgca

SEQ ID NO: 222846 - DNA, 22 bp, Artificial Sequence
  Synthetic oligonucleotide; CTG chr2 60481087 60481108 60481092 60481087 -
taccaggatctagtgcaacttg

SEQ ID NO: 222847 - DNA, 22 bp, Artificial Sequence
  Synthetic oligonucleotide; CTA chr2 60481075 60481096 60481080 60481075 -
gtgcaacttgggtgacaaggtg

SEQ ID NO: 222848 - DNA, 22 bp, Artificial Sequence
  Synthetic oligonucleotide; CTT chr2 60481066 60481087 60481071 60481066 -
gggtgacaaggtgtgggtggct

SEQ ID NO: 222849 - DNA, 22 bp, Artificial Sequence
  Synthetic oligonucleotide; TTG chr2 60481065 60481086 60481070 60481065 -
ggtgacaaggtgtgggtggctg

SEQ ID NO: 222850 - DNA, 22 bp, Artificial Sequence
  Synthetic oligonucleotide; CTG chr2 60481043 60481064 60481048 60481043 -
caggtgttctccctgcatctga

SEQ ID NO: 222851 - DNA, 22 bp, Artificial Sequence
  Synthetic oligonucleotide; TTC chr2 60481034 60481055 60481039 60481034 -
tccctgcatctgaggcagggag

SEQ ID NO: 222852 - DNA, 22 bp, Artificial Sequence
  Synthetic oligonucleotide; CTC chr2 60481032 60481053 60481037 60481032 -
cctgcatctgaggcagggaggc

SEQ ID NO: 222853 - DNA, 22 bp, Artificial Sequence
  Synthetic oligonucleotide; CTG chr2 60481028 60481049 60481033 60481028 -
catctgaggcagggaggcagct

SEQ ID NO: 222854 - DNA, 22 bp, Artificial Sequence
  Synthetic oligonucleotide; CTG chr2 60481022 60481043 60481027 60481022 -
aggcagggaggcagctgggggc

SEQ ID NO: 222855 - DNA, 22 bp, Artificial Sequence
  Synthetic oligonucleotide; CTG chr2 60481005 60481026 60481010 60481005 -
ggggcttccagccagcctgtaa

SEQ ID NO: 222856 - DNA, 22 bp, Artificial Sequence
  Synthetic oligonucleotide; CTT chr2 60480998 60481019 60481003 60480998 -
ccagccagcctgtaatgcccct

SEQ ID NO: 222857 - DNA, 22 bp, Artificial Sequence
  Synthetic oligonucleotide; TTC chr2 60480997 60481018 60481002 60480997 -
cagccagcctgtaatgcccctc

SEQ ID NO: 222858 - DNA, 22 bp, Artificial Sequence
  Synthetic oligonucleotide; CTG chr2 60480986 60481007 60480991 60480986 -
taatgcccctcccaggtctagc

SEQ ID NO: 222859 - DNA, 22 bp, Artificial Sequence
  Synthetic oligonucleotide; CTC chr2 60480975 60480996 60480980 60480975 -
ccaggtctagcttcctagcctt

SEQ ID NO: 222860 - DNA, 22 bp, Artificial Sequence
  Synthetic oligonucleotide; CTA chr2 60480966 60480987 60480971 60480966 -
gcttcctagccttatttttaag

SEQ ID NO: 222861 - DNA, 22 bp, Artificial Sequence
  Synthetic oligonucleotide; CTT chr2 60480962 60480983 60480967 60480962 -
cctagccttatttttaagccct

SEQ ID NO: 222862 - DNA, 22 bp, Artificial Sequence
  Synthetic oligonucleotide; TTC chr2 60480961 60480982 60480966 60480961 -
ctagccttatttttaagccctt

SEQ ID NO: 222863 - DNA, 22 bp, Artificial Sequence
  Synthetic oligonucleotide; CTA chr2 60480958 60480979 60480963 60480958 -
gccttatttttaagccctttta

SEQ ID NO: 222864 - DNA, 22 bp, Artificial Sequence
  Synthetic oligonucleotide; CTT chr2 60480953 60480974 60480958 60480953 -
atttttaagcccttttagtgga

SEQ ID NO: 222865 - DNA, 22 bp, Artificial Sequence
  Synthetic oligonucleotide; TTA chr2 60480952 60480973 60480957 60480952 -
tttttaagcccttttagtggag

SEQ ID NO: 222866 - DNA, 22 bp, Artificial Sequence
  Synthetic oligonucleotide; TTT chr2 60480949 60480970 60480954 60480949 -
ttaagcccttttagtggagcaa

SEQ ID NO: 222867 - DNA, 22 bp, Artificial Sequence
  Synthetic oligonucleotide; TTT chr2 60480948 60480969 60480953 60480948 -
taagcccttttagtggagcaaa

SEQ ID NO: 222868 - DNA, 22 bp, Artificial Sequence
  Synthetic oligonucleotide; TTT chr2 60480947 60480968 60480952 60480947 -
aagcccttttagtggagcaaaa

SEQ ID NO: 222869 - DNA, 22 bp, Artificial Sequence
  Synthetic oligonucleotide; TTA chr2 60480946 60480967 60480951 60480946 -
agcccttttagtggagcaaaaa

SEQ ID NO: 222870 - DNA, 22 bp, Artificial Sequence
  Synthetic oligonucleotide; CTT chr2 60480939 60480960 60480944 60480939 -
ttagtggagcaaaaactattta

SEQ ID NO: 222871 - DNA, 22 bp, Artificial Sequence
  Synthetic oligonucleotide; TTT chr2 60480938 60480959 60480943 60480938 -
tagtggagcaaaaactatttag

SEQ ID NO: 222872 - DNA, 22 bp, Artificial Sequence
  Synthetic oligonucleotide; TTT chr2 60480937 60480958 60480942 60480937 -
agtggagcaaaaactatttaga

SEQ ID NO: 222873 - DNA, 22 bp, Artificial Sequence
  Synthetic oligonucleotide; TTA chr2 60480936 60480957 60480941 60480936 -
gtggagcaaaaactatttagaa

SEQ ID NO: 222874 - DNA, 22 bp, Artificial Sequence
  Synthetic oligonucleotide; CTA chr2 60480921 60480942 60480926 60480921 -
tttagaactatgagttcaaaaa

SEQ ID NO: 222875 - DNA, 22 bp, Artificial Sequence
  Synthetic oligonucleotide; TTT chr2 60480918 60480939 60480923 60480918 -
agaactatgagttcaaaaatag

SEQ ID NO: 222876 - DNA, 22 bp, Artificial Sequence
  Synthetic oligonucleotide; TTA chr2 60480917 60480938 60480922 60480917 -
gaactatgagttcaaaaatagg

SEQ ID NO: 222877 - DNA, 22 bp, Artificial Sequence
  Synthetic oligonucleotide; CTA chr2 60480911 60480932 60480916 60480911 -
tgagttcaaaaataggattatt

SEQ ID NO: 222878 - DNA, 22 bp, Artificial Sequence
  Synthetic oligonucleotide; TTC chr2 60480904 60480925 60480909 60480904 -
aaaaataggattattcaagcgg

SEQ ID NO: 222879 - DNA, 22 bp, Artificial Sequence
  Synthetic oligonucleotide; TTA chr2 60480891 60480912 60480896 60480891 -
ttcaagcggaggtacttcacac

SEQ ID NO: 222880 - DNA, 22 bp, Artificial Sequence
  Synthetic oligonucleotide; TTC chr2 60480888 60480909 60480893 60480888 -
aagcggaggtacttcacactgt

SEQ ID NO: 222881 - DNA, 22 bp, Artificial Sequence
  Synthetic oligonucleotide; CTT chr2 60480874 60480895 60480879 60480874 -
cacactgttctttctcttggga

SEQ ID NO: 222882 - DNA, 22 bp, Artificial Sequence
  Synthetic oligonucleotide; TTC chr2 60480873 60480894 60480878 60480873 -
acactgttctttctcttgggac

SEQ ID NO: 222883 - DNA, 22 bp, Artificial Sequence
  Synthetic oligonucleotide; CTG chr2 60480867 60480888 60480872 60480867 -
ttctttctcttgggacagagat

SEQ ID NO: 222884 - DNA, 22 bp, Artificial Sequence
  Synthetic oligonucleotide; TTC chr2 60480864 60480885 60480869 60480864 -
tttctcttgggacagagatggg

SEQ ID NO: 222885 - DNA, 22 bp, Artificial Sequence
  Synthetic oligonucleotide; CTT chr2 60480862 60480883 60480867 60480862 -
tctcttgggacagagatggggg

SEQ ID NO: 222886 - DNA, 22 bp, Artificial Sequence
  Synthetic oligonucleotide; TTT chr2 60480861 60480882 60480866 60480861 -
ctcttgggacagagatgggggt

SEQ ID NO: 222887 - DNA, 22 bp, Artificial Sequence
  Synthetic oligonucleotide; TTC chr2 60480860 60480881 60480865 60480860 -
tcttgggacagagatgggggtg

SEQ ID NO: 222888 - DNA, 22 bp, Artificial Sequence
  Synthetic oligonucleotide; CTC chr2 60480858 60480879 60480863 60480858 -
ttgggacagagatgggggtgca

SEQ ID NO: 222889 - DNA, 22 bp, Artificial Sequence
  Synthetic oligonucleotide; CTT chr2 60480856 60480877 60480861 60480856 -
gggacagagatgggggtgcagg

SEQ ID NO: 222890 - DNA, 22 bp, Artificial Sequence
  Synthetic oligonucleotide; TTG chr2 60480855 60480876 60480860 60480855 -
ggacagagatgggggtgcaggt

SEQ ID NO: 222891 - DNA, 22 bp, Artificial Sequence
  Synthetic oligonucleotide; TTG chr2 60480799 60480820 60480804 60480799 -
ctaaaacaaattgagagaggaa

SEQ ID NO: 222892 - DNA, 22 bp, Artificial Sequence
  Synthetic oligonucleotide; CTA chr2 60480796 60480817 60480801 60480796 -
aaacaaattgagagaggaagga

SEQ ID NO: 222893 - DNA, 22 bp, Artificial Sequence
  Synthetic oligonucleotide; TTG chr2 60480786 60480807 60480791 60480786 -
agagaggaaggaagaaagggac

SEQ ID NO: 222894 - DNA, 22 bp, Artificial Sequence
  Synthetic oligonucleotide; CTA chr2 60480756 60480777 60480761 60480756 -
gtaattgagaccaattcaccag

SEQ ID NO: 222895 - DNA, 22 bp, Artificial Sequence
  Synthetic oligonucleotide; TTG chr2 60480749 60480770 60480754 60480749 -
agaccaattcaccagaagactt

SEQ ID NO: 222896 - DNA, 22 bp, Artificial Sequence
  Synthetic oligonucleotide; TTC chr2 60480739 60480760 60480744 60480739 -
accagaagacttaaggaaattt

SEQ ID NO: 222897 - DNA, 22 bp, Artificial Sequence
  Synthetic oligonucleotide; CTT chr2 60480727 60480748 60480732 60480727 -
aaggaaatttgacatccgctgt

SEQ ID NO: 222898 - DNA, 22 bp, Artificial Sequence
  Synthetic oligonucleotide; TTA chr2 60480726 60480747 60480731 60480726 -
aggaaatttgacatccgctgta

SEQ ID NO: 222899 - DNA, 22 bp, Artificial Sequence
  Synthetic oligonucleotide; TTT chr2 60480717 60480738 60480722 60480717 -
gacatccgctgtagctctttta

SEQ ID NO: 222900 - DNA, 22 bp, Artificial Sequence
  Synthetic oligonucleotide; TTG chr2 60480716 60480737 60480721 60480716 -
acatccgctgtagctcttttaa

SEQ ID NO: 222901 - DNA, 22 bp, Artificial Sequence
  Synthetic oligonucleotide; CTG chr2 60480706 60480727 60480711 60480706 -
tagctcttttaactgtgtaatt

SEQ ID NO: 222902 - DNA, 22 bp, Artificial Sequence
  Synthetic oligonucleotide; CTC chr2 60480700 60480721 60480705 60480700 -
ttttaactgtgtaattacacag

SEQ ID NO: 222903 - DNA, 22 bp, Artificial Sequence
  Synthetic oligonucleotide; CTT chr2 60480698 60480719 60480703 60480698 -
ttaactgtgtaattacacagca

SEQ ID NO: 222904 - DNA, 22 bp, Artificial Sequence
  Synthetic oligonucleotide; TTT chr2 60480697 60480718 60480702 60480697 -
taactgtgtaattacacagcat

SEQ ID NO: 222905 - DNA, 22 bp, Artificial Sequence
  Synthetic oligonucleotide; TTT chr2 60480696 60480717 60480701 60480696 -
aactgtgtaattacacagcatt

SEQ ID NO: 222906 - DNA, 22 bp, Artificial Sequence
  Synthetic oligonucleotide; TTA chr2 60480695 60480716 60480700 60480695 -
actgtgtaattacacagcattt

SEQ ID NO: 222907 - DNA, 22 bp, Artificial Sequence
  Synthetic oligonucleotide; CTG chr2 60480691 60480712 60480696 60480691 -
tgtaattacacagcatttggaa

SEQ ID NO: 222908 - DNA, 22 bp, Artificial Sequence
  Synthetic oligonucleotide; TTA chr2 60480683 60480704 60480688 60480683 -
cacagcatttggaaagtgaatg

SEQ ID NO: 222909 - DNA, 22 bp, Artificial Sequence
  Synthetic oligonucleotide; TTT chr2 60480673 60480694 60480678 60480673 -
ggaaagtgaatgattaacctga

SEQ ID NO: 222910 - DNA, 22 bp, Artificial Sequence
  Synthetic oligonucleotide; TTG chr2 60480672 60480693 60480677 60480672 -
gaaagtgaatgattaacctgat

SEQ ID NO: 222911 - DNA, 22 bp, Artificial Sequence
  Synthetic oligonucleotide; TTA chr2 60480657 60480678 60480662 60480657 -
acctgattgtccataacaacca

SEQ ID NO: 222912 - DNA, 22 bp, Artificial Sequence
  Synthetic oligonucleotide; CTG chr2 60480652 60480673 60480657 60480652 -
attgtccataacaaccattgag

SEQ ID NO: 222913 - DNA, 22 bp, Artificial Sequence
  Synthetic oligonucleotide; TTG chr2 60480648 60480669 60480653 60480648 -
tccataacaaccattgagtaaa

SEQ ID NO: 222914 - DNA, 22 bp, Artificial Sequence
  Synthetic oligonucleotide; TTG chr2 60480632 60480653 60480637 60480632 -
agtaaatacactattacagatt

SEQ ID NO: 222915 - DNA, 22 bp, Artificial Sequence
  Synthetic oligonucleotide; CTA chr2 60480619 60480640 60480624 60480619 -
ttacagattgccaaaatagtac

SEQ ID NO: 222916 - DNA, 22 bp, Artificial Sequence
  Synthetic oligonucleotide; TTA chr2 60480616 60480637 60480621 60480616 -
cagattgccaaaatagtacagt

SEQ ID NO: 222917 - DNA, 22 bp, Artificial Sequence
  Synthetic oligonucleotide; TTG chr2 60480609 60480630 60480614 60480609 -
ccaaaatagtacagtgaagcga

SEQ ID NO: 222918 - DNA, 22 bp, Artificial Sequence
  Synthetic oligonucleotide; CTT chr2 60480570 60480591 60480575 60480570 -
tcaaggggctgtaatcctctcc

SEQ ID NO: 222919 - DNA, 22 bp, Artificial Sequence
  Synthetic oligonucleotide; TTT chr2 60480569 60480590 60480574 60480569 -
caaggggctgtaatcctctcct

SEQ ID NO: 222920 - DNA, 22 bp, Artificial Sequence
  Synthetic oligonucleotide; TTC chr2 60480568 60480589 60480573 60480568 -
aaggggctgtaatcctctcctg

SEQ ID NO: 222921 - DNA, 22 bp, Artificial Sequence
  Synthetic oligonucleotide; CTG chr2 60480559 60480580 60480564 60480559 -
taatcctctcctgggtcaaggc

SEQ ID NO: 222922 - DNA, 22 bp, Artificial Sequence
  Synthetic oligonucleotide; CTC chr2 60480551 60480572 60480556 60480551 -
tcctgggtcaaggctgacccag

SEQ ID NO: 222923 - DNA, 22 bp, Artificial Sequence
  Synthetic oligonucleotide; CTC chr2 60480549 60480570 60480554 60480549 -
ctgggtcaaggctgacccagag

SEQ ID NO: 222924 - DNA, 22 bp, Artificial Sequence
  Synthetic oligonucleotide; CTG chr2 60480546 60480567 60480551 60480546 -
ggtcaaggctgacccagaggct

SEQ ID NO: 222925 - DNA, 22 bp, Artificial Sequence
  Synthetic oligonucleotide; CTG chr2 60480535 60480556 60480540 60480535 -
acccagaggctccttggttagt

SEQ ID NO: 222926 - DNA, 22 bp, Artificial Sequence
  Synthetic oligonucleotide; CTC chr2 60480523 60480544 60480528 60480523 -
cttggttagtgaatcatttact

SEQ ID NO: 222927 - DNA, 22 bp, Artificial Sequence
  Synthetic oligonucleotide; CTT chr2 60480520 60480541 60480525 60480520 -
ggttagtgaatcatttactagg

SEQ ID NO: 222928 - DNA, 22 bp, Artificial Sequence
  Synthetic oligonucleotide; TTG chr2 60480519 60480540 60480524 60480519 -
gttagtgaatcatttactaggg

SEQ ID NO: 222929 - DNA, 22 bp, Artificial Sequence
  Synthetic oligonucleotide; TTA chr2 60480515 60480536 60480520 60480515 -
gtgaatcatttactagggaagg

SEQ ID NO: 222930 - DNA, 22 bp, Artificial Sequence
  Synthetic oligonucleotide; TTT chr2 60480504 60480525 60480509 60480504 -
actagggaaggtttcccctggt

SEQ ID NO: 222931 - DNA, 22 bp, Artificial Sequence
  Synthetic oligonucleotide; TTA chr2 60480503 60480524 60480508 60480503 -
ctagggaaggtttcccctggtc

SEQ ID NO: 222932 - DNA, 22 bp, Artificial Sequence
  Synthetic oligonucleotide; CTA chr2 60480500 60480521 60480505 60480500 -
gggaaggtttcccctggtcact

SEQ ID NO: 222933 - DNA, 22 bp, Artificial Sequence
  Synthetic oligonucleotide; TTT chr2 60480490 60480511 60480495 60480490 -
cccctggtcactgctggctcca

SEQ ID NO: 222934 - DNA, 22 bp, Artificial Sequence
  Synthetic oligonucleotide; TTC chr2 60480489 60480510 60480494 60480489 -
ccctggtcactgctggctccat

SEQ ID NO: 222935 - DNA, 22 bp, Artificial Sequence
  Synthetic oligonucleotide; CTG chr2 60480484 60480505 60480489 60480484 -
gtcactgctggctccatggcct

SEQ ID NO: 222936 - DNA, 22 bp, Artificial Sequence
  Synthetic oligonucleotide; CTG chr2 60480477 60480498 60480482 60480477 -
ctggctccatggcctggtcctt

SEQ ID NO: 222937 - DNA, 22 bp, Artificial Sequence
  Synthetic oligonucleotide; CTG chr2 60480474 60480495 60480479 60480474 -
gctccatggcctggtccttcca

SEQ ID NO: 222938 - DNA, 22 bp, Artificial Sequence
  Synthetic oligonucleotide; CTC chr2 60480470 60480491 60480475 60480470 -
catggcctggtccttccagcca

SEQ ID NO: 222939 - DNA, 22 bp, Artificial Sequence
  Synthetic oligonucleotide; CTG chr2 60480461 60480482 60480466 60480461 -
gtccttccagccaggtcattta

SEQ ID NO: 222940 - DNA, 22 bp, Artificial Sequence
  Synthetic oligonucleotide; CTT chr2 60480455 60480476 60480460 60480455 -
ccagccaggtcatttagaatgg

SEQ ID NO: 222941 - DNA, 22 bp, Artificial Sequence
  Synthetic oligonucleotide; TTC chr2 60480454 60480475 60480459 60480454 -
cagccaggtcatttagaatggc

SEQ ID NO: 222942 - DNA, 22 bp, Artificial Sequence
  Synthetic oligonucleotide; TTT chr2 60480440 60480461 60480445 60480440 -
agaatggctctccaacaggaag

SEQ ID NO: 222943 - DNA, 22 bp, Artificial Sequence
  Synthetic oligonucleotide; TTA chr2 60480439 60480460 60480444 60480439 -
gaatggctctccaacaggaaga

SEQ ID NO: 222944 - DNA, 22 bp, Artificial Sequence
  Synthetic oligonucleotide; CTC chr2 60480430 60480451 60480435 60480430 -
tccaacaggaagaaaagttcac

SEQ ID NO: 222945 - DNA, 22 bp, Artificial Sequence
  Synthetic oligonucleotide; CTC chr2 60480428 60480449 60480433 60480428 -
caacaggaagaaaagttcactg

SEQ ID NO: 222946 - DNA, 22 bp, Artificial Sequence
  Synthetic oligonucleotide; TTC chr2 60480410 60480431 60480415 60480410 -
actgcacagcgcttgaatccta

SEQ ID NO: 222947 - DNA, 22 bp, Artificial Sequence
  Synthetic oligonucleotide; CTG chr2 60480406 60480427 60480411 60480406 -
cacagcgcttgaatcctaatta

SEQ ID NO: 222948 - DNA, 22 bp, Artificial Sequence
  Synthetic oligonucleotide; CTT chr2 60480396 60480417 60480401 60480396 -
gaatcctaattatttattgagg

SEQ ID NO: 222949 - DNA, 22 bp, Artificial Sequence
  Synthetic oligonucleotide; TTG chr2 60480395 60480416 60480400 60480395 -
aatcctaattatttattgaggg

SEQ ID NO: 222950 - DNA, 22 bp, Artificial Sequence
  Synthetic oligonucleotide; CTA chr2 60480388 60480409 60480393 60480388 -
attatttattgaggggctcttc

SEQ ID NO: 222951 - DNA, 22 bp, Artificial Sequence
  Synthetic oligonucleotide; TTA chr2 60480384 60480405 60480389 60480384 -
tttattgaggggctcttctttg

SEQ ID NO: 222952 - DNA, 22 bp, Artificial Sequence
  Synthetic oligonucleotide; TTT chr2 60480381 60480402 60480386 60480381 -
attgaggggctcttctttgccc

SEQ ID NO: 222953 - DNA, 22 bp, Artificial Sequence
  Synthetic oligonucleotide; TTA chr2 60480380 60480401 60480385 60480380 -
ttgaggggctcttctttgccca

SEQ ID NO: 222954 - DNA, 22 bp, Artificial Sequence
  Synthetic oligonucleotide; TTG chr2 60480377 60480398 60480382 60480377 -
aggggctcttctttgcccagca

SEQ ID NO: 222955 - DNA, 22 bp, Artificial Sequence
  Synthetic oligonucleotide; CTC chr2 60480369 60480390 60480374 60480369 -
ttctttgcccagcatggtgctg

SEQ ID NO: 222956 - DNA, 22 bp, Artificial Sequence
  Synthetic oligonucleotide; CTT chr2 60480367 60480388 60480372 60480367 -
ctttgcccagcatggtgctgga

SEQ ID NO: 222957 - DNA, 22 bp, Artificial Sequence
  Synthetic oligonucleotide; TTC chr2 60480366 60480387 60480371 60480366 -
tttgcccagcatggtgctggac

SEQ ID NO: 222958 - DNA, 22 bp, Artificial Sequence
  Synthetic oligonucleotide; CTT chr2 60480364 60480385 60480369 60480364 -
tgcccagcatggtgctggacag

SEQ ID NO: 222959 - DNA, 22 bp, Artificial Sequence
  Synthetic oligonucleotide; TTT chr2 60480363 60480384 60480368 60480363 -
gcccagcatggtgctggacagt

SEQ ID NO: 222960 - DNA, 22 bp, Artificial Sequence
  Synthetic oligonucleotide; TTG chr2 60480362 60480383 60480367 60480362 -
cccagcatggtgctggacagtc

SEQ ID NO: 222961 - DNA, 22 bp, Artificial Sequence
  Synthetic oligonucleotide; CTG chr2 60480347 60480368 60480352 60480347 -
gacagtcagaggtagaccactg

SEQ ID NO: 222962 - DNA, 22 bp, Artificial Sequence
  Synthetic oligonucleotide; CTG chr2 60480325 60480346 60480330 60480325 -
agtcttggttcttagaagcctt

SEQ ID NO: 222963 - DNA, 22 bp, Artificial Sequence
  Synthetic oligonucleotide; CTT chr2 60480319 60480340 60480324 60480319 -
ggttcttagaagccttgaactt

SEQ ID NO: 222964 - DNA, 22 bp, Artificial Sequence
  Synthetic oligonucleotide; TTG chr2 60480318 60480339 60480323 60480318 -
gttcttagaagccttgaacttt

SEQ ID NO: 222965 - DNA, 22 bp, Artificial Sequence
  Synthetic oligonucleotide; TTC chr2 60480314 60480335 60480319 60480314 -
ttagaagccttgaacttttagt

SEQ ID NO: 222966 - DNA, 22 bp, Artificial Sequence
  Synthetic oligonucleotide; CTT chr2 60480312 60480333 60480317 60480312 -
agaagccttgaacttttagttg

SEQ ID NO: 222967 - DNA, 22 bp, Artificial Sequence
  Synthetic oligonucleotide; TTA chr2 60480311 60480332 60480316 60480311 -
gaagccttgaacttttagttgg

SEQ ID NO: 222968 - DNA, 22 bp, Artificial Sequence
  Synthetic oligonucleotide; CTT chr2 60480303 60480324 60480308 60480303 -
gaacttttagttggagaaccag

SEQ ID NO: 222969 - DNA, 22 bp, Artificial Sequence
  Synthetic oligonucleotide; TTG chr2 60480302 60480323 60480307 60480302 -
aacttttagttggagaaccagt

SEQ ID NO: 222970 - DNA, 22 bp, Artificial Sequence
  Synthetic oligonucleotide; CTT chr2 60480297 60480318 60480302 60480297 -
ttagttggagaaccagtggtag

SEQ ID NO: 222971 - DNA, 22 bp, Artificial Sequence
  Synthetic oligonucleotide; TTT chr2 60480296 60480317 60480301 60480296 -
tagttggagaaccagtggtaga

SEQ ID NO: 222972 - DNA, 22 bp, Artificial Sequence
  Synthetic oligonucleotide; TTT chr2 60480295 60480316 60480300 60480295 -
agttggagaaccagtggtagat

SEQ ID NO: 222973 - DNA, 22 bp, Artificial Sequence
  Synthetic oligonucleotide; TTA chr2 60480294 60480315 60480299 60480294 -
gttggagaaccagtggtagata

SEQ ID NO: 222974 - DNA, 22 bp, Artificial Sequence
  Synthetic oligonucleotide; TTG chr2 60480290 60480311 60480295 60480290 -
gagaaccagtggtagatacatg

SEQ ID NO: 222975 - DNA, 22 bp, Artificial Sequence
  Synthetic oligonucleotide; CTG chr2 60480265 60480286 60480270 60480265 -
attacagggagacttggatcca

SEQ ID NO: 222976 - DNA, 22 bp, Artificial Sequence
  Synthetic oligonucleotide; TTA chr2 60480261 60480282 60480266 60480261 -
cagggagacttggatccaggag

SEQ ID NO: 222977 - DNA, 22 bp, Artificial Sequence
  Synthetic oligonucleotide; CTT chr2 60480250 60480271 60480255 60480250 -
ggatccaggagaaatggagtgg

SEQ ID NO: 222978 - DNA, 22 bp, Artificial Sequence
  Synthetic oligonucleotide; TTG chr2 60480249 60480270 60480254 60480249 -
gatccaggagaaatggagtgga

SEQ ID NO: 222979 - DNA, 22 bp, Artificial Sequence
  Synthetic oligonucleotide; TTC chr2 60480216 60480237 60480221 60480216 -
agaagagagacatatcctttac

SEQ ID NO: 222980 - DNA, 22 bp, Artificial Sequence
  Synthetic oligonucleotide; CTT chr2 60480197 60480218 60480202 60480197 -
tacaggcctttgtgttacctag

SEQ ID NO: 222981 - DNA, 22 bp, Artificial Sequence
  Synthetic oligonucleotide; TTT chr2 60480196 60480217 60480201 60480196 -
acaggcctttgtgttacctagc

SEQ ID NO: 222982 - DNA, 22 bp, Artificial Sequence
  Synthetic oligonucleotide; TTA chr2 60480195 60480216 60480200 60480195 -
caggcctttgtgttacctagcc

SEQ ID NO: 222983 - DNA, 22 bp, Artificial Sequence
  Synthetic oligonucleotide; CTT chr2 60480187 60480208 60480192 60480187 -
tgtgttacctagccagtgcctt

SEQ ID NO: 222984 - DNA, 22 bp, Artificial Sequence
  Synthetic oligonucleotide; TTT chr2 60480186 60480207 60480191 60480186 -
gtgttacctagccagtgccttc

SEQ ID NO: 222985 - DNA, 22 bp, Artificial Sequence
  Synthetic oligonucleotide; TTG chr2 60480185 60480206 60480190 60480185 -
tgttacctagccagtgccttca

SEQ ID NO: 222986 - DNA, 22 bp, Artificial Sequence
  Synthetic oligonucleotide; TTA chr2 60480180 60480201 60480185 60480180 -
cctagccagtgccttcatgtcc

SEQ ID NO: 222987 - DNA, 22 bp, Artificial Sequence
  Synthetic oligonucleotide; CTA chr2 60480176 60480197 60480181 60480176 -
gccagtgccttcatgtccccag

SEQ ID NO: 222988 - DNA, 22 bp, Artificial Sequence
  Synthetic oligonucleotide; CTT chr2 60480165 60480186 60480170 60480165 -
catgtccccagccccctggcct

SEQ ID NO: 222989 - DNA, 22 bp, Artificial Sequence
  Synthetic oligonucleotide; TTC chr2 60480164 60480185 60480169 60480164 -
atgtccccagccccctggcctc

SEQ ID NO: 222990 - DNA, 22 bp, Artificial Sequence
  Synthetic oligonucleotide; CTG chr2 60480147 60480168 60480152 60480147 -
gcctccagctcctccaccccca

SEQ ID NO: 222991 - DNA, 22 bp, Artificial Sequence
  Synthetic oligonucleotide; CTC chr2 60480142 60480163 60480147 60480142 -
cagctcctccacccccaccttc

SEQ ID NO: 222992 - DNA, 22 bp, Artificial Sequence
  Synthetic oligonucleotide; CTC chr2 60480136 60480157 60480141 60480136 -
ctccacccccaccttcccccct

SEQ ID NO: 222993 - DNA, 22 bp, Artificial Sequence
  Synthetic oligonucleotide; CTC chr2 60480133 60480154 60480138 60480133 -
cacccccaccttcccccctcct

SEQ ID NO: 222994 - DNA, 22 bp, Artificial Sequence
  Synthetic oligonucleotide; CTT chr2 60480121 60480142 60480126 60480121 -
cccccctcctcgctgtccttgg

SEQ ID NO: 222995 - DNA, 22 bp, Artificial Sequence
  Synthetic oligonucleotide; TTC chr2 60480120 60480141 60480125 60480120 -
ccccctcctcgctgtccttggt

SEQ ID NO: 222996 - DNA, 22 bp, Artificial Sequence
  Synthetic oligonucleotide; CTC chr2 60480113 60480134 60480118 60480113 -
ctcgctgtccttggtgcagagt

SEQ ID NO: 222997 - DNA, 22 bp, Artificial Sequence
  Synthetic oligonucleotide; CTC chr2 60480110 60480131 60480115 60480110 -
gctgtccttggtgcagagtggg

SEQ ID NO: 222998 - DNA, 22 bp, Artificial Sequence
  Synthetic oligonucleotide; CTG chr2 60480106 60480127 60480111 60480106 -
tccttggtgcagagtggggcag

SEQ ID NO: 222999 - DNA, 22 bp, Artificial Sequence
  Synthetic oligonucleotide; CTT chr2 60480101 60480122 60480106 60480101 -
ggtgcagagtggggcagtcatc

SEQ ID NO: 223000 - DNA, 22 bp, Artificial Sequence
  Synthetic oligonucleotide; TTG chr2 60480100 60480121 60480105 60480100 -
gtgcagagtggggcagtcatct

SEQ ID NO: 223001 - DNA, 22 bp, Artificial Sequence
  Synthetic oligonucleotide; CTC chr2 60480077 60480098 60480082 60480077 -
agtggggcctcctcccggggaa

SEQ ID NO: 223002 - DNA, 22 bp, Artificial Sequence
  Synthetic oligonucleotide; CTC chr2 60480066 60480087 60480071 60480066 -
ctcccggggaagtccacagctt

SEQ ID NO: 223003 - DNA, 22 bp, Artificial Sequence
  Synthetic oligonucleotide; CTC chr2 60480063 60480084 60480068 60480063 -
ccggggaagtccacagcttgct

SEQ ID NO: 223004 - DNA, 22 bp, Artificial Sequence
  Synthetic oligonucleotide; CTT chr2 60480044 60480065 60480049 60480044 -
gctccacaccggaggagccgcc

SEQ ID NO: 223005 - DNA, 22 bp, Artificial Sequence
  Synthetic oligonucleotide; TTG chr2 60480043 60480064 60480048 60480043 -
ctccacaccggaggagccgcca

SEQ ID NO: 223006 - DNA, 22 bp, Artificial Sequence
  Synthetic oligonucleotide; CTC chr2 60480040 60480061 60480045 60480040 -
cacaccggaggagccgccaaag

SEQ ID NO: 223007 - DNA, 22 bp, Artificial Sequence
  Synthetic oligonucleotide; TTT chr2 60479978 60479999 60479983 60479978 -
aacaaaagcagcttttgagtga

SEQ ID NO: 223008 - DNA, 22 bp, Artificial Sequence
  Synthetic oligonucleotide; TTA chr2 60479977 60479998 60479982 60479977 -
acaaaagcagcttttgagtgag

SEQ ID NO: 223009 - DNA, 22 bp, Artificial Sequence
  Synthetic oligonucleotide; CTT chr2 60479964 60479985 60479969 60479964 -
ttgagtgagaaagctgagtgga

SEQ ID NO: 223010 - DNA, 22 bp, Artificial Sequence
  Synthetic oligonucleotide; TTT chr2 60479963 60479984 60479968 60479963 -
tgagtgagaaagctgagtggag

SEQ ID NO: 223011 - DNA, 22 bp, Artificial Sequence
  Synthetic oligonucleotide; TTT chr2 60479962 60479983 60479967 60479962 -
gagtgagaaagctgagtggagt

SEQ ID NO: 223012 - DNA, 22 bp, Artificial Sequence
  Synthetic oligonucleotide; TTG chr2 60479961 60479982 60479966 60479961 -
agtgagaaagctgagtggagtt

SEQ ID NO: 223013 - DNA, 22 bp, Artificial Sequence
  Synthetic oligonucleotide; CTG chr2 60479948 60479969 60479953 60479948 -
agtggagttgtcccaacctgtc

SEQ ID NO: 223014 - DNA, 22 bp, Artificial Sequence
  Synthetic oligonucleotide; TTG chr2 60479938 60479959 60479943 60479938 -
tcccaacctgtcaacttcagat

SEQ ID NO: 223015 - DNA, 22 bp, Artificial Sequence
  Synthetic oligonucleotide; CTG chr2 60479928 60479949 60479933 60479928 -
tcaacttcagatttctttcctc

SEQ ID NO: 223016 - DNA, 22 bp, Artificial Sequence
  Synthetic oligonucleotide; CTT chr2 60479921 60479942 60479926 60479921 -
cagatttctttcctcctcccca

SEQ ID NO: 223017 - DNA, 22 bp, Artificial Sequence
  Synthetic oligonucleotide; TTC chr2 60479920 60479941 60479925 60479920 -
agatttctttcctcctccccat

SEQ ID NO: 223018 - DNA, 22 bp, Artificial Sequence
  Synthetic oligonucleotide; TTT chr2 60479914 60479935 60479919 60479914 -
ctttcctcctccccataaatca

SEQ ID NO: 223019 - DNA, 22 bp, Artificial Sequence
  Synthetic oligonucleotide; TTC chr2 60479913 60479934 60479918 60479913 -
tttcctcctccccataaatcaa

SEQ ID NO: 223020 - DNA, 22 bp, Artificial Sequence
  Synthetic oligonucleotide; CTT chr2 60479911 60479932 60479916 60479911 -
tcctcctccccataaatcaaaa

SEQ ID NO: 223021 - DNA, 22 bp, Artificial Sequence
  Synthetic oligonucleotide; TTT chr2 60479910 60479931 60479915 60479910 -
cctcctccccataaatcaaaaa

SEQ ID NO: 223022 - DNA, 22 bp, Artificial Sequence
  Synthetic oligonucleotide; TTC chr2 60479909 60479930 60479914 60479909 -
ctcctccccataaatcaaaaaa

SEQ ID NO: 223023 - DNA, 22 bp, Artificial Sequence
  Synthetic oligonucleotide; CTC chr2 60479906 60479927 60479911 60479906 -
ctccccataaatcaaaaaacgg

SEQ ID NO: 223024 - DNA, 22 bp, Artificial Sequence
  Synthetic oligonucleotide; CTC chr2 60479903 60479924 60479908 60479903 -
cccataaatcaaaaaacggttg

SEQ ID NO: 223025 - DNA, 22 bp, Artificial Sequence
  Synthetic oligonucleotide; TTG chr2 60479881 60479902 60479886 60479881 -
gtggaagggagggacagaagcg

SEQ ID NO: 223026 - DNA, 22 bp, Artificial Sequence
  Synthetic oligonucleotide; TTT chr2 60479856 60479877 60479861 60479856 -
cattttcagattttgtaagaaa

SEQ ID NO: 223027 - DNA, 22 bp, Artificial Sequence
  Synthetic oligonucleotide; TTC chr2 60479855 60479876 60479860 60479855 -
attttcagattttgtaagaaaa

SEQ ID NO: 223028 - DNA, 22 bp, Artificial Sequence
  Synthetic oligonucleotide; TTT chr2 60479851 60479872 60479856 60479851 -
tcagattttgtaagaaaataaa

SEQ ID NO: 223029 - DNA, 22 bp, Artificial Sequence
  Synthetic oligonucleotide; TTT chr2 60479850 60479871 60479855 60479850 -
cagattttgtaagaaaataaaa

SEQ ID NO: 223030 - DNA, 22 bp, Artificial Sequence
  Synthetic oligonucleotide; TTC chr2 60479849 60479870 60479854 60479849 -
agattttgtaagaaaataaaat

SEQ ID NO: 223031 - DNA, 22 bp, Artificial Sequence
  Synthetic oligonucleotide; TTT chr2 60479843 60479864 60479848 60479843 -
tgtaagaaaataaaataaaatc

SEQ ID NO: 223032 - DNA, 22 bp, Artificial Sequence
  Synthetic oligonucleotide; TTT chr2 60479842 60479863 60479847 60479842 -
gtaagaaaataaaataaaatca

SEQ ID NO: 223033 - DNA, 22 bp, Artificial Sequence
  Synthetic oligonucleotide; TTG chr2 60479841 60479862 60479846 60479841 -
taagaaaataaaataaaatcaa

SEQ ID NO: 223034 - DNA, 22 bp, Artificial Sequence
  Synthetic oligonucleotide; CTG chr2 60479810 60479831 60479815 60479810 -
tcccacgctgataccttacatg

SEQ ID NO: 223035 - DNA, 22 bp, Artificial Sequence
  Synthetic oligonucleotide; CTG chr2 60479800 60479821 60479805 60479800 -
ataccttacatgccaggtttga

SEQ ID NO: 223036 - DNA, 22 bp, Artificial Sequence
  Synthetic oligonucleotide; CTT chr2 60479793 60479814 60479798 60479793 -
acatgccaggtttgagcctgag

SEQ ID NO: 223037 - DNA, 22 bp, Artificial Sequence
  Synthetic oligonucleotide; TTA chr2 60479792 60479813 60479797 60479792 -
catgccaggtttgagcctgagg

SEQ ID NO: 223038 - DNA, 22 bp, Artificial Sequence
  Synthetic oligonucleotide; TTT chr2 60479780 60479801 60479785 60479780 -
gagcctgaggcaaatttttgtg

SEQ ID NO: 223039 - DNA, 22 bp, Artificial Sequence
  Synthetic oligonucleotide; TTG chr2 60479779 60479800 60479784 60479779 -
agcctgaggcaaatttttgtgg

SEQ ID NO: 223040 - DNA, 22 bp, Artificial Sequence
  Synthetic oligonucleotide; CTG chr2 60479773 60479794 60479778 60479773 -
aggcaaatttttgtggccatgt

SEQ ID NO: 223041 - DNA, 22 bp, Artificial Sequence
  Synthetic oligonucleotide; TTT chr2 60479763 60479784 60479768 60479763 -
ttgtggccatgtaataagcctc

SEQ ID NO: 223042 - DNA, 22 bp, Artificial Sequence
  Synthetic oligonucleotide; TTT chr2 60479762 60479783 60479767 60479762 -
tgtggccatgtaataagcctct

SEQ ID NO: 223043 - DNA, 22 bp, Artificial Sequence
  Synthetic oligonucleotide; TTT chr2 60479761 60479782 60479766 60479761 -
gtggccatgtaataagcctctt

SEQ ID NO: 223044 - DNA, 22 bp, Artificial Sequence
  Synthetic oligonucleotide; TTG chr2 60479760 60479781 60479765 60479760 -
tggccatgtaataagcctcttt

SEQ ID NO: 223045 - DNA, 22 bp, Artificial Sequence
  Synthetic oligonucleotide; CTC chr2 60479741 60479762 60479746 60479741 -
tttaaaatggtgacagaccctt

SEQ ID NO: 223046 - DNA, 22 bp, Artificial Sequence
  Synthetic oligonucleotide; CTT chr2 60479739 60479760 60479744 60479739 -
taaaatggtgacagacccttga

SEQ ID NO: 223047 - DNA, 22 bp, Artificial Sequence
  Synthetic oligonucleotide; TTT chr2 60479738 60479759 60479743 60479738 -
aaaatggtgacagacccttgac

SEQ ID NO: 223048 - DNA, 22 bp, Artificial Sequence
  Synthetic oligonucleotide; TTA chr2 60479737 60479758 60479742 60479737 -
aaatggtgacagacccttgact

SEQ ID NO: 223049 - DNA, 22 bp, Artificial Sequence
  Synthetic oligonucleotide; CTT chr2 60479719 60479740 60479724 60479719 -
gactctttgccttgaattacat

SEQ ID NO: 223050 - DNA, 22 bp, Artificial Sequence
  Synthetic oligonucleotide; TTG chr2 60479718 60479739 60479723 60479718 -
actctttgccttgaattacatt

SEQ ID NO: 223051 - DNA, 22 bp, Artificial Sequence
  Synthetic oligonucleotide; CTC chr2 60479714 60479735 60479719 60479714 -
tttgccttgaattacattgata

SEQ ID NO: 223052 - DNA, 22 bp, Artificial Sequence
  Synthetic oligonucleotide; CTT chr2 60479712 60479733 60479717 60479712 -
tgccttgaattacattgataaa

SEQ ID NO: 223053 - DNA, 22 bp, Artificial Sequence
  Synthetic oligonucleotide; TTT chr2 60479711 60479732 60479716 60479711 -
gccttgaattacattgataaaa

SEQ ID NO: 223054 - DNA, 22 bp, Artificial Sequence
  Synthetic oligonucleotide; TTG chr2 60479710 60479731 60479715 60479710 -
ccttgaattacattgataaaag

SEQ ID NO: 223055 - DNA, 22 bp, Artificial Sequence
  Synthetic oligonucleotide; CTT chr2 60479706 60479727 60479711 60479706 -
gaattacattgataaaagacat

SEQ ID NO: 223056 - DNA, 22 bp, Artificial Sequence
  Synthetic oligonucleotide; TTG chr2 60479705 60479726 60479710 60479705 -
aattacattgataaaagacatt

SEQ ID NO: 223057 - DNA, 22 bp, Artificial Sequence
  Synthetic oligonucleotide; TTA chr2 60479700 60479721 60479705 60479700 -
cattgataaaagacattttatt

SEQ ID NO: 223058 - DNA, 22 bp, Artificial Sequence
  Synthetic oligonucleotide; TTG chr2 60479695 60479716 60479700 60479695 -
ataaaagacattttattgcatt

SEQ ID NO: 223059 - DNA, 22 bp, Artificial Sequence
  Synthetic oligonucleotide; TTT chr2 60479682 60479703 60479687 60479682 -
tattgcattagagctggggcag

SEQ ID NO: 223060 - DNA, 22 bp, Artificial Sequence
  Synthetic oligonucleotide; TTT chr2 60479681 60479702 60479686 60479681 -
attgcattagagctggggcagg

SEQ ID NO: 223061 - DNA, 22 bp, Artificial Sequence
  Synthetic oligonucleotide; TTA chr2 60479680 60479701 60479685 60479680 -
ttgcattagagctggggcagga

SEQ ID NO: 223062 - DNA, 22 bp, Artificial Sequence
  Synthetic oligonucleotide; TTG chr2 60479677 60479698 60479682 60479677 -
cattagagctggggcaggagta

SEQ ID NO: 223063 - DNA, 22 bp, Artificial Sequence
  Synthetic oligonucleotide; TTA chr2 60479672 60479693 60479677 60479672 -
gagctggggcaggagtacagga

SEQ ID NO: 223064 - DNA, 22 bp, Artificial Sequence
  Synthetic oligonucleotide; CTG chr2 60479666 60479687 60479671 60479666 -
gggcaggagtacaggacggttc

SEQ ID NO: 223065 - DNA, 22 bp, Artificial Sequence
  Synthetic oligonucleotide; TTC chr2 60479644 60479665 60479649 60479644 -
ttgcctggtcggcctctttgaa

SEQ ID NO: 223066 - DNA, 22 bp, Artificial Sequence
  Synthetic oligonucleotide; CTT chr2 60479642 60479663 60479647 60479642 -
gcctggtcggcctctttgaaac

SEQ ID NO: 223067 - DNA, 22 bp, Artificial Sequence
  Synthetic oligonucleotide; TTG chr2 60479641 60479662 60479646 60479641 -
cctggtcggcctctttgaaacc

SEQ ID NO: 223068 - DNA, 22 bp, Artificial Sequence
  Synthetic oligonucleotide; CTG chr2 60479637 60479658 60479642 60479637 -
gtcggcctctttgaaaccgcgt

SEQ ID NO: 223069 - DNA, 22 bp, Artificial Sequence
  Synthetic oligonucleotide; CTC chr2 60479628 60479649 60479633 60479628 -
tttgaaaccgcgtcagcctgcc

SEQ ID NO: 223070 - DNA, 22 bp, Artificial Sequence
  Synthetic oligonucleotide; CTT chr2 60479626 60479647 60479631 60479626 -
tgaaaccgcgtcagcctgccgt

SEQ ID NO: 223071 - DNA, 22 bp, Artificial Sequence
  Synthetic oligonucleotide; TTT chr2 60479625 60479646 60479630 60479625 -
gaaaccgcgtcagcctgccgtc

SEQ ID NO: 223072 - DNA, 22 bp, Artificial Sequence
  Synthetic oligonucleotide; TTG chr2 60479624 60479645 60479629 60479624 -
aaaccgcgtcagcctgccgtcc

SEQ ID NO: 223073 - DNA, 22 bp, Artificial Sequence
  Synthetic oligonucleotide; CTG chr2 60479608 60479629 60479613 60479608 -
ccgtccacactctccaccgcct

SEQ ID NO: 223074 - DNA, 22 bp, Artificial Sequence
  Synthetic oligonucleotide; CTC chr2 60479596 60479617 60479601 60479596 -
tccaccgcctgacagggtttga

SEQ ID NO: 223075 - DNA, 22 bp, Artificial Sequence
  Synthetic oligonucleotide; CTC chr2 60479594 60479615 60479599 60479594 -
caccgcctgacagggtttgagt

SEQ ID NO: 223076 - DNA, 22 bp, Artificial Sequence
  Synthetic oligonucleotide; CTG chr2 60479585 60479606 60479590 60479585 -
acagggtttgagtgcgatggca

SEQ ID NO: 223077 - DNA, 22 bp, Artificial Sequence
  Synthetic oligonucleotide; TTT chr2 60479576 60479597 60479581 60479576 -
gagtgcgatggcagctgagatc

SEQ ID NO: 223078 - DNA, 22 bp, Artificial Sequence
  Synthetic oligonucleotide; TTG chr2 60479575 60479596 60479580 60479575 -
agtgcgatggcagctgagatct

SEQ ID NO: 223079 - DNA, 22 bp, Artificial Sequence
  Synthetic oligonucleotide; CTG chr2 60479559 60479580 60479564 60479559 -
agatctgtgggccggtgacaga

SEQ ID NO: 223080 - DNA, 22 bp, Artificial Sequence
  Synthetic oligonucleotide; CTG chr2 60479552 60479573 60479557 60479552 -
tgggccggtgacagagggggct

SEQ ID NO: 223081 - DNA, 22 bp, Artificial Sequence
  Synthetic oligonucleotide; CTT chr2 60479529 60479550 60479534 60479529 -
tctacccagcagtagaaggttg

SEQ ID NO: 223082 - DNA, 22 bp, Artificial Sequence
  Synthetic oligonucleotide; TTT chr2 60479528 60479549 60479533 60479528 -
ctacccagcagtagaaggttga

SEQ ID NO: 223083 - DNA, 22 bp, Artificial Sequence
  Synthetic oligonucleotide; TTC chr2 60479527 60479548 60479532 60479527 -
tacccagcagtagaaggttgag

SEQ ID NO: 223084 - DNA, 22 bp, Artificial Sequence
  Synthetic oligonucleotide; CTA chr2 60479525 60479546 60479530 60479525 -
cccagcagtagaaggttgaggc

SEQ ID NO: 223085 - DNA, 22 bp, Artificial Sequence
  Synthetic oligonucleotide; TTG chr2 60479507 60479528 60479512 60479507 -
aggccctggaagcaaaaggatt

SEQ ID NO: 223086 - DNA, 22 bp, Artificial Sequence
  Synthetic oligonucleotide; CTG chr2 60479499 60479520 60479504 60479499 -
gaagcaaaaggatttcagcctg

SEQ ID NO: 223087 - DNA, 22 bp, Artificial Sequence
  Synthetic oligonucleotide; TTT chr2 60479484 60479505 60479489 60479484 -
cagcctgaggggcttgttaagg

SEQ ID NO: 223088 - DNA, 22 bp, Artificial Sequence
  Synthetic oligonucleotide; TTC chr2 60479483 60479504 60479488 60479483 -
agcctgaggggcttgttaaggg

SEQ ID NO: 223089 - DNA, 22 bp, Artificial Sequence
  Synthetic oligonucleotide; CTG chr2 60479477 60479498 60479482 60479477 -
aggggcttgttaagggagagtt

SEQ ID NO: 223090 - DNA, 22 bp, Artificial Sequence
  Synthetic oligonucleotide; CTT chr2 60479469 60479490 60479474 60479469 -
gttaagggagagttattctttc

SEQ ID NO: 223091 - DNA, 22 bp, Artificial Sequence
  Synthetic oligonucleotide; TTG chr2 60479468 60479489 60479473 60479468 -
ttaagggagagttattctttcc

SEQ ID NO: 223092 - DNA, 22 bp, Artificial Sequence
  Synthetic oligonucleotide; TTA chr2 60479465 60479486 60479470 60479465 -
agggagagttattctttcctgt

SEQ ID NO: 223093 - DNA, 22 bp, Artificial Sequence
  Synthetic oligonucleotide; TTA chr2 60479454 60479475 60479459 60479454 -
ttctttcctgttcctagtagac

SEQ ID NO: 223094 - DNA, 22 bp, Artificial Sequence
  Synthetic oligonucleotide; TTC chr2 60479451 60479472 60479456 60479451 -
tttcctgttcctagtagacctg

SEQ ID NO: 223095 - DNA, 22 bp, Artificial Sequence
  Synthetic oligonucleotide; CTT chr2 60479449 60479470 60479454 60479449 -
tcctgttcctagtagacctgag

SEQ ID NO: 223096 - DNA, 22 bp, Artificial Sequence
  Synthetic oligonucleotide; TTT chr2 60479448 60479469 60479453 60479448 -
cctgttcctagtagacctgaga

SEQ ID NO: 223097 - DNA, 22 bp, Artificial Sequence
  Synthetic oligonucleotide; TTC chr2 60479447 60479468 60479452 60479447 -
ctgttcctagtagacctgagag

SEQ ID NO: 223098 - DNA, 22 bp, Artificial Sequence
  Synthetic oligonucleotide; CTG chr2 60479444 60479465 60479449 60479444 -
ttcctagtagacctgagagagc

SEQ ID NO: 223099 - DNA, 22 bp, Artificial Sequence
  Synthetic oligonucleotide; TTC chr2 60479441 60479462 60479446 60479441 -
ctagtagacctgagagagcttg

SEQ ID NO: 223100 - DNA, 22 bp, Artificial Sequence
  Synthetic oligonucleotide; CTA chr2 60479438 60479459 60479443 60479438 -
gtagacctgagagagcttgacg

SEQ ID NO: 223101 - DNA, 22 bp, Artificial Sequence
  Synthetic oligonucleotide; CTG chr2 60479429 60479450 60479434 60479429 -
agagagcttgacgttggtggcc

SEQ ID NO: 223102 - DNA, 22 bp, Artificial Sequence
  Synthetic oligonucleotide; CTT chr2 60479420 60479441 60479425 60479420 -
gacgttggtggcctctggtcag

SEQ ID NO: 223103 - DNA, 22 bp, Artificial Sequence
  Synthetic oligonucleotide; TTG chr2 60479419 60479440 60479424 60479419 -
acgttggtggcctctggtcagc

SEQ ID NO: 223104 - DNA, 22 bp, Artificial Sequence
  Synthetic oligonucleotide; TTG chr2 60479413 60479434 60479418 60479413 -
gtggcctctggtcagcctcatg

SEQ ID NO: 223105 - DNA, 22 bp, Artificial Sequence
  Synthetic oligonucleotide; CTC chr2 60479405 60479426 60479410 60479405 -
tggtcagcctcatggttgggac

SEQ ID NO: 223106 - DNA, 22 bp, Artificial Sequence
  Synthetic oligonucleotide; CTG chr2 60479403 60479424 60479408 60479403 -
gtcagcctcatggttgggactg

SEQ ID NO: 223107 - DNA, 22 bp, Artificial Sequence
  Synthetic oligonucleotide; CTC chr2 60479394 60479415 60479399 60479394 -
atggttgggactgcgtggaaat

SEQ ID NO: 223108 - DNA, 22 bp, Artificial Sequence
  Synthetic oligonucleotide; TTG chr2 60479387 60479408 60479392 60479387 -
ggactgcgtggaaatgctagac

SEQ ID NO: 223109 - DNA, 22 bp, Artificial Sequence
  Synthetic oligonucleotide; CTG chr2 60479381 60479402 60479386 60479381 -
cgtggaaatgctagacctgaga

SEQ ID NO: 223110 - DNA, 22 bp, Artificial Sequence
  Synthetic oligonucleotide; CTA chr2 60479368 60479389 60479373 60479368 -
gacctgagagacctcatttccc

SEQ ID NO: 223111 - DNA, 22 bp, Artificial Sequence
  Synthetic oligonucleotide; CTG chr2 60479362 60479383 60479367 60479362 -
agagacctcatttcccaagcag

SEQ ID NO: 223112 - DNA, 22 bp, Artificial Sequence
  Synthetic oligonucleotide; CTC chr2 60479353 60479374 60479358 60479353 -
atttcccaagcagtcttagaga

SEQ ID NO: 223113 - DNA, 22 bp, Artificial Sequence
  Synthetic oligonucleotide; TTT chr2 60479349 60479370 60479354 60479349 -
cccaagcagtcttagagagact

SEQ ID NO: 223114 - DNA, 22 bp, Artificial Sequence
  Synthetic oligonucleotide; TTC chr2 60479348 60479369 60479353 60479348 -
ccaagcagtcttagagagactc

SEQ ID NO: 223115 - DNA, 22 bp, Artificial Sequence
  Synthetic oligonucleotide; CTT chr2 60479336 60479357 60479341 60479336 -
agagagactcaaaacaaaaaat

SEQ ID NO: 223116 - DNA, 22 bp, Artificial Sequence
  Synthetic oligonucleotide; TTA chr2 60479335 60479356 60479340 60479335 -
gagagactcaaaacaaaaaatg

SEQ ID NO: 223117 - DNA, 22 bp, Artificial Sequence
  Synthetic oligonucleotide; CTC chr2 60479326 60479347 60479331 60479326 -
aaaacaaaaaatggtctccggg

SEQ ID NO: 223118 - DNA, 22 bp, Artificial Sequence
  Synthetic oligonucleotide; CTC chr2 60479308 60479329 60479313 60479308 -
cgggtcccaccgtggtgtgtgg

SEQ ID NO: 223119 - DNA, 22 bp, Artificial Sequence
  Synthetic oligonucleotide; CTG chr2 60479280 60479301 60479285 60479280 -
tgcccgcagaggccaggtgtcc

SEQ ID NO: 223120 - DNA, 22 bp, Artificial Sequence
  Synthetic oligonucleotide; CTG chr2 60479250 60479271 60479255 60479250 -
agtccccacgtggacctgctag

SEQ ID NO: 223121 - DNA, 22 bp, Artificial Sequence
  Synthetic oligonucleotide; CTG chr2 60479232 60479253 60479237 60479232 -
ctaggtgggtagaaaggagttg

SEQ ID NO: 223122 - DNA, 22 bp, Artificial Sequence
  Synthetic oligonucleotide; CTA chr2 60479229 60479250 60479234 60479229 -
ggtgggtagaaaggagttgaag

SEQ ID NO: 223123 - DNA, 22 bp, Artificial Sequence
  Synthetic oligonucleotide; TTG chr2 60479210 60479231 60479215 60479210 -
aagatgttgtgctgttggttgg

SEQ ID NO: 223124 - DNA, 22 bp, Artificial Sequence
  Synthetic oligonucleotide; TTG chr2 60479201 60479222 60479206 60479201 -
tgctgttggttggaggagcttg

SEQ ID NO: 223125 - DNA, 22 bp, Artificial Sequence
  Synthetic oligonucleotide; CTG chr2 60479196 60479217 60479201 60479196 -
ttggttggaggagcttggaggt

SEQ ID NO: 223126 - DNA, 22 bp, Artificial Sequence
  Synthetic oligonucleotide; TTG chr2 60479193 60479214 60479198 60479193 -
gttggaggagcttggaggtgtc

SEQ ID NO: 223127 - DNA, 22 bp, Artificial Sequence
  Synthetic oligonucleotide; TTG chr2 60479189 60479210 60479194 60479189 -
gaggagcttggaggtgtctggg

SEQ ID NO: 223128 - DNA, 22 bp, Artificial Sequence
  Synthetic oligonucleotide; CTT chr2 60479180 60479201 60479185 60479180 -
ggaggtgtctgggaacattgga

SEQ ID NO: 223129 - DNA, 22 bp, Artificial Sequence
  Synthetic oligonucleotide; TTG chr2 60479179 60479200 60479184 60479179 -
gaggtgtctgggaacattggat

SEQ ID NO: 223130 - DNA, 22 bp, Artificial Sequence
  Synthetic oligonucleotide; CTG chr2 60479169 60479190 60479174 60479169 -
ggaacattggatgttactcata

SEQ ID NO: 223131 - DNA, 22 bp, Artificial Sequence
  Synthetic oligonucleotide; TTG chr2 60479160 60479181 60479165 60479160 -
gatgttactcatatggaatcag

SEQ ID NO: 223132 - DNA, 22 bp, Artificial Sequence
  Synthetic oligonucleotide; TTA chr2 60479153 60479174 60479158 60479153 -
ctcatatggaatcagcagaatt

SEQ ID NO: 223133 - DNA, 22 bp, Artificial Sequence
  Synthetic oligonucleotide; CTC chr2 60479150 60479171 60479155 60479150 -
atatggaatcagcagaattagt

SEQ ID NO: 223134 - DNA, 22 bp, Artificial Sequence
  Synthetic oligonucleotide; TTA chr2 60479130 60479151 60479135 60479130 -
gtagagccaagaacagacggca

SEQ ID NO: 223135 - DNA, 22 bp, Artificial Sequence
  Synthetic oligonucleotide; CTG chr2 60479089 60479110 60479094 60479089 -
gactgaggctgctccaatgatg

SEQ ID NO: 223136 - DNA, 22 bp, Artificial Sequence
  Synthetic oligonucleotide; CTG chr2 60479084 60479105 60479089 60479084 -
aggctgctccaatgatggcagg

SEQ ID NO: 223137 - DNA, 22 bp, Artificial Sequence
  Synthetic oligonucleotide; CTG chr2 60479078 60479099 60479083 60479078 -
ctccaatgatggcaggttgtat

SEQ ID NO: 223138 - DNA, 22 bp, Artificial Sequence
  Synthetic oligonucleotide; CTC chr2 60479075 60479096 60479080 60479075 -
caatgatggcaggttgtatctg

SEQ ID NO: 223139 - DNA, 22 bp, Artificial Sequence
  Synthetic oligonucleotide; TTG chr2 60479059 60479080 60479064 60479059 -
tatctgcgggcatctccaattt

SEQ ID NO: 223140 - DNA, 22 bp, Artificial Sequence
  Synthetic oligonucleotide; CTG chr2 60479053 60479074 60479058 60479053 -
cgggcatctccaatttgctcag

SEQ ID NO: 223141 - DNA, 22 bp, Artificial Sequence
  Synthetic oligonucleotide; CTC chr2 60479043 60479064 60479048 60479043 -
caatttgctcagggaactcttt

SEQ ID NO: 223142 - DNA, 22 bp, Artificial Sequence
  Synthetic oligonucleotide; TTT chr2 60479037 60479058 60479042 60479037 -
gctcagggaactctttccagat

SEQ ID NO: 223143 - DNA, 22 bp, Artificial Sequence
  Synthetic oligonucleotide; TTG chr2 60479036 60479057 60479041 60479036 -
ctcagggaactctttccagatt

SEQ ID NO: 223144 - DNA, 22 bp, Artificial Sequence
  Synthetic oligonucleotide; CTC chr2 60479033 60479054 60479038 60479033 -
agggaactctttccagattggt

SEQ ID NO: 223145 - DNA, 22 bp, Artificial Sequence
  Synthetic oligonucleotide; CTC chr2 60479024 60479045 60479029 60479024 -
tttccagattggtcagtggtat

SEQ ID NO: 223146 - DNA, 22 bp, Artificial Sequence
  Synthetic oligonucleotide; CTT chr2 60479022 60479043 60479027 60479022 -
tccagattggtcagtggtataa

SEQ ID NO: 223147 - DNA, 22 bp, Artificial Sequence
  Synthetic oligonucleotide; TTT chr2 60479021 60479042 60479026 60479021 -
ccagattggtcagtggtataaa

SEQ ID NO: 223148 - DNA, 22 bp, Artificial Sequence
  Synthetic oligonucleotide; TTC chr2 60479020 60479041 60479025 60479020 -
cagattggtcagtggtataaat

SEQ ID NO: 223149 - DNA, 22 bp, Artificial Sequence
  Synthetic oligonucleotide; TTG chr2 60479013 60479034 60479018 60479013 -
gtcagtggtataaatgaaggat

SEQ ID NO: 223150 - DNA, 22 bp, Artificial Sequence
  Synthetic oligonucleotide; TTA chr2 60478989 60479010 60478994 60478989 -
ggaaattgggtaaaaagccagg

SEQ ID NO: 223151 - DNA, 22 bp, Artificial Sequence
  Synthetic oligonucleotide; TTG chr2 60478981 60479002 60478986 60478981 -
ggtaaaaagccagggaggaggg

SEQ ID NO: 223152 - DNA, 22 bp, Artificial Sequence
  Synthetic oligonucleotide; CTG chr2 60478915 60478936 60478920 60478915 -
tgttttgttctgtgggactttg

SEQ ID NO: 223153 - DNA, 22 bp, Artificial Sequence
  Synthetic oligonucleotide; TTT chr2 60478910 60478931 60478915 60478910 -
tgttctgtgggactttgccaga

SEQ ID NO: 223154 - DNA, 22 bp, Artificial Sequence
  Synthetic oligonucleotide; TTT chr2 60478909 60478930 60478914 60478909 -
gttctgtgggactttgccagag

SEQ ID NO: 223155 - DNA, 22 bp, Artificial Sequence
  Synthetic oligonucleotide; TTG chr2 60478908 60478929 60478913 60478908 -
ttctgtgggactttgccagaga

SEQ ID NO: 223156 - DNA, 22 bp, Artificial Sequence
  Synthetic oligonucleotide; TTC chr2 60478905 60478926 60478910 60478905 -
tgtgggactttgccagagagat

SEQ ID NO: 223157 - DNA, 22 bp, Artificial Sequence
  Synthetic oligonucleotide; CTG chr2 60478903 60478924 60478908 60478903 -
tgggactttgccagagagatga

SEQ ID NO: 223158 - DNA, 22 bp, Artificial Sequence
  Synthetic oligonucleotide; CTT chr2 60478895 60478916 60478900 60478895 -
tgccagagagatgaggactgag

SEQ ID NO: 223159 - DNA, 22 bp, Artificial Sequence
  Synthetic oligonucleotide; TTT chr2 60478894 60478915 60478899 60478894 -
gccagagagatgaggactgagg

SEQ ID NO: 223160 - DNA, 22 bp, Artificial Sequence
  Synthetic oligonucleotide; TTG chr2 60478893 60478914 60478898 60478893 -
ccagagagatgaggactgaggc

SEQ ID NO: 223161 - DNA, 22 bp, Artificial Sequence
  Synthetic oligonucleotide; CTG chr2 60478875 60478896 60478880 60478875 -
aggctgggctgctgtgtgcctg

SEQ ID NO: 223162 - DNA, 22 bp, Artificial Sequence
  Synthetic oligonucleotide; CTG chr2 60478869 60478890 60478874 60478869 -
ggctgctgtgtgcctgggaggc

SEQ ID NO: 223163 - DNA, 22 bp, Artificial Sequence
  Synthetic oligonucleotide; CTG chr2 60478864 60478885 60478869 60478864 -
ctgtgtgcctgggaggcgggaa

SEQ ID NO: 223164 - DNA, 22 bp, Artificial Sequence
  Synthetic oligonucleotide; CTG chr2 60478861 60478882 60478866 60478861 -
tgtgcctgggaggcgggaaggt

SEQ ID NO: 223165 - DNA, 22 bp, Artificial Sequence
  Synthetic oligonucleotide; CTG chr2 60478853 60478874 60478858 60478853 -
ggaggcgggaaggtgctgaggc

SEQ ID NO: 223166 - DNA, 22 bp, Artificial Sequence
  Synthetic oligonucleotide; CTG chr2 60478835 60478856 60478840 60478835 -
aggcactgcagagaagcagctg

SEQ ID NO: 223167 - DNA, 22 bp, Artificial Sequence
  Synthetic oligonucleotide; CTG chr2 60478827 60478848 60478832 60478827 -
cagagaagcagctgcagcatgc

SEQ ID NO: 223168 - DNA, 22 bp, Artificial Sequence
  Synthetic oligonucleotide; CTG chr2 60478813 60478834 60478818 60478813 -
cagcatgccccgggcagaggcc

SEQ ID NO: 223169 - DNA, 22 bp, Artificial Sequence
  Synthetic oligonucleotide; CTG chr2 60478789 60478810 60478794 60478789 -
ttttctgaaagaaggacttgcc

SEQ ID NO: 223170 - DNA, 22 bp, Artificial Sequence
  Synthetic oligonucleotide; TTT chr2 60478786 60478807 60478791 60478786 -
tctgaaagaaggacttgccgtc

SEQ ID NO: 223171 - DNA, 22 bp, Artificial Sequence
  Synthetic oligonucleotide; TTT chr2 60478785 60478806 60478790 60478785 -
ctgaaagaaggacttgccgtca

SEQ ID NO: 223172 - DNA, 22 bp, Artificial Sequence
  Synthetic oligonucleotide; TTC chr2 60478784 60478805 60478789 60478784 -
tgaaagaaggacttgccgtcat

SEQ ID NO: 223173 - DNA, 22 bp, Artificial Sequence
  Synthetic oligonucleotide; CTG chr2 60478782 60478803 60478787 60478782 -
aaagaaggacttgccgtcatgg

SEQ ID NO: 223174 - DNA, 22 bp, Artificial Sequence
  Synthetic oligonucleotide; CTT chr2 60478770 60478791 60478775 60478770 -
gccgtcatgggaggaggcctgg

SEQ ID NO: 223175 - DNA, 22 bp, Artificial Sequence
  Synthetic oligonucleotide; TTG chr2 60478769 60478790 60478774 60478769 -
ccgtcatgggaggaggcctggc

SEQ ID NO: 223176 - DNA, 22 bp, Artificial Sequence
  Synthetic oligonucleotide; CTG chr2 60478749 60478770 60478754 60478749 -
gcctcgcagcaccagagcgctc

SEQ ID NO: 223177 - DNA, 22 bp, Artificial Sequence
  Synthetic oligonucleotide; CTC chr2 60478744 60478765 60478749 60478744 -
gcagcaccagagcgctccttca

SEQ ID NO: 223178 - DNA, 22 bp, Artificial Sequence
  Synthetic oligonucleotide; CTC chr2 60478727 60478748 60478732 60478727 -
cttcattcagcctcacctcagg

SEQ ID NO: 223179 - DNA, 22 bp, Artificial Sequence
  Synthetic oligonucleotide; CTT chr2 60478724 60478745 60478729 60478724 -
cattcagcctcacctcaggcga

SEQ ID NO: 223180 - DNA, 22 bp, Artificial Sequence
  Synthetic oligonucleotide; TTC chr2 60478723 60478744 60478728 60478723 -
attcagcctcacctcaggcgag

SEQ ID NO: 223181 - DNA, 22 bp, Artificial Sequence
  Synthetic oligonucleotide; TTC chr2 60478719 60478740 60478724 60478719 -
agcctcacctcaggcgagaggg

SEQ ID NO: 223182 - DNA, 22 bp, Artificial Sequence
  Synthetic oligonucleotide; CTC chr2 60478713 60478734 60478718 60478713 -
acctcaggcgagagggcagcct

SEQ ID NO: 223183 - DNA, 22 bp, Artificial Sequence
  Synthetic oligonucleotide; CTC chr2 60478708 60478729 60478713 60478708 -
aggcgagagggcagcctagttt

SEQ ID NO: 223184 - DNA, 22 bp, Artificial Sequence
  Synthetic oligonucleotide; CTA chr2 60478690 60478711 60478695 60478690 -
gttttattcctgaagaaatgtt

SEQ ID NO: 223185 - DNA, 22 bp, Artificial Sequence
  Synthetic oligonucleotide; TTT chr2 60478686 60478707 60478691 60478686 -
tattcctgaagaaatgttagag

SEQ ID NO: 223186 - DNA, 22 bp, Artificial Sequence
  Synthetic oligonucleotide; TTT chr2 60478685 60478706 60478690 60478685 -
attcctgaagaaatgttagagc

SEQ ID NO: 223187 - DNA, 22 bp, Artificial Sequence
  Synthetic oligonucleotide; TTA chr2 60478684 60478705 60478689 60478684 -
ttcctgaagaaatgttagagcc

SEQ ID NO: 223188 - DNA, 22 bp, Artificial Sequence
  Synthetic oligonucleotide; TTC chr2 60478681 60478702 60478686 60478681 -
ctgaagaaatgttagagcctga

SEQ ID NO: 223189 - DNA, 22 bp, Artificial Sequence
  Synthetic oligonucleotide; CTG chr2 60478678 60478699 60478683 60478678 -
aagaaatgttagagcctgacct

SEQ ID NO: 223190 - DNA, 22 bp, Artificial Sequence
  Synthetic oligonucleotide; TTA chr2 60478667 60478688 60478672 60478667 -
gagcctgacctgctagaccatt

SEQ ID NO: 223191 - DNA, 22 bp, Artificial Sequence
  Synthetic oligonucleotide; CTG chr2 60478660 60478681 60478665 60478660 -
acctgctagaccattttttttg

SEQ ID NO: 223192 - DNA, 22 bp, Artificial Sequence
  Synthetic oligonucleotide; CTG chr2 60478655 60478676 60478660 60478655 -
ctagaccattttttttggtaga

SEQ ID NO: 223193 - DNA, 22 bp, Artificial Sequence
  Synthetic oligonucleotide; CTA chr2 60478652 60478673 60478657 60478652 -
gaccattttttttggtagagct

SEQ ID NO: 223194 - DNA, 22 bp, Artificial Sequence
  Synthetic oligonucleotide; TTT chr2 60478644 60478665 60478649 60478644 -
tttttggtagagctttgaagcc

SEQ ID NO: 223195 - DNA, 22 bp, Artificial Sequence
  Synthetic oligonucleotide; TTT chr2 60478643 60478664 60478648 60478643 -
ttttggtagagctttgaagcct

SEQ ID NO: 223196 - DNA, 22 bp, Artificial Sequence
  Synthetic oligonucleotide; TTT chr2 60478642 60478663 60478647 60478642 -
tttggtagagctttgaagcctt

SEQ ID NO: 223197 - DNA, 22 bp, Artificial Sequence
  Synthetic oligonucleotide; TTT chr2 60478641 60478662 60478646 60478641 -
ttggtagagctttgaagcctta

SEQ ID NO: 223198 - DNA, 22 bp, Artificial Sequence
  Synthetic oligonucleotide; TTT chr2 60478640 60478661 60478645 60478640 -
tggtagagctttgaagccttaa

SEQ ID NO: 223199 - DNA, 22 bp, Artificial Sequence
  Synthetic oligonucleotide; TTT chr2 60478639 60478660 60478644 60478639 -
ggtagagctttgaagccttaaa

SEQ ID NO: 223200 - DNA, 22 bp, Artificial Sequence
  Synthetic oligonucleotide; TTG chr2 60478638 60478659 60478643 60478638 -
gtagagctttgaagccttaaat

SEQ ID NO: 223201 - DNA, 22 bp, Artificial Sequence
  Synthetic oligonucleotide; CTT chr2 60478629 60478650 60478634 60478629 -
tgaagccttaaattagttctca

SEQ ID NO: 223202 - DNA, 22 bp, Artificial Sequence
  Synthetic oligonucleotide; TTT chr2 60478628 60478649 60478633 60478628 -
gaagccttaaattagttctcat

SEQ ID NO: 223203 - DNA, 22 bp, Artificial Sequence
  Synthetic oligonucleotide; TTG chr2 60478627 60478648 60478632 60478627 -
aagccttaaattagttctcata

SEQ ID NO: 223204 - DNA, 22 bp, Artificial Sequence
  Synthetic oligonucleotide; CTT chr2 60478620 60478641 60478625 60478620 -
aaattagttctcataatttctg

SEQ ID NO: 223205 - DNA, 22 bp, Artificial Sequence
  Synthetic oligonucleotide; TTA chr2 60478619 60478640 60478624 60478619 -
aattagttctcataatttctga

SEQ ID NO: 223206 - DNA, 22 bp, Artificial Sequence
  Synthetic oligonucleotide; TTA chr2 60478614 60478635 60478619 60478614 -
gttctcataatttctgagcagc

SEQ ID NO: 223207 - DNA, 22 bp, Artificial Sequence
  Synthetic oligonucleotide; TTC chr2 60478610 60478631 60478615 60478610 -
tcataatttctgagcagctctg

SEQ ID NO: 223208 - DNA, 22 bp, Artificial Sequence
  Synthetic oligonucleotide; CTC chr2 60478608 60478629 60478613 60478608 -
ataatttctgagcagctctgtg

SEQ ID NO: 223209 - DNA, 22 bp, Artificial Sequence
  Synthetic oligonucleotide; TTT chr2 60478601 60478622 60478606 60478601 -
ctgagcagctctgtgttaacca

SEQ ID NO: 223210 - DNA, 22 bp, Artificial Sequence
  Synthetic oligonucleotide; TTC chr2 60478600 60478621 60478605 60478600 -
tgagcagctctgtgttaaccat

SEQ ID NO: 223211 - DNA, 22 bp, Artificial Sequence
  Synthetic oligonucleotide; CTG chr2 60478598 60478619 60478603 60478598 -
agcagctctgtgttaaccatag

SEQ ID NO: 223212 - DNA, 22 bp, Artificial Sequence
  Synthetic oligonucleotide; CTC chr2 60478590 60478611 60478595 60478590 -
tgtgttaaccataggacataat

SEQ ID NO: 223213 - DNA, 22 bp, Artificial Sequence
  Synthetic oligonucleotide; CTG chr2 60478588 60478609 60478593 60478588 -
tgttaaccataggacataatag

SEQ ID NO: 223214 - DNA, 22 bp, Artificial Sequence
  Synthetic oligonucleotide; TTA chr2 60478583 60478604 60478588 60478583 -
accataggacataataggtttt

SEQ ID NO: 223215 - DNA, 22 bp, Artificial Sequence
  Synthetic oligonucleotide; TTT chr2 60478562 60478583 60478567 60478562 -
taattctggagaatggccagtt

SEQ ID NO: 223216 - DNA, 22 bp, Artificial Sequence
  Synthetic oligonucleotide; TTT chr2 60478561 60478582 60478566 60478561 -
aattctggagaatggccagttc

SEQ ID NO: 223217 - DNA, 22 bp, Artificial Sequence
  Synthetic oligonucleotide; TTA chr2 60478560 60478581 60478565 60478560 -
attctggagaatggccagttct

SEQ ID NO: 223218 - DNA, 22 bp, Artificial Sequence
  Synthetic oligonucleotide; TTC chr2 60478556 60478577 60478561 60478556 -
tggagaatggccagttctggtt

SEQ ID NO: 223219 - DNA, 22 bp, Artificial Sequence
  Synthetic oligonucleotide; CTG chr2 60478554 60478575 60478559 60478554 -
gagaatggccagttctggttct

SEQ ID NO: 223220 - DNA, 22 bp, Artificial Sequence
  Synthetic oligonucleotide; TTC chr2 60478539 60478560 60478544 60478539 -
tggttctcagaatctcttggcc

SEQ ID NO: 223221 - DNA, 22 bp, Artificial Sequence
  Synthetic oligonucleotide; CTG chr2 60478537 60478558 60478542 60478537 -
gttctcagaatctcttggccaa

SEQ ID NO: 223222 - DNA, 22 bp, Artificial Sequence
  Synthetic oligonucleotide; TTC chr2 60478533 60478554 60478538 60478533 -
tcagaatctcttggccaagact

SEQ ID NO: 223223 - DNA, 22 bp, Artificial Sequence
  Synthetic oligonucleotide; CTC chr2 60478531 60478552 60478536 60478531 -
agaatctcttggccaagactgt

SEQ ID NO: 223224 - DNA, 22 bp, Artificial Sequence
  Synthetic oligonucleotide; CTC chr2 60478523 60478544 60478528 60478523 -
ttggccaagactgtcacagagt

SEQ ID NO: 223225 - DNA, 22 bp, Artificial Sequence
  Synthetic oligonucleotide; CTT chr2 60478521 60478542 60478526 60478521 -
ggccaagactgtcacagagtat

SEQ ID NO: 223226 - DNA, 22 bp, Artificial Sequence
  Synthetic oligonucleotide; TTG chr2 60478520 60478541 60478525 60478520 -
gccaagactgtcacagagtatt

SEQ ID NO: 223227 - DNA, 22 bp, Artificial Sequence
  Synthetic oligonucleotide; CTG chr2 60478510 60478531 60478515 60478510 -
tcacagagtattaggcctgtga

SEQ ID NO: 223228 - DNA, 22 bp, Artificial Sequence
  Synthetic oligonucleotide; TTA chr2 60478497 60478518 60478502 60478497 -
ggcctgtgaagtgccttccacg

SEQ ID NO: 223229 - DNA, 22 bp, Artificial Sequence
  Synthetic oligonucleotide; CTG chr2 60478491 60478512 60478496 60478491 -
tgaagtgccttccacgcttccc

SEQ ID NO: 223230 - DNA, 22 bp, Artificial Sequence
  Synthetic oligonucleotide; CTT chr2 60478480 60478501 60478485 60478480 -
ccacgcttcccctgaagtccac

SEQ ID NO: 223231 - DNA, 22 bp, Artificial Sequence
  Synthetic oligonucleotide; TTC chr2 60478479 60478500 60478484 60478479 -
cacgcttcccctgaagtccaca

SEQ ID NO: 223232 - DNA, 22 bp, Artificial Sequence
  Synthetic oligonucleotide; CTT chr2 60478472 60478493 60478477 60478472 -
cccctgaagtccacacaccagt

SEQ ID NO: 223233 - DNA, 22 bp, Artificial Sequence
  Synthetic oligonucleotide; TTC chr2 60478471 60478492 60478476 60478471 -
ccctgaagtccacacaccagtc

SEQ ID NO: 223234 - DNA, 22 bp, Artificial Sequence
  Synthetic oligonucleotide; CTG chr2 60478466 60478487 60478471 60478466 -
aagtccacacaccagtcactca

SEQ ID NO: 223235 - DNA, 22 bp, Artificial Sequence
  Synthetic oligonucleotide; CTC chr2 60478445 60478466 60478450 60478445 -
aatagtgccagaaaggcaagtg

SEQ ID NO: 223236 - DNA, 22 bp, Artificial Sequence
  Synthetic oligonucleotide; TTG chr2 60478414 60478435 60478419 60478414 -
cctgaaaggggctgtatgacca

SEQ ID NO: 223237 - DNA, 22 bp, Artificial Sequence
  Synthetic oligonucleotide; CTG chr2 60478410 60478431 60478415 60478410 -
aaaggggctgtatgaccagtgt

SEQ ID NO: 223238 - DNA, 22 bp, Artificial Sequence
  Synthetic oligonucleotide; CTG chr2 60478400 60478421 60478405 60478400 -
tatgaccagtgtccagacgaca

SEQ ID NO: 223239 - DNA, 22 bp, Artificial Sequence
  Synthetic oligonucleotide; TTT chr2 60478373 60478394 60478378 60478373 -
ctgccgcggccctgaggtggca

SEQ ID NO: 223240 - DNA, 22 bp, Artificial Sequence
  Synthetic oligonucleotide; TTC chr2 60478372 60478393 60478377 60478372 -
tgccgcggccctgaggtggcag

SEQ ID NO: 223241 - DNA, 22 bp, Artificial Sequence
  Synthetic oligonucleotide; CTG chr2 60478370 60478391 60478375 60478370 -
ccgcggccctgaggtggcagtg

SEQ ID NO: 223242 - DNA, 22 bp, Artificial Sequence
  Synthetic oligonucleotide; CTG chr2 60478359 60478380 60478364 60478359 -
aggtggcagtgggaggggtttg

SEQ ID NO: 223243 - DNA, 22 bp, Artificial Sequence
  Synthetic oligonucleotide; TTT chr2 60478338 60478359 60478343 60478338 -
gtcagaaggtgggcagggtcct

SEQ ID NO: 223244 - DNA, 22 bp, Artificial Sequence
  Synthetic oligonucleotide; TTG chr2 60478337 60478358 60478342 60478337 -
tcagaaggtgggcagggtcctg

SEQ ID NO: 223245 - DNA, 22 bp, Artificial Sequence
  Synthetic oligonucleotide; CTG chr2 60478315 60478336 60478320 60478315 -
aagcccagccctgtcctccctg

SEQ ID NO: 223246 - DNA, 22 bp, Artificial Sequence
  Synthetic oligonucleotide; CTG chr2 60478302 60478323 60478307 60478302 -
tcctccctgtccacagcaggac

SEQ ID NO: 223247 - DNA, 22 bp, Artificial Sequence
  Synthetic oligonucleotide; CTC chr2 60478297 60478318 60478302 60478297 -
cctgtccacagcaggacacttc

SEQ ID NO: 223248 - DNA, 22 bp, Artificial Sequence
  Synthetic oligonucleotide; CTG chr2 60478293 60478314 60478298 60478293 -
tccacagcaggacacttctgag

SEQ ID NO: 223249 - DNA, 22 bp, Artificial Sequence
  Synthetic oligonucleotide; CTT chr2 60478276 60478297 60478281 60478276 -
ctgagatcttcgagttcctcac

SEQ ID NO: 223250 - DNA, 22 bp, Artificial Sequence
  Synthetic oligonucleotide; TTC chr2 60478275 60478296 60478280 60478275 -
tgagatcttcgagttcctcact

SEQ ID NO: 223251 - DNA, 22 bp, Artificial Sequence
  Synthetic oligonucleotide; CTG chr2 60478273 60478294 60478278 60478273 -
agatcttcgagttcctcactgg

SEQ ID NO: 223252 - DNA, 22 bp, Artificial Sequence
  Synthetic oligonucleotide; CTT chr2 60478266 60478287 60478271 60478266 -
cgagttcctcactgggaggtga

SEQ ID NO: 223253 - DNA, 22 bp, Artificial Sequence
  Synthetic oligonucleotide; TTC chr2 60478265 60478286 60478270 60478265 -
gagttcctcactgggaggtgag

SEQ ID NO: 223254 - DNA, 22 bp, Artificial Sequence
  Synthetic oligonucleotide; TTC chr2 60478259 60478280 60478264 60478259 -
ctcactgggaggtgaggctaat

SEQ ID NO: 223255 - DNA, 22 bp, Artificial Sequence
  Synthetic oligonucleotide; CTC chr2 60478256 60478277 60478261 60478256 -
actgggaggtgaggctaatacc

SEQ ID NO: 223256 - DNA, 22 bp, Artificial Sequence
  Synthetic oligonucleotide; CTG chr2 60478252 60478273 60478257 60478252 -
ggaggtgaggctaataccttcc

SEQ ID NO: 223257 - DNA, 22 bp, Artificial Sequence
  Synthetic oligonucleotide; CTA chr2 60478239 60478260 60478244 60478239 -
ataccttccctcattccacagg

SEQ ID NO: 223258 - DNA, 22 bp, Artificial Sequence
  Synthetic oligonucleotide; CTT chr2 60478232 60478253 60478237 60478232 -
ccctcattccacagggcgactg

SEQ ID NO: 223259 - DNA, 22 bp, Artificial Sequence
  Synthetic oligonucleotide; TTC chr2 60478231 60478252 60478236 60478231 -
cctcattccacagggcgactgt

SEQ ID NO: 223260 - DNA, 22 bp, Artificial Sequence
  Synthetic oligonucleotide; CTC chr2 60478227 60478248 60478232 60478227 -
attccacagggcgactgttggg

SEQ ID NO: 223261 - DNA, 22 bp, Artificial Sequence
  Synthetic oligonucleotide; TTC chr2 60478223 60478244 60478228 60478223 -
cacagggcgactgttggggcag

SEQ ID NO: 223262 - DNA, 22 bp, Artificial Sequence
  Synthetic oligonucleotide; CTG chr2 60478210 60478231 60478215 60478210 -
ttggggcaggatgtgaggagag

SEQ ID NO: 223263 - DNA, 22 bp, Artificial Sequence
  Synthetic oligonucleotide; TTG chr2 60478207 60478228 60478212 60478207 -
gggcaggatgtgaggagagtac

SEQ ID NO: 223264 - DNA, 22 bp, Artificial Sequence
  Synthetic oligonucleotide; CTT chr2 60478183 60478204 60478188 60478183 -
tgggaagaacataacactttcc

SEQ ID NO: 223265 - DNA, 22 bp, Artificial Sequence
  Synthetic oligonucleotide; TTT chr2 60478182 60478203 60478187 60478182 -
gggaagaacataacactttcca

SEQ ID NO: 223266 - DNA, 22 bp, Artificial Sequence
  Synthetic oligonucleotide; TTG chr2 60478181 60478202 60478186 60478181 -
ggaagaacataacactttccac

SEQ ID NO: 223267 - DNA, 22 bp, Artificial Sequence
  Synthetic oligonucleotide; CTT chr2 60478164 60478185 60478169 60478164 -
tccacccagcctgggcaacatg

SEQ ID NO: 223268 - DNA, 22 bp, Artificial Sequence
  Synthetic oligonucleotide; TTT chr2 60478163 60478184 60478168 60478163 -
ccacccagcctgggcaacatgg

SEQ ID NO: 223269 - DNA, 22 bp, Artificial Sequence
  Synthetic oligonucleotide; TTC chr2 60478162 60478183 60478167 60478162 -
cacccagcctgggcaacatggt

SEQ ID NO: 223270 - DNA, 22 bp, Artificial Sequence
  Synthetic oligonucleotide; CTG chr2 60478151 60478172 60478156 60478151 -
ggcaacatggtgagatcccatc

SEQ ID NO: 223271 - DNA, 22 bp, Artificial Sequence
  Synthetic oligonucleotide; CTC chr2 60478127 60478148 60478132 60478127 -
tacaaaaaatacaaaaattagc

SEQ ID NO: 223272 - DNA, 22 bp, Artificial Sequence
  Synthetic oligonucleotide; CTA chr2 60478125 60478146 60478130 60478125 -
caaaaaatacaaaaattagcca

SEQ ID NO: 223273 - DNA, 22 bp, Artificial Sequence
  Synthetic oligonucleotide; TTA chr2 60478107 60478128 60478112 60478107 -
gccaggtgtggtggtggcgcat

SEQ ID NO: 223274 - DNA, 22 bp, Artificial Sequence
  Synthetic oligonucleotide; CTG chr2 60478080 60478101 60478085 60478080 -
tagtcctagctacttgagagct

SEQ ID NO: 223275 - DNA, 22 bp, Artificial Sequence
  Synthetic oligonucleotide; CTA chr2 60478072 60478093 60478077 60478072 -
gctacttgagagctgaggcagg

SEQ ID NO: 223276 - DNA, 22 bp, Artificial Sequence
  Synthetic oligonucleotide; CTA chr2 60478068 60478089 60478073 60478068 -
cttgagagctgaggcaggagga

SEQ ID NO: 223277 - DNA, 22 bp, Artificial Sequence
  Synthetic oligonucleotide; CTT chr2 60478065 60478086 60478070 60478065 -
gagagctgaggcaggaggactg

SEQ ID NO: 223278 - DNA, 22 bp, Artificial Sequence
  Synthetic oligonucleotide; TTG chr2 60478064 60478085 60478069 60478064 -
agagctgaggcaggaggactgc

SEQ ID NO: 223279 - DNA, 22 bp, Artificial Sequence
  Synthetic oligonucleotide; CTG chr2 60478057 60478078 60478062 60478057 -
aggcaggaggactgcttgaact

SEQ ID NO: 223280 - DNA, 22 bp, Artificial Sequence
  Synthetic oligonucleotide; CTG chr2 60478043 60478064 60478048 60478043 -
cttgaactcgggaggcggaggt

SEQ ID NO: 223281 - DNA, 22 bp, Artificial Sequence
  Synthetic oligonucleotide; CTT chr2 60478040 60478061 60478045 60478040 -
gaactcgggaggcggaggttgc

SEQ ID NO: 223282 - DNA, 22 bp, Artificial Sequence
  Synthetic oligonucleotide; TTG chr2 60478039 60478060 60478044 60478039 -
aactcgggaggcggaggttgca

SEQ ID NO: 223283 - DNA, 22 bp, Artificial Sequence
  Synthetic oligonucleotide; CTC chr2 60478034 60478055 60478039 60478034 -
gggaggcggaggttgcagtgag

SEQ ID NO: 223284 - DNA, 22 bp, Artificial Sequence
  Synthetic oligonucleotide; TTG chr2 60478019 60478040 60478024 60478019 -
cagtgagccaagattgcaccac

SEQ ID NO: 223285 - DNA, 22 bp, Artificial Sequence
  Synthetic oligonucleotide; TTG chr2 60478003 60478024 60478008 60478003 -
caccactgcactccagcctggg

SEQ ID NO: 223286 - DNA, 22 bp, Artificial Sequence
  Synthetic oligonucleotide; CTG chr2 60477995 60478016 60478000 60477995 -
cactccagcctgggcaacagag

SEQ ID NO: 223287 - DNA, 22 bp, Artificial Sequence
  Synthetic oligonucleotide; CTC chr2 60477990 60478011 60477995 60477990 -
cagcctgggcaacagagtgaga

SEQ ID NO: 223288 - DNA, 22 bp, Artificial Sequence
  Synthetic oligonucleotide; CTG chr2 60477983 60478004 60477988 60477983 -
ggcaacagagtgagaccatgtc

SEQ ID NO: 223289 - DNA, 22 bp, Artificial Sequence
  Synthetic oligonucleotide; CTC chr2 60477959 60477980 60477964 60477959 -
aattaaaaaaaaaaaaaaaaaa

SEQ ID NO: 223290 - DNA, 22 bp, Artificial Sequence
  Synthetic oligonucleotide; TTA chr2 60477954 60477975 60477959 60477954 -
aaaaaaaaaaaaaaaaagcttt

SEQ ID NO: 223291 - DNA, 22 bp, Artificial Sequence
  Synthetic oligonucleotide; CTT chr2 60477933 60477954 60477938 60477933 -
tccataaaggccaggacagatg

SEQ ID NO: 223292 - DNA, 22 bp, Artificial Sequence
  Synthetic oligonucleotide; TTT chr2 60477932 60477953 60477937 60477932 -
ccataaaggccaggacagatgt

SEQ ID NO: 223293 - DNA, 22 bp, Artificial Sequence
  Synthetic oligonucleotide; TTC chr2 60477931 60477952 60477936 60477931 -
cataaaggccaggacagatgtg

SEQ ID NO: 223294 - DNA, 22 bp, Artificial Sequence
  Synthetic oligonucleotide; CTT chr2 60477906 60477927 60477911 60477906 -
ccttaagaagggctagagttgg

SEQ ID NO: 223295 - DNA, 22 bp, Artificial Sequence
  Synthetic oligonucleotide; TTC chr2 60477905 60477926 60477910 60477905 -
cttaagaagggctagagttgga

SEQ ID NO: 223296 - DNA, 22 bp, Artificial Sequence
  Synthetic oligonucleotide; CTT chr2 60477902 60477923 60477907 60477902 -
aagaagggctagagttggaggc

SEQ ID NO: 223297 - DNA, 22 bp, Artificial Sequence
  Synthetic oligonucleotide; TTA chr2 60477901 60477922 60477906 60477901 -
agaagggctagagttggaggcc

SEQ ID NO: 223298 - DNA, 22 bp, Artificial Sequence
  Synthetic oligonucleotide; CTA chr2 60477891 60477912 60477896 60477891 -
gagttggaggccttgccctcct

SEQ ID NO: 223299 - DNA, 22 bp, Artificial Sequence
  Synthetic oligonucleotide; TTG chr2 60477885 60477906 60477890 60477885 -
gaggccttgccctcctctgggc

SEQ ID NO: 223300 - DNA, 22 bp, Artificial Sequence
  Synthetic oligonucleotide; CTT chr2 60477877 60477898 60477882 60477877 -
gccctcctctgggcttgttggc

SEQ ID NO: 223301 - DNA, 22 bp, Artificial Sequence
  Synthetic oligonucleotide; TTG chr2 60477876 60477897 60477881 60477876 -
ccctcctctgggcttgttggcc

SEQ ID NO: 223302 - DNA, 22 bp, Artificial Sequence
  Synthetic oligonucleotide; CTC chr2 60477871 60477892 60477876 60477871 -
ctctgggcttgttggccttggg

SEQ ID NO: 223303 - DNA, 22 bp, Artificial Sequence
  Synthetic oligonucleotide; CTC chr2 60477868 60477889 60477873 60477868 -
tgggcttgttggccttggggga

SEQ ID NO: 223304 - DNA, 22 bp, Artificial Sequence
  Synthetic oligonucleotide; CTG chr2 60477866 60477887 60477871 60477866 -
ggcttgttggccttgggggagg

SEQ ID NO: 223305 - DNA, 22 bp, Artificial Sequence
  Synthetic oligonucleotide; CTT chr2 60477861 60477882 60477866 60477861 -
gttggccttgggggaggcctga

SEQ ID NO: 223306 - DNA, 22 bp, Artificial Sequence
  Synthetic oligonucleotide; TTG chr2 60477860 60477881 60477865 60477860 -
ttggccttgggggaggcctgac

SEQ ID NO: 223307 - DNA, 22 bp, Artificial Sequence
  Synthetic oligonucleotide; TTG chr2 60477857 60477878 60477862 60477857 -
gccttgggggaggcctgacaga

SEQ ID NO: 223308 - DNA, 22 bp, Artificial Sequence
  Synthetic oligonucleotide; CTT chr2 60477852 60477873 60477857 60477852 -
gggggaggcctgacagagcctt

SEQ ID NO: 223309 - DNA, 22 bp, Artificial Sequence
  Synthetic oligonucleotide; TTG chr2 60477851 60477872 60477856 60477851 -
ggggaggcctgacagagccttc

SEQ ID NO: 223310 - DNA, 22 bp, Artificial Sequence
  Synthetic oligonucleotide; CTG chr2 60477840 60477861 60477845 60477840 -
acagagccttcctggggctgcc

SEQ ID NO: 223311 - DNA, 22 bp, Artificial Sequence
  Synthetic oligonucleotide; CTT chr2 60477830 60477851 60477835 60477830 -
cctggggctgcctgttcttctg

SEQ ID NO: 223312 - DNA, 22 bp, Artificial Sequence
  Synthetic oligonucleotide; TTC chr2 60477829 60477850 60477834 60477829 -
ctggggctgcctgttcttctgg

SEQ ID NO: 223313 - DNA, 22 bp, Artificial Sequence
  Synthetic oligonucleotide; CTG chr2 60477826 60477847 60477831 60477826 -
gggctgcctgttcttctggccc

SEQ ID NO: 223314 - DNA, 22 bp, Artificial Sequence
  Synthetic oligonucleotide; CTG chr2 60477820 60477841 60477825 60477820 -
cctgttcttctggccccttctc

SEQ ID NO: 223315 - DNA, 22 bp, Artificial Sequence
  Synthetic oligonucleotide; CTG chr2 60477816 60477837 60477821 60477816 -
ttcttctggccccttctccgtg

SEQ ID NO: 223316 - DNA, 22 bp, Artificial Sequence
  Synthetic oligonucleotide; TTC chr2 60477813 60477834 60477818 60477813 -
ttctggccccttctccgtgcac

SEQ ID NO: 223317 - DNA, 22 bp, Artificial Sequence
  Synthetic oligonucleotide; CTT chr2 60477811 60477832 60477816 60477811 -
ctggccccttctccgtgcacag

SEQ ID NO: 223318 - DNA, 22 bp, Artificial Sequence
  Synthetic oligonucleotide; TTC chr2 60477810 60477831 60477815 60477810 -
tggccccttctccgtgcacaga

SEQ ID NO: 223319 - DNA, 22 bp, Artificial Sequence
  Synthetic oligonucleotide; CTG chr2 60477808 60477829 60477813 60477808 -
gccccttctccgtgcacagacc

SEQ ID NO: 223320 - DNA, 22 bp, Artificial Sequence
  Synthetic oligonucleotide; CTT chr2 60477801 60477822 60477806 60477801 -
ctccgtgcacagaccagtcttg

SEQ ID NO: 223321 - DNA, 22 bp, Artificial Sequence
  Synthetic oligonucleotide; TTC chr2 60477800 60477821 60477805 60477800 -
tccgtgcacagaccagtcttgg

SEQ ID NO: 223322 - DNA, 22 bp, Artificial Sequence
  Synthetic oligonucleotide; CTC chr2 60477798 60477819 60477803 60477798 -
cgtgcacagaccagtcttggat

SEQ ID NO: 223323 - DNA, 22 bp, Artificial Sequence
  Synthetic oligonucleotide; CTT chr2 60477780 60477801 60477785 60477780 -
ggatgataagtcaggaaagccc

SEQ ID NO: 223324 - DNA, 22 bp, Artificial Sequence
  Synthetic oligonucleotide; TTG chr2 60477779 60477800 60477784 60477779 -
gatgataagtcaggaaagccct

SEQ ID NO: 223325 - DNA, 22 bp, Artificial Sequence
  Synthetic oligonucleotide; CTC chr2 60477756 60477777 60477761 60477756 -
cacctggccgggctgcagtgtc

SEQ ID NO: 223326 - DNA, 22 bp, Artificial Sequence
  Synthetic oligonucleotide; CTG chr2 60477750 60477771 60477755 60477750 -
gccgggctgcagtgtcgctggg

SEQ ID NO: 223327 - DNA, 22 bp, Artificial Sequence
  Synthetic oligonucleotide; CTG chr2 60477741 60477762 60477746 60477741 -
cagtgtcgctggggctgcccac

SEQ ID NO: 223328 - DNA, 22 bp, Artificial Sequence
  Synthetic oligonucleotide; CTG chr2 60477730 60477751 60477735 60477730 -
gggctgcccacacttgctgacc

SEQ ID NO: 223329 - DNA, 22 bp, Artificial Sequence
  Synthetic oligonucleotide; CTG chr2 60477724 60477745 60477729 60477724 -
cccacacttgctgaccatggct

SEQ ID NO: 223330 - DNA, 22 bp, Artificial Sequence
  Synthetic oligonucleotide; CTT chr2 60477715 60477736 60477720 60477715 -
gctgaccatggctccccactcc

SEQ ID NO: 223331 - DNA, 22 bp, Artificial Sequence
  Synthetic oligonucleotide; TTG chr2 60477714 60477735 60477719 60477714 -
ctgaccatggctccccactccc

SEQ ID NO: 223332 - DNA, 22 bp, Artificial Sequence
  Synthetic oligonucleotide; CTG chr2 60477711 60477732 60477716 60477711 -
accatggctccccactcccttg

SEQ ID NO: 223333 - DNA, 22 bp, Artificial Sequence
  Synthetic oligonucleotide; CTC chr2 60477701 60477722 60477706 60477701 -
cccactcccttgtctctcacag

SEQ ID NO: 223334 - DNA, 22 bp, Artificial Sequence
  Synthetic oligonucleotide; CTC chr2 60477694 60477715 60477699 60477694 -
ccttgtctctcacagcaccact

SEQ ID NO: 223335 - DNA, 22 bp, Artificial Sequence
  Synthetic oligonucleotide; CTT chr2 60477690 60477711 60477695 60477690 -
gtctctcacagcaccactgccc

SEQ ID NO: 223336 - DNA, 22 bp, Artificial Sequence
  Synthetic oligonucleotide; TTG chr2 60477689 60477710 60477694 60477689 -
tctctcacagcaccactgcccc

SEQ ID NO: 223337 - DNA, 22 bp, Artificial Sequence
  Synthetic oligonucleotide; CTC chr2 60477685 60477706 60477690 60477685 -
tcacagcaccactgcccctgtt

SEQ ID NO: 223338 - DNA, 22 bp, Artificial Sequence
  Synthetic oligonucleotide; CTC chr2 60477683 60477704 60477688 60477683 -
acagcaccactgcccctgtttc

SEQ ID NO: 223339 - DNA, 22 bp, Artificial Sequence
  Synthetic oligonucleotide; CTG chr2 60477671 60477692 60477676 60477671 -
cccctgtttccacagtgcccac

SEQ ID NO: 223340 - DNA, 22 bp, Artificial Sequence
  Synthetic oligonucleotide; CTG chr2 60477665 60477686 60477670 60477665 -
tttccacagtgcccacgaacaa

SEQ ID NO: 223341 - DNA, 22 bp, Artificial Sequence
  Synthetic oligonucleotide; TTT chr2 60477662 60477683 60477667 60477662 -
ccacagtgcccacgaacaaaac

SEQ ID NO: 223342 - DNA, 22 bp, Artificial Sequence
  Synthetic oligonucleotide; TTC chr2 60477661 60477682 60477666 60477661 -
cacagtgcccacgaacaaaaca

SEQ ID NO: 223343 - DNA, 22 bp, Artificial Sequence
  Synthetic oligonucleotide; CTC chr2 60477628 60477649 60477633 60477628 -
ttggaaacaccatgtttgatta

SEQ ID NO: 223344 - DNA, 22 bp, Artificial Sequence
  Synthetic oligonucleotide; CTT chr2 60477626 60477647 60477631 60477626 -
ggaaacaccatgtttgattatt

SEQ ID NO: 223345 - DNA, 22 bp, Artificial Sequence
  Synthetic oligonucleotide; TTG chr2 60477625 60477646 60477630 60477625 -
gaaacaccatgtttgattattt

SEQ ID NO: 223346 - DNA, 22 bp, Artificial Sequence
  Synthetic oligonucleotide; TTT chr2 60477611 60477632 60477616 60477611 -
gattatttctttctttctttct

SEQ ID NO: 223347 - DNA, 22 bp, Artificial Sequence
  Synthetic oligonucleotide; TTG chr2 60477610 60477631 60477615 60477610 -
attatttctttctttctttctt

SEQ ID NO: 223348 - DNA, 22 bp, Artificial Sequence
  Synthetic oligonucleotide; TTA chr2 60477606 60477627 60477611 60477606 -
tttctttctttctttctttctt

SEQ ID NO: 223349 - DNA, 22 bp, Artificial Sequence
  Synthetic oligonucleotide; TTT chr2 60477603 60477624 60477608 60477603 -
ctttctttctttctttctttat

SEQ ID NO: 223350 - DNA, 22 bp, Artificial Sequence
  Synthetic oligonucleotide; TTC chr2 60477602 60477623 60477607 60477602 -
tttctttctttctttctttatt

SEQ ID NO: 223351 - DNA, 22 bp, Artificial Sequence
  Synthetic oligonucleotide; CTT chr2 60477600 60477621 60477605 60477600 -
tctttctttctttctttattta

SEQ ID NO: 223352 - DNA, 22 bp, Artificial Sequence
  Synthetic oligonucleotide; TTT chr2 60477599 60477620 60477604 60477599 -
ctttctttctttctttatttat

SEQ ID NO: 223353 - DNA, 22 bp, Artificial Sequence
  Synthetic oligonucleotide; TTC chr2 60477598 60477619 60477603 60477598 -
tttctttctttctttatttatt

SEQ ID NO: 223354 - DNA, 22 bp, Artificial Sequence
  Synthetic oligonucleotide; CTT chr2 60477596 60477617 60477601 60477596 -
tctttctttctttatttatttt

SEQ ID NO: 223355 - DNA, 22 bp, Artificial Sequence
  Synthetic oligonucleotide; TTT chr2 60477595 60477616 60477600 60477595 -
ctttctttctttatttatttta

SEQ ID NO: 223356 - DNA, 22 bp, Artificial Sequence
  Synthetic oligonucleotide; TTC chr2 60477594 60477615 60477599 60477594 -
tttctttctttatttattttac

SEQ ID NO: 223357 - DNA, 22 bp, Artificial Sequence
  Synthetic oligonucleotide; CTT chr2 60477592 60477613 60477597 60477592 -
tctttctttatttattttactc

SEQ ID NO: 223358 - DNA, 22 bp, Artificial Sequence
  Synthetic oligonucleotide; TTT chr2 60477591 60477612 60477596 60477591 -
ctttctttatttattttactct

SEQ ID NO: 223359 - DNA, 22 bp, Artificial Sequence
  Synthetic oligonucleotide; TTC chr2 60477590 60477611 60477595 60477590 -
tttctttatttattttactcta

SEQ ID NO: 223360 - DNA, 22 bp, Artificial Sequence
  Synthetic oligonucleotide; CTT chr2 60477588 60477609 60477593 60477588 -
tctttatttattttactctaag

SEQ ID NO: 223361 - DNA, 22 bp, Artificial Sequence
  Synthetic oligonucleotide; TTT chr2 60477587 60477608 60477592 60477587 -
ctttatttattttactctaagt

SEQ ID NO: 223362 - DNA, 22 bp, Artificial Sequence
  Synthetic oligonucleotide; TTC chr2 60477586 60477607 60477591 60477586 -
tttatttattttactctaagtt

SEQ ID NO: 223363 - DNA, 22 bp, Artificial Sequence
  Synthetic oligonucleotide; CTT chr2 60477584 60477605 60477589 60477584 -
tatttattttactctaagttct

SEQ ID NO: 223364 - DNA, 22 bp, Artificial Sequence
  Synthetic oligonucleotide; TTT chr2 60477583 60477604 60477588 60477583 -
atttattttactctaagttctg

SEQ ID NO: 223365 - DNA, 22 bp, Artificial Sequence
  Synthetic oligonucleotide; TTA chr2 60477582 60477603 60477587 60477582 -
tttattttactctaagttctgg

SEQ ID NO: 223366 - DNA, 22 bp, Artificial Sequence
  Synthetic oligonucleotide; TTT chr2 60477579 60477600 60477584 60477579 -
attttactctaagttctgggat

SEQ ID NO: 223367 - DNA, 22 bp, Artificial Sequence
  Synthetic oligonucleotide; TTA chr2 60477578 60477599 60477583 60477578 -
ttttactctaagttctgggata

SEQ ID NO: 223368 - DNA, 22 bp, Artificial Sequence
  Synthetic oligonucleotide; TTT chr2 60477575 60477596 60477580 60477575 -
tactctaagttctgggatacat

SEQ ID NO: 223369 - DNA, 22 bp, Artificial Sequence
  Synthetic oligonucleotide; TTT chr2 60477574 60477595 60477579 60477574 -
actctaagttctgggatacatg

SEQ ID NO: 223370 - DNA, 22 bp, Artificial Sequence
  Synthetic oligonucleotide; TTA chr2 60477573 60477594 60477578 60477573 -
ctctaagttctgggatacatgt

SEQ ID NO: 223371 - DNA, 22 bp, Artificial Sequence
  Synthetic oligonucleotide; CTC chr2 60477570 60477591 60477575 60477570 -
taagttctgggatacatgtgca

SEQ ID NO: 223372 - DNA, 22 bp, Artificial Sequence
  Synthetic oligonucleotide; CTA chr2 60477568 60477589 60477573 60477568 -
agttctgggatacatgtgcaga

SEQ ID NO: 223373 - DNA, 22 bp, Artificial Sequence
  Synthetic oligonucleotide; TTC chr2 60477563 60477584 60477568 60477563 -
tgggatacatgtgcagaatgtg

SEQ ID NO: 223374 - DNA, 22 bp, Artificial Sequence
  Synthetic oligonucleotide; CTG chr2 60477561 60477582 60477566 60477561 -
ggatacatgtgcagaatgtgca

SEQ ID NO: 223375 - DNA, 22 bp, Artificial Sequence
  Synthetic oligonucleotide; TTT chr2 60477534 60477555 60477539 60477534 -
gttacataagtatacatgtacc

SEQ ID NO: 223376 - DNA, 22 bp, Artificial Sequence
  Synthetic oligonucleotide; TTG chr2 60477533 60477554 60477538 60477533 -
ttacataagtatacatgtacca

SEQ ID NO: 223377 - DNA, 22 bp, Artificial Sequence
  Synthetic oligonucleotide; TTA chr2 60477530 60477551 60477535 60477530 -
cataagtatacatgtaccatgg

SEQ ID NO: 223378 - DNA, 22 bp, Artificial Sequence
  Synthetic oligonucleotide; TTT chr2 60477502 60477523 60477507 60477502 -
gctgcacctatcaacccatcat

SEQ ID NO: 223379 - DNA, 22 bp, Artificial Sequence
  Synthetic oligonucleotide; TTG chr2 60477501 60477522 60477506 60477501 -
ctgcacctatcaacccatcatc

SEQ ID NO: 223380 - DNA, 22 bp, Artificial Sequence
  Synthetic oligonucleotide; CTG chr2 60477498 60477519 60477503 60477498 -
cacctatcaacccatcatctac

SEQ ID NO: 223381 - DNA, 22 bp, Artificial Sequence
  Synthetic oligonucleotide; CTA chr2 60477492 60477513 60477497 60477492 -
tcaacccatcatctacattagg

SEQ ID NO: 223382 - DNA, 22 bp, Artificial Sequence
  Synthetic oligonucleotide; CTA chr2 60477477 60477498 60477482 60477477 -
cattaggcatttctcctaatgc

SEQ ID NO: 223383 - DNA, 22 bp, Artificial Sequence
  Synthetic oligonucleotide; TTA chr2 60477472 60477493 60477477 60477472 -
ggcatttctcctaatgctatcc

SEQ ID NO: 223384 - DNA, 22 bp, Artificial Sequence
  Synthetic oligonucleotide; TTT chr2 60477465 60477486 60477470 60477465 -
ctcctaatgctatccctcccct

SEQ ID NO: 223385 - DNA, 22 bp, Artificial Sequence
  Synthetic oligonucleotide; TTC chr2 60477464 60477485 60477469 60477464 -
tcctaatgctatccctcccctt

SEQ ID NO: 223386 - DNA, 22 bp, Artificial Sequence
  Synthetic oligonucleotide; CTC chr2 60477462 60477483 60477467 60477462 -
ctaatgctatccctccccttgc

SEQ ID NO: 223387 - DNA, 22 bp, Artificial Sequence
  Synthetic oligonucleotide; CTA chr2 60477459 60477480 60477464 60477459 -
atgctatccctccccttgcccc

SEQ ID NO: 223388 - DNA, 22 bp, Artificial Sequence
  Synthetic oligonucleotide; CTA chr2 60477453 60477474 60477458 60477453 -
tccctccccttgcccctccacc

SEQ ID NO: 223389 - DNA, 22 bp, Artificial Sequence
  Synthetic oligonucleotide; CTC chr2 60477447 60477468 60477452 60477447 -
cccttgcccctccacccatgtt

SEQ ID NO: 223390 - DNA, 22 bp, Artificial Sequence
  Synthetic oligonucleotide; CTT chr2 60477442 60477463 60477447 60477442 -
gcccctccacccatgtttggtt

SEQ ID NO: 223391 - DNA, 22 bp, Artificial Sequence
  Synthetic oligonucleotide; TTG chr2 60477441 60477462 60477446 60477441 -
cccctccacccatgtttggttt

SEQ ID NO: 223392 - DNA, 22 bp, Artificial Sequence
  Synthetic oligonucleotide; CTC chr2 60477435 60477456 60477440 60477435 -
cacccatgtttggttttcttta

SEQ ID NO: 223393 - DNA, 22 bp, Artificial Sequence
  Synthetic oligonucleotide; TTT chr2 60477424 60477445 60477429 60477424 -
ggttttctttagcttattctag

SEQ ID NO: 223394 - DNA, 22 bp, Artificial Sequence
  Synthetic oligonucleotide; TTG chr2 60477423 60477444 60477428 60477423 -
gttttctttagcttattctagt

SEQ ID NO: 223395 - DNA, 22 bp, Artificial Sequence
  Synthetic oligonucleotide; TTT chr2 60477419 60477440 60477424 60477419 -
tctttagcttattctagtattt

SEQ ID NO: 223396 - DNA, 22 bp, Artificial Sequence
  Synthetic oligonucleotide; TTT chr2 60477418 60477439 60477423 60477418 -
ctttagcttattctagtatttt

SEQ ID NO: 223397 - DNA, 22 bp, Artificial Sequence
  Synthetic oligonucleotide; TTC chr2 60477417 60477438 60477422 60477417 -
tttagcttattctagtattttc

SEQ ID NO: 223398 - DNA, 22 bp, Artificial Sequence
  Synthetic oligonucleotide; CTT chr2 60477415 60477436 60477420 60477415 -
tagcttattctagtattttctc

SEQ ID NO: 223399 - DNA, 22 bp, Artificial Sequence
  Synthetic oligonucleotide; TTT chr2 60477414 60477435 60477419 60477414 -
agcttattctagtattttctca

SEQ ID NO: 223400 - DNA, 22 bp, Artificial Sequence
  Synthetic oligonucleotide; TTA chr2 60477413 60477434 60477418 60477413 -
gcttattctagtattttctcaa

SEQ ID NO: 223401 - DNA, 22 bp, Artificial Sequence
  Synthetic oligonucleotide; CTT chr2 60477409 60477430 60477414 60477409 -
attctagtattttctcaagacc

SEQ ID NO: 223402 - DNA, 22 bp, Artificial Sequence
  Synthetic oligonucleotide; TTA chr2 60477408 60477429 60477413 60477408 -
ttctagtattttctcaagaccg

SEQ ID NO: 223403 - DNA, 22 bp, Artificial Sequence
  Synthetic oligonucleotide; TTC chr2 60477405 60477426 60477410 60477405 -
tagtattttctcaagaccgatc

SEQ ID NO: 223404 - DNA, 22 bp, Artificial Sequence
  Synthetic oligonucleotide; CTA chr2 60477403 60477424 60477408 60477403 -
gtattttctcaagaccgatcga

SEQ ID NO: 223405 - DNA, 22 bp, Artificial Sequence
  Synthetic oligonucleotide; TTT chr2 60477397 60477418 60477402 60477397 -
tctcaagaccgatcgaaatgat

SEQ ID NO: 223406 - DNA, 22 bp, Artificial Sequence
  Synthetic oligonucleotide; TTT chr2 60477396 60477417 60477401 60477396 -
ctcaagaccgatcgaaatgata

SEQ ID NO: 223407 - DNA, 22 bp, Artificial Sequence
  Synthetic oligonucleotide; TTC chr2 60477395 60477416 60477400 60477395 -
tcaagaccgatcgaaatgataa

SEQ ID NO: 223408 - DNA, 22 bp, Artificial Sequence
  Synthetic oligonucleotide; CTC chr2 60477393 60477414 60477398 60477393 -
aagaccgatcgaaatgataata

SEQ ID NO: 223409 - DNA, 22 bp, Artificial Sequence
  Synthetic oligonucleotide; TTT chr2 60477351 60477372 60477356 60477351 -
gttgtgagttgatgcagataaa

SEQ ID NO: 223410 - DNA, 22 bp, Artificial Sequence
  Synthetic oligonucleotide; TTG chr2 60477350 60477371 60477355 60477350 -
ttgtgagttgatgcagataaaa

SEQ ID NO: 223411 - DNA, 22 bp, Artificial Sequence
  Synthetic oligonucleotide; TTG chr2 60477347 60477368 60477352 60477347 -
tgagttgatgcagataaaaagg

SEQ ID NO: 223412 - DNA, 22 bp, Artificial Sequence
  Synthetic oligonucleotide; TTG chr2 60477340 60477361 60477345 60477340 -
atgcagataaaaaggcttgggg

SEQ ID NO: 223413 - DNA, 22 bp, Artificial Sequence
  Synthetic oligonucleotide; CTT chr2 60477322 60477343 60477327 60477322 -
ggggtggtcttcagagtaattt

SEQ ID NO: 223414 - DNA, 22 bp, Artificial Sequence
  Synthetic oligonucleotide; TTG chr2 60477321 60477342 60477326 60477321 -
gggtggtcttcagagtaatttg

SEQ ID NO: 223415 - DNA, 22 bp, Artificial Sequence
  Synthetic oligonucleotide; CTT chr2 60477311 60477332 60477316 60477311 -
cagagtaatttgggagttgtgt

SEQ ID NO: 223416 - DNA, 22 bp, Artificial Sequence
  Synthetic oligonucleotide; TTC chr2 60477310 60477331 60477315 60477310 -
agagtaatttgggagttgtgtg

SEQ ID NO: 223417 - DNA, 22 bp, Artificial Sequence
  Synthetic oligonucleotide; TTT chr2 60477300 60477321 60477305 60477300 -
gggagttgtgtgttctgctggc

SEQ ID NO: 223418 - DNA, 22 bp, Artificial Sequence
  Synthetic oligonucleotide; TTG chr2 60477299 60477320 60477304 60477299 -
ggagttgtgtgttctgctggct

SEQ ID NO: 223419 - DNA, 22 bp, Artificial Sequence
  Synthetic oligonucleotide; TTG chr2 60477292 60477313 60477297 60477292 -
tgtgttctgctggctttgatag

SEQ ID NO: 223420 - DNA, 22 bp, Artificial Sequence
  Synthetic oligonucleotide; TTC chr2 60477285 60477306 60477290 60477285 -
tgctggctttgatagacaagcc

SEQ ID NO: 223421 - DNA, 22 bp, Artificial Sequence
  Synthetic oligonucleotide; CTG chr2 60477283 60477304 60477288 60477283 -
ctggctttgatagacaagccct

SEQ ID NO: 223422 - DNA, 22 bp, Artificial Sequence
  Synthetic oligonucleotide; CTG chr2 60477280 60477301 60477285 60477280 -
gctttgatagacaagcccttct

SEQ ID NO: 223423 - DNA, 22 bp, Artificial Sequence
  Synthetic oligonucleotide; CTT chr2 60477276 60477297 60477281 60477276 -
tgatagacaagcccttctctgc

SEQ ID NO: 223424 - DNA, 22 bp, Artificial Sequence
  Synthetic oligonucleotide; TTT chr2 60477275 60477296 60477280 60477275 -
gatagacaagcccttctctgct

SEQ ID NO: 223425 - DNA, 22 bp, Artificial Sequence
  Synthetic oligonucleotide; TTG chr2 60477274 60477295 60477279 60477274 -
atagacaagcccttctctgctc

SEQ ID NO: 223426 - DNA, 22 bp, Artificial Sequence
  Synthetic oligonucleotide; CTT chr2 60477260 60477281 60477265 60477260 -
ctctgctctggcaggtgttatc

SEQ ID NO: 223427 - DNA, 22 bp, Artificial Sequence
  Synthetic oligonucleotide; TTC chr2 60477259 60477280 60477264 60477259 -
tctgctctggcaggtgttatca

SEQ ID NO: 223428 - DNA, 22 bp, Artificial Sequence
  Synthetic oligonucleotide; CTC chr2 60477257 60477278 60477262 60477257 -
tgctctggcaggtgttatcaga

SEQ ID NO: 223429 - DNA, 22 bp, Artificial Sequence
  Synthetic oligonucleotide; CTG chr2 60477255 60477276 60477260 60477255 -
ctctggcaggtgttatcagaat

SEQ ID NO: 223430 - DNA, 22 bp, Artificial Sequence
  Synthetic oligonucleotide; CTC chr2 60477252 60477273 60477257 60477252 -
tggcaggtgttatcagaatcaa

SEQ ID NO: 223431 - DNA, 22 bp, Artificial Sequence
  Synthetic oligonucleotide; CTG chr2 60477250 60477271 60477255 60477250 -
gcaggtgttatcagaatcaaac

SEQ ID NO: 223432 - DNA, 22 bp, Artificial Sequence
  Synthetic oligonucleotide; TTA chr2 60477240 60477261 60477245 60477240 -
tcagaatcaaacgtttgcaaat

SEQ ID NO: 223433 - DNA, 22 bp, Artificial Sequence
  Synthetic oligonucleotide; TTT chr2 60477224 60477245 60477229 60477224 -
gcaaatgatcattctcatcgca

SEQ ID NO: 223434 - DNA, 22 bp, Artificial Sequence
  Synthetic oligonucleotide; TTG chr2 60477223 60477244 60477228 60477223 -
caaatgatcattctcatcgcat

SEQ ID NO: 223435 - DNA, 22 bp, Artificial Sequence
  Synthetic oligonucleotide; TTC chr2 60477210 60477231 60477215 60477210 -
tcatcgcatccatcttcacagc

SEQ ID NO: 223436 - DNA, 22 bp, Artificial Sequence
  Synthetic oligonucleotide; CTC chr2 60477208 60477229 60477213 60477208 -
atcgcatccatcttcacagccc

SEQ ID NO: 223437 - DNA, 22 bp, Artificial Sequence
  Synthetic oligonucleotide; CTT chr2 60477194 60477215 60477199 60477194 -
cacagccccatgcctcttcctg

SEQ ID NO: 223438 - DNA, 22 bp, Artificial Sequence
  Synthetic oligonucleotide; TTC chr2 60477193 60477214 60477198 60477193 -
acagccccatgcctcttcctga

SEQ ID NO: 223439 - DNA, 22 bp, Artificial Sequence
  Synthetic oligonucleotide; CTC chr2 60477178 60477199 60477183 60477178 -
ttcctgaatgctcagttgaaaa

SEQ ID NO: 223440 - DNA, 22 bp, Artificial Sequence
  Synthetic oligonucleotide; CTT chr2 60477176 60477197 60477181 60477176 -
cctgaatgctcagttgaaaatg

SEQ ID NO: 223441 - DNA, 22 bp, Artificial Sequence
  Synthetic oligonucleotide; TTC chr2 60477175 60477196 60477180 60477175 -
ctgaatgctcagttgaaaatgc

SEQ ID NO: 223442 - DNA, 22 bp, Artificial Sequence
  Synthetic oligonucleotide; CTG chr2 60477172 60477193 60477177 60477172 -
aatgctcagttgaaaatgcgta

SEQ ID NO: 223443 - DNA, 22 bp, Artificial Sequence
  Synthetic oligonucleotide; CTC chr2 60477165 60477186 60477170 60477165 -
agttgaaaatgcgtatttcacc

SEQ ID NO: 223444 - DNA, 22 bp, Artificial Sequence
  Synthetic oligonucleotide; TTG chr2 60477160 60477181 60477165 60477160 -
aaaatgcgtatttcaccttcct

SEQ ID NO: 223445 - DNA, 22 bp, Artificial Sequence
  Synthetic oligonucleotide; TTT chr2 60477147 60477168 60477152 60477147 -
caccttcctcaggtatctaata

SEQ ID NO: 223446 - DNA, 22 bp, Artificial Sequence
  Synthetic oligonucleotide; TTC chr2 60477146 60477167 60477151 60477146 -
accttcctcaggtatctaatac

SEQ ID NO: 223447 - DNA, 22 bp, Artificial Sequence
  Synthetic oligonucleotide; CTT chr2 60477141 60477162 60477146 60477141 -
cctcaggtatctaatacttaac

SEQ ID NO: 223448 - DNA, 22 bp, Artificial Sequence
  Synthetic oligonucleotide; TTC chr2 60477140 60477161 60477145 60477140 -
ctcaggtatctaatacttaacc

SEQ ID NO: 223449 - DNA, 22 bp, Artificial Sequence
  Synthetic oligonucleotide; CTC chr2 60477137 60477158 60477142 60477137 -
aggtatctaatacttaacctgg

SEQ ID NO: 223450 - DNA, 22 bp, Artificial Sequence
  Synthetic oligonucleotide; CTA chr2 60477128 60477149 60477133 60477128 -
atacttaacctgggagaaacgc

SEQ ID NO: 223451 - DNA, 22 bp, Artificial Sequence
  Synthetic oligonucleotide; CTT chr2 60477122 60477143 60477127 60477122 -
aacctgggagaaacgcaagtgt

SEQ ID NO: 223452 - DNA, 22 bp, Artificial Sequence
  Synthetic oligonucleotide; TTA chr2 60477121 60477142 60477126 60477121 -
acctgggagaaacgcaagtgtg

SEQ ID NO: 223453 - DNA, 22 bp, Artificial Sequence
  Synthetic oligonucleotide; CTG chr2 60477116 60477137 60477121 60477116 -
ggagaaacgcaagtgtggtttg

SEQ ID NO: 223454 - DNA, 22 bp, Artificial Sequence
  Synthetic oligonucleotide; TTT chr2 60477095 60477116 60477100 60477095 -
gcaaggctttccaggtgtccaa

SEQ ID NO: 223455 - DNA, 22 bp, Artificial Sequence
  Synthetic oligonucleotide; TTG chr2 60477094 60477115 60477099 60477094 -
caaggctttccaggtgtccaaa

SEQ ID NO: 223456 - DNA, 22 bp, Artificial Sequence
  Synthetic oligonucleotide; CTT chr2 60477086 60477107 60477091 60477086 -
tccaggtgtccaaatgatgatt

SEQ ID NO: 223457 - DNA, 22 bp, Artificial Sequence
  Synthetic oligonucleotide; TTT chr2 60477085 60477106 60477090 60477085 -
ccaggtgtccaaatgatgattt

SEQ ID NO: 223458 - DNA, 22 bp, Artificial Sequence
  Synthetic oligonucleotide; TTC chr2 60477084 60477105 60477089 60477084 -
caggtgtccaaatgatgatttc

SEQ ID NO: 223459 - DNA, 22 bp, Artificial Sequence
  Synthetic oligonucleotide; TTT chr2 60477063 60477084 60477068 60477063 -
cccatccttttcttcatttctc

SEQ ID NO: 223460 - DNA, 22 bp, Artificial Sequence
  Synthetic oligonucleotide; TTC chr2 60477062 60477083 60477067 60477062 -
ccatccttttcttcatttctcg

SEQ ID NO: 223461 - DNA, 22 bp, Artificial Sequence
  Synthetic oligonucleotide; CTT chr2 60477054 60477075 60477059 60477054 -
ttcttcatttctcgagtggggc

SEQ ID NO: 223462 - DNA, 22 bp, Artificial Sequence
  Synthetic oligonucleotide; TTT chr2 60477053 60477074 60477058 60477053 -
tcttcatttctcgagtggggca

SEQ ID NO: 223463 - DNA, 22 bp, Artificial Sequence
  Synthetic oligonucleotide; TTT chr2 60477052 60477073 60477057 60477052 -
cttcatttctcgagtggggcag

SEQ ID NO: 223464 - DNA, 22 bp, Artificial Sequence
  Synthetic oligonucleotide; TTC chr2 60477051 60477072 60477056 60477051 -
ttcatttctcgagtggggcagg

SEQ ID NO: 223465 - DNA, 22 bp, Artificial Sequence
  Synthetic oligonucleotide; CTT chr2 60477049 60477070 60477054 60477049 -
catttctcgagtggggcaggga

SEQ ID NO: 223466 - DNA, 22 bp, Artificial Sequence
  Synthetic oligonucleotide; TTC chr2 60477048 60477069 60477053 60477048 -
atttctcgagtggggcagggag

SEQ ID NO: 223467 - DNA, 22 bp, Artificial Sequence
  Synthetic oligonucleotide; TTT chr2 60477044 60477065 60477049 60477044 -
ctcgagtggggcagggaggcat

SEQ ID NO: 223468 - DNA, 22 bp, Artificial Sequence
  Synthetic oligonucleotide; TTC chr2 60477043 60477064 60477048 60477043 -
tcgagtggggcagggaggcatc

SEQ ID NO: 223469 - DNA, 22 bp, Artificial Sequence
  Synthetic oligonucleotide; CTC chr2 60477041 60477062 60477046 60477041 -
gagtggggcagggaggcatcgg

SEQ ID NO: 223470 - DNA, 22 bp, Artificial Sequence
  Synthetic oligonucleotide; TTT chr2 60477012 60477033 60477017 60477012 -
gtgatacgtttgtgtgaagctg

SEQ ID NO: 223471 - DNA, 22 bp, Artificial Sequence
  Synthetic oligonucleotide; TTG chr2 60477011 60477032 60477016 60477011 -
tgatacgtttgtgtgaagctgg

SEQ ID NO: 223472 - DNA, 22 bp, Artificial Sequence
  Synthetic oligonucleotide; TTT chr2 60477001 60477022 60477006 60477001 -
gtgtgaagctggacaattcggg

SEQ ID NO: 223473 - DNA, 22 bp, Artificial Sequence
  Synthetic oligonucleotide; TTG chr2 60477000 60477021 60477005 60477000 -
tgtgaagctggacaattcgggt

SEQ ID NO: 223474 - DNA, 22 bp, Artificial Sequence
  Synthetic oligonucleotide; CTG chr2 60476990 60477011 60476995 60476990 -
gacaattcgggtgacagaaata

SEQ ID NO: 223475 - DNA, 22 bp, Artificial Sequence
  Synthetic oligonucleotide; TTC chr2 60476982 60477003 60476987 60476982 -
gggtgacagaaatatgttcagg

SEQ ID NO: 223476 - DNA, 22 bp, Artificial Sequence
  Synthetic oligonucleotide; TTC chr2 60476963 60476984 60476968 60476963 -
agggcagtgtcttttatcgtcc

SEQ ID NO: 223477 - DNA, 22 bp, Artificial Sequence
  Synthetic oligonucleotide; CTT chr2 60476950 60476971 60476955 60476950 -
ttatcgtcccttctaactacaa

SEQ ID NO: 223478 - DNA, 22 bp, Artificial Sequence
  Synthetic oligonucleotide; TTT chr2 60476949 60476970 60476954 60476949 -
tatcgtcccttctaactacaaa

SEQ ID NO: 223479 - DNA, 22 bp, Artificial Sequence
  Synthetic oligonucleotide; TTT chr2 60476948 60476969 60476953 60476948 -
atcgtcccttctaactacaaag

SEQ ID NO: 223480 - DNA, 22 bp, Artificial Sequence
  Synthetic oligonucleotide; TTA chr2 60476947 60476968 60476952 60476947 -
tcgtcccttctaactacaaagg

SEQ ID NO: 223481 - DNA, 22 bp, Artificial Sequence
  Synthetic oligonucleotide; CTT chr2 60476938 60476959 60476943 60476938 -
ctaactacaaaggcatggattg

SEQ ID NO: 223482 - DNA, 22 bp, Artificial Sequence
  Synthetic oligonucleotide; TTC chr2 60476937 60476958 60476942 60476937 -
taactacaaaggcatggattgc

SEQ ID NO: 223483 - DNA, 22 bp, Artificial Sequence
  Synthetic oligonucleotide; CTA chr2 60476935 60476956 60476940 60476935 -
actacaaaggcatggattgcag

SEQ ID NO: 223484 - DNA, 22 bp, Artificial Sequence
  Synthetic oligonucleotide; CTA chr2 60476931 60476952 60476936 60476931 -
caaaggcatggattgcagttga

SEQ ID NO: 223485 - DNA, 22 bp, Artificial Sequence
  Synthetic oligonucleotide; TTG chr2 60476916 60476937 60476921 60476916 -
cagttgagccccactttcagaa

SEQ ID NO: 223486 - DNA, 22 bp, Artificial Sequence
  Synthetic oligonucleotide; TTG chr2 60476910 60476931 60476915 60476910 -
agccccactttcagaaggccca

SEQ ID NO: 223487 - DNA, 22 bp, Artificial Sequence
  Synthetic oligonucleotide; CTT chr2 60476900 60476921 60476905 60476900 -
tcagaaggcccaatacacacaa

SEQ ID NO: 223488 - DNA, 22 bp, Artificial Sequence
  Synthetic oligonucleotide; TTT chr2 60476899 60476920 60476904 60476899 -
cagaaggcccaatacacacaaa

SEQ ID NO: 223489 - DNA, 22 bp, Artificial Sequence
  Synthetic oligonucleotide; TTC chr2 60476898 60476919 60476903 60476898 -
agaaggcccaatacacacaaaa

SEQ ID NO: 223490 - DNA, 22 bp, Artificial Sequence
  Synthetic oligonucleotide; CTC chr2 60476871 60476892 60476876 60476871 -
attaatggaaactgataaatta

SEQ ID NO: 223491 - DNA, 22 bp, Artificial Sequence
  Synthetic oligonucleotide; TTA chr2 60476867 60476888 60476872 60476867 -
atggaaactgataaattagaga

SEQ ID NO: 223492 - DNA, 22 bp, Artificial Sequence
  Synthetic oligonucleotide; CTG chr2 60476857 60476878 60476862 60476857 -
ataaattagagagtgatttttc

SEQ ID NO: 223493 - DNA, 22 bp, Artificial Sequence
  Synthetic oligonucleotide; TTA chr2 60476849 60476870 60476854 60476849 -
gagagtgatttttcacattaca

SEQ ID NO: 223494 - DNA, 22 bp, Artificial Sequence
  Synthetic oligonucleotide; TTT chr2 60476838 60476859 60476843 60476838 -
ttcacattacagaaagattgtt

SEQ ID NO: 223495 - DNA, 22 bp, Artificial Sequence
  Synthetic oligonucleotide; TTT chr2 60476837 60476858 60476842 60476837 -
tcacattacagaaagattgtta

SEQ ID NO: 223496 - DNA, 22 bp, Artificial Sequence
  Synthetic oligonucleotide; TTT chr2 60476836 60476857 60476841 60476836 -
cacattacagaaagattgttaa

SEQ ID NO: 223497 - DNA, 22 bp, Artificial Sequence
  Synthetic oligonucleotide; TTC chr2 60476835 60476856 60476840 60476835 -
acattacagaaagattgttaac

SEQ ID NO: 223498 - DNA, 22 bp, Artificial Sequence
  Synthetic oligonucleotide; TTA chr2 60476829 60476850 60476834 60476829 -
cagaaagattgttaacttttca

SEQ ID NO: 223499 - DNA, 22 bp, Artificial Sequence
  Synthetic oligonucleotide; TTG chr2 60476818 60476839 60476823 60476818 -
ttaacttttcaaaaggtttcac

SEQ ID NO: 223500 - DNA, 22 bp, Artificial Sequence
  Synthetic oligonucleotide; TTA chr2 60476815 60476836 60476820 60476815 -
acttttcaaaaggtttcaccac

SEQ ID NO: 223501 - DNA, 22 bp, Artificial Sequence
  Synthetic oligonucleotide; CTT chr2 60476811 60476832 60476816 60476811 -
ttcaaaaggtttcaccacaggg

SEQ ID NO: 223502 - DNA, 22 bp, Artificial Sequence
  Synthetic oligonucleotide; TTT chr2 60476810 60476831 60476815 60476810 -
tcaaaaggtttcaccacagggt

SEQ ID NO: 223503 - DNA, 22 bp, Artificial Sequence
  Synthetic oligonucleotide; TTT chr2 60476809 60476830 60476814 60476809 -
caaaaggtttcaccacagggtt

SEQ ID NO: 223504 - DNA, 22 bp, Artificial Sequence
  Synthetic oligonucleotide; TTC chr2 60476808 60476829 60476813 60476808 -
aaaaggtttcaccacagggttt

SEQ ID NO: 223505 - DNA, 22 bp, Artificial Sequence
  Synthetic oligonucleotide; TTT chr2 60476799 60476820 60476804 60476799 -
caccacagggtttctttaaata

SEQ ID NO: 223506 - DNA, 22 bp, Artificial Sequence
  Synthetic oligonucleotide; TTC chr2 60476798 60476819 60476803 60476798 -
accacagggtttctttaaatag

SEQ ID NO: 223507 - DNA, 22 bp, Artificial Sequence
  Synthetic oligonucleotide; TTT chr2 60476786 60476807 60476791 60476786 -
ctttaaatagtgagctccccca

SEQ ID NO: 223508 - DNA, 22 bp, Artificial Sequence
  Synthetic oligonucleotide; TTC chr2 60476785 60476806 60476790 60476785 -
tttaaatagtgagctcccccac

SEQ ID NO: 223509 - DNA, 22 bp, Artificial Sequence
  Synthetic oligonucleotide; CTT chr2 60476783 60476804 60476788 60476783 -
taaatagtgagctcccccactg

SEQ ID NO: 223510 - DNA, 22 bp, Artificial Sequence
  Synthetic oligonucleotide; TTT chr2 60476782 60476803 60476787 60476782 -
aaatagtgagctcccccactga

SEQ ID NO: 223511 - DNA, 22 bp, Artificial Sequence
  Synthetic oligonucleotide; TTA chr2 60476781 60476802 60476786 60476781 -
aatagtgagctcccccactgaa

SEQ ID NO: 223512 - DNA, 22 bp, Artificial Sequence
  Synthetic oligonucleotide; CTC chr2 60476769 60476790 60476774 60476769 -
ccccactgaatttaaagtgttt

SEQ ID NO: 223513 - DNA, 22 bp, Artificial Sequence
  Synthetic oligonucleotide; CTG chr2 60476761 60476782 60476766 60476761 -
aatttaaagtgtttgtttacag

SEQ ID NO: 223514 - DNA, 22 bp, Artificial Sequence
  Synthetic oligonucleotide; TTT chr2 60476756 60476777 60476761 60476756 -
aaagtgtttgtttacagatcat

SEQ ID NO: 223515 - DNA, 22 bp, Artificial Sequence
  Synthetic oligonucleotide; TTA chr2 60476755 60476776 60476760 60476755 -
aagtgtttgtttacagatcatt

SEQ ID NO: 223516 - DNA, 22 bp, Artificial Sequence
  Synthetic oligonucleotide; TTT chr2 60476747 60476768 60476752 60476747 -
gtttacagatcattaactactt

SEQ ID NO: 223517 - DNA, 22 bp, Artificial Sequence
  Synthetic oligonucleotide; TTG chr2 60476746 60476767 60476751 60476746 -
tttacagatcattaactacttg

SEQ ID NO: 223518 - DNA, 22 bp, Artificial Sequence
  Synthetic oligonucleotide; TTT chr2 60476743 60476764 60476748 60476743 -
acagatcattaactacttgaca

SEQ ID NO: 223519 - DNA, 22 bp, Artificial Sequence
  Synthetic oligonucleotide; TTA chr2 60476742 60476763 60476747 60476742 -
cagatcattaactacttgacag

SEQ ID NO: 223520 - DNA, 22 bp, Artificial Sequence
  Synthetic oligonucleotide; TTA chr2 60476732 60476753 60476737 60476732 -
actacttgacagagaggatatt

SEQ ID NO: 223521 - DNA, 22 bp, Artificial Sequence
  Synthetic oligonucleotide; CTA chr2 60476728 60476749 60476733 60476728 -
cttgacagagaggatattgggg

SEQ ID NO: 223522 - DNA, 22 bp, Artificial Sequence
  Synthetic oligonucleotide; CTT chr2 60476725 60476746 60476730 60476725 -
gacagagaggatattgggggtt

SEQ ID NO: 223523 - DNA, 22 bp, Artificial Sequence
  Synthetic oligonucleotide; TTG chr2 60476724 60476745 60476729 60476724 -
acagagaggatattgggggttg

SEQ ID NO: 223524 - DNA, 22 bp, Artificial Sequence
  Synthetic oligonucleotide; TTG chr2 60476709 60476730 60476714 60476709 -
ggggttgggggaaggaagacac

SEQ ID NO: 223525 - DNA, 22 bp, Artificial Sequence
  Synthetic oligonucleotide; TTG chr2 60476702 60476723 60476707 60476702 -
ggggaaggaagacacacttaaa

SEQ ID NO: 223526 - DNA, 22 bp, Artificial Sequence
  Synthetic oligonucleotide; CTT chr2 60476683 60476704 60476688 60476683 -
aaaaggtaaaatgttagaagcc

SEQ ID NO: 223527 - DNA, 22 bp, Artificial Sequence
  Synthetic oligonucleotide; TTA chr2 60476682 60476703 60476687 60476682 -
aaaggtaaaatgttagaagccc

SEQ ID NO: 223528 - DNA, 22 bp, Artificial Sequence
  Synthetic oligonucleotide; TTA chr2 60476667 60476688 60476672 60476667 -
gaagccctgccaattttcaatg

SEQ ID NO: 223529 - DNA, 22 bp, Artificial Sequence
  Synthetic oligonucleotide; CTG chr2 60476658 60476679 60476663 60476658 -
ccaattttcaatgagcctggaa

SEQ ID NO: 223530 - DNA, 22 bp, Artificial Sequence
  Synthetic oligonucleotide; TTT chr2 60476651 60476672 60476656 60476651 -
tcaatgagcctggaagggtgac

SEQ ID NO: 223531 - DNA, 22 bp, Artificial Sequence
  Synthetic oligonucleotide; TTT chr2 60476650 60476671 60476655 60476650 -
caatgagcctggaagggtgacg

SEQ ID NO: 223532 - DNA, 22 bp, Artificial Sequence
  Synthetic oligonucleotide; TTC chr2 60476649 60476670 60476654 60476649 -
aatgagcctggaagggtgacga

SEQ ID NO: 223533 - DNA, 22 bp, Artificial Sequence
  Synthetic oligonucleotide; CTG chr2 60476639 60476660 60476644 60476639 -
gaagggtgacgaaacatctctg

SEQ ID NO: 223534 - DNA, 22 bp, Artificial Sequence
  Synthetic oligonucleotide; CTC chr2 60476619 60476640 60476624 60476619 -
tgaaattatgttggttagcaaa

SEQ ID NO: 223535 - DNA, 22 bp, Artificial Sequence
  Synthetic oligonucleotide; CTG chr2 60476617 60476638 60476622 60476617 -
aaattatgttggttagcaaata

SEQ ID NO: 223536 - DNA, 22 bp, Artificial Sequence
  Synthetic oligonucleotide; TTA chr2 60476611 60476632 60476616 60476611 -
tgttggttagcaaatatgattt

SEQ ID NO: 223537 - DNA, 22 bp, Artificial Sequence
  Synthetic oligonucleotide; TTG chr2 60476606 60476627 60476611 60476606 -
gttagcaaatatgatttatttt

SEQ ID NO: 223538 - DNA, 22 bp, Artificial Sequence
  Synthetic oligonucleotide; TTA chr2 60476602 60476623 60476607 60476602 -
gcaaatatgatttattttacag

SEQ ID NO: 223539 - DNA, 22 bp, Artificial Sequence
  Synthetic oligonucleotide; TTT chr2 60476589 60476610 60476594 60476589 -
attttacagaaattcattttac

SEQ ID NO: 223540 - DNA, 22 bp, Artificial Sequence
  Synthetic oligonucleotide; TTA chr2 60476588 60476609 60476593 60476588 -
ttttacagaaattcattttaca

SEQ ID NO: 223541 - DNA, 22 bp, Artificial Sequence
  Synthetic oligonucleotide; TTT chr2 60476585 60476606 60476590 60476585 -
tacagaaattcattttacacat

SEQ ID NO: 223542 - DNA, 22 bp, Artificial Sequence
  Synthetic oligonucleotide; TTT chr2 60476584 60476605 60476589 60476584 -
acagaaattcattttacacatg

SEQ ID NO: 223543 - DNA, 22 bp, Artificial Sequence
  Synthetic oligonucleotide; TTA chr2 60476583 60476604 60476588 60476583 -
cagaaattcattttacacatgg

SEQ ID NO: 223544 - DNA, 22 bp, Artificial Sequence
  Synthetic oligonucleotide; TTC chr2 60476574 60476595 60476579 60476574 -
attttacacatggctttccaag

SEQ ID NO: 223545 - DNA, 22 bp, Artificial Sequence
  Synthetic oligonucleotide; TTT chr2 60476570 60476591 60476575 60476570 -
tacacatggctttccaagaacc

SEQ ID NO: 223546 - DNA, 22 bp, Artificial Sequence
  Synthetic oligonucleotide; TTT chr2 60476569 60476590 60476574 60476569 -
acacatggctttccaagaaccc

SEQ ID NO: 223547 - DNA, 22 bp, Artificial Sequence
  Synthetic oligonucleotide; TTA chr2 60476568 60476589 60476573 60476568 -
cacatggctttccaagaaccct

SEQ ID NO: 223548 - DNA, 22 bp, Artificial Sequence
  Synthetic oligonucleotide; CTT chr2 60476558 60476579 60476563 60476558 -
tccaagaaccctccatgctgat

SEQ ID NO: 223549 - DNA, 22 bp, Artificial Sequence
  Synthetic oligonucleotide; TTT chr2 60476557 60476578 60476562 60476557 -
ccaagaaccctccatgctgatg

SEQ ID NO: 223550 - DNA, 22 bp, Artificial Sequence
  Synthetic oligonucleotide; TTC chr2 60476556 60476577 60476561 60476556 -
caagaaccctccatgctgatgg

SEQ ID NO: 223551 - DNA, 22 bp, Artificial Sequence
  Synthetic oligonucleotide; CTC chr2 60476545 60476566 60476550 60476545 -
catgctgatggggtgtggtggg

SEQ ID NO: 223552 - DNA, 22 bp, Artificial Sequence
  Synthetic oligonucleotide; CTG chr2 60476538 60476559 60476543 60476538 -
atggggtgtggtgggaggtcaa

SEQ ID NO: 223553 - DNA, 22 bp, Artificial Sequence
  Synthetic oligonucleotide; CTG chr2 60476500 60476521 60476505 60476500 -
ggctttgctgtcctggtttgtg

SEQ ID NO: 223554 - DNA, 22 bp, Artificial Sequence
  Synthetic oligonucleotide; CTT chr2 60476495 60476516 60476500 60476495 -
tgctgtcctggtttgtggtggc

SEQ ID NO: 223555 - DNA, 22 bp, Artificial Sequence
  Synthetic oligonucleotide; TTT chr2 60476494 60476515 60476499 60476494 -
gctgtcctggtttgtggtggct

SEQ ID NO: 223556 - DNA, 22 bp, Artificial Sequence
  Synthetic oligonucleotide; TTG chr2 60476493 60476514 60476498 60476493 -
ctgtcctggtttgtggtggctg

SEQ ID NO: 223557 - DNA, 22 bp, Artificial Sequence
  Synthetic oligonucleotide; CTG chr2 60476490 60476511 60476495 60476490 -
tcctggtttgtggtggctgggg

SEQ ID NO: 223558 - DNA, 22 bp, Artificial Sequence
  Synthetic oligonucleotide; CTG chr2 60476485 60476506 60476490 60476485 -
gtttgtggtggctggggagagg

SEQ ID NO: 223559 - DNA, 22 bp, Artificial Sequence
  Synthetic oligonucleotide; TTT chr2 60476481 60476502 60476486 60476481 -
gtggtggctggggagaggactc

SEQ ID NO: 223560 - DNA, 22 bp, Artificial Sequence
  Synthetic oligonucleotide; TTG chr2 60476480 60476501 60476485 60476480 -
tggtggctggggagaggactcc

SEQ ID NO: 223561 - DNA, 22 bp, Artificial Sequence
  Synthetic oligonucleotide; CTG chr2 60476471 60476492 60476476 60476471 -
gggagaggactcccttttctta

SEQ ID NO: 223562 - DNA, 22 bp, Artificial Sequence
  Synthetic oligonucleotide; CTC chr2 60476459 60476480 60476464 60476459 -
ccttttcttagagtcctgtgtg

SEQ ID NO: 223563 - DNA, 22 bp, Artificial Sequence
  Synthetic oligonucleotide; CTT chr2 60476455 60476476 60476460 60476455 -
ttcttagagtcctgtgtgtgcc

SEQ ID NO: 223564 - DNA, 22 bp, Artificial Sequence
  Synthetic oligonucleotide; TTT chr2 60476454 60476475 60476459 60476454 -
tcttagagtcctgtgtgtgcct

SEQ ID NO: 223565 - DNA, 22 bp, Artificial Sequence
  Synthetic oligonucleotide; TTT chr2 60476453 60476474 60476458 60476453 -
cttagagtcctgtgtgtgcctt

SEQ ID NO: 223566 - DNA, 22 bp, Artificial Sequence
  Synthetic oligonucleotide; TTC chr2 60476452 60476473 60476457 60476452 -
ttagagtcctgtgtgtgccttt

SEQ ID NO: 223567 - DNA, 22 bp, Artificial Sequence
  Synthetic oligonucleotide; CTT chr2 60476450 60476471 60476455 60476450 -
agagtcctgtgtgtgcctttgt

SEQ ID NO: 223568 - DNA, 22 bp, Artificial Sequence
  Synthetic oligonucleotide; TTA chr2 60476449 60476470 60476454 60476449 -
gagtcctgtgtgtgcctttgtg

SEQ ID NO: 223569 - DNA, 22 bp, Artificial Sequence
  Synthetic oligonucleotide; CTG chr2 60476441 60476462 60476446 60476441 -
tgtgtgcctttgtgagcaatgg

SEQ ID NO: 223570 - DNA, 22 bp, Artificial Sequence
  Synthetic oligonucleotide; CTT chr2 60476431 60476452 60476436 60476431 -
tgtgagcaatgggtgccaggct

SEQ ID NO: 223571 - DNA, 22 bp, Artificial Sequence
  Synthetic oligonucleotide; TTT chr2 60476430 60476451 60476435 60476430 -
gtgagcaatgggtgccaggctc

SEQ ID NO: 223572 - DNA, 22 bp, Artificial Sequence
  Synthetic oligonucleotide; TTG chr2 60476429 60476450 60476434 60476429 -
tgagcaatgggtgccaggctct

SEQ ID NO: 223573 - DNA, 22 bp, Artificial Sequence
  Synthetic oligonucleotide; CTC chr2 60476408 60476429 60476413 60476408 -
tggcatgaggccgagctttgct

SEQ ID NO: 223574 - DNA, 22 bp, Artificial Sequence
  Synthetic oligonucleotide; CTG chr2 60476406 60476427 60476411 60476406 -
gcatgaggccgagctttgctac

SEQ ID NO: 223575 - DNA, 22 bp, Artificial Sequence
  Synthetic oligonucleotide; CTT chr2 60476390 60476411 60476395 60476390 -
tgctactggacttctggcatga

SEQ ID NO: 223576 - DNA, 22 bp, Artificial Sequence
  Synthetic oligonucleotide; TTT chr2 60476389 60476410 60476394 60476389 -
gctactggacttctggcatgag

SEQ ID NO: 223577 - DNA, 22 bp, Artificial Sequence
  Synthetic oligonucleotide; TTG chr2 60476388 60476409 60476393 60476388 -
ctactggacttctggcatgagc

SEQ ID NO: 223578 - DNA, 22 bp, Artificial Sequence
  Synthetic oligonucleotide; CTA chr2 60476385 60476406 60476390 60476385 -
ctggacttctggcatgagccac

SEQ ID NO: 223579 - DNA, 22 bp, Artificial Sequence
  Synthetic oligonucleotide; CTG chr2 60476382 60476403 60476387 60476382 -
gacttctggcatgagccactga

SEQ ID NO: 223580 - DNA, 22 bp, Artificial Sequence
  Synthetic oligonucleotide; CTT chr2 60476377 60476398 60476382 60476377 -
ctggcatgagccactgagacct

SEQ ID NO: 223581 - DNA, 22 bp, Artificial Sequence
  Synthetic oligonucleotide; TTC chr2 60476376 60476397 60476381 60476376 -
tggcatgagccactgagacctt

SEQ ID NO: 223582 - DNA, 22 bp, Artificial Sequence
  Synthetic oligonucleotide; CTG chr2 60476374 60476395 60476379 60476374 -
gcatgagccactgagacctttt

SEQ ID NO: 223583 - DNA, 22 bp, Artificial Sequence
  Synthetic oligonucleotide; CTG chr2 60476361 60476382 60476366 60476361 -
agaccttttcccttgacattta

SEQ ID NO: 223584 - DNA, 22 bp, Artificial Sequence
  Synthetic oligonucleotide; CTT chr2 60476354 60476375 60476359 60476354 -
ttcccttgacatttagcctggg

SEQ ID NO: 223585 - DNA, 22 bp, Artificial Sequence
  Synthetic oligonucleotide; TTT chr2 60476353 60476374 60476358 60476353 -
tcccttgacatttagcctgggt

SEQ ID NO: 223586 - DNA, 22 bp, Artificial Sequence
  Synthetic oligonucleotide; TTT chr2 60476352 60476373 60476357 60476352 -
cccttgacatttagcctgggtt

SEQ ID NO: 223587 - DNA, 22 bp, Artificial Sequence
  Synthetic oligonucleotide; TTC chr2 60476351 60476372 60476356 60476351 -
ccttgacatttagcctgggttt

SEQ ID NO: 223588 - DNA, 22 bp, Artificial Sequence
  Synthetic oligonucleotide; CTT chr2 60476347 60476368 60476352 60476347 -
gacatttagcctgggtttgggg

SEQ ID NO: 223589 - DNA, 22 bp, Artificial Sequence
  Synthetic oligonucleotide; TTG chr2 60476346 60476367 60476351 60476346 -
acatttagcctgggtttgggga

SEQ ID NO: 223590 - DNA, 22 bp, Artificial Sequence
  Synthetic oligonucleotide; TTT chr2 60476340 60476361 60476345 60476340 -
agcctgggtttggggaagtttc

SEQ ID NO: 223591 - DNA, 22 bp, Artificial Sequence
  Synthetic oligonucleotide; TTA chr2 60476339 60476360 60476344 60476339 -
gcctgggtttggggaagtttct

SEQ ID NO: 223592 - DNA, 22 bp, Artificial Sequence
  Synthetic oligonucleotide; CTG chr2 60476334 60476355 60476339 60476334 -
ggtttggggaagtttcttcctg

SEQ ID NO: 223593 - DNA, 22 bp, Artificial Sequence
  Synthetic oligonucleotide; TTT chr2 60476329 60476350 60476334 60476329 -
ggggaagtttcttcctggttct

SEQ ID NO: 223594 - DNA, 22 bp, Artificial Sequence
  Synthetic oligonucleotide; TTG chr2 60476328 60476349 60476333 60476328 -
gggaagtttcttcctggttctc

SEQ ID NO: 223595 - DNA, 22 bp, Artificial Sequence
  Synthetic oligonucleotide; TTT chr2 60476319 60476340 60476324 60476319 -
cttcctggttctctgaccttca

SEQ ID NO: 223596 - DNA, 22 bp, Artificial Sequence
  Synthetic oligonucleotide; TTC chr2 60476318 60476339 60476323 60476318 -
ttcctggttctctgaccttcag

SEQ ID NO: 223597 - DNA, 22 bp, Artificial Sequence
  Synthetic oligonucleotide; CTT chr2 60476316 60476337 60476321 60476316 -
cctggttctctgaccttcagtc

SEQ ID NO: 223598 - DNA, 22 bp, Artificial Sequence
  Synthetic oligonucleotide; TTC chr2 60476315 60476336 60476320 60476315 -
ctggttctctgaccttcagtct

SEQ ID NO: 223599 - DNA, 22 bp, Artificial Sequence
  Synthetic oligonucleotide; CTG chr2 60476312 60476333 60476317 60476312 -
gttctctgaccttcagtctcat

SEQ ID NO: 223600 - DNA, 22 bp, Artificial Sequence
  Synthetic oligonucleotide; TTC chr2 60476308 60476329 60476313 60476308 -
tctgaccttcagtctcattggc

SEQ ID NO: 223601 - DNA, 22 bp, Artificial Sequence
  Synthetic oligonucleotide; CTC chr2 60476306 60476327 60476311 60476306 -
tgaccttcagtctcattggctc

SEQ ID NO: 223602 - DNA, 22 bp, Artificial Sequence
  Synthetic oligonucleotide; CTG chr2 60476304 60476325 60476309 60476304 -
accttcagtctcattggctcag

SEQ ID NO: 223603 - DNA, 22 bp, Artificial Sequence
  Synthetic oligonucleotide; CTT chr2 60476299 60476320 60476304 60476299 -
cagtctcattggctcaggacac

SEQ ID NO: 223604 - DNA, 22 bp, Artificial Sequence
  Synthetic oligonucleotide; TTC chr2 60476298 60476319 60476303 60476298 -
agtctcattggctcaggacaca

SEQ ID NO: 223605 - DNA, 22 bp, Artificial Sequence
  Synthetic oligonucleotide; CTC chr2 60476292 60476313 60476297 60476292 -
attggctcaggacacacctagg

SEQ ID NO: 223606 - DNA, 22 bp, Artificial Sequence
  Synthetic oligonucleotide; TTG chr2 60476288 60476309 60476293 60476288 -
gctcaggacacacctaggtttc

SEQ ID NO: 223607 - DNA, 22 bp, Artificial Sequence
  Synthetic oligonucleotide; CTC chr2 60476284 60476305 60476289 60476284 -
aggacacacctaggtttcctcc

SEQ ID NO: 223608 - DNA, 22 bp, Artificial Sequence
  Synthetic oligonucleotide; CTA chr2 60476272 60476293 60476277 60476272 -
ggtttcctccttgaagctcaga

SEQ ID NO: 223609 - DNA, 22 bp, Artificial Sequence
  Synthetic oligonucleotide; TTT chr2 60476267 60476288 60476272 60476267 -
cctccttgaagctcagacatgt

SEQ ID NO: 223610 - DNA, 22 bp, Artificial Sequence
  Synthetic oligonucleotide; TTC chr2 60476266 60476287 60476271 60476266 -
ctccttgaagctcagacatgta

SEQ ID NO: 223611 - DNA, 22 bp, Artificial Sequence
  Synthetic oligonucleotide; CTC chr2 60476263 60476284 60476268 60476263 -
cttgaagctcagacatgtaaac

SEQ ID NO: 223612 - DNA, 22 bp, Artificial Sequence
  Synthetic oligonucleotide; CTT chr2 60476260 60476281 60476265 60476260 -
gaagctcagacatgtaaacttt

SEQ ID NO: 223613 - DNA, 22 bp, Artificial Sequence
  Synthetic oligonucleotide; TTG chr2 60476259 60476280 60476264 60476259 -
aagctcagacatgtaaactttg

SEQ ID NO: 223614 - DNA, 22 bp, Artificial Sequence
  Synthetic oligonucleotide; CTC chr2 60476253 60476274 60476258 60476253 -
agacatgtaaactttgcaagac

SEQ ID NO: 223615 - DNA, 22 bp, Artificial Sequence
  Synthetic oligonucleotide; CTT chr2 60476239 60476260 60476244 60476239 -
tgcaagactgtgtcccaggagg

SEQ ID NO: 223616 - DNA, 22 bp, Artificial Sequence
  Synthetic oligonucleotide; TTT chr2 60476238 60476259 60476243 60476238 -
gcaagactgtgtcccaggaggt

SEQ ID NO: 223617 - DNA, 22 bp, Artificial Sequence
  Synthetic oligonucleotide; TTG chr2 60476237 60476258 60476242 60476237 -
caagactgtgtcccaggaggtt

SEQ ID NO: 223618 - DNA, 22 bp, Artificial Sequence
  Synthetic oligonucleotide; CTG chr2 60476229 60476250 60476234 60476229 -
tgtcccaggaggttgaaatcca

SEQ ID NO: 223619 - DNA, 22 bp, Artificial Sequence
  Synthetic oligonucleotide; TTG chr2 60476214 60476235 60476219 60476214 -
aaatccatcatcaggctcactc

SEQ ID NO: 223620 - DNA, 22 bp, Artificial Sequence
  Synthetic oligonucleotide; CTC chr2 60476196 60476217 60476201 60476196 -
actctctaagcctaaggattag

SEQ ID NO: 223621 - DNA, 22 bp, Artificial Sequence
  Synthetic oligonucleotide; CTC chr2 60476192 60476213 60476197 60476192 -
tctaagcctaaggattagcctg

SEQ ID NO: 223622 - DNA, 22 bp, Artificial Sequence
  Synthetic oligonucleotide; CTC chr2 60476190 60476211 60476195 60476190 -
taagcctaaggattagcctggg

SEQ ID NO: 223623 - DNA, 22 bp, Artificial Sequence
  Synthetic oligonucleotide; CTA chr2 60476188 60476209 60476193 60476188 -
agcctaaggattagcctgggga

SEQ ID NO: 223624 - DNA, 22 bp, Artificial Sequence
  Synthetic oligonucleotide; CTA chr2 60476182 60476203 60476187 60476182 -
aggattagcctggggaccaagc

SEQ ID NO: 223625 - DNA, 22 bp, Artificial Sequence
  Synthetic oligonucleotide; TTA chr2 60476175 60476196 60476180 60476175 -
gcctggggaccaagcccagccc

SEQ ID NO: 223626 - DNA, 22 bp, Artificial Sequence
  Synthetic oligonucleotide; CTG chr2 60476170 60476191 60476175 60476170 -
gggaccaagcccagccctgaac

SEQ ID NO: 223627 - DNA, 22 bp, Artificial Sequence
  Synthetic oligonucleotide; CTG chr2 60476151 60476172 60476156 60476151 -
aactctcctataaggccctcct

SEQ ID NO: 223628 - DNA, 22 bp, Artificial Sequence
  Synthetic oligonucleotide; CTC chr2 60476146 60476167 60476151 60476146 -
tcctataaggccctcctcatcc

SEQ ID NO: 223629 - DNA, 22 bp, Artificial Sequence
  Synthetic oligonucleotide; CTC chr2 60476144 60476165 60476149 60476144 -
ctataaggccctcctcatccag

SEQ ID NO: 223630 - DNA, 22 bp, Artificial Sequence
  Synthetic oligonucleotide; CTA chr2 60476141 60476162 60476146 60476141 -
taaggccctcctcatccaggtc

SEQ ID NO: 223631 - DNA, 22 bp, Artificial Sequence
  Synthetic oligonucleotide; CTC chr2 60476131 60476152 60476136 60476131 -
ctcatccaggtcaaggtcatga

SEQ ID NO: 223632 - DNA, 22 bp, Artificial Sequence
  Synthetic oligonucleotide; CTC chr2 60476128 60476149 60476133 60476128 -
atccaggtcaaggtcatgaggg

SEQ ID NO: 223633 - DNA, 22 bp, Artificial Sequence
  Synthetic oligonucleotide; CTG chr2 60476090 60476111 60476095 60476090 -
gccagcttctagcacggcctat

SEQ ID NO: 223634 - DNA, 22 bp, Artificial Sequence
  Synthetic oligonucleotide; CTT chr2 60476082 60476103 60476087 60476082 -
ctagcacggcctatagtaggtc

SEQ ID NO: 223635 - DNA, 22 bp, Artificial Sequence
  Synthetic oligonucleotide; TTC chr2 60476081 60476102 60476086 60476081 -
tagcacggcctatagtaggtct

SEQ ID NO: 223636 - DNA, 22 bp, Artificial Sequence
  Synthetic oligonucleotide; CTA chr2 60476079 60476100 60476084 60476079 -
gcacggcctatagtaggtctct

SEQ ID NO: 223637 - DNA, 22 bp, Artificial Sequence
  Synthetic oligonucleotide; CTA chr2 60476069 60476090 60476074 60476069 -
tagtaggtctcttggttggtcc

SEQ ID NO: 223638 - DNA, 22 bp, Artificial Sequence
  Synthetic oligonucleotide; CTC chr2 60476058 60476079 60476063 60476058 -
ttggttggtccaaaggaggcct

SEQ ID NO: 223639 - DNA, 22 bp, Artificial Sequence
  Synthetic oligonucleotide; CTT chr2 60476056 60476077 60476061 60476056 -
ggttggtccaaaggaggcctgg

SEQ ID NO: 223640 - DNA, 22 bp, Artificial Sequence
  Synthetic oligonucleotide; TTG chr2 60476055 60476076 60476060 60476055 -
gttggtccaaaggaggcctgga

SEQ ID NO: 223641 - DNA, 22 bp, Artificial Sequence
  Synthetic oligonucleotide; TTG chr2 60476051 60476072 60476056 60476051 -
gtccaaaggaggcctggacttg

SEQ ID NO: 223642 - DNA, 22 bp, Artificial Sequence
  Synthetic oligonucleotide; CTG chr2 60476035 60476056 60476040 60476035 -
gacttgcatgggaggcaggaga

SEQ ID NO: 223643 - DNA, 22 bp, Artificial Sequence
  Synthetic oligonucleotide; CTT chr2 60476030 60476051 60476035 60476030 -
gcatgggaggcaggagagagaa

SEQ ID NO: 223644 - DNA, 22 bp, Artificial Sequence
  Synthetic oligonucleotide; TTG chr2 60476029 60476050 60476034 60476029 -
catgggaggcaggagagagaag

SEQ ID NO: 223645 - DNA, 22 bp, Artificial Sequence
  Synthetic oligonucleotide; CTA chr2 60475995 60476016 60476000 60475995 -
atccagtcttctccttttaaag

SEQ ID NO: 223646 - DNA, 22 bp, Artificial Sequence
  Synthetic oligonucleotide; CTT chr2 60475985 60476006 60475990 60475985 -
ctccttttaaagatggaaacac

SEQ ID NO: 223647 - DNA, 22 bp, Artificial Sequence
  Synthetic oligonucleotide; TTC chr2 60475984 60476005 60475989 60475984 -
tccttttaaagatggaaacact

SEQ ID NO: 223648 - DNA, 22 bp, Artificial Sequence
  Synthetic oligonucleotide; CTC chr2 60475982 60476003 60475987 60475982 -
cttttaaagatggaaacactta

SEQ ID NO: 223649 - DNA, 22 bp, Artificial Sequence
  Synthetic oligonucleotide; CTT chr2 60475979 60476000 60475984 60475979 -
ttaaagatggaaacacttaggg

SEQ ID NO: 223650 - DNA, 22 bp, Artificial Sequence
  Synthetic oligonucleotide; TTT chr2 60475978 60475999 60475983 60475978 -
taaagatggaaacacttagggc

SEQ ID NO: 223651 - DNA, 22 bp, Artificial Sequence
  Synthetic oligonucleotide; TTT chr2 60475977 60475998 60475982 60475977 -
aaagatggaaacacttagggcc

SEQ ID NO: 223652 - DNA, 22 bp, Artificial Sequence
  Synthetic oligonucleotide; TTA chr2 60475976 60475997 60475981 60475976 -
aagatggaaacacttagggcca

SEQ ID NO: 223653 - DNA, 22 bp, Artificial Sequence
  Synthetic oligonucleotide; CTT chr2 60475961 60475982 60475966 60475961 -
agggccagaaagaaaggattta

SEQ ID NO: 223654 - DNA, 22 bp, Artificial Sequence
  Synthetic oligonucleotide; TTA chr2 60475960 60475981 60475965 60475960 -
gggccagaaagaaaggatttat

SEQ ID NO: 223655 - DNA, 22 bp, Artificial Sequence
  Synthetic oligonucleotide; TTT chr2 60475940 60475961 60475945 60475940 -
attcaaagtcacgaaacagctg

SEQ ID NO: 223656 - DNA, 22 bp, Artificial Sequence
  Synthetic oligonucleotide; TTA chr2 60475939 60475960 60475944 60475939 -
ttcaaagtcacgaaacagctgg

SEQ ID NO: 223657 - DNA, 22 bp, Artificial Sequence
  Synthetic oligonucleotide; TTC chr2 60475936 60475957 60475941 60475936 -
aaagtcacgaaacagctggtga

SEQ ID NO: 223658 - DNA, 22 bp, Artificial Sequence
  Synthetic oligonucleotide; CTG chr2 60475918 60475939 60475923 60475918 -
gtgagtggcagagttggggttg

SEQ ID NO: 223659 - DNA, 22 bp, Artificial Sequence
  Synthetic oligonucleotide; TTG chr2 60475902 60475923 60475907 60475902 -
gggttgcagaacttaggttcct

SEQ ID NO: 223660 - DNA, 22 bp, Artificial Sequence
  Synthetic oligonucleotide; TTG chr2 60475896 60475917 60475901 60475896 -
cagaacttaggttcctgacttt

SEQ ID NO: 223661 - DNA, 22 bp, Artificial Sequence
  Synthetic oligonucleotide; CTT chr2 60475888 60475909 60475893 60475888 -
aggttcctgactttcctctagc

SEQ ID NO: 223662 - DNA, 22 bp, Artificial Sequence
  Synthetic oligonucleotide; TTA chr2 60475887 60475908 60475892 60475887 -
ggttcctgactttcctctagca

SEQ ID NO: 223663 - DNA, 22 bp, Artificial Sequence
  Synthetic oligonucleotide; TTC chr2 60475882 60475903 60475887 60475882 -
ctgactttcctctagcagtctc

SEQ ID NO: 223664 - DNA, 22 bp, Artificial Sequence
  Synthetic oligonucleotide; CTG chr2 60475879 60475900 60475884 60475879 -
actttcctctagcagtctctcc

SEQ ID NO: 223665 - DNA, 22 bp, Artificial Sequence
  Synthetic oligonucleotide; CTT chr2 60475875 60475896 60475880 60475875 -
tcctctagcagtctctccagag

SEQ ID NO: 223666 - DNA, 22 bp, Artificial Sequence
  Synthetic oligonucleotide; TTT chr2 60475874 60475895 60475879 60475874 -
cctctagcagtctctccagagg

SEQ ID NO: 223667 - DNA, 22 bp, Artificial Sequence
  Synthetic oligonucleotide; TTC chr2 60475873 60475894 60475878 60475873 -
ctctagcagtctctccagagga

SEQ ID NO: 223668 - DNA, 22 bp, Artificial Sequence
  Synthetic oligonucleotide; CTC chr2 60475870 60475891 60475875 60475870 -
tagcagtctctccagaggaaca

SEQ ID NO: 223669 - DNA, 22 bp, Artificial Sequence
  Synthetic oligonucleotide; CTA chr2 60475868 60475889 60475873 60475868 -
gcagtctctccagaggaacaag

SEQ ID NO: 223670 - DNA, 22 bp, Artificial Sequence
  Synthetic oligonucleotide; CTC chr2 60475860 60475881 60475865 60475860 -
tccagaggaacaagtccctgct

SEQ ID NO: 223671 - DNA, 22 bp, Artificial Sequence
  Synthetic oligonucleotide; CTC chr2 60475858 60475879 60475863 60475858 -
cagaggaacaagtccctgcttc

SEQ ID NO: 223672 - DNA, 22 bp, Artificial Sequence
  Synthetic oligonucleotide; CTG chr2 60475840 60475861 60475845 60475840 -
cttcctaaaggaagaaaagaat

SEQ ID NO: 223673 - DNA, 22 bp, Artificial Sequence
  Synthetic oligonucleotide; CTT chr2 60475837 60475858 60475842 60475837 -
cctaaaggaagaaaagaatccg

SEQ ID NO: 223674 - DNA, 22 bp, Artificial Sequence
  Synthetic oligonucleotide; TTC chr2 60475836 60475857 60475841 60475836 -
ctaaaggaagaaaagaatccgg

SEQ ID NO: 223675 - DNA, 22 bp, Artificial Sequence
  Synthetic oligonucleotide; CTA chr2 60475833 60475854 60475838 60475833 -
aaggaagaaaagaatccgggga

SEQ ID NO: 223676 - DNA, 22 bp, Artificial Sequence
  Synthetic oligonucleotide; CTC chr2 60475774 60475795 60475779 60475774 -
tgaaagtagctcccaaataacc

SEQ ID NO: 223677 - DNA, 22 bp, Artificial Sequence
  Synthetic oligonucleotide; CTG chr2 60475772 60475793 60475777 60475772 -
aaagtagctcccaaataacctg

SEQ ID NO: 223678 - DNA, 22 bp, Artificial Sequence
  Synthetic oligonucleotide; CTC chr2 60475762 60475783 60475767 60475762 -
ccaaataacctgataaatacct

SEQ ID NO: 223679 - DNA, 22 bp, Artificial Sequence
  Synthetic oligonucleotide; CTG chr2 60475750 60475771 60475755 60475750 -
ataaatacctcggatagaggca

SEQ ID NO: 223680 - DNA, 22 bp, Artificial Sequence
  Synthetic oligonucleotide; CTC chr2 60475739 60475760 60475744 60475739 -
ggatagaggcaaggctacaccc

SEQ ID NO: 223681 - DNA, 22 bp, Artificial Sequence
  Synthetic oligonucleotide; CTA chr2 60475722 60475743 60475727 60475722 -
cacccctccccctgcccccact

SEQ ID NO: 223682 - DNA, 22 bp, Artificial Sequence
  Synthetic oligonucleotide; CTC chr2 60475714 60475735 60475719 60475714 -
cccctgcccccactacacacaa

SEQ ID NO: 223683 - DNA, 22 bp, Artificial Sequence
  Synthetic oligonucleotide; CTG chr2 60475708 60475729 60475713 60475708 -
cccccactacacacaaacaaga

SEQ ID NO: 223684 - DNA, 22 bp, Artificial Sequence
  Synthetic oligonucleotide; CTA chr2 60475699 60475720 60475704 60475699 -
cacacaaacaagatcctcagct

SEQ ID NO: 223685 - DNA, 22 bp, Artificial Sequence
  Synthetic oligonucleotide; CTC chr2 60475681 60475702 60475686 60475681 -
agctgaggactcagagcaggag

SEQ ID NO: 223686 - DNA, 22 bp, Artificial Sequence
  Synthetic oligonucleotide; CTG chr2 60475676 60475697 60475681 60475676 -
aggactcagagcaggagtaagg

SEQ ID NO: 223687 - DNA, 22 bp, Artificial Sequence
  Synthetic oligonucleotide; CTC chr2 60475669 60475690 60475674 60475669 -
agagcaggagtaagggcacccc

SEQ ID NO: 223688 - DNA, 22 bp, Artificial Sequence
  Synthetic oligonucleotide; CTA chr2 60475645 60475666 60475650 60475645 -
tcctccccatggctttgaaaag

SEQ ID NO: 223689 - DNA, 22 bp, Artificial Sequence
  Synthetic oligonucleotide; CTC chr2 60475640 60475661 60475645 60475640 -
cccatggctttgaaaagaagaa

SEQ ID NO: 223690 - DNA, 22 bp, Artificial Sequence
  Synthetic oligonucleotide; CTT chr2 60475630 60475651 60475635 60475630 -
tgaaaagaagaaagaggggaaa

SEQ ID NO: 223691 - DNA, 22 bp, Artificial Sequence
  Synthetic oligonucleotide; TTT chr2 60475629 60475650 60475634 60475629 -
gaaaagaagaaagaggggaaat

SEQ ID NO: 223692 - DNA, 22 bp, Artificial Sequence
  Synthetic oligonucleotide; TTG chr2 60475628 60475649 60475633 60475628 -
aaaagaagaaagaggggaaatt

SEQ ID NO: 223693 - DNA, 22 bp, Artificial Sequence
  Synthetic oligonucleotide; TTT chr2 60475605 60475626 60475610 60475605 -
ggagggatggtcaagttgatga

SEQ ID NO: 223694 - DNA, 22 bp, Artificial Sequence
  Synthetic oligonucleotide; TTG chr2 60475604 60475625 60475609 60475604 -
gagggatggtcaagttgatgat

SEQ ID NO: 223695 - DNA, 22 bp, Artificial Sequence
  Synthetic oligonucleotide; TTG chr2 60475587 60475608 60475592 60475587 -
atgattgaagagacaaagtagt

SEQ ID NO: 223696 - DNA, 22 bp, Artificial Sequence
  Synthetic oligonucleotide; TTG chr2 60475580 60475601 60475585 60475580 -
aagagacaaagtagtgtaggaa

SEQ ID NO: 223697 - DNA, 22 bp, Artificial Sequence
  Synthetic oligonucleotide; CTC chr2 60475552 60475573 60475557 60475552 -
aatgtttcttgcacagtcattt

SEQ ID NO: 223698 - DNA, 22 bp, Artificial Sequence
  Synthetic oligonucleotide; TTT chr2 60475545 60475566 60475550 60475545 -
cttgcacagtcatttgttgaaa

SEQ ID NO: 223699 - DNA, 22 bp, Artificial Sequence
  Synthetic oligonucleotide; TTC chr2 60475544 60475565 60475549 60475544 -
ttgcacagtcatttgttgaaaa

SEQ ID NO: 223700 - DNA, 22 bp, Artificial Sequence
  Synthetic oligonucleotide; CTT chr2 60475542 60475563 60475547 60475542 -
gcacagtcatttgttgaaaatg

SEQ ID NO: 223701 - DNA, 22 bp, Artificial Sequence
  Synthetic oligonucleotide; TTG chr2 60475541 60475562 60475546 60475541 -
cacagtcatttgttgaaaatgt

SEQ ID NO: 223702 - DNA, 22 bp, Artificial Sequence
  Synthetic oligonucleotide; TTT chr2 60475530 60475551 60475535 60475530 -
gttgaaaatgtgtcagcaagta

SEQ ID NO: 223703 - DNA, 22 bp, Artificial Sequence
  Synthetic oligonucleotide; TTG chr2 60475529 60475550 60475534 60475529 -
ttgaaaatgtgtcagcaagtac

SEQ ID NO: 223704 - DNA, 22 bp, Artificial Sequence
  Synthetic oligonucleotide; TTG chr2 60475526 60475547 60475531 60475526 -
aaaatgtgtcagcaagtacaag

SEQ ID NO: 223705 - DNA, 22 bp, Artificial Sequence
  Synthetic oligonucleotide; CTT chr2 60475496 60475517 60475501 60475496 -
aaactggcaatgagacatctga

SEQ ID NO: 223706 - DNA, 22 bp, Artificial Sequence
  Synthetic oligonucleotide; TTA chr2 60475495 60475516 60475500 60475495 -
aactggcaatgagacatctgaa

SEQ ID NO: 223707 - DNA, 22 bp, Artificial Sequence
  Synthetic oligonucleotide; CTG chr2 60475490 60475511 60475495 60475490 -
gcaatgagacatctgaaataga

SEQ ID NO: 223708 - DNA, 22 bp, Artificial Sequence
  Synthetic oligonucleotide; CTG chr2 60475475 60475496 60475480 60475475 -
aaatagattatttaagccaggg

SEQ ID NO: 223709 - DNA, 22 bp, Artificial Sequence
  Synthetic oligonucleotide; TTA chr2 60475465 60475486 60475470 60475465 -
tttaagccagggaggcagtatt

SEQ ID NO: 223710 - DNA, 22 bp, Artificial Sequence
  Synthetic oligonucleotide; TTT chr2 60475462 60475483 60475467 60475462 -
aagccagggaggcagtattgca

SEQ ID NO: 223711 - DNA, 22 bp, Artificial Sequence
  Synthetic oligonucleotide; TTA chr2 60475461 60475482 60475466 60475461 -
agccagggaggcagtattgcaa

SEQ ID NO: 223712 - DNA, 22 bp, Artificial Sequence
  Synthetic oligonucleotide; TTG chr2 60475442 60475463 60475447 60475442 -
caaggaagaacatggctatcaa

SEQ ID NO: 223713 - DNA, 22 bp, Artificial Sequence
  Synthetic oligonucleotide; CTA chr2 60475424 60475445 60475429 60475424 -
tcaacacttgtttgtctgactc

SEQ ID NO: 223714 - DNA, 22 bp, Artificial Sequence
  Synthetic oligonucleotide; CTT chr2 60475415 60475436 60475420 60475415 -
gtttgtctgactcagaggaata

SEQ ID NO: 223715 - DNA, 22 bp, Artificial Sequence
  Synthetic oligonucleotide; TTG chr2 60475414 60475435 60475419 60475414 -
tttgtctgactcagaggaataa

SEQ ID NO: 223716 - DNA, 22 bp, Artificial Sequence
  Synthetic oligonucleotide; TTT chr2 60475411 60475432 60475416 60475411 -
gtctgactcagaggaataaaac

SEQ ID NO: 223717 - DNA, 22 bp, Artificial Sequence
  Synthetic oligonucleotide; TTG chr2 60475410 60475431 60475415 60475410 -
tctgactcagaggaataaaaca

SEQ ID NO: 223718 - DNA, 22 bp, Artificial Sequence
  Synthetic oligonucleotide; CTG chr2 60475406 60475427 60475411 60475406 -
actcagaggaataaaacatagt

SEQ ID NO: 223719 - DNA, 22 bp, Artificial Sequence
  Synthetic oligonucleotide; CTC chr2 60475402 60475423 60475407 60475402 -
agaggaataaaacatagtaaat

SEQ ID NO: 223720 - DNA, 22 bp, Artificial Sequence
  Synthetic oligonucleotide; TTT chr2 60475378 60475399 60475383 60475378 -
tgccttagcgggccacccacat

SEQ ID NO: 223721 - DNA, 22 bp, Artificial Sequence
  Synthetic oligonucleotide; TTT chr2 60475377 60475398 60475382 60475377 -
gccttagcgggccacccacatt

SEQ ID NO: 223722 - DNA, 22 bp, Artificial Sequence
  Synthetic oligonucleotide; TTG chr2 60475376 60475397 60475381 60475376 -
ccttagcgggccacccacattc

SEQ ID NO: 223723 - DNA, 22 bp, Artificial Sequence
  Synthetic oligonucleotide; CTT chr2 60475372 60475393 60475377 60475372 -
agcgggccacccacattcattg

SEQ ID NO: 223724 - DNA, 22 bp, Artificial Sequence
  Synthetic oligonucleotide; TTA chr2 60475371 60475392 60475376 60475371 -
gcgggccacccacattcattgg

SEQ ID NO: 223725 - DNA, 22 bp, Artificial Sequence
  Synthetic oligonucleotide; TTC chr2 60475354 60475375 60475359 60475354 -
attgggggaagaaacaattgag

SEQ ID NO: 223726 - DNA, 22 bp, Artificial Sequence
  Synthetic oligonucleotide; TTG chr2 60475350 60475371 60475355 60475350 -
ggggaagaaacaattgaggtgg

SEQ ID NO: 223727 - DNA, 22 bp, Artificial Sequence
  Synthetic oligonucleotide; TTG chr2 60475334 60475355 60475339 60475334 -
aggtggggggaaaacagaacag

SEQ ID NO: 223728 - DNA, 22 bp, Artificial Sequence
  Synthetic oligonucleotide; CTT chr2 60475303 60475324 60475308 60475303 -
catggagtttcacaagagtcca

SEQ ID NO: 223729 - DNA, 22 bp, Artificial Sequence
  Synthetic oligonucleotide; TTC chr2 60475302 60475323 60475307 60475302 -
atggagtttcacaagagtccac

SEQ ID NO: 223730 - DNA, 22 bp, Artificial Sequence
  Synthetic oligonucleotide; TTT chr2 60475293 60475314 60475298 60475293 -
cacaagagtccacatggttgtg

SEQ ID NO: 223731 - DNA, 22 bp, Artificial Sequence
  Synthetic oligonucleotide; TTC chr2 60475292 60475313 60475297 60475292 -
acaagagtccacatggttgtgt

SEQ ID NO: 223732 - DNA, 22 bp, Artificial Sequence
  Synthetic oligonucleotide; TTG chr2 60475273 60475294 60475278 60475273 -
tgtcccttattttcagaaaatg

SEQ ID NO: 223733 - DNA, 22 bp, Artificial Sequence
  Synthetic oligonucleotide; CTT chr2 60475265 60475286 60475270 60475265 -
attttcagaaaatgtgaaattg

SEQ ID NO: 223734 - DNA, 22 bp, Artificial Sequence
  Synthetic oligonucleotide; TTA chr2 60475264 60475285 60475269 60475264 -
ttttcagaaaatgtgaaattgg

SEQ ID NO: 223735 - DNA, 22 bp, Artificial Sequence
  Synthetic oligonucleotide; TTT chr2 60475261 60475282 60475266 60475261 -
tcagaaaatgtgaaattggaaa

SEQ ID NO: 223736 - DNA, 22 bp, Artificial Sequence
  Synthetic oligonucleotide; TTT chr2 60475260 60475281 60475265 60475260 -
cagaaaatgtgaaattggaaaa

SEQ ID NO: 223737 - DNA, 22 bp, Artificial Sequence
  Synthetic oligonucleotide; TTC chr2 60475259 60475280 60475264 60475259 -
agaaaatgtgaaattggaaaat

SEQ ID NO: 223738 - DNA, 22 bp, Artificial Sequence
  Synthetic oligonucleotide; TTG chr2 60475243 60475264 60475248 60475243 -
gaaaatacgcacttgtgaaagc

SEQ ID NO: 223739 - DNA, 22 bp, Artificial Sequence
  Synthetic oligonucleotide; CTT chr2 60475229 60475250 60475234 60475229 -
gtgaaagctgaagatgtcacag

SEQ ID NO: 223740 - DNA, 22 bp, Artificial Sequence
  Synthetic oligonucleotide; TTG chr2 60475228 60475249 60475233 60475228 -
tgaaagctgaagatgtcacaga

SEQ ID NO: 223741 - DNA, 22 bp, Artificial Sequence
  Synthetic oligonucleotide; CTG chr2 60475219 60475240 60475224 60475219 -
aagatgtcacagaaatcttcag

SEQ ID NO: 223742 - DNA, 22 bp, Artificial Sequence
  Synthetic oligonucleotide; CTT chr2 60475200 60475221 60475205 60475200 -
cagaggatttatttagatggtc

SEQ ID NO: 223743 - DNA, 22 bp, Artificial Sequence
  Synthetic oligonucleotide; TTC chr2 60475199 60475220 60475204 60475199 -
agaggatttatttagatggtcg

SEQ ID NO: 223744 - DNA, 22 bp, Artificial Sequence
  Synthetic oligonucleotide; TTT chr2 60475190 60475211 60475195 60475190 -
atttagatggtcgtatcctccg

SEQ ID NO: 223745 - DNA, 22 bp, Artificial Sequence
  Synthetic oligonucleotide; TTA chr2 60475189 60475210 60475194 60475189 -
tttagatggtcgtatcctccgc

SEQ ID NO: 223746 - DNA, 22 bp, Artificial Sequence
  Synthetic oligonucleotide; TTT chr2 60475186 60475207 60475191 60475186 -
agatggtcgtatcctccgctgt

SEQ ID NO: 223747 - DNA, 22 bp, Artificial Sequence
  Synthetic oligonucleotide; TTA chr2 60475185 60475206 60475190 60475185 -
gatggtcgtatcctccgctgtc

SEQ ID NO: 223748 - DNA, 22 bp, Artificial Sequence
  Synthetic oligonucleotide; CTC chr2 60475170 60475191 60475175 60475170 -
cgctgtcaactggatgaatcag

SEQ ID NO: 223749 - DNA, 22 bp, Artificial Sequence
  Synthetic oligonucleotide; CTG chr2 60475165 60475186 60475170 60475165 -
tcaactggatgaatcagtgtgc

SEQ ID NO: 223750 - DNA, 22 bp, Artificial Sequence
  Synthetic oligonucleotide; CTG chr2 60475158 60475179 60475163 60475158 -
gatgaatcagtgtgcaatattt

SEQ ID NO: 223751 - DNA, 22 bp, Artificial Sequence
  Synthetic oligonucleotide; TTT chr2 60475136 60475157 60475141 60475136 -
tgatgtgaatgtaaccgcctat

SEQ ID NO: 223752 - DNA, 22 bp, Artificial Sequence
  Synthetic oligonucleotide; TTT chr2 60475135 60475156 60475140 60475135 -
gatgtgaatgtaaccgcctatt

SEQ ID NO: 223753 - DNA, 22 bp, Artificial Sequence
  Synthetic oligonucleotide; TTG chr2 60475134 60475155 60475139 60475134 -
atgtgaatgtaaccgcctattg

SEQ ID NO: 223754 - DNA, 22 bp, Artificial Sequence
  Synthetic oligonucleotide; CTA chr2 60475115 60475136 60475120 60475115 -
ttgggccccatttactctgtgc

SEQ ID NO: 223755 - DNA, 22 bp, Artificial Sequence
  Synthetic oligonucleotide; TTG chr2 60475112 60475133 60475117 60475112 -
ggccccatttactctgtgccca

SEQ ID NO: 223756 - DNA, 22 bp, Artificial Sequence
  Synthetic oligonucleotide; TTT chr2 60475102 60475123 60475107 60475102 -
actctgtgcccaccttgggctt

SEQ ID NO: 223757 - DNA, 22 bp, Artificial Sequence
  Synthetic oligonucleotide; TTA chr2 60475101 60475122 60475106 60475101 -
ctctgtgcccaccttgggcttt

SEQ ID NO: 223758 - DNA, 22 bp, Artificial Sequence
  Synthetic oligonucleotide; CTC chr2 60475098 60475119 60475103 60475098 -
tgtgcccaccttgggctttgct

SEQ ID NO: 223759 - DNA, 22 bp, Artificial Sequence
  Synthetic oligonucleotide; CTG chr2 60475096 60475117 60475101 60475096 -
tgcccaccttgggctttgcttc

SEQ ID NO: 223760 - DNA, 22 bp, Artificial Sequence
  Synthetic oligonucleotide; CTT chr2 60475086 60475107 60475091 60475086 -
gggctttgcttctctctaagca

SEQ ID NO: 223761 - DNA, 22 bp, Artificial Sequence
  Synthetic oligonucleotide; TTG chr2 60475085 60475106 60475090 60475085 -
ggctttgcttctctctaagcat

SEQ ID NO: 223762 - DNA, 22 bp, Artificial Sequence
  Synthetic oligonucleotide; CTT chr2 60475080 60475101 60475085 60475080 -
tgcttctctctaagcatcttta

SEQ ID NO: 223763 - DNA, 22 bp, Artificial Sequence
  Synthetic oligonucleotide; TTT chr2 60475079 60475100 60475084 60475079 -
gcttctctctaagcatctttac

SEQ ID NO: 223764 - DNA, 22 bp, Artificial Sequence
  Synthetic oligonucleotide; TTG chr2 60475078 60475099 60475083 60475078 -
cttctctctaagcatctttacc

SEQ ID NO: 223765 - DNA, 22 bp, Artificial Sequence
  Synthetic oligonucleotide; CTT chr2 60475075 60475096 60475080 60475075 -
ctctctaagcatctttacctgc

SEQ ID NO: 223766 - DNA, 22 bp, Artificial Sequence
  Synthetic oligonucleotide; TTC chr2 60475074 60475095 60475079 60475074 -
tctctaagcatctttacctgct

SEQ ID NO: 223767 - DNA, 22 bp, Artificial Sequence
  Synthetic oligonucleotide; CTC chr2 60475072 60475093 60475077 60475072 -
tctaagcatctttacctgcttt

SEQ ID NO: 223768 - DNA, 22 bp, Artificial Sequence
  Synthetic oligonucleotide; CTC chr2 60475070 60475091 60475075 60475070 -
taagcatctttacctgcttttt

SEQ ID NO: 223769 - DNA, 22 bp, Artificial Sequence
  Synthetic oligonucleotide; CTA chr2 60475068 60475089 60475073 60475068 -
agcatctttacctgctttttct

SEQ ID NO: 223770 - DNA, 22 bp, Artificial Sequence
  Synthetic oligonucleotide; CTT chr2 60475060 60475081 60475065 60475060 -
tacctgctttttctttttatct

SEQ ID NO: 223771 - DNA, 22 bp, Artificial Sequence
  Synthetic oligonucleotide; TTT chr2 60475059 60475080 60475064 60475059 -
acctgctttttctttttatcta

SEQ ID NO: 223772 - DNA, 22 bp, Artificial Sequence
  Synthetic oligonucleotide; TTA chr2 60475058 60475079 60475063 60475058 -
cctgctttttctttttatctag

SEQ ID NO: 223773 - DNA, 22 bp, Artificial Sequence
  Synthetic oligonucleotide; CTG chr2 60475054 60475075 60475059 60475054 -
ctttttctttttatctaggata

SEQ ID NO: 223774 - DNA, 22 bp, Artificial Sequence
  Synthetic oligonucleotide; CTT chr2 60475051 60475072 60475056 60475051 -
tttctttttatctaggatatcc

SEQ ID NO: 223775 - DNA, 22 bp, Artificial Sequence
  Synthetic oligonucleotide; TTT chr2 60475050 60475071 60475055 60475050 -
ttctttttatctaggatatcct

SEQ ID NO: 223776 - DNA, 22 bp, Artificial Sequence
  Synthetic oligonucleotide; TTT chr2 60475049 60475070 60475054 60475049 -
tctttttatctaggatatcctt

SEQ ID NO: 223777 - DNA, 22 bp, Artificial Sequence
  Synthetic oligonucleotide; TTT chr2 60475048 60475069 60475053 60475048 -
ctttttatctaggatatccttt

SEQ ID NO: 223778 - DNA, 22 bp, Artificial Sequence
  Synthetic oligonucleotide; TTC chr2 60475047 60475068 60475052 60475047 -
tttttatctaggatatcctttc

SEQ ID NO: 223779 - DNA, 22 bp, Artificial Sequence
  Synthetic oligonucleotide; CTT chr2 60475045 60475066 60475050 60475045 -
tttatctaggatatcctttctc

SEQ ID NO: 223780 - DNA, 22 bp, Artificial Sequence
  Synthetic oligonucleotide; TTT chr2 60475044 60475065 60475049 60475044 -
ttatctaggatatcctttctct

SEQ ID NO: 223781 - DNA, 22 bp, Artificial Sequence
  Synthetic oligonucleotide; TTT chr2 60475043 60475064 60475048 60475043 -
tatctaggatatcctttctctt

SEQ ID NO: 223782 - DNA, 22 bp, Artificial Sequence
  Synthetic oligonucleotide; TTT chr2 60475042 60475063 60475047 60475042 -
atctaggatatcctttctcttg

SEQ ID NO: 223783 - DNA, 22 bp, Artificial Sequence
  Synthetic oligonucleotide; TTA chr2 60475041 60475062 60475046 60475041 -
tctaggatatcctttctcttgg

SEQ ID NO: 223784 - DNA, 22 bp, Artificial Sequence
  Synthetic oligonucleotide; CTA chr2 60475037 60475058 60475042 60475037 -
ggatatcctttctcttggctct

SEQ ID NO: 223785 - DNA, 22 bp, Artificial Sequence
  Synthetic oligonucleotide; CTT chr2 60475027 60475048 60475032 60475027 -
tctcttggctctccaggtttaa

SEQ ID NO: 223786 - DNA, 22 bp, Artificial Sequence
  Synthetic oligonucleotide; TTT chr2 60475026 60475047 60475031 60475026 -
ctcttggctctccaggtttaac

SEQ ID NO: 223787 - DNA, 22 bp, Artificial Sequence
  Synthetic oligonucleotide; TTC chr2 60475025 60475046 60475030 60475025 -
tcttggctctccaggtttaact

SEQ ID NO: 223788 - DNA, 22 bp, Artificial Sequence
  Synthetic oligonucleotide; CTC chr2 60475023 60475044 60475028 60475023 -
ttggctctccaggtttaactca

SEQ ID NO: 223789 - DNA, 22 bp, Artificial Sequence
  Synthetic oligonucleotide; CTT chr2 60475021 60475042 60475026 60475021 -
ggctctccaggtttaactcata

SEQ ID NO: 223790 - DNA, 22 bp, Artificial Sequence
  Synthetic oligonucleotide; TTG chr2 60475020 60475041 60475025 60475020 -
gctctccaggtttaactcataa

SEQ ID NO: 223791 - DNA, 22 bp, Artificial Sequence
  Synthetic oligonucleotide; CTC chr2 60475016 60475037 60475021 60475016 -
tccaggtttaactcataagttt

SEQ ID NO: 223792 - DNA, 22 bp, Artificial Sequence
  Synthetic oligonucleotide; CTC chr2 60475014 60475035 60475019 60475014 -
caggtttaactcataagttttc

SEQ ID NO: 223793 - DNA, 22 bp, Artificial Sequence
  Synthetic oligonucleotide; TTT chr2 60475007 60475028 60475012 60475007 -
aactcataagttttcctctttc

SEQ ID NO: 223794 - DNA, 22 bp, Artificial Sequence
  Synthetic oligonucleotide; TTA chr2 60475006 60475027 60475011 60475006 -
actcataagttttcctctttcc

SEQ ID NO: 223795 - DNA, 22 bp, Artificial Sequence
  Synthetic oligonucleotide; CTC chr2 60475002 60475023 60475007 60475002 -
ataagttttcctctttcccaaa

SEQ ID NO: 223796 - DNA, 22 bp, Artificial Sequence
  Synthetic oligonucleotide; TTT chr2 60474994 60475015 60474999 60474994 -
tcctctttcccaaagcctctct

SEQ ID NO: 223797 - DNA, 22 bp, Artificial Sequence
  Synthetic oligonucleotide; TTT chr2 60474993 60475014 60474998 60474993 -
cctctttcccaaagcctctctc

SEQ ID NO: 223798 - DNA, 22 bp, Artificial Sequence
  Synthetic oligonucleotide; TTC chr2 60474992 60475013 60474997 60474992 -
ctctttcccaaagcctctctcc

SEQ ID NO: 223799 - DNA, 22 bp, Artificial Sequence
  Synthetic oligonucleotide; CTC chr2 60474989 60475010 60474994 60474989 -
tttcccaaagcctctctccctc

SEQ ID NO: 223800 - DNA, 22 bp, Artificial Sequence
  Synthetic oligonucleotide; CTT chr2 60474987 60475008 60474992 60474987 -
tcccaaagcctctctccctccc

SEQ ID NO: 223801 - DNA, 22 bp, Artificial Sequence
  Synthetic oligonucleotide; TTT chr2 60474986 60475007 60474991 60474986 -
cccaaagcctctctccctccct

SEQ ID NO: 223802 - DNA, 22 bp, Artificial Sequence
  Synthetic oligonucleotide; TTC chr2 60474985 60475006 60474990 60474985 -
ccaaagcctctctccctccctt

SEQ ID NO: 223803 - DNA, 22 bp, Artificial Sequence
  Synthetic oligonucleotide; CTC chr2 60474975 60474996 60474980 60474975 -
tctccctcccttccaaatggaa

SEQ ID NO: 223804 - DNA, 22 bp, Artificial Sequence
  Synthetic oligonucleotide; CTC chr2 60474973 60474994 60474978 60474973 -
tccctcccttccaaatggaaat

SEQ ID NO: 223805 - DNA, 22 bp, Artificial Sequence
  Synthetic oligonucleotide; CTC chr2 60474971 60474992 60474976 60474971 -
cctcccttccaaatggaaataa

SEQ ID NO: 223806 - DNA, 22 bp, Artificial Sequence
  Synthetic oligonucleotide; CTC chr2 60474967 60474988 60474972 60474967 -
ccttccaaatggaaataatttc

SEQ ID NO: 223807 - DNA, 22 bp, Artificial Sequence
  Synthetic oligonucleotide; CTT chr2 60474963 60474984 60474968 60474963 -
ccaaatggaaataatttctctt

SEQ ID NO: 223808 - DNA, 22 bp, Artificial Sequence
  Synthetic oligonucleotide; TTC chr2 60474962 60474983 60474967 60474962 -
caaatggaaataatttctcttc

SEQ ID NO: 223809 - DNA, 22 bp, Artificial Sequence
  Synthetic oligonucleotide; TTT chr2 60474946 60474967 60474951 60474946 -
ctcttcctttgaatttccatag

SEQ ID NO: 223810 - DNA, 22 bp, Artificial Sequence
  Synthetic oligonucleotide; TTC chr2 60474945 60474966 60474950 60474945 -
tcttcctttgaatttccatagc

SEQ ID NO: 223811 - DNA, 22 bp, Artificial Sequence
  Synthetic oligonucleotide; CTC chr2 60474943 60474964 60474948 60474943 -
ttcctttgaatttccatagcag

SEQ ID NO: 223812 - DNA, 22 bp, Artificial Sequence
  Synthetic oligonucleotide; CTT chr2 60474941 60474962 60474946 60474941 -
cctttgaatttccatagcagct

SEQ ID NO: 223813 - DNA, 22 bp, Artificial Sequence
  Synthetic oligonucleotide; TTC chr2 60474940 60474961 60474945 60474940 -
ctttgaatttccatagcagctc

SEQ ID NO: 223814 - DNA, 22 bp, Artificial Sequence
  Synthetic oligonucleotide; CTT chr2 60474937 60474958 60474942 60474937 -
tgaatttccatagcagctcatc

SEQ ID NO: 223815 - DNA, 22 bp, Artificial Sequence
  Synthetic oligonucleotide; TTT chr2 60474936 60474957 60474941 60474936 -
gaatttccatagcagctcatct

SEQ ID NO: 223816 - DNA, 22 bp, Artificial Sequence
  Synthetic oligonucleotide; TTG chr2 60474935 60474956 60474940 60474935 -
aatttccatagcagctcatctg

SEQ ID NO: 223817 - DNA, 22 bp, Artificial Sequence
  Synthetic oligonucleotide; TTT chr2 60474930 60474951 60474935 60474930 -
ccatagcagctcatctgtacct

SEQ ID NO: 223818 - DNA, 22 bp, Artificial Sequence
  Synthetic oligonucleotide; TTC chr2 60474929 60474950 60474934 60474929 -
catagcagctcatctgtacctc

SEQ ID NO: 223819 - DNA, 22 bp, Artificial Sequence
  Synthetic oligonucleotide; CTC chr2 60474918 60474939 60474923 60474918 -
atctgtacctctctcatgacac

SEQ ID NO: 223820 - DNA, 22 bp, Artificial Sequence
  Synthetic oligonucleotide; CTG chr2 60474913 60474934 60474918 60474913 -
tacctctctcatgacacacttt

SEQ ID NO: 223821 - DNA, 22 bp, Artificial Sequence
  Synthetic oligonucleotide; CTC chr2 60474907 60474928 60474912 60474907 -
tctcatgacacactttctacat

SEQ ID NO: 223822 - DNA, 22 bp, Artificial Sequence
  Synthetic oligonucleotide; CTC chr2 60474905 60474926 60474910 60474905 -
tcatgacacactttctacatgg

SEQ ID NO: 223823 - DNA, 22 bp, Artificial Sequence
  Synthetic oligonucleotide; CTC chr2 60474903 60474924 60474908 60474903 -
atgacacactttctacatgggg

SEQ ID NO: 223824 - DNA, 22 bp, Artificial Sequence
  Synthetic oligonucleotide; CTT chr2 60474892 60474913 60474897 60474892 -
tctacatgggggtagagcaatt

SEQ ID NO: 223825 - DNA, 22 bp, Artificial Sequence
  Synthetic oligonucleotide; TTT chr2 60474891 60474912 60474896 60474891 -
ctacatgggggtagagcaattt

SEQ ID NO: 223826 - DNA, 22 bp, Artificial Sequence
  Synthetic oligonucleotide; TTC chr2 60474890 60474911 60474895 60474890 -
tacatgggggtagagcaatttc

SEQ ID NO: 223827 - DNA, 22 bp, Artificial Sequence
  Synthetic oligonucleotide; CTA chr2 60474888 60474909 60474893 60474888 -
catgggggtagagcaatttctg

SEQ ID NO: 223828 - DNA, 22 bp, Artificial Sequence
  Synthetic oligonucleotide; TTT chr2 60474869 60474890 60474874 60474869 -
ctgtgcaggccttaccttttct

SEQ ID NO: 223829 - DNA, 22 bp, Artificial Sequence
  Synthetic oligonucleotide; TTC chr2 60474868 60474889 60474873 60474868 -
tgtgcaggccttaccttttcta

SEQ ID NO: 223830 - DNA, 22 bp, Artificial Sequence
  Synthetic oligonucleotide; CTG chr2 60474866 60474887 60474871 60474866 -
tgcaggccttaccttttctact

SEQ ID NO: 223831 - DNA, 22 bp, Artificial Sequence
  Synthetic oligonucleotide; CTT chr2 60474856 60474877 60474861 60474856 -
accttttctactaaatgaagcc

SEQ ID NO: 223832 - DNA, 22 bp, Artificial Sequence
  Synthetic oligonucleotide; TTA chr2 60474855 60474876 60474860 60474855 -
ccttttctactaaatgaagcct

SEQ ID NO: 223833 - DNA, 22 bp, Artificial Sequence
  Synthetic oligonucleotide; CTT chr2 60474851 60474872 60474856 60474851 -
ttctactaaatgaagcctgctg

SEQ ID NO: 223834 - DNA, 22 bp, Artificial Sequence
  Synthetic oligonucleotide; TTT chr2 60474850 60474871 60474855 60474850 -
tctactaaatgaagcctgctgt

SEQ ID NO: 223835 - DNA, 22 bp, Artificial Sequence
  Synthetic oligonucleotide; TTT chr2 60474849 60474870 60474854 60474849 -
ctactaaatgaagcctgctgtg

SEQ ID NO: 223836 - DNA, 22 bp, Artificial Sequence
  Synthetic oligonucleotide; TTC chr2 60474848 60474869 60474853 60474848 -
tactaaatgaagcctgctgtgg

SEQ ID NO: 223837 - DNA, 22 bp, Artificial Sequence
  Synthetic oligonucleotide; CTA chr2 60474846 60474867 60474851 60474846 -
ctaaatgaagcctgctgtggga

SEQ ID NO: 223838 - DNA, 22 bp, Artificial Sequence
  Synthetic oligonucleotide; CTA chr2 60474843 60474864 60474848 60474843 -
aatgaagcctgctgtgggagaa

SEQ ID NO: 223839 - DNA, 22 bp, Artificial Sequence
  Synthetic oligonucleotide; CTG chr2 60474832 60474853 60474837 60474832 -
ctgtgggagaaatctgtgtccg

SEQ ID NO: 223840 - DNA, 22 bp, Artificial Sequence
  Synthetic oligonucleotide; CTG chr2 60474829 60474850 60474834 60474829 -
tgggagaaatctgtgtccgtgt

SEQ ID NO: 223841 - DNA, 22 bp, Artificial Sequence
  Synthetic oligonucleotide; CTG chr2 60474816 60474837 60474821 60474816 -
tgtccgtgttttctttgtactg

SEQ ID NO: 223842 - DNA, 22 bp, Artificial Sequence
  Synthetic oligonucleotide; TTT chr2 60474805 60474826 60474810 60474805 -
tctttgtactgcccacagcggc

SEQ ID NO: 223843 - DNA, 22 bp, Artificial Sequence
  Synthetic oligonucleotide; TTT chr2 60474804 60474825 60474809 60474804 -
ctttgtactgcccacagcggct

SEQ ID NO: 223844 - DNA, 22 bp, Artificial Sequence
  Synthetic oligonucleotide; TTC chr2 60474803 60474824 60474808 60474803 -
tttgtactgcccacagcggcta

SEQ ID NO: 223845 - DNA, 22 bp, Artificial Sequence
  Synthetic oligonucleotide; CTT chr2 60474801 60474822 60474806 60474801 -
tgtactgcccacagcggctagc

SEQ ID NO: 223846 - DNA, 22 bp, Artificial Sequence
  Synthetic oligonucleotide; TTT chr2 60474800 60474821 60474805 60474800 -
gtactgcccacagcggctagcc

SEQ ID NO: 223847 - DNA, 22 bp, Artificial Sequence
  Synthetic oligonucleotide; TTG chr2 60474799 60474820 60474804 60474799 -
tactgcccacagcggctagccc

SEQ ID NO: 223848 - DNA, 22 bp, Artificial Sequence
  Synthetic oligonucleotide; CTG chr2 60474794 60474815 60474799 60474794 -
cccacagcggctagcccattgc

SEQ ID NO: 223849 - DNA, 22 bp, Artificial Sequence
  Synthetic oligonucleotide; CTA chr2 60474781 60474802 60474786 60474781 -
gcccattgctttgggcattgta

SEQ ID NO: 223850 - DNA, 22 bp, Artificial Sequence
  Synthetic oligonucleotide; TTG chr2 60474773 60474794 60474778 60474773 -
ctttgggcattgtaggcactcg

SEQ ID NO: 223851 - DNA, 22 bp, Artificial Sequence
  Synthetic oligonucleotide; CTT chr2 60474770 60474791 60474775 60474770 -
tgggcattgtaggcactcggta

SEQ ID NO: 223852 - DNA, 22 bp, Artificial Sequence
  Synthetic oligonucleotide; TTT chr2 60474769 60474790 60474774 60474769 -
gggcattgtaggcactcggtaa

SEQ ID NO: 223853 - DNA, 22 bp, Artificial Sequence
  Synthetic oligonucleotide; TTG chr2 60474768 60474789 60474773 60474768 -
ggcattgtaggcactcggtaaa

SEQ ID NO: 223854 - DNA, 22 bp, Artificial Sequence
  Synthetic oligonucleotide; TTG chr2 60474761 60474782 60474766 60474761 -
taggcactcggtaaatatttgt

SEQ ID NO: 223855 - DNA, 22 bp, Artificial Sequence
  Synthetic oligonucleotide; CTC chr2 60474752 60474773 60474757 60474752 -
ggtaaatatttgttgaatgaat

SEQ ID NO: 223856 - DNA, 22 bp, Artificial Sequence
  Synthetic oligonucleotide; TTT chr2 60474741 60474762 60474746 60474741 -
gttgaatgaatgcatgagaggt

SEQ ID NO: 223857 - DNA, 22 bp, Artificial Sequence
  Synthetic oligonucleotide; TTG chr2 60474740 60474761 60474745 60474740 -
ttgaatgaatgcatgagaggtt

SEQ ID NO: 223858 - DNA, 22 bp, Artificial Sequence
  Synthetic oligonucleotide; TTG chr2 60474737 60474758 60474742 60474737 -
aatgaatgcatgagaggttgaa

SEQ ID NO: 223859 - DNA, 22 bp, Artificial Sequence
  Synthetic oligonucleotide; TTG chr2 60474717 60474738 60474722 60474717 -
aatgaatgcatgagagaatgaa

SEQ ID NO: 223860 - DNA, 22 bp, Artificial Sequence
  Synthetic oligonucleotide; TTT chr2 60474683 60474704 60474688 60474683 -
atcctgggaacacacattttgc

SEQ ID NO: 223861 - DNA, 22 bp, Artificial Sequence
  Synthetic oligonucleotide; TTA chr2 60474682 60474703 60474687 60474682 -
tcctgggaacacacattttgca

SEQ ID NO: 223862 - DNA, 22 bp, Artificial Sequence
  Synthetic oligonucleotide; CTG chr2 60474677 60474698 60474682 60474677 -
ggaacacacattttgcatagtg

SEQ ID NO: 223863 - DNA, 22 bp, Artificial Sequence
  Synthetic oligonucleotide; TTT chr2 60474664 60474685 60474669 60474664 -
tgcatagtgaggtatgtgatta

SEQ ID NO: 223864 - DNA, 22 bp, Artificial Sequence
  Synthetic oligonucleotide; TTT chr2 60474663 60474684 60474668 60474663 -
gcatagtgaggtatgtgattaa

SEQ ID NO: 223865 - DNA, 22 bp, Artificial Sequence
  Synthetic oligonucleotide; TTG chr2 60474662 60474683 60474667 60474662 -
catagtgaggtatgtgattaaa

SEQ ID NO: 223866 - DNA, 22 bp, Artificial Sequence
  Synthetic oligonucleotide; TTA chr2 60474642 60474663 60474647 60474642 -
aacaaacaaaaaaaaattgtcc

SEQ ID NO: 223867 - DNA, 22 bp, Artificial Sequence
  Synthetic oligonucleotide; TTG chr2 60474623 60474644 60474628 60474623 -
tcctaagacaatttgtcttttt

SEQ ID NO: 223868 - DNA, 22 bp, Artificial Sequence
  Synthetic oligonucleotide; CTA chr2 60474618 60474639 60474623 60474618 -
agacaatttgtctttttatgca

SEQ ID NO: 223869 - DNA, 22 bp, Artificial Sequence
  Synthetic oligonucleotide; TTT chr2 60474609 60474630 60474614 60474609 -
gtctttttatgcagctgccctc

SEQ ID NO: 223870 - DNA, 22 bp, Artificial Sequence
  Synthetic oligonucleotide; TTG chr2 60474608 60474629 60474613 60474608 -
tctttttatgcagctgccctct

SEQ ID NO: 223871 - DNA, 22 bp, Artificial Sequence
  Synthetic oligonucleotide; CTT chr2 60474604 60474625 60474609 60474604 -
tttatgcagctgccctctcagt

SEQ ID NO: 223872 - DNA, 22 bp, Artificial Sequence
  Synthetic oligonucleotide; TTT chr2 60474603 60474624 60474608 60474603 -
ttatgcagctgccctctcagtc

SEQ ID NO: 223873 - DNA, 22 bp, Artificial Sequence
  Synthetic oligonucleotide; TTT chr2 60474602 60474623 60474607 60474602 -
tatgcagctgccctctcagtct

SEQ ID NO: 223874 - DNA, 22 bp, Artificial Sequence
  Synthetic oligonucleotide; TTT chr2 60474601 60474622 60474606 60474601 -
atgcagctgccctctcagtctc

SEQ ID NO: 223875 - DNA, 22 bp, Artificial Sequence
  Synthetic oligonucleotide; TTA chr2 60474600 60474621 60474605 60474600 -
tgcagctgccctctcagtctcc

SEQ ID NO: 223876 - DNA, 22 bp, Artificial Sequence
  Synthetic oligonucleotide; CTG chr2 60474592 60474613 60474597 60474592 -
ccctctcagtctcctagataag

SEQ ID NO: 223877 - DNA, 22 bp, Artificial Sequence
  Synthetic oligonucleotide; CTC chr2 60474587 60474608 60474592 60474587 -
tcagtctcctagataagttccg

SEQ ID NO: 223878 - DNA, 22 bp, Artificial Sequence
  Synthetic oligonucleotide; CTC chr2 60474585 60474606 60474590 60474585 -
agtctcctagataagttccgcc

SEQ ID NO: 223879 - DNA, 22 bp, Artificial Sequence
  Synthetic oligonucleotide; CTC chr2 60474579 60474600 60474584 60474579 -
ctagataagttccgccattcta

SEQ ID NO: 223880 - DNA, 22 bp, Artificial Sequence
  Synthetic oligonucleotide; CTA chr2 60474576 60474597 60474581 60474576 -
gataagttccgccattctaagg

SEQ ID NO: 223881 - DNA, 22 bp, Artificial Sequence
  Synthetic oligonucleotide; TTC chr2 60474567 60474588 60474572 60474567 -
cgccattctaaggcaaaagctt

SEQ ID NO: 223882 - DNA, 22 bp, Artificial Sequence
  Synthetic oligonucleotide; TTC chr2 60474559 60474580 60474564 60474559 -
taaggcaaaagcttaaagtgta

SEQ ID NO: 223883 - DNA, 22 bp, Artificial Sequence
  Synthetic oligonucleotide; CTA chr2 60474557 60474578 60474562 60474557 -
aggcaaaagcttaaagtgtaat

SEQ ID NO: 223884 - DNA, 22 bp, Artificial Sequence
  Synthetic oligonucleotide; CTT chr2 60474545 60474566 60474550 60474545 -
aaagtgtaataaaaatttatct

SEQ ID NO: 223885 - DNA, 22 bp, Artificial Sequence
  Synthetic oligonucleotide; TTA chr2 60474544 60474565 60474549 60474544 -
aagtgtaataaaaatttatcta

SEQ ID NO: 223886 - DNA, 22 bp, Artificial Sequence
  Synthetic oligonucleotide; TTT chr2 60474527 60474548 60474532 60474527 -
atctaattcacgatcaagtgaa

SEQ ID NO: 223887 - DNA, 22 bp, Artificial Sequence
  Synthetic oligonucleotide; TTA chr2 60474526 60474547 60474531 60474526 -
tctaattcacgatcaagtgaaa

SEQ ID NO: 223888 - DNA, 22 bp, Artificial Sequence
  Synthetic oligonucleotide; CTA chr2 60474522 60474543 60474527 60474522 -
attcacgatcaagtgaaaatac

SEQ ID NO: 223889 - DNA, 22 bp, Artificial Sequence
  Synthetic oligonucleotide; TTC chr2 60474518 60474539 60474523 60474518 -
acgatcaagtgaaaatactttg

SEQ ID NO: 223890 - DNA, 22 bp, Artificial Sequence
  Synthetic oligonucleotide; CTT chr2 60474498 60474519 60474503 60474498 -
tgggcccagagccaaagaatat

SEQ ID NO: 223891 - DNA, 22 bp, Artificial Sequence
  Synthetic oligonucleotide; TTT chr2 60474497 60474518 60474502 60474497 -
gggcccagagccaaagaatatt

SEQ ID NO: 223892 - DNA, 22 bp, Artificial Sequence
  Synthetic oligonucleotide; TTG chr2 60474496 60474517 60474501 60474496 -
ggcccagagccaaagaatatta

SEQ ID NO: 223893 - DNA, 22 bp, Artificial Sequence
  Synthetic oligonucleotide; TTA chr2 60474474 60474495 60474479 60474474 -
ttggagtgaactttttttaaca

SEQ ID NO: 223894 - DNA, 22 bp, Artificial Sequence
  Synthetic oligonucleotide; TTG chr2 60474471 60474492 60474476 60474471 -
gagtgaactttttttaacaccc

SEQ ID NO: 223895 - DNA, 22 bp, Artificial Sequence
  Synthetic oligonucleotide; CTT chr2 60474461 60474482 60474466 60474461 -
tttttaacaccctaaatttaac

SEQ ID NO: 223896 - DNA, 22 bp, Artificial Sequence
  Synthetic oligonucleotide; TTT chr2 60474460 60474481 60474465 60474460 -
ttttaacaccctaaatttaacc

SEQ ID NO: 223897 - DNA, 22 bp, Artificial Sequence
  Synthetic oligonucleotide; TTT chr2 60474459 60474480 60474464 60474459 -
tttaacaccctaaatttaacca

SEQ ID NO: 223898 - DNA, 22 bp, Artificial Sequence
  Synthetic oligonucleotide; TTT chr2 60474458 60474479 60474463 60474458 -
ttaacaccctaaatttaaccag

SEQ ID NO: 223899 - DNA, 22 bp, Artificial Sequence
  Synthetic oligonucleotide; TTT chr2 60474457 60474478 60474462 60474457 -
taacaccctaaatttaaccagc

SEQ ID NO: 223900 - DNA, 22 bp, Artificial Sequence
  Synthetic oligonucleotide; TTT chr2 60474456 60474477 60474461 60474456 -
aacaccctaaatttaaccagct

SEQ ID NO: 223901 - DNA, 22 bp, Artificial Sequence
  Synthetic oligonucleotide; TTA chr2 60474455 60474476 60474460 60474455 -
acaccctaaatttaaccagctg

SEQ ID NO: 223902 - DNA, 22 bp, Artificial Sequence
  Synthetic oligonucleotide; CTA chr2 60474447 60474468 60474452 60474447 -
aatttaaccagctggaattctt

SEQ ID NO: 223903 - DNA, 22 bp, Artificial Sequence
  Synthetic oligonucleotide; TTT chr2 60474442 60474463 60474447 60474442 -
aaccagctggaattcttttttt

SEQ ID NO: 223904 - DNA, 22 bp, Artificial Sequence
  Synthetic oligonucleotide; TTA chr2 60474441 60474462 60474446 60474441 -
accagctggaattcttttttta

SEQ ID NO: 223905 - DNA, 22 bp, Artificial Sequence
  Synthetic oligonucleotide; CTG chr2 60474433 60474454 60474438 60474433 -
gaattctttttttaagtaccat

SEQ ID NO: 223906 - DNA, 22 bp, Artificial Sequence
  Synthetic oligonucleotide; TTC chr2 60474427 60474448 60474432 60474427 -
tttttttaagtaccatcctatt

SEQ ID NO: 223907 - DNA, 22 bp, Artificial Sequence
  Synthetic oligonucleotide; CTT chr2 60474425 60474446 60474430 60474425 -
tttttaagtaccatcctattca

SEQ ID NO: 223908 - DNA, 22 bp, Artificial Sequence
  Synthetic oligonucleotide; TTT chr2 60474424 60474445 60474429 60474424 -
ttttaagtaccatcctattcaa

SEQ ID NO: 223909 - DNA, 22 bp, Artificial Sequence
  Synthetic oligonucleotide; TTT chr2 60474423 60474444 60474428 60474423 -
tttaagtaccatcctattcaac

SEQ ID NO: 223910 - DNA, 22 bp, Artificial Sequence
  Synthetic oligonucleotide; TTT chr2 60474422 60474443 60474427 60474422 -
ttaagtaccatcctattcaacc

SEQ ID NO: 223911 - DNA, 22 bp, Artificial Sequence
  Synthetic oligonucleotide; TTT chr2 60474421 60474442 60474426 60474421 -
taagtaccatcctattcaacct

SEQ ID NO: 223912 - DNA, 22 bp, Artificial Sequence
  Synthetic oligonucleotide; TTT chr2 60474420 60474441 60474425 60474420 -
aagtaccatcctattcaacctt

SEQ ID NO: 223913 - DNA, 22 bp, Artificial Sequence
  Synthetic oligonucleotide; TTA chr2 60474419 60474440 60474424 60474419 -
agtaccatcctattcaaccttt

SEQ ID NO: 223914 - DNA, 22 bp, Artificial Sequence
  Synthetic oligonucleotide; CTA chr2 60474407 60474428 60474412 60474407 -
ttcaaccttttgaaatgaagga

SEQ ID NO: 223915 - DNA, 22 bp, Artificial Sequence
  Synthetic oligonucleotide; TTC chr2 60474404 60474425 60474409 60474404 -
aaccttttgaaatgaaggattt

SEQ ID NO: 223916 - DNA, 22 bp, Artificial Sequence
  Synthetic oligonucleotide; CTT chr2 60474398 60474419 60474403 60474398 -
ttgaaatgaaggatttgccttt

SEQ ID NO: 223917 - DNA, 22 bp, Artificial Sequence
  Synthetic oligonucleotide; TTT chr2 60474397 60474418 60474402 60474397 -
tgaaatgaaggatttgcctttt

SEQ ID NO: 223918 - DNA, 22 bp, Artificial Sequence
  Synthetic oligonucleotide; TTT chr2 60474396 60474417 60474401 60474396 -
gaaatgaaggatttgcctttta

SEQ ID NO: 223919 - DNA, 22 bp, Artificial Sequence
  Synthetic oligonucleotide; TTG chr2 60474395 60474416 60474400 60474395 -
aaatgaaggatttgccttttag

SEQ ID NO: 223920 - DNA, 22 bp, Artificial Sequence
  Synthetic oligonucleotide; TTT chr2 60474382 60474403 60474387 60474382 -
gccttttagtgggaaatctgca

SEQ ID NO: 223921 - DNA, 22 bp, Artificial Sequence
  Synthetic oligonucleotide; TTG chr2 60474381 60474402 60474386 60474381 -
ccttttagtgggaaatctgcat

SEQ ID NO: 223922 - DNA, 22 bp, Artificial Sequence
  Synthetic oligonucleotide; CTT chr2 60474377 60474398 60474382 60474377 -
ttagtgggaaatctgcatttca

SEQ ID NO: 223923 - DNA, 22 bp, Artificial Sequence
  Synthetic oligonucleotide; TTT chr2 60474376 60474397 60474381 60474376 -
tagtgggaaatctgcatttcaa

SEQ ID NO: 223924 - DNA, 22 bp, Artificial Sequence
  Synthetic oligonucleotide; TTT chr2 60474375 60474396 60474380 60474375 -
agtgggaaatctgcatttcaac

SEQ ID NO: 223925 - DNA, 22 bp, Artificial Sequence
  Synthetic oligonucleotide; TTA chr2 60474374 60474395 60474379 60474374 -
gtgggaaatctgcatttcaaca

SEQ ID NO: 223926 - DNA, 22 bp, Artificial Sequence
  Synthetic oligonucleotide; CTG chr2 60474362 60474383 60474367 60474362 -
catttcaacacaaagatggaac

SEQ ID NO: 223927 - DNA, 22 bp, Artificial Sequence
  Synthetic oligonucleotide; TTT chr2 60474357 60474378 60474362 60474357 -
caacacaaagatggaacacaat

SEQ ID NO: 223928 - DNA, 22 bp, Artificial Sequence
  Synthetic oligonucleotide; TTC chr2 60474356 60474377 60474361 60474356 -
aacacaaagatggaacacaatg

SEQ ID NO: 223929 - DNA, 22 bp, Artificial Sequence
  Synthetic oligonucleotide; CTT chr2 60474330 60474351 60474335 60474330 -
tggcttagttgcttttcagaaa

SEQ ID NO: 223930 - DNA, 22 bp, Artificial Sequence
  Synthetic oligonucleotide; TTT chr2 60474329 60474350 60474334 60474329 -
ggcttagttgcttttcagaaaa

SEQ ID NO: 223931 - DNA, 22 bp, Artificial Sequence
  Synthetic oligonucleotide; TTG chr2 60474328 60474349 60474333 60474328 -
gcttagttgcttttcagaaaag

SEQ ID NO: 223932 - DNA, 22 bp, Artificial Sequence
  Synthetic oligonucleotide; CTT chr2 60474324 60474345 60474329 60474324 -
agttgcttttcagaaaagcaag

SEQ ID NO: 223933 - DNA, 22 bp, Artificial Sequence
  Synthetic oligonucleotide; TTA chr2 60474323 60474344 60474328 60474323 -
gttgcttttcagaaaagcaaga

SEQ ID NO: 223934 - DNA, 22 bp, Artificial Sequence
  Synthetic oligonucleotide; TTG chr2 60474319 60474340 60474324 60474319 -
cttttcagaaaagcaagatttt

SEQ ID NO: 223935 - DNA, 22 bp, Artificial Sequence
  Synthetic oligonucleotide; CTT chr2 60474316 60474337 60474321 60474316 -
ttcagaaaagcaagattttttt

SEQ ID NO: 223936 - DNA, 22 bp, Artificial Sequence
  Synthetic oligonucleotide; TTT chr2 60474315 60474336 60474320 60474315 -
tcagaaaagcaagatttttttt

SEQ ID NO: 223937 - DNA, 22 bp, Artificial Sequence
  Synthetic oligonucleotide; TTT chr2 60474314 60474335 60474319 60474314 -
cagaaaagcaagattttttttt

SEQ ID NO: 223938 - DNA, 22 bp, Artificial Sequence
  Synthetic oligonucleotide; TTC chr2 60474313 60474334 60474318 60474313 -
agaaaagcaagatttttttttt

SEQ ID NO: 223939 - DNA, 22 bp, Artificial Sequence
  Synthetic oligonucleotide; TTT chr2 60474298 60474319 60474303 60474298 -
tttttttttggaattatatgct

SEQ ID NO: 223940 - DNA, 22 bp, Artificial Sequence
  Synthetic oligonucleotide; TTT chr2 60474297 60474318 60474302 60474297 -
ttttttttggaattatatgctt

SEQ ID NO: 223941 - DNA, 22 bp, Artificial Sequence
  Synthetic oligonucleotide; TTT chr2 60474296 60474317 60474301 60474296 -
tttttttggaattatatgcttt

SEQ ID NO: 223942 - DNA, 22 bp, Artificial Sequence
  Synthetic oligonucleotide; TTT chr2 60474295 60474316 60474300 60474295 -
ttttttggaattatatgctttg

SEQ ID NO: 223943 - DNA, 22 bp, Artificial Sequence
  Synthetic oligonucleotide; TTT chr2 60474294 60474315 60474299 60474294 -
tttttggaattatatgctttgc

SEQ ID NO: 223944 - DNA, 22 bp, Artificial Sequence
  Synthetic oligonucleotide; TTT chr2 60474293 60474314 60474298 60474293 -
ttttggaattatatgctttgct

SEQ ID NO: 223945 - DNA, 22 bp, Artificial Sequence
  Synthetic oligonucleotide; TTT chr2 60474292 60474313 60474297 60474292 -
tttggaattatatgctttgctt

SEQ ID NO: 223946 - DNA, 22 bp, Artificial Sequence
  Synthetic oligonucleotide; TTT chr2 60474291 60474312 60474296 60474291 -
ttggaattatatgctttgctta

SEQ ID NO: 223947 - DNA, 22 bp, Artificial Sequence
  Synthetic oligonucleotide; TTT chr2 60474290 60474311 60474295 60474290 -
tggaattatatgctttgcttat

SEQ ID NO: 223948 - DNA, 22 bp, Artificial Sequence
  Synthetic oligonucleotide; TTT chr2 60474289 60474310 60474294 60474289 -
ggaattatatgctttgcttatg

SEQ ID NO: 223949 - DNA, 22 bp, Artificial Sequence
  Synthetic oligonucleotide; TTG chr2 60474288 60474309 60474293 60474288 -
gaattatatgctttgcttatgt

SEQ ID NO: 223950 - DNA, 22 bp, Artificial Sequence
  Synthetic oligonucleotide; TTA chr2 60474282 60474303 60474287 60474282 -
tatgctttgcttatgttaaaga

SEQ ID NO: 223951 - DNA, 22 bp, Artificial Sequence
  Synthetic oligonucleotide; CTT chr2 60474275 60474296 60474280 60474275 -
tgcttatgttaaagacacagct

SEQ ID NO: 223952 - DNA, 22 bp, Artificial Sequence
  Synthetic oligonucleotide; TTT chr2 60474274 60474295 60474279 60474274 -
gcttatgttaaagacacagctt

SEQ ID NO: 223953 - DNA, 22 bp, Artificial Sequence
  Synthetic oligonucleotide; TTG chr2 60474273 60474294 60474278 60474273 -
cttatgttaaagacacagcttg

SEQ ID NO: 223954 - DNA, 22 bp, Artificial Sequence
  Synthetic oligonucleotide; CTT chr2 60474270 60474291 60474275 60474270 -
atgttaaagacacagcttgcag

SEQ ID NO: 223955 - DNA, 22 bp, Artificial Sequence
  Synthetic oligonucleotide; TTA chr2 60474269 60474290 60474274 60474269 -
tgttaaagacacagcttgcaga

SEQ ID NO: 223956 - DNA, 22 bp, Artificial Sequence
  Synthetic oligonucleotide; TTA chr2 60474264 60474285 60474269 60474264 -
aagacacagcttgcagaaaaat

SEQ ID NO: 223957 - DNA, 22 bp, Artificial Sequence
  Synthetic oligonucleotide; CTT chr2 60474252 60474273 60474257 60474252 -
gcagaaaaattttgtttaggcc

SEQ ID NO: 223958 - DNA, 22 bp, Artificial Sequence
  Synthetic oligonucleotide; TTG chr2 60474251 60474272 60474256 60474251 -
cagaaaaattttgtttaggcct

SEQ ID NO: 223959 - DNA, 22 bp, Artificial Sequence
  Synthetic oligonucleotide; TTT chr2 60474240 60474261 60474245 60474240 -
tgtttaggcctgacagattggt

SEQ ID NO: 223960 - DNA, 22 bp, Artificial Sequence
  Synthetic oligonucleotide; TTT chr2 60474239 60474260 60474244 60474239 -
gtttaggcctgacagattggtg

SEQ ID NO: 223961 - DNA, 22 bp, Artificial Sequence
  Synthetic oligonucleotide; TTG chr2 60474238 60474259 60474243 60474238 -
tttaggcctgacagattggtgg

SEQ ID NO: 223962 - DNA, 22 bp, Artificial Sequence
  Synthetic oligonucleotide; TTT chr2 60474235 60474256 60474240 60474235 -
aggcctgacagattggtggctg

SEQ ID NO: 223963 - DNA, 22 bp, Artificial Sequence
  Synthetic oligonucleotide; TTA chr2 60474234 60474255 60474239 60474234 -
ggcctgacagattggtggctgg

SEQ ID NO: 223964 - DNA, 22 bp, Artificial Sequence
  Synthetic oligonucleotide; CTG chr2 60474228 60474249 60474233 60474228 -
acagattggtggctggcatttt

SEQ ID NO: 223965 - DNA, 22 bp, Artificial Sequence
  Synthetic oligonucleotide; TTG chr2 60474220 60474241 60474225 60474220 -
gtggctggcatttttatagata

SEQ ID NO: 223966 - DNA, 22 bp, Artificial Sequence
  Synthetic oligonucleotide; CTG chr2 60474213 60474234 60474218 60474213 -
gcatttttatagataaaggggc

SEQ ID NO: 223967 - DNA, 22 bp, Artificial Sequence
  Synthetic oligonucleotide; TTT chr2 60474207 60474228 60474212 60474207 -
ttatagataaaggggcacgcaa

SEQ ID NO: 223968 - DNA, 22 bp, Artificial Sequence
  Synthetic oligonucleotide; TTT chr2 60474206 60474227 60474211 60474206 -
tatagataaaggggcacgcaaa

SEQ ID NO: 223969 - DNA, 22 bp, Artificial Sequence
  Synthetic oligonucleotide; TTT chr2 60474205 60474226 60474210 60474205 -
atagataaaggggcacgcaaaa

SEQ ID NO: 223970 - DNA, 22 bp, Artificial Sequence
  Synthetic oligonucleotide; TTA chr2 60474204 60474225 60474209 60474204 -
tagataaaggggcacgcaaaat

SEQ ID NO: 223971 - DNA, 22 bp, Artificial Sequence
  Synthetic oligonucleotide; CTC chr2 60474174 60474195 60474179 60474174 -
tacttcctccctttattgagaa

SEQ ID NO: 223972 - DNA, 22 bp, Artificial Sequence
  Synthetic oligonucleotide; CTA chr2 60474172 60474193 60474177 60474172 -
cttcctccctttattgagaaaa

SEQ ID NO: 223973 - DNA, 22 bp, Artificial Sequence
  Synthetic oligonucleotide; CTT chr2 60474169 60474190 60474174 60474169 -
cctccctttattgagaaaaagc

SEQ ID NO: 223974 - DNA, 22 bp, Artificial Sequence
  Synthetic oligonucleotide; TTC chr2 60474168 60474189 60474173 60474168 -
ctccctttattgagaaaaagcc

SEQ ID NO: 223975 - DNA, 22 bp, Artificial Sequence
  Synthetic oligonucleotide; CTC chr2 60474165 60474186 60474170 60474165 -
cctttattgagaaaaagcctag

SEQ ID NO: 223976 - DNA, 22 bp, Artificial Sequence
  Synthetic oligonucleotide; CTT chr2 60474161 60474182 60474166 60474161 -
tattgagaaaaagcctaggagg

SEQ ID NO: 223977 - DNA, 22 bp, Artificial Sequence
  Synthetic oligonucleotide; TTT chr2 60474160 60474181 60474165 60474160 -
attgagaaaaagcctaggagga

SEQ ID NO: 223978 - DNA, 22 bp, Artificial Sequence
  Synthetic oligonucleotide; TTA chr2 60474159 60474180 60474164 60474159 -
ttgagaaaaagcctaggaggag

SEQ ID NO: 223979 - DNA, 22 bp, Artificial Sequence
  Synthetic oligonucleotide; TTG chr2 60474156 60474177 60474161 60474156 -
agaaaaagcctaggaggagaac

SEQ ID NO: 223980 - DNA, 22 bp, Artificial Sequence
  Synthetic oligonucleotide; CTA chr2 60474144 60474165 60474149 60474144 -
ggaggagaactcttaaaaggtg

SEQ ID NO: 223981 - DNA, 22 bp, Artificial Sequence
  Synthetic oligonucleotide; CTC chr2 60474132 60474153 60474137 60474132 -
ttaaaaggtgaagttagtaacc

SEQ ID NO: 223982 - DNA, 22 bp, Artificial Sequence
  Synthetic oligonucleotide; CTT chr2 60474130 60474151 60474135 60474130 -
aaaaggtgaagttagtaacctg

SEQ ID NO: 223983 - DNA, 22 bp, Artificial Sequence
  Synthetic oligonucleotide; TTA chr2 60474129 60474150 60474134 60474129 -
aaaggtgaagttagtaacctgt

SEQ ID NO: 223984 - DNA, 22 bp, Artificial Sequence
  Synthetic oligonucleotide; TTA chr2 60474116 60474137 60474121 60474116 -
gtaacctgttgtttgagtaatc

SEQ ID NO: 223985 - DNA, 22 bp, Artificial Sequence
  Synthetic oligonucleotide; CTG chr2 60474108 60474129 60474113 60474108 -
ttgtttgagtaatcaaggctct

SEQ ID NO: 223986 - DNA, 22 bp, Artificial Sequence
  Synthetic oligonucleotide; TTG chr2 60474105 60474126 60474110 60474105 -
tttgagtaatcaaggctctaag

SEQ ID NO: 223987 - DNA, 22 bp, Artificial Sequence
  Synthetic oligonucleotide; TTT chr2 60474102 60474123 60474107 60474102 -
gagtaatcaaggctctaagagg

SEQ ID NO: 223988 - DNA, 22 bp, Artificial Sequence
  Synthetic oligonucleotide; TTG chr2 60474101 60474122 60474106 60474101 -
agtaatcaaggctctaagagga

SEQ ID NO: 223989 - DNA, 22 bp, Artificial Sequence
  Synthetic oligonucleotide; CTC chr2 60474087 60474108 60474092 60474087 -
taagaggatagcattgatcaaa

SEQ ID NO: 223990 - DNA, 22 bp, Artificial Sequence
  Synthetic oligonucleotide; CTA chr2 60474085 60474106 60474090 60474085 -
agaggatagcattgatcaaaaa

SEQ ID NO: 223991 - DNA, 22 bp, Artificial Sequence
  Synthetic oligonucleotide; TTG chr2 60474071 60474092 60474076 60474071 -
atcaaaaaagagttttaaaatg

SEQ ID NO: 223992 - DNA, 22 bp, Artificial Sequence
  Synthetic oligonucleotide; TTT chr2 60474056 60474077 60474061 60474056 -
taaaatgagtgattgatgttat

SEQ ID NO: 223993 - DNA, 22 bp, Artificial Sequence
  Synthetic oligonucleotide; TTT chr2 60474055 60474076 60474060 60474055 -
aaaatgagtgattgatgttatt

SEQ ID NO: 223994 - DNA, 22 bp, Artificial Sequence
  Synthetic oligonucleotide; TTA chr2 60474054 60474075 60474059 60474054 -
aaatgagtgattgatgttatta

SEQ ID NO: 223995 - DNA, 22 bp, Artificial Sequence
  Synthetic oligonucleotide; TTG chr2 60474041 60474062 60474046 60474041 -
atgttattaaagtcactggtga

SEQ ID NO: 223996 - DNA, 22 bp, Artificial Sequence
  Synthetic oligonucleotide; TTA chr2 60474035 60474056 60474040 60474035 -
ttaaagtcactggtgaagtatc

SEQ ID NO: 223997 - DNA, 22 bp, Artificial Sequence
  Synthetic oligonucleotide; TTA chr2 60474032 60474053 60474037 60474032 -
aagtcactggtgaagtatcaag

SEQ ID NO: 223998 - DNA, 22 bp, Artificial Sequence
  Synthetic oligonucleotide; CTG chr2 60474023 60474044 60474028 60474023 -
gtgaagtatcaaggaatctaag

SEQ ID NO: 223999 - DNA, 22 bp, Artificial Sequence
  Synthetic oligonucleotide; CTA chr2 60474003 60474024 60474008 60474003 -
aggaccatgagagagtttcagg

SEQ ID NO: 224000 - DNA, 22 bp, Artificial Sequence
  Synthetic oligonucleotide; TTT chr2 60473985 60474006 60473990 60473985 -
cagggaagaaattctatattgt

SEQ ID NO: 224001 - DNA, 22 bp, Artificial Sequence
  Synthetic oligonucleotide; TTC chr2 60473984 60474005 60473989 60473984 -
agggaagaaattctatattgta

SEQ ID NO: 224002 - DNA, 22 bp, Artificial Sequence
  Synthetic oligonucleotide; TTC chr2 60473971 60473992 60473976 60473971 -
tatattgtagtgtctataatta

SEQ ID NO: 224003 - DNA, 22 bp, Artificial Sequence
  Synthetic oligonucleotide; CTA chr2 60473969 60473990 60473974 60473969 -
tattgtagtgtctataattatt

SEQ ID NO: 224004 - DNA, 22 bp, Artificial Sequence
  Synthetic oligonucleotide; TTG chr2 60473964 60473985 60473969 60473964 -
tagtgtctataattattgcttt

SEQ ID NO: 224005 - DNA, 22 bp, Artificial Sequence
  Synthetic oligonucleotide; CTA chr2 60473955 60473976 60473960 60473955 -
taattattgctttcttttgttt

SEQ ID NO: 224006 - DNA, 22 bp, Artificial Sequence
  Synthetic oligonucleotide; TTA chr2 60473949 60473970 60473954 60473949 -
ttgctttcttttgtttttgcag

SEQ ID NO: 224007 - DNA, 22 bp, Artificial Sequence
  Synthetic oligonucleotide; TTG chr2 60473946 60473967 60473951 60473946 -
ctttcttttgtttttgcagaat

SEQ ID NO: 224008 - DNA, 22 bp, Artificial Sequence
  Synthetic oligonucleotide; CTT chr2 60473943 60473964 60473948 60473943 -
tcttttgtttttgcagaataca

SEQ ID NO: 224009 - DNA, 22 bp, Artificial Sequence
  Synthetic oligonucleotide; TTT chr2 60473942 60473963 60473947 60473942 -
cttttgtttttgcagaatacac

SEQ ID NO: 224010 - DNA, 22 bp, Artificial Sequence
  Synthetic oligonucleotide; TTC chr2 60473941 60473962 60473946 60473941 -
ttttgtttttgcagaatacact

SEQ ID NO: 224011 - DNA, 22 bp, Artificial Sequence
  Synthetic oligonucleotide; CTT chr2 60473939 60473960 60473944 60473939 -
ttgtttttgcagaatacacttt

SEQ ID NO: 224012 - DNA, 22 bp, Artificial Sequence
  Synthetic oligonucleotide; TTT chr2 60473938 60473959 60473943 60473938 -
tgtttttgcagaatacactttt

SEQ ID NO: 224013 - DNA, 22 bp, Artificial Sequence
  Synthetic oligonucleotide; TTT chr2 60473937 60473958 60473942 60473937 -
gtttttgcagaatacacttttt

SEQ ID NO: 224014 - DNA, 22 bp, Artificial Sequence
  Synthetic oligonucleotide; TTG chr2 60473936 60473957 60473941 60473936 -
tttttgcagaatacacttttta

SEQ ID NO: 224015 - DNA, 22 bp, Artificial Sequence
  Synthetic oligonucleotide; TTT chr2 60473933 60473954 60473938 60473933 -
ttgcagaatacactttttaaag

SEQ ID NO: 224016 - DNA, 22 bp, Artificial Sequence
  Synthetic oligonucleotide; TTT chr2 60473932 60473953 60473937 60473932 -
tgcagaatacactttttaaaga

SEQ ID NO: 224017 - DNA, 22 bp, Artificial Sequence
  Synthetic oligonucleotide; TTT chr2 60473931 60473952 60473936 60473931 -
gcagaatacactttttaaagaa

SEQ ID NO: 224018 - DNA, 22 bp, Artificial Sequence
  Synthetic oligonucleotide; TTG chr2 60473930 60473951 60473935 60473930 -
cagaatacactttttaaagaac

SEQ ID NO: 224019 - DNA, 22 bp, Artificial Sequence
  Synthetic oligonucleotide; CTT chr2 60473918 60473939 60473923 60473918 -
tttaaagaacatcaggatttgg

SEQ ID NO: 224020 - DNA, 22 bp, Artificial Sequence
  Synthetic oligonucleotide; TTT chr2 60473917 60473938 60473922 60473917 -
ttaaagaacatcaggatttggt

SEQ ID NO: 224021 - DNA, 22 bp, Artificial Sequence
  Synthetic oligonucleotide; TTT chr2 60473916 60473937 60473921 60473916 -
taaagaacatcaggatttggta

SEQ ID NO: 224022 - DNA, 22 bp, Artificial Sequence
  Synthetic oligonucleotide; TTT chr2 60473915 60473936 60473920 60473915 -
aaagaacatcaggatttggtaa

SEQ ID NO: 224023 - DNA, 22 bp, Artificial Sequence
  Synthetic oligonucleotide; TTA chr2 60473914 60473935 60473919 60473914 -
aagaacatcaggatttggtaaa

SEQ ID NO: 224024 - DNA, 22 bp, Artificial Sequence
  Synthetic oligonucleotide; TTT chr2 60473898 60473919 60473903 60473898 -
ggtaaaacagccagtaaaaaag

SEQ ID NO: 224025 - DNA, 22 bp, Artificial Sequence
  Synthetic oligonucleotide; TTG chr2 60473897 60473918 60473902 60473897 -
gtaaaacagccagtaaaaaagc

SEQ ID NO: 224026 - DNA, 22 bp, Artificial Sequence
  Synthetic oligonucleotide; CTC chr2 60473842 60473863 60473847 60473842 -
atttctagaacaaaagagagtg

SEQ ID NO: 224027 - DNA, 22 bp, Artificial Sequence
  Synthetic oligonucleotide; TTT chr2 60473838 60473859 60473843 60473838 -
ctagaacaaaagagagtgcgat

SEQ ID NO: 224028 - DNA, 22 bp, Artificial Sequence
  Synthetic oligonucleotide; TTC chr2 60473837 60473858 60473842 60473837 -
tagaacaaaagagagtgcgatt

SEQ ID NO: 224029 - DNA, 22 bp, Artificial Sequence
  Synthetic oligonucleotide; CTA chr2 60473835 60473856 60473840 60473835 -
gaacaaaagagagtgcgatttt

SEQ ID NO: 224030 - DNA, 22 bp, Artificial Sequence
  Synthetic oligonucleotide; TTT chr2 60473814 60473835 60473819 60473814 -
tgacaatatcagaaggttaatt

SEQ ID NO: 224031 - DNA, 22 bp, Artificial Sequence
  Synthetic oligonucleotide; TTT chr2 60473813 60473834 60473818 60473813 -
gacaatatcagaaggttaatta

SEQ ID NO: 224032 - DNA, 22 bp, Artificial Sequence
  Synthetic oligonucleotide; TTG chr2 60473812 60473833 60473817 60473812 -
acaatatcagaaggttaattaa

SEQ ID NO: 224033 - DNA, 22 bp, Artificial Sequence
  Synthetic oligonucleotide; TTA chr2 60473795 60473816 60473800 60473795 -
attaagaagtctgtgagtgatg

SEQ ID NO: 224034 - DNA, 22 bp, Artificial Sequence
  Synthetic oligonucleotide; TTA chr2 60473791 60473812 60473796 60473791 -
agaagtctgtgagtgatgataa

SEQ ID NO: 224035 - DNA, 22 bp, Artificial Sequence
  Synthetic oligonucleotide; CTG chr2 60473782 60473803 60473787 60473782 -
tgagtgatgataaagctggcac

SEQ ID NO: 224036 - DNA, 22 bp, Artificial Sequence
  Synthetic oligonucleotide; CTG chr2 60473764 60473785 60473769 60473764 -
gcacattttcattacagattga

SEQ ID NO: 224037 - DNA, 22 bp, Artificial Sequence
  Synthetic oligonucleotide; TTT chr2 60473756 60473777 60473761 60473756 -
tcattacagattgacacaactc

SEQ ID NO: 224038 - DNA, 22 bp, Artificial Sequence
  Synthetic oligonucleotide; TTT chr2 60473755 60473776 60473760 60473755 -
cattacagattgacacaactca

SEQ ID NO: 224039 - DNA, 22 bp, Artificial Sequence
  Synthetic oligonucleotide; TTC chr2 60473754 60473775 60473759 60473754 -
attacagattgacacaactcaa

SEQ ID NO: 224040 - DNA, 22 bp, Artificial Sequence
  Synthetic oligonucleotide; TTA chr2 60473750 60473771 60473755 60473750 -
cagattgacacaactcaagtca

SEQ ID NO: 224041 - DNA, 22 bp, Artificial Sequence
  Synthetic oligonucleotide; TTG chr2 60473743 60473764 60473748 60473743 -
acacaactcaagtcacaggcat

SEQ ID NO: 224042 - DNA, 22 bp, Artificial Sequence
  Synthetic oligonucleotide; CTC chr2 60473734 60473755 60473739 60473734 -
aagtcacaggcatagctaatgt

SEQ ID NO: 224043 - DNA, 22 bp, Artificial Sequence
  Synthetic oligonucleotide; CTA chr2 60473716 60473737 60473721 60473716 -
atgtttgctctataatactctg

SEQ ID NO: 224044 - DNA, 22 bp, Artificial Sequence
  Synthetic oligonucleotide; TTT chr2 60473710 60473731 60473715 60473710 -
gctctataatactctgataagt

SEQ ID NO: 224045 - DNA, 22 bp, Artificial Sequence
  Synthetic oligonucleotide; TTG chr2 60473709 60473730 60473714 60473709 -
ctctataatactctgataagtc

SEQ ID NO: 224046 - DNA, 22 bp, Artificial Sequence
  Synthetic oligonucleotide; CTC chr2 60473706 60473727 60473711 60473706 -
tataatactctgataagtcaga

SEQ ID NO: 224047 - DNA, 22 bp, Artificial Sequence
  Synthetic oligonucleotide; CTA chr2 60473704 60473725 60473709 60473704 -
taatactctgataagtcagaga

SEQ ID NO: 224048 - DNA, 22 bp, Artificial Sequence
  Synthetic oligonucleotide; CTC chr2 60473696 60473717 60473701 60473696 -
tgataagtcagagaatctaagt

SEQ ID NO: 224049 - DNA, 22 bp, Artificial Sequence
  Synthetic oligonucleotide; CTG chr2 60473694 60473715 60473699 60473694 -
ataagtcagagaatctaagtga

SEQ ID NO: 224050 - DNA, 22 bp, Artificial Sequence
  Synthetic oligonucleotide; CTA chr2 60473677 60473698 60473682 60473677 -
agtgagaagaactggtatctat

SEQ ID NO: 224051 - DNA, 22 bp, Artificial Sequence
  Synthetic oligonucleotide; CTG chr2 60473663 60473684 60473668 60473663 -
gtatctatggtaaacatagggt

SEQ ID NO: 224052 - DNA, 22 bp, Artificial Sequence
  Synthetic oligonucleotide; CTA chr2 60473656 60473677 60473661 60473656 -
tggtaaacatagggtcaagagc

SEQ ID NO: 224053 - DNA, 22 bp, Artificial Sequence
  Synthetic oligonucleotide; CTA chr2 60473632 60473653 60473637 60473632 -
gatgcggctgaatagaaaggac

SEQ ID NO: 224054 - DNA, 22 bp, Artificial Sequence
  Synthetic oligonucleotide; CTG chr2 60473622 60473643 60473627 60473622 -
aatagaaaggacatttactttg

SEQ ID NO: 224055 - DNA, 22 bp, Artificial Sequence
  Synthetic oligonucleotide; TTT chr2 60473606 60473627 60473611 60473606 -
actttgcagttaggtaaagaag

SEQ ID NO: 224056 - DNA, 22 bp, Artificial Sequence
  Synthetic oligonucleotide; TTA chr2 60473605 60473626 60473610 60473605 -
ctttgcagttaggtaaagaagc

SEQ ID NO: 224057 - DNA, 22 bp, Artificial Sequence
  Synthetic oligonucleotide; CTT chr2 60473602 60473623 60473607 60473602 -
tgcagttaggtaaagaagcctc

SEQ ID NO: 224058 - DNA, 22 bp, Artificial Sequence
  Synthetic oligonucleotide; TTT chr2 60473601 60473622 60473606 60473601 -
gcagttaggtaaagaagcctct

SEQ ID NO: 224059 - DNA, 22 bp, Artificial Sequence
  Synthetic oligonucleotide; TTG chr2 60473600 60473621 60473605 60473600 -
cagttaggtaaagaagcctcta

SEQ ID NO: 224060 - DNA, 22 bp, Artificial Sequence
  Synthetic oligonucleotide; TTA chr2 60473594 60473615 60473599 60473594 -
ggtaaagaagcctctagctcag

SEQ ID NO: 224061 - DNA, 22 bp, Artificial Sequence
  Synthetic oligonucleotide; CTC chr2 60473580 60473601 60473585 60473580 -
tagctcagactagctgcactgt

SEQ ID NO: 224062 - DNA, 22 bp, Artificial Sequence
  Synthetic oligonucleotide; CTA chr2 60473578 60473599 60473583 60473578 -
gctcagactagctgcactgttg

SEQ ID NO: 224063 - DNA, 22 bp, Artificial Sequence
  Synthetic oligonucleotide; CTC chr2 60473574 60473595 60473579 60473574 -
agactagctgcactgttgttat

SEQ ID NO: 224064 - DNA, 22 bp, Artificial Sequence
  Synthetic oligonucleotide; CTA chr2 60473568 60473589 60473573 60473568 -
gctgcactgttgttatttgtgt

SEQ ID NO: 224065 - DNA, 22 bp, Artificial Sequence
  Synthetic oligonucleotide; CTG chr2 60473564 60473585 60473569 60473564 -
cactgttgttatttgtgtggct

SEQ ID NO: 224066 - DNA, 22 bp, Artificial Sequence
  Synthetic oligonucleotide; CTG chr2 60473559 60473580 60473564 60473559 -
ttgttatttgtgtggcttgaac

SEQ ID NO: 224067 - DNA, 22 bp, Artificial Sequence
  Synthetic oligonucleotide; TTG chr2 60473556 60473577 60473561 60473556 -
ttatttgtgtggcttgaaccta

SEQ ID NO: 224068 - DNA, 22 bp, Artificial Sequence
  Synthetic oligonucleotide; TTA chr2 60473553 60473574 60473558 60473553 -
tttgtgtggcttgaacctagta

SEQ ID NO: 224069 - DNA, 22 bp, Artificial Sequence
  Synthetic oligonucleotide; TTT chr2 60473550 60473571 60473555 60473550 -
gtgtggcttgaacctagtaatc

SEQ ID NO: 224070 - DNA, 22 bp, Artificial Sequence
  Synthetic oligonucleotide; TTG chr2 60473549 60473570 60473554 60473549 -
tgtggcttgaacctagtaatcg

SEQ ID NO: 224071 - DNA, 22 bp, Artificial Sequence
  Synthetic oligonucleotide; CTT chr2 60473541 60473562 60473546 60473541 -
gaacctagtaatcggattcaga

SEQ ID NO: 224072 - DNA, 22 bp, Artificial Sequence
  Synthetic oligonucleotide; TTG chr2 60473540 60473561 60473545 60473540 -
aacctagtaatcggattcagaa

SEQ ID NO: 224073 - DNA, 22 bp, Artificial Sequence
  Synthetic oligonucleotide; CTA chr2 60473534 60473555 60473539 60473534 -
gtaatcggattcagaactggaa

SEQ ID NO: 224074 - DNA, 22 bp, Artificial Sequence
  Synthetic oligonucleotide; TTC chr2 60473522 60473543 60473527 60473522 -
agaactggaatgggttccttca

SEQ ID NO: 224075 - DNA, 22 bp, Artificial Sequence
  Synthetic oligonucleotide; CTG chr2 60473515 60473536 60473520 60473515 -
gaatgggttccttcagggtact

SEQ ID NO: 224076 - DNA, 22 bp, Artificial Sequence
  Synthetic oligonucleotide; TTC chr2 60473505 60473526 60473510 60473505 -
cttcagggtactttacaaacgt

SEQ ID NO: 224077 - DNA, 22 bp, Artificial Sequence
  Synthetic oligonucleotide; CTT chr2 60473502 60473523 60473507 60473502 -
cagggtactttacaaacgttca

SEQ ID NO: 224078 - DNA, 22 bp, Artificial Sequence
  Synthetic oligonucleotide; TTC chr2 60473501 60473522 60473506 60473501 -
agggtactttacaaacgttcag

SEQ ID NO: 224079 - DNA, 22 bp, Artificial Sequence
  Synthetic oligonucleotide; CTT chr2 60473492 60473513 60473497 60473492 -
tacaaacgttcaggatgcattt

SEQ ID NO: 224080 - DNA, 22 bp, Artificial Sequence
  Synthetic oligonucleotide; TTT chr2 60473491 60473512 60473496 60473491 -
acaaacgttcaggatgcatttt

SEQ ID NO: 224081 - DNA, 22 bp, Artificial Sequence
  Synthetic oligonucleotide; TTA chr2 60473490 60473511 60473495 60473490 -
caaacgttcaggatgcatttta

SEQ ID NO: 224082 - DNA, 22 bp, Artificial Sequence
  Synthetic oligonucleotide; TTC chr2 60473481 60473502 60473486 60473481 -
aggatgcattttaagtgtagtc

SEQ ID NO: 224083 - DNA, 22 bp, Artificial Sequence
  Synthetic oligonucleotide; TTT chr2 60473470 60473491 60473475 60473470 -
taagtgtagtctagaaggtggt

SEQ ID NO: 224084 - DNA, 22 bp, Artificial Sequence
  Synthetic oligonucleotide; TTT chr2 60473469 60473490 60473474 60473469 -
aagtgtagtctagaaggtggta

SEQ ID NO: 224085 - DNA, 22 bp, Artificial Sequence
  Synthetic oligonucleotide; TTA chr2 60473468 60473489 60473473 60473468 -
agtgtagtctagaaggtggtac

SEQ ID NO: 224086 - DNA, 22 bp, Artificial Sequence
  Synthetic oligonucleotide; CTA chr2 60473457 60473478 60473462 60473457 -
gaaggtggtacatggaagagct

SEQ ID NO: 224087 - DNA, 22 bp, Artificial Sequence
  Synthetic oligonucleotide; CTG chr2 60473434 60473455 60473439 60473434 -
agggacttgaggattatggact

SEQ ID NO: 224088 - DNA, 22 bp, Artificial Sequence
  Synthetic oligonucleotide; CTT chr2 60473426 60473447 60473431 60473426 -
gaggattatggactgcgaaagg

SEQ ID NO: 224089 - DNA, 22 bp, Artificial Sequence
  Synthetic oligonucleotide; TTG chr2 60473425 60473446 60473430 60473425 -
aggattatggactgcgaaagga

SEQ ID NO: 224090 - DNA, 22 bp, Artificial Sequence
  Synthetic oligonucleotide; TTA chr2 60473418 60473439 60473423 60473418 -
tggactgcgaaaggactgtagg

SEQ ID NO: 224091 - DNA, 22 bp, Artificial Sequence
  Synthetic oligonucleotide; CTG chr2 60473411 60473432 60473416 60473411 -
cgaaaggactgtaggtagtcct

SEQ ID NO: 224092 - DNA, 22 bp, Artificial Sequence
  Synthetic oligonucleotide; CTG chr2 60473400 60473421 60473405 60473400 -
taggtagtcctgtattttggcc

SEQ ID NO: 224093 - DNA, 22 bp, Artificial Sequence
  Synthetic oligonucleotide; CTG chr2 60473388 60473409 60473393 60473388 -
tattttggcctgtcaccaatat

SEQ ID NO: 224094 - DNA, 22 bp, Artificial Sequence
  Synthetic oligonucleotide; TTT chr2 60473383 60473404 60473388 60473383 -
tggcctgtcaccaatatagaga

SEQ ID NO: 224095 - DNA, 22 bp, Artificial Sequence
  Synthetic oligonucleotide; TTT chr2 60473382 60473403 60473387 60473382 -
ggcctgtcaccaatatagagac

SEQ ID NO: 224096 - DNA, 22 bp, Artificial Sequence
  Synthetic oligonucleotide; TTG chr2 60473381 60473402 60473386 60473381 -
gcctgtcaccaatatagagacc

SEQ ID NO: 224097 - DNA, 22 bp, Artificial Sequence
  Synthetic oligonucleotide; CTG chr2 60473376 60473397 60473381 60473376 -
tcaccaatatagagacccctcc

SEQ ID NO: 224098 - DNA, 22 bp, Artificial Sequence
  Synthetic oligonucleotide; CTC chr2 60473355 60473376 60473360 60473355 -
ctcatcatagtgtcatccattc

SEQ ID NO: 224099 - DNA, 22 bp, Artificial Sequence
  Synthetic oligonucleotide; CTC chr2 60473352 60473373 60473357 60473352 -
atcatagtgtcatccattctct

SEQ ID NO: 224100 - DNA, 22 bp, Artificial Sequence
  Synthetic oligonucleotide; TTC chr2 60473333 60473354 60473338 60473333 -
tctttttgaagacccagggtga

SEQ ID NO: 224101 - DNA, 22 bp, Artificial Sequence
  Synthetic oligonucleotide; CTC chr2 60473331 60473352 60473336 60473331 -
tttttgaagacccagggtgaaa

SEQ ID NO: 224102 - DNA, 22 bp, Artificial Sequence
  Synthetic oligonucleotide; CTT chr2 60473329 60473350 60473334 60473329 -
tttgaagacccagggtgaaaga

SEQ ID NO: 224103 - DNA, 22 bp, Artificial Sequence
  Synthetic oligonucleotide; TTT chr2 60473328 60473349 60473333 60473328 -
ttgaagacccagggtgaaagaa

SEQ ID NO: 224104 - DNA, 22 bp, Artificial Sequence
  Synthetic oligonucleotide; TTT chr2 60473327 60473348 60473332 60473327 -
tgaagacccagggtgaaagaaa

SEQ ID NO: 224105 - DNA, 22 bp, Artificial Sequence
  Synthetic oligonucleotide; TTT chr2 60473326 60473347 60473331 60473326 -
gaagacccagggtgaaagaaag

SEQ ID NO: 224106 - DNA, 22 bp, Artificial Sequence
  Synthetic oligonucleotide; TTG chr2 60473325 60473346 60473330 60473325 -
aagacccagggtgaaagaaagg

SEQ ID NO: 224107 - DNA, 22 bp, Artificial Sequence
  Synthetic oligonucleotide; TTC chr2 60473274 60473295 60473279 60473274 -
cacgtgggacagctctactgct

SEQ ID NO: 224108 - DNA, 22 bp, Artificial Sequence
  Synthetic oligonucleotide; CTC chr2 60473259 60473280 60473264 60473259 -
tactgcttttgtgcctgtctca

SEQ ID NO: 224109 - DNA, 22 bp, Artificial Sequence
  Synthetic oligonucleotide; CTA chr2 60473257 60473278 60473262 60473257 -
ctgcttttgtgcctgtctcact

SEQ ID NO: 224110 - DNA, 22 bp, Artificial Sequence
  Synthetic oligonucleotide; CTG chr2 60473254 60473275 60473259 60473254 -
cttttgtgcctgtctcactgaa

SEQ ID NO: 224111 - DNA, 22 bp, Artificial Sequence
  Synthetic oligonucleotide; CTT chr2 60473251 60473272 60473256 60473251 -
ttgtgcctgtctcactgaaaaa

SEQ ID NO: 224112 - DNA, 22 bp, Artificial Sequence
  Synthetic oligonucleotide; TTT chr2 60473250 60473271 60473255 60473250 -
tgtgcctgtctcactgaaaaaa

SEQ ID NO: 224113 - DNA, 22 bp, Artificial Sequence
  Synthetic oligonucleotide; TTT chr2 60473249 60473270 60473254 60473249 -
gtgcctgtctcactgaaaaaaa

SEQ ID NO: 224114 - DNA, 22 bp, Artificial Sequence
  Synthetic oligonucleotide; TTG chr2 60473248 60473269 60473253 60473248 -
tgcctgtctcactgaaaaaaaa

SEQ ID NO: 224115 - DNA, 22 bp, Artificial Sequence
  Synthetic oligonucleotide; CTG chr2 60473242 60473263 60473247 60473242 -
tctcactgaaaaaaaaaaaaaa

SEQ ID NO: 224116 - DNA, 22 bp, Artificial Sequence
  Synthetic oligonucleotide; CTC chr2 60473238 60473259 60473243 60473238 -
actgaaaaaaaaaaaaaaacag

SEQ ID NO: 224117 - DNA, 22 bp, Artificial Sequence
  Synthetic oligonucleotide; CTG chr2 60473234 60473255 60473239 60473234 -
aaaaaaaaaaaaaaacagggaa

SEQ ID NO: 224118 - DNA, 22 bp, Artificial Sequence
  Synthetic oligonucleotide; TTA chr2 60473208 60473229 60473213 60473208 -
tctaaaaacatatgtttaggaa

SEQ ID NO: 224119 - DNA, 22 bp, Artificial Sequence
  Synthetic oligonucleotide; CTA chr2 60473204 60473225 60473209 60473204 -
aaaacatatgtttaggaaatat

SEQ ID NO: 224120 - DNA, 22 bp, Artificial Sequence
  Synthetic oligonucleotide; TTT chr2 60473191 60473212 60473196 60473191 -
aggaaatatacacacattcaca

SEQ ID NO: 224121 - DNA, 22 bp, Artificial Sequence
  Synthetic oligonucleotide; TTA chr2 60473190 60473211 60473195 60473190 -
ggaaatatacacacattcacac

SEQ ID NO: 224122 - DNA, 22 bp, Artificial Sequence
  Synthetic oligonucleotide; TTC chr2 60473172 60473193 60473177 60473172 -
acacacgtacacagacacatat

SEQ ID NO: 224123 - DNA, 22 bp, Artificial Sequence
  Synthetic oligonucleotide; CTC chr2 60473140 60473161 60473145 60473140 -
acatatacacacacatgaacac

SEQ ID NO: 224124 - DNA, 22 bp, Artificial Sequence
  Synthetic oligonucleotide; CTA chr2 60473114 60473135 60473119 60473114 -
acacacatgtgcatgcacatgc

SEQ ID NO: 224125 - DNA, 22 bp, Artificial Sequence
  Synthetic oligonucleotide; CTA chr2 60473090 60473111 60473095 60473090 -
acacatgcacaagcatacacac

SEQ ID NO: 224126 - DNA, 22 bp, Artificial Sequence
  Synthetic oligonucleotide; CTC chr2 60473029 60473050 60473034 60473029 -
acaaacacatatgcatgcacac

SEQ ID NO: 224127 - DNA, 22 bp, Artificial Sequence
  Synthetic oligonucleotide; CTA chr2 60473003 60473024 60473008 60473003 -
acacacatatgtacacataaat

SEQ ID NO: 224128 - DNA, 22 bp, Artificial Sequence
  Synthetic oligonucleotide; CTT chr2 60472977 60472998 60472982 60472977 -
gcaaacacacacacacgtacat

SEQ ID NO: 224129 - DNA, 22 bp, Artificial Sequence
  Synthetic oligonucleotide; TTG chr2 60472976 60472997 60472981 60472976 -
caaacacacacacacgtacatt

SEQ ID NO: 224130 - DNA, 22 bp, Artificial Sequence
  Synthetic oligonucleotide; TTT chr2 60472953 60472974 60472958 60472953 -
tagtgaatagcacacatctatg

SEQ ID NO: 224131 - DNA, 22 bp, Artificial Sequence
  Synthetic oligonucleotide; TTT chr2 60472952 60472973 60472957 60472952 -
agtgaatagcacacatctatgt

SEQ ID NO: 224132 - DNA, 22 bp, Artificial Sequence
  Synthetic oligonucleotide; TTA chr2 60472951 60472972 60472956 60472951 -
gtgaatagcacacatctatgta

SEQ ID NO: 224133 - DNA, 22 bp, Artificial Sequence
  Synthetic oligonucleotide; CTA chr2 60472933 60472954 60472938 60472933 -
tgtactcctgtggagagtcctg

SEQ ID NO: 224134 - DNA, 22 bp, Artificial Sequence
  Synthetic oligonucleotide; CTC chr2 60472926 60472947 60472931 60472926 -
ctgtggagagtcctgtggtttt

SEQ ID NO: 224135 - DNA, 22 bp, Artificial Sequence
  Synthetic oligonucleotide; CTG chr2 60472923 60472944 60472928 60472923 -
tggagagtcctgtggttttaat

SEQ ID NO: 224136 - DNA, 22 bp, Artificial Sequence
  Synthetic oligonucleotide; CTG chr2 60472911 60472932 60472916 60472911 -
tggttttaatacctgttaaagt

SEQ ID NO: 224137 - DNA, 22 bp, Artificial Sequence
  Synthetic oligonucleotide; TTT chr2 60472905 60472926 60472910 60472905 -
taatacctgttaaagttgggct

SEQ ID NO: 224138 - DNA, 22 bp, Artificial Sequence
  Synthetic oligonucleotide; TTT chr2 60472904 60472925 60472909 60472904 -
aatacctgttaaagttgggctc

SEQ ID NO: 224139 - DNA, 22 bp, Artificial Sequence
  Synthetic oligonucleotide; TTA chr2 60472903 60472924 60472908 60472903 -
atacctgttaaagttgggctcc

SEQ ID NO: 224140 - DNA, 22 bp, Artificial Sequence
  Synthetic oligonucleotide; CTG chr2 60472896 60472917 60472901 60472896 -
ttaaagttgggctcccaaagca

SEQ ID NO: 224141 - DNA, 22 bp, Artificial Sequence
  Synthetic oligonucleotide; TTA chr2 60472893 60472914 60472898 60472893 -
aagttgggctcccaaagcagtc

SEQ ID NO: 224142 - DNA, 22 bp, Artificial Sequence
  Synthetic oligonucleotide; TTG chr2 60472887 60472908 60472892 60472887 -
ggctcccaaagcagtcattaaa

SEQ ID NO: 224143 - DNA, 22 bp, Artificial Sequence
  Synthetic oligonucleotide; CTC chr2 60472882 60472903 60472887 60472882 -
ccaaagcagtcattaaacgtgt

SEQ ID NO: 224144 - DNA, 22 bp, Artificial Sequence
  Synthetic oligonucleotide; TTA chr2 60472867 60472888 60472872 60472867 -
aacgtgttggaatgatgctttt

SEQ ID NO: 224145 - DNA, 22 bp, Artificial Sequence
  Synthetic oligonucleotide; TTG chr2 60472858 60472879 60472863 60472858 -
gaatgatgctttttgcttagct

SEQ ID NO: 224146 - DNA, 22 bp, Artificial Sequence
  Synthetic oligonucleotide; CTT chr2 60472847 60472868 60472852 60472847 -
tttgcttagctgttttggcaca

SEQ ID NO: 224147 - DNA, 22 bp, Artificial Sequence
  Synthetic oligonucleotide; TTT chr2 60472846 60472867 60472851 60472846 -
ttgcttagctgttttggcacat

SEQ ID NO: 224148 - DNA, 22 bp, Artificial Sequence
  Synthetic oligonucleotide; TTT chr2 60472845 60472866 60472850 60472845 -
tgcttagctgttttggcacatt

SEQ ID NO: 224149 - DNA, 22 bp, Artificial Sequence
  Synthetic oligonucleotide; TTT chr2 60472844 60472865 60472849 60472844 -
gcttagctgttttggcacattt

SEQ ID NO: 224150 - DNA, 22 bp, Artificial Sequence
  Synthetic oligonucleotide; TTG chr2 60472843 60472864 60472848 60472843 -
cttagctgttttggcacatttg

SEQ ID NO: 224151 - DNA, 22 bp, Artificial Sequence
  Synthetic oligonucleotide; CTT chr2 60472840 60472861 60472845 60472840 -
agctgttttggcacatttggaa

SEQ ID NO: 224152 - DNA, 22 bp, Artificial Sequence
  Synthetic oligonucleotide; TTA chr2 60472839 60472860 60472844 60472839 -
gctgttttggcacatttggaaa

SEQ ID NO: 224153 - DNA, 22 bp, Artificial Sequence
  Synthetic oligonucleotide; CTG chr2 60472835 60472856 60472840 60472835 -
ttttggcacatttggaaatctg

SEQ ID NO: 224154 - DNA, 22 bp, Artificial Sequence
  Synthetic oligonucleotide; TTT chr2 60472832 60472853 60472837 60472832 -
tggcacatttggaaatctgcag

SEQ ID NO: 224155 - DNA, 22 bp, Artificial Sequence
  Synthetic oligonucleotide; TTT chr2 60472831 60472852 60472836 60472831 -
ggcacatttggaaatctgcagt

SEQ ID NO: 224156 - DNA, 22 bp, Artificial Sequence
  Synthetic oligonucleotide; TTG chr2 60472830 60472851 60472835 60472830 -
gcacatttggaaatctgcagta

SEQ ID NO: 224157 - DNA, 22 bp, Artificial Sequence
  Synthetic oligonucleotide; TTT chr2 60472822 60472843 60472827 60472822 -
ggaaatctgcagtattacctgt

SEQ ID NO: 224158 - DNA, 22 bp, Artificial Sequence
  Synthetic oligonucleotide; TTG chr2 60472821 60472842 60472826 60472821 -
gaaatctgcagtattacctgtt

SEQ ID NO: 224159 - DNA, 22 bp, Artificial Sequence
  Synthetic oligonucleotide; CTG chr2 60472813 60472834 60472818 60472813 -
cagtattacctgttgattagta

SEQ ID NO: 224160 - DNA, 22 bp, Artificial Sequence
  Synthetic oligonucleotide; TTA chr2 60472805 60472826 60472810 60472805 -
cctgttgattagtagacagtaa

SEQ ID NO: 224161 - DNA, 22 bp, Artificial Sequence
  Synthetic oligonucleotide; CTG chr2 60472801 60472822 60472806 60472801 -
ttgattagtagacagtaatgtg

SEQ ID NO: 224162 - DNA, 22 bp, Artificial Sequence
  Synthetic oligonucleotide; TTG chr2 60472798 60472819 60472803 60472798 -
attagtagacagtaatgtggct

SEQ ID NO: 224163 - DNA, 22 bp, Artificial Sequence
  Synthetic oligonucleotide; TTA chr2 60472794 60472815 60472799 60472794 -
gtagacagtaatgtggctgtat

SEQ ID NO: 224164 - DNA, 22 bp, Artificial Sequence
  Synthetic oligonucleotide; CTG chr2 60472775 60472796 60472780 60472775 -
tattacacacccagtgattagt

SEQ ID NO: 224165 - DNA, 22 bp, Artificial Sequence
  Synthetic oligonucleotide; TTA chr2 60472770 60472791 60472775 60472770 -
cacacccagtgattagtttcag

SEQ ID NO: 224166 - DNA, 22 bp, Artificial Sequence
  Synthetic oligonucleotide; TTA chr2 60472755 60472776 60472760 60472755 -
gtttcagaaacaaatagcatgt

SEQ ID NO: 224167 - DNA, 22 bp, Artificial Sequence
  Synthetic oligonucleotide; TTT chr2 60472751 60472772 60472756 60472751 -
cagaaacaaatagcatgttaat

SEQ ID NO: 224168 - DNA, 22 bp, Artificial Sequence
  Synthetic oligonucleotide; TTC chr2 60472750 60472771 60472755 60472750 -
agaaacaaatagcatgttaata

SEQ ID NO: 224169 - DNA, 22 bp, Artificial Sequence
  Synthetic oligonucleotide; TTA chr2 60472731 60472752 60472736 60472731 -
atagtcaaggaatctttgagat

SEQ ID NO: 224170 - DNA, 22 bp, Artificial Sequence
  Synthetic oligonucleotide; CTT chr2 60472715 60472736 60472720 60472715 -
tgagatgttcttgaggaaacca

SEQ ID NO: 224171 - DNA, 22 bp, Artificial Sequence
  Synthetic oligonucleotide; TTT chr2 60472714 60472735 60472719 60472714 -
gagatgttcttgaggaaaccaa

SEQ ID NO: 224172 - DNA, 22 bp, Artificial Sequence
  Synthetic oligonucleotide; TTG chr2 60472713 60472734 60472718 60472713 -
agatgttcttgaggaaaccaaa

SEQ ID NO: 224173 - DNA, 22 bp, Artificial Sequence
  Synthetic oligonucleotide; TTC chr2 60472705 60472726 60472710 60472705 -
ttgaggaaaccaaaaaacttga

SEQ ID NO: 224174 - DNA, 22 bp, Artificial Sequence
  Synthetic oligonucleotide; CTT chr2 60472703 60472724 60472708 60472703 -
gaggaaaccaaaaaacttgatt

SEQ ID NO: 224175 - DNA, 22 bp, Artificial Sequence
  Synthetic oligonucleotide; TTG chr2 60472702 60472723 60472707 60472702 -
aggaaaccaaaaaacttgattt

SEQ ID NO: 224176 - DNA, 22 bp, Artificial Sequence
  Synthetic oligonucleotide; CTT chr2 60472685 60472706 60472690 60472685 -
gatttaatgacttaaattccag

SEQ ID NO: 224177 - DNA, 22 bp, Artificial Sequence
  Synthetic oligonucleotide; TTG chr2 60472684 60472705 60472689 60472684 -
atttaatgacttaaattccagg

SEQ ID NO: 224178 - DNA, 22 bp, Artificial Sequence
  Synthetic oligonucleotide; TTT chr2 60472680 60472701 60472685 60472680 -
aatgacttaaattccaggaaca

SEQ ID NO: 224179 - DNA, 22 bp, Artificial Sequence
  Synthetic oligonucleotide; TTA chr2 60472679 60472700 60472684 60472679 -
atgacttaaattccaggaacat

SEQ ID NO: 224180 - DNA, 22 bp, Artificial Sequence
  Synthetic oligonucleotide; CTT chr2 60472672 60472693 60472677 60472672 -
aaattccaggaacatcccactg

SEQ ID NO: 224181 - DNA, 22 bp, Artificial Sequence
  Synthetic oligonucleotide; TTA chr2 60472671 60472692 60472676 60472671 -
aattccaggaacatcccactgg

SEQ ID NO: 224182 - DNA, 22 bp, Artificial Sequence
  Synthetic oligonucleotide; TTC chr2 60472666 60472687 60472671 60472666 -
caggaacatcccactgggctta

SEQ ID NO: 224183 - DNA, 22 bp, Artificial Sequence
  Synthetic oligonucleotide; CTG chr2 60472650 60472671 60472655 60472650 -
ggcttagagctctttgtcaaaa

SEQ ID NO: 224184 - DNA, 22 bp, Artificial Sequence
  Synthetic oligonucleotide; CTT chr2 60472645 60472666 60472650 60472645 -
agagctctttgtcaaaagttgg

SEQ ID NO: 224185 - DNA, 22 bp, Artificial Sequence
  Synthetic oligonucleotide; TTA chr2 60472644 60472665 60472649 60472644 -
gagctctttgtcaaaagttggt

SEQ ID NO: 224186 - DNA, 22 bp, Artificial Sequence
  Synthetic oligonucleotide; CTC chr2 60472638 60472659 60472643 60472638 -
tttgtcaaaagttggtacccaa

SEQ ID NO: 224187 - DNA, 22 bp, Artificial Sequence
  Synthetic oligonucleotide; CTT chr2 60472636 60472657 60472641 60472636 -
tgtcaaaagttggtacccaata

SEQ ID NO: 224188 - DNA, 22 bp, Artificial Sequence
  Synthetic oligonucleotide; TTT chr2 60472635 60472656 60472640 60472635 -
gtcaaaagttggtacccaatat

SEQ ID NO: 224189 - DNA, 22 bp, Artificial Sequence
  Synthetic oligonucleotide; TTG chr2 60472634 60472655 60472639 60472634 -
tcaaaagttggtacccaatata

SEQ ID NO: 224190 - DNA, 22 bp, Artificial Sequence
  Synthetic oligonucleotide; TTG chr2 60472624 60472645 60472629 60472624 -
gtacccaatatatgtagaaatg

SEQ ID NO: 224191 - DNA, 22 bp, Artificial Sequence
  Synthetic oligonucleotide; TTA chr2 60472577 60472598 60472582 60472577 -
aatcaaagccattcccagtttg

SEQ ID NO: 224192 - DNA, 22 bp, Artificial Sequence
  Synthetic oligonucleotide; TTC chr2 60472563 60472584 60472568 60472563 -
ccagtttgctgcatatttttta

SEQ ID NO: 224193 - DNA, 22 bp, Artificial Sequence
  Synthetic oligonucleotide; TTT chr2 60472556 60472577 60472561 60472556 -
gctgcatattttttaatgaaac

SEQ ID NO: 224194 - DNA, 22 bp, Artificial Sequence
  Synthetic oligonucleotide; TTG chr2 60472555 60472576 60472560 60472555 -
ctgcatattttttaatgaaacc

SEQ ID NO: 224195 - DNA, 22 bp, Artificial Sequence
  Synthetic oligonucleotide; CTG chr2 60472552 60472573 60472557 60472552 -
catattttttaatgaaacctga

SEQ ID NO: 224196 - DNA, 22 bp, Artificial Sequence
  Synthetic oligonucleotide; TTT chr2 60472545 60472566 60472550 60472545 -
tttaatgaaacctgaaaaataa

SEQ ID NO: 224197 - DNA, 22 bp, Artificial Sequence
  Synthetic oligonucleotide; TTT chr2 60472544 60472565 60472549 60472544 -
ttaatgaaacctgaaaaataag

SEQ ID NO: 224198 - DNA, 22 bp, Artificial Sequence
  Synthetic oligonucleotide; TTT chr2 60472543 60472564 60472548 60472543 -
taatgaaacctgaaaaataaga

SEQ ID NO: 224199 - DNA, 22 bp, Artificial Sequence
  Synthetic oligonucleotide; TTT chr2 60472542 60472563 60472547 60472542 -
aatgaaacctgaaaaataagag

SEQ ID NO: 224200 - DNA, 22 bp, Artificial Sequence
  Synthetic oligonucleotide; TTA chr2 60472541 60472562 60472546 60472541 -
atgaaacctgaaaaataagagt

SEQ ID NO: 224201 - DNA, 22 bp, Artificial Sequence
  Synthetic oligonucleotide; CTG chr2 60472531 60472552 60472536 60472531 -
aaaaataagagtcactattttt

SEQ ID NO: 224202 - DNA, 22 bp, Artificial Sequence
  Synthetic oligonucleotide; CTA chr2 60472514 60472535 60472519 60472514 -
tttttaaattcagccataagga

SEQ ID NO: 224203 - DNA, 22 bp, Artificial Sequence
  Synthetic oligonucleotide; TTT chr2 60472511 60472532 60472516 60472511 -
ttaaattcagccataaggaaac

SEQ ID NO: 224204 - DNA, 22 bp, Artificial Sequence
  Synthetic oligonucleotide; TTT chr2 60472510 60472531 60472515 60472510 -
taaattcagccataaggaaact

SEQ ID NO: 224205 - DNA, 22 bp, Artificial Sequence
  Synthetic oligonucleotide; TTT chr2 60472509 60472530 60472514 60472509 -
aaattcagccataaggaaactt

SEQ ID NO: 224206 - DNA, 22 bp, Artificial Sequence
  Synthetic oligonucleotide; TTA chr2 60472508 60472529 60472513 60472508 -
aattcagccataaggaaacttt

SEQ ID NO: 224207 - DNA, 22 bp, Artificial Sequence
  Synthetic oligonucleotide; TTC chr2 60472503 60472524 60472508 60472503 -
agccataaggaaactttgcaac

SEQ ID NO: 224208 - DNA, 22 bp, Artificial Sequence
  Synthetic oligonucleotide; CTT chr2 60472487 60472508 60472492 60472487 -
tgcaacctaataatgtgtaagg

SEQ ID NO: 224209 - DNA, 22 bp, Artificial Sequence
  Synthetic oligonucleotide; TTT chr2 60472486 60472507 60472491 60472486 -
gcaacctaataatgtgtaaggc

SEQ ID NO: 224210 - DNA, 22 bp, Artificial Sequence
  Synthetic oligonucleotide; TTG chr2 60472485 60472506 60472490 60472485 -
caacctaataatgtgtaaggca

SEQ ID NO: 224211 - DNA, 22 bp, Artificial Sequence
  Synthetic oligonucleotide; CTA chr2 60472478 60472499 60472483 60472478 -
ataatgtgtaaggcatttctga

SEQ ID NO: 224212 - DNA, 22 bp, Artificial Sequence
  Synthetic oligonucleotide; TTT chr2 60472460 60472481 60472465 60472460 -
ctgaggccccaagtggaaatac

SEQ ID NO: 224213 - DNA, 22 bp, Artificial Sequence
  Synthetic oligonucleotide; TTC chr2 60472459 60472480 60472464 60472459 -
tgaggccccaagtggaaatact

SEQ ID NO: 224214 - DNA, 22 bp, Artificial Sequence
  Synthetic oligonucleotide; CTG chr2 60472457 60472478 60472462 60472457 -
aggccccaagtggaaatactgg

SEQ ID NO: 224215 - DNA, 22 bp, Artificial Sequence
  Synthetic oligonucleotide; CTG chr2 60472436 60472457 60472441 60472436 -
ggtctagagagacctttatgaa

SEQ ID NO: 224216 - DNA, 22 bp, Artificial Sequence
  Synthetic oligonucleotide; CTA chr2 60472430 60472451 60472435 60472430 -
gagagacctttatgaaatagaa

SEQ ID NO: 224217 - DNA, 22 bp, Artificial Sequence
  Synthetic oligonucleotide; CTT chr2 60472420 60472441 60472425 60472420 -
tatgaaatagaacaggttgaaa

SEQ ID NO: 224218 - DNA, 22 bp, Artificial Sequence
  Synthetic oligonucleotide; TTT chr2 60472419 60472440 60472424 60472419 -
atgaaatagaacaggttgaaac

SEQ ID NO: 224219 - DNA, 22 bp, Artificial Sequence
  Synthetic oligonucleotide; TTA chr2 60472418 60472439 60472423 60472418 -
tgaaatagaacaggttgaaaca

SEQ ID NO: 224220 - DNA, 22 bp, Artificial Sequence
  Synthetic oligonucleotide; TTG chr2 60472401 60472422 60472406 60472401 -
aaacaccttccaccagaaaagt

SEQ ID NO: 224221 - DNA, 22 bp, Artificial Sequence
  Synthetic oligonucleotide; CTT chr2 60472392 60472413 60472397 60472392 -
ccaccagaaaagtgtaagacat

SEQ ID NO: 224222 - DNA, 22 bp, Artificial Sequence
  Synthetic oligonucleotide; TTC chr2 60472391 60472412 60472396 60472391 -
caccagaaaagtgtaagacatt

SEQ ID NO: 224223 - DNA, 22 bp, Artificial Sequence
  Synthetic oligonucleotide; TTT chr2 60472368 60472389 60472373 60472368 -
gaaaaaagattgagtcagaaaa

SEQ ID NO: 224224 - DNA, 22 bp, Artificial Sequence
  Synthetic oligonucleotide; TTG chr2 60472367 60472388 60472372 60472367 -
aaaaaagattgagtcagaaaag

SEQ ID NO: 224225 - DNA, 22 bp, Artificial Sequence
  Synthetic oligonucleotide; TTG chr2 60472356 60472377 60472361 60472356 -
agtcagaaaagggaaatgtgtc

SEQ ID NO: 224226 - DNA, 22 bp, Artificial Sequence
  Synthetic oligonucleotide; TTT chr2 60472328 60472349 60472333 60472328 -
gagagaccagaaagggaaacaa

SEQ ID NO: 224227 - DNA, 22 bp, Artificial Sequence
  Synthetic oligonucleotide; TTG chr2 60472327 60472348 60472332 60472327 -
agagaccagaaagggaaacaag

SEQ ID NO: 224228 - DNA, 22 bp, Artificial Sequence
  Synthetic oligonucleotide; TTC chr2 60472295 60472316 60472300 60472295 -
ctgctgtgtccgtgcagttgcc

SEQ ID NO: 224229 - DNA, 22 bp, Artificial Sequence
  Synthetic oligonucleotide; CTG chr2 60472292 60472313 60472297 60472292 -
ctgtgtccgtgcagttgccaca

SEQ ID NO: 224230 - DNA, 22 bp, Artificial Sequence
  Synthetic oligonucleotide; CTG chr2 60472289 60472310 60472294 60472289 -
tgtccgtgcagttgccacagct

SEQ ID NO: 224231 - DNA, 22 bp, Artificial Sequence
  Synthetic oligonucleotide; TTG chr2 60472275 60472296 60472280 60472275 -
ccacagctgcgttcgctgacat

SEQ ID NO: 224232 - DNA, 22 bp, Artificial Sequence
  Synthetic oligonucleotide; CTG chr2 60472266 60472287 60472271 60472266 -
cgttcgctgacatgtcggcttt

SEQ ID NO: 224233 - DNA, 22 bp, Artificial Sequence
  Synthetic oligonucleotide; TTC chr2 60472261 60472282 60472266 60472261 -
gctgacatgtcggctttaatgg

SEQ ID NO: 224234 - DNA, 22 bp, Artificial Sequence
  Synthetic oligonucleotide; CTG chr2 60472257 60472278 60472262 60472257 -
acatgtcggctttaatggaagc

SEQ ID NO: 224235 - DNA, 22 bp, Artificial Sequence
  Synthetic oligonucleotide; CTT chr2 60472245 60472266 60472250 60472245 -
taatggaagcagtgaggacaca

SEQ ID NO: 224236 - DNA, 22 bp, Artificial Sequence
  Synthetic oligonucleotide; TTT chr2 60472244 60472265 60472249 60472244 -
aatggaagcagtgaggacacaa

SEQ ID NO: 224237 - DNA, 22 bp, Artificial Sequence
  Synthetic oligonucleotide; TTA chr2 60472243 60472264 60472248 60472243 -
atggaagcagtgaggacacaat

SEQ ID NO: 224238 - DNA, 22 bp, Artificial Sequence
  Synthetic oligonucleotide; CTG chr2 60472218 60472239 60472223 60472218 -
tctggcacaagctggtttgggt

SEQ ID NO: 224239 - DNA, 22 bp, Artificial Sequence
  Synthetic oligonucleotide; CTG chr2 60472214 60472235 60472219 60472214 -
gcacaagctggtttgggtgttg

SEQ ID NO: 224240 - DNA, 22 bp, Artificial Sequence
  Synthetic oligonucleotide; CTG chr2 60472204 60472225 60472209 60472204 -
gtttgggtgttgtctcatgcta

SEQ ID NO: 224241 - DNA, 22 bp, Artificial Sequence
  Synthetic oligonucleotide; TTT chr2 60472200 60472221 60472205 60472200 -
gggtgttgtctcatgctaagaa

SEQ ID NO: 224242 - DNA, 22 bp, Artificial Sequence
  Synthetic oligonucleotide; TTG chr2 60472199 60472220 60472204 60472199 -
ggtgttgtctcatgctaagaag

SEQ ID NO: 224243 - DNA, 22 bp, Artificial Sequence
  Synthetic oligonucleotide; TTG chr2 60472192 60472213 60472197 60472192 -
tctcatgctaagaaggccctgg

SEQ ID NO: 224244 - DNA, 22 bp, Artificial Sequence
  Synthetic oligonucleotide; CTC chr2 60472188 60472209 60472193 60472188 -
atgctaagaaggccctggacct

SEQ ID NO: 224245 - DNA, 22 bp, Artificial Sequence
  Synthetic oligonucleotide; CTA chr2 60472182 60472203 60472187 60472182 -
agaaggccctggacctgatgga

SEQ ID NO: 224246 - DNA, 22 bp, Artificial Sequence
  Synthetic oligonucleotide; CTG chr2 60472171 60472192 60472176 60472171 -
gacctgatggagagcctggacc

SEQ ID NO: 224247 - DNA, 22 bp, Artificial Sequence
  Synthetic oligonucleotide; CTG chr2 60472165 60472186 60472170 60472165 -
atggagagcctggacctgttcc

SEQ ID NO: 224248 - DNA, 22 bp, Artificial Sequence
  Synthetic oligonucleotide; CTG chr2 60472153 60472174 60472158 60472153 -
gacctgttccctgtccttatca

SEQ ID NO: 224249 - DNA, 22 bp, Artificial Sequence
  Synthetic oligonucleotide; CTG chr2 60472147 60472168 60472152 60472147 -
ttccctgtccttatcaatgaca

SEQ ID NO: 224250 - DNA, 22 bp, Artificial Sequence
  Synthetic oligonucleotide; TTC chr2 60472144 60472165 60472149 60472144 -
cctgtccttatcaatgacagac

SEQ ID NO: 224251 - DNA, 22 bp, Artificial Sequence
  Synthetic oligonucleotide; CTG chr2 60472140 60472161 60472145 60472140 -
tccttatcaatgacagacggag

SEQ ID NO: 224252 - DNA, 22 bp, Artificial Sequence
  Synthetic oligonucleotide; CTT chr2 60472135 60472156 60472140 60472135 -
atcaatgacagacggagggtgg

SEQ ID NO: 224253 - DNA, 22 bp, Artificial Sequence
  Synthetic oligonucleotide; TTA chr2 60472134 60472155 60472139 60472134 -
tcaatgacagacggagggtgga

SEQ ID NO: 224254 - DNA, 22 bp, Artificial Sequence
  Synthetic oligonucleotide; CTG chr2 60472107 60472128 60472112 60472107 -
aatttcctaatggagggatcct

SEQ ID NO: 224255 - DNA, 22 bp, Artificial Sequence
  Synthetic oligonucleotide; TTT chr2 60472102 60472123 60472107 60472102 -
cctaatggagggatccttaggg

SEQ ID NO: 224256 - DNA, 22 bp, Artificial Sequence
  Synthetic oligonucleotide; TTC chr2 60472101 60472122 60472106 60472101 -
ctaatggagggatccttaggga

SEQ ID NO: 224257 - DNA, 22 bp, Artificial Sequence
  Synthetic oligonucleotide; CTA chr2 60472098 60472119 60472103 60472098 -
atggagggatccttagggattc

SEQ ID NO: 224258 - DNA, 22 bp, Artificial Sequence
  Synthetic oligonucleotide; CTT chr2 60472084 60472105 60472089 60472084 -
agggattccctaagcttaattt

SEQ ID NO: 224259 - DNA, 22 bp, Artificial Sequence
  Synthetic oligonucleotide; TTA chr2 60472083 60472104 60472088 60472083 -
gggattccctaagcttaatttg

SEQ ID NO: 224260 - DNA, 22 bp, Artificial Sequence
  Synthetic oligonucleotide; TTC chr2 60472076 60472097 60472081 60472076 -
cctaagcttaatttgtttttga

SEQ ID NO: 224261 - DNA, 22 bp, Artificial Sequence
  Synthetic oligonucleotide; CTA chr2 60472072 60472093 60472077 60472072 -
agcttaatttgtttttgactgt

SEQ ID NO: 224262 - DNA, 22 bp, Artificial Sequence
  Synthetic oligonucleotide; CTT chr2 60472067 60472088 60472072 60472067 -
aatttgtttttgactgttccag

SEQ ID NO: 224263 - DNA, 22 bp, Artificial Sequence
  Synthetic oligonucleotide; TTA chr2 60472066 60472087 60472071 60472066 -
atttgtttttgactgttccagt

SEQ ID NO: 224264 - DNA, 22 bp, Artificial Sequence
  Synthetic oligonucleotide; TTT chr2 60472062 60472083 60472067 60472062 -
gtttttgactgttccagtccta

SEQ ID NO: 224265 - DNA, 22 bp, Artificial Sequence
  Synthetic oligonucleotide; TTG chr2 60472061 60472082 60472066 60472061 -
tttttgactgttccagtcctaa

SEQ ID NO: 224266 - DNA, 22 bp, Artificial Sequence
  Synthetic oligonucleotide; TTT chr2 60472058 60472079 60472063 60472058 -
ttgactgttccagtcctaaagg

SEQ ID NO: 224267 - DNA, 22 bp, Artificial Sequence
  Synthetic oligonucleotide; TTT chr2 60472057 60472078 60472062 60472057 -
tgactgttccagtcctaaagga

SEQ ID NO: 224268 - DNA, 22 bp, Artificial Sequence
  Synthetic oligonucleotide; TTT chr2 60472056 60472077 60472061 60472056 -
gactgttccagtcctaaaggag

SEQ ID NO: 224269 - DNA, 22 bp, Artificial Sequence
  Synthetic oligonucleotide; TTG chr2 60472055 60472076 60472060 60472055 -
actgttccagtcctaaaggagg

SEQ ID NO: 224270 - DNA, 22 bp, Artificial Sequence
  Synthetic oligonucleotide; CTG chr2 60472051 60472072 60472056 60472051 -
ttccagtcctaaaggaggtggg

SEQ ID NO: 224271 - DNA, 22 bp, Artificial Sequence
  Synthetic oligonucleotide; TTC chr2 60472048 60472069 60472053 60472048 -
cagtcctaaaggaggtgggtcc

SEQ ID NO: 224272 - DNA, 22 bp, Artificial Sequence
  Synthetic oligonucleotide; CTA chr2 60472040 60472061 60472045 60472040 -
aaggaggtgggtcctggacagg

SEQ ID NO: 224273 - DNA, 22 bp, Artificial Sequence
  Synthetic oligonucleotide; CTG chr2 60472024 60472045 60472029 60472024 -
gacaggagggaaaacagcctca

SEQ ID NO: 224274 - DNA, 22 bp, Artificial Sequence
  Synthetic oligonucleotide; CTC chr2 60472003 60472024 60472008 60472003 -
atggcccatgggtctctgccca

SEQ ID NO: 224275 - DNA, 22 bp, Artificial Sequence
  Synthetic oligonucleotide; CTC chr2 60471987 60472008 60471992 60471987 -
tgcccagggaatttcaaagctt

SEQ ID NO: 224276 - DNA, 22 bp, Artificial Sequence
  Synthetic oligonucleotide; CTG chr2 60471985 60472006 60471990 60471985 -
cccagggaatttcaaagcttcc

SEQ ID NO: 224277 - DNA, 22 bp, Artificial Sequence
  Synthetic oligonucleotide; TTT chr2 60471973 60471994 60471978 60471973 -
caaagcttccagcgttcatact

SEQ ID NO: 224278 - DNA, 22 bp, Artificial Sequence
  Synthetic oligonucleotide; TTC chr2 60471972 60471993 60471977 60471972 -
aaagcttccagcgttcatactt

SEQ ID NO: 224279 - DNA, 22 bp, Artificial Sequence
  Synthetic oligonucleotide; CTT chr2 60471965 60471986 60471970 60471965 -
ccagcgttcatacttcccttac

SEQ ID NO: 224280 - DNA, 22 bp, Artificial Sequence
  Synthetic oligonucleotide; TTC chr2 60471964 60471985 60471969 60471964 -
cagcgttcatacttcccttacc

SEQ ID NO: 224281 - DNA, 22 bp, Artificial Sequence
  Synthetic oligonucleotide; TTC chr2 60471956 60471977 60471961 60471956 -
atacttcccttaccctaagaca

SEQ ID NO: 224282 - DNA, 22 bp, Artificial Sequence
  Synthetic oligonucleotide; CTT chr2 60471950 60471971 60471955 60471950 -
cccttaccctaagacagcagtg

SEQ ID NO: 224283 - DNA, 22 bp, Artificial Sequence
  Synthetic oligonucleotide; TTC chr2 60471949 60471970 60471954 60471949 -
ccttaccctaagacagcagtgc

SEQ ID NO: 224284 - DNA, 22 bp, Artificial Sequence
  Synthetic oligonucleotide; CTT chr2 60471945 60471966 60471950 60471945 -
accctaagacagcagtgctgat

SEQ ID NO: 224285 - DNA, 22 bp, Artificial Sequence
  Synthetic oligonucleotide; TTA chr2 60471944 60471965 60471949 60471944 -
ccctaagacagcagtgctgatt

SEQ ID NO: 224286 - DNA, 22 bp, Artificial Sequence
  Synthetic oligonucleotide; CTA chr2 60471939 60471960 60471944 60471939 -
agacagcagtgctgattcagct

SEQ ID NO: 224287 - DNA, 22 bp, Artificial Sequence
  Synthetic oligonucleotide; CTG chr2 60471925 60471946 60471930 60471925 -
attcagcttgagtgtgcatgag

SEQ ID NO: 224288 - DNA, 22 bp, Artificial Sequence
  Synthetic oligonucleotide; TTC chr2 60471921 60471942 60471926 60471921 -
agcttgagtgtgcatgagaatc

SEQ ID NO: 224289 - DNA, 22 bp, Artificial Sequence
  Synthetic oligonucleotide; CTT chr2 60471916 60471937 60471921 60471916 -
gagtgtgcatgagaatcacctg

SEQ ID NO: 224290 - DNA, 22 bp, Artificial Sequence
  Synthetic oligonucleotide; TTG chr2 60471915 60471936 60471920 60471915 -
agtgtgcatgagaatcacctgg

SEQ ID NO: 224291 - DNA, 22 bp, Artificial Sequence
  Synthetic oligonucleotide; CTG chr2 60471894 60471915 60471899 60471894 -
gagaatttattcaacatagaag

SEQ ID NO: 224292 - DNA, 22 bp, Artificial Sequence
  Synthetic oligonucleotide; TTT chr2 60471886 60471907 60471891 60471886 -
attcaacatagaaggctgcttc

SEQ ID NO: 224293 - DNA, 22 bp, Artificial Sequence
  Synthetic oligonucleotide; TTA chr2 60471885 60471906 60471890 60471885 -
ttcaacatagaaggctgcttcc

SEQ ID NO: 224294 - DNA, 22 bp, Artificial Sequence
  Synthetic oligonucleotide; TTC chr2 60471882 60471903 60471887 60471882 -
aacatagaaggctgcttcccca

SEQ ID NO: 224295 - DNA, 22 bp, Artificial Sequence
  Synthetic oligonucleotide; CTG chr2 60471868 60471889 60471873 60471868 -
cttccccaccctcaatttctga

SEQ ID NO: 224296 - DNA, 22 bp, Artificial Sequence
  Synthetic oligonucleotide; CTT chr2 60471865 60471886 60471870 60471865 -
ccccaccctcaatttctgattc

SEQ ID NO: 224297 - DNA, 22 bp, Artificial Sequence
  Synthetic oligonucleotide; TTC chr2 60471864 60471885 60471869 60471864 -
cccaccctcaatttctgattca

SEQ ID NO: 224298 - DNA, 22 bp, Artificial Sequence
  Synthetic oligonucleotide; CTC chr2 60471855 60471876 60471860 60471855 -
aatttctgattcagtaagtctg

SEQ ID NO: 224299 - DNA, 22 bp, Artificial Sequence
  Synthetic oligonucleotide; TTT chr2 60471850 60471871 60471855 60471850 -
ctgattcagtaagtctgaggtg

SEQ ID NO: 224300 - DNA, 22 bp, Artificial Sequence
  Synthetic oligonucleotide; TTC chr2 60471849 60471870 60471854 60471849 -
tgattcagtaagtctgaggtgg

SEQ ID NO: 224301 - DNA, 22 bp, Artificial Sequence
  Synthetic oligonucleotide; CTG chr2 60471847 60471868 60471852 60471847 -
attcagtaagtctgaggtggtg

SEQ ID NO: 224302 - DNA, 22 bp, Artificial Sequence
  Synthetic oligonucleotide; TTC chr2 60471843 60471864 60471848 60471843 -
agtaagtctgaggtggtgccca

SEQ ID NO: 224303 - DNA, 22 bp, Artificial Sequence
  Synthetic oligonucleotide; CTG chr2 60471833 60471854 60471838 60471833 -
aggtggtgcccaagaatttgca

SEQ ID NO: 224304 - DNA, 22 bp, Artificial Sequence
  Synthetic oligonucleotide; TTT chr2 60471814 60471835 60471819 60471814 -
gcattttgaacaaactcccagg

SEQ ID NO: 224305 - DNA, 22 bp, Artificial Sequence
  Synthetic oligonucleotide; TTG chr2 60471813 60471834 60471818 60471813 -
cattttgaacaaactcccaggt

SEQ ID NO: 224306 - DNA, 22 bp, Artificial Sequence
  Synthetic oligonucleotide; TTT chr2 60471808 60471829 60471813 60471808 -
tgaacaaactcccaggtgatgc

SEQ ID NO: 224307 - DNA, 22 bp, Artificial Sequence
  Synthetic oligonucleotide; TTT chr2 60471807 60471828 60471812 60471807 -
gaacaaactcccaggtgatgct

SEQ ID NO: 224308 - DNA, 22 bp, Artificial Sequence
  Synthetic oligonucleotide; TTG chr2 60471806 60471827 60471811 60471806 -
aacaaactcccaggtgatgctg

SEQ ID NO: 224309 - DNA, 22 bp, Artificial Sequence
  Synthetic oligonucleotide; CTC chr2 60471797 60471818 60471802 60471797 -
ccaggtgatgctgatcgggggt

SEQ ID NO: 224310 - DNA, 22 bp, Artificial Sequence
  Synthetic oligonucleotide; CTG chr2 60471784 60471805 60471789 60471784 -
atcgggggtgggcctgggtctg

SEQ ID NO: 224311 - DNA, 22 bp, Artificial Sequence
  Synthetic oligonucleotide; CTG chr2 60471768 60471789 60471773 60471768 -
ggtctgcgctgtgagaatcact

SEQ ID NO: 224312 - DNA, 22 bp, Artificial Sequence
  Synthetic oligonucleotide; CTG chr2 60471762 60471783 60471767 60471762 -
cgctgtgagaatcacttgccta

SEQ ID NO: 224313 - DNA, 22 bp, Artificial Sequence
  Synthetic oligonucleotide; CTG chr2 60471757 60471778 60471762 60471757 -
tgagaatcacttgcctaagagc

SEQ ID NO: 224314 - DNA, 22 bp, Artificial Sequence
  Synthetic oligonucleotide; CTT chr2 60471745 60471766 60471750 60471745 -
gcctaagagcactaacaaagaa

SEQ ID NO: 224315 - DNA, 22 bp, Artificial Sequence
  Synthetic oligonucleotide; TTG chr2 60471744 60471765 60471749 60471744 -
cctaagagcactaacaaagaaa

SEQ ID NO: 224316 - DNA, 22 bp, Artificial Sequence
  Synthetic oligonucleotide; CTA chr2 60471740 60471761 60471745 60471740 -
agagcactaacaaagaaaaaaa

SEQ ID NO: 224317 - DNA, 22 bp, Artificial Sequence
  Synthetic oligonucleotide; CTA chr2 60471731 60471752 60471736 60471731 -
acaaagaaaaaaagaggacata

SEQ ID NO: 224318 - DNA, 22 bp, Artificial Sequence
  Synthetic oligonucleotide; CTA chr2 60471705 60471726 60471710 60471705 -
gatcacccacttcctagccagc

SEQ ID NO: 224319 - DNA, 22 bp, Artificial Sequence
  Synthetic oligonucleotide; CTT chr2 60471693 60471714 60471698 60471693 -
cctagccagcaaccagagccca

SEQ ID NO: 224320 - DNA, 22 bp, Artificial Sequence
  Synthetic oligonucleotide; TTC chr2 60471692 60471713 60471697 60471692 -
ctagccagcaaccagagcccat

SEQ ID NO: 224321 - DNA, 22 bp, Artificial Sequence
  Synthetic oligonucleotide; CTA chr2 60471689 60471710 60471694 60471689 -
gccagcaaccagagcccatctc

SEQ ID NO: 224322 - DNA, 22 bp, Artificial Sequence
  Synthetic oligonucleotide; CTC chr2 60471667 60471688 60471672 60471667 -
tggctggggagaatgaaagcga

SEQ ID NO: 224323 - DNA, 22 bp, Artificial Sequence
  Synthetic oligonucleotide; CTG chr2 60471665 60471686 60471670 60471665 -
gctggggagaatgaaagcgaag

SEQ ID NO: 224324 - DNA, 22 bp, Artificial Sequence
  Synthetic oligonucleotide; CTG chr2 60471661 60471682 60471666 60471661 -
gggagaatgaaagcgaaggtgg

SEQ ID NO: 224325 - DNA, 22 bp, Artificial Sequence
  Synthetic oligonucleotide; CTC chr2 60471622 60471643 60471627 60471622 -
aaccaggggcagctccttttcc

SEQ ID NO: 224326 - DNA, 22 bp, Artificial Sequence
  Synthetic oligonucleotide; CTC chr2 60471607 60471628 60471612 60471607 -
cttttccccaccttggcctggg

SEQ ID NO: 224327 - DNA, 22 bp, Artificial Sequence
  Synthetic oligonucleotide; CTT chr2 60471604 60471625 60471609 60471604 -
ttccccaccttggcctgggaag

SEQ ID NO: 224328 - DNA, 22 bp, Artificial Sequence
  Synthetic oligonucleotide; TTT chr2 60471603 60471624 60471608 60471603 -
tccccaccttggcctgggaagg

SEQ ID NO: 224329 - DNA, 22 bp, Artificial Sequence
  Synthetic oligonucleotide; TTT chr2 60471602 60471623 60471607 60471602 -
ccccaccttggcctgggaaggc

SEQ ID NO: 224330 - DNA, 22 bp, Artificial Sequence
  Synthetic oligonucleotide; TTC chr2 60471601 60471622 60471606 60471601 -
cccaccttggcctgggaaggca

SEQ ID NO: 224331 - DNA, 22 bp, Artificial Sequence
  Synthetic oligonucleotide; CTT chr2 60471593 60471614 60471598 60471593 -
ggcctgggaaggcagagctgct

SEQ ID NO: 224332 - DNA, 22 bp, Artificial Sequence
  Synthetic oligonucleotide; TTG chr2 60471592 60471613 60471597 60471592 -
gcctgggaaggcagagctgctc

SEQ ID NO: 224333 - DNA, 22 bp, Artificial Sequence
  Synthetic oligonucleotide; CTG chr2 60471587 60471608 60471592 60471587 -
ggaaggcagagctgctcctcga

SEQ ID NO: 224334 - DNA, 22 bp, Artificial Sequence
  Synthetic oligonucleotide; CTG chr2 60471573 60471594 60471578 60471573 -
ctcctcgagtttgacgctcaga

SEQ ID NO: 224335 - DNA, 22 bp, Artificial Sequence
  Synthetic oligonucleotide; CTC chr2 60471570 60471591 60471575 60471570 -
ctcgagtttgacgctcagaagc

SEQ ID NO: 224336 - DNA, 22 bp, Artificial Sequence
  Synthetic oligonucleotide; CTC chr2 60471567 60471588 60471572 60471567 -
gagtttgacgctcagaagcatt

SEQ ID NO: 224337 - DNA, 22 bp, Artificial Sequence
  Synthetic oligonucleotide; TTT chr2 60471561 60471582 60471566 60471561 -
gacgctcagaagcattaattgt

SEQ ID NO: 224338 - DNA, 22 bp, Artificial Sequence
  Synthetic oligonucleotide; TTG chr2 60471560 60471581 60471565 60471560 -
acgctcagaagcattaattgtg

SEQ ID NO: 224339 - DNA, 22 bp, Artificial Sequence
  Synthetic oligonucleotide; CTC chr2 60471554 60471575 60471559 60471554 -
agaagcattaattgtgatactt

SEQ ID NO: 224340 - DNA, 22 bp, Artificial Sequence
  Synthetic oligonucleotide; TTA chr2 60471544 60471565 60471549 60471544 -
attgtgatactttactttgcct

SEQ ID NO: 224341 - DNA, 22 bp, Artificial Sequence
  Synthetic oligonucleotide; TTG chr2 60471540 60471561 60471545 60471540 -
tgatactttactttgcctaagc

SEQ ID NO: 224342 - DNA, 22 bp, Artificial Sequence
  Synthetic oligonucleotide; CTT chr2 60471532 60471553 60471537 60471532 -
tactttgcctaagccgtgatga

SEQ ID NO: 224343 - DNA, 22 bp, Artificial Sequence
  Synthetic oligonucleotide; TTT chr2 60471531 60471552 60471536 60471531 -
actttgcctaagccgtgatgaa

SEQ ID NO: 224344 - DNA, 22 bp, Artificial Sequence
  Synthetic oligonucleotide; TTA chr2 60471530 60471551 60471535 60471530 -
ctttgcctaagccgtgatgaaa

SEQ ID NO: 224345 - DNA, 22 bp, Artificial Sequence
  Synthetic oligonucleotide; CTT chr2 60471527 60471548 60471532 60471527 -
tgcctaagccgtgatgaaataa

SEQ ID NO: 224346 - DNA, 22 bp, Artificial Sequence
  Synthetic oligonucleotide; TTT chr2 60471526 60471547 60471531 60471526 -
gcctaagccgtgatgaaataat

SEQ ID NO: 224347 - DNA, 22 bp, Artificial Sequence
  Synthetic oligonucleotide; TTG chr2 60471525 60471546 60471530 60471525 -
cctaagccgtgatgaaataatt

SEQ ID NO: 224348 - DNA, 22 bp, Artificial Sequence
  Synthetic oligonucleotide; CTA chr2 60471521 60471542 60471526 60471521 -
agccgtgatgaaataattgaag

SEQ ID NO: 224349 - DNA, 22 bp, Artificial Sequence
  Synthetic oligonucleotide; TTG chr2 60471502 60471523 60471507 60471502 -
aaggcatcatagcaagaagtta

SEQ ID NO: 224350 - DNA, 22 bp, Artificial Sequence
  Synthetic oligonucleotide; TTA chr2 60471480 60471501 60471485 60471480 -
agccctagggaggctattaaca

SEQ ID NO: 224351 - DNA, 22 bp, Artificial Sequence
  Synthetic oligonucleotide; CTA chr2 60471473 60471494 60471478 60471473 -
gggaggctattaacaatttagc

SEQ ID NO: 224352 - DNA, 22 bp, Artificial Sequence
  Synthetic oligonucleotide; CTA chr2 60471464 60471485 60471469 60471464 -
ttaacaatttagcatttccagt

SEQ ID NO: 224353 - DNA, 22 bp, Artificial Sequence
  Synthetic oligonucleotide; TTA chr2 60471461 60471482 60471466 60471461 -
acaatttagcatttccagttca

SEQ ID NO: 224354 - DNA, 22 bp, Artificial Sequence
  Synthetic oligonucleotide; TTT chr2 60471454 60471475 60471459 60471454 -
agcatttccagttcatgtggga

SEQ ID NO: 224355 - DNA, 22 bp, Artificial Sequence
  Synthetic oligonucleotide; TTA chr2 60471453 60471474 60471458 60471453 -
gcatttccagttcatgtgggaa

SEQ ID NO: 224356 - DNA, 22 bp, Artificial Sequence
  Synthetic oligonucleotide; TTT chr2 60471447 60471468 60471452 60471447 -
ccagttcatgtgggaatgtcga

SEQ ID NO: 224357 - DNA, 22 bp, Artificial Sequence
  Synthetic oligonucleotide; TTC chr2 60471446 60471467 60471451 60471446 -
cagttcatgtgggaatgtcgat

SEQ ID NO: 224358 - DNA, 22 bp, Artificial Sequence
  Synthetic oligonucleotide; TTC chr2 60471440 60471461 60471445 60471440 -
atgtgggaatgtcgattttact

SEQ ID NO: 224359 - DNA, 22 bp, Artificial Sequence
  Synthetic oligonucleotide; TTT chr2 60471422 60471443 60471427 60471422 -
tacttaccaaagagaatattat

SEQ ID NO: 224360 - DNA, 22 bp, Artificial Sequence
  Synthetic oligonucleotide; TTT chr2 60471421 60471442 60471426 60471421 -
acttaccaaagagaatattatg

SEQ ID NO: 224361 - DNA, 22 bp, Artificial Sequence
  Synthetic oligonucleotide; TTA chr2 60471420 60471441 60471425 60471420 -
cttaccaaagagaatattatgg

SEQ ID NO: 224362 - DNA, 22 bp, Artificial Sequence
  Synthetic oligonucleotide; CTT chr2 60471417 60471438 60471422 60471417 -
accaaagagaatattatggatg

SEQ ID NO: 224363 - DNA, 22 bp, Artificial Sequence
  Synthetic oligonucleotide; TTA chr2 60471416 60471437 60471421 60471416 -
ccaaagagaatattatggatgt

SEQ ID NO: 224364 - DNA, 22 bp, Artificial Sequence
  Synthetic oligonucleotide; TTA chr2 60471401 60471422 60471406 60471401 -
tggatgtgtttagtggaagaag

SEQ ID NO: 224365 - DNA, 22 bp, Artificial Sequence
  Synthetic oligonucleotide; TTT chr2 60471390 60471411 60471395 60471390 -
agtggaagaagcagcagaatca

SEQ ID NO: 224366 - DNA, 22 bp, Artificial Sequence
  Synthetic oligonucleotide; TTA chr2 60471389 60471410 60471394 60471389 -
gtggaagaagcagcagaatcag

SEQ ID NO: 224367 - DNA, 22 bp, Artificial Sequence
  Synthetic oligonucleotide; CTG chr2 60471364 60471385 60471369 60471364 -
gggtccccagttggctttgctt

SEQ ID NO: 224368 - DNA, 22 bp, Artificial Sequence
  Synthetic oligonucleotide; TTG chr2 60471351 60471372 60471356 60471351 -
gctttgctttgaccctcttcct

SEQ ID NO: 224369 - DNA, 22 bp, Artificial Sequence
  Synthetic oligonucleotide; CTT chr2 60471347 60471368 60471352 60471347 -
tgctttgaccctcttcctgaag

SEQ ID NO: 224370 - DNA, 22 bp, Artificial Sequence
  Synthetic oligonucleotide; TTT chr2 60471346 60471367 60471351 60471346 -
gctttgaccctcttcctgaagg

SEQ ID NO: 224371 - DNA, 22 bp, Artificial Sequence
  Synthetic oligonucleotide; TTG chr2 60471345 60471366 60471350 60471345 -
ctttgaccctcttcctgaagga

SEQ ID NO: 224372 - DNA, 22 bp, Artificial Sequence
  Synthetic oligonucleotide; CTT chr2 60471342 60471363 60471347 60471342 -
tgaccctcttcctgaaggaaga

SEQ ID NO: 224373 - DNA, 22 bp, Artificial Sequence
  Synthetic oligonucleotide; TTT chr2 60471341 60471362 60471346 60471341 -
gaccctcttcctgaaggaagat

SEQ ID NO: 224374 - DNA, 22 bp, Artificial Sequence
  Synthetic oligonucleotide; TTG chr2 60471340 60471361 60471345 60471340 -
accctcttcctgaaggaagata

SEQ ID NO: 224375 - DNA, 22 bp, Artificial Sequence
  Synthetic oligonucleotide; CTC chr2 60471334 60471355 60471339 60471334 -
ttcctgaaggaagataaatgca

SEQ ID NO: 224376 - DNA, 22 bp, Artificial Sequence
  Synthetic oligonucleotide; CTT chr2 60471332 60471353 60471337 60471332 -
cctgaaggaagataaatgcaag

SEQ ID NO: 224377 - DNA, 22 bp, Artificial Sequence
  Synthetic oligonucleotide; TTC chr2 60471331 60471352 60471336 60471331 -
ctgaaggaagataaatgcaagg

SEQ ID NO: 224378 - DNA, 22 bp, Artificial Sequence
  Synthetic oligonucleotide; CTG chr2 60471328 60471349 60471333 60471328 -
aaggaagataaatgcaagggtg

SEQ ID NO: 224379 - DNA, 22 bp, Artificial Sequence
  Synthetic oligonucleotide; CTC chr2 60471300 60471321 60471305 60471300 -
acaaagacagtgtgcttttttt

SEQ ID NO: 224380 - DNA, 22 bp, Artificial Sequence
  Synthetic oligonucleotide; CTT chr2 60471283 60471304 60471288 60471283 -
tttttctaaagtaaatagcttc

SEQ ID NO: 224381 - DNA, 22 bp, Artificial Sequence
  Synthetic oligonucleotide; TTT chr2 60471282 60471303 60471287 60471282 -
ttttctaaagtaaatagcttct

SEQ ID NO: 224382 - DNA, 22 bp, Artificial Sequence
  Synthetic oligonucleotide; TTT chr2 60471281 60471302 60471286 60471281 -
tttctaaagtaaatagcttctt

SEQ ID NO: 224383 - DNA, 22 bp, Artificial Sequence
  Synthetic oligonucleotide; TTT chr2 60471280 60471301 60471285 60471280 -
ttctaaagtaaatagcttctta

SEQ ID NO: 224384 - DNA, 22 bp, Artificial Sequence
  Synthetic oligonucleotide; TTT chr2 60471279 60471300 60471284 60471279 -
tctaaagtaaatagcttcttag

SEQ ID NO: 224385 - DNA, 22 bp, Artificial Sequence
  Synthetic oligonucleotide; TTT chr2 60471278 60471299 60471283 60471278 -
ctaaagtaaatagcttcttagg

SEQ ID NO: 224386 - DNA, 22 bp, Artificial Sequence
  Synthetic oligonucleotide; TTC chr2 60471277 60471298 60471282 60471277 -
taaagtaaatagcttcttaggc

SEQ ID NO: 224387 - DNA, 22 bp, Artificial Sequence
  Synthetic oligonucleotide; CTA chr2 60471275 60471296 60471280 60471275 -
aagtaaatagcttcttaggctg

SEQ ID NO: 224388 - DNA, 22 bp, Artificial Sequence
  Synthetic oligonucleotide; CTT chr2 60471262 60471283 60471267 60471262 -
cttaggctgatagaaatgtttt

SEQ ID NO: 224389 - DNA, 22 bp, Artificial Sequence
  Synthetic oligonucleotide; TTC chr2 60471261 60471282 60471266 60471261 -
ttaggctgatagaaatgttttt

SEQ ID NO: 224390 - DNA, 22 bp, Artificial Sequence
  Synthetic oligonucleotide; CTT chr2 60471259 60471280 60471264 60471259 -
aggctgatagaaatgtttttag

SEQ ID NO: 224391 - DNA, 22 bp, Artificial Sequence
  Synthetic oligonucleotide; TTA chr2 60471258 60471279 60471263 60471258 -
ggctgatagaaatgtttttagc

SEQ ID NO: 224392 - DNA, 22 bp, Artificial Sequence
  Synthetic oligonucleotide; CTG chr2 60471253 60471274 60471258 60471253 -
atagaaatgtttttagctgtct

SEQ ID NO: 224393 - DNA, 22 bp, Artificial Sequence
  Synthetic oligonucleotide; TTT chr2 60471241 60471262 60471246 60471241 -
ttagctgtctaattctgcaggg

SEQ ID NO: 224394 - DNA, 22 bp, Artificial Sequence
  Synthetic oligonucleotide; TTT chr2 60471240 60471261 60471245 60471240 -
tagctgtctaattctgcagggg

SEQ ID NO: 224395 - DNA, 22 bp, Artificial Sequence
  Synthetic oligonucleotide; TTT chr2 60471239 60471260 60471244 60471239 -
agctgtctaattctgcagggga

SEQ ID NO: 224396 - DNA, 22 bp, Artificial Sequence
  Synthetic oligonucleotide; TTA chr2 60471238 60471259 60471243 60471238 -
gctgtctaattctgcaggggaa

SEQ ID NO: 224397 - DNA, 22 bp, Artificial Sequence
  Synthetic oligonucleotide; CTG chr2 60471234 60471255 60471239 60471234 -
tctaattctgcaggggaagcag

SEQ ID NO: 224398 - DNA, 22 bp, Artificial Sequence
  Synthetic oligonucleotide; CTA chr2 60471230 60471251 60471235 60471230 -
attctgcaggggaagcagaggt

SEQ ID NO: 224399 - DNA, 22 bp, Artificial Sequence
  Synthetic oligonucleotide; TTC chr2 60471226 60471247 60471231 60471226 -
tgcaggggaagcagaggtagag

SEQ ID NO: 224400 - DNA, 22 bp, Artificial Sequence
  Synthetic oligonucleotide; CTG chr2 60471224 60471245 60471229 60471224 -
caggggaagcagaggtagaggg

SEQ ID NO: 224401 - DNA, 22 bp, Artificial Sequence
  Synthetic oligonucleotide; CTT chr2 60471152 60471173 60471157 60471152 -
gttttccaattgtgagaccaag

SEQ ID NO: 224402 - DNA, 22 bp, Artificial Sequence
  Synthetic oligonucleotide; TTG chr2 60471151 60471172 60471156 60471151 -
ttttccaattgtgagaccaagt

SEQ ID NO: 224403 - DNA, 22 bp, Artificial Sequence
  Synthetic oligonucleotide; TTT chr2 60471148 60471169 60471153 60471148 -
tccaattgtgagaccaagtcag

SEQ ID NO: 224404 - DNA, 22 bp, Artificial Sequence
  Synthetic oligonucleotide; TTT chr2 60471147 60471168 60471152 60471147 -
ccaattgtgagaccaagtcagt

SEQ ID NO: 224405 - DNA, 22 bp, Artificial Sequence
  Synthetic oligonucleotide; TTC chr2 60471146 60471167 60471151 60471146 -
caattgtgagaccaagtcagtt

SEQ ID NO: 224406 - DNA, 22 bp, Artificial Sequence
  Synthetic oligonucleotide; TTG chr2 60471140 60471161 60471145 60471140 -
tgagaccaagtcagttcattgg

SEQ ID NO: 224407 - DNA, 22 bp, Artificial Sequence
  Synthetic oligonucleotide; TTC chr2 60471123 60471144 60471128 60471123 -
attggcacctttcgaaagcccc

SEQ ID NO: 224408 - DNA, 22 bp, Artificial Sequence
  Synthetic oligonucleotide; TTG chr2 60471119 60471140 60471124 60471119 -
gcacctttcgaaagccccatgt

SEQ ID NO: 224409 - DNA, 22 bp, Artificial Sequence
  Synthetic oligonucleotide; CTT chr2 60471112 60471133 60471117 60471112 -
tcgaaagccccatgtagcgctg

SEQ ID NO: 224410 - DNA, 22 bp, Artificial Sequence
  Synthetic oligonucleotide; TTT chr2 60471111 60471132 60471116 60471111 -
cgaaagccccatgtagcgctgc

SEQ ID NO: 224411 - DNA, 22 bp, Artificial Sequence
  Synthetic oligonucleotide; TTC chr2 60471110 60471131 60471115 60471110 -
gaaagccccatgtagcgctgct

SEQ ID NO: 224412 - DNA, 22 bp, Artificial Sequence
  Synthetic oligonucleotide; CTG chr2 60471090 60471111 60471095 60471090 -
ctgggctggaccctcccccaag

SEQ ID NO: 224413 - DNA, 22 bp, Artificial Sequence
  Synthetic oligonucleotide; CTG chr2 60471087 60471108 60471092 60471087 -
ggctggaccctcccccaagacg

SEQ ID NO: 224414 - DNA, 22 bp, Artificial Sequence
  Synthetic oligonucleotide; CTG chr2 60471082 60471103 60471087 60471082 -
gaccctcccccaagacggttaa

SEQ ID NO: 224415 - DNA, 22 bp, Artificial Sequence
  Synthetic oligonucleotide; CTC chr2 60471075 60471096 60471080 60471075 -
ccccaagacggttaagtactgc

SEQ ID NO: 224416 - DNA, 22 bp, Artificial Sequence
  Synthetic oligonucleotide; TTA chr2 60471061 60471082 60471066 60471061 -
agtactgcttaatggatcagta

SEQ ID NO: 224417 - DNA, 22 bp, Artificial Sequence
  Synthetic oligonucleotide; CTG chr2 60471054 60471075 60471059 60471054 -
cttaatggatcagtagaaacag

SEQ ID NO: 224418 - DNA, 22 bp, Artificial Sequence
  Synthetic oligonucleotide; CTT chr2 60471051 60471072 60471056 60471051 -
aatggatcagtagaaacaggac

SEQ ID NO: 224419 - DNA, 22 bp, Artificial Sequence
  Synthetic oligonucleotide; TTA chr2 60471050 60471071 60471055 60471050 -
atggatcagtagaaacaggacc

SEQ ID NO: 224420 - DNA, 22 bp, Artificial Sequence
  Synthetic oligonucleotide; CTT chr2 60471026 60471047 60471031 60471026 -
cttgttgggcagtgaagaccac

SEQ ID NO: 224421 - DNA, 22 bp, Artificial Sequence
  Synthetic oligonucleotide; TTC chr2 60471025 60471046 60471030 60471025 -
ttgttgggcagtgaagaccacg

SEQ ID NO: 224422 - DNA, 22 bp, Artificial Sequence
  Synthetic oligonucleotide; CTT chr2 60471023 60471044 60471028 60471023 -
gttgggcagtgaagaccacggc

SEQ ID NO: 224423 - DNA, 22 bp, Artificial Sequence
  Synthetic oligonucleotide; TTG chr2 60471022 60471043 60471027 60471022 -
ttgggcagtgaagaccacggca

SEQ ID NO: 224424 - DNA, 22 bp, Artificial Sequence
  Synthetic oligonucleotide; TTG chr2 60471019 60471040 60471024 60471019 -
ggcagtgaagaccacggcagga

SEQ ID NO: 224425 - DNA, 22 bp, Artificial Sequence
  Synthetic oligonucleotide; TTC chr2 60470972 60470993 60470977 60470972 -
ccaggaaagaccactggatcag

SEQ ID NO: 224426 - DNA, 22 bp, Artificial Sequence
  Synthetic oligonucleotide; CTG chr2 60470956 60470977 60470961 60470956 -
gatcaggagtcaggagattaat

SEQ ID NO: 224427 - DNA, 22 bp, Artificial Sequence
  Synthetic oligonucleotide; TTA chr2 60470936 60470957 60470941 60470936 -
attctaatcttcacattgtggt

SEQ ID NO: 224428 - DNA, 22 bp, Artificial Sequence
  Synthetic oligonucleotide; TTC chr2 60470932 60470953 60470937 60470932 -
taatcttcacattgtggttaat

SEQ ID NO: 224429 - DNA, 22 bp, Artificial Sequence
  Synthetic oligonucleotide; CTA chr2 60470930 60470951 60470935 60470930 -
atcttcacattgtggttaatca

SEQ ID NO: 224430 - DNA, 22 bp, Artificial Sequence
  Synthetic oligonucleotide; CTT chr2 60470925 60470946 60470930 60470925 -
cacattgtggttaatcatcagt

SEQ ID NO: 224431 - DNA, 22 bp, Artificial Sequence
  Synthetic oligonucleotide; TTC chr2 60470924 60470945 60470929 60470924 -
acattgtggttaatcatcagtg

SEQ ID NO: 224432 - DNA, 22 bp, Artificial Sequence
  Synthetic oligonucleotide; TTG chr2 60470918 60470939 60470923 60470918 -
tggttaatcatcagtgtagcca

SEQ ID NO: 224433 - DNA, 22 bp, Artificial Sequence
  Synthetic oligonucleotide; TTA chr2 60470912 60470933 60470917 60470912 -
atcatcagtgtagccatgggca

SEQ ID NO: 224434 - DNA, 22 bp, Artificial Sequence
  Synthetic oligonucleotide; CTT chr2 60470882 60470903 60470887 60470882 -
aatttctcatggcctcagtttc

SEQ ID NO: 224435 - DNA, 22 bp, Artificial Sequence
  Synthetic oligonucleotide; TTA chr2 60470881 60470902 60470886 60470881 -
atttctcatggcctcagtttcc

SEQ ID NO: 224436 - DNA, 22 bp, Artificial Sequence
  Synthetic oligonucleotide; TTT chr2 60470877 60470898 60470882 60470877 -
ctcatggcctcagtttccccat

SEQ ID NO: 224437 - DNA, 22 bp, Artificial Sequence
  Synthetic oligonucleotide; TTC chr2 60470876 60470897 60470881 60470876 -
tcatggcctcagtttccccatc

SEQ ID NO: 224438 - DNA, 22 bp, Artificial Sequence
  Synthetic oligonucleotide; CTC chr2 60470874 60470895 60470879 60470874 -
atggcctcagtttccccatctg

SEQ ID NO: 224439 - DNA, 22 bp, Artificial Sequence
  Synthetic oligonucleotide; CTC chr2 60470866 60470887 60470871 60470866 -
agtttccccatctgtaaaatga

SEQ ID NO: 224440 - DNA, 22 bp, Artificial Sequence
  Synthetic oligonucleotide; TTT chr2 60470861 60470882 60470866 60470861 -
ccccatctgtaaaatgaaggga

SEQ ID NO: 224441 - DNA, 22 bp, Artificial Sequence
  Synthetic oligonucleotide; TTC chr2 60470860 60470881 60470865 60470860 -
cccatctgtaaaatgaagggac

SEQ ID NO: 224442 - DNA, 22 bp, Artificial Sequence
  Synthetic oligonucleotide; CTG chr2 60470852 60470873 60470857 60470852 -
taaaatgaagggacagacttga

SEQ ID NO: 224443 - DNA, 22 bp, Artificial Sequence
  Synthetic oligonucleotide; CTT chr2 60470832 60470853 60470837 60470832 -
gatgatagctagggttttttac

SEQ ID NO: 224444 - DNA, 22 bp, Artificial Sequence
  Synthetic oligonucleotide; TTG chr2 60470831 60470852 60470836 60470831 -
atgatagctagggttttttaca

SEQ ID NO: 224445 - DNA, 22 bp, Artificial Sequence
  Synthetic oligonucleotide; CTA chr2 60470821 60470842 60470826 60470821 -
gggttttttacaacttagaaaa

SEQ ID NO: 224446 - DNA, 22 bp, Artificial Sequence
  Synthetic oligonucleotide; TTT chr2 60470815 60470836 60470820 60470815 -
tttacaacttagaaaacaaaaa

SEQ ID NO: 224447 - DNA, 22 bp, Artificial Sequence
  Synthetic oligonucleotide; TTT chr2 60470814 60470835 60470819 60470814 -
ttacaacttagaaaacaaaaac

SEQ ID NO: 224448 - DNA, 22 bp, Artificial Sequence
  Synthetic oligonucleotide; TTT chr2 60470813 60470834 60470818 60470813 -
tacaacttagaaaacaaaaaca

SEQ ID NO: 224449 - DNA, 22 bp, Artificial Sequence
  Synthetic oligonucleotide; TTT chr2 60470812 60470833 60470817 60470812 -
acaacttagaaaacaaaaacaa

SEQ ID NO: 224450 - DNA, 22 bp, Artificial Sequence
  Synthetic oligonucleotide; TTA chr2 60470811 60470832 60470816 60470811 -
caacttagaaaacaaaaacaaa

SEQ ID NO: 224451 - DNA, 22 bp, Artificial Sequence
  Synthetic oligonucleotide; CTT chr2 60470805 60470826 60470810 60470805 -
agaaaacaaaaacaaaaacaaa

SEQ ID NO: 224452 - DNA, 22 bp, Artificial Sequence
  Synthetic oligonucleotide; TTA chr2 60470804 60470825 60470809 60470804 -
gaaaacaaaaacaaaaacaaaa

SEQ ID NO: 224453 - DNA, 22 bp, Artificial Sequence
  Synthetic oligonucleotide; CTA chr2 60470768 60470789 60470773 60470768 -
tgctgccagatagtcagatgag

SEQ ID NO: 224454 - DNA, 22 bp, Artificial Sequence
  Synthetic oligonucleotide; CTG chr2 60470763 60470784 60470768 60470763 -
ccagatagtcagatgagacctc

SEQ ID NO: 224455 - DNA, 22 bp, Artificial Sequence
  Synthetic oligonucleotide; CTC chr2 60470741 60470762 60470746 60470741 -
actttgccacacggccagacac

SEQ ID NO: 224456 - DNA, 22 bp, Artificial Sequence
  Synthetic oligonucleotide; CTT chr2 60470737 60470758 60470742 60470737 -
tgccacacggccagacactgta

SEQ ID NO: 224457 - DNA, 22 bp, Artificial Sequence
  Synthetic oligonucleotide; TTT chr2 60470736 60470757 60470741 60470736 -
gccacacggccagacactgtag

SEQ ID NO: 224458 - DNA, 22 bp, Artificial Sequence
  Synthetic oligonucleotide; TTG chr2 60470735 60470756 60470740 60470735 -
ccacacggccagacactgtaga

SEQ ID NO: 224459 - DNA, 22 bp, Artificial Sequence
  Synthetic oligonucleotide; CTG chr2 60470717 60470738 60470722 60470717 -
tagagatctggtcctgccgtca

SEQ ID NO: 224460 - DNA, 22 bp, Artificial Sequence
  Synthetic oligonucleotide; CTG chr2 60470707 60470728 60470712 60470707 -
gtcctgccgtcagcttgtttag

SEQ ID NO: 224461 - DNA, 22 bp, Artificial Sequence
  Synthetic oligonucleotide; CTG chr2 60470701 60470722 60470706 60470701 -
ccgtcagcttgtttagggctaa

SEQ ID NO: 224462 - DNA, 22 bp, Artificial Sequence
  Synthetic oligonucleotide; CTT chr2 60470691 60470712 60470696 60470691 -
gtttagggctaatgggtttgta

SEQ ID NO: 224463 - DNA, 22 bp, Artificial Sequence
  Synthetic oligonucleotide; TTG chr2 60470690 60470711 60470695 60470690 -
tttagggctaatgggtttgtag

SEQ ID NO: 224464 - DNA, 22 bp, Artificial Sequence
  Synthetic oligonucleotide; TTT chr2 60470687 60470708 60470692 60470687 -
agggctaatgggtttgtagaca

SEQ ID NO: 224465 - DNA, 22 bp, Artificial Sequence
  Synthetic oligonucleotide; TTA chr2 60470686 60470707 60470691 60470686 -
gggctaatgggtttgtagacaa

SEQ ID NO: 224466 - DNA, 22 bp, Artificial Sequence
  Synthetic oligonucleotide; CTA chr2 60470680 60470701 60470685 60470680 -
atgggtttgtagacaagtttgc

SEQ ID NO: 224467 - DNA, 22 bp, Artificial Sequence
  Synthetic oligonucleotide; TTT chr2 60470672 60470693 60470677 60470672 -
gtagacaagtttgccaacaaga

SEQ ID NO: 224468 - DNA, 22 bp, Artificial Sequence
  Synthetic oligonucleotide; TTG chr2 60470671 60470692 60470676 60470671 -
tagacaagtttgccaacaagag

SEQ ID NO: 224469 - DNA, 22 bp, Artificial Sequence
  Synthetic oligonucleotide; TTT chr2 60470660 60470681 60470665 60470660 -
gccaacaagagattcatgcgag

SEQ ID NO: 224470 - DNA, 22 bp, Artificial Sequence
  Synthetic oligonucleotide; TTG chr2 60470659 60470680 60470664 60470659 -
ccaacaagagattcatgcgagg

SEQ ID NO: 224471 - DNA, 22 bp, Artificial Sequence
  Synthetic oligonucleotide; TTC chr2 60470645 60470666 60470650 60470645 -
atgcgaggggctaggcatggat

SEQ ID NO: 224472 - DNA, 22 bp, Artificial Sequence
  Synthetic oligonucleotide; CTA chr2 60470632 60470653 60470637 60470632 -
ggcatggattaggttagcagtt

SEQ ID NO: 224473 - DNA, 22 bp, Artificial Sequence
  Synthetic oligonucleotide; TTA chr2 60470621 60470642 60470626 60470621 -
ggttagcagttctcccatttct

SEQ ID NO: 224474 - DNA, 22 bp, Artificial Sequence
  Synthetic oligonucleotide; TTA chr2 60470616 60470637 60470621 60470616 -
gcagttctcccatttcttgctg

SEQ ID NO: 224475 - DNA, 22 bp, Artificial Sequence
  Synthetic oligonucleotide; TTC chr2 60470609 60470630 60470614 60470609 -
tcccatttcttgctggaggcct

SEQ ID NO: 224476 - DNA, 22 bp, Artificial Sequence
  Synthetic oligonucleotide; CTC chr2 60470607 60470628 60470612 60470607 -
ccatttcttgctggaggcctgc

SEQ ID NO: 224477 - DNA, 22 bp, Artificial Sequence
  Synthetic oligonucleotide; TTT chr2 60470601 60470622 60470606 60470601 -
cttgctggaggcctgctgaagc

SEQ ID NO: 224478 - DNA, 22 bp, Artificial Sequence
  Synthetic oligonucleotide; TTC chr2 60470600 60470621 60470605 60470600 -
ttgctggaggcctgctgaagca

SEQ ID NO: 224479 - DNA, 22 bp, Artificial Sequence
  Synthetic oligonucleotide; CTT chr2 60470598 60470619 60470603 60470598 -
gctggaggcctgctgaagcact

SEQ ID NO: 224480 - DNA, 22 bp, Artificial Sequence
  Synthetic oligonucleotide; TTG chr2 60470597 60470618 60470602 60470597 -
ctggaggcctgctgaagcactt

SEQ ID NO: 224481 - DNA, 22 bp, Artificial Sequence
  Synthetic oligonucleotide; CTG chr2 60470594 60470615 60470599 60470594 -
gaggcctgctgaagcacttcag

SEQ ID NO: 224482 - DNA, 22 bp, Artificial Sequence
  Synthetic oligonucleotide; CTG chr2 60470586 60470607 60470591 60470586 -
ctgaagcacttcagggtctctt

SEQ ID NO: 224483 - DNA, 22 bp, Artificial Sequence
  Synthetic oligonucleotide; CTG chr2 60470583 60470604 60470588 60470583 -
aagcacttcagggtctcttccc

SEQ ID NO: 224484 - DNA, 22 bp, Artificial Sequence
  Synthetic oligonucleotide; CTT chr2 60470575 60470596 60470580 60470575 -
cagggtctcttcccagagtaag

SEQ ID NO: 224485 - DNA, 22 bp, Artificial Sequence
  Synthetic oligonucleotide; TTC chr2 60470574 60470595 60470579 60470574 -
agggtctcttcccagagtaagt

SEQ ID NO: 224486 - DNA, 22 bp, Artificial Sequence
  Synthetic oligonucleotide; CTC chr2 60470566 60470587 60470571 60470566 -
ttcccagagtaagtggcagaga

SEQ ID NO: 224487 - DNA, 22 bp, Artificial Sequence
  Synthetic oligonucleotide; CTT chr2 60470564 60470585 60470569 60470564 -
cccagagtaagtggcagagaat

SEQ ID NO: 224488 - DNA, 22 bp, Artificial Sequence
  Synthetic oligonucleotide; TTC chr2 60470563 60470584 60470568 60470563 -
ccagagtaagtggcagagaatt

SEQ ID NO: 224489 - DNA, 22 bp, Artificial Sequence
  Synthetic oligonucleotide; TTT chr2 60470540 60470561 60470545 60470540 -
gaaatttgatactccccataca

SEQ ID NO: 224490 - DNA, 22 bp, Artificial Sequence
  Synthetic oligonucleotide; TTG chr2 60470539 60470560 60470544 60470539 -
aaatttgatactccccatacaa

SEQ ID NO: 224491 - DNA, 22 bp, Artificial Sequence
  Synthetic oligonucleotide; TTT chr2 60470533 60470554 60470538 60470533 -
gatactccccatacaaggatcc

SEQ ID NO: 224492 - DNA, 22 bp, Artificial Sequence
  Synthetic oligonucleotide; TTG chr2 60470532 60470553 60470537 60470532 -
atactccccatacaaggatcca

SEQ ID NO: 224493 - DNA, 22 bp, Artificial Sequence
  Synthetic oligonucleotide; CTC chr2 60470526 60470547 60470531 60470526 -
cccatacaaggatccaagtacc

SEQ ID NO: 224494 - DNA, 22 bp, Artificial Sequence
  Synthetic oligonucleotide; CTG chr2 60470502 60470523 60470507 60470502 -
ttgcgtttatgctgggatcaca

SEQ ID NO: 224495 - DNA, 22 bp, Artificial Sequence
  Synthetic oligonucleotide; TTG chr2 60470499 60470520 60470504 60470499 -
cgtttatgctgggatcacagag

SEQ ID NO: 224496 - DNA, 22 bp, Artificial Sequence
  Synthetic oligonucleotide; TTT chr2 60470494 60470515 60470499 60470494 -
atgctgggatcacagagatacc

SEQ ID NO: 224497 - DNA, 22 bp, Artificial Sequence
  Synthetic oligonucleotide; TTA chr2 60470493 60470514 60470498 60470493 -
tgctgggatcacagagatacct

SEQ ID NO: 224498 - DNA, 22 bp, Artificial Sequence
  Synthetic oligonucleotide; CTG chr2 60470488 60470509 60470493 60470488 -
ggatcacagagatacctgggtt

SEQ ID NO: 224499 - DNA, 22 bp, Artificial Sequence
  Synthetic oligonucleotide; CTG chr2 60470470 60470491 60470475 60470470 -
ggttgcctgtgtttcctaagaa

SEQ ID NO: 224500 - DNA, 22 bp, Artificial Sequence
  Synthetic oligonucleotide; TTG chr2 60470465 60470486 60470470 60470465 -
cctgtgtttcctaagaaaagga

SEQ ID NO: 224501 - DNA, 22 bp, Artificial Sequence
  Synthetic oligonucleotide; CTG chr2 60470461 60470482 60470466 60470461 -
tgtttcctaagaaaaggatgtc

SEQ ID NO: 224502 - DNA, 22 bp, Artificial Sequence
  Synthetic oligonucleotide; TTT chr2 60470456 60470477 60470461 60470456 -
cctaagaaaaggatgtctgttt

SEQ ID NO: 224503 - DNA, 22 bp, Artificial Sequence
  Synthetic oligonucleotide; TTC chr2 60470455 60470476 60470460 60470455 -
ctaagaaaaggatgtctgtttt

SEQ ID NO: 224504 - DNA, 22 bp, Artificial Sequence
  Synthetic oligonucleotide; CTA chr2 60470452 60470473 60470457 60470452 -
agaaaaggatgtctgttttggc

SEQ ID NO: 224505 - DNA, 22 bp, Artificial Sequence
  Synthetic oligonucleotide; CTG chr2 60470437 60470458 60470442 60470437 -
ttttggcagcaaacttagtgaa

SEQ ID NO: 224506 - DNA, 22 bp, Artificial Sequence
  Synthetic oligonucleotide; TTT chr2 60470434 60470455 60470439 60470434 -
tggcagcaaacttagtgaacgg

SEQ ID NO: 224507 - DNA, 22 bp, Artificial Sequence
  Synthetic oligonucleotide; TTT chr2 60470433 60470454 60470438 60470433 -
ggcagcaaacttagtgaacggc

SEQ ID NO: 224508 - DNA, 22 bp, Artificial Sequence
  Synthetic oligonucleotide; TTG chr2 60470432 60470453 60470437 60470432 -
gcagcaaacttagtgaacggct

SEQ ID NO: 224509 - DNA, 22 bp, Artificial Sequence
  Synthetic oligonucleotide; CTT chr2 60470421 60470442 60470426 60470421 -
agtgaacggctgaggcaaaaac

SEQ ID NO: 224510 - DNA, 22 bp, Artificial Sequence
  Synthetic oligonucleotide; TTA chr2 60470420 60470441 60470425 60470420 -
gtgaacggctgaggcaaaaaca

SEQ ID NO: 224511 - DNA, 22 bp, Artificial Sequence
  Synthetic oligonucleotide; CTG chr2 60470409 60470430 60470414 60470409 -
aggcaaaaacaagtgcaaagat

SEQ ID NO: 224512 - DNA, 22 bp, Artificial Sequence
  Synthetic oligonucleotide; TTC chr2 60470381 60470402 60470386 60470381 -
tcagatttctcattgaaaaata

SEQ ID NO: 224513 - DNA, 22 bp, Artificial Sequence
  Synthetic oligonucleotide; CTC chr2 60470379 60470400 60470384 60470379 -
agatttctcattgaaaaatacc

SEQ ID NO: 224514 - DNA, 22 bp, Artificial Sequence
  Synthetic oligonucleotide; TTT chr2 60470373 60470394 60470378 60470373 -
ctcattgaaaaataccatgaca

SEQ ID NO: 224515 - DNA, 22 bp, Artificial Sequence
  Synthetic oligonucleotide; TTC chr2 60470372 60470393 60470377 60470372 -
tcattgaaaaataccatgacaa

SEQ ID NO: 224516 - DNA, 22 bp, Artificial Sequence
  Synthetic oligonucleotide; CTC chr2 60470370 60470391 60470375 60470370 -
attgaaaaataccatgacaaaa

SEQ ID NO: 224517 - DNA, 22 bp, Artificial Sequence
  Synthetic oligonucleotide; TTG chr2 60470366 60470387 60470371 60470366 -
aaaaataccatgacaaaatctg

SEQ ID NO: 224518 - DNA, 22 bp, Artificial Sequence
  Synthetic oligonucleotide; CTG chr2 60470344 60470365 60470349 60470344 -
tagtaattttacgccacactct

SEQ ID NO: 224519 - DNA, 22 bp, Artificial Sequence
  Synthetic oligonucleotide; TTT chr2 60470335 60470356 60470340 60470335 -
tacgccacactctcaattcact

SEQ ID NO: 224520 - DNA, 22 bp, Artificial Sequence
  Synthetic oligonucleotide; TTT chr2 60470334 60470355 60470339 60470334 -
acgccacactctcaattcactt

SEQ ID NO: 224521 - DNA, 22 bp, Artificial Sequence
  Synthetic oligonucleotide; TTA chr2 60470333 60470354 60470338 60470333 -
cgccacactctcaattcacttg

SEQ ID NO: 224522 - DNA, 22 bp, Artificial Sequence
  Synthetic oligonucleotide; CTC chr2 60470323 60470344 60470328 60470323 -
tcaattcacttgacgtaaacag

SEQ ID NO: 224523 - DNA, 22 bp, Artificial Sequence
  Synthetic oligonucleotide; CTC chr2 60470321 60470342 60470326 60470321 -
aattcacttgacgtaaacagtc

SEQ ID NO: 224524 - DNA, 22 bp, Artificial Sequence
  Synthetic oligonucleotide; TTC chr2 60470316 60470337 60470321 60470316 -
acttgacgtaaacagtcaaatg

SEQ ID NO: 224525 - DNA, 22 bp, Artificial Sequence
  Synthetic oligonucleotide; CTT chr2 60470312 60470333 60470317 60470312 -
gacgtaaacagtcaaatgtaga

SEQ ID NO: 224526 - DNA, 22 bp, Artificial Sequence
  Synthetic oligonucleotide; TTG chr2 60470311 60470332 60470316 60470311 -
acgtaaacagtcaaatgtagac

SEQ ID NO: 224527 - DNA, 22 bp, Artificial Sequence
  Synthetic oligonucleotide; CTT chr2 60470283 60470304 60470288 60470283 -
gtttgttaagtccggtcttcct

SEQ ID NO: 224528 - DNA, 22 bp, Artificial Sequence
  Synthetic oligonucleotide; TTG chr2 60470282 60470303 60470287 60470282 -
tttgttaagtccggtcttcctg

SEQ ID NO: 224529 - DNA, 22 bp, Artificial Sequence
  Synthetic oligonucleotide; TTT chr2 60470279 60470300 60470284 60470279 -
gttaagtccggtcttcctgctt

SEQ ID NO: 224530 - DNA, 22 bp, Artificial Sequence
  Synthetic oligonucleotide; TTG chr2 60470278 60470299 60470283 60470278 -
ttaagtccggtcttcctgcttg

SEQ ID NO: 224531 - DNA, 22 bp, Artificial Sequence
  Synthetic oligonucleotide; TTA chr2 60470275 60470296 60470280 60470275 -
agtccggtcttcctgcttgtgt

SEQ ID NO: 224532 - DNA, 22 bp, Artificial Sequence
  Synthetic oligonucleotide; CTT chr2 60470264 60470285 60470269 60470264 -
cctgcttgtgttggttcacttt

SEQ ID NO: 224533 - DNA, 22 bp, Artificial Sequence
  Synthetic oligonucleotide; TTC chr2 60470263 60470284 60470268 60470263 -
ctgcttgtgttggttcactttg

SEQ ID NO: 224534 - DNA, 22 bp, Artificial Sequence
  Synthetic oligonucleotide; CTG chr2 60470260 60470281 60470265 60470260 -
cttgtgttggttcactttgtgg

SEQ ID NO: 224535 - DNA, 22 bp, Artificial Sequence
  Synthetic oligonucleotide; CTT chr2 60470257 60470278 60470262 60470257 -
gtgttggttcactttgtggtgt

SEQ ID NO: 224536 - DNA, 22 bp, Artificial Sequence
  Synthetic oligonucleotide; TTG chr2 60470256 60470277 60470261 60470256 -
tgttggttcactttgtggtgtt

SEQ ID NO: 224537 - DNA, 22 bp, Artificial Sequence
  Synthetic oligonucleotide; TTG chr2 60470251 60470272 60470256 60470251 -
gttcactttgtggtgtttattt

SEQ ID NO: 224538 - DNA, 22 bp, Artificial Sequence
  Synthetic oligonucleotide; TTC chr2 60470247 60470268 60470252 60470247 -
actttgtggtgtttattttgtt

SEQ ID NO: 224539 - DNA, 22 bp, Artificial Sequence
  Synthetic oligonucleotide; CTT chr2 60470243 60470264 60470248 60470243 -
tgtggtgtttattttgttttgg

SEQ ID NO: 224540 - DNA, 22 bp, Artificial Sequence
  Synthetic oligonucleotide; TTT chr2 60470242 60470263 60470247 60470242 -
gtggtgtttattttgttttggg

SEQ ID NO: 224541 - DNA, 22 bp, Artificial Sequence
  Synthetic oligonucleotide; TTG chr2 60470241 60470262 60470246 60470241 -
tggtgtttattttgttttgggt

SEQ ID NO: 224542 - DNA, 22 bp, Artificial Sequence
  Synthetic oligonucleotide; TTT chr2 60470233 60470254 60470238 60470233 -
attttgttttgggtcagagagg

SEQ ID NO: 224543 - DNA, 22 bp, Artificial Sequence
  Synthetic oligonucleotide; TTA chr2 60470232 60470253 60470237 60470232 -
ttttgttttgggtcagagagga

SEQ ID NO: 224544 - DNA, 22 bp, Artificial Sequence
  Synthetic oligonucleotide; TTT chr2 60470229 60470250 60470234 60470229 -
tgttttgggtcagagaggatga

SEQ ID NO: 224545 - DNA, 22 bp, Artificial Sequence
  Synthetic oligonucleotide; TTT chr2 60470228 60470249 60470233 60470228 -
gttttgggtcagagaggatgaa

SEQ ID NO: 224546 - DNA, 22 bp, Artificial Sequence
  Synthetic oligonucleotide; TTG chr2 60470227 60470248 60470232 60470227 -
ttttgggtcagagaggatgaaa

SEQ ID NO: 224547 - DNA, 22 bp, Artificial Sequence
  Synthetic oligonucleotide; TTT chr2 60470224 60470245 60470229 60470224 -
tgggtcagagaggatgaaatgt

SEQ ID NO: 224548 - DNA, 22 bp, Artificial Sequence
  Synthetic oligonucleotide; TTT chr2 60470223 60470244 60470228 60470223 -
gggtcagagaggatgaaatgtc

SEQ ID NO: 224549 - DNA, 22 bp, Artificial Sequence
  Synthetic oligonucleotide; TTG chr2 60470222 60470243 60470227 60470222 -
ggtcagagaggatgaaatgtct

SEQ ID NO: 224550 - DNA, 22 bp, Artificial Sequence
  Synthetic oligonucleotide; CTC chr2 60470199 60470220 60470204 60470199 -
tgtagatgttctcaggctaggt

SEQ ID NO: 224551 - DNA, 22 bp, Artificial Sequence
  Synthetic oligonucleotide; CTG chr2 60470197 60470218 60470202 60470197 -
tagatgttctcaggctaggtgg

SEQ ID NO: 224552 - DNA, 22 bp, Artificial Sequence
  Synthetic oligonucleotide; TTC chr2 60470188 60470209 60470193 60470188 -
tcaggctaggtggtgcttccac

SEQ ID NO: 224553 - DNA, 22 bp, Artificial Sequence
  Synthetic oligonucleotide; CTC chr2 60470186 60470207 60470191 60470186 -
aggctaggtggtgcttccacca

SEQ ID NO: 224554 - DNA, 22 bp, Artificial Sequence
  Synthetic oligonucleotide; CTA chr2 60470180 60470201 60470185 60470180 -
ggtggtgcttccaccagggctt

SEQ ID NO: 224555 - DNA, 22 bp, Artificial Sequence
  Synthetic oligonucleotide; CTT chr2 60470170 60470191 60470175 60470170 -
ccaccagggcttccctctgcag

SEQ ID NO: 224556 - DNA, 22 bp, Artificial Sequence
  Synthetic oligonucleotide; TTC chr2 60470169 60470190 60470174 60470169 -
caccagggcttccctctgcagg

SEQ ID NO: 224557 - DNA, 22 bp, Artificial Sequence
  Synthetic oligonucleotide; CTT chr2 60470158 60470179 60470163 60470158 -
ccctctgcaggcctggtaacag

SEQ ID NO: 224558 - DNA, 22 bp, Artificial Sequence
  Synthetic oligonucleotide; TTC chr2 60470157 60470178 60470162 60470157 -
cctctgcaggcctggtaacagc

SEQ ID NO: 224559 - DNA, 22 bp, Artificial Sequence
  Synthetic oligonucleotide; CTC chr2 60470153 60470174 60470158 60470153 -
tgcaggcctggtaacagcagac

SEQ ID NO: 224560 - DNA, 22 bp, Artificial Sequence
  Synthetic oligonucleotide; CTG chr2 60470151 60470172 60470156 60470151 -
caggcctggtaacagcagacct

SEQ ID NO: 224561 - DNA, 22 bp, Artificial Sequence
  Synthetic oligonucleotide; CTG chr2 60470143 60470164 60470148 60470143 -
gtaacagcagacctatgctgtc

SEQ ID NO: 224562 - DNA, 22 bp, Artificial Sequence
  Synthetic oligonucleotide; CTA chr2 60470128 60470149 60470133 60470128 -
tgctgtctgtgtaagagccttc

SEQ ID NO: 224563 - DNA, 22 bp, Artificial Sequence
  Synthetic oligonucleotide; CTG chr2 60470123 60470144 60470128 60470123 -
tctgtgtaagagccttctcagc

SEQ ID NO: 224564 - DNA, 22 bp, Artificial Sequence
  Synthetic oligonucleotide; CTG chr2 60470119 60470140 60470124 60470119 -
tgtaagagccttctcagcagca

SEQ ID NO: 224565 - DNA, 22 bp, Artificial Sequence
  Synthetic oligonucleotide; CTT chr2 60470107 60470128 60470112 60470107 -
ctcagcagcacaccatcgttac

SEQ ID NO: 224566 - DNA, 22 bp, Artificial Sequence
  Synthetic oligonucleotide; TTC chr2 60470106 60470127 60470111 60470106 -
tcagcagcacaccatcgttacc

SEQ ID NO: 224567 - DNA, 22 bp, Artificial Sequence
  Synthetic oligonucleotide; CTC chr2 60470104 60470125 60470109 60470104 -
agcagcacaccatcgttaccca

SEQ ID NO: 224568 - DNA, 22 bp, Artificial Sequence
  Synthetic oligonucleotide; TTA chr2 60470086 60470107 60470091 60470086 -
cccaccaggctccttgcgaaag

SEQ ID NO: 224569 - DNA, 22 bp, Artificial Sequence
  Synthetic oligonucleotide; CTC chr2 60470074 60470095 60470079 60470074 -
cttgcgaaaggaaatcttgtcc

SEQ ID NO: 224570 - DNA, 22 bp, Artificial Sequence
  Synthetic oligonucleotide; CTT chr2 60470071 60470092 60470076 60470071 -
gcgaaaggaaatcttgtcccaa

SEQ ID NO: 224571 - DNA, 22 bp, Artificial Sequence
  Synthetic oligonucleotide; TTG chr2 60470070 60470091 60470075 60470070 -
cgaaaggaaatcttgtcccaac

SEQ ID NO: 224572 - DNA, 22 bp, Artificial Sequence
  Synthetic oligonucleotide; CTT chr2 60470056 60470077 60470061 60470056 -
gtcccaactgccttggctgtgc

SEQ ID NO: 224573 - DNA, 22 bp, Artificial Sequence
  Synthetic oligonucleotide; TTG chr2 60470055 60470076 60470060 60470055 -
tcccaactgccttggctgtgct

SEQ ID NO: 224574 - DNA, 22 bp, Artificial Sequence
  Synthetic oligonucleotide; CTG chr2 60470046 60470067 60470051 60470046 -
ccttggctgtgcttggcagtgt

SEQ ID NO: 224575 - DNA, 22 bp, Artificial Sequence
  Synthetic oligonucleotide; CTT chr2 60470042 60470063 60470047 60470042 -
ggctgtgcttggcagtgtgctc

SEQ ID NO: 224576 - DNA, 22 bp, Artificial Sequence
  Synthetic oligonucleotide; TTG chr2 60470041 60470062 60470046 60470041 -
gctgtgcttggcagtgtgctct

SEQ ID NO: 224577 - DNA, 22 bp, Artificial Sequence
  Synthetic oligonucleotide; CTG chr2 60470037 60470058 60470042 60470037 -
tgcttggcagtgtgctctatat

SEQ ID NO: 224578 - DNA, 22 bp, Artificial Sequence
  Synthetic oligonucleotide; CTT chr2 60470032 60470053 60470037 60470032 -
ggcagtgtgctctatataagga

SEQ ID NO: 224579 - DNA, 22 bp, Artificial Sequence
  Synthetic oligonucleotide; TTG chr2 60470031 60470052 60470036 60470031 -
gcagtgtgctctatataaggag

SEQ ID NO: 224580 - DNA, 22 bp, Artificial Sequence
  Synthetic oligonucleotide; CTC chr2 60470020 60470041 60470025 60470020 -
tatataaggagaacaggatgta

SEQ ID NO: 224581 - DNA, 22 bp, Artificial Sequence
  Synthetic oligonucleotide; CTA chr2 60470018 60470039 60470023 60470018 -
tataaggagaacaggatgtatt

SEQ ID NO: 224582 - DNA, 22 bp, Artificial Sequence
  Synthetic oligonucleotide; TTT chr2 60469995 60470016 60470000 60469995 -
tacacttgagacctgctatcct

SEQ ID NO: 224583 - DNA, 22 bp, Artificial Sequence
  Synthetic oligonucleotide; TTT chr2 60469994 60470015 60469999 60469994 -
acacttgagacctgctatccta

SEQ ID NO: 224584 - DNA, 22 bp, Artificial Sequence
  Synthetic oligonucleotide; TTA chr2 60469993 60470014 60469998 60469993 -
cacttgagacctgctatcctag

SEQ ID NO: 224585 - DNA, 22 bp, Artificial Sequence
  Synthetic oligonucleotide; CTT chr2 60469988 60470009 60469993 60469988 -
gagacctgctatcctagagtac

SEQ ID NO: 224586 - DNA, 22 bp, Artificial Sequence
  Synthetic oligonucleotide; TTG chr2 60469987 60470008 60469992 60469987 -
agacctgctatcctagagtaca

SEQ ID NO: 224587 - DNA, 22 bp, Artificial Sequence
  Synthetic oligonucleotide; CTG chr2 60469980 60470001 60469985 60469980 -
ctatcctagagtacaacaacaa

SEQ ID NO: 224588 - DNA, 22 bp, Artificial Sequence
  Synthetic oligonucleotide; CTA chr2 60469977 60469998 60469982 60469977 -
tcctagagtacaacaacaacac

SEQ ID NO: 224589 - DNA, 22 bp, Artificial Sequence
  Synthetic oligonucleotide; CTA chr2 60469972 60469993 60469977 60469972 -
gagtacaacaacaacacttcta

SEQ ID NO: 224590 - DNA, 22 bp, Artificial Sequence
  Synthetic oligonucleotide; CTT chr2 60469953 60469974 60469958 60469953 -
ctaagtgctcttaatattaagc

SEQ ID NO: 224591 - DNA, 22 bp, Artificial Sequence
  Synthetic oligonucleotide; TTC chr2 60469952 60469973 60469957 60469952 -
taagtgctcttaatattaagct

SEQ ID NO: 224592 - DNA, 22 bp, Artificial Sequence
  Synthetic oligonucleotide; CTA chr2 60469950 60469971 60469955 60469950 -
agtgctcttaatattaagctaa

SEQ ID NO: 224593 - DNA, 22 bp, Artificial Sequence
  Synthetic oligonucleotide; CTC chr2 60469943 60469964 60469948 60469943 -
ttaatattaagctaatggaaaa

SEQ ID NO: 224594 - DNA, 22 bp, Artificial Sequence
  Synthetic oligonucleotide; CTT chr2 60469941 60469962 60469946 60469941 -
aatattaagctaatggaaaaca

SEQ ID NO: 224595 - DNA, 22 bp, Artificial Sequence
  Synthetic oligonucleotide; TTA chr2 60469940 60469961 60469945 60469940 -
atattaagctaatggaaaacat

SEQ ID NO: 224596 - DNA, 22 bp, Artificial Sequence
  Synthetic oligonucleotide; TTA chr2 60469934 60469955 60469939 60469934 -
agctaatggaaaacatactgtt

SEQ ID NO: 224597 - DNA, 22 bp, Artificial Sequence
  Synthetic oligonucleotide; CTA chr2 60469929 60469950 60469934 60469929 -
atggaaaacatactgtttgttc

SEQ ID NO: 224598 - DNA, 22 bp, Artificial Sequence
  Synthetic oligonucleotide; CTG chr2 60469914 60469935 60469919 60469914 -
tttgttcaccatcaaagtctgt

SEQ ID NO: 224599 - DNA, 22 bp, Artificial Sequence
  Synthetic oligonucleotide; TTT chr2 60469911 60469932 60469916 60469911 -
gttcaccatcaaagtctgtttt

SEQ ID NO: 224600 - DNA, 22 bp, Artificial Sequence
  Synthetic oligonucleotide; TTG chr2 60469910 60469931 60469915 60469910 -
ttcaccatcaaagtctgttttt

SEQ ID NO: 224601 - DNA, 22 bp, Artificial Sequence
  Synthetic oligonucleotide; TTC chr2 60469907 60469928 60469912 60469907 -
accatcaaagtctgtttttctt

SEQ ID NO: 224602 - DNA, 22 bp, Artificial Sequence
  Synthetic oligonucleotide; CTG chr2 60469893 60469914 60469898 60469893 -
tttttcttgtctcccgccctcc

SEQ ID NO: 224603 - DNA, 22 bp, Artificial Sequence
  Synthetic oligonucleotide; TTT chr2 60469890 60469911 60469895 60469890 -
ttcttgtctcccgccctcccca

SEQ ID NO: 224604 - DNA, 22 bp, Artificial Sequence
  Synthetic oligonucleotide; TTT chr2 60469889 60469910 60469894 60469889 -
tcttgtctcccgccctccccaa

SEQ ID NO: 224605 - DNA, 22 bp, Artificial Sequence
  Synthetic oligonucleotide; TTT chr2 60469888 60469909 60469893 60469888 -
cttgtctcccgccctccccaat

SEQ ID NO: 224606 - DNA, 22 bp, Artificial Sequence
  Synthetic oligonucleotide; TTC chr2 60469887 60469908 60469892 60469887 -
ttgtctcccgccctccccaatc

SEQ ID NO: 224607 - DNA, 22 bp, Artificial Sequence
  Synthetic oligonucleotide; CTT chr2 60469885 60469906 60469890 60469885 -
gtctcccgccctccccaatcat

SEQ ID NO: 224608 - DNA, 22 bp, Artificial Sequence
  Synthetic oligonucleotide; TTG chr2 60469884 60469905 60469889 60469884 -
tctcccgccctccccaatcatc

SEQ ID NO: 224609 - DNA, 22 bp, Artificial Sequence
  Synthetic oligonucleotide; CTC chr2 60469880 60469901 60469885 60469880 -
ccgccctccccaatcatcatga

SEQ ID NO: 224610 - DNA, 22 bp, Artificial Sequence
  Synthetic oligonucleotide; CTC chr2 60469872 60469893 60469877 60469872 -
cccaatcatcatgaactccaaa

SEQ ID NO: 224611 - DNA, 22 bp, Artificial Sequence
  Synthetic oligonucleotide; CTC chr2 60469854 60469875 60469859 60469854 -
caaacctctagaacacacagag

SEQ ID NO: 224612 - DNA, 22 bp, Artificial Sequence
  Synthetic oligonucleotide; CTC chr2 60469846 60469867 60469851 60469846 -
tagaacacacagagcgtctcct

SEQ ID NO: 224613 - DNA, 22 bp, Artificial Sequence
  Synthetic oligonucleotide; CTA chr2 60469844 60469865 60469849 60469844 -
gaacacacagagcgtctcctgc

SEQ ID NO: 224614 - DNA, 22 bp, Artificial Sequence
  Synthetic oligonucleotide; CTC chr2 60469826 60469847 60469831 60469826 -
ctgcaccatctatcctccagtc

SEQ ID NO: 224615 - DNA, 22 bp, Artificial Sequence
  Synthetic oligonucleotide; CTG chr2 60469823 60469844 60469828 60469823 -
caccatctatcctccagtctgt

SEQ ID NO: 224616 - DNA, 22 bp, Artificial Sequence
  Synthetic oligonucleotide; CTA chr2 60469814 60469835 60469819 60469814 -
tcctccagtctgtctcaagatg

SEQ ID NO: 224617 - DNA, 22 bp, Artificial Sequence
  Synthetic oligonucleotide; CTC chr2 60469809 60469830 60469814 60469809 -
cagtctgtctcaagatggacag

SEQ ID NO: 224618 - DNA, 22 bp, Artificial Sequence
  Synthetic oligonucleotide; CTG chr2 60469802 60469823 60469807 60469802 -
tctcaagatggacagctacatg

SEQ ID NO: 224619 - DNA, 22 bp, Artificial Sequence
  Synthetic oligonucleotide; CTC chr2 60469798 60469819 60469803 60469798 -
aagatggacagctacatggtta

SEQ ID NO: 224620 - DNA, 22 bp, Artificial Sequence
  Synthetic oligonucleotide; CTA chr2 60469784 60469805 60469789 60469784 -
catggttagttagctagaggag

SEQ ID NO: 224621 - DNA, 22 bp, Artificial Sequence
  Synthetic oligonucleotide; TTA chr2 60469776 60469797 60469781 60469776 -
gttagctagaggaggacttgga

SEQ ID NO: 224622 - DNA, 22 bp, Artificial Sequence
  Synthetic oligonucleotide; TTA chr2 60469772 60469793 60469777 60469772 -
gctagaggaggacttggaaaag

SEQ ID NO: 224623 - DNA, 22 bp, Artificial Sequence
  Synthetic oligonucleotide; CTA chr2 60469768 60469789 60469773 60469768 -
gaggaggacttggaaaagctag

SEQ ID NO: 224624 - DNA, 22 bp, Artificial Sequence
  Synthetic oligonucleotide; CTT chr2 60469757 60469778 60469762 60469757 -
ggaaaagctaggcacttaccac

SEQ ID NO: 224625 - DNA, 22 bp, Artificial Sequence
  Synthetic oligonucleotide; TTG chr2 60469756 60469777 60469761 60469756 -
gaaaagctaggcacttaccaca

SEQ ID NO: 224626 - DNA, 22 bp, Artificial Sequence
  Synthetic oligonucleotide; CTA chr2 60469747 60469768 60469752 60469747 -
ggcacttaccacataaaccgta

SEQ ID NO: 224627 - DNA, 22 bp, Artificial Sequence
  Synthetic oligonucleotide; CTT chr2 60469740 60469761 60469745 60469740 -
accacataaaccgtaaaatccc

SEQ ID NO: 224628 - DNA, 22 bp, Artificial Sequence
  Synthetic oligonucleotide; TTA chr2 60469739 60469760 60469744 60469739 -
ccacataaaccgtaaaatcccc

SEQ ID NO: 224629 - DNA, 22 bp, Artificial Sequence
  Synthetic oligonucleotide; TTG chr2 60469711 60469732 60469716 60469711 -
cacaaaccaaattttcctcttc

SEQ ID NO: 224630 - DNA, 22 bp, Artificial Sequence
  Synthetic oligonucleotide; TTT chr2 60469697 60469718 60469702 60469697 -
tcctcttctcaaaaaaatctca

SEQ ID NO: 224631 - DNA, 22 bp, Artificial Sequence
  Synthetic oligonucleotide; TTT chr2 60469696 60469717 60469701 60469696 -
cctcttctcaaaaaaatctcag

SEQ ID NO: 224632 - DNA, 22 bp, Artificial Sequence
  Synthetic oligonucleotide; TTC chr2 60469695 60469716 60469700 60469695 -
ctcttctcaaaaaaatctcagt

SEQ ID NO: 224633 - DNA, 22 bp, Artificial Sequence
  Synthetic oligonucleotide; CTC chr2 60469692 60469713 60469697 60469692 -
ttctcaaaaaaatctcagtgct

SEQ ID NO: 224634 - DNA, 22 bp, Artificial Sequence
  Synthetic oligonucleotide; CTT chr2 60469690 60469711 60469695 60469690 -
ctcaaaaaaatctcagtgctac

SEQ ID NO: 224635 - DNA, 22 bp, Artificial Sequence
  Synthetic oligonucleotide; TTC chr2 60469689 60469710 60469694 60469689 -
tcaaaaaaatctcagtgctaca

SEQ ID NO: 224636 - DNA, 22 bp, Artificial Sequence
  Synthetic oligonucleotide; CTC chr2 60469687 60469708 60469692 60469687 -
aaaaaaatctcagtgctacaaa

SEQ ID NO: 224637 - DNA, 22 bp, Artificial Sequence
  Synthetic oligonucleotide; CTC chr2 60469676 60469697 60469681 60469676 -
agtgctacaaatgtttcattga

SEQ ID NO: 224638 - DNA, 22 bp, Artificial Sequence
  Synthetic oligonucleotide; CTA chr2 60469669 60469690 60469674 60469669 -
caaatgtttcattgactattag

SEQ ID NO: 224639 - DNA, 22 bp, Artificial Sequence
  Synthetic oligonucleotide; TTT chr2 60469660 60469681 60469665 60469660 -
cattgactattagattcatttt

SEQ ID NO: 224640 - DNA, 22 bp, Artificial Sequence
  Synthetic oligonucleotide; TTC chr2 60469659 60469680 60469664 60469659 -
attgactattagattcatttta

SEQ ID NO: 224641 - DNA, 22 bp, Artificial Sequence
  Synthetic oligonucleotide; TTG chr2 60469655 60469676 60469660 60469655 -
actattagattcattttattag

SEQ ID NO: 224642 - DNA, 22 bp, Artificial Sequence
  Synthetic oligonucleotide; CTA chr2 60469651 60469672 60469656 60469651 -
ttagattcattttattagtgtg

SEQ ID NO: 224643 - DNA, 22 bp, Artificial Sequence
  Synthetic oligonucleotide; TTA chr2 60469648 60469669 60469653 60469648 -
gattcattttattagtgtgaga

SEQ ID NO: 224644 - DNA, 22 bp, Artificial Sequence
  Synthetic oligonucleotide; TTC chr2 60469643 60469664 60469648 60469643 -
attttattagtgtgagaagtca

SEQ ID NO: 224645 - DNA, 22 bp, Artificial Sequence
  Synthetic oligonucleotide; TTT chr2 60469639 60469660 60469644 60469639 -
tattagtgtgagaagtcacttg

SEQ ID NO: 224646 - DNA, 22 bp, Artificial Sequence
  Synthetic oligonucleotide; TTT chr2 60469638 60469659 60469643 60469638 -
attagtgtgagaagtcacttgt

SEQ ID NO: 224647 - DNA, 22 bp, Artificial Sequence
  Synthetic oligonucleotide; TTA chr2 60469637 60469658 60469642 60469637 -
ttagtgtgagaagtcacttgtc

SEQ ID NO: 224648 - DNA, 22 bp, Artificial Sequence
  Synthetic oligonucleotide; TTA chr2 60469634 60469655 60469639 60469634 -
gtgtgagaagtcacttgtcttc

SEQ ID NO: 224649 - DNA, 22 bp, Artificial Sequence
  Synthetic oligonucleotide; CTT chr2 60469618 60469639 60469623 60469618 -
gtcttcaccagagtacaacaaa

SEQ ID NO: 224650 - DNA, 22 bp, Artificial Sequence
  Synthetic oligonucleotide; TTG chr2 60469617 60469638 60469622 60469617 -
tcttcaccagagtacaacaaag

SEQ ID NO: 224651 - DNA, 22 bp, Artificial Sequence
  Synthetic oligonucleotide; CTT chr2 60469613 60469634 60469618 60469613 -
caccagagtacaacaaagtgca

SEQ ID NO: 224652 - DNA, 22 bp, Artificial Sequence
  Synthetic oligonucleotide; TTC chr2 60469612 60469633 60469617 60469612 -
accagagtacaacaaagtgcag

SEQ ID NO: 224653 - DNA, 22 bp, Artificial Sequence
  Synthetic oligonucleotide; TTT chr2 60469563 60469584 60469568 60469563 -
ctgggtgctggcattattggaa

SEQ ID NO: 224654 - DNA, 22 bp, Artificial Sequence
  Synthetic oligonucleotide; TTC chr2 60469562 60469583 60469567 60469562 -
tgggtgctggcattattggaat

SEQ ID NO: 224655 - DNA, 22 bp, Artificial Sequence
  Synthetic oligonucleotide; CTG chr2 60469560 60469581 60469565 60469560 -
ggtgctggcattattggaatgc

SEQ ID NO: 224656 - DNA, 22 bp, Artificial Sequence
  Synthetic oligonucleotide; CTG chr2 60469553 60469574 60469558 60469553 -
gcattattggaatgctggttct

SEQ ID NO: 224657 - DNA, 22 bp, Artificial Sequence
  Synthetic oligonucleotide; TTA chr2 60469547 60469568 60469552 60469547 -
ttggaatgctggttctttcctt

SEQ ID NO: 224658 - DNA, 22 bp, Artificial Sequence
  Synthetic oligonucleotide; TTG chr2 60469544 60469565 60469549 60469544 -
gaatgctggttctttccttgtc

SEQ ID NO: 224659 - DNA, 22 bp, Artificial Sequence
  Synthetic oligonucleotide; CTG chr2 60469536 60469557 60469541 60469536 -
gttctttccttgtcatttaatg

SEQ ID NO: 224660 - DNA, 22 bp, Artificial Sequence
  Synthetic oligonucleotide; TTC chr2 60469532 60469553 60469537 60469532 -
tttccttgtcatttaatggtca

SEQ ID NO: 224661 - DNA, 22 bp, Artificial Sequence
  Synthetic oligonucleotide; CTT chr2 60469530 60469551 60469535 60469530 -
tccttgtcatttaatggtcaaa

SEQ ID NO: 224662 - DNA, 22 bp, Artificial Sequence
  Synthetic oligonucleotide; TTT chr2 60469529 60469550 60469534 60469529 -
ccttgtcatttaatggtcaaag

SEQ ID NO: 224663 - DNA, 22 bp, Artificial Sequence
  Synthetic oligonucleotide; TTC chr2 60469528 60469549 60469533 60469528 -
cttgtcatttaatggtcaaagt

SEQ ID NO: 224664 - DNA, 22 bp, Artificial Sequence
  Synthetic oligonucleotide; CTT chr2 60469525 60469546 60469530 60469525 -
gtcatttaatggtcaaagttat

SEQ ID NO: 224665 - DNA, 22 bp, Artificial Sequence
  Synthetic oligonucleotide; TTG chr2 60469524 60469545 60469529 60469524 -
tcatttaatggtcaaagttatt

SEQ ID NO: 224666 - DNA, 22 bp, Artificial Sequence
  Synthetic oligonucleotide; TTT chr2 60469518 60469539 60469523 60469518 -
aatggtcaaagttatttggacc

SEQ ID NO: 224667 - DNA, 22 bp, Artificial Sequence
  Synthetic oligonucleotide; TTA chr2 60469517 60469538 60469522 60469517 -
atggtcaaagttatttggaccc

SEQ ID NO: 224668 - DNA, 22 bp, Artificial Sequence
  Synthetic oligonucleotide; TTA chr2 60469504 60469525 60469509 60469504 -
tttggaccccagaagtctaatc

SEQ ID NO: 224669 - DNA, 22 bp, Artificial Sequence
  Synthetic oligonucleotide; TTT chr2 60469501 60469522 60469506 60469501 -
ggaccccagaagtctaatcttt

SEQ ID NO: 224670 - DNA, 22 bp, Artificial Sequence
  Synthetic oligonucleotide; TTG chr2 60469500 60469521 60469505 60469500 -
gaccccagaagtctaatcttta

SEQ ID NO: 224671 - DNA, 22 bp, Artificial Sequence
  Synthetic oligonucleotide; CTA chr2 60469485 60469506 60469490 60469485 -
atctttatcttccattgctttg

SEQ ID NO: 224672 - DNA, 22 bp, Artificial Sequence
  Synthetic oligonucleotide; CTT chr2 60469480 60469501 60469485 60469480 -
tatcttccattgctttgtattg

SEQ ID NO: 224673 - DNA, 22 bp, Artificial Sequence
  Synthetic oligonucleotide; TTT chr2 60469479 60469500 60469484 60469479 -
atcttccattgctttgtattgt

SEQ ID NO: 224674 - DNA, 22 bp, Artificial Sequence
  Synthetic oligonucleotide; TTA chr2 60469478 60469499 60469483 60469478 -
tcttccattgctttgtattgtg

SEQ ID NO: 224675 - DNA, 22 bp, Artificial Sequence
  Synthetic oligonucleotide; CTT chr2 60469474 60469495 60469479 60469474 -
ccattgctttgtattgtgagaa

SEQ ID NO: 224676 - DNA, 22 bp, Artificial Sequence
  Synthetic oligonucleotide; TTC chr2 60469473 60469494 60469478 60469473 -
cattgctttgtattgtgagaag

SEQ ID NO: 224677 - DNA, 22 bp, Artificial Sequence
  Synthetic oligonucleotide; TTG chr2 60469468 60469489 60469473 60469468 -
ctttgtattgtgagaagccaca

SEQ ID NO: 224678 - DNA, 22 bp, Artificial Sequence
  Synthetic oligonucleotide; CTT chr2 60469465 60469486 60469470 60469465 -
tgtattgtgagaagccacatct

SEQ ID NO: 224679 - DNA, 22 bp, Artificial Sequence
  Synthetic oligonucleotide; TTT chr2 60469464 60469485 60469469 60469464 -
gtattgtgagaagccacatctg

SEQ ID NO: 224680 - DNA, 22 bp, Artificial Sequence
  Synthetic oligonucleotide; TTG chr2 60469463 60469484 60469468 60469463 -
tattgtgagaagccacatctgt

SEQ ID NO: 224681 - DNA, 22 bp, Artificial Sequence
  Synthetic oligonucleotide; TTG chr2 60469458 60469479 60469463 60469458 -
tgagaagccacatctgtgtaag

SEQ ID NO: 224682 - DNA, 22 bp, Artificial Sequence
  Synthetic oligonucleotide; CTG chr2 60469442 60469463 60469447 60469442 -
tgtaaggtttccagttgacagg

SEQ ID NO: 224683 - DNA, 22 bp, Artificial Sequence
  Synthetic oligonucleotide; TTT chr2 60469432 60469453 60469437 60469432 -
ccagttgacaggattctagagt

SEQ ID NO: 224684 - DNA, 22 bp, Artificial Sequence
  Synthetic oligonucleotide; TTC chr2 60469431 60469452 60469436 60469431 -
cagttgacaggattctagagta

SEQ ID NO: 224685 - DNA, 22 bp, Artificial Sequence
  Synthetic oligonucleotide; TTG chr2 60469425 60469446 60469430 60469425 -
acaggattctagagtatggccc

SEQ ID NO: 224686 - DNA, 22 bp, Artificial Sequence
  Synthetic oligonucleotide; TTC chr2 60469416 60469437 60469421 60469416 -
tagagtatggcccagctcagtc

SEQ ID NO: 224687 - DNA, 22 bp, Artificial Sequence
  Synthetic oligonucleotide; CTA chr2 60469414 60469435 60469419 60469414 -
gagtatggcccagctcagtcca

SEQ ID NO: 224688 - DNA, 22 bp, Artificial Sequence
  Synthetic oligonucleotide; CTC chr2 60469398 60469419 60469403 60469398 -
agtccagaaatgcccaggtttc

SEQ ID NO: 224689 - DNA, 22 bp, Artificial Sequence
  Synthetic oligonucleotide; TTT chr2 60469377 60469398 60469382 60469377 -
cccctatcactgaaggcgctat

SEQ ID NO: 224690 - DNA, 22 bp, Artificial Sequence
  Synthetic oligonucleotide; TTC chr2 60469376 60469397 60469381 60469376 -
ccctatcactgaaggcgctatc

SEQ ID NO: 224691 - DNA, 22 bp, Artificial Sequence
  Synthetic oligonucleotide; CTA chr2 60469371 60469392 60469376 60469371 -
tcactgaaggcgctatcataaa

SEQ ID NO: 224692 - DNA, 22 bp, Artificial Sequence
  Synthetic oligonucleotide; CTG chr2 60469365 60469386 60469370 60469365 -
aaggcgctatcataaatatagc

SEQ ID NO: 224693 - DNA, 22 bp, Artificial Sequence
  Synthetic oligonucleotide; CTA chr2 60469356 60469377 60469361 60469356 -
tcataaatatagcatgggaaga

SEQ ID NO: 224694 - DNA, 22 bp, Artificial Sequence
  Synthetic oligonucleotide; CTC chr2 60469298 60469319 60469303 60469298 -
tgtcccataaaaaacgattcac

SEQ ID NO: 224695 - DNA, 22 bp, Artificial Sequence
  Synthetic oligonucleotide; CTG chr2 60469296 60469317 60469301 60469296 -
tcccataaaaaacgattcacaa

SEQ ID NO: 224696 - DNA, 22 bp, Artificial Sequence
  Synthetic oligonucleotide; TTC chr2 60469278 60469299 60469283 60469278 -
acaaatctactcatttcctatc

SEQ ID NO: 224697 - DNA, 22 bp, Artificial Sequence
  Synthetic oligonucleotide; CTA chr2 60469269 60469290 60469274 60469269 -
ctcatttcctatcagcattttg

SEQ ID NO: 224698 - DNA, 22 bp, Artificial Sequence
  Synthetic oligonucleotide; CTC chr2 60469266 60469287 60469271 60469266 -
atttcctatcagcattttgctt

SEQ ID NO: 224699 - DNA, 22 bp, Artificial Sequence
  Synthetic oligonucleotide; TTT chr2 60469262 60469283 60469267 60469262 -
cctatcagcattttgctttttg

SEQ ID NO: 224700 - DNA, 22 bp, Artificial Sequence
  Synthetic oligonucleotide; TTC chr2 60469261 60469282 60469266 60469261 -
ctatcagcattttgctttttgc

SEQ ID NO: 224701 - DNA, 22 bp, Artificial Sequence
  Synthetic oligonucleotide; CTA chr2 60469258 60469279 60469263 60469258 -
tcagcattttgctttttgcttg

SEQ ID NO: 224702 - DNA, 22 bp, Artificial Sequence
  Synthetic oligonucleotide; TTT chr2 60469249 60469270 60469254 60469249 -
tgctttttgcttgggtttgtct

SEQ ID NO: 224703 - DNA, 22 bp, Artificial Sequence
  Synthetic oligonucleotide; TTT chr2 60469248 60469269 60469253 60469248 -
gctttttgcttgggtttgtcta

SEQ ID NO: 224704 - DNA, 22 bp, Artificial Sequence
  Synthetic oligonucleotide; TTG chr2 60469247 60469268 60469252 60469247 -
ctttttgcttgggtttgtctat

SEQ ID NO: 224705 - DNA, 22 bp, Artificial Sequence
  Synthetic oligonucleotide; CTT chr2 60469244 60469265 60469249 60469244 -
tttgcttgggtttgtctataaa

SEQ ID NO: 224706 - DNA, 22 bp, Artificial Sequence
  Synthetic oligonucleotide; TTT chr2 60469243 60469264 60469248 60469243 -
ttgcttgggtttgtctataaag

SEQ ID NO: 224707 - DNA, 22 bp, Artificial Sequence
  Synthetic oligonucleotide; TTT chr2 60469242 60469263 60469247 60469242 -
tgcttgggtttgtctataaagt

SEQ ID NO: 224708 - DNA, 22 bp, Artificial Sequence
  Synthetic oligonucleotide; TTT chr2 60469241 60469262 60469246 60469241 -
gcttgggtttgtctataaagta

SEQ ID NO: 224709 - DNA, 22 bp, Artificial Sequence
  Synthetic oligonucleotide; TTG chr2 60469240 60469261 60469245 60469240 -
cttgggtttgtctataaagtaa

SEQ ID NO: 224710 - DNA, 22 bp, Artificial Sequence
  Synthetic oligonucleotide; CTT chr2 60469237 60469258 60469242 60469237 -
gggtttgtctataaagtaaagt

SEQ ID NO: 224711 - DNA, 22 bp, Artificial Sequence
  Synthetic oligonucleotide; TTG chr2 60469236 60469257 60469241 60469236 -
ggtttgtctataaagtaaagtt

SEQ ID NO: 224712 - DNA, 22 bp, Artificial Sequence
  Synthetic oligonucleotide; TTT chr2 60469231 60469252 60469236 60469231 -
gtctataaagtaaagttaatgt

SEQ ID NO: 224713 - DNA, 22 bp, Artificial Sequence
  Synthetic oligonucleotide; TTG chr2 60469230 60469251 60469235 60469230 -
tctataaagtaaagttaatgta

SEQ ID NO: 224714 - DNA, 22 bp, Artificial Sequence
  Synthetic oligonucleotide; CTA chr2 60469226 60469247 60469231 60469226 -
taaagtaaagttaatgtatgca

SEQ ID NO: 224715 - DNA, 22 bp, Artificial Sequence
  Synthetic oligonucleotide; TTA chr2 60469213 60469234 60469218 60469213 -
atgtatgcatgtaaaccagcct

SEQ ID NO: 224716 - DNA, 22 bp, Artificial Sequence
  Synthetic oligonucleotide; CTT chr2 60469190 60469211 60469195 60469190 -
gcagataaaatccccccatgtt

SEQ ID NO: 224717 - DNA, 22 bp, Artificial Sequence
  Synthetic oligonucleotide; TTG chr2 60469189 60469210 60469194 60469189 -
cagataaaatccccccatgttt

SEQ ID NO: 224718 - DNA, 22 bp, Artificial Sequence
  Synthetic oligonucleotide; TTT chr2 60469167 60469188 60469172 60469167 -
ccaggctacccacaatattacc

SEQ ID NO: 224719 - DNA, 22 bp, Artificial Sequence
  Synthetic oligonucleotide; TTC chr2 60469166 60469187 60469171 60469166 -
caggctacccacaatattacca

SEQ ID NO: 224720 - DNA, 22 bp, Artificial Sequence
  Synthetic oligonucleotide; CTA chr2 60469159 60469180 60469164 60469159 -
cccacaatattaccagttttcc

SEQ ID NO: 224721 - DNA, 22 bp, Artificial Sequence
  Synthetic oligonucleotide; TTA chr2 60469147 60469168 60469152 60469147 -
ccagttttccccttgctgctta

SEQ ID NO: 224722 - DNA, 22 bp, Artificial Sequence
  Synthetic oligonucleotide; TTT chr2 60469140 60469161 60469145 60469140 -
tccccttgctgcttacacatct

SEQ ID NO: 224723 - DNA, 22 bp, Artificial Sequence
  Synthetic oligonucleotide; TTT chr2 60469139 60469160 60469144 60469139 -
ccccttgctgcttacacatctt

SEQ ID NO: 224724 - DNA, 22 bp, Artificial Sequence
  Synthetic oligonucleotide; TTC chr2 60469138 60469159 60469143 60469138 -
cccttgctgcttacacatcttc

SEQ ID NO: 224725 - DNA, 22 bp, Artificial Sequence
  Synthetic oligonucleotide; CTT chr2 60469133 60469154 60469138 60469133 -
gctgcttacacatcttctttcc

SEQ ID NO: 224726 - DNA, 22 bp, Artificial Sequence
  Synthetic oligonucleotide; TTG chr2 60469132 60469153 60469137 60469132 -
ctgcttacacatcttctttcca

SEQ ID NO: 224727 - DNA, 22 bp, Artificial Sequence
  Synthetic oligonucleotide; CTG chr2 60469129 60469150 60469134 60469129 -
cttacacatcttctttccacaa

SEQ ID NO: 224728 - DNA, 22 bp, Artificial Sequence
  Synthetic oligonucleotide; CTT chr2 60469126 60469147 60469131 60469126 -
acacatcttctttccacaagac

SEQ ID NO: 224729 - DNA, 22 bp, Artificial Sequence
  Synthetic oligonucleotide; TTA chr2 60469125 60469146 60469130 60469125 -
cacatcttctttccacaagaca

SEQ ID NO: 224730 - DNA, 22 bp, Artificial Sequence
  Synthetic oligonucleotide; CTT chr2 60469117 60469138 60469122 60469117 -
ctttccacaagacaataatcaa

SEQ ID NO: 224731 - DNA, 22 bp, Artificial Sequence
  Synthetic oligonucleotide; TTC chr2 60469116 60469137 60469121 60469116 -
tttccacaagacaataatcaaa

SEQ ID NO: 224732 - DNA, 22 bp, Artificial Sequence
  Synthetic oligonucleotide; CTT chr2 60469114 60469135 60469119 60469114 -
tccacaagacaataatcaaaca

SEQ ID NO: 224733 - DNA, 22 bp, Artificial Sequence
  Synthetic oligonucleotide; TTT chr2 60469113 60469134 60469118 60469113 -
ccacaagacaataatcaaacaa

SEQ ID NO: 224734 - DNA, 22 bp, Artificial Sequence
  Synthetic oligonucleotide; TTC chr2 60469112 60469133 60469117 60469112 -
cacaagacaataatcaaacaac

SEQ ID NO: 224735 - DNA, 22 bp, Artificial Sequence
  Synthetic oligonucleotide; CTC chr2 60469054 60469075 60469059 60469054 -
tcccctttcctaaaacaaaccc

SEQ ID NO: 224736 - DNA, 22 bp, Artificial Sequence
  Synthetic oligonucleotide; CTC chr2 60469052 60469073 60469057 60469052 -
ccctttcctaaaacaaaccctt

SEQ ID NO: 224737 - DNA, 22 bp, Artificial Sequence
  Synthetic oligonucleotide; CTT chr2 60469047 60469068 60469052 60469047 -
tcctaaaacaaaccctttcact

SEQ ID NO: 224738 - DNA, 22 bp, Artificial Sequence
  Synthetic oligonucleotide; TTT chr2 60469046 60469067 60469051 60469046 -
cctaaaacaaaccctttcactt

SEQ ID NO: 224739 - DNA, 22 bp, Artificial Sequence
  Synthetic oligonucleotide; TTC chr2 60469045 60469066 60469050 60469045 -
ctaaaacaaaccctttcacttt

SEQ ID NO: 224740 - DNA, 22 bp, Artificial Sequence
  Synthetic oligonucleotide; CTA chr2 60469042 60469063 60469047 60469042 -
aaacaaaccctttcacttttgt

SEQ ID NO: 224741 - DNA, 22 bp, Artificial Sequence
  Synthetic oligonucleotide; CTT chr2 60469030 60469051 60469035 60469030 -
tcacttttgtcaaaaagaccga

SEQ ID NO: 224742 - DNA, 22 bp, Artificial Sequence
  Synthetic oligonucleotide; TTT chr2 60469029 60469050 60469034 60469029 -
cacttttgtcaaaaagaccgaa

SEQ ID NO: 224743 - DNA, 22 bp, Artificial Sequence
  Synthetic oligonucleotide; TTC chr2 60469028 60469049 60469033 60469028 -
acttttgtcaaaaagaccgaaa

SEQ ID NO: 224744 - DNA, 22 bp, Artificial Sequence
  Synthetic oligonucleotide; CTT chr2 60469024 60469045 60469029 60469024 -
ttgtcaaaaagaccgaaattga

SEQ ID NO: 224745 - DNA, 22 bp, Artificial Sequence
  Synthetic oligonucleotide; TTT chr2 60469023 60469044 60469028 60469023 -
tgtcaaaaagaccgaaattgaa

SEQ ID NO: 224746 - DNA, 22 bp, Artificial Sequence
  Synthetic oligonucleotide; TTT chr2 60469022 60469043 60469027 60469022 -
gtcaaaaagaccgaaattgaaa

SEQ ID NO: 224747 - DNA, 22 bp, Artificial Sequence
  Synthetic oligonucleotide; TTG chr2 60469021 60469042 60469026 60469021 -
tcaaaaagaccgaaattgaaaa

SEQ ID NO: 224748 - DNA, 22 bp, Artificial Sequence
  Synthetic oligonucleotide; TTG chr2 60469003 60469024 60469008 60469003 -
aaaacaaaacagaaactctggg

SEQ ID NO: 224749 - DNA, 22 bp, Artificial Sequence
  Synthetic oligonucleotide; CTC chr2 60468985 60469006 60468990 60468985 -
tgggaaataactcaccactctt

SEQ ID NO: 224750 - DNA, 22 bp, Artificial Sequence
  Synthetic oligonucleotide; CTG chr2 60468983 60469004 60468988 60468983 -
ggaaataactcaccactcttct

SEQ ID NO: 224751 - DNA, 22 bp, Artificial Sequence
  Synthetic oligonucleotide; CTC chr2 60468972 60468993 60468977 60468972 -
accactcttcttttgtttcagg

SEQ ID NO: 224752 - DNA, 22 bp, Artificial Sequence
  Synthetic oligonucleotide; CTC chr2 60468965 60468986 60468970 60468965 -
ttcttttgtttcaggccttggg

SEQ ID NO: 224753 - DNA, 22 bp, Artificial Sequence
  Synthetic oligonucleotide; CTT chr2 60468963 60468984 60468968 60468963 -
cttttgtttcaggccttgggcc

SEQ ID NO: 224754 - DNA, 22 bp, Artificial Sequence
  Synthetic oligonucleotide; TTC chr2 60468962 60468983 60468967 60468962 -
ttttgtttcaggccttgggcct

SEQ ID NO: 224755 - DNA, 22 bp, Artificial Sequence
  Synthetic oligonucleotide; CTT chr2 60468960 60468981 60468965 60468960 -
ttgtttcaggccttgggcctgt

SEQ ID NO: 224756 - DNA, 22 bp, Artificial Sequence
  Synthetic oligonucleotide; TTT chr2 60468959 60468980 60468964 60468959 -
tgtttcaggccttgggcctgtt

SEQ ID NO: 224757 - DNA, 22 bp, Artificial Sequence
  Synthetic oligonucleotide; TTT chr2 60468958 60468979 60468963 60468958 -
gtttcaggccttgggcctgtta

SEQ ID NO: 224758 - DNA, 22 bp, Artificial Sequence
  Synthetic oligonucleotide; TTG chr2 60468957 60468978 60468962 60468957 -
tttcaggccttgggcctgttaa

SEQ ID NO: 224759 - DNA, 22 bp, Artificial Sequence
  Synthetic oligonucleotide; TTT chr2 60468954 60468975 60468959 60468954 -
caggccttgggcctgttaacta

SEQ ID NO: 224760 - DNA, 22 bp, Artificial Sequence
  Synthetic oligonucleotide; TTC chr2 60468953 60468974 60468958 60468953 -
aggccttgggcctgttaactat

SEQ ID NO: 224761 - DNA, 22 bp, Artificial Sequence
  Synthetic oligonucleotide; CTT chr2 60468946 60468967 60468951 60468946 -
gggcctgttaactatctgcaag

SEQ ID NO: 224762 - DNA, 22 bp, Artificial Sequence
  Synthetic oligonucleotide; TTG chr2 60468945 60468966 60468950 60468945 -
ggcctgttaactatctgcaagg

SEQ ID NO: 224763 - DNA, 22 bp, Artificial Sequence
  Synthetic oligonucleotide; CTG chr2 60468939 60468960 60468944 60468939 -
ttaactatctgcaaggctgttg

SEQ ID NO: 224764 - DNA, 22 bp, Artificial Sequence
  Synthetic oligonucleotide; TTA chr2 60468936 60468957 60468941 60468936 -
actatctgcaaggctgttgtaa

SEQ ID NO: 224765 - DNA, 22 bp, Artificial Sequence
  Synthetic oligonucleotide; CTA chr2 60468932 60468953 60468937 60468932 -
tctgcaaggctgttgtaatgat

SEQ ID NO: 224766 - DNA, 22 bp, Artificial Sequence
  Synthetic oligonucleotide; CTG chr2 60468928 60468949 60468933 60468928 -
caaggctgttgtaatgatgttg

SEQ ID NO: 224767 - DNA, 22 bp, Artificial Sequence
  Synthetic oligonucleotide; CTG chr2 60468920 60468941 60468925 60468920 -
ttgtaatgatgttgtaatctat

SEQ ID NO: 224768 - DNA, 22 bp, Artificial Sequence
  Synthetic oligonucleotide; TTG chr2 60468917 60468938 60468922 60468917 -
taatgatgttgtaatctatttt

SEQ ID NO: 224769 - DNA, 22 bp, Artificial Sequence
  Synthetic oligonucleotide; TTG chr2 60468906 60468927 60468911 60468906 -
taatctattttaatggaattga

SEQ ID NO: 224770 - DNA, 22 bp, Artificial Sequence
  Synthetic oligonucleotide; CTA chr2 60468899 60468920 60468904 60468899 -
ttttaatggaattgaaatgtga

SEQ ID NO: 224771 - DNA, 22 bp, Artificial Sequence
  Synthetic oligonucleotide; TTT chr2 60468896 60468917 60468901 60468896 -
taatggaattgaaatgtgatat

SEQ ID NO: 224772 - DNA, 22 bp, Artificial Sequence
  Synthetic oligonucleotide; TTT chr2 60468895 60468916 60468900 60468895 -
aatggaattgaaatgtgatatc

SEQ ID NO: 224773 - DNA, 22 bp, Artificial Sequence
  Synthetic oligonucleotide; TTA chr2 60468894 60468915 60468899 60468894 -
atggaattgaaatgtgatatcc

SEQ ID NO: 224774 - DNA, 22 bp, Artificial Sequence
  Synthetic oligonucleotide; TTG chr2 60468885 60468906 60468890 60468885 -
aaatgtgatatcctgtggttta

SEQ ID NO: 224775 - DNA, 22 bp, Artificial Sequence
  Synthetic oligonucleotide; CTG chr2 60468870 60468891 60468875 60468870 -
tggtttatgatgcacgttgttt

SEQ ID NO: 224776 - DNA, 22 bp, Artificial Sequence
  Synthetic oligonucleotide; TTT chr2 60468864 60468885 60468869 60468864 -
atgatgcacgttgtttgtagct

SEQ ID NO: 224777 - DNA, 22 bp, Artificial Sequence
  Synthetic oligonucleotide; TTA chr2 60468863 60468884 60468868 60468863 -
tgatgcacgttgtttgtagctg

SEQ ID NO: 224778 - DNA, 22 bp, Artificial Sequence
  Synthetic oligonucleotide; TTG chr2 60468851 60468872 60468856 60468851 -
tttgtagctgtagtgcttgatt

SEQ ID NO: 224779 - DNA, 22 bp, Artificial Sequence
  Synthetic oligonucleotide; TTT chr2 60468848 60468869 60468853 60468848 -
gtagctgtagtgcttgattttg

SEQ ID NO: 224780 - DNA, 22 bp, Artificial Sequence
  Synthetic oligonucleotide; TTG chr2 60468847 60468868 60468852 60468847 -
tagctgtagtgcttgattttgg

SEQ ID NO: 224781 - DNA, 22 bp, Artificial Sequence
  Synthetic oligonucleotide; CTG chr2 60468841 60468862 60468846 60468841 -
tagtgcttgattttgggtttct

SEQ ID NO: 224782 - DNA, 22 bp, Artificial Sequence
  Synthetic oligonucleotide; CTT chr2 60468833 60468854 60468838 60468833 -
gattttgggtttctttcacaga

SEQ ID NO: 224783 - DNA, 22 bp, Artificial Sequence
  Synthetic oligonucleotide; TTG chr2 60468832 60468853 60468837 60468832 -
attttgggtttctttcacagat

SEQ ID NO: 224784 - DNA, 22 bp, Artificial Sequence
  Synthetic oligonucleotide; TTT chr2 60468828 60468849 60468833 60468828 -
tgggtttctttcacagataaac

SEQ ID NO: 224785 - DNA, 22 bp, Artificial Sequence
  Synthetic oligonucleotide; TTT chr2 60468827 60468848 60468832 60468827 -
gggtttctttcacagataaact

SEQ ID NO: 224786 - DNA, 22 bp, Artificial Sequence
  Synthetic oligonucleotide; TTG chr2 60468826 60468847 60468831 60468826 -
ggtttctttcacagataaactt

SEQ ID NO: 224787 - DNA, 22 bp, Artificial Sequence
  Synthetic oligonucleotide; TTT chr2 60468821 60468842 60468826 60468821 -
ctttcacagataaacttctgca

SEQ ID NO: 224788 - DNA, 22 bp, Artificial Sequence
  Synthetic oligonucleotide; TTC chr2 60468820 60468841 60468825 60468820 -
tttcacagataaacttctgcac

SEQ ID NO: 224789 - DNA, 22 bp, Artificial Sequence
  Synthetic oligonucleotide; CTT chr2 60468818 60468839 60468823 60468818 -
tcacagataaacttctgcactg

SEQ ID NO: 224790 - DNA, 22 bp, Artificial Sequence
  Synthetic oligonucleotide; TTT chr2 60468817 60468838 60468822 60468817 -
cacagataaacttctgcactgg

SEQ ID NO: 224791 - DNA, 22 bp, Artificial Sequence
  Synthetic oligonucleotide; TTC chr2 60468816 60468837 60468821 60468816 -
acagataaacttctgcactgga

SEQ ID NO: 224792 - DNA, 22 bp, Artificial Sequence
  Synthetic oligonucleotide; CTT chr2 60468804 60468825 60468809 60468804 -
ctgcactggaggggcctctcct

SEQ ID NO: 224793 - DNA, 22 bp, Artificial Sequence
  Synthetic oligonucleotide; TTC chr2 60468803 60468824 60468808 60468803 -
tgcactggaggggcctctcctc

SEQ ID NO: 224794 - DNA, 22 bp, Artificial Sequence
  Synthetic oligonucleotide; CTG chr2 60468801 60468822 60468806 60468801 -
cactggaggggcctctcctccc

SEQ ID NO: 224795 - DNA, 22 bp, Artificial Sequence
  Synthetic oligonucleotide; CTG chr2 60468796 60468817 60468801 60468796 -
gaggggcctctcctcccctcgt

SEQ ID NO: 224796 - DNA, 22 bp, Artificial Sequence
  Synthetic oligonucleotide; CTC chr2 60468786 60468807 60468791 60468786 -
tcctcccctcgttctgcacatg

SEQ ID NO: 224797 - DNA, 22 bp, Artificial Sequence
  Synthetic oligonucleotide; CTC chr2 60468784 60468805 60468789 60468784 -
ctcccctcgttctgcacatgga

SEQ ID NO: 224798 - DNA, 22 bp, Artificial Sequence
  Synthetic oligonucleotide; CTC chr2 60468781 60468802 60468786 60468781 -
ccctcgttctgcacatggagct

SEQ ID NO: 224799 - DNA, 22 bp, Artificial Sequence
  Synthetic oligonucleotide; CTC chr2 60468776 60468797 60468781 60468776 -
gttctgcacatggagctctaat

SEQ ID NO: 224800 - DNA, 22 bp, Artificial Sequence
  Synthetic oligonucleotide; TTC chr2 60468772 60468793 60468777 60468772 -
tgcacatggagctctaatcccc

SEQ ID NO: 224801 - DNA, 22 bp, Artificial Sequence
  Synthetic oligonucleotide; CTG chr2 60468770 60468791 60468775 60468770 -
cacatggagctctaatccccac

SEQ ID NO: 224802 - DNA, 22 bp, Artificial Sequence
  Synthetic oligonucleotide; CTC chr2 60468758 60468779 60468763 60468758 -
taatccccacgcctgggatgag

SEQ ID NO: 224803 - DNA, 22 bp, Artificial Sequence
  Synthetic oligonucleotide; CTA chr2 60468756 60468777 60468761 60468756 -
atccccacgcctgggatgagtg

SEQ ID NO: 224804 - DNA, 22 bp, Artificial Sequence
  Synthetic oligonucleotide; CTG chr2 60468743 60468764 60468748 60468743 -
ggatgagtgcagaatatgcccc

SEQ ID NO: 224805 - DNA, 22 bp, Artificial Sequence
  Synthetic oligonucleotide; TTT chr2 60468710 60468731 60468715 60468710 -
gtaagttgagccttatttcttc

SEQ ID NO: 224806 - DNA, 22 bp, Artificial Sequence
  Synthetic oligonucleotide; TTG chr2 60468709 60468730 60468714 60468709 -
taagttgagccttatttcttct

SEQ ID NO: 224807 - DNA, 22 bp, Artificial Sequence
  Synthetic oligonucleotide; TTG chr2 60468702 60468723 60468707 60468702 -
agccttatttcttctacaaatg

SEQ ID NO: 224808 - DNA, 22 bp, Artificial Sequence
  Synthetic oligonucleotide; CTT chr2 60468696 60468717 60468701 60468696 -
atttcttctacaaatgtccatg

SEQ ID NO: 224809 - DNA, 22 bp, Artificial Sequence
  Synthetic oligonucleotide; TTA chr2 60468695 60468716 60468700 60468695 -
tttcttctacaaatgtccatgt

SEQ ID NO: 224810 - DNA, 22 bp, Artificial Sequence
  Synthetic oligonucleotide; TTT chr2 60468692 60468713 60468697 60468692 -
cttctacaaatgtccatgtgta

SEQ ID NO: 224811 - DNA, 22 bp, Artificial Sequence
  Synthetic oligonucleotide; TTC chr2 60468691 60468712 60468696 60468691 -
ttctacaaatgtccatgtgtat

SEQ ID NO: 224812 - DNA, 22 bp, Artificial Sequence
  Synthetic oligonucleotide; CTT chr2 60468689 60468710 60468694 60468689 -
ctacaaatgtccatgtgtatag

SEQ ID NO: 224813 - DNA, 22 bp, Artificial Sequence
  Synthetic oligonucleotide; TTC chr2 60468688 60468709 60468693 60468688 -
tacaaatgtccatgtgtataga

SEQ ID NO: 224814 - DNA, 22 bp, Artificial Sequence
  Synthetic oligonucleotide; CTA chr2 60468686 60468707 60468691 60468686 -
caaatgtccatgtgtatagaga

SEQ ID NO: 224815 - DNA, 22 bp, Artificial Sequence
  Synthetic oligonucleotide; TTT chr2 60468655 60468676 60468660 60468655 -
ctggaaattgcccttacttttt

SEQ ID NO: 224816 - DNA, 22 bp, Artificial Sequence
  Synthetic oligonucleotide; TTC chr2 60468654 60468675 60468659 60468654 -
tggaaattgcccttacttttta

SEQ ID NO: 224817 - DNA, 22 bp, Artificial Sequence
  Synthetic oligonucleotide; CTG chr2 60468652 60468673 60468657 60468652 -
gaaattgcccttactttttaag

SEQ ID NO: 224818 - DNA, 22 bp, Artificial Sequence
  Synthetic oligonucleotide; TTG chr2 60468645 60468666 60468650 60468645 -
cccttactttttaagtactgaa

SEQ ID NO: 224819 - DNA, 22 bp, Artificial Sequence
  Synthetic oligonucleotide; CTT chr2 60468640 60468661 60468645 60468640 -
actttttaagtactgaaggagt

SEQ ID NO: 224820 - DNA, 22 bp, Artificial Sequence
  Synthetic oligonucleotide; TTA chr2 60468639 60468660 60468644 60468639 -
ctttttaagtactgaaggagtt

SEQ ID NO: 224821 - DNA, 22 bp, Artificial Sequence
  Synthetic oligonucleotide; CTT chr2 60468636 60468657 60468641 60468636 -
tttaagtactgaaggagttact

SEQ ID NO: 224822 - DNA, 22 bp, Artificial Sequence
  Synthetic oligonucleotide; TTT chr2 60468635 60468656 60468640 60468635 -
ttaagtactgaaggagttactt

SEQ ID NO: 224823 - DNA, 22 bp, Artificial Sequence
  Synthetic oligonucleotide; TTT chr2 60468634 60468655 60468639 60468634 -
taagtactgaaggagttacttc

SEQ ID NO: 224824 - DNA, 22 bp, Artificial Sequence
  Synthetic oligonucleotide; TTT chr2 60468633 60468654 60468638 60468633 -
aagtactgaaggagttacttcc

SEQ ID NO: 224825 - DNA, 22 bp, Artificial Sequence
  Synthetic oligonucleotide; TTA chr2 60468632 60468653 60468637 60468632 -
agtactgaaggagttacttcca

SEQ ID NO: 224826 - DNA, 22 bp, Artificial Sequence
  Synthetic oligonucleotide; CTG chr2 60468625 60468646 60468630 60468625 -
aaggagttacttccaaaataga

SEQ ID NO: 224827 - DNA, 22 bp, Artificial Sequence
  Synthetic oligonucleotide; TTA chr2 60468616 60468637 60468621 60468616 -
cttccaaaatagattgtcatat

SEQ ID NO: 224828 - DNA, 22 bp, Artificial Sequence
  Synthetic oligonucleotide; CTT chr2 60468613 60468634 60468618 60468613 -
ccaaaatagattgtcatatgta

SEQ ID NO: 224829 - DNA, 22 bp, Artificial Sequence
  Synthetic oligonucleotide; TTC chr2 60468612 60468633 60468617 60468612 -
caaaatagattgtcatatgtat

SEQ ID NO: 224830 - DNA, 22 bp, Artificial Sequence
  Synthetic oligonucleotide; TTG chr2 60468600 60468621 60468605 60468600 -
tcatatgtattattccattact

SEQ ID NO: 224831 - DNA, 22 bp, Artificial Sequence
  Synthetic oligonucleotide; TTA chr2 60468588 60468609 60468593 60468588 -
ttccattactcacttggcagcc

SEQ ID NO: 224832 - DNA, 22 bp, Artificial Sequence
  Synthetic oligonucleotide; TTC chr2 60468585 60468606 60468590 60468585 -
cattactcacttggcagccgct

SEQ ID NO: 224833 - DNA, 22 bp, Artificial Sequence
  Synthetic oligonucleotide; TTA chr2 60468580 60468601 60468585 60468580 -
ctcacttggcagccgctcccca

SEQ ID NO: 224834 - DNA, 22 bp, Artificial Sequence
  Synthetic oligonucleotide; CTC chr2 60468577 60468598 60468582 60468577 -
acttggcagccgctccccactc

SEQ ID NO: 224835 - DNA, 22 bp, Artificial Sequence
  Synthetic oligonucleotide; CTT chr2 60468573 60468594 60468578 60468573 -
ggcagccgctccccactccact

SEQ ID NO: 224836 - DNA, 22 bp, Artificial Sequence
  Synthetic oligonucleotide; TTG chr2 60468572 60468593 60468577 60468572 -
gcagccgctccccactccactc

SEQ ID NO: 224837 - DNA, 22 bp, Artificial Sequence
  Synthetic oligonucleotide; CTC chr2 60468562 60468583 60468567 60468562 -
cccactccactcagccccagag

SEQ ID NO: 224838 - DNA, 22 bp, Artificial Sequence
  Synthetic oligonucleotide; CTC chr2 60468555 60468576 60468560 60468555 -
cactcagccccagagggacttc

SEQ ID NO: 224839 - DNA, 22 bp, Artificial Sequence
  Synthetic oligonucleotide; CTC chr2 60468550 60468571 60468555 60468550 -
agccccagagggacttcttccc

SEQ ID NO: 224840 - DNA, 22 bp, Artificial Sequence
  Synthetic oligonucleotide; CTT chr2 60468534 60468555 60468539 60468534 -
cttccctcccctttttctttcc

SEQ ID NO: 224841 - DNA, 22 bp, Artificial Sequence
  Synthetic oligonucleotide; TTC chr2 60468533 60468554 60468538 60468533 -
ttccctcccctttttctttcct

SEQ ID NO: 224842 - DNA, 22 bp, Artificial Sequence
  Synthetic oligonucleotide; CTT chr2 60468531 60468552 60468536 60468531 -
ccctcccctttttctttcctca

SEQ ID NO: 224843 - DNA, 22 bp, Artificial Sequence
  Synthetic oligonucleotide; TTC chr2 60468530 60468551 60468535 60468530 -
cctcccctttttctttcctcac

SEQ ID NO: 224844 - DNA, 22 bp, Artificial Sequence
  Synthetic oligonucleotide; CTC chr2 60468526 60468547 60468531 60468526 -
ccctttttctttcctcactgga

SEQ ID NO: 224845 - DNA, 22 bp, Artificial Sequence
  Synthetic oligonucleotide; CTT chr2 60468521 60468542 60468526 60468521 -
tttctttcctcactggaggctg

SEQ ID NO: 224846 - DNA, 22 bp, Artificial Sequence
  Synthetic oligonucleotide; TTT chr2 60468520 60468541 60468525 60468520 -
ttctttcctcactggaggctgg

SEQ ID NO: 224847 - DNA, 22 bp, Artificial Sequence
  Synthetic oligonucleotide; TTT chr2 60468519 60468540 60468524 60468519 -
tctttcctcactggaggctggg

SEQ ID NO: 224848 - DNA, 22 bp, Artificial Sequence
  Synthetic oligonucleotide; TTT chr2 60468518 60468539 60468523 60468518 -
ctttcctcactggaggctggga

SEQ ID NO: 224849 - DNA, 22 bp, Artificial Sequence
  Synthetic oligonucleotide; TTC chr2 60468517 60468538 60468522 60468517 -
tttcctcactggaggctgggag

SEQ ID NO: 224850 - DNA, 22 bp, Artificial Sequence
  Synthetic oligonucleotide; CTT chr2 60468515 60468536 60468520 60468515 -
tcctcactggaggctgggagct

SEQ ID NO: 224851 - DNA, 22 bp, Artificial Sequence
  Synthetic oligonucleotide; TTT chr2 60468514 60468535 60468519 60468514 -
cctcactggaggctgggagctg

SEQ ID NO: 224852 - DNA, 22 bp, Artificial Sequence
  Synthetic oligonucleotide; TTC chr2 60468513 60468534 60468518 60468513 -
ctcactggaggctgggagctga

SEQ ID NO: 224853 - DNA, 22 bp, Artificial Sequence
  Synthetic oligonucleotide; CTC chr2 60468510 60468531 60468515 60468510 -
actggaggctgggagctgatag

SEQ ID NO: 224854 - DNA, 22 bp, Artificial Sequence
  Synthetic oligonucleotide; CTG chr2 60468506 60468527 60468511 60468506 -
gaggctgggagctgatagtagc

SEQ ID NO: 224855 - DNA, 22 bp, Artificial Sequence
  Synthetic oligonucleotide; CTG chr2 60468499 60468520 60468504 60468499 -
ggagctgatagtagctcatccc

SEQ ID NO: 224856 - DNA, 22 bp, Artificial Sequence
  Synthetic oligonucleotide; CTG chr2 60468492 60468513 60468497 60468492 -
atagtagctcatccctgtgggt

SEQ ID NO: 224857 - DNA, 22 bp, Artificial Sequence
  Synthetic oligonucleotide; CTC chr2 60468482 60468503 60468487 60468482 -
atccctgtgggtcttctcccca

SEQ ID NO: 224858 - DNA, 22 bp, Artificial Sequence
  Synthetic oligonucleotide; CTG chr2 60468475 60468496 60468480 60468475 -
tgggtcttctccccagggtctt

SEQ ID NO: 224859 - DNA, 22 bp, Artificial Sequence
  Synthetic oligonucleotide; CTT chr2 60468467 60468488 60468472 60468467 -
ctccccagggtcttgtcttgct

SEQ ID NO: 224860 - DNA, 22 bp, Artificial Sequence
  Synthetic oligonucleotide; TTC chr2 60468466 60468487 60468471 60468466 -
tccccagggtcttgtcttgctc

SEQ ID NO: 224861 - DNA, 22 bp, Artificial Sequence
  Synthetic oligonucleotide; CTC chr2 60468464 60468485 60468469 60468464 -
cccagggtcttgtcttgctccg

SEQ ID NO: 224862 - DNA, 22 bp, Artificial Sequence
  Synthetic oligonucleotide; CTT chr2 60468453 60468474 60468458 60468453 -
gtcttgctccgtggctagtgat

SEQ ID NO: 224863 - DNA, 22 bp, Artificial Sequence
  Synthetic oligonucleotide; TTG chr2 60468452 60468473 60468457 60468452 -
tcttgctccgtggctagtgatt

SEQ ID NO: 224864 - DNA, 22 bp, Artificial Sequence
  Synthetic oligonucleotide; CTT chr2 60468448 60468469 60468453 60468448 -
gctccgtggctagtgattgaag

SEQ ID NO: 224865 - DNA, 22 bp, Artificial Sequence
  Synthetic oligonucleotide; TTG chr2 60468447 60468468 60468452 60468447 -
ctccgtggctagtgattgaaga

SEQ ID NO: 224866 - DNA, 22 bp, Artificial Sequence
  Synthetic oligonucleotide; CTC chr2 60468444 60468465 60468449 60468444 -
cgtggctagtgattgaagatgc

SEQ ID NO: 224867 - DNA, 22 bp, Artificial Sequence
  Synthetic oligonucleotide; CTA chr2 60468436 60468457 60468441 60468436 -
gtgattgaagatgcctgtgcct

SEQ ID NO: 224868 - DNA, 22 bp, Artificial Sequence
  Synthetic oligonucleotide; TTG chr2 60468429 60468450 60468434 60468429 -
aagatgcctgtgcctctggagc

SEQ ID NO: 224869 - DNA, 22 bp, Artificial Sequence
  Synthetic oligonucleotide; CTG chr2 60468419 60468440 60468424 60468419 -
tgcctctggagcccattttatt

SEQ ID NO: 224870 - DNA, 22 bp, Artificial Sequence
  Synthetic oligonucleotide; CTC chr2 60468413 60468434 60468418 60468413 -
tggagcccattttattactgga

SEQ ID NO: 224871 - DNA, 22 bp, Artificial Sequence
  Synthetic oligonucleotide; CTG chr2 60468411 60468432 60468416 60468411 -
gagcccattttattactggaca

SEQ ID NO: 224872 - DNA, 22 bp, Artificial Sequence
  Synthetic oligonucleotide; TTT chr2 60468401 60468422 60468406 60468401 -
tattactggacattcactcctg

SEQ ID NO: 224873 - DNA, 22 bp, Artificial Sequence
  Synthetic oligonucleotide; TTT chr2 60468400 60468421 60468405 60468400 -
attactggacattcactcctgt

SEQ ID NO: 224874 - DNA, 22 bp, Artificial Sequence
  Synthetic oligonucleotide; TTA chr2 60468399 60468420 60468404 60468399 -
ttactggacattcactcctgtg

SEQ ID NO: 224875 - DNA, 22 bp, Artificial Sequence
  Synthetic oligonucleotide; TTA chr2 60468396 60468417 60468401 60468396 -
ctggacattcactcctgtggcc

SEQ ID NO: 224876 - DNA, 22 bp, Artificial Sequence
  Synthetic oligonucleotide; CTG chr2 60468393 60468414 60468398 60468393 -
gacattcactcctgtggcctca

SEQ ID NO: 224877 - DNA, 22 bp, Artificial Sequence
  Synthetic oligonucleotide; TTC chr2 60468386 60468407 60468391 60468386 -
actcctgtggcctcatttagga

SEQ ID NO: 224878 - DNA, 22 bp, Artificial Sequence
  Synthetic oligonucleotide; CTC chr2 60468382 60468403 60468387 60468382 -
ctgtggcctcatttaggacttt

SEQ ID NO: 224879 - DNA, 22 bp, Artificial Sequence
  Synthetic oligonucleotide; CTG chr2 60468379 60468400 60468384 60468379 -
tggcctcatttaggactttggg

SEQ ID NO: 224880 - DNA, 22 bp, Artificial Sequence
  Synthetic oligonucleotide; CTC chr2 60468372 60468393 60468377 60468372 -
atttaggactttgggtatagtc

SEQ ID NO: 224881 - DNA, 22 bp, Artificial Sequence
  Synthetic oligonucleotide; TTT chr2 60468368 60468389 60468373 60468368 -
aggactttgggtatagtccatg

SEQ ID NO: 224882 - DNA, 22 bp, Artificial Sequence
  Synthetic oligonucleotide; TTA chr2 60468367 60468388 60468372 60468367 -
ggactttgggtatagtccatgg

SEQ ID NO: 224883 - DNA, 22 bp, Artificial Sequence
  Synthetic oligonucleotide; CTT chr2 60468361 60468382 60468366 60468361 -
tgggtatagtccatggcacaca

SEQ ID NO: 224884 - DNA, 22 bp, Artificial Sequence
  Synthetic oligonucleotide; TTT chr2 60468360 60468381 60468365 60468360 -
gggtatagtccatggcacacat

SEQ ID NO: 224885 - DNA, 22 bp, Artificial Sequence
  Synthetic oligonucleotide; TTG chr2 60468359 60468380 60468364 60468359 -
ggtatagtccatggcacacatc

SEQ ID NO: 224886 - DNA, 22 bp, Artificial Sequence
  Synthetic oligonucleotide; CTT chr2 60468335 60468356 60468340 60468335 -
tagccaaggccagaatcaaaag

SEQ ID NO: 224887 - DNA, 22 bp, Artificial Sequence
  Synthetic oligonucleotide; TTT chr2 60468334 60468355 60468339 60468334 -
agccaaggccagaatcaaaagg

SEQ ID NO: 224888 - DNA, 22 bp, Artificial Sequence
  Synthetic oligonucleotide; TTA chr2 60468333 60468354 60468338 60468333 -
gccaaggccagaatcaaaagga

SEQ ID NO: 224889 - DNA, 22 bp, Artificial Sequence
  Synthetic oligonucleotide; TTT chr2 60468303 60468324 60468308 60468303 -
agggttattccagagttattcc

SEQ ID NO: 224890 - DNA, 22 bp, Artificial Sequence
  Synthetic oligonucleotide; TTA chr2 60468302 60468323 60468307 60468302 -
gggttattccagagttattcca

SEQ ID NO: 224891 - DNA, 22 bp, Artificial Sequence
  Synthetic oligonucleotide; TTA chr2 60468296 60468317 60468301 60468296 -
ttccagagttattccaatgcat

SEQ ID NO: 224892 - DNA, 22 bp, Artificial Sequence
  Synthetic oligonucleotide; TTC chr2 60468293 60468314 60468298 60468293 -
cagagttattccaatgcatatt

SEQ ID NO: 224893 - DNA, 22 bp, Artificial Sequence
  Synthetic oligonucleotide; TTA chr2 60468285 60468306 60468290 60468285 -
ttccaatgcatattccttatgt

SEQ ID NO: 224894 - DNA, 22 bp, Artificial Sequence
  Synthetic oligonucleotide; TTC chr2 60468282 60468303 60468287 60468282 -
caatgcatattccttatgtatt

SEQ ID NO: 224895 - DNA, 22 bp, Artificial Sequence
  Synthetic oligonucleotide; TTC chr2 60468270 60468291 60468275 60468270 -
cttatgtatttacatgtgtatt

SEQ ID NO: 224896 - DNA, 22 bp, Artificial Sequence
  Synthetic oligonucleotide; CTT chr2 60468267 60468288 60468272 60468267 -
atgtatttacatgtgtatttga

SEQ ID NO: 224897 - DNA, 22 bp, Artificial Sequence
  Synthetic oligonucleotide; TTA chr2 60468266 60468287 60468271 60468266 -
tgtatttacatgtgtatttgaa

SEQ ID NO: 224898 - DNA, 22 bp, Artificial Sequence
  Synthetic oligonucleotide; TTT chr2 60468259 60468280 60468264 60468259 -
acatgtgtatttgaacatagta

SEQ ID NO: 224899 - DNA, 22 bp, Artificial Sequence
  Synthetic oligonucleotide; TTA chr2 60468258 60468279 60468263 60468258 -
catgtgtatttgaacatagtat

SEQ ID NO: 224900 - DNA, 22 bp, Artificial Sequence
  Synthetic oligonucleotide; TTT chr2 60468247 60468268 60468252 60468247 -
gaacatagtatatgttgtatat

SEQ ID NO: 224901 - DNA, 22 bp, Artificial Sequence
  Synthetic oligonucleotide; TTG chr2 60468246 60468267 60468251 60468246 -
aacatagtatatgttgtatatt

SEQ ID NO: 224902 - DNA, 22 bp, Artificial Sequence
  Synthetic oligonucleotide; TTG chr2 60468230 60468251 60468235 60468230 -
tatattcatgcccacacataat

SEQ ID NO: 224903 - DNA, 22 bp, Artificial Sequence
  Synthetic oligonucleotide; TTC chr2 60468223 60468244 60468228 60468223 -
atgcccacacataattttgact

SEQ ID NO: 224904 - DNA, 22 bp, Artificial Sequence
  Synthetic oligonucleotide; TTT chr2 60468206 60468227 60468211 60468206 -
tgactaatttttctcctggttt

SEQ ID NO: 224905 - DNA, 22 bp, Artificial Sequence
  Synthetic oligonucleotide; TTT chr2 60468205 60468226 60468210 60468205 -
gactaatttttctcctggtttt

SEQ ID NO: 224906 - DNA, 22 bp, Artificial Sequence
  Synthetic oligonucleotide; TTG chr2 60468204 60468225 60468209 60468204 -
actaatttttctcctggtttta

SEQ ID NO: 224907 - DNA, 22 bp, Artificial Sequence
  Synthetic oligonucleotide; CTA chr2 60468200 60468221 60468205 60468200 -
atttttctcctggttttagaga

SEQ ID NO: 224908 - DNA, 22 bp, Artificial Sequence
  Synthetic oligonucleotide; TTT chr2 60468196 60468217 60468201 60468196 -
ttctcctggttttagagaaaaa

SEQ ID NO: 224909 - DNA, 22 bp, Artificial Sequence
  Synthetic oligonucleotide; TTT chr2 60468195 60468216 60468200 60468195 -
tctcctggttttagagaaaaat

SEQ ID NO: 224910 - DNA, 22 bp, Artificial Sequence
  Synthetic oligonucleotide; TTT chr2 60468194 60468215 60468199 60468194 -
ctcctggttttagagaaaaatg

SEQ ID NO: 224911 - DNA, 22 bp, Artificial Sequence
  Synthetic oligonucleotide; TTC chr2 60468193 60468214 60468198 60468193 -
tcctggttttagagaaaaatgc

SEQ ID NO: 224912 - DNA, 22 bp, Artificial Sequence
  Synthetic oligonucleotide; CTC chr2 60468191 60468212 60468196 60468191 -
ctggttttagagaaaaatgcac

SEQ ID NO: 224913 - DNA, 22 bp, Artificial Sequence
  Synthetic oligonucleotide; CTG chr2 60468188 60468209 60468193 60468188 -
gttttagagaaaaatgcacatc

SEQ ID NO: 224914 - DNA, 22 bp, Artificial Sequence
  Synthetic oligonucleotide; TTT chr2 60468184 60468205 60468189 60468184 -
tagagaaaaatgcacatcattg

SEQ ID NO: 224915 - DNA, 22 bp, Artificial Sequence
  Synthetic oligonucleotide; TTT chr2 60468183 60468204 60468188 60468183 -
agagaaaaatgcacatcattgt

SEQ ID NO: 224916 - DNA, 22 bp, Artificial Sequence
  Synthetic oligonucleotide; TTA chr2 60468182 60468203 60468187 60468182 -
gagaaaaatgcacatcattgta

SEQ ID NO: 224917 - DNA, 22 bp, Artificial Sequence
  Synthetic oligonucleotide; TTG chr2 60468162 60468183 60468167 60468162 -
tagttaaaatgtgaaggctcta

SEQ ID NO: 224918 - DNA, 22 bp, Artificial Sequence
  Synthetic oligonucleotide; TTA chr2 60468156 60468177 60468161 60468156 -
aaatgtgaaggctctactatca

SEQ ID NO: 224919 - DNA, 22 bp, Artificial Sequence
  Synthetic oligonucleotide; CTC chr2 60468142 60468163 60468147 60468142 -
tactatcaccaccaccaccacc

SEQ ID NO: 224920 - DNA, 22 bp, Artificial Sequence
  Synthetic oligonucleotide; CTA chr2 60468140 60468161 60468145 60468140 -
ctatcaccaccaccaccaccac

SEQ ID NO: 224921 - DNA, 22 bp, Artificial Sequence
  Synthetic oligonucleotide; CTA chr2 60468137 60468158 60468142 60468137 -
tcaccaccaccaccaccaccat

SEQ ID NO: 224922 - DNA, 22 bp, Artificial Sequence
  Synthetic oligonucleotide; CTG chr2 60468089 60468110 60468094 60468089 -
ccaccatcaccaccaccaccac

SEQ ID NO: 224923 - DNA, 22 bp, Artificial Sequence
  Synthetic oligonucleotide; CTA chr2 60468050 60468071 60468055 60468050 -
ccaccaccaccatcaccaccag

SEQ ID NO: 224924 - DNA, 22 bp, Artificial Sequence
  Synthetic oligonucleotide; CTA chr2 60468002 60468023 60468007 60468002 -
ccaccaccaccaccatcaccac

SEQ ID NO: 224925 - DNA, 22 bp, Artificial Sequence
  Synthetic oligonucleotide; TTA chr2 60467969 60467990 60467974 60467969 -
ccaccaccatcactaccaccac

SEQ ID NO: 224926 - DNA, 22 bp, Artificial Sequence
  Synthetic oligonucleotide; CTA chr2 60467954 60467975 60467959 60467954 -
ccaccaccaccatcaccaccag

SEQ ID NO: 224927 - DNA, 22 bp, Artificial Sequence
  Synthetic oligonucleotide; CTA chr2 60467906 60467927 60467911 60467906 -
ccaccaccaccaccaccaccat

SEQ ID NO: 224928 - DNA, 22 bp, Artificial Sequence
  Synthetic oligonucleotide; TTA chr2 60467882 60467903 60467887 60467882 -
ccaccaccatcactaccaccac

SEQ ID NO: 224929 - DNA, 22 bp, Artificial Sequence
  Synthetic oligonucleotide; CTA chr2 60467867 60467888 60467872 60467867 -
ccaccaccaccatcaccaccag

SEQ ID NO: 224930 - DNA, 22 bp, Artificial Sequence
  Synthetic oligonucleotide; CTC chr2 60467749 60467770 60467754 60467749 -
caccaccaccattaccaccacc

SEQ ID NO: 224931 - DNA, 22 bp, Artificial Sequence
  Synthetic oligonucleotide; TTA chr2 60467735 60467756 60467740 60467735 -
ccaccaccatcactaccaccac

SEQ ID NO: 224932 - DNA, 22 bp, Artificial Sequence
  Synthetic oligonucleotide; CTA chr2 60467720 60467741 60467725 60467720 -
ccaccaccaccatcaccaccag

SEQ ID NO: 224933 - DNA, 22 bp, Artificial Sequence
  Synthetic oligonucleotide; TTA chr2 60467603 60467624 60467608 60467603 -
ccaccaccatcactaccaccac

SEQ ID NO: 224934 - DNA, 22 bp, Artificial Sequence
  Synthetic oligonucleotide; CTA chr2 60467588 60467609 60467593 60467588 -
ccaccaccaccaccatcaccac

SEQ ID NO: 224935 - DNA, 22 bp, Artificial Sequence
  Synthetic oligonucleotide; TTA chr2 60467555 60467576 60467560 60467555 -
ccaccaccatcactaccaccac

SEQ ID NO: 224936 - DNA, 22 bp, Artificial Sequence
  Synthetic oligonucleotide; CTA chr2 60467540 60467561 60467545 60467540 -
ccaccaccaccatcaccagtac

SEQ ID NO: 224937 - DNA, 22 bp, Artificial Sequence
  Synthetic oligonucleotide; TTA chr2 60467453 60467474 60467458 60467453 -
ccaccaccatcaccaccaccac

SEQ ID NO: 224938 - DNA, 22 bp, Artificial Sequence
  Synthetic oligonucleotide; TTA chr2 60467426 60467447 60467431 60467426 -
ccaccaccatcactaccaccac

SEQ ID NO: 224939 - DNA, 22 bp, Artificial Sequence
  Synthetic oligonucleotide; CTA chr2 60467411 60467432 60467416 60467411 -
ccaccaccaccatcaccagtac

SEQ ID NO: 224940 - DNA, 22 bp, Artificial Sequence
  Synthetic oligonucleotide; TTA chr2 60467324 60467345 60467329 60467324 -
ccaccaccatcactaccaccac

SEQ ID NO: 224941 - DNA, 22 bp, Artificial Sequence
  Synthetic oligonucleotide; CTA chr2 60467309 60467330 60467314 60467309 -
ccaccaccaccaccatcaccac

SEQ ID NO: 224942 - DNA, 22 bp, Artificial Sequence
  Synthetic oligonucleotide; TTA chr2 60467276 60467297 60467281 60467276 -
ccaccaccatcactaccaccac

SEQ ID NO: 224943 - DNA, 22 bp, Artificial Sequence
  Synthetic oligonucleotide; CTA chr2 60467261 60467282 60467266 60467261 -
ccaccaccaccaccatcaccac

SEQ ID NO: 224944 - DNA, 22 bp, Artificial Sequence
  Synthetic oligonucleotide; TTA chr2 60467228 60467249 60467233 60467228 -
ccaccaccatcactaccaccac

SEQ ID NO: 224945 - DNA, 22 bp, Artificial Sequence
  Synthetic oligonucleotide; CTA chr2 60467213 60467234 60467218 60467213 -
ccaccaccaccatcaccagtac

SEQ ID NO: 224946 - DNA, 22 bp, Artificial Sequence
  Synthetic oligonucleotide; CTA chr2 60467087 60467108 60467092 60467087 -
ccaccaccatcatcaccaccac

SEQ ID NO: 224947 - DNA, 22 bp, Artificial Sequence
  Synthetic oligonucleotide; CTG chr2 60467048 60467069 60467053 60467048 -
ccaccaccatttacttgttcaa

SEQ ID NO: 224948 - DNA, 22 bp, Artificial Sequence
  Synthetic oligonucleotide; TTT chr2 60467036 60467057 60467041 60467036 -
acttgttcaagtgagcttttat

SEQ ID NO: 224949 - DNA, 22 bp, Artificial Sequence
  Synthetic oligonucleotide; TTA chr2 60467035 60467056 60467040 60467035 -
cttgttcaagtgagcttttata

SEQ ID NO: 224950 - DNA, 22 bp, Artificial Sequence
  Synthetic oligonucleotide; CTT chr2 60467032 60467053 60467037 60467032 -
gttcaagtgagcttttatagta

SEQ ID NO: 224951 - DNA, 22 bp, Artificial Sequence
  Synthetic oligonucleotide; TTG chr2 60467031 60467052 60467036 60467031 -
ttcaagtgagcttttatagtag

SEQ ID NO: 224952 - DNA, 22 bp, Artificial Sequence
  Synthetic oligonucleotide; TTC chr2 60467028 60467049 60467033 60467028 -
aagtgagcttttatagtaggga

SEQ ID NO: 224953 - DNA, 22 bp, Artificial Sequence
  Synthetic oligonucleotide; CTT chr2 60467018 60467039 60467023 60467018 -
ttatagtagggaccattttatg

SEQ ID NO: 224954 - DNA, 22 bp, Artificial Sequence
  Synthetic oligonucleotide; TTT chr2 60467017 60467038 60467022 60467017 -
tatagtagggaccattttatga

SEQ ID NO: 224955 - DNA, 22 bp, Artificial Sequence
  Synthetic oligonucleotide; TTT chr2 60467016 60467037 60467021 60467016 -
atagtagggaccattttatgaa

SEQ ID NO: 224956 - DNA, 22 bp, Artificial Sequence
  Synthetic oligonucleotide; TTA chr2 60467015 60467036 60467020 60467015 -
tagtagggaccattttatgaaa

SEQ ID NO: 224957 - DNA, 22 bp, Artificial Sequence
  Synthetic oligonucleotide; TTT chr2 60467000 60467021 60467005 60467000 -
tatgaaacttaaatttgtccat

SEQ ID NO: 224958 - DNA, 22 bp, Artificial Sequence
  Synthetic oligonucleotide; TTT chr2 60466999 60467020 60467004 60466999 -
atgaaacttaaatttgtccatt

SEQ ID NO: 224959 - DNA, 22 bp, Artificial Sequence
  Synthetic oligonucleotide; TTA chr2 60466998 60467019 60467003 60466998 -
tgaaacttaaatttgtccattt

SEQ ID NO: 224960 - DNA, 22 bp, Artificial Sequence
  Synthetic oligonucleotide; CTT chr2 60466990 60467011 60466995 60466990 -
aaatttgtccatttatacaaat

SEQ ID NO: 224961 - DNA, 22 bp, Artificial Sequence
  Synthetic oligonucleotide; TTA chr2 60466989 60467010 60466994 60466989 -
aatttgtccatttatacaaatg
